United States Patent Application Publication US 2025/0333448 A1 - sequence listing, part 10

SEQ ID NO: 202909 - protein, 15 aa, Artificial Sequence
  Description of Artificial Sequence: Synthetic peptide
  Seed: EWLKTRPILSPLTKG
EWCKTMPFLSLLTKG

SEQ ID NO: 202910 - protein, 15 aa, Artificial Sequence
  Description of Artificial Sequence: Synthetic peptide
  Seed: EWLKTRPILSPLTKG
EWCKTMPFLSVLTKG

SEQ ID NO: 202911 - protein, 15 aa, Artificial Sequence
  Description of Artificial Sequence: Synthetic peptide
  Seed: EWLKTRPILSPLTKG
EWCKTSPFLSILTKG

SEQ ID NO: 202912 - protein, 15 aa, Artificial Sequence
  Description of Artificial Sequence: Synthetic peptide
  Seed: EWLKTRPILSPLTKG
EWCKTSPFLSLLTKG

SEQ ID NO: 202913 - protein, 15 aa, Artificial Sequence
  Description of Artificial Sequence: Synthetic peptide
  Seed: EWLKTRPILSPLTKG
EWCKTSPFLSVLTKG

SEQ ID NO: 202914 - protein, 15 aa, Artificial Sequence
  Description of Artificial Sequence: Synthetic peptide
  Seed: EWLKTRPILSPLTKG
EWCKTTPFLSILTKG

SEQ ID NO: 202915 - protein, 15 aa, Artificial Sequence
  Description of Artificial Sequence: Synthetic peptide
  Seed: EWLKTRPILSPLTKG
EWCKTTPFLSLLTKG

SEQ ID NO: 202916 - protein, 15 aa, Artificial Sequence
  Description of Artificial Sequence: Synthetic peptide
  Seed: EWLKTRPILSPLTKG
EWCKTTPFLSVLTKG

SEQ ID NO: 202917 - protein, 15 aa, Artificial Sequence
  Description of Artificial Sequence: Synthetic peptide
  Seed: EWLKTRPILSPLTKG
EWCKTVPFLSILTKG

SEQ ID NO: 202918 - protein, 15 aa, Artificial Sequence
  Description of Artificial Sequence: Synthetic peptide
  Seed: EWLKTRPILSPLTKG
EWCKTVPFLSLLTKG

SEQ ID NO: 202919 - protein, 15 aa, Artificial Sequence
  Description of Artificial Sequence: Synthetic peptide
  Seed: EWLKTRPILSPLTKG
EWCKTVPFLSVLTKG

SEQ ID NO: 202920 - protein, 15 aa, Artificial Sequence
  Description of Artificial Sequence: Synthetic peptide
  Seed: EWLKTRPILSPLTKG
EWCKTYPFLSVLTKG

SEQ ID NO: 202921 - protein, 15 aa, Artificial Sequence
  Description of Artificial Sequence: Synthetic peptide
  Seed: EWLKTRPILSPLTKG
EWFKTAPFLSALTKG

SEQ ID NO: 202922 - protein, 15 aa, Artificial Sequence
  Description of Artificial Sequence: Synthetic peptide
  Seed: EWLKTRPILSPLTKG
EWFKTAPFLSCLTKG

SEQ ID NO: 202923 - protein, 15 aa, Artificial Sequence
  Description of Artificial Sequence: Synthetic peptide
  Seed: EWLKTRPILSPLTKG
EWFKTAPFLSDLTKG

SEQ ID NO: 202924 - protein, 15 aa, Artificial Sequence
  Description of Artificial Sequence: Synthetic peptide
  Seed: EWLKTRPILSPLTKG
EWFKTAPFLSELTKG

SEQ ID NO: 202925 - protein, 15 aa, Artificial Sequence
  Description of Artificial Sequence: Synthetic peptide
  Seed: EWLKTRPILSPLTKG
EWFKTAPFLSFLTKG

SEQ ID NO: 202926 - protein, 15 aa, Artificial Sequence
  Description of Artificial Sequence: Synthetic peptide
  Seed: EWLKTRPILSPLTKG
EWFKTAPFLSGLTKG

SEQ ID NO: 202927 - protein, 15 aa, Artificial Sequence
  Description of Artificial Sequence: Synthetic peptide
  Seed: EWLKTRPILSPLTKG
EWFKTAPFLSHLTKG

SEQ ID NO: 202928 - protein, 15 aa, Artificial Sequence
  Description of Artificial Sequence: Synthetic peptide
  Seed: EWLKTRPILSPLTKG
EWFKTAPFLSILTKG

SEQ ID NO: 202929 - protein, 15 aa, Artificial Sequence
  Description of Artificial Sequence: Synthetic peptide
  Seed: EWLKTRPILSPLTKG
EWFKTAPFLSLLTKG

SEQ ID NO: 202930 - protein, 15 aa, Artificial Sequence
  Description of Artificial Sequence: Synthetic peptide
  Seed: EWLKTRPILSPLTKG
EWFKTAPFLSMLTKG

SEQ ID NO: 202931 - protein, 15 aa, Artificial Sequence
  Description of Artificial Sequence: Synthetic peptide
  Seed: EWLKTRPILSPLTKG
EWFKTAPFLSNLTKG

SEQ ID NO: 202932 - protein, 15 aa, Artificial Sequence
  Description of Artificial Sequence: Synthetic peptide
  Seed: EWLKTRPILSPLTKG
EWFKTAPFLSPLTKG

SEQ ID NO: 202933 - protein, 15 aa, Artificial Sequence
  Description of Artificial Sequence: Synthetic peptide
  Seed: EWLKTRPILSPLTKG
EWFKTAPFLSQLTKG

SEQ ID NO: 202934 - protein, 15 aa, Artificial Sequence
  Description of Artificial Sequence: Synthetic peptide
  Seed: EWLKTRPILSPLTKG
EWFKTAPFLSRLTKG

SEQ ID NO: 202935 - protein, 15 aa, Artificial Sequence
  Description of Artificial Sequence: Synthetic peptide
  Seed: EWLKTRPILSPLTKG
EWFKTAPFLSSLTKG

SEQ ID NO: 202936 - protein, 15 aa, Artificial Sequence
  Description of Artificial Sequence: Synthetic peptide
  Seed: EWLKTRPILSPLTKG
EWFKTAPFLSTLTKG

SEQ ID NO: 202937 - protein, 15 aa, Artificial Sequence
  Description of Artificial Sequence: Synthetic peptide
  Seed: EWLKTRPILSPLTKG
EWFKTAPFLSVLTKG

SEQ ID NO: 202938 - protein, 15 aa, Artificial Sequence
  Description of Artificial Sequence: Synthetic peptide
  Seed: EWLKTRPILSPLTKG
EWFKTAPFLSWLTKG

SEQ ID NO: 202939 - protein, 15 aa, Artificial Sequence
  Description of Artificial Sequence: Synthetic peptide
  Seed: EWLKTRPILSPLTKG
EWFKTAPFLSYLTKG

SEQ ID NO: 202940 - protein, 15 aa, Artificial Sequence
  Description of Artificial Sequence: Synthetic peptide
  Seed: EWLKTRPILSPLTKG
EWFKTAPILSILTKG

SEQ ID NO: 202941 - protein, 15 aa, Artificial Sequence
  Description of Artificial Sequence: Synthetic peptide
  Seed: EWLKTRPILSPLTKG
EWFKTAPILSLLTKG

SEQ ID NO: 202942 - protein, 15 aa, Artificial Sequence
  Description of Artificial Sequence: Synthetic peptide
  Seed: EWLKTRPILSPLTKG
EWFKTAPILSVLTKG

SEQ ID NO: 202943 - protein, 15 aa, Artificial Sequence
  Description of Artificial Sequence: Synthetic peptide
  Seed: EWLKTRPILSPLTKG
EWFKTAPLLSFLTKG

SEQ ID NO: 202944 - protein, 15 aa, Artificial Sequence
  Description of Artificial Sequence: Synthetic peptide
  Seed: EWLKTRPILSPLTKG
EWFKTAPLLSILTKG

SEQ ID NO: 202945 - protein, 15 aa, Artificial Sequence
  Description of Artificial Sequence: Synthetic peptide
  Seed: EWLKTRPILSPLTKG
EWFKTAPLLSLLTKG

SEQ ID NO: 202946 - protein, 15 aa, Artificial Sequence
  Description of Artificial Sequence: Synthetic peptide
  Seed: EWLKTRPILSPLTKG
EWFKTAPLLSMLTKG

SEQ ID NO: 202947 - protein, 15 aa, Artificial Sequence
  Description of Artificial Sequence: Synthetic peptide
  Seed: EWLKTRPILSPLTKG
EWFKTAPLLSVLTKG

SEQ ID NO: 202948 - protein, 15 aa, Artificial Sequence
  Description of Artificial Sequence: Synthetic peptide
  Seed: EWLKTRPILSPLTKG
EWFKTAPMLSFLTKG

SEQ ID NO: 202949 - protein, 15 aa, Artificial Sequence
  Description of Artificial Sequence: Synthetic peptide
  Seed: EWLKTRPILSPLTKG
EWFKTAPMLSILTKG

SEQ ID NO: 202950 - protein, 15 aa, Artificial Sequence
  Description of Artificial Sequence: Synthetic peptide
  Seed: EWLKTRPILSPLTKG
EWFKTAPMLSLLTKG

SEQ ID NO: 202951 - protein, 15 aa, Artificial Sequence
  Description of Artificial Sequence: Synthetic peptide
  Seed: EWLKTRPILSPLTKG
EWFKTAPMLSMLTKG

SEQ ID NO: 202952 - protein, 15 aa, Artificial Sequence
  Description of Artificial Sequence: Synthetic peptide
  Seed: EWLKTRPILSPLTKG
EWFKTAPMLSVLTKG

SEQ ID NO: 202953 - protein, 15 aa, Artificial Sequence
  Description of Artificial Sequence: Synthetic peptide
  Seed: EWLKTRPILSPLTKG
EWFKTAPRLSALTKG

SEQ ID NO: 202954 - protein, 15 aa, Artificial Sequence
  Description of Artificial Sequence: Synthetic peptide
  Seed: EWLKTRPILSPLTKG
EWFKTAPRLSQLTKG

SEQ ID NO: 202955 - protein, 15 aa, Artificial Sequence
  Description of Artificial Sequence: Synthetic peptide
  Seed: EWLKTRPILSPLTKG
EWFKTAPRLSSLTKG

SEQ ID NO: 202956 - protein, 15 aa, Artificial Sequence
  Description of Artificial Sequence: Synthetic peptide
  Seed: EWLKTRPILSPLTKG
EWFKTAPVLSILTKG

SEQ ID NO: 202957 - protein, 15 aa, Artificial Sequence
  Description of Artificial Sequence: Synthetic peptide
  Seed: EWLKTRPILSPLTKG
EWFKTAPWLSFLTKG

SEQ ID NO: 202958 - protein, 15 aa, Artificial Sequence
  Description of Artificial Sequence: Synthetic peptide
  Seed: EWLKTRPILSPLTKG
EWFKTAPWLSILTKG

SEQ ID NO: 202959 - protein, 15 aa, Artificial Sequence
  Description of Artificial Sequence: Synthetic peptide
  Seed: EWLKTRPILSPLTKG
EWFKTAPWLSLLTKG

SEQ ID NO: 202960 - protein, 15 aa, Artificial Sequence
  Description of Artificial Sequence: Synthetic peptide
  Seed: EWLKTRPILSPLTKG
EWFKTAPWLSMLTKG

SEQ ID NO: 202961 - protein, 15 aa, Artificial Sequence
  Description of Artificial Sequence: Synthetic peptide
  Seed: EWLKTRPILSPLTKG
EWFKTAPWLSVLTKG

SEQ ID NO: 202962 - protein, 15 aa, Artificial Sequence
  Description of Artificial Sequence: Synthetic peptide
  Seed: EWLKTRPILSPLTKG
EWFKTAPWLSYLTKG

SEQ ID NO: 202963 - protein, 15 aa, Artificial Sequence
  Description of Artificial Sequence: Synthetic peptide
  Seed: EWLKTRPILSPLTKG
EWFKTAPYLSFLTKG

SEQ ID NO: 202964 - protein, 15 aa, Artificial Sequence
  Description of Artificial Sequence: Synthetic peptide
  Seed: EWLKTRPILSPLTKG
EWFKTAPYLSILTKG

SEQ ID NO: 202965 - protein, 15 aa, Artificial Sequence
  Description of Artificial Sequence: Synthetic peptide
  Seed: EWLKTRPILSPLTKG
EWFKTAPYLSLLTKG

SEQ ID NO: 202966 - protein, 15 aa, Artificial Sequence
  Description of Artificial Sequence: Synthetic peptide
  Seed: EWLKTRPILSPLTKG
EWFKTAPYLSMLTKG

SEQ ID NO: 202967 - protein, 15 aa, Artificial Sequence
  Description of Artificial Sequence: Synthetic peptide
  Seed: EWLKTRPILSPLTKG
EWFKTAPYLSVLTKG

SEQ ID NO: 202968 - protein, 15 aa, Artificial Sequence
  Description of Artificial Sequence: Synthetic peptide
  Seed: EWLKTRPILSPLTKG
EWFKTAPYLSYLTKG

SEQ ID NO: 202969 - protein, 15 aa, Artificial Sequence
  Description of Artificial Sequence: Synthetic peptide
  Seed: EWLKTRPILSPLTKG
EWFKTCPFLSALTKG

SEQ ID NO: 202970 - protein, 15 aa, Artificial Sequence
  Description of Artificial Sequence: Synthetic peptide
  Seed: EWLKTRPILSPLTKG
EWFKTCPFLSFLTKG

SEQ ID NO: 202971 - protein, 15 aa, Artificial Sequence
  Description of Artificial Sequence: Synthetic peptide
  Seed: EWLKTRPILSPLTKG
EWFKTCPFLSILTKG

SEQ ID NO: 202972 - protein, 15 aa, Artificial Sequence
  Description of Artificial Sequence: Synthetic peptide
  Seed: EWLKTRPILSPLTKG
EWFKTCPFLSLLTKG

SEQ ID NO: 202973 - protein, 15 aa, Artificial Sequence
  Description of Artificial Sequence: Synthetic peptide
  Seed: EWLKTRPILSPLTKG
EWFKTCPFLSMLTKG

SEQ ID NO: 202974 - protein, 15 aa, Artificial Sequence
  Description of Artificial Sequence: Synthetic peptide
  Seed: EWLKTRPILSPLTKG
EWFKTCPFLSTLTKG

SEQ ID NO: 202975 - protein, 15 aa, Artificial Sequence
  Description of Artificial Sequence: Synthetic peptide
  Seed: EWLKTRPILSPLTKG
EWFKTCPFLSVLTKG

SEQ ID NO: 202976 - protein, 15 aa, Artificial Sequence
  Description of Artificial Sequence: Synthetic peptide
  Seed: EWLKTRPILSPLTKG
EWFKTCPFLSYLTKG

SEQ ID NO: 202977 - protein, 15 aa, Artificial Sequence
  Description of Artificial Sequence: Synthetic peptide
  Seed: EWLKTRPILSPLTKG
EWFKTDPFLSILTKG

SEQ ID NO: 202978 - protein, 15 aa, Artificial Sequence
  Description of Artificial Sequence: Synthetic peptide
  Seed: EWLKTRPILSPLTKG
EWFKTDPFLSLLTKG

SEQ ID NO: 202979 - protein, 15 aa, Artificial Sequence
  Description of Artificial Sequence: Synthetic peptide
  Seed: EWLKTRPILSPLTKG
EWFKTDPFLSMLTKG

SEQ ID NO: 202980 - protein, 15 aa, Artificial Sequence
  Description of Artificial Sequence: Synthetic peptide
  Seed: EWLKTRPILSPLTKG
EWFKTDPFLSVLTKG

SEQ ID NO: 202981 - protein, 15 aa, Artificial Sequence
  Description of Artificial Sequence: Synthetic peptide
  Seed: EWLKTRPILSPLTKG
EWFKTEPFLSALTKG

SEQ ID NO: 202982 - protein, 15 aa, Artificial Sequence
  Description of Artificial Sequence: Synthetic peptide
  Seed: EWLKTRPILSPLTKG
EWFKTEPFLSCLTKG

SEQ ID NO: 202983 - protein, 15 aa, Artificial Sequence
  Description of Artificial Sequence: Synthetic peptide
  Seed: EWLKTRPILSPLTKG
EWFKTEPFLSDLTKG

SEQ ID NO: 202984 - protein, 15 aa, Artificial Sequence
  Description of Artificial Sequence: Synthetic peptide
  Seed: EWLKTRPILSPLTKG
EWFKTEPFLSELTKG

SEQ ID NO: 202985 - protein, 15 aa, Artificial Sequence
  Description of Artificial Sequence: Synthetic peptide
  Seed: EWLKTRPILSPLTKG
EWFKTEPFLSFLTKG

SEQ ID NO: 202986 - protein, 15 aa, Artificial Sequence
  Description of Artificial Sequence: Synthetic peptide
  Seed: EWLKTRPILSPLTKG
EWFKTEPFLSHLTKG

SEQ ID NO: 202987 - protein, 15 aa, Artificial Sequence
  Description of Artificial Sequence: Synthetic peptide
  Seed: EWLKTRPILSPLTKG
EWFKTEPFLSILTKG

SEQ ID NO: 202988 - protein, 15 aa, Artificial Sequence
  Description of Artificial Sequence: Synthetic peptide
  Seed: EWLKTRPILSPLTKG
EWFKTEPFLSLLTKG

SEQ ID NO: 202989 - protein, 15 aa, Artificial Sequence
  Description of Artificial Sequence: Synthetic peptide
  Seed: EWLKTRPILSPLTKG
EWFKTEPFLSMLTKG

SEQ ID NO: 202990 - protein, 15 aa, Artificial Sequence
  Description of Artificial Sequence: Synthetic peptide
  Seed: EWLKTRPILSPLTKG
EWFKTEPFLSNLTKG

SEQ ID NO: 202991 - protein, 15 aa, Artificial Sequence
  Description of Artificial Sequence: Synthetic peptide
  Seed: EWLKTRPILSPLTKG
EWFKTEPFLSQLTKG

SEQ ID NO: 202992 - protein, 15 aa, Artificial Sequence
  Description of Artificial Sequence: Synthetic peptide
  Seed: EWLKTRPILSPLTKG
EWFKTEPFLSSLTKG

SEQ ID NO: 202993 - protein, 15 aa, Artificial Sequence
  Description of Artificial Sequence: Synthetic peptide
  Seed: EWLKTRPILSPLTKG
EWFKTEPFLSTLTKG

SEQ ID NO: 202994 - protein, 15 aa, Artificial Sequence
  Description of Artificial Sequence: Synthetic peptide
  Seed: EWLKTRPILSPLTKG
EWFKTEPFLSVLTKG

SEQ ID NO: 202995 - protein, 15 aa, Artificial Sequence
  Description of Artificial Sequence: Synthetic peptide
  Seed: EWLKTRPILSPLTKG
EWFKTEPFLSWLTKG

SEQ ID NO: 202996 - protein, 15 aa, Artificial Sequence
  Description of Artificial Sequence: Synthetic peptide
  Seed: EWLKTRPILSPLTKG
EWFKTEPFLSYLTKG

SEQ ID NO: 202997 - protein, 15 aa, Artificial Sequence
  Description of Artificial Sequence: Synthetic peptide
  Seed: EWLKTRPILSPLTKG
EWFKTEPILSILTKG

SEQ ID NO: 202998 - protein, 15 aa, Artificial Sequence
  Description of Artificial Sequence: Synthetic peptide
  Seed: EWLKTRPILSPLTKG
EWFKTEPILSLLTKG

SEQ ID NO: 202999 - protein, 15 aa, Artificial Sequence
  Description of Artificial Sequence: Synthetic peptide
  Seed: EWLKTRPILSPLTKG
EWFKTEPILSVLTKG

SEQ ID NO: 203000 - protein, 15 aa, Artificial Sequence
  Description of Artificial Sequence: Synthetic peptide
  Seed: EWLKTRPILSPLTKG
EWFKTEPLLSFLTKG

SEQ ID NO: 203001 - protein, 15 aa, Artificial Sequence
  Description of Artificial Sequence: Synthetic peptide
  Seed: EWLKTRPILSPLTKG
EWFKTEPLLSILTKG

SEQ ID NO: 203002 - protein, 15 aa, Artificial Sequence
  Description of Artificial Sequence: Synthetic peptide
  Seed: EWLKTRPILSPLTKG
EWFKTEPLLSLLTKG

SEQ ID NO: 203003 - protein, 15 aa, Artificial Sequence
  Description of Artificial Sequence: Synthetic peptide
  Seed: EWLKTRPILSPLTKG
EWFKTEPLLSMLTKG

SEQ ID NO: 203004 - protein, 15 aa, Artificial Sequence
  Description of Artificial Sequence: Synthetic peptide
  Seed: EWLKTRPILSPLTKG
EWFKTEPLLSVLTKG

SEQ ID NO: 203005 - protein, 15 aa, Artificial Sequence
  Description of Artificial Sequence: Synthetic peptide
  Seed: EWLKTRPILSPLTKG
EWFKTEPMLSILTKG

SEQ ID NO: 203006 - protein, 15 aa, Artificial Sequence
  Description of Artificial Sequence: Synthetic peptide
  Seed: EWLKTRPILSPLTKG
EWFKTEPMLSLLTKG

SEQ ID NO: 203007 - protein, 15 aa, Artificial Sequence
  Description of Artificial Sequence: Synthetic peptide
  Seed: EWLKTRPILSPLTKG
EWFKTEPMLSVLTKG

SEQ ID NO: 203008 - protein, 15 aa, Artificial Sequence
  Description of Artificial Sequence: Synthetic peptide
  Seed: EWLKTRPILSPLTKG
EWFKTEPWLSFLTKG

SEQ ID NO: 203009 - protein, 15 aa, Artificial Sequence
  Description of Artificial Sequence: Synthetic peptide
  Seed: EWLKTRPILSPLTKG
EWFKTEPWLSILTKG

SEQ ID NO: 203010 - protein, 15 aa, Artificial Sequence
  Description of Artificial Sequence: Synthetic peptide
  Seed: EWLKTRPILSPLTKG
EWFKTEPWLSLLTKG

SEQ ID NO: 203011 - protein, 15 aa, Artificial Sequence
  Description of Artificial Sequence: Synthetic peptide
  Seed: EWLKTRPILSPLTKG
EWFKTEPWLSMLTKG

SEQ ID NO: 203012 - protein, 15 aa, Artificial Sequence
  Description of Artificial Sequence: Synthetic peptide
  Seed: EWLKTRPILSPLTKG
EWFKTEPWLSVLTKG

SEQ ID NO: 203013 - protein, 15 aa, Artificial Sequence
  Description of Artificial Sequence: Synthetic peptide
  Seed: EWLKTRPILSPLTKG
EWFKTEPYLSFLTKG

SEQ ID NO: 203014 - protein, 15 aa, Artificial Sequence
  Description of Artificial Sequence: Synthetic peptide
  Seed: EWLKTRPILSPLTKG
EWFKTEPYLSILTKG

SEQ ID NO: 203015 - protein, 15 aa, Artificial Sequence
  Description of Artificial Sequence: Synthetic peptide
  Seed: EWLKTRPILSPLTKG
EWFKTEPYLSLLTKG

SEQ ID NO: 203016 - protein, 15 aa, Artificial Sequence
  Description of Artificial Sequence: Synthetic peptide
  Seed: EWLKTRPILSPLTKG
EWFKTEPYLSMLTKG

SEQ ID NO: 203017 - protein, 15 aa, Artificial Sequence
  Description of Artificial Sequence: Synthetic peptide
  Seed: EWLKTRPILSPLTKG
EWFKTEPYLSVLTKG

SEQ ID NO: 203018 - protein, 15 aa, Artificial Sequence
  Description of Artificial Sequence: Synthetic peptide
  Seed: EWLKTRPILSPLTKG
EWFKTFPALSFLTKG

SEQ ID NO: 203019 - protein, 15 aa, Artificial Sequence
  Description of Artificial Sequence: Synthetic peptide
  Seed: EWLKTRPILSPLTKG
EWFKTFPALSILTKG

SEQ ID NO: 203020 - protein, 15 aa, Artificial Sequence
  Description of Artificial Sequence: Synthetic peptide
  Seed: EWLKTRPILSPLTKG
EWFKTFPALSLLTKG

SEQ ID NO: 203021 - protein, 15 aa, Artificial Sequence
  Description of Artificial Sequence: Synthetic peptide
  Seed: EWLKTRPILSPLTKG
EWFKTFPALSMLTKG

SEQ ID NO: 203022 - protein, 15 aa, Artificial Sequence
  Description of Artificial Sequence: Synthetic peptide
  Seed: EWLKTRPILSPLTKG
EWFKTFPALSVLTKG

SEQ ID NO: 203023 - protein, 15 aa, Artificial Sequence
  Description of Artificial Sequence: Synthetic peptide
  Seed: EWLKTRPILSPLTKG
EWFKTFPFLSALTKG

SEQ ID NO: 203024 - protein, 15 aa, Artificial Sequence
  Description of Artificial Sequence: Synthetic peptide
  Seed: EWLKTRPILSPLTKG
EWFKTFPFLSCLTKG

SEQ ID NO: 203025 - protein, 15 aa, Artificial Sequence
  Description of Artificial Sequence: Synthetic peptide
  Seed: EWLKTRPILSPLTKG
EWFKTFPFLSDLTKG

SEQ ID NO: 203026 - protein, 15 aa, Artificial Sequence
  Description of Artificial Sequence: Synthetic peptide
  Seed: EWLKTRPILSPLTKG
EWFKTFPFLSELTKG

SEQ ID NO: 203027 - protein, 15 aa, Artificial Sequence
  Description of Artificial Sequence: Synthetic peptide
  Seed: EWLKTRPILSPLTKG
EWFKTFPFLSFLTKG

SEQ ID NO: 203028 - protein, 15 aa, Artificial Sequence
  Description of Artificial Sequence: Synthetic peptide
  Seed: EWLKTRPILSPLTKG
EWFKTFPFLSGLTKG

SEQ ID NO: 203029 - protein, 15 aa, Artificial Sequence
  Description of Artificial Sequence: Synthetic peptide
  Seed: EWLKTRPILSPLTKG
EWFKTFPFLSHLTKG

SEQ ID NO: 203030 - protein, 15 aa, Artificial Sequence
  Description of Artificial Sequence: Synthetic peptide
  Seed: EWLKTRPILSPLTKG
EWFKTFPFLSILTKG

SEQ ID NO: 203031 - protein, 15 aa, Artificial Sequence
  Description of Artificial Sequence: Synthetic peptide
  Seed: EWLKTRPILSPLTKG
EWFKTFPFLSKLTKG

SEQ ID NO: 203032 - protein, 15 aa, Artificial Sequence
  Description of Artificial Sequence: Synthetic peptide
  Seed: EWLKTRPILSPLTKG
EWFKTFPFLSLLTKG

SEQ ID NO: 203033 - protein, 15 aa, Artificial Sequence
  Description of Artificial Sequence: Synthetic peptide
  Seed: EWLKTRPILSPLTKG
EWFKTFPFLSMLTKG

SEQ ID NO: 203034 - protein, 15 aa, Artificial Sequence
  Description of Artificial Sequence: Synthetic peptide
  Seed: EWLKTRPILSPLTKG
EWFKTFPFLSNLTKG

SEQ ID NO: 203035 - protein, 15 aa, Artificial Sequence
  Description of Artificial Sequence: Synthetic peptide
  Seed: EWLKTRPILSPLTKG
EWFKTFPFLSPLTKG

SEQ ID NO: 203036 - protein, 15 aa, Artificial Sequence
  Description of Artificial Sequence: Synthetic peptide
  Seed: EWLKTRPILSPLTKG
EWFKTFPFLSQLTKG

SEQ ID NO: 203037 - protein, 15 aa, Artificial Sequence
  Description of Artificial Sequence: Synthetic peptide
  Seed: EWLKTRPILSPLTKG
EWFKTFPFLSRLTKG

SEQ ID NO: 203038 - protein, 15 aa, Artificial Sequence
  Description of Artificial Sequence: Synthetic peptide
  Seed: EWLKTRPILSPLTKG
EWFKTFPFLSSLTKG

SEQ ID NO: 203039 - protein, 15 aa, Artificial Sequence
  Description of Artificial Sequence: Synthetic peptide
  Seed: EWLKTRPILSPLTKG
EWFKTFPFLSTLTKG

SEQ ID NO: 203040 - protein, 15 aa, Artificial Sequence
  Description of Artificial Sequence: Synthetic peptide
  Seed: EWLKTRPILSPLTKG
EWFKTFPFLSVLTKG

SEQ ID NO: 203041 - protein, 15 aa, Artificial Sequence
  Description of Artificial Sequence: Synthetic peptide
  Seed: EWLKTRPILSPLTKG
EWFKTFPFLSWLTKG

SEQ ID NO: 203042 - protein, 15 aa, Artificial Sequence
  Description of Artificial Sequence: Synthetic peptide
  Seed: EWLKTRPILSPLTKG
EWFKTFPFLSYLTKG

SEQ ID NO: 203043 - protein, 15 aa, Artificial Sequence
  Description of Artificial Sequence: Synthetic peptide
  Seed: EWLKTRPILSPLTKG
EWFKTFPILSALTKG

SEQ ID NO: 203044 - protein, 15 aa, Artificial Sequence
  Description of Artificial Sequence: Synthetic peptide
  Seed: EWLKTRPILSPLTKG
EWFKTFPILSFLTKG

SEQ ID NO: 203045 - protein, 15 aa, Artificial Sequence
  Description of Artificial Sequence: Synthetic peptide
  Seed: EWLKTRPILSPLTKG
EWFKTFPILSILTKG

SEQ ID NO: 203046 - protein, 15 aa, Artificial Sequence
  Description of Artificial Sequence: Synthetic peptide
  Seed: EWLKTRPILSPLTKG
EWFKTFPILSLLTKG

SEQ ID NO: 203047 - protein, 15 aa, Artificial Sequence
  Description of Artificial Sequence: Synthetic peptide
  Seed: EWLKTRPILSPLTKG
EWFKTFPILSMLTKG

SEQ ID NO: 203048 - protein, 15 aa, Artificial Sequence
  Description of Artificial Sequence: Synthetic peptide
  Seed: EWLKTRPILSPLTKG
EWFKTFPILSNLTKG

SEQ ID NO: 203049 - protein, 15 aa, Artificial Sequence
  Description of Artificial Sequence: Synthetic peptide
  Seed: EWLKTRPILSPLTKG
EWFKTFPILSSLTKG

SEQ ID NO: 203050 - protein, 15 aa, Artificial Sequence
  Description of Artificial Sequence: Synthetic peptide
  Seed: EWLKTRPILSPLTKG
EWFKTFPILSTLTKG

SEQ ID NO: 203051 - protein, 15 aa, Artificial Sequence
  Description of Artificial Sequence: Synthetic peptide
  Seed: EWLKTRPILSPLTKG
EWFKTFPILSVLTKG

SEQ ID NO: 203052 - protein, 15 aa, Artificial Sequence
  Description of Artificial Sequence: Synthetic peptide
  Seed: EWLKTRPILSPLTKG
EWFKTFPILSYLTKG

SEQ ID NO: 203053 - protein, 15 aa, Artificial Sequence
  Description of Artificial Sequence: Synthetic peptide
  Seed: EWLKTRPILSPLTKG
EWFKTFPKLSALTKG

SEQ ID NO: 203054 - protein, 15 aa, Artificial Sequence
  Description of Artificial Sequence: Synthetic peptide
  Seed: EWLKTRPILSPLTKG
EWFKTFPKLSSLTKG

SEQ ID NO: 203055 - protein, 15 aa, Artificial Sequence
  Description of Artificial Sequence: Synthetic peptide
  Seed: EWLKTRPILSPLTKG
EWFKTFPLLSALTKG

SEQ ID NO: 203056 - protein, 15 aa, Artificial Sequence
  Description of Artificial Sequence: Synthetic peptide
  Seed: EWLKTRPILSPLTKG
EWFKTFPLLSDLTKG

SEQ ID NO: 203057 - protein, 15 aa, Artificial Sequence
  Description of Artificial Sequence: Synthetic peptide
  Seed: EWLKTRPILSPLTKG
EWFKTFPLLSELTKG

SEQ ID NO: 203058 - protein, 15 aa, Artificial Sequence
  Description of Artificial Sequence: Synthetic peptide
  Seed: EWLKTRPILSPLTKG
EWFKTFPLLSFLTKG

SEQ ID NO: 203059 - protein, 15 aa, Artificial Sequence
  Description of Artificial Sequence: Synthetic peptide
  Seed: EWLKTRPILSPLTKG
EWFKTFPLLSILTKG

SEQ ID NO: 203060 - protein, 15 aa, Artificial Sequence
  Description of Artificial Sequence: Synthetic peptide
  Seed: EWLKTRPILSPLTKG
EWFKTFPLLSLLTKG

SEQ ID NO: 203061 - protein, 15 aa, Artificial Sequence
  Description of Artificial Sequence: Synthetic peptide
  Seed: EWLKTRPILSPLTKG
EWFKTFPLLSMLTKG

SEQ ID NO: 203062 - protein, 15 aa, Artificial Sequence
  Description of Artificial Sequence: Synthetic peptide
  Seed: EWLKTRPILSPLTKG
EWFKTFPLLSNLTKG

SEQ ID NO: 203063 - protein, 15 aa, Artificial Sequence
  Description of Artificial Sequence: Synthetic peptide
  Seed: EWLKTRPILSPLTKG
EWFKTFPLLSSLTKG

SEQ ID NO: 203064 - protein, 15 aa, Artificial Sequence
  Description of Artificial Sequence: Synthetic peptide
  Seed: EWLKTRPILSPLTKG
EWFKTFPLLSTLTKG

SEQ ID NO: 203065 - protein, 15 aa, Artificial Sequence
  Description of Artificial Sequence: Synthetic peptide
  Seed: EWLKTRPILSPLTKG
EWFKTFPLLSVLTKG

SEQ ID NO: 203066 - protein, 15 aa, Artificial Sequence
  Description of Artificial Sequence: Synthetic peptide
  Seed: EWLKTRPILSPLTKG
EWFKTFPLLSYLTKG

SEQ ID NO: 203067 - protein, 15 aa, Artificial Sequence
  Description of Artificial Sequence: Synthetic peptide
  Seed: EWLKTRPILSPLTKG
EWFKTFPMLSALTKG

SEQ ID NO: 203068 - protein, 15 aa, Artificial Sequence
  Description of Artificial Sequence: Synthetic peptide
  Seed: EWLKTRPILSPLTKG
EWFKTFPMLSFLTKG

SEQ ID NO: 203069 - protein, 15 aa, Artificial Sequence
  Description of Artificial Sequence: Synthetic peptide
  Seed: EWLKTRPILSPLTKG
EWFKTFPMLSILTKG

SEQ ID NO: 203070 - protein, 15 aa, Artificial Sequence
  Description of Artificial Sequence: Synthetic peptide
  Seed: EWLKTRPILSPLTKG
EWFKTFPMLSLLTKG

SEQ ID NO: 203071 - protein, 15 aa, Artificial Sequence
  Description of Artificial Sequence: Synthetic peptide
  Seed: EWLKTRPILSPLTKG
EWFKTFPMLSMLTKG

SEQ ID NO: 203072 - protein, 15 aa, Artificial Sequence
  Description of Artificial Sequence: Synthetic peptide
  Seed: EWLKTRPILSPLTKG
EWFKTFPMLSNLTKG

SEQ ID NO: 203073 - protein, 15 aa, Artificial Sequence
  Description of Artificial Sequence: Synthetic peptide
  Seed: EWLKTRPILSPLTKG
EWFKTFPMLSSLTKG

SEQ ID NO: 203074 - protein, 15 aa, Artificial Sequence
  Description of Artificial Sequence: Synthetic peptide
  Seed: EWLKTRPILSPLTKG
EWFKTFPMLSTLTKG

SEQ ID NO: 203075 - protein, 15 aa, Artificial Sequence
  Description of Artificial Sequence: Synthetic peptide
  Seed: EWLKTRPILSPLTKG
EWFKTFPMLSVLTKG

SEQ ID NO: 203076 - protein, 15 aa, Artificial Sequence
  Description of Artificial Sequence: Synthetic peptide
  Seed: EWLKTRPILSPLTKG
EWFKTFPMLSYLTKG

SEQ ID NO: 203077 - protein, 15 aa, Artificial Sequence
  Description of Artificial Sequence: Synthetic peptide
  Seed: EWLKTRPILSPLTKG
EWFKTFPRLSALTKG

SEQ ID NO: 203078 - protein, 15 aa, Artificial Sequence
  Description of Artificial Sequence: Synthetic peptide
  Seed: EWLKTRPILSPLTKG
EWFKTFPRLSGLTKG

SEQ ID NO: 203079 - protein, 15 aa, Artificial Sequence
  Description of Artificial Sequence: Synthetic peptide
  Seed: EWLKTRPILSPLTKG
EWFKTFPRLSHLTKG

SEQ ID NO: 203080 - protein, 15 aa, Artificial Sequence
  Description of Artificial Sequence: Synthetic peptide
  Seed: EWLKTRPILSPLTKG
EWFKTFPRLSQLTKG

SEQ ID NO: 203081 - protein, 15 aa, Artificial Sequence
  Description of Artificial Sequence: Synthetic peptide
  Seed: EWLKTRPILSPLTKG
EWFKTFPRLSRLTKG

SEQ ID NO: 203082 - protein, 15 aa, Artificial Sequence
  Description of Artificial Sequence: Synthetic peptide
  Seed: EWLKTRPILSPLTKG
EWFKTFPRLSSLTKG

SEQ ID NO: 203083 - protein, 15 aa, Artificial Sequence
  Description of Artificial Sequence: Synthetic peptide
  Seed: EWLKTRPILSPLTKG
EWFKTFPVLSFLTKG

SEQ ID NO: 203084 - protein, 15 aa, Artificial Sequence
  Description of Artificial Sequence: Synthetic peptide
  Seed: EWLKTRPILSPLTKG
EWFKTFPVLSILTKG

SEQ ID NO: 203085 - protein, 15 aa, Artificial Sequence
  Description of Artificial Sequence: Synthetic peptide
  Seed: EWLKTRPILSPLTKG
EWFKTFPVLSLLTKG

SEQ ID NO: 203086 - protein, 15 aa, Artificial Sequence
  Description of Artificial Sequence: Synthetic peptide
  Seed: EWLKTRPILSPLTKG
EWFKTFPVLSMLTKG

SEQ ID NO: 203087 - protein, 15 aa, Artificial Sequence
  Description of Artificial Sequence: Synthetic peptide
  Seed: EWLKTRPILSPLTKG
EWFKTFPVLSVLTKG

SEQ ID NO: 203088 - protein, 15 aa, Artificial Sequence
  Description of Artificial Sequence: Synthetic peptide
  Seed: EWLKTRPILSPLTKG
EWFKTFPVLSYLTKG

SEQ ID NO: 203089 - protein, 15 aa, Artificial Sequence
  Description of Artificial Sequence: Synthetic peptide
  Seed: EWLKTRPILSPLTKG
EWFKTFPWLSALTKG

SEQ ID NO: 203090 - protein, 15 aa, Artificial Sequence
  Description of Artificial Sequence: Synthetic peptide
  Seed: EWLKTRPILSPLTKG
EWFKTFPWLSFLTKG

SEQ ID NO: 203091 - protein, 15 aa, Artificial Sequence
  Description of Artificial Sequence: Synthetic peptide
  Seed: EWLKTRPILSPLTKG
EWFKTFPWLSILTKG

SEQ ID NO: 203092 - protein, 15 aa, Artificial Sequence
  Description of Artificial Sequence: Synthetic peptide
  Seed: EWLKTRPILSPLTKG
EWFKTFPWLSLLTKG

SEQ ID NO: 203093 - protein, 15 aa, Artificial Sequence
  Description of Artificial Sequence: Synthetic peptide
  Seed: EWLKTRPILSPLTKG
EWFKTFPWLSMLTKG

SEQ ID NO: 203094 - protein, 15 aa, Artificial Sequence
  Description of Artificial Sequence: Synthetic peptide
  Seed: EWLKTRPILSPLTKG
EWFKTFPWLSNLTKG

SEQ ID NO: 203095 - protein, 15 aa, Artificial Sequence
  Description of Artificial Sequence: Synthetic peptide
  Seed: EWLKTRPILSPLTKG
EWFKTFPWLSSLTKG

SEQ ID NO: 203096 - protein, 15 aa, Artificial Sequence
  Description of Artificial Sequence: Synthetic peptide
  Seed: EWLKTRPILSPLTKG
EWFKTFPWLSTLTKG

SEQ ID NO: 203097 - protein, 15 aa, Artificial Sequence
  Description of Artificial Sequence: Synthetic peptide
  Seed: EWLKTRPILSPLTKG
EWFKTFPWLSVLTKG

SEQ ID NO: 203098 - protein, 15 aa, Artificial Sequence
  Description of Artificial Sequence: Synthetic peptide
  Seed: EWLKTRPILSPLTKG
EWFKTFPWLSYLTKG

SEQ ID NO: 203099 - protein, 15 aa, Artificial Sequence
  Description of Artificial Sequence: Synthetic peptide
  Seed: EWLKTRPILSPLTKG
EWFKTFPYLSALTKG

SEQ ID NO: 203100 - protein, 15 aa, Artificial Sequence
  Description of Artificial Sequence: Synthetic peptide
  Seed: EWLKTRPILSPLTKG
EWFKTFPYLSFLTKG

SEQ ID NO: 203101 - protein, 15 aa, Artificial Sequence
  Description of Artificial Sequence: Synthetic peptide
  Seed: EWLKTRPILSPLTKG
EWFKTFPYLSILTKG

SEQ ID NO: 203102 - protein, 15 aa, Artificial Sequence
  Description of Artificial Sequence: Synthetic peptide
  Seed: EWLKTRPILSPLTKG
EWFKTFPYLSLLTKG

SEQ ID NO: 203103 - protein, 15 aa, Artificial Sequence
  Description of Artificial Sequence: Synthetic peptide
  Seed: EWLKTRPILSPLTKG
EWFKTFPYLSMLTKG

SEQ ID NO: 203104 - protein, 15 aa, Artificial Sequence
  Description of Artificial Sequence: Synthetic peptide
  Seed: EWLKTRPILSPLTKG
EWFKTFPYLSNLTKG

SEQ ID NO: 203105 - protein, 15 aa, Artificial Sequence
  Description of Artificial Sequence: Synthetic peptide
  Seed: EWLKTRPILSPLTKG
EWFKTFPYLSSLTKG

SEQ ID NO: 203106 - protein, 15 aa, Artificial Sequence
  Description of Artificial Sequence: Synthetic peptide
  Seed: EWLKTRPILSPLTKG
EWFKTFPYLSTLTKG

SEQ ID NO: 203107 - protein, 15 aa, Artificial Sequence
  Description of Artificial Sequence: Synthetic peptide
  Seed: EWLKTRPILSPLTKG
EWFKTFPYLSVLTKG

SEQ ID NO: 203108 - protein, 15 aa, Artificial Sequence
  Description of Artificial Sequence: Synthetic peptide
  Seed: EWLKTRPILSPLTKG
EWFKTFPYLSYLTKG

SEQ ID NO: 203109 - protein, 15 aa, Artificial Sequence
  Description of Artificial Sequence: Synthetic peptide
  Seed: EWLKTRPILSPLTKG
EWFKTGPFLSFLTKG

SEQ ID NO: 203110 - protein, 15 aa, Artificial Sequence
  Description of Artificial Sequence: Synthetic peptide
  Seed: EWLKTRPILSPLTKG
EWFKTGPFLSILTKG

SEQ ID NO: 203111 - protein, 15 aa, Artificial Sequence
  Description of Artificial Sequence: Synthetic peptide
  Seed: EWLKTRPILSPLTKG
EWFKTGPFLSLLTKG

SEQ ID NO: 203112 - protein, 15 aa, Artificial Sequence
  Description of Artificial Sequence: Synthetic peptide
  Seed: EWLKTRPILSPLTKG
EWFKTGPFLSMLTKG

SEQ ID NO: 203113 - protein, 15 aa, Artificial Sequence
  Description of Artificial Sequence: Synthetic peptide
  Seed: EWLKTRPILSPLTKG
EWFKTGPFLSVLTKG

SEQ ID NO: 203114 - protein, 15 aa, Artificial Sequence
  Description of Artificial Sequence: Synthetic peptide
  Seed: EWLKTRPILSPLTKG
EWFKTHPALSLLTKG

SEQ ID NO: 203115 - protein, 15 aa, Artificial Sequence
  Description of Artificial Sequence: Synthetic peptide
  Seed: EWLKTRPILSPLTKG
EWFKTHPFLSALTKG

SEQ ID NO: 203116 - protein, 15 aa, Artificial Sequence
  Description of Artificial Sequence: Synthetic peptide
  Seed: EWLKTRPILSPLTKG
EWFKTHPFLSCLTKG

SEQ ID NO: 203117 - protein, 15 aa, Artificial Sequence
  Description of Artificial Sequence: Synthetic peptide
  Seed: EWLKTRPILSPLTKG
EWFKTHPFLSDLTKG

SEQ ID NO: 203118 - protein, 15 aa, Artificial Sequence
  Description of Artificial Sequence: Synthetic peptide
  Seed: EWLKTRPILSPLTKG
EWFKTHPFLSELTKG

SEQ ID NO: 203119 - protein, 15 aa, Artificial Sequence
  Description of Artificial Sequence: Synthetic peptide
  Seed: EWLKTRPILSPLTKG
EWFKTHPFLSFLTKG

SEQ ID NO: 203120 - protein, 15 aa, Artificial Sequence
  Description of Artificial Sequence: Synthetic peptide
  Seed: EWLKTRPILSPLTKG
EWFKTHPFLSGLTKG

SEQ ID NO: 203121 - protein, 15 aa, Artificial Sequence
  Description of Artificial Sequence: Synthetic peptide
  Seed: EWLKTRPILSPLTKG
EWFKTHPFLSHLTKG

SEQ ID NO: 203122 - protein, 15 aa, Artificial Sequence
  Description of Artificial Sequence: Synthetic peptide
  Seed: EWLKTRPILSPLTKG
EWFKTHPFLSILTKG

SEQ ID NO: 203123 - protein, 15 aa, Artificial Sequence
  Description of Artificial Sequence: Synthetic peptide
  Seed: EWLKTRPILSPLTKG
EWFKTHPFLSLLTKG

SEQ ID NO: 203124 - protein, 15 aa, Artificial Sequence
  Description of Artificial Sequence: Synthetic peptide
  Seed: EWLKTRPILSPLTKG
EWFKTHPFLSMLTKG

SEQ ID NO: 203125 - protein, 15 aa, Artificial Sequence
  Description of Artificial Sequence: Synthetic peptide
  Seed: EWLKTRPILSPLTKG
EWFKTHPFLSNLTKG

SEQ ID NO: 203126 - protein, 15 aa, Artificial Sequence
  Description of Artificial Sequence: Synthetic peptide
  Seed: EWLKTRPILSPLTKG
EWFKTHPFLSPLTKG

SEQ ID NO: 203127 - protein, 15 aa, Artificial Sequence
  Description of Artificial Sequence: Synthetic peptide
  Seed: EWLKTRPILSPLTKG
EWFKTHPFLSQLTKG

SEQ ID NO: 203128 - protein, 15 aa, Artificial Sequence
  Description of Artificial Sequence: Synthetic peptide
  Seed: EWLKTRPILSPLTKG
EWFKTHPFLSSLTKG

SEQ ID NO: 203129 - protein, 15 aa, Artificial Sequence
  Description of Artificial Sequence: Synthetic peptide
  Seed: EWLKTRPILSPLTKG
EWFKTHPFLSTLTKG

SEQ ID NO: 203130 - protein, 15 aa, Artificial Sequence
  Description of Artificial Sequence: Synthetic peptide
  Seed: EWLKTRPILSPLTKG
EWFKTHPFLSVLTKG

SEQ ID NO: 203131 - protein, 15 aa, Artificial Sequence
  Description of Artificial Sequence: Synthetic peptide
  Seed: EWLKTRPILSPLTKG
EWFKTHPFLSWLTKG

SEQ ID NO: 203132 - protein, 15 aa, Artificial Sequence
  Description of Artificial Sequence: Synthetic peptide
  Seed: EWLKTRPILSPLTKG
EWFKTHPFLSYLTKG

SEQ ID NO: 203133 - protein, 15 aa, Artificial Sequence
  Description of Artificial Sequence: Synthetic peptide
  Seed: EWLKTRPILSPLTKG
EWFKTHPILSFLTKG

SEQ ID NO: 203134 - protein, 15 aa, Artificial Sequence
  Description of Artificial Sequence: Synthetic peptide
  Seed: EWLKTRPILSPLTKG
EWFKTHPILSILTKG

SEQ ID NO: 203135 - protein, 15 aa, Artificial Sequence
  Description of Artificial Sequence: Synthetic peptide
  Seed: EWLKTRPILSPLTKG
EWFKTHPILSLLTKG

SEQ ID NO: 203136 - protein, 15 aa, Artificial Sequence
  Description of Artificial Sequence: Synthetic peptide
  Seed: EWLKTRPILSPLTKG
EWFKTHPILSMLTKG

SEQ ID NO: 203137 - protein, 15 aa, Artificial Sequence
  Description of Artificial Sequence: Synthetic peptide
  Seed: EWLKTRPILSPLTKG
EWFKTHPILSVLTKG

SEQ ID NO: 203138 - protein, 15 aa, Artificial Sequence
  Description of Artificial Sequence: Synthetic peptide
  Seed: EWLKTRPILSPLTKG
EWFKTHPLLSALTKG

SEQ ID NO: 203139 - protein, 15 aa, Artificial Sequence
  Description of Artificial Sequence: Synthetic peptide
  Seed: EWLKTRPILSPLTKG
EWFKTHPLLSFLTKG

SEQ ID NO: 203140 - protein, 15 aa, Artificial Sequence
  Description of Artificial Sequence: Synthetic peptide
  Seed: EWLKTRPILSPLTKG
EWFKTHPLLSILTKG

SEQ ID NO: 203141 - protein, 15 aa, Artificial Sequence
  Description of Artificial Sequence: Synthetic peptide
  Seed: EWLKTRPILSPLTKG
EWFKTHPLLSLLTKG

SEQ ID NO: 203142 - protein, 15 aa, Artificial Sequence
  Description of Artificial Sequence: Synthetic peptide
  Seed: EWLKTRPILSPLTKG
EWFKTHPLLSMLTKG

SEQ ID NO: 203143 - protein, 15 aa, Artificial Sequence
  Description of Artificial Sequence: Synthetic peptide
  Seed: EWLKTRPILSPLTKG
EWFKTHPLLSTLTKG

SEQ ID NO: 203144 - protein, 15 aa, Artificial Sequence
  Description of Artificial Sequence: Synthetic peptide
  Seed: EWLKTRPILSPLTKG
EWFKTHPLLSVLTKG

SEQ ID NO: 203145 - protein, 15 aa, Artificial Sequence
  Description of Artificial Sequence: Synthetic peptide
  Seed: EWLKTRPILSPLTKG
EWFKTHPLLSWLTKG

SEQ ID NO: 203146 - protein, 15 aa, Artificial Sequence
  Description of Artificial Sequence: Synthetic peptide
  Seed: EWLKTRPILSPLTKG
EWFKTHPLLSYLTKG

SEQ ID NO: 203147 - protein, 15 aa, Artificial Sequence
  Description of Artificial Sequence: Synthetic peptide
  Seed: EWLKTRPILSPLTKG
EWFKTHPMLSFLTKG

SEQ ID NO: 203148 - protein, 15 aa, Artificial Sequence
  Description of Artificial Sequence: Synthetic peptide
  Seed: EWLKTRPILSPLTKG
EWFKTHPMLSILTKG

SEQ ID NO: 203149 - protein, 15 aa, Artificial Sequence
  Description of Artificial Sequence: Synthetic peptide
  Seed: EWLKTRPILSPLTKG
EWFKTHPMLSLLTKG

SEQ ID NO: 203150 - protein, 15 aa, Artificial Sequence
  Description of Artificial Sequence: Synthetic peptide
  Seed: EWLKTRPILSPLTKG
EWFKTHPMLSMLTKG

SEQ ID NO: 203151 - protein, 15 aa, Artificial Sequence
  Description of Artificial Sequence: Synthetic peptide
  Seed: EWLKTRPILSPLTKG
EWFKTHPMLSVLTKG

SEQ ID NO: 203152 - protein, 15 aa, Artificial Sequence
  Description of Artificial Sequence: Synthetic peptide
  Seed: EWLKTRPILSPLTKG
EWFKTHPVLSFLTKG

SEQ ID NO: 203153 - protein, 15 aa, Artificial Sequence
  Description of Artificial Sequence: Synthetic peptide
  Seed: EWLKTRPILSPLTKG
EWFKTHPVLSILTKG

SEQ ID NO: 203154 - protein, 15 aa, Artificial Sequence
  Description of Artificial Sequence: Synthetic peptide
  Seed: EWLKTRPILSPLTKG
EWFKTHPVLSLLTKG

SEQ ID NO: 203155 - protein, 15 aa, Artificial Sequence
  Description of Artificial Sequence: Synthetic peptide
  Seed: EWLKTRPILSPLTKG
EWFKTHPVLSVLTKG

SEQ ID NO: 203156 - protein, 15 aa, Artificial Sequence
  Description of Artificial Sequence: Synthetic peptide
  Seed: EWLKTRPILSPLTKG
EWFKTHPWLSFLTKG

SEQ ID NO: 203157 - protein, 15 aa, Artificial Sequence
  Description of Artificial Sequence: Synthetic peptide
  Seed: EWLKTRPILSPLTKG
EWFKTHPWLSILTKG

SEQ ID NO: 203158 - protein, 15 aa, Artificial Sequence
  Description of Artificial Sequence: Synthetic peptide
  Seed: EWLKTRPILSPLTKG
EWFKTHPWLSLLTKG

SEQ ID NO: 203159 - protein, 15 aa, Artificial Sequence
  Description of Artificial Sequence: Synthetic peptide
  Seed: EWLKTRPILSPLTKG
EWFKTHPWLSMLTKG

SEQ ID NO: 203160 - protein, 15 aa, Artificial Sequence
  Description of Artificial Sequence: Synthetic peptide
  Seed: EWLKTRPILSPLTKG
EWFKTHPWLSVLTKG

SEQ ID NO: 203161 - protein, 15 aa, Artificial Sequence
  Description of Artificial Sequence: Synthetic peptide
  Seed: EWLKTRPILSPLTKG
EWFKTHPYLSFLTKG

SEQ ID NO: 203162 - protein, 15 aa, Artificial Sequence
  Description of Artificial Sequence: Synthetic peptide
  Seed: EWLKTRPILSPLTKG
EWFKTHPYLSILTKG

SEQ ID NO: 203163 - protein, 15 aa, Artificial Sequence
  Description of Artificial Sequence: Synthetic peptide
  Seed: EWLKTRPILSPLTKG
EWFKTHPYLSLLTKG

SEQ ID NO: 203164 - protein, 15 aa, Artificial Sequence
  Description of Artificial Sequence: Synthetic peptide
  Seed: EWLKTRPILSPLTKG
EWFKTHPYLSMLTKG

SEQ ID NO: 203165 - protein, 15 aa, Artificial Sequence
  Description of Artificial Sequence: Synthetic peptide
  Seed: EWLKTRPILSPLTKG
EWFKTHPYLSVLTKG

SEQ ID NO: 203166 - protein, 15 aa, Artificial Sequence
  Description of Artificial Sequence: Synthetic peptide
  Seed: EWLKTRPILSPLTKG
EWFKTIPALSFLTKG

SEQ ID NO: 203167 - protein, 15 aa, Artificial Sequence
  Description of Artificial Sequence: Synthetic peptide
  Seed: EWLKTRPILSPLTKG
EWFKTIPALSILTKG

SEQ ID NO: 203168 - protein, 15 aa, Artificial Sequence
  Description of Artificial Sequence: Synthetic peptide
  Seed: EWLKTRPILSPLTKG
EWFKTIPALSLLTKG

SEQ ID NO: 203169 - protein, 15 aa, Artificial Sequence
  Description of Artificial Sequence: Synthetic peptide
  Seed: EWLKTRPILSPLTKG
EWFKTIPALSVLTKG

SEQ ID NO: 203170 - protein, 15 aa, Artificial Sequence
  Description of Artificial Sequence: Synthetic peptide
  Seed: EWLKTRPILSPLTKG
EWFKTIPFLSALTKG

SEQ ID NO: 203171 - protein, 15 aa, Artificial Sequence
  Description of Artificial Sequence: Synthetic peptide
  Seed: EWLKTRPILSPLTKG
EWFKTIPFLSCLTKG

SEQ ID NO: 203172 - protein, 15 aa, Artificial Sequence
  Description of Artificial Sequence: Synthetic peptide
  Seed: EWLKTRPILSPLTKG
EWFKTIPFLSDLTKG

SEQ ID NO: 203173 - protein, 15 aa, Artificial Sequence
  Description of Artificial Sequence: Synthetic peptide
  Seed: EWLKTRPILSPLTKG
EWFKTIPFLSELTKG

SEQ ID NO: 203174 - protein, 15 aa, Artificial Sequence
  Description of Artificial Sequence: Synthetic peptide
  Seed: EWLKTRPILSPLTKG
EWFKTIPFLSFLTKG

SEQ ID NO: 203175 - protein, 15 aa, Artificial Sequence
  Description of Artificial Sequence: Synthetic peptide
  Seed: EWLKTRPILSPLTKG
EWFKTIPFLSGLTKG

SEQ ID NO: 203176 - protein, 15 aa, Artificial Sequence
  Description of Artificial Sequence: Synthetic peptide
  Seed: EWLKTRPILSPLTKG
EWFKTIPFLSHLTKG

SEQ ID NO: 203177 - protein, 15 aa, Artificial Sequence
  Description of Artificial Sequence: Synthetic peptide
  Seed: EWLKTRPILSPLTKG
EWFKTIPFLSILTKG

SEQ ID NO: 203178 - protein, 15 aa, Artificial Sequence
  Description of Artificial Sequence: Synthetic peptide
  Seed: EWLKTRPILSPLTKG
EWFKTIPFLSKLTKG

SEQ ID NO: 203179 - protein, 15 aa, Artificial Sequence
  Description of Artificial Sequence: Synthetic peptide
  Seed: EWLKTRPILSPLTKG
EWFKTIPFLSLLTKG

SEQ ID NO: 203180 - protein, 15 aa, Artificial Sequence
  Description of Artificial Sequence: Synthetic peptide
  Seed: EWLKTRPILSPLTKG
EWFKTIPFLSMLTKG

SEQ ID NO: 203181 - protein, 15 aa, Artificial Sequence
  Description of Artificial Sequence: Synthetic peptide
  Seed: EWLKTRPILSPLTKG
EWFKTIPFLSNLTKG

SEQ ID NO: 203182 - protein, 15 aa, Artificial Sequence
  Description of Artificial Sequence: Synthetic peptide
  Seed: EWLKTRPILSPLTKG
EWFKTIPFLSPLTKG

SEQ ID NO: 203183 - protein, 15 aa, Artificial Sequence
  Description of Artificial Sequence: Synthetic peptide
  Seed: EWLKTRPILSPLTKG
EWFKTIPFLSQLTKG

SEQ ID NO: 203184 - protein, 15 aa, Artificial Sequence
  Description of Artificial Sequence: Synthetic peptide
  Seed: EWLKTRPILSPLTKG
EWFKTIPFLSRLTKG

SEQ ID NO: 203185 - protein, 15 aa, Artificial Sequence
  Description of Artificial Sequence: Synthetic peptide
  Seed: EWLKTRPILSPLTKG
EWFKTIPFLSSLTKG

SEQ ID NO: 203186 - protein, 15 aa, Artificial Sequence
  Description of Artificial Sequence: Synthetic peptide
  Seed: EWLKTRPILSPLTKG
EWFKTIPFLSTLTKG

SEQ ID NO: 203187 - protein, 15 aa, Artificial Sequence
  Description of Artificial Sequence: Synthetic peptide
  Seed: EWLKTRPILSPLTKG
EWFKTIPFLSVLTKG

SEQ ID NO: 203188 - protein, 15 aa, Artificial Sequence
  Description of Artificial Sequence: Synthetic peptide
  Seed: EWLKTRPILSPLTKG
EWFKTIPFLSWLTKG

SEQ ID NO: 203189 - protein, 15 aa, Artificial Sequence
  Description of Artificial Sequence: Synthetic peptide
  Seed: EWLKTRPILSPLTKG
EWFKTIPFLSYLTKG

SEQ ID NO: 203190 - protein, 15 aa, Artificial Sequence
  Description of Artificial Sequence: Synthetic peptide
  Seed: EWLKTRPILSPLTKG
EWFKTIPILSFLTKG

SEQ ID NO: 203191 - protein, 15 aa, Artificial Sequence
  Description of Artificial Sequence: Synthetic peptide
  Seed: EWLKTRPILSPLTKG
EWFKTIPILSILTKG

SEQ ID NO: 203192 - protein, 15 aa, Artificial Sequence
  Description of Artificial Sequence: Synthetic peptide
  Seed: EWLKTRPILSPLTKG
EWFKTIPILSLLTKG

SEQ ID NO: 203193 - protein, 15 aa, Artificial Sequence
  Description of Artificial Sequence: Synthetic peptide
  Seed: EWLKTRPILSPLTKG
EWFKTIPILSMLTKG

SEQ ID NO: 203194 - protein, 15 aa, Artificial Sequence
  Description of Artificial Sequence: Synthetic peptide
  Seed: EWLKTRPILSPLTKG
EWFKTIPILSTLTKG

SEQ ID NO: 203195 - protein, 15 aa, Artificial Sequence
  Description of Artificial Sequence: Synthetic peptide
  Seed: EWLKTRPILSPLTKG
EWFKTIPILSVLTKG

SEQ ID NO: 203196 - protein, 15 aa, Artificial Sequence
  Description of Artificial Sequence: Synthetic peptide
  Seed: EWLKTRPILSPLTKG
EWFKTIPILSYLTKG

SEQ ID NO: 203197 - protein, 15 aa, Artificial Sequence
  Description of Artificial Sequence: Synthetic peptide
  Seed: EWLKTRPILSPLTKG
EWFKTIPKLSALTKG

SEQ ID NO: 203198 - protein, 15 aa, Artificial Sequence
  Description of Artificial Sequence: Synthetic peptide
  Seed: EWLKTRPILSPLTKG
EWFKTIPKLSGLTKG

SEQ ID NO: 203199 - protein, 15 aa, Artificial Sequence
  Description of Artificial Sequence: Synthetic peptide
  Seed: EWLKTRPILSPLTKG
EWFKTIPKLSHLTKG

SEQ ID NO: 203200 - protein, 15 aa, Artificial Sequence
  Description of Artificial Sequence: Synthetic peptide
  Seed: EWLKTRPILSPLTKG
EWFKTIPKLSKLTKG

SEQ ID NO: 203201 - protein, 15 aa, Artificial Sequence
  Description of Artificial Sequence: Synthetic peptide
  Seed: EWLKTRPILSPLTKG
EWFKTIPKLSMLTKG

SEQ ID NO: 203202 - protein, 15 aa, Artificial Sequence
  Description of Artificial Sequence: Synthetic peptide
  Seed: EWLKTRPILSPLTKG
EWFKTIPKLSQLTKG

SEQ ID NO: 203203 - protein, 15 aa, Artificial Sequence
  Description of Artificial Sequence: Synthetic peptide
  Seed: EWLKTRPILSPLTKG
EWFKTIPKLSRLTKG

SEQ ID NO: 203204 - protein, 15 aa, Artificial Sequence
  Description of Artificial Sequence: Synthetic peptide
  Seed: EWLKTRPILSPLTKG
EWFKTIPKLSSLTKG

SEQ ID NO: 203205 - protein, 15 aa, Artificial Sequence
  Description of Artificial Sequence: Synthetic peptide
  Seed: EWLKTRPILSPLTKG
EWFKTIPKLSTLTKG

SEQ ID NO: 203206 - protein, 15 aa, Artificial Sequence
  Description of Artificial Sequence: Synthetic peptide
  Seed: EWLKTRPILSPLTKG
EWFKTIPKLSYLTKG

SEQ ID NO: 203207 - protein, 15 aa, Artificial Sequence
  Description of Artificial Sequence: Synthetic peptide
  Seed: EWLKTRPILSPLTKG
EWFKTIPLLSALTKG

SEQ ID NO: 203208 - protein, 15 aa, Artificial Sequence
  Description of Artificial Sequence: Synthetic peptide
  Seed: EWLKTRPILSPLTKG
EWFKTIPLLSELTKG

SEQ ID NO: 203209 - protein, 15 aa, Artificial Sequence
  Description of Artificial Sequence: Synthetic peptide
  Seed: EWLKTRPILSPLTKG
EWFKTIPLLSFLTKG

SEQ ID NO: 203210 - protein, 15 aa, Artificial Sequence
  Description of Artificial Sequence: Synthetic peptide
  Seed: EWLKTRPILSPLTKG
EWFKTIPLLSILTKG

SEQ ID NO: 203211 - protein, 15 aa, Artificial Sequence
  Description of Artificial Sequence: Synthetic peptide
  Seed: EWLKTRPILSPLTKG
EWFKTIPLLSLLTKG

SEQ ID NO: 203212 - protein, 15 aa, Artificial Sequence
  Description of Artificial Sequence: Synthetic peptide
  Seed: EWLKTRPILSPLTKG
EWFKTIPLLSMLTKG

SEQ ID NO: 203213 - protein, 15 aa, Artificial Sequence
  Description of Artificial Sequence: Synthetic peptide
  Seed: EWLKTRPILSPLTKG
EWFKTIPLLSNLTKG

SEQ ID NO: 203214 - protein, 15 aa, Artificial Sequence
  Description of Artificial Sequence: Synthetic peptide
  Seed: EWLKTRPILSPLTKG
EWFKTIPLLSSLTKG

SEQ ID NO: 203215 - protein, 15 aa, Artificial Sequence
  Description of Artificial Sequence: Synthetic peptide
  Seed: EWLKTRPILSPLTKG
EWFKTIPLLSTLTKG

SEQ ID NO: 203216 - protein, 15 aa, Artificial Sequence
  Description of Artificial Sequence: Synthetic peptide
  Seed: EWLKTRPILSPLTKG
EWFKTIPLLSVLTKG

SEQ ID NO: 203217 - protein, 15 aa, Artificial Sequence
  Description of Artificial Sequence: Synthetic peptide
  Seed: EWLKTRPILSPLTKG
EWFKTIPLLSYLTKG

SEQ ID NO: 203218 - protein, 15 aa, Artificial Sequence
  Description of Artificial Sequence: Synthetic peptide
  Seed: EWLKTRPILSPLTKG
EWFKTIPMLSALTKG

SEQ ID NO: 203219 - protein, 15 aa, Artificial Sequence
  Description of Artificial Sequence: Synthetic peptide
  Seed: EWLKTRPILSPLTKG
EWFKTIPMLSFLTKG

SEQ ID NO: 203220 - protein, 15 aa, Artificial Sequence
  Description of Artificial Sequence: Synthetic peptide
  Seed: EWLKTRPILSPLTKG
EWFKTIPMLSILTKG

SEQ ID NO: 203221 - protein, 15 aa, Artificial Sequence
  Description of Artificial Sequence: Synthetic peptide
  Seed: EWLKTRPILSPLTKG
EWFKTIPMLSLLTKG

SEQ ID NO: 203222 - protein, 15 aa, Artificial Sequence
  Description of Artificial Sequence: Synthetic peptide
  Seed: EWLKTRPILSPLTKG
EWFKTIPMLSMLTKG

SEQ ID NO: 203223 - protein, 15 aa, Artificial Sequence
  Description of Artificial Sequence: Synthetic peptide
  Seed: EWLKTRPILSPLTKG
EWFKTIPMLSTLTKG

SEQ ID NO: 203224 - protein, 15 aa, Artificial Sequence
  Description of Artificial Sequence: Synthetic peptide
  Seed: EWLKTRPILSPLTKG
EWFKTIPMLSVLTKG

SEQ ID NO: 203225 - protein, 15 aa, Artificial Sequence
  Description of Artificial Sequence: Synthetic peptide
  Seed: EWLKTRPILSPLTKG
EWFKTIPMLSYLTKG

SEQ ID NO: 203226 - protein, 15 aa, Artificial Sequence
  Description of Artificial Sequence: Synthetic peptide
  Seed: EWLKTRPILSPLTKG
EWFKTIPRLSALTKG

SEQ ID NO: 203227 - protein, 15 aa, Artificial Sequence
  Description of Artificial Sequence: Synthetic peptide
  Seed: EWLKTRPILSPLTKG
EWFKTIPRLSGLTKG

SEQ ID NO: 203228 - protein, 15 aa, Artificial Sequence
  Description of Artificial Sequence: Synthetic peptide
  Seed: EWLKTRPILSPLTKG
EWFKTIPRLSHLTKG

SEQ ID NO: 203229 - protein, 15 aa, Artificial Sequence
  Description of Artificial Sequence: Synthetic peptide
  Seed: EWLKTRPILSPLTKG
EWFKTIPRLSILTKG

SEQ ID NO: 203230 - protein, 15 aa, Artificial Sequence
  Description of Artificial Sequence: Synthetic peptide
  Seed: EWLKTRPILSPLTKG
EWFKTIPRLSKLTKG

SEQ ID NO: 203231 - protein, 15 aa, Artificial Sequence
  Description of Artificial Sequence: Synthetic peptide
  Seed: EWLKTRPILSPLTKG
EWFKTIPRLSLLTKG

SEQ ID NO: 203232 - protein, 15 aa, Artificial Sequence
  Description of Artificial Sequence: Synthetic peptide
  Seed: EWLKTRPILSPLTKG
EWFKTIPRLSMLTKG

SEQ ID NO: 203233 - protein, 15 aa, Artificial Sequence
  Description of Artificial Sequence: Synthetic peptide
  Seed: EWLKTRPILSPLTKG
EWFKTIPRLSNLTKG

SEQ ID NO: 203234 - protein, 15 aa, Artificial Sequence
  Description of Artificial Sequence: Synthetic peptide
  Seed: EWLKTRPILSPLTKG
EWFKTIPRLSQLTKG

SEQ ID NO: 203235 - protein, 15 aa, Artificial Sequence
  Description of Artificial Sequence: Synthetic peptide
  Seed: EWLKTRPILSPLTKG
EWFKTIPRLSRLTKG

SEQ ID NO: 203236 - protein, 15 aa, Artificial Sequence
  Description of Artificial Sequence: Synthetic peptide
  Seed: EWLKTRPILSPLTKG
EWFKTIPRLSTLTKG

SEQ ID NO: 203237 - protein, 15 aa, Artificial Sequence
  Description of Artificial Sequence: Synthetic peptide
  Seed: EWLKTRPILSPLTKG
EWFKTIPRLSYLTKG

SEQ ID NO: 203238 - protein, 15 aa, Artificial Sequence
  Description of Artificial Sequence: Synthetic peptide
  Seed: EWLKTRPILSPLTKG
EWFKTIPVLSFLTKG

SEQ ID NO: 203239 - protein, 15 aa, Artificial Sequence
  Description of Artificial Sequence: Synthetic peptide
  Seed: EWLKTRPILSPLTKG
EWFKTIPVLSILTKG

SEQ ID NO: 203240 - protein, 15 aa, Artificial Sequence
  Description of Artificial Sequence: Synthetic peptide
  Seed: EWLKTRPILSPLTKG
EWFKTIPVLSLLTKG

SEQ ID NO: 203241 - protein, 15 aa, Artificial Sequence
  Description of Artificial Sequence: Synthetic peptide
  Seed: EWLKTRPILSPLTKG
EWFKTIPVLSMLTKG

SEQ ID NO: 203242 - protein, 15 aa, Artificial Sequence
  Description of Artificial Sequence: Synthetic peptide
  Seed: EWLKTRPILSPLTKG
EWFKTIPVLSVLTKG

SEQ ID NO: 203243 - protein, 15 aa, Artificial Sequence
  Description of Artificial Sequence: Synthetic peptide
  Seed: EWLKTRPILSPLTKG
EWFKTIPWLSALTKG

SEQ ID NO: 203244 - protein, 15 aa, Artificial Sequence
  Description of Artificial Sequence: Synthetic peptide
  Seed: EWLKTRPILSPLTKG
EWFKTIPWLSELTKG

SEQ ID NO: 203245 - protein, 15 aa, Artificial Sequence
  Description of Artificial Sequence: Synthetic peptide
  Seed: EWLKTRPILSPLTKG
EWFKTIPWLSFLTKG

SEQ ID NO: 203246 - protein, 15 aa, Artificial Sequence
  Description of Artificial Sequence: Synthetic peptide
  Seed: EWLKTRPILSPLTKG
EWFKTIPWLSILTKG

SEQ ID NO: 203247 - protein, 15 aa, Artificial Sequence
  Description of Artificial Sequence: Synthetic peptide
  Seed: EWLKTRPILSPLTKG
EWFKTIPWLSLLTKG

SEQ ID NO: 203248 - protein, 15 aa, Artificial Sequence
  Description of Artificial Sequence: Synthetic peptide
  Seed: EWLKTRPILSPLTKG
EWFKTIPWLSMLTKG

SEQ ID NO: 203249 - protein, 15 aa, Artificial Sequence
  Description of Artificial Sequence: Synthetic peptide
  Seed: EWLKTRPILSPLTKG
EWFKTIPWLSNLTKG

SEQ ID NO: 203250 - protein, 15 aa, Artificial Sequence
  Description of Artificial Sequence: Synthetic peptide
  Seed: EWLKTRPILSPLTKG
EWFKTIPWLSSLTKG

SEQ ID NO: 203251 - protein, 15 aa, Artificial Sequence
  Description of Artificial Sequence: Synthetic peptide
  Seed: EWLKTRPILSPLTKG
EWFKTIPWLSTLTKG

SEQ ID NO: 203252 - protein, 15 aa, Artificial Sequence
  Description of Artificial Sequence: Synthetic peptide
  Seed: EWLKTRPILSPLTKG
EWFKTIPWLSVLTKG

SEQ ID NO: 203253 - protein, 15 aa, Artificial Sequence
  Description of Artificial Sequence: Synthetic peptide
  Seed: EWLKTRPILSPLTKG
EWFKTIPWLSYLTKG

SEQ ID NO: 203254 - protein, 15 aa, Artificial Sequence
  Description of Artificial Sequence: Synthetic peptide
  Seed: EWLKTRPILSPLTKG
EWFKTIPYLSALTKG

SEQ ID NO: 203255 - protein, 15 aa, Artificial Sequence
  Description of Artificial Sequence: Synthetic peptide
  Seed: EWLKTRPILSPLTKG
EWFKTIPYLSELTKG

SEQ ID NO: 203256 - protein, 15 aa, Artificial Sequence
  Description of Artificial Sequence: Synthetic peptide
  Seed: EWLKTRPILSPLTKG
EWFKTIPYLSFLTKG

SEQ ID NO: 203257 - protein, 15 aa, Artificial Sequence
  Description of Artificial Sequence: Synthetic peptide
  Seed: EWLKTRPILSPLTKG
EWFKTIPYLSILTKG

SEQ ID NO: 203258 - protein, 15 aa, Artificial Sequence
  Description of Artificial Sequence: Synthetic peptide
  Seed: EWLKTRPILSPLTKG
EWFKTIPYLSLLTKG

SEQ ID NO: 203259 - protein, 15 aa, Artificial Sequence
  Description of Artificial Sequence: Synthetic peptide
  Seed: EWLKTRPILSPLTKG
EWFKTIPYLSMLTKG

SEQ ID NO: 203260 - protein, 15 aa, Artificial Sequence
  Description of Artificial Sequence: Synthetic peptide
  Seed: EWLKTRPILSPLTKG
EWFKTIPYLSNLTKG

SEQ ID NO: 203261 - protein, 15 aa, Artificial Sequence
  Description of Artificial Sequence: Synthetic peptide
  Seed: EWLKTRPILSPLTKG
EWFKTIPYLSSLTKG

SEQ ID NO: 203262 - protein, 15 aa, Artificial Sequence
  Description of Artificial Sequence: Synthetic peptide
  Seed: EWLKTRPILSPLTKG
EWFKTIPYLSTLTKG

SEQ ID NO: 203263 - protein, 15 aa, Artificial Sequence
  Description of Artificial Sequence: Synthetic peptide
  Seed: EWLKTRPILSPLTKG
EWFKTIPYLSVLTKG

SEQ ID NO: 203264 - protein, 15 aa, Artificial Sequence
  Description of Artificial Sequence: Synthetic peptide
  Seed: EWLKTRPILSPLTKG
EWFKTIPYLSWLTKG

SEQ ID NO: 203265 - protein, 15 aa, Artificial Sequence
  Description of Artificial Sequence: Synthetic peptide
  Seed: EWLKTRPILSPLTKG
EWFKTIPYLSYLTKG

SEQ ID NO: 203266 - protein, 15 aa, Artificial Sequence
  Description of Artificial Sequence: Synthetic peptide
  Seed: EWLKTRPILSPLTKG
EWFKTKPFLSALTKG

SEQ ID NO: 203267 - protein, 15 aa, Artificial Sequence
  Description of Artificial Sequence: Synthetic peptide
  Seed: EWLKTRPILSPLTKG
EWFKTKPFLSELTKG

SEQ ID NO: 203268 - protein, 15 aa, Artificial Sequence
  Description of Artificial Sequence: Synthetic peptide
  Seed: EWLKTRPILSPLTKG
EWFKTKPFLSFLTKG

SEQ ID NO: 203269 - protein, 15 aa, Artificial Sequence
  Description of Artificial Sequence: Synthetic peptide
  Seed: EWLKTRPILSPLTKG
EWFKTKPFLSILTKG

SEQ ID NO: 203270 - protein, 15 aa, Artificial Sequence
  Description of Artificial Sequence: Synthetic peptide
  Seed: EWLKTRPILSPLTKG
EWFKTKPFLSLLTKG

SEQ ID NO: 203271 - protein, 15 aa, Artificial Sequence
  Description of Artificial Sequence: Synthetic peptide
  Seed: EWLKTRPILSPLTKG
EWFKTKPFLSMLTKG

SEQ ID NO: 203272 - protein, 15 aa, Artificial Sequence
  Description of Artificial Sequence: Synthetic peptide
  Seed: EWLKTRPILSPLTKG
EWFKTKPFLSTLTKG

SEQ ID NO: 203273 - protein, 15 aa, Artificial Sequence
  Description of Artificial Sequence: Synthetic peptide
  Seed: EWLKTRPILSPLTKG
EWFKTKPFLSVLTKG

SEQ ID NO: 203274 - protein, 15 aa, Artificial Sequence
  Description of Artificial Sequence: Synthetic peptide
  Seed: EWLKTRPILSPLTKG
EWFKTKPILSILTKG

SEQ ID NO: 203275 - protein, 15 aa, Artificial Sequence
  Description of Artificial Sequence: Synthetic peptide
  Seed: EWLKTRPILSPLTKG
EWFKTKPILSLLTKG

SEQ ID NO: 203276 - protein, 15 aa, Artificial Sequence
  Description of Artificial Sequence: Synthetic peptide
  Seed: EWLKTRPILSPLTKG
EWFKTKPLLSFLTKG

SEQ ID NO: 203277 - protein, 15 aa, Artificial Sequence
  Description of Artificial Sequence: Synthetic peptide
  Seed: EWLKTRPILSPLTKG
EWFKTKPLLSILTKG

SEQ ID NO: 203278 - protein, 15 aa, Artificial Sequence
  Description of Artificial Sequence: Synthetic peptide
  Seed: EWLKTRPILSPLTKG
EWFKTKPLLSLLTKG

SEQ ID NO: 203279 - protein, 15 aa, Artificial Sequence
  Description of Artificial Sequence: Synthetic peptide
  Seed: EWLKTRPILSPLTKG
EWFKTKPLLSVLTKG

SEQ ID NO: 203280 - protein, 15 aa, Artificial Sequence
  Description of Artificial Sequence: Synthetic peptide
  Seed: EWLKTRPILSPLTKG
EWFKTKPMLSLLTKG

SEQ ID NO: 203281 - protein, 15 aa, Artificial Sequence
  Description of Artificial Sequence: Synthetic peptide
  Seed: EWLKTRPILSPLTKG
EWFKTLPALSILTKG

SEQ ID NO: 203282 - protein, 15 aa, Artificial Sequence
  Description of Artificial Sequence: Synthetic peptide
  Seed: EWLKTRPILSPLTKG
EWFKTLPALSLLTKG

SEQ ID NO: 203283 - protein, 15 aa, Artificial Sequence
  Description of Artificial Sequence: Synthetic peptide
  Seed: EWLKTRPILSPLTKG
EWFKTLPALSVLTKG

SEQ ID NO: 203284 - protein, 15 aa, Artificial Sequence
  Description of Artificial Sequence: Synthetic peptide
  Seed: EWLKTRPILSPLTKG
EWFKTLPFLSALTKG

SEQ ID NO: 203285 - protein, 15 aa, Artificial Sequence
  Description of Artificial Sequence: Synthetic peptide
  Seed: EWLKTRPILSPLTKG
EWFKTLPFLSCLTKG

SEQ ID NO: 203286 - protein, 15 aa, Artificial Sequence
  Description of Artificial Sequence: Synthetic peptide
  Seed: EWLKTRPILSPLTKG
EWFKTLPFLSDLTKG

SEQ ID NO: 203287 - protein, 15 aa, Artificial Sequence
  Description of Artificial Sequence: Synthetic peptide
  Seed: EWLKTRPILSPLTKG
EWFKTLPFLSELTKG

SEQ ID NO: 203288 - protein, 15 aa, Artificial Sequence
  Description of Artificial Sequence: Synthetic peptide
  Seed: EWLKTRPILSPLTKG
EWFKTLPFLSFLTKG

SEQ ID NO: 203289 - protein, 15 aa, Artificial Sequence
  Description of Artificial Sequence: Synthetic peptide
  Seed: EWLKTRPILSPLTKG
EWFKTLPFLSGLTKG

SEQ ID NO: 203290 - protein, 15 aa, Artificial Sequence
  Description of Artificial Sequence: Synthetic peptide
  Seed: EWLKTRPILSPLTKG
EWFKTLPFLSHLTKG

SEQ ID NO: 203291 - protein, 15 aa, Artificial Sequence
  Description of Artificial Sequence: Synthetic peptide
  Seed: EWLKTRPILSPLTKG
EWFKTLPFLSILTKG

SEQ ID NO: 203292 - protein, 15 aa, Artificial Sequence
  Description of Artificial Sequence: Synthetic peptide
  Seed: EWLKTRPILSPLTKG
EWFKTLPFLSLLTKG

SEQ ID NO: 203293 - protein, 15 aa, Artificial Sequence
  Description of Artificial Sequence: Synthetic peptide
  Seed: EWLKTRPILSPLTKG
EWFKTLPFLSMLTKG

SEQ ID NO: 203294 - protein, 15 aa, Artificial Sequence
  Description of Artificial Sequence: Synthetic peptide
  Seed: EWLKTRPILSPLTKG
EWFKTLPFLSNLTKG

SEQ ID NO: 203295 - protein, 15 aa, Artificial Sequence
  Description of Artificial Sequence: Synthetic peptide
  Seed: EWLKTRPILSPLTKG
EWFKTLPFLSPLTKG

SEQ ID NO: 203296 - protein, 15 aa, Artificial Sequence
  Description of Artificial Sequence: Synthetic peptide
  Seed: EWLKTRPILSPLTKG
EWFKTLPFLSQLTKG

SEQ ID NO: 203297 - protein, 15 aa, Artificial Sequence
  Description of Artificial Sequence: Synthetic peptide
  Seed: EWLKTRPILSPLTKG
EWFKTLPFLSRLTKG

SEQ ID NO: 203298 - protein, 15 aa, Artificial Sequence
  Description of Artificial Sequence: Synthetic peptide
  Seed: EWLKTRPILSPLTKG
EWFKTLPFLSSLTKG

SEQ ID NO: 203299 - protein, 15 aa, Artificial Sequence
  Description of Artificial Sequence: Synthetic peptide
  Seed: EWLKTRPILSPLTKG
EWFKTLPFLSTLTKG

SEQ ID NO: 203300 - protein, 15 aa, Artificial Sequence
  Description of Artificial Sequence: Synthetic peptide
  Seed: EWLKTRPILSPLTKG
EWFKTLPFLSVLTKG

SEQ ID NO: 203301 - protein, 15 aa, Artificial Sequence
  Description of Artificial Sequence: Synthetic peptide
  Seed: EWLKTRPILSPLTKG
EWFKTLPFLSWLTKG

SEQ ID NO: 203302 - protein, 15 aa, Artificial Sequence
  Description of Artificial Sequence: Synthetic peptide
  Seed: EWLKTRPILSPLTKG
EWFKTLPFLSYLTKG

SEQ ID NO: 203303 - protein, 15 aa, Artificial Sequence
  Description of Artificial Sequence: Synthetic peptide
  Seed: EWLKTRPILSPLTKG
EWFKTLPILSFLTKG

SEQ ID NO: 203304 - protein, 15 aa, Artificial Sequence
  Description of Artificial Sequence: Synthetic peptide
  Seed: EWLKTRPILSPLTKG
EWFKTLPILSILTKG

SEQ ID NO: 203305 - protein, 15 aa, Artificial Sequence
  Description of Artificial Sequence: Synthetic peptide
  Seed: EWLKTRPILSPLTKG
EWFKTLPILSLLTKG

SEQ ID NO: 203306 - protein, 15 aa, Artificial Sequence
  Description of Artificial Sequence: Synthetic peptide
  Seed: EWLKTRPILSPLTKG
EWFKTLPILSMLTKG

SEQ ID NO: 203307 - protein, 15 aa, Artificial Sequence
  Description of Artificial Sequence: Synthetic peptide
  Seed: EWLKTRPILSPLTKG
EWFKTLPILSVLTKG

SEQ ID NO: 203308 - protein, 15 aa, Artificial Sequence
  Description of Artificial Sequence: Synthetic peptide
  Seed: EWLKTRPILSPLTKG
EWFKTLPKLSALTKG

SEQ ID NO: 203309 - protein, 15 aa, Artificial Sequence
  Description of Artificial Sequence: Synthetic peptide
  Seed: EWLKTRPILSPLTKG
EWFKTLPKLSGLTKG

SEQ ID NO: 203310 - protein, 15 aa, Artificial Sequence
  Description of Artificial Sequence: Synthetic peptide
  Seed: EWLKTRPILSPLTKG
EWFKTLPKLSHLTKG

SEQ ID NO: 203311 - protein, 15 aa, Artificial Sequence
  Description of Artificial Sequence: Synthetic peptide
  Seed: EWLKTRPILSPLTKG
EWFKTLPKLSKLTKG

SEQ ID NO: 203312 - protein, 15 aa, Artificial Sequence
  Description of Artificial Sequence: Synthetic peptide
  Seed: EWLKTRPILSPLTKG
EWFKTLPKLSMLTKG

SEQ ID NO: 203313 - protein, 15 aa, Artificial Sequence
  Description of Artificial Sequence: Synthetic peptide
  Seed: EWLKTRPILSPLTKG
EWFKTLPKLSQLTKG

SEQ ID NO: 203314 - protein, 15 aa, Artificial Sequence
  Description of Artificial Sequence: Synthetic peptide
  Seed: EWLKTRPILSPLTKG
EWFKTLPKLSRLTKG

SEQ ID NO: 203315 - protein, 15 aa, Artificial Sequence
  Description of Artificial Sequence: Synthetic peptide
  Seed: EWLKTRPILSPLTKG
EWFKTLPKLSSLTKG

SEQ ID NO: 203316 - protein, 15 aa, Artificial Sequence
  Description of Artificial Sequence: Synthetic peptide
  Seed: EWLKTRPILSPLTKG
EWFKTLPKLSTLTKG

SEQ ID NO: 203317 - protein, 15 aa, Artificial Sequence
  Description of Artificial Sequence: Synthetic peptide
  Seed: EWLKTRPILSPLTKG
EWFKTLPKLSVLTKG

SEQ ID NO: 203318 - protein, 15 aa, Artificial Sequence
  Description of Artificial Sequence: Synthetic peptide
  Seed: EWLKTRPILSPLTKG
EWFKTLPLLSALTKG

SEQ ID NO: 203319 - protein, 15 aa, Artificial Sequence
  Description of Artificial Sequence: Synthetic peptide
  Seed: EWLKTRPILSPLTKG
EWFKTLPLLSFLTKG

SEQ ID NO: 203320 - protein, 15 aa, Artificial Sequence
  Description of Artificial Sequence: Synthetic peptide
  Seed: EWLKTRPILSPLTKG
EWFKTLPLLSILTKG

SEQ ID NO: 203321 - protein, 15 aa, Artificial Sequence
  Description of Artificial Sequence: Synthetic peptide
  Seed: EWLKTRPILSPLTKG
EWFKTLPLLSLLTKG

SEQ ID NO: 203322 - protein, 15 aa, Artificial Sequence
  Description of Artificial Sequence: Synthetic peptide
  Seed: EWLKTRPILSPLTKG
EWFKTLPLLSMLTKG

SEQ ID NO: 203323 - protein, 15 aa, Artificial Sequence
  Description of Artificial Sequence: Synthetic peptide
  Seed: EWLKTRPILSPLTKG
EWFKTLPLLSTLTKG

SEQ ID NO: 203324 - protein, 15 aa, Artificial Sequence
  Description of Artificial Sequence: Synthetic peptide
  Seed: EWLKTRPILSPLTKG
EWFKTLPLLSVLTKG

SEQ ID NO: 203325 - protein, 15 aa, Artificial Sequence
  Description of Artificial Sequence: Synthetic peptide
  Seed: EWLKTRPILSPLTKG
EWFKTLPLLSYLTKG

SEQ ID NO: 203326 - protein, 15 aa, Artificial Sequence
  Description of Artificial Sequence: Synthetic peptide
  Seed: EWLKTRPILSPLTKG
EWFKTLPMLSFLTKG

SEQ ID NO: 203327 - protein, 15 aa, Artificial Sequence
  Description of Artificial Sequence: Synthetic peptide
  Seed: EWLKTRPILSPLTKG
EWFKTLPMLSILTKG

SEQ ID NO: 203328 - protein, 15 aa, Artificial Sequence
  Description of Artificial Sequence: Synthetic peptide
  Seed: EWLKTRPILSPLTKG
EWFKTLPMLSLLTKG

SEQ ID NO: 203329 - protein, 15 aa, Artificial Sequence
  Description of Artificial Sequence: Synthetic peptide
  Seed: EWLKTRPILSPLTKG
EWFKTLPMLSMLTKG

SEQ ID NO: 203330 - protein, 15 aa, Artificial Sequence
  Description of Artificial Sequence: Synthetic peptide
  Seed: EWLKTRPILSPLTKG
EWFKTLPMLSVLTKG

SEQ ID NO: 203331 - protein, 15 aa, Artificial Sequence
  Description of Artificial Sequence: Synthetic peptide
  Seed: EWLKTRPILSPLTKG
EWFKTLPRLSGLTKG

SEQ ID NO: 203332 - protein, 15 aa, Artificial Sequence
  Description of Artificial Sequence: Synthetic peptide
  Seed: EWLKTRPILSPLTKG
EWFKTLPRLSHLTKG

SEQ ID NO: 203333 - protein, 15 aa, Artificial Sequence
  Description of Artificial Sequence: Synthetic peptide
  Seed: EWLKTRPILSPLTKG
EWFKTLPRLSILTKG

SEQ ID NO: 203334 - protein, 15 aa, Artificial Sequence
  Description of Artificial Sequence: Synthetic peptide
  Seed: EWLKTRPILSPLTKG
EWFKTLPRLSKLTKG

SEQ ID NO: 203335 - protein, 15 aa, Artificial Sequence
  Description of Artificial Sequence: Synthetic peptide
  Seed: EWLKTRPILSPLTKG
EWFKTLPRLSLLTKG

SEQ ID NO: 203336 - protein, 15 aa, Artificial Sequence
  Description of Artificial Sequence: Synthetic peptide
  Seed: EWLKTRPILSPLTKG
EWFKTLPRLSMLTKG

SEQ ID NO: 203337 - protein, 15 aa, Artificial Sequence
  Description of Artificial Sequence: Synthetic peptide
  Seed: EWLKTRPILSPLTKG
EWFKTLPRLSNLTKG

SEQ ID NO: 203338 - protein, 15 aa, Artificial Sequence
  Description of Artificial Sequence: Synthetic peptide
  Seed: EWLKTRPILSPLTKG
EWFKTLPRLSPLTKG

SEQ ID NO: 203339 - protein, 15 aa, Artificial Sequence
  Description of Artificial Sequence: Synthetic peptide
  Seed: EWLKTRPILSPLTKG
EWFKTLPRLSQLTKG

SEQ ID NO: 203340 - protein, 15 aa, Artificial Sequence
  Description of Artificial Sequence: Synthetic peptide
  Seed: EWLKTRPILSPLTKG
EWFKTLPRLSRLTKG

SEQ ID NO: 203341 - protein, 15 aa, Artificial Sequence
  Description of Artificial Sequence: Synthetic peptide
  Seed: EWLKTRPILSPLTKG
EWFKTLPRLSSLTKG

SEQ ID NO: 203342 - protein, 15 aa, Artificial Sequence
  Description of Artificial Sequence: Synthetic peptide
  Seed: EWLKTRPILSPLTKG
EWFKTLPRLSTLTKG

SEQ ID NO: 203343 - protein, 15 aa, Artificial Sequence
  Description of Artificial Sequence: Synthetic peptide
  Seed: EWLKTRPILSPLTKG
EWFKTLPRLSVLTKG

SEQ ID NO: 203344 - protein, 15 aa, Artificial Sequence
  Description of Artificial Sequence: Synthetic peptide
  Seed: EWLKTRPILSPLTKG
EWFKTLPRLSYLTKG

SEQ ID NO: 203345 - protein, 15 aa, Artificial Sequence
  Description of Artificial Sequence: Synthetic peptide
  Seed: EWLKTRPILSPLTKG
EWFKTLPVLSILTKG

SEQ ID NO: 203346 - protein, 15 aa, Artificial Sequence
  Description of Artificial Sequence: Synthetic peptide
  Seed: EWLKTRPILSPLTKG
EWFKTLPVLSLLTKG

SEQ ID NO: 203347 - protein, 15 aa, Artificial Sequence
  Description of Artificial Sequence: Synthetic peptide
  Seed: EWLKTRPILSPLTKG
EWFKTLPVLSVLTKG

SEQ ID NO: 203348 - protein, 15 aa, Artificial Sequence
  Description of Artificial Sequence: Synthetic peptide
  Seed: EWLKTRPILSPLTKG
EWFKTLPWLSALTKG

SEQ ID NO: 203349 - protein, 15 aa, Artificial Sequence
  Description of Artificial Sequence: Synthetic peptide
  Seed: EWLKTRPILSPLTKG
EWFKTLPWLSFLTKG

SEQ ID NO: 203350 - protein, 15 aa, Artificial Sequence
  Description of Artificial Sequence: Synthetic peptide
  Seed: EWLKTRPILSPLTKG
EWFKTLPWLSILTKG

SEQ ID NO: 203351 - protein, 15 aa, Artificial Sequence
  Description of Artificial Sequence: Synthetic peptide
  Seed: EWLKTRPILSPLTKG
EWFKTLPWLSLLTKG

SEQ ID NO: 203352 - protein, 15 aa, Artificial Sequence
  Description of Artificial Sequence: Synthetic peptide
  Seed: EWLKTRPILSPLTKG
EWFKTLPWLSMLTKG

SEQ ID NO: 203353 - protein, 15 aa, Artificial Sequence
  Description of Artificial Sequence: Synthetic peptide
  Seed: EWLKTRPILSPLTKG
EWFKTLPWLSNLTKG

SEQ ID NO: 203354 - protein, 15 aa, Artificial Sequence
  Description of Artificial Sequence: Synthetic peptide
  Seed: EWLKTRPILSPLTKG
EWFKTLPWLSSLTKG

SEQ ID NO: 203355 - protein, 15 aa, Artificial Sequence
  Description of Artificial Sequence: Synthetic peptide
  Seed: EWLKTRPILSPLTKG
EWFKTLPWLSTLTKG

SEQ ID NO: 203356 - protein, 15 aa, Artificial Sequence
  Description of Artificial Sequence: Synthetic peptide
  Seed: EWLKTRPILSPLTKG
EWFKTLPWLSVLTKG

SEQ ID NO: 203357 - protein, 15 aa, Artificial Sequence
  Description of Artificial Sequence: Synthetic peptide
  Seed: EWLKTRPILSPLTKG
EWFKTLPWLSYLTKG

SEQ ID NO: 203358 - protein, 15 aa, Artificial Sequence
  Description of Artificial Sequence: Synthetic peptide
  Seed: EWLKTRPILSPLTKG
EWFKTLPYLSALTKG

SEQ ID NO: 203359 - protein, 15 aa, Artificial Sequence
  Description of Artificial Sequence: Synthetic peptide
  Seed: EWLKTRPILSPLTKG
EWFKTLPYLSFLTKG

SEQ ID NO: 203360 - protein, 15 aa, Artificial Sequence
  Description of Artificial Sequence: Synthetic peptide
  Seed: EWLKTRPILSPLTKG
EWFKTLPYLSILTKG

SEQ ID NO: 203361 - protein, 15 aa, Artificial Sequence
  Description of Artificial Sequence: Synthetic peptide
  Seed: EWLKTRPILSPLTKG
EWFKTLPYLSLLTKG

SEQ ID NO: 203362 - protein, 15 aa, Artificial Sequence
  Description of Artificial Sequence: Synthetic peptide
  Seed: EWLKTRPILSPLTKG
EWFKTLPYLSMLTKG

SEQ ID NO: 203363 - protein, 15 aa, Artificial Sequence
  Description of Artificial Sequence: Synthetic peptide
  Seed: EWLKTRPILSPLTKG
EWFKTLPYLSNLTKG

SEQ ID NO: 203364 - protein, 15 aa, Artificial Sequence
  Description of Artificial Sequence: Synthetic peptide
  Seed: EWLKTRPILSPLTKG
EWFKTLPYLSSLTKG

SEQ ID NO: 203365 - protein, 15 aa, Artificial Sequence
  Description of Artificial Sequence: Synthetic peptide
  Seed: EWLKTRPILSPLTKG
EWFKTLPYLSTLTKG

SEQ ID NO: 203366 - protein, 15 aa, Artificial Sequence
  Description of Artificial Sequence: Synthetic peptide
  Seed: EWLKTRPILSPLTKG
EWFKTLPYLSVLTKG

SEQ ID NO: 203367 - protein, 15 aa, Artificial Sequence
  Description of Artificial Sequence: Synthetic peptide
  Seed: EWLKTRPILSPLTKG
EWFKTLPYLSWLTKG

SEQ ID NO: 203368 - protein, 15 aa, Artificial Sequence
  Description of Artificial Sequence: Synthetic peptide
  Seed: EWLKTRPILSPLTKG
EWFKTLPYLSYLTKG

SEQ ID NO: 203369 - protein, 15 aa, Artificial Sequence
  Description of Artificial Sequence: Synthetic peptide
  Seed: EWLKTRPILSPLTKG
EWFKTMPFLSALTKG

SEQ ID NO: 203370 - protein, 15 aa, Artificial Sequence
  Description of Artificial Sequence: Synthetic peptide
  Seed: EWLKTRPILSPLTKG
EWFKTMPFLSCLTKG

SEQ ID NO: 203371 - protein, 15 aa, Artificial Sequence
  Description of Artificial Sequence: Synthetic peptide
  Seed: EWLKTRPILSPLTKG
EWFKTMPFLSDLTKG

SEQ ID NO: 203372 - protein, 15 aa, Artificial Sequence
  Description of Artificial Sequence: Synthetic peptide
  Seed: EWLKTRPILSPLTKG
EWFKTMPFLSELTKG

SEQ ID NO: 203373 - protein, 15 aa, Artificial Sequence
  Description of Artificial Sequence: Synthetic peptide
  Seed: EWLKTRPILSPLTKG
EWFKTMPFLSFLTKG

SEQ ID NO: 203374 - protein, 15 aa, Artificial Sequence
  Description of Artificial Sequence: Synthetic peptide
  Seed: EWLKTRPILSPLTKG
EWFKTMPFLSHLTKG

SEQ ID NO: 203375 - protein, 15 aa, Artificial Sequence
  Description of Artificial Sequence: Synthetic peptide
  Seed: EWLKTRPILSPLTKG
EWFKTMPFLSILTKG

SEQ ID NO: 203376 - protein, 15 aa, Artificial Sequence
  Description of Artificial Sequence: Synthetic peptide
  Seed: EWLKTRPILSPLTKG
EWFKTMPFLSLLTKG

SEQ ID NO: 203377 - protein, 15 aa, Artificial Sequence
  Description of Artificial Sequence: Synthetic peptide
  Seed: EWLKTRPILSPLTKG
EWFKTMPFLSMLTKG

SEQ ID NO: 203378 - protein, 15 aa, Artificial Sequence
  Description of Artificial Sequence: Synthetic peptide
  Seed: EWLKTRPILSPLTKG
EWFKTMPFLSNLTKG

SEQ ID NO: 203379 - protein, 15 aa, Artificial Sequence
  Description of Artificial Sequence: Synthetic peptide
  Seed: EWLKTRPILSPLTKG
EWFKTMPFLSPLTKG

SEQ ID NO: 203380 - protein, 15 aa, Artificial Sequence
  Description of Artificial Sequence: Synthetic peptide
  Seed: EWLKTRPILSPLTKG
EWFKTMPFLSQLTKG

SEQ ID NO: 203381 - protein, 15 aa, Artificial Sequence
  Description of Artificial Sequence: Synthetic peptide
  Seed: EWLKTRPILSPLTKG
EWFKTMPFLSRLTKG

SEQ ID NO: 203382 - protein, 15 aa, Artificial Sequence
  Description of Artificial Sequence: Synthetic peptide
  Seed: EWLKTRPILSPLTKG
EWFKTMPFLSSLTKG

SEQ ID NO: 203383 - protein, 15 aa, Artificial Sequence
  Description of Artificial Sequence: Synthetic peptide
  Seed: EWLKTRPILSPLTKG
EWFKTMPFLSTLTKG

SEQ ID NO: 203384 - protein, 15 aa, Artificial Sequence
  Description of Artificial Sequence: Synthetic peptide
  Seed: EWLKTRPILSPLTKG
EWFKTMPFLSVLTKG

SEQ ID NO: 203385 - protein, 15 aa, Artificial Sequence
  Description of Artificial Sequence: Synthetic peptide
  Seed: EWLKTRPILSPLTKG
EWFKTMPFLSWLTKG

SEQ ID NO: 203386 - protein, 15 aa, Artificial Sequence
  Description of Artificial Sequence: Synthetic peptide
  Seed: EWLKTRPILSPLTKG
EWFKTMPFLSYLTKG

SEQ ID NO: 203387 - protein, 15 aa, Artificial Sequence
  Description of Artificial Sequence: Synthetic peptide
  Seed: EWLKTRPILSPLTKG
EWFKTMPILSFLTKG

SEQ ID NO: 203388 - protein, 15 aa, Artificial Sequence
  Description of Artificial Sequence: Synthetic peptide
  Seed: EWLKTRPILSPLTKG
EWFKTMPILSILTKG

SEQ ID NO: 203389 - protein, 15 aa, Artificial Sequence
  Description of Artificial Sequence: Synthetic peptide
  Seed: EWLKTRPILSPLTKG
EWFKTMPILSLLTKG

SEQ ID NO: 203390 - protein, 15 aa, Artificial Sequence
  Description of Artificial Sequence: Synthetic peptide
  Seed: EWLKTRPILSPLTKG
EWFKTMPILSMLTKG

SEQ ID NO: 203391 - protein, 15 aa, Artificial Sequence
  Description of Artificial Sequence: Synthetic peptide
  Seed: EWLKTRPILSPLTKG
EWFKTMPILSVLTKG

SEQ ID NO: 203392 - protein, 15 aa, Artificial Sequence
  Description of Artificial Sequence: Synthetic peptide
  Seed: EWLKTRPILSPLTKG
EWFKTMPKLSALTKG

SEQ ID NO: 203393 - protein, 15 aa, Artificial Sequence
  Description of Artificial Sequence: Synthetic peptide
  Seed: EWLKTRPILSPLTKG
EWFKTMPKLSGLTKG

SEQ ID NO: 203394 - protein, 15 aa, Artificial Sequence
  Description of Artificial Sequence: Synthetic peptide
  Seed: EWLKTRPILSPLTKG
EWFKTMPKLSHLTKG

SEQ ID NO: 203395 - protein, 15 aa, Artificial Sequence
  Description of Artificial Sequence: Synthetic peptide
  Seed: EWLKTRPILSPLTKG
EWFKTMPKLSILTKG

SEQ ID NO: 203396 - protein, 15 aa, Artificial Sequence
  Description of Artificial Sequence: Synthetic peptide
  Seed: EWLKTRPILSPLTKG
EWFKTMPKLSKLTKG

SEQ ID NO: 203397 - protein, 15 aa, Artificial Sequence
  Description of Artificial Sequence: Synthetic peptide
  Seed: EWLKTRPILSPLTKG
EWFKTMPKLSLLTKG

SEQ ID NO: 203398 - protein, 15 aa, Artificial Sequence
  Description of Artificial Sequence: Synthetic peptide
  Seed: EWLKTRPILSPLTKG
EWFKTMPKLSMLTKG

SEQ ID NO: 203399 - protein, 15 aa, Artificial Sequence
  Description of Artificial Sequence: Synthetic peptide
  Seed: EWLKTRPILSPLTKG
EWFKTMPKLSQLTKG

SEQ ID NO: 203400 - protein, 15 aa, Artificial Sequence
  Description of Artificial Sequence: Synthetic peptide
  Seed: EWLKTRPILSPLTKG
EWFKTMPKLSRLTKG

SEQ ID NO: 203401 - protein, 15 aa, Artificial Sequence
  Description of Artificial Sequence: Synthetic peptide
  Seed: EWLKTRPILSPLTKG
EWFKTMPKLSSLTKG

SEQ ID NO: 203402 - protein, 15 aa, Artificial Sequence
  Description of Artificial Sequence: Synthetic peptide
  Seed: EWLKTRPILSPLTKG
EWFKTMPKLSTLTKG

SEQ ID NO: 203403 - protein, 15 aa, Artificial Sequence
  Description of Artificial Sequence: Synthetic peptide
  Seed: EWLKTRPILSPLTKG
EWFKTMPKLSVLTKG

SEQ ID NO: 203404 - protein, 15 aa, Artificial Sequence
  Description of Artificial Sequence: Synthetic peptide
  Seed: EWLKTRPILSPLTKG
EWFKTMPKLSYLTKG

SEQ ID NO: 203405 - protein, 15 aa, Artificial Sequence
  Description of Artificial Sequence: Synthetic peptide
  Seed: EWLKTRPILSPLTKG
EWFKTMPLLSFLTKG

SEQ ID NO: 203406 - protein, 15 aa, Artificial Sequence
  Description of Artificial Sequence: Synthetic peptide
  Seed: EWLKTRPILSPLTKG
EWFKTMPLLSILTKG

SEQ ID NO: 203407 - protein, 15 aa, Artificial Sequence
  Description of Artificial Sequence: Synthetic peptide
  Seed: EWLKTRPILSPLTKG
EWFKTMPLLSLLTKG

SEQ ID NO: 203408 - protein, 15 aa, Artificial Sequence
  Description of Artificial Sequence: Synthetic peptide
  Seed: EWLKTRPILSPLTKG
EWFKTMPLLSMLTKG

SEQ ID NO: 203409 - protein, 15 aa, Artificial Sequence
  Description of Artificial Sequence: Synthetic peptide
  Seed: EWLKTRPILSPLTKG
EWFKTMPLLSTLTKG

SEQ ID NO: 203410 - protein, 15 aa, Artificial Sequence
  Description of Artificial Sequence: Synthetic peptide
  Seed: EWLKTRPILSPLTKG
EWFKTMPLLSVLTKG

SEQ ID NO: 203411 - protein, 15 aa, Artificial Sequence
  Description of Artificial Sequence: Synthetic peptide
  Seed: EWLKTRPILSPLTKG
EWFKTMPLLSYLTKG

SEQ ID NO: 203412 - protein, 15 aa, Artificial Sequence
  Description of Artificial Sequence: Synthetic peptide
  Seed: EWLKTRPILSPLTKG
EWFKTMPMLSFLTKG

SEQ ID NO: 203413 - protein, 15 aa, Artificial Sequence
  Description of Artificial Sequence: Synthetic peptide
  Seed: EWLKTRPILSPLTKG
EWFKTMPMLSILTKG

SEQ ID NO: 203414 - protein, 15 aa, Artificial Sequence
  Description of Artificial Sequence: Synthetic peptide
  Seed: EWLKTRPILSPLTKG
EWFKTMPMLSLLTKG

SEQ ID NO: 203415 - protein, 15 aa, Artificial Sequence
  Description of Artificial Sequence: Synthetic peptide
  Seed: EWLKTRPILSPLTKG
EWFKTMPMLSMLTKG

SEQ ID NO: 203416 - protein, 15 aa, Artificial Sequence
  Description of Artificial Sequence: Synthetic peptide
  Seed: EWLKTRPILSPLTKG
EWFKTMPMLSVLTKG

SEQ ID NO: 203417 - protein, 15 aa, Artificial Sequence
  Description of Artificial Sequence: Synthetic peptide
  Seed: EWLKTRPILSPLTKG
EWFKTMPRLSALTKG

SEQ ID NO: 203418 - protein, 15 aa, Artificial Sequence
  Description of Artificial Sequence: Synthetic peptide
  Seed: EWLKTRPILSPLTKG
EWFKTMPRLSFLTKG

SEQ ID NO: 203419 - protein, 15 aa, Artificial Sequence
  Description of Artificial Sequence: Synthetic peptide
  Seed: EWLKTRPILSPLTKG
EWFKTMPRLSGLTKG

SEQ ID NO: 203420 - protein, 15 aa, Artificial Sequence
  Description of Artificial Sequence: Synthetic peptide
  Seed: EWLKTRPILSPLTKG
EWFKTMPRLSHLTKG

SEQ ID NO: 203421 - protein, 15 aa, Artificial Sequence
  Description of Artificial Sequence: Synthetic peptide
  Seed: EWLKTRPILSPLTKG
EWFKTMPRLSILTKG

SEQ ID NO: 203422 - protein, 15 aa, Artificial Sequence
  Description of Artificial Sequence: Synthetic peptide
  Seed: EWLKTRPILSPLTKG
EWFKTMPRLSKLTKG

SEQ ID NO: 203423 - protein, 15 aa, Artificial Sequence
  Description of Artificial Sequence: Synthetic peptide
  Seed: EWLKTRPILSPLTKG
EWFKTMPRLSLLTKG

SEQ ID NO: 203424 - protein, 15 aa, Artificial Sequence
  Description of Artificial Sequence: Synthetic peptide
  Seed: EWLKTRPILSPLTKG
EWFKTMPRLSMLTKG

SEQ ID NO: 203425 - protein, 15 aa, Artificial Sequence
  Description of Artificial Sequence: Synthetic peptide
  Seed: EWLKTRPILSPLTKG
EWFKTMPRLSNLTKG

SEQ ID NO: 203426 - protein, 15 aa, Artificial Sequence
  Description of Artificial Sequence: Synthetic peptide
  Seed: EWLKTRPILSPLTKG
EWFKTMPRLSPLTKG

SEQ ID NO: 203427 - protein, 15 aa, Artificial Sequence
  Description of Artificial Sequence: Synthetic peptide
  Seed: EWLKTRPILSPLTKG
EWFKTMPRLSQLTKG

SEQ ID NO: 203428 - protein, 15 aa, Artificial Sequence
  Description of Artificial Sequence: Synthetic peptide
  Seed: EWLKTRPILSPLTKG
EWFKTMPRLSRLTKG

SEQ ID NO: 203429 - protein, 15 aa, Artificial Sequence
  Description of Artificial Sequence: Synthetic peptide
  Seed: EWLKTRPILSPLTKG
EWFKTMPRLSSLTKG

SEQ ID NO: 203430 - protein, 15 aa, Artificial Sequence
  Description of Artificial Sequence: Synthetic peptide
  Seed: EWLKTRPILSPLTKG
EWFKTMPRLSTLTKG

SEQ ID NO: 203431 - protein, 15 aa, Artificial Sequence
  Description of Artificial Sequence: Synthetic peptide
  Seed: EWLKTRPILSPLTKG
EWFKTMPRLSVLTKG

SEQ ID NO: 203432 - protein, 15 aa, Artificial Sequence
  Description of Artificial Sequence: Synthetic peptide
  Seed: EWLKTRPILSPLTKG
EWFKTMPRLSYLTKG

SEQ ID NO: 203433 - protein, 15 aa, Artificial Sequence
  Description of Artificial Sequence: Synthetic peptide
  Seed: EWLKTRPILSPLTKG
EWFKTMPVLSILTKG

SEQ ID NO: 203434 - protein, 15 aa, Artificial Sequence
  Description of Artificial Sequence: Synthetic peptide
  Seed: EWLKTRPILSPLTKG
EWFKTMPVLSLLTKG

SEQ ID NO: 203435 - protein, 15 aa, Artificial Sequence
  Description of Artificial Sequence: Synthetic peptide
  Seed: EWLKTRPILSPLTKG
EWFKTMPVLSVLTKG

SEQ ID NO: 203436 - protein, 15 aa, Artificial Sequence
  Description of Artificial Sequence: Synthetic peptide
  Seed: EWLKTRPILSPLTKG
EWFKTMPWLSFLTKG

SEQ ID NO: 203437 - protein, 15 aa, Artificial Sequence
  Description of Artificial Sequence: Synthetic peptide
  Seed: EWLKTRPILSPLTKG
EWFKTMPWLSILTKG

SEQ ID NO: 203438 - protein, 15 aa, Artificial Sequence
  Description of Artificial Sequence: Synthetic peptide
  Seed: EWLKTRPILSPLTKG
EWFKTMPWLSLLTKG

SEQ ID NO: 203439 - protein, 15 aa, Artificial Sequence
  Description of Artificial Sequence: Synthetic peptide
  Seed: EWLKTRPILSPLTKG
EWFKTMPWLSMLTKG

SEQ ID NO: 203440 - protein, 15 aa, Artificial Sequence
  Description of Artificial Sequence: Synthetic peptide
  Seed: EWLKTRPILSPLTKG
EWFKTMPWLSVLTKG

SEQ ID NO: 203441 - protein, 15 aa, Artificial Sequence
  Description of Artificial Sequence: Synthetic peptide
  Seed: EWLKTRPILSPLTKG
EWFKTMPYLSFLTKG

SEQ ID NO: 203442 - protein, 15 aa, Artificial Sequence
  Description of Artificial Sequence: Synthetic peptide
  Seed: EWLKTRPILSPLTKG
EWFKTMPYLSILTKG

SEQ ID NO: 203443 - protein, 15 aa, Artificial Sequence
  Description of Artificial Sequence: Synthetic peptide
  Seed: EWLKTRPILSPLTKG
EWFKTMPYLSLLTKG

SEQ ID NO: 203444 - protein, 15 aa, Artificial Sequence
  Description of Artificial Sequence: Synthetic peptide
  Seed: EWLKTRPILSPLTKG
EWFKTMPYLSMLTKG

SEQ ID NO: 203445 - protein, 15 aa, Artificial Sequence
  Description of Artificial Sequence: Synthetic peptide
  Seed: EWLKTRPILSPLTKG
EWFKTMPYLSVLTKG

SEQ ID NO: 203446 - protein, 15 aa, Artificial Sequence
  Description of Artificial Sequence: Synthetic peptide
  Seed: EWLKTRPILSPLTKG
EWFKTMPYLSYLTKG

SEQ ID NO: 203447 - protein, 15 aa, Artificial Sequence
  Description of Artificial Sequence: Synthetic peptide
  Seed: EWLKTRPILSPLTKG
EWFKTNPFLSALTKG

SEQ ID NO: 203448 - protein, 15 aa, Artificial Sequence
  Description of Artificial Sequence: Synthetic peptide
  Seed: EWLKTRPILSPLTKG
EWFKTNPFLSDLTKG

SEQ ID NO: 203449 - protein, 15 aa, Artificial Sequence
  Description of Artificial Sequence: Synthetic peptide
  Seed: EWLKTRPILSPLTKG
EWFKTNPFLSELTKG

SEQ ID NO: 203450 - protein, 15 aa, Artificial Sequence
  Description of Artificial Sequence: Synthetic peptide
  Seed: EWLKTRPILSPLTKG
EWFKTNPFLSFLTKG

SEQ ID NO: 203451 - protein, 15 aa, Artificial Sequence
  Description of Artificial Sequence: Synthetic peptide
  Seed: EWLKTRPILSPLTKG
EWFKTNPFLSILTKG

SEQ ID NO: 203452 - protein, 15 aa, Artificial Sequence
  Description of Artificial Sequence: Synthetic peptide
  Seed: EWLKTRPILSPLTKG
EWFKTNPFLSLLTKG

SEQ ID NO: 203453 - protein, 15 aa, Artificial Sequence
  Description of Artificial Sequence: Synthetic peptide
  Seed: EWLKTRPILSPLTKG
EWFKTNPFLSMLTKG

SEQ ID NO: 203454 - protein, 15 aa, Artificial Sequence
  Description of Artificial Sequence: Synthetic peptide
  Seed: EWLKTRPILSPLTKG
EWFKTNPFLSNLTKG

SEQ ID NO: 203455 - protein, 15 aa, Artificial Sequence
  Description of Artificial Sequence: Synthetic peptide
  Seed: EWLKTRPILSPLTKG
EWFKTNPFLSSLTKG

SEQ ID NO: 203456 - protein, 15 aa, Artificial Sequence
  Description of Artificial Sequence: Synthetic peptide
  Seed: EWLKTRPILSPLTKG
EWFKTNPFLSTLTKG

SEQ ID NO: 203457 - protein, 15 aa, Artificial Sequence
  Description of Artificial Sequence: Synthetic peptide
  Seed: EWLKTRPILSPLTKG
EWFKTNPFLSVLTKG

SEQ ID NO: 203458 - protein, 15 aa, Artificial Sequence
  Description of Artificial Sequence: Synthetic peptide
  Seed: EWLKTRPILSPLTKG
EWFKTNPFLSYLTKG

SEQ ID NO: 203459 - protein, 15 aa, Artificial Sequence
  Description of Artificial Sequence: Synthetic peptide
  Seed: EWLKTRPILSPLTKG
EWFKTNPLLSILTKG

SEQ ID NO: 203460 - protein, 15 aa, Artificial Sequence
  Description of Artificial Sequence: Synthetic peptide
  Seed: EWLKTRPILSPLTKG
EWFKTNPLLSLLTKG

SEQ ID NO: 203461 - protein, 15 aa, Artificial Sequence
  Description of Artificial Sequence: Synthetic peptide
  Seed: EWLKTRPILSPLTKG
EWFKTNPLLSVLTKG

SEQ ID NO: 203462 - protein, 15 aa, Artificial Sequence
  Description of Artificial Sequence: Synthetic peptide
  Seed: EWLKTRPILSPLTKG
EWFKTNPMLSLLTKG

SEQ ID NO: 203463 - protein, 15 aa, Artificial Sequence
  Description of Artificial Sequence: Synthetic peptide
  Seed: EWLKTRPILSPLTKG
EWFKTNPWLSLLTKG

SEQ ID NO: 203464 - protein, 15 aa, Artificial Sequence
  Description of Artificial Sequence: Synthetic peptide
  Seed: EWLKTRPILSPLTKG
EWFKTNPYLSILTKG

SEQ ID NO: 203465 - protein, 15 aa, Artificial Sequence
  Description of Artificial Sequence: Synthetic peptide
  Seed: EWLKTRPILSPLTKG
EWFKTNPYLSLLTKG

SEQ ID NO: 203466 - protein, 15 aa, Artificial Sequence
  Description of Artificial Sequence: Synthetic peptide
  Seed: EWLKTRPILSPLTKG
EWFKTNPYLSVLTKG

SEQ ID NO: 203467 - protein, 15 aa, Artificial Sequence
  Description of Artificial Sequence: Synthetic peptide
  Seed: EWLKTRPILSPLTKG
EWFKTPPFLSILTKG

SEQ ID NO: 203468 - protein, 15 aa, Artificial Sequence
  Description of Artificial Sequence: Synthetic peptide
  Seed: EWLKTRPILSPLTKG
EWFKTPPFLSLLTKG

SEQ ID NO: 203469 - protein, 15 aa, Artificial Sequence
  Description of Artificial Sequence: Synthetic peptide
  Seed: EWLKTRPILSPLTKG
EWFKTPPFLSVLTKG

SEQ ID NO: 203470 - protein, 15 aa, Artificial Sequence
  Description of Artificial Sequence: Synthetic peptide
  Seed: EWLKTRPILSPLTKG
EWFKTQPFLSALTKG

SEQ ID NO: 203471 - protein, 15 aa, Artificial Sequence
  Description of Artificial Sequence: Synthetic peptide
  Seed: EWLKTRPILSPLTKG
EWFKTQPFLSCLTKG

SEQ ID NO: 203472 - protein, 15 aa, Artificial Sequence
  Description of Artificial Sequence: Synthetic peptide
  Seed: EWLKTRPILSPLTKG
EWFKTQPFLSDLTKG

SEQ ID NO: 203473 - protein, 15 aa, Artificial Sequence
  Description of Artificial Sequence: Synthetic peptide
  Seed: EWLKTRPILSPLTKG
EWFKTQPFLSELTKG

SEQ ID NO: 203474 - protein, 15 aa, Artificial Sequence
  Description of Artificial Sequence: Synthetic peptide
  Seed: EWLKTRPILSPLTKG
EWFKTQPFLSFLTKG

SEQ ID NO: 203475 - protein, 15 aa, Artificial Sequence
  Description of Artificial Sequence: Synthetic peptide
  Seed: EWLKTRPILSPLTKG
EWFKTQPFLSILTKG

SEQ ID NO: 203476 - protein, 15 aa, Artificial Sequence
  Description of Artificial Sequence: Synthetic peptide
  Seed: EWLKTRPILSPLTKG
EWFKTQPFLSLLTKG

SEQ ID NO: 203477 - protein, 15 aa, Artificial Sequence
  Description of Artificial Sequence: Synthetic peptide
  Seed: EWLKTRPILSPLTKG
EWFKTQPFLSMLTKG

SEQ ID NO: 203478 - protein, 15 aa, Artificial Sequence
  Description of Artificial Sequence: Synthetic peptide
  Seed: EWLKTRPILSPLTKG
EWFKTQPFLSNLTKG

SEQ ID NO: 203479 - protein, 15 aa, Artificial Sequence
  Description of Artificial Sequence: Synthetic peptide
  Seed: EWLKTRPILSPLTKG
EWFKTQPFLSSLTKG

SEQ ID NO: 203480 - protein, 15 aa, Artificial Sequence
  Description of Artificial Sequence: Synthetic peptide
  Seed: EWLKTRPILSPLTKG
EWFKTQPFLSTLTKG

SEQ ID NO: 203481 - protein, 15 aa, Artificial Sequence
  Description of Artificial Sequence: Synthetic peptide
  Seed: EWLKTRPILSPLTKG
EWFKTQPFLSVLTKG

SEQ ID NO: 203482 - protein, 15 aa, Artificial Sequence
  Description of Artificial Sequence: Synthetic peptide
  Seed: EWLKTRPILSPLTKG
EWFKTQPFLSWLTKG

SEQ ID NO: 203483 - protein, 15 aa, Artificial Sequence
  Description of Artificial Sequence: Synthetic peptide
  Seed: EWLKTRPILSPLTKG
EWFKTQPFLSYLTKG

SEQ ID NO: 203484 - protein, 15 aa, Artificial Sequence
  Description of Artificial Sequence: Synthetic peptide
  Seed: EWLKTRPILSPLTKG
EWFKTQPILSILTKG

SEQ ID NO: 203485 - protein, 15 aa, Artificial Sequence
  Description of Artificial Sequence: Synthetic peptide
  Seed: EWLKTRPILSPLTKG
EWFKTQPILSLLTKG

SEQ ID NO: 203486 - protein, 15 aa, Artificial Sequence
  Description of Artificial Sequence: Synthetic peptide
  Seed: EWLKTRPILSPLTKG
EWFKTQPILSVLTKG

SEQ ID NO: 203487 - protein, 15 aa, Artificial Sequence
  Description of Artificial Sequence: Synthetic peptide
  Seed: EWLKTRPILSPLTKG
EWFKTQPLLSFLTKG

SEQ ID NO: 203488 - protein, 15 aa, Artificial Sequence
  Description of Artificial Sequence: Synthetic peptide
  Seed: EWLKTRPILSPLTKG
EWFKTQPLLSILTKG

SEQ ID NO: 203489 - protein, 15 aa, Artificial Sequence
  Description of Artificial Sequence: Synthetic peptide
  Seed: EWLKTRPILSPLTKG
EWFKTQPLLSLLTKG

SEQ ID NO: 203490 - protein, 15 aa, Artificial Sequence
  Description of Artificial Sequence: Synthetic peptide
  Seed: EWLKTRPILSPLTKG
EWFKTQPLLSMLTKG

SEQ ID NO: 203491 - protein, 15 aa, Artificial Sequence
  Description of Artificial Sequence: Synthetic peptide
  Seed: EWLKTRPILSPLTKG
EWFKTQPLLSVLTKG

SEQ ID NO: 203492 - protein, 15 aa, Artificial Sequence
  Description of Artificial Sequence: Synthetic peptide
  Seed: EWLKTRPILSPLTKG
EWFKTQPMLSILTKG

SEQ ID NO: 203493 - protein, 15 aa, Artificial Sequence
  Description of Artificial Sequence: Synthetic peptide
  Seed: EWLKTRPILSPLTKG
EWFKTQPMLSLLTKG

SEQ ID NO: 203494 - protein, 15 aa, Artificial Sequence
  Description of Artificial Sequence: Synthetic peptide
  Seed: EWLKTRPILSPLTKG
EWFKTQPMLSVLTKG

SEQ ID NO: 203495 - protein, 15 aa, Artificial Sequence
  Description of Artificial Sequence: Synthetic peptide
  Seed: EWLKTRPILSPLTKG
EWFKTQPWLSFLTKG

SEQ ID NO: 203496 - protein, 15 aa, Artificial Sequence
  Description of Artificial Sequence: Synthetic peptide
  Seed: EWLKTRPILSPLTKG
EWFKTQPWLSILTKG

SEQ ID NO: 203497 - protein, 15 aa, Artificial Sequence
  Description of Artificial Sequence: Synthetic peptide
  Seed: EWLKTRPILSPLTKG
EWFKTQPWLSLLTKG

SEQ ID NO: 203498 - protein, 15 aa, Artificial Sequence
  Description of Artificial Sequence: Synthetic peptide
  Seed: EWLKTRPILSPLTKG
EWFKTQPWLSVLTKG

SEQ ID NO: 203499 - protein, 15 aa, Artificial Sequence
  Description of Artificial Sequence: Synthetic peptide
  Seed: EWLKTRPILSPLTKG
EWFKTQPYLSILTKG

SEQ ID NO: 203500 - protein, 15 aa, Artificial Sequence
  Description of Artificial Sequence: Synthetic peptide
  Seed: EWLKTRPILSPLTKG
EWFKTQPYLSLLTKG

SEQ ID NO: 203501 - protein, 15 aa, Artificial Sequence
  Description of Artificial Sequence: Synthetic peptide
  Seed: EWLKTRPILSPLTKG
EWFKTQPYLSVLTKG

SEQ ID NO: 203502 - protein, 15 aa, Artificial Sequence
  Description of Artificial Sequence: Synthetic peptide
  Seed: EWLKTRPILSPLTKG
EWFKTRPFLSALTKG

SEQ ID NO: 203503 - protein, 15 aa, Artificial Sequence
  Description of Artificial Sequence: Synthetic peptide
  Seed: EWLKTRPILSPLTKG
EWFKTRPFLSFLTKG

SEQ ID NO: 203504 - protein, 15 aa, Artificial Sequence
  Description of Artificial Sequence: Synthetic peptide
  Seed: EWLKTRPILSPLTKG
EWFKTRPFLSILTKG

SEQ ID NO: 203505 - protein, 15 aa, Artificial Sequence
  Description of Artificial Sequence: Synthetic peptide
  Seed: EWLKTRPILSPLTKG
EWFKTRPFLSLLTKG

SEQ ID NO: 203506 - protein, 15 aa, Artificial Sequence
  Description of Artificial Sequence: Synthetic peptide
  Seed: EWLKTRPILSPLTKG
EWFKTRPFLSMLTKG

SEQ ID NO: 203507 - protein, 15 aa, Artificial Sequence
  Description of Artificial Sequence: Synthetic peptide
  Seed: EWLKTRPILSPLTKG
EWFKTRPFLSVLTKG

SEQ ID NO: 203508 - protein, 15 aa, Artificial Sequence
  Description of Artificial Sequence: Synthetic peptide
  Seed: EWLKTRPILSPLTKG
EWFKTRPLLSILTKG

SEQ ID NO: 203509 - protein, 15 aa, Artificial Sequence
  Description of Artificial Sequence: Synthetic peptide
  Seed: EWLKTRPILSPLTKG
EWFKTRPLLSLLTKG

SEQ ID NO: 203510 - protein, 15 aa, Artificial Sequence
  Description of Artificial Sequence: Synthetic peptide
  Seed: EWLKTRPILSPLTKG
EWFKTRPLLSVLTKG

SEQ ID NO: 203511 - protein, 15 aa, Artificial Sequence
  Description of Artificial Sequence: Synthetic peptide
  Seed: EWLKTRPILSPLTKG
EWFKTSPALSILTKG

SEQ ID NO: 203512 - protein, 15 aa, Artificial Sequence
  Description of Artificial Sequence: Synthetic peptide
  Seed: EWLKTRPILSPLTKG
EWFKTSPALSLLTKG

SEQ ID NO: 203513 - protein, 15 aa, Artificial Sequence
  Description of Artificial Sequence: Synthetic peptide
  Seed: EWLKTRPILSPLTKG
EWFKTSPFLSALTKG

SEQ ID NO: 203514 - protein, 15 aa, Artificial Sequence
  Description of Artificial Sequence: Synthetic peptide
  Seed: EWLKTRPILSPLTKG
EWFKTSPFLSCLTKG

SEQ ID NO: 203515 - protein, 15 aa, Artificial Sequence
  Description of Artificial Sequence: Synthetic peptide
  Seed: EWLKTRPILSPLTKG
EWFKTSPFLSDLTKG

SEQ ID NO: 203516 - protein, 15 aa, Artificial Sequence
  Description of Artificial Sequence: Synthetic peptide
  Seed: EWLKTRPILSPLTKG
EWFKTSPFLSELTKG

SEQ ID NO: 203517 - protein, 15 aa, Artificial Sequence
  Description of Artificial Sequence: Synthetic peptide
  Seed: EWLKTRPILSPLTKG
EWFKTSPFLSFLTKG

SEQ ID NO: 203518 - protein, 15 aa, Artificial Sequence
  Description of Artificial Sequence: Synthetic peptide
  Seed: EWLKTRPILSPLTKG
EWFKTSPFLSGLTKG

SEQ ID NO: 203519 - protein, 15 aa, Artificial Sequence
  Description of Artificial Sequence: Synthetic peptide
  Seed: EWLKTRPILSPLTKG
EWFKTSPFLSHLTKG

SEQ ID NO: 203520 - protein, 15 aa, Artificial Sequence
  Description of Artificial Sequence: Synthetic peptide
  Seed: EWLKTRPILSPLTKG
EWFKTSPFLSILTKG

SEQ ID NO: 203521 - protein, 15 aa, Artificial Sequence
  Description of Artificial Sequence: Synthetic peptide
  Seed: EWLKTRPILSPLTKG
EWFKTSPFLSLLTKG

SEQ ID NO: 203522 - protein, 15 aa, Artificial Sequence
  Description of Artificial Sequence: Synthetic peptide
  Seed: EWLKTRPILSPLTKG
EWFKTSPFLSMLTKG

SEQ ID NO: 203523 - protein, 15 aa, Artificial Sequence
  Description of Artificial Sequence: Synthetic peptide
  Seed: EWLKTRPILSPLTKG
EWFKTSPFLSNLTKG

SEQ ID NO: 203524 - protein, 15 aa, Artificial Sequence
  Description of Artificial Sequence: Synthetic peptide
  Seed: EWLKTRPILSPLTKG
EWFKTSPFLSPLTKG

SEQ ID NO: 203525 - protein, 15 aa, Artificial Sequence
  Description of Artificial Sequence: Synthetic peptide
  Seed: EWLKTRPILSPLTKG
EWFKTSPFLSQLTKG

SEQ ID NO: 203526 - protein, 15 aa, Artificial Sequence
  Description of Artificial Sequence: Synthetic peptide
  Seed: EWLKTRPILSPLTKG
EWFKTSPFLSSLTKG

SEQ ID NO: 203527 - protein, 15 aa, Artificial Sequence
  Description of Artificial Sequence: Synthetic peptide
  Seed: EWLKTRPILSPLTKG
EWFKTSPFLSTLTKG

SEQ ID NO: 203528 - protein, 15 aa, Artificial Sequence
  Description of Artificial Sequence: Synthetic peptide
  Seed: EWLKTRPILSPLTKG
EWFKTSPFLSVLTKG

SEQ ID NO: 203529 - protein, 15 aa, Artificial Sequence
  Description of Artificial Sequence: Synthetic peptide
  Seed: EWLKTRPILSPLTKG
EWFKTSPFLSWLTKG

SEQ ID NO: 203530 - protein, 15 aa, Artificial Sequence
  Description of Artificial Sequence: Synthetic peptide
  Seed: EWLKTRPILSPLTKG
EWFKTSPFLSYLTKG

SEQ ID NO: 203531 - protein, 15 aa, Artificial Sequence
  Description of Artificial Sequence: Synthetic peptide
  Seed: EWLKTRPILSPLTKG
EWFKTSPILSFLTKG

SEQ ID NO: 203532 - protein, 15 aa, Artificial Sequence
  Description of Artificial Sequence: Synthetic peptide
  Seed: EWLKTRPILSPLTKG
EWFKTSPILSILTKG

SEQ ID NO: 203533 - protein, 15 aa, Artificial Sequence
  Description of Artificial Sequence: Synthetic peptide
  Seed: EWLKTRPILSPLTKG
EWFKTSPILSLLTKG

SEQ ID NO: 203534 - protein, 15 aa, Artificial Sequence
  Description of Artificial Sequence: Synthetic peptide
  Seed: EWLKTRPILSPLTKG
EWFKTSPILSMLTKG

SEQ ID NO: 203535 - protein, 15 aa, Artificial Sequence
  Description of Artificial Sequence: Synthetic peptide
  Seed: EWLKTRPILSPLTKG
EWFKTSPILSVLTKG

SEQ ID NO: 203536 - protein, 15 aa, Artificial Sequence
  Description of Artificial Sequence: Synthetic peptide
  Seed: EWLKTRPILSPLTKG
EWFKTSPLLSFLTKG

SEQ ID NO: 203537 - protein, 15 aa, Artificial Sequence
  Description of Artificial Sequence: Synthetic peptide
  Seed: EWLKTRPILSPLTKG
EWFKTSPLLSILTKG

SEQ ID NO: 203538 - protein, 15 aa, Artificial Sequence
  Description of Artificial Sequence: Synthetic peptide
  Seed: EWLKTRPILSPLTKG
EWFKTSPLLSLLTKG

SEQ ID NO: 203539 - protein, 15 aa, Artificial Sequence
  Description of Artificial Sequence: Synthetic peptide
  Seed: EWLKTRPILSPLTKG
EWFKTSPLLSMLTKG

SEQ ID NO: 203540 - protein, 15 aa, Artificial Sequence
  Description of Artificial Sequence: Synthetic peptide
  Seed: EWLKTRPILSPLTKG
EWFKTSPLLSVLTKG

SEQ ID NO: 203541 - protein, 15 aa, Artificial Sequence
  Description of Artificial Sequence: Synthetic peptide
  Seed: EWLKTRPILSPLTKG
EWFKTSPLLSYLTKG

SEQ ID NO: 203542 - protein, 15 aa, Artificial Sequence
  Description of Artificial Sequence: Synthetic peptide
  Seed: EWLKTRPILSPLTKG
EWFKTSPMLSFLTKG

SEQ ID NO: 203543 - protein, 15 aa, Artificial Sequence
  Description of Artificial Sequence: Synthetic peptide
  Seed: EWLKTRPILSPLTKG
EWFKTSPMLSILTKG

SEQ ID NO: 203544 - protein, 15 aa, Artificial Sequence
  Description of Artificial Sequence: Synthetic peptide
  Seed: EWLKTRPILSPLTKG
EWFKTSPMLSLLTKG

SEQ ID NO: 203545 - protein, 15 aa, Artificial Sequence
  Description of Artificial Sequence: Synthetic peptide
  Seed: EWLKTRPILSPLTKG
EWFKTSPMLSMLTKG

SEQ ID NO: 203546 - protein, 15 aa, Artificial Sequence
  Description of Artificial Sequence: Synthetic peptide
  Seed: EWLKTRPILSPLTKG
EWFKTSPMLSVLTKG

SEQ ID NO: 203547 - protein, 15 aa, Artificial Sequence
  Description of Artificial Sequence: Synthetic peptide
  Seed: EWLKTRPILSPLTKG
EWFKTSPVLSILTKG

SEQ ID NO: 203548 - protein, 15 aa, Artificial Sequence
  Description of Artificial Sequence: Synthetic peptide
  Seed: EWLKTRPILSPLTKG
EWFKTSPVLSLLTKG

SEQ ID NO: 203549 - protein, 15 aa, Artificial Sequence
  Description of Artificial Sequence: Synthetic peptide
  Seed: EWLKTRPILSPLTKG
EWFKTSPVLSVLTKG

SEQ ID NO: 203550 - protein, 15 aa, Artificial Sequence
  Description of Artificial Sequence: Synthetic peptide
  Seed: EWLKTRPILSPLTKG
EWFKTSPWLSFLTKG

SEQ ID NO: 203551 - protein, 15 aa, Artificial Sequence
  Description of Artificial Sequence: Synthetic peptide
  Seed: EWLKTRPILSPLTKG
EWFKTSPWLSILTKG

SEQ ID NO: 203552 - protein, 15 aa, Artificial Sequence
  Description of Artificial Sequence: Synthetic peptide
  Seed: EWLKTRPILSPLTKG
EWFKTSPWLSLLTKG

SEQ ID NO: 203553 - protein, 15 aa, Artificial Sequence
  Description of Artificial Sequence: Synthetic peptide
  Seed: EWLKTRPILSPLTKG
EWFKTSPWLSMLTKG

SEQ ID NO: 203554 - protein, 15 aa, Artificial Sequence
  Description of Artificial Sequence: Synthetic peptide
  Seed: EWLKTRPILSPLTKG
EWFKTSPWLSVLTKG

SEQ ID NO: 203555 - protein, 15 aa, Artificial Sequence
  Description of Artificial Sequence: Synthetic peptide
  Seed: EWLKTRPILSPLTKG
EWFKTSPWLSYLTKG

SEQ ID NO: 203556 - protein, 15 aa, Artificial Sequence
  Description of Artificial Sequence: Synthetic peptide
  Seed: EWLKTRPILSPLTKG
EWFKTSPYLSFLTKG

SEQ ID NO: 203557 - protein, 15 aa, Artificial Sequence
  Description of Artificial Sequence: Synthetic peptide
  Seed: EWLKTRPILSPLTKG
EWFKTSPYLSILTKG

SEQ ID NO: 203558 - protein, 15 aa, Artificial Sequence
  Description of Artificial Sequence: Synthetic peptide
  Seed: EWLKTRPILSPLTKG
EWFKTSPYLSLLTKG

SEQ ID NO: 203559 - protein, 15 aa, Artificial Sequence
  Description of Artificial Sequence: Synthetic peptide
  Seed: EWLKTRPILSPLTKG
EWFKTSPYLSMLTKG

SEQ ID NO: 203560 - protein, 15 aa, Artificial Sequence
  Description of Artificial Sequence: Synthetic peptide
  Seed: EWLKTRPILSPLTKG
EWFKTSPYLSVLTKG

SEQ ID NO: 203561 - protein, 15 aa, Artificial Sequence
  Description of Artificial Sequence: Synthetic peptide
  Seed: EWLKTRPILSPLTKG
EWFKTSPYLSYLTKG

SEQ ID NO: 203562 - protein, 15 aa, Artificial Sequence
  Description of Artificial Sequence: Synthetic peptide
  Seed: EWLKTRPILSPLTKG
EWFKTTPALSFLTKG

SEQ ID NO: 203563 - protein, 15 aa, Artificial Sequence
  Description of Artificial Sequence: Synthetic peptide
  Seed: EWLKTRPILSPLTKG
EWFKTTPALSILTKG

SEQ ID NO: 203564 - protein, 15 aa, Artificial Sequence
  Description of Artificial Sequence: Synthetic peptide
  Seed: EWLKTRPILSPLTKG
EWFKTTPALSLLTKG

SEQ ID NO: 203565 - protein, 15 aa, Artificial Sequence
  Description of Artificial Sequence: Synthetic peptide
  Seed: EWLKTRPILSPLTKG
EWFKTTPALSVLTKG

SEQ ID NO: 203566 - protein, 15 aa, Artificial Sequence
  Description of Artificial Sequence: Synthetic peptide
  Seed: EWLKTRPILSPLTKG
EWFKTTPFLSALTKG

SEQ ID NO: 203567 - protein, 15 aa, Artificial Sequence
  Description of Artificial Sequence: Synthetic peptide
  Seed: EWLKTRPILSPLTKG
EWFKTTPFLSCLTKG

SEQ ID NO: 203568 - protein, 15 aa, Artificial Sequence
  Description of Artificial Sequence: Synthetic peptide
  Seed: EWLKTRPILSPLTKG
EWFKTTPFLSDLTKG

SEQ ID NO: 203569 - protein, 15 aa, Artificial Sequence
  Description of Artificial Sequence: Synthetic peptide
  Seed: EWLKTRPILSPLTKG
EWFKTTPFLSELTKG

SEQ ID NO: 203570 - protein, 15 aa, Artificial Sequence
  Description of Artificial Sequence: Synthetic peptide
  Seed: EWLKTRPILSPLTKG
EWFKTTPFLSFLTKG

SEQ ID NO: 203571 - protein, 15 aa, Artificial Sequence
  Description of Artificial Sequence: Synthetic peptide
  Seed: EWLKTRPILSPLTKG
EWFKTTPFLSGLTKG

SEQ ID NO: 203572 - protein, 15 aa, Artificial Sequence
  Description of Artificial Sequence: Synthetic peptide
  Seed: EWLKTRPILSPLTKG
EWFKTTPFLSHLTKG

SEQ ID NO: 203573 - protein, 15 aa, Artificial Sequence
  Description of Artificial Sequence: Synthetic peptide
  Seed: EWLKTRPILSPLTKG
EWFKTTPFLSILTKG

SEQ ID NO: 203574 - protein, 15 aa, Artificial Sequence
  Description of Artificial Sequence: Synthetic peptide
  Seed: EWLKTRPILSPLTKG
EWFKTTPFLSLLTKG

SEQ ID NO: 203575 - protein, 15 aa, Artificial Sequence
  Description of Artificial Sequence: Synthetic peptide
  Seed: EWLKTRPILSPLTKG
EWFKTTPFLSMLTKG

SEQ ID NO: 203576 - protein, 15 aa, Artificial Sequence
  Description of Artificial Sequence: Synthetic peptide
  Seed: EWLKTRPILSPLTKG
EWFKTTPFLSNLTKG

SEQ ID NO: 203577 - protein, 15 aa, Artificial Sequence
  Description of Artificial Sequence: Synthetic peptide
  Seed: EWLKTRPILSPLTKG
EWFKTTPFLSPLTKG

SEQ ID NO: 203578 - protein, 15 aa, Artificial Sequence
  Description of Artificial Sequence: Synthetic peptide
  Seed: EWLKTRPILSPLTKG
EWFKTTPFLSQLTKG

SEQ ID NO: 203579 - protein, 15 aa, Artificial Sequence
  Description of Artificial Sequence: Synthetic peptide
  Seed: EWLKTRPILSPLTKG
EWFKTTPFLSRLTKG

SEQ ID NO: 203580 - protein, 15 aa, Artificial Sequence
  Description of Artificial Sequence: Synthetic peptide
  Seed: EWLKTRPILSPLTKG
EWFKTTPFLSSLTKG

SEQ ID NO: 203581 - protein, 15 aa, Artificial Sequence
  Description of Artificial Sequence: Synthetic peptide
  Seed: EWLKTRPILSPLTKG
EWFKTTPFLSTLTKG

SEQ ID NO: 203582 - protein, 15 aa, Artificial Sequence
  Description of Artificial Sequence: Synthetic peptide
  Seed: EWLKTRPILSPLTKG
EWFKTTPFLSVLTKG

SEQ ID NO: 203583 - protein, 15 aa, Artificial Sequence
  Description of Artificial Sequence: Synthetic peptide
  Seed: EWLKTRPILSPLTKG
EWFKTTPFLSWLTKG

SEQ ID NO: 203584 - protein, 15 aa, Artificial Sequence
  Description of Artificial Sequence: Synthetic peptide
  Seed: EWLKTRPILSPLTKG
EWFKTTPFLSYLTKG

SEQ ID NO: 203585 - protein, 15 aa, Artificial Sequence
  Description of Artificial Sequence: Synthetic peptide
  Seed: EWLKTRPILSPLTKG
EWFKTTPILSFLTKG

SEQ ID NO: 203586 - protein, 15 aa, Artificial Sequence
  Description of Artificial Sequence: Synthetic peptide
  Seed: EWLKTRPILSPLTKG
EWFKTTPILSILTKG

SEQ ID NO: 203587 - protein, 15 aa, Artificial Sequence
  Description of Artificial Sequence: Synthetic peptide
  Seed: EWLKTRPILSPLTKG
EWFKTTPILSLLTKG

SEQ ID NO: 203588 - protein, 15 aa, Artificial Sequence
  Description of Artificial Sequence: Synthetic peptide
  Seed: EWLKTRPILSPLTKG
EWFKTTPILSMLTKG

SEQ ID NO: 203589 - protein, 15 aa, Artificial Sequence
  Description of Artificial Sequence: Synthetic peptide
  Seed: EWLKTRPILSPLTKG
EWFKTTPILSVLTKG

SEQ ID NO: 203590 - protein, 15 aa, Artificial Sequence
  Description of Artificial Sequence: Synthetic peptide
  Seed: EWLKTRPILSPLTKG
EWFKTTPILSYLTKG

SEQ ID NO: 203591 - protein, 15 aa, Artificial Sequence
  Description of Artificial Sequence: Synthetic peptide
  Seed: EWLKTRPILSPLTKG
EWFKTTPLLSALTKG

SEQ ID NO: 203592 - protein, 15 aa, Artificial Sequence
  Description of Artificial Sequence: Synthetic peptide
  Seed: EWLKTRPILSPLTKG
EWFKTTPLLSFLTKG

SEQ ID NO: 203593 - protein, 15 aa, Artificial Sequence
  Description of Artificial Sequence: Synthetic peptide
  Seed: EWLKTRPILSPLTKG
EWFKTTPLLSILTKG

SEQ ID NO: 203594 - protein, 15 aa, Artificial Sequence
  Description of Artificial Sequence: Synthetic peptide
  Seed: EWLKTRPILSPLTKG
EWFKTTPLLSLLTKG

SEQ ID NO: 203595 - protein, 15 aa, Artificial Sequence
  Description of Artificial Sequence: Synthetic peptide
  Seed: EWLKTRPILSPLTKG
EWFKTTPLLSMLTKG

SEQ ID NO: 203596 - protein, 15 aa, Artificial Sequence
  Description of Artificial Sequence: Synthetic peptide
  Seed: EWLKTRPILSPLTKG
EWFKTTPLLSSLTKG

SEQ ID NO: 203597 - protein, 15 aa, Artificial Sequence
  Description of Artificial Sequence: Synthetic peptide
  Seed: EWLKTRPILSPLTKG
EWFKTTPLLSTLTKG

SEQ ID NO: 203598 - protein, 15 aa, Artificial Sequence
  Description of Artificial Sequence: Synthetic peptide
  Seed: EWLKTRPILSPLTKG
EWFKTTPLLSVLTKG

SEQ ID NO: 203599 - protein, 15 aa, Artificial Sequence
  Description of Artificial Sequence: Synthetic peptide
  Seed: EWLKTRPILSPLTKG
EWFKTTPLLSYLTKG

SEQ ID NO: 203600 - protein, 15 aa, Artificial Sequence
  Description of Artificial Sequence: Synthetic peptide
  Seed: EWLKTRPILSPLTKG
EWFKTTPMLSFLTKG

SEQ ID NO: 203601 - protein, 15 aa, Artificial Sequence
  Description of Artificial Sequence: Synthetic peptide
  Seed: EWLKTRPILSPLTKG
EWFKTTPMLSILTKG

SEQ ID NO: 203602 - protein, 15 aa, Artificial Sequence
  Description of Artificial Sequence: Synthetic peptide
  Seed: EWLKTRPILSPLTKG
EWFKTTPMLSLLTKG

SEQ ID NO: 203603 - protein, 15 aa, Artificial Sequence
  Description of Artificial Sequence: Synthetic peptide
  Seed: EWLKTRPILSPLTKG
EWFKTTPMLSMLTKG

SEQ ID NO: 203604 - protein, 15 aa, Artificial Sequence
  Description of Artificial Sequence: Synthetic peptide
  Seed: EWLKTRPILSPLTKG
EWFKTTPMLSVLTKG

SEQ ID NO: 203605 - protein, 15 aa, Artificial Sequence
  Description of Artificial Sequence: Synthetic peptide
  Seed: EWLKTRPILSPLTKG
EWFKTTPVLSILTKG

SEQ ID NO: 203606 - protein, 15 aa, Artificial Sequence
  Description of Artificial Sequence: Synthetic peptide
  Seed: EWLKTRPILSPLTKG
EWFKTTPVLSLLTKG

SEQ ID NO: 203607 - protein, 15 aa, Artificial Sequence
  Description of Artificial Sequence: Synthetic peptide
  Seed: EWLKTRPILSPLTKG
EWFKTTPVLSVLTKG

SEQ ID NO: 203608 - protein, 15 aa, Artificial Sequence
  Description of Artificial Sequence: Synthetic peptide
  Seed: EWLKTRPILSPLTKG
EWFKTTPWLSALTKG

SEQ ID NO: 203609 - protein, 15 aa, Artificial Sequence
  Description of Artificial Sequence: Synthetic peptide
  Seed: EWLKTRPILSPLTKG
EWFKTTPWLSFLTKG

SEQ ID NO: 203610 - protein, 15 aa, Artificial Sequence
  Description of Artificial Sequence: Synthetic peptide
  Seed: EWLKTRPILSPLTKG
EWFKTTPWLSILTKG

SEQ ID NO: 203611 - protein, 15 aa, Artificial Sequence
  Description of Artificial Sequence: Synthetic peptide
  Seed: EWLKTRPILSPLTKG
EWFKTTPWLSLLTKG

SEQ ID NO: 203612 - protein, 15 aa, Artificial Sequence
  Description of Artificial Sequence: Synthetic peptide
  Seed: EWLKTRPILSPLTKG
EWFKTTPWLSMLTKG

SEQ ID NO: 203613 - protein, 15 aa, Artificial Sequence
  Description of Artificial Sequence: Synthetic peptide
  Seed: EWLKTRPILSPLTKG
EWFKTTPWLSSLTKG

SEQ ID NO: 203614 - protein, 15 aa, Artificial Sequence
  Description of Artificial Sequence: Synthetic peptide
  Seed: EWLKTRPILSPLTKG
EWFKTTPWLSTLTKG

SEQ ID NO: 203615 - protein, 15 aa, Artificial Sequence
  Description of Artificial Sequence: Synthetic peptide
  Seed: EWLKTRPILSPLTKG
EWFKTTPWLSVLTKG

SEQ ID NO: 203616 - protein, 15 aa, Artificial Sequence
  Description of Artificial Sequence: Synthetic peptide
  Seed: EWLKTRPILSPLTKG
EWFKTTPWLSYLTKG

SEQ ID NO: 203617 - protein, 15 aa, Artificial Sequence
  Description of Artificial Sequence: Synthetic peptide
  Seed: EWLKTRPILSPLTKG
EWFKTTPYLSALTKG

SEQ ID NO: 203618 - protein, 15 aa, Artificial Sequence
  Description of Artificial Sequence: Synthetic peptide
  Seed: EWLKTRPILSPLTKG
EWFKTTPYLSFLTKG

SEQ ID NO: 203619 - protein, 15 aa, Artificial Sequence
  Description of Artificial Sequence: Synthetic peptide
  Seed: EWLKTRPILSPLTKG
EWFKTTPYLSILTKG

SEQ ID NO: 203620 - protein, 15 aa, Artificial Sequence
  Description of Artificial Sequence: Synthetic peptide
  Seed: EWLKTRPILSPLTKG
EWFKTTPYLSLLTKG

SEQ ID NO: 203621 - protein, 15 aa, Artificial Sequence
  Description of Artificial Sequence: Synthetic peptide
  Seed: EWLKTRPILSPLTKG
EWFKTTPYLSMLTKG

SEQ ID NO: 203622 - protein, 15 aa, Artificial Sequence
  Description of Artificial Sequence: Synthetic peptide
  Seed: EWLKTRPILSPLTKG
EWFKTTPYLSTLTKG

SEQ ID NO: 203623 - protein, 15 aa, Artificial Sequence
  Description of Artificial Sequence: Synthetic peptide
  Seed: EWLKTRPILSPLTKG
EWFKTTPYLSVLTKG

SEQ ID NO: 203624 - protein, 15 aa, Artificial Sequence
  Description of Artificial Sequence: Synthetic peptide
  Seed: EWLKTRPILSPLTKG
EWFKTTPYLSYLTKG

SEQ ID NO: 203625 - protein, 15 aa, Artificial Sequence
  Description of Artificial Sequence: Synthetic peptide
  Seed: EWLKTRPILSPLTKG
EWFKTVPALSFLTKG

SEQ ID NO: 203626 - protein, 15 aa, Artificial Sequence
  Description of Artificial Sequence: Synthetic peptide
  Seed: EWLKTRPILSPLTKG
EWFKTVPALSILTKG

SEQ ID NO: 203627 - protein, 15 aa, Artificial Sequence
  Description of Artificial Sequence: Synthetic peptide
  Seed: EWLKTRPILSPLTKG
EWFKTVPALSLLTKG

SEQ ID NO: 203628 - protein, 15 aa, Artificial Sequence
  Description of Artificial Sequence: Synthetic peptide
  Seed: EWLKTRPILSPLTKG
EWFKTVPALSVLTKG

SEQ ID NO: 203629 - protein, 15 aa, Artificial Sequence
  Description of Artificial Sequence: Synthetic peptide
  Seed: EWLKTRPILSPLTKG
EWFKTVPFLSALTKG

SEQ ID NO: 203630 - protein, 15 aa, Artificial Sequence
  Description of Artificial Sequence: Synthetic peptide
  Seed: EWLKTRPILSPLTKG
EWFKTVPFLSCLTKG

SEQ ID NO: 203631 - protein, 15 aa, Artificial Sequence
  Description of Artificial Sequence: Synthetic peptide
  Seed: EWLKTRPILSPLTKG
EWFKTVPFLSDLTKG

SEQ ID NO: 203632 - protein, 15 aa, Artificial Sequence
  Description of Artificial Sequence: Synthetic peptide
  Seed: EWLKTRPILSPLTKG
EWFKTVPFLSELTKG

SEQ ID NO: 203633 - protein, 15 aa, Artificial Sequence
  Description of Artificial Sequence: Synthetic peptide
  Seed: EWLKTRPILSPLTKG
EWFKTVPFLSFLTKG

SEQ ID NO: 203634 - protein, 15 aa, Artificial Sequence
  Description of Artificial Sequence: Synthetic peptide
  Seed: EWLKTRPILSPLTKG
EWFKTVPFLSGLTKG

SEQ ID NO: 203635 - protein, 15 aa, Artificial Sequence
  Description of Artificial Sequence: Synthetic peptide
  Seed: EWLKTRPILSPLTKG
EWFKTVPFLSHLTKG

SEQ ID NO: 203636 - protein, 15 aa, Artificial Sequence
  Description of Artificial Sequence: Synthetic peptide
  Seed: EWLKTRPILSPLTKG
EWFKTVPFLSILTKG

SEQ ID NO: 203637 - protein, 15 aa, Artificial Sequence
  Description of Artificial Sequence: Synthetic peptide
  Seed: EWLKTRPILSPLTKG
EWFKTVPFLSKLTKG

SEQ ID NO: 203638 - protein, 15 aa, Artificial Sequence
  Description of Artificial Sequence: Synthetic peptide
  Seed: EWLKTRPILSPLTKG
EWFKTVPFLSLLTKG

SEQ ID NO: 203639 - protein, 15 aa, Artificial Sequence
  Description of Artificial Sequence: Synthetic peptide
  Seed: EWLKTRPILSPLTKG
EWFKTVPFLSMLTKG

SEQ ID NO: 203640 - protein, 15 aa, Artificial Sequence
  Description of Artificial Sequence: Synthetic peptide
  Seed: EWLKTRPILSPLTKG
EWFKTVPFLSNLTKG

SEQ ID NO: 203641 - protein, 15 aa, Artificial Sequence
  Description of Artificial Sequence: Synthetic peptide
  Seed: EWLKTRPILSPLTKG
EWFKTVPFLSPLTKG

SEQ ID NO: 203642 - protein, 15 aa, Artificial Sequence
  Description of Artificial Sequence: Synthetic peptide
  Seed: EWLKTRPILSPLTKG
EWFKTVPFLSQLTKG

SEQ ID NO: 203643 - protein, 15 aa, Artificial Sequence
  Description of Artificial Sequence: Synthetic peptide
  Seed: EWLKTRPILSPLTKG
EWFKTVPFLSRLTKG

SEQ ID NO: 203644 - protein, 15 aa, Artificial Sequence
  Description of Artificial Sequence: Synthetic peptide
  Seed: EWLKTRPILSPLTKG
EWFKTVPFLSSLTKG

SEQ ID NO: 203645 - protein, 15 aa, Artificial Sequence
  Description of Artificial Sequence: Synthetic peptide
  Seed: EWLKTRPILSPLTKG
EWFKTVPFLSTLTKG

SEQ ID NO: 203646 - protein, 15 aa, Artificial Sequence
  Description of Artificial Sequence: Synthetic peptide
  Seed: EWLKTRPILSPLTKG
EWFKTVPFLSVLTKG

SEQ ID NO: 203647 - protein, 15 aa, Artificial Sequence
  Description of Artificial Sequence: Synthetic peptide
  Seed: EWLKTRPILSPLTKG
EWFKTVPFLSWLTKG

SEQ ID NO: 203648 - protein, 15 aa, Artificial Sequence
  Description of Artificial Sequence: Synthetic peptide
  Seed: EWLKTRPILSPLTKG
EWFKTVPFLSYLTKG

SEQ ID NO: 203649 - protein, 15 aa, Artificial Sequence
  Description of Artificial Sequence: Synthetic peptide
  Seed: EWLKTRPILSPLTKG
EWFKTVPILSFLTKG

SEQ ID NO: 203650 - protein, 15 aa, Artificial Sequence
  Description of Artificial Sequence: Synthetic peptide
  Seed: EWLKTRPILSPLTKG
EWFKTVPILSILTKG

SEQ ID NO: 203651 - protein, 15 aa, Artificial Sequence
  Description of Artificial Sequence: Synthetic peptide
  Seed: EWLKTRPILSPLTKG
EWFKTVPILSLLTKG

SEQ ID NO: 203652 - protein, 15 aa, Artificial Sequence
  Description of Artificial Sequence: Synthetic peptide
  Seed: EWLKTRPILSPLTKG
EWFKTVPILSMLTKG

SEQ ID NO: 203653 - protein, 15 aa, Artificial Sequence
  Description of Artificial Sequence: Synthetic peptide
  Seed: EWLKTRPILSPLTKG
EWFKTVPILSVLTKG

SEQ ID NO: 203654 - protein, 15 aa, Artificial Sequence
  Description of Artificial Sequence: Synthetic peptide
  Seed: EWLKTRPILSPLTKG
EWFKTVPILSYLTKG

SEQ ID NO: 203655 - protein, 15 aa, Artificial Sequence
  Description of Artificial Sequence: Synthetic peptide
  Seed: EWLKTRPILSPLTKG
EWFKTVPKLSALTKG

SEQ ID NO: 203656 - protein, 15 aa, Artificial Sequence
  Description of Artificial Sequence: Synthetic peptide
  Seed: EWLKTRPILSPLTKG
EWFKTVPKLSGLTKG

SEQ ID NO: 203657 - protein, 15 aa, Artificial Sequence
  Description of Artificial Sequence: Synthetic peptide
  Seed: EWLKTRPILSPLTKG
EWFKTVPKLSRLTKG

SEQ ID NO: 203658 - protein, 15 aa, Artificial Sequence
  Description of Artificial Sequence: Synthetic peptide
  Seed: EWLKTRPILSPLTKG
EWFKTVPKLSSLTKG

SEQ ID NO: 203659 - protein, 15 aa, Artificial Sequence
  Description of Artificial Sequence: Synthetic peptide
  Seed: EWLKTRPILSPLTKG
EWFKTVPLLSALTKG

SEQ ID NO: 203660 - protein, 15 aa, Artificial Sequence
  Description of Artificial Sequence: Synthetic peptide
  Seed: EWLKTRPILSPLTKG
EWFKTVPLLSELTKG

SEQ ID NO: 203661 - protein, 15 aa, Artificial Sequence
  Description of Artificial Sequence: Synthetic peptide
  Seed: EWLKTRPILSPLTKG
EWFKTVPLLSFLTKG

SEQ ID NO: 203662 - protein, 15 aa, Artificial Sequence
  Description of Artificial Sequence: Synthetic peptide
  Seed: EWLKTRPILSPLTKG
EWFKTVPLLSILTKG

SEQ ID NO: 203663 - protein, 15 aa, Artificial Sequence
  Description of Artificial Sequence: Synthetic peptide
  Seed: EWLKTRPILSPLTKG
EWFKTVPLLSLLTKG

SEQ ID NO: 203664 - protein, 15 aa, Artificial Sequence
  Description of Artificial Sequence: Synthetic peptide
  Seed: EWLKTRPILSPLTKG
EWFKTVPLLSMLTKG

SEQ ID NO: 203665 - protein, 15 aa, Artificial Sequence
  Description of Artificial Sequence: Synthetic peptide
  Seed: EWLKTRPILSPLTKG
EWFKTVPLLSNLTKG

SEQ ID NO: 203666 - protein, 15 aa, Artificial Sequence
  Description of Artificial Sequence: Synthetic peptide
  Seed: EWLKTRPILSPLTKG
EWFKTVPLLSSLTKG

SEQ ID NO: 203667 - protein, 15 aa, Artificial Sequence
  Description of Artificial Sequence: Synthetic peptide
  Seed: EWLKTRPILSPLTKG
EWFKTVPLLSTLTKG

SEQ ID NO: 203668 - protein, 15 aa, Artificial Sequence
  Description of Artificial Sequence: Synthetic peptide
  Seed: EWLKTRPILSPLTKG
EWFKTVPLLSVLTKG

SEQ ID NO: 203669 - protein, 15 aa, Artificial Sequence
  Description of Artificial Sequence: Synthetic peptide
  Seed: EWLKTRPILSPLTKG
EWFKTVPLLSYLTKG

SEQ ID NO: 203670 - protein, 15 aa, Artificial Sequence
  Description of Artificial Sequence: Synthetic peptide
  Seed: EWLKTRPILSPLTKG
EWFKTVPMLSFLTKG

SEQ ID NO: 203671 - protein, 15 aa, Artificial Sequence
  Description of Artificial Sequence: Synthetic peptide
  Seed: EWLKTRPILSPLTKG
EWFKTVPMLSILTKG

SEQ ID NO: 203672 - protein, 15 aa, Artificial Sequence
  Description of Artificial Sequence: Synthetic peptide
  Seed: EWLKTRPILSPLTKG
EWFKTVPMLSLLTKG

SEQ ID NO: 203673 - protein, 15 aa, Artificial Sequence
  Description of Artificial Sequence: Synthetic peptide
  Seed: EWLKTRPILSPLTKG
EWFKTVPMLSMLTKG

SEQ ID NO: 203674 - protein, 15 aa, Artificial Sequence
  Description of Artificial Sequence: Synthetic peptide
  Seed: EWLKTRPILSPLTKG
EWFKTVPMLSVLTKG

SEQ ID NO: 203675 - protein, 15 aa, Artificial Sequence
  Description of Artificial Sequence: Synthetic peptide
  Seed: EWLKTRPILSPLTKG
EWFKTVPMLSYLTKG

SEQ ID NO: 203676 - protein, 15 aa, Artificial Sequence
  Description of Artificial Sequence: Synthetic peptide
  Seed: EWLKTRPILSPLTKG
EWFKTVPRLSALTKG

SEQ ID NO: 203677 - protein, 15 aa, Artificial Sequence
  Description of Artificial Sequence: Synthetic peptide
  Seed: EWLKTRPILSPLTKG
EWFKTVPRLSGLTKG

SEQ ID NO: 203678 - protein, 15 aa, Artificial Sequence
  Description of Artificial Sequence: Synthetic peptide
  Seed: EWLKTRPILSPLTKG
EWFKTVPRLSHLTKG

SEQ ID NO: 203679 - protein, 15 aa, Artificial Sequence
  Description of Artificial Sequence: Synthetic peptide
  Seed: EWLKTRPILSPLTKG
EWFKTVPRLSKLTKG

SEQ ID NO: 203680 - protein, 15 aa, Artificial Sequence
  Description of Artificial Sequence: Synthetic peptide
  Seed: EWLKTRPILSPLTKG
EWFKTVPRLSMLTKG

SEQ ID NO: 203681 - protein, 15 aa, Artificial Sequence
  Description of Artificial Sequence: Synthetic peptide
  Seed: EWLKTRPILSPLTKG
EWFKTVPRLSQLTKG

SEQ ID NO: 203682 - protein, 15 aa, Artificial Sequence
  Description of Artificial Sequence: Synthetic peptide
  Seed: EWLKTRPILSPLTKG
EWFKTVPRLSRLTKG

SEQ ID NO: 203683 - protein, 15 aa, Artificial Sequence
  Description of Artificial Sequence: Synthetic peptide
  Seed: EWLKTRPILSPLTKG
EWFKTVPRLSSLTKG

SEQ ID NO: 203684 - protein, 15 aa, Artificial Sequence
  Description of Artificial Sequence: Synthetic peptide
  Seed: EWLKTRPILSPLTKG
EWFKTVPRLSTLTKG

SEQ ID NO: 203685 - protein, 15 aa, Artificial Sequence
  Description of Artificial Sequence: Synthetic peptide
  Seed: EWLKTRPILSPLTKG
EWFKTVPRLSVLTKG

SEQ ID NO: 203686 - protein, 15 aa, Artificial Sequence
  Description of Artificial Sequence: Synthetic peptide
  Seed: EWLKTRPILSPLTKG
EWFKTVPRLSYLTKG

SEQ ID NO: 203687 - protein, 15 aa, Artificial Sequence
  Description of Artificial Sequence: Synthetic peptide
  Seed: EWLKTRPILSPLTKG
EWFKTVPVLSFLTKG

SEQ ID NO: 203688 - protein, 15 aa, Artificial Sequence
  Description of Artificial Sequence: Synthetic peptide
  Seed: EWLKTRPILSPLTKG
EWFKTVPVLSILTKG

SEQ ID NO: 203689 - protein, 15 aa, Artificial Sequence
  Description of Artificial Sequence: Synthetic peptide
  Seed: EWLKTRPILSPLTKG
EWFKTVPVLSLLTKG

SEQ ID NO: 203690 - protein, 15 aa, Artificial Sequence
  Description of Artificial Sequence: Synthetic peptide
  Seed: EWLKTRPILSPLTKG
EWFKTVPVLSVLTKG

SEQ ID NO: 203691 - protein, 15 aa, Artificial Sequence
  Description of Artificial Sequence: Synthetic peptide
  Seed: EWLKTRPILSPLTKG
EWFKTVPWLSALTKG

SEQ ID NO: 203692 - protein, 15 aa, Artificial Sequence
  Description of Artificial Sequence: Synthetic peptide
  Seed: EWLKTRPILSPLTKG
EWFKTVPWLSELTKG

SEQ ID NO: 203693 - protein, 15 aa, Artificial Sequence
  Description of Artificial Sequence: Synthetic peptide
  Seed: EWLKTRPILSPLTKG
EWFKTVPWLSFLTKG

SEQ ID NO: 203694 - protein, 15 aa, Artificial Sequence
  Description of Artificial Sequence: Synthetic peptide
  Seed: EWLKTRPILSPLTKG
EWFKTVPWLSILTKG

SEQ ID NO: 203695 - protein, 15 aa, Artificial Sequence
  Description of Artificial Sequence: Synthetic peptide
  Seed: EWLKTRPILSPLTKG
EWFKTVPWLSLLTKG

SEQ ID NO: 203696 - protein, 15 aa, Artificial Sequence
  Description of Artificial Sequence: Synthetic peptide
  Seed: EWLKTRPILSPLTKG
EWFKTVPWLSMLTKG

SEQ ID NO: 203697 - protein, 15 aa, Artificial Sequence
  Description of Artificial Sequence: Synthetic peptide
  Seed: EWLKTRPILSPLTKG
EWFKTVPWLSNLTKG

SEQ ID NO: 203698 - protein, 15 aa, Artificial Sequence
  Description of Artificial Sequence: Synthetic peptide
  Seed: EWLKTRPILSPLTKG
EWFKTVPWLSSLTKG

SEQ ID NO: 203699 - protein, 15 aa, Artificial Sequence
  Description of Artificial Sequence: Synthetic peptide
  Seed: EWLKTRPILSPLTKG
EWFKTVPWLSTLTKG

SEQ ID NO: 203700 - protein, 15 aa, Artificial Sequence
  Description of Artificial Sequence: Synthetic peptide
  Seed: EWLKTRPILSPLTKG
EWFKTVPWLSVLTKG

SEQ ID NO: 203701 - protein, 15 aa, Artificial Sequence
  Description of Artificial Sequence: Synthetic peptide
  Seed: EWLKTRPILSPLTKG
EWFKTVPWLSYLTKG

SEQ ID NO: 203702 - protein, 15 aa, Artificial Sequence
  Description of Artificial Sequence: Synthetic peptide
  Seed: EWLKTRPILSPLTKG
EWFKTVPYLSALTKG

SEQ ID NO: 203703 - protein, 15 aa, Artificial Sequence
  Description of Artificial Sequence: Synthetic peptide
  Seed: EWLKTRPILSPLTKG
EWFKTVPYLSELTKG

SEQ ID NO: 203704 - protein, 15 aa, Artificial Sequence
  Description of Artificial Sequence: Synthetic peptide
  Seed: EWLKTRPILSPLTKG
EWFKTVPYLSFLTKG

SEQ ID NO: 203705 - protein, 15 aa, Artificial Sequence
  Description of Artificial Sequence: Synthetic peptide
  Seed: EWLKTRPILSPLTKG
EWFKTVPYLSILTKG

SEQ ID NO: 203706 - protein, 15 aa, Artificial Sequence
  Description of Artificial Sequence: Synthetic peptide
  Seed: EWLKTRPILSPLTKG
EWFKTVPYLSLLTKG

SEQ ID NO: 203707 - protein, 15 aa, Artificial Sequence
  Description of Artificial Sequence: Synthetic peptide
  Seed: EWLKTRPILSPLTKG
EWFKTVPYLSMLTKG

SEQ ID NO: 203708 - protein, 15 aa, Artificial Sequence
  Description of Artificial Sequence: Synthetic peptide
  Seed: EWLKTRPILSPLTKG
EWFKTVPYLSNLTKG

SEQ ID NO: 203709 - protein, 15 aa, Artificial Sequence
  Description of Artificial Sequence: Synthetic peptide
  Seed: EWLKTRPILSPLTKG
EWFKTVPYLSSLTKG

SEQ ID NO: 203710 - protein, 15 aa, Artificial Sequence
  Description of Artificial Sequence: Synthetic peptide
  Seed: EWLKTRPILSPLTKG
EWFKTVPYLSTLTKG

SEQ ID NO: 203711 - protein, 15 aa, Artificial Sequence
  Description of Artificial Sequence: Synthetic peptide
  Seed: EWLKTRPILSPLTKG
EWFKTVPYLSVLTKG

SEQ ID NO: 203712 - protein, 15 aa, Artificial Sequence
  Description of Artificial Sequence: Synthetic peptide
  Seed: EWLKTRPILSPLTKG
EWFKTVPYLSWLTKG

SEQ ID NO: 203713 - protein, 15 aa, Artificial Sequence
  Description of Artificial Sequence: Synthetic peptide
  Seed: EWLKTRPILSPLTKG
EWFKTVPYLSYLTKG

SEQ ID NO: 203714 - protein, 15 aa, Artificial Sequence
  Description of Artificial Sequence: Synthetic peptide
  Seed: EWLKTRPILSPLTKG
EWFKTWPFLSALTKG

SEQ ID NO: 203715 - protein, 15 aa, Artificial Sequence
  Description of Artificial Sequence: Synthetic peptide
  Seed: EWLKTRPILSPLTKG
EWFKTWPFLSFLTKG

SEQ ID NO: 203716 - protein, 15 aa, Artificial Sequence
  Description of Artificial Sequence: Synthetic peptide
  Seed: EWLKTRPILSPLTKG
EWFKTWPFLSILTKG

SEQ ID NO: 203717 - protein, 15 aa, Artificial Sequence
  Description of Artificial Sequence: Synthetic peptide
  Seed: EWLKTRPILSPLTKG
EWFKTWPFLSLLTKG

SEQ ID NO: 203718 - protein, 15 aa, Artificial Sequence
  Description of Artificial Sequence: Synthetic peptide
  Seed: EWLKTRPILSPLTKG
EWFKTWPFLSMLTKG

SEQ ID NO: 203719 - protein, 15 aa, Artificial Sequence
  Description of Artificial Sequence: Synthetic peptide
  Seed: EWLKTRPILSPLTKG
EWFKTWPFLSNLTKG

SEQ ID NO: 203720 - protein, 15 aa, Artificial Sequence
  Description of Artificial Sequence: Synthetic peptide
  Seed: EWLKTRPILSPLTKG
EWFKTWPFLSSLTKG

SEQ ID NO: 203721 - protein, 15 aa, Artificial Sequence
  Description of Artificial Sequence: Synthetic peptide
  Seed: EWLKTRPILSPLTKG
EWFKTWPFLSTLTKG

SEQ ID NO: 203722 - protein, 15 aa, Artificial Sequence
  Description of Artificial Sequence: Synthetic peptide
  Seed: EWLKTRPILSPLTKG
EWFKTWPFLSVLTKG

SEQ ID NO: 203723 - protein, 15 aa, Artificial Sequence
  Description of Artificial Sequence: Synthetic peptide
  Seed: EWLKTRPILSPLTKG
EWFKTWPFLSYLTKG

SEQ ID NO: 203724 - protein, 15 aa, Artificial Sequence
  Description of Artificial Sequence: Synthetic peptide
  Seed: EWLKTRPILSPLTKG
EWFKTWPILSFLTKG

SEQ ID NO: 203725 - protein, 15 aa, Artificial Sequence
  Description of Artificial Sequence: Synthetic peptide
  Seed: EWLKTRPILSPLTKG
EWFKTWPILSILTKG

SEQ ID NO: 203726 - protein, 15 aa, Artificial Sequence
  Description of Artificial Sequence: Synthetic peptide
  Seed: EWLKTRPILSPLTKG
EWFKTWPILSLLTKG

SEQ ID NO: 203727 - protein, 15 aa, Artificial Sequence
  Description of Artificial Sequence: Synthetic peptide
  Seed: EWLKTRPILSPLTKG
EWFKTWPILSVLTKG

SEQ ID NO: 203728 - protein, 15 aa, Artificial Sequence
  Description of Artificial Sequence: Synthetic peptide
  Seed: EWLKTRPILSPLTKG
EWFKTWPLLSFLTKG

SEQ ID NO: 203729 - protein, 15 aa, Artificial Sequence
  Description of Artificial Sequence: Synthetic peptide
  Seed: EWLKTRPILSPLTKG
EWFKTWPLLSILTKG

SEQ ID NO: 203730 - protein, 15 aa, Artificial Sequence
  Description of Artificial Sequence: Synthetic peptide
  Seed: EWLKTRPILSPLTKG
EWFKTWPLLSLLTKG

SEQ ID NO: 203731 - protein, 15 aa, Artificial Sequence
  Description of Artificial Sequence: Synthetic peptide
  Seed: EWLKTRPILSPLTKG
EWFKTWPLLSMLTKG

SEQ ID NO: 203732 - protein, 15 aa, Artificial Sequence
  Description of Artificial Sequence: Synthetic peptide
  Seed: EWLKTRPILSPLTKG
EWFKTWPLLSVLTKG

SEQ ID NO: 203733 - protein, 15 aa, Artificial Sequence
  Description of Artificial Sequence: Synthetic peptide
  Seed: EWLKTRPILSPLTKG
EWFKTWPMLSFLTKG

SEQ ID NO: 203734 - protein, 15 aa, Artificial Sequence
  Description of Artificial Sequence: Synthetic peptide
  Seed: EWLKTRPILSPLTKG
EWFKTWPMLSILTKG

SEQ ID NO: 203735 - protein, 15 aa, Artificial Sequence
  Description of Artificial Sequence: Synthetic peptide
  Seed: EWLKTRPILSPLTKG
EWFKTWPMLSLLTKG

SEQ ID NO: 203736 - protein, 15 aa, Artificial Sequence
  Description of Artificial Sequence: Synthetic peptide
  Seed: EWLKTRPILSPLTKG
EWFKTWPMLSMLTKG

SEQ ID NO: 203737 - protein, 15 aa, Artificial Sequence
  Description of Artificial Sequence: Synthetic peptide
  Seed: EWLKTRPILSPLTKG
EWFKTWPMLSVLTKG

SEQ ID NO: 203738 - protein, 15 aa, Artificial Sequence
  Description of Artificial Sequence: Synthetic peptide
  Seed: EWLKTRPILSPLTKG
EWFKTWPWLSFLTKG

SEQ ID NO: 203739 - protein, 15 aa, Artificial Sequence
  Description of Artificial Sequence: Synthetic peptide
  Seed: EWLKTRPILSPLTKG
EWFKTWPWLSILTKG

SEQ ID NO: 203740 - protein, 15 aa, Artificial Sequence
  Description of Artificial Sequence: Synthetic peptide
  Seed: EWLKTRPILSPLTKG
EWFKTWPWLSLLTKG

SEQ ID NO: 203741 - protein, 15 aa, Artificial Sequence
  Description of Artificial Sequence: Synthetic peptide
  Seed: EWLKTRPILSPLTKG
EWFKTWPWLSMLTKG

SEQ ID NO: 203742 - protein, 15 aa, Artificial Sequence
  Description of Artificial Sequence: Synthetic peptide
  Seed: EWLKTRPILSPLTKG
EWFKTWPWLSVLTKG

SEQ ID NO: 203743 - protein, 15 aa, Artificial Sequence
  Description of Artificial Sequence: Synthetic peptide
  Seed: EWLKTRPILSPLTKG
EWFKTWPYLSFLTKG

SEQ ID NO: 203744 - protein, 15 aa, Artificial Sequence
  Description of Artificial Sequence: Synthetic peptide
  Seed: EWLKTRPILSPLTKG
EWFKTWPYLSILTKG

SEQ ID NO: 203745 - protein, 15 aa, Artificial Sequence
  Description of Artificial Sequence: Synthetic peptide
  Seed: EWLKTRPILSPLTKG
EWFKTWPYLSLLTKG

SEQ ID NO: 203746 - protein, 15 aa, Artificial Sequence
  Description of Artificial Sequence: Synthetic peptide
  Seed: EWLKTRPILSPLTKG
EWFKTWPYLSMLTKG

SEQ ID NO: 203747 - protein, 15 aa, Artificial Sequence
  Description of Artificial Sequence: Synthetic peptide
  Seed: EWLKTRPILSPLTKG
EWFKTWPYLSVLTKG

SEQ ID NO: 203748 - protein, 15 aa, Artificial Sequence
  Description of Artificial Sequence: Synthetic peptide
  Seed: EWLKTRPILSPLTKG
EWFKTYPALSILTKG

SEQ ID NO: 203749 - protein, 15 aa, Artificial Sequence
  Description of Artificial Sequence: Synthetic peptide
  Seed: EWLKTRPILSPLTKG
EWFKTYPALSLLTKG

SEQ ID NO: 203750 - protein, 15 aa, Artificial Sequence
  Description of Artificial Sequence: Synthetic peptide
  Seed: EWLKTRPILSPLTKG
EWFKTYPFLSALTKG

SEQ ID NO: 203751 - protein, 15 aa, Artificial Sequence
  Description of Artificial Sequence: Synthetic peptide
  Seed: EWLKTRPILSPLTKG
EWFKTYPFLSCLTKG

SEQ ID NO: 203752 - protein, 15 aa, Artificial Sequence
  Description of Artificial Sequence: Synthetic peptide
  Seed: EWLKTRPILSPLTKG
EWFKTYPFLSDLTKG

SEQ ID NO: 203753 - protein, 15 aa, Artificial Sequence
  Description of Artificial Sequence: Synthetic peptide
  Seed: EWLKTRPILSPLTKG
EWFKTYPFLSELTKG

SEQ ID NO: 203754 - protein, 15 aa, Artificial Sequence
  Description of Artificial Sequence: Synthetic peptide
  Seed: EWLKTRPILSPLTKG
EWFKTYPFLSFLTKG

SEQ ID NO: 203755 - protein, 15 aa, Artificial Sequence
  Description of Artificial Sequence: Synthetic peptide
  Seed: EWLKTRPILSPLTKG
EWFKTYPFLSHLTKG

SEQ ID NO: 203756 - protein, 15 aa, Artificial Sequence
  Description of Artificial Sequence: Synthetic peptide
  Seed: EWLKTRPILSPLTKG
EWFKTYPFLSILTKG

SEQ ID NO: 203757 - protein, 15 aa, Artificial Sequence
  Description of Artificial Sequence: Synthetic peptide
  Seed: EWLKTRPILSPLTKG
EWFKTYPFLSLLTKG

SEQ ID NO: 203758 - protein, 15 aa, Artificial Sequence
  Description of Artificial Sequence: Synthetic peptide
  Seed: EWLKTRPILSPLTKG
EWFKTYPFLSMLTKG

SEQ ID NO: 203759 - protein, 15 aa, Artificial Sequence
  Description of Artificial Sequence: Synthetic peptide
  Seed: EWLKTRPILSPLTKG
EWFKTYPFLSNLTKG

SEQ ID NO: 203760 - protein, 15 aa, Artificial Sequence
  Description of Artificial Sequence: Synthetic peptide
  Seed: EWLKTRPILSPLTKG
EWFKTYPFLSPLTKG

SEQ ID NO: 203761 - protein, 15 aa, Artificial Sequence
  Description of Artificial Sequence: Synthetic peptide
  Seed: EWLKTRPILSPLTKG
EWFKTYPFLSQLTKG

SEQ ID NO: 203762 - protein, 15 aa, Artificial Sequence
  Description of Artificial Sequence: Synthetic peptide
  Seed: EWLKTRPILSPLTKG
EWFKTYPFLSSLTKG

SEQ ID NO: 203763 - protein, 15 aa, Artificial Sequence
  Description of Artificial Sequence: Synthetic peptide
  Seed: EWLKTRPILSPLTKG
EWFKTYPFLSTLTKG

SEQ ID NO: 203764 - protein, 15 aa, Artificial Sequence
  Description of Artificial Sequence: Synthetic peptide
  Seed: EWLKTRPILSPLTKG
EWFKTYPFLSVLTKG

SEQ ID NO: 203765 - protein, 15 aa, Artificial Sequence
  Description of Artificial Sequence: Synthetic peptide
  Seed: EWLKTRPILSPLTKG
EWFKTYPFLSWLTKG

SEQ ID NO: 203766 - protein, 15 aa, Artificial Sequence
  Description of Artificial Sequence: Synthetic peptide
  Seed: EWLKTRPILSPLTKG
EWFKTYPFLSYLTKG

SEQ ID NO: 203767 - protein, 15 aa, Artificial Sequence
  Description of Artificial Sequence: Synthetic peptide
  Seed: EWLKTRPILSPLTKG
EWFKTYPILSFLTKG

SEQ ID NO: 203768 - protein, 15 aa, Artificial Sequence
  Description of Artificial Sequence: Synthetic peptide
  Seed: EWLKTRPILSPLTKG
EWFKTYPILSILTKG

SEQ ID NO: 203769 - protein, 15 aa, Artificial Sequence
  Description of Artificial Sequence: Synthetic peptide
  Seed: EWLKTRPILSPLTKG
EWFKTYPILSLLTKG

SEQ ID NO: 203770 - protein, 15 aa, Artificial Sequence
  Description of Artificial Sequence: Synthetic peptide
  Seed: EWLKTRPILSPLTKG
EWFKTYPILSMLTKG

SEQ ID NO: 203771 - protein, 15 aa, Artificial Sequence
  Description of Artificial Sequence: Synthetic peptide
  Seed: EWLKTRPILSPLTKG
EWFKTYPILSVLTKG

SEQ ID NO: 203772 - protein, 15 aa, Artificial Sequence
  Description of Artificial Sequence: Synthetic peptide
  Seed: EWLKTRPILSPLTKG
EWFKTYPILSYLTKG

SEQ ID NO: 203773 - protein, 15 aa, Artificial Sequence
  Description of Artificial Sequence: Synthetic peptide
  Seed: EWLKTRPILSPLTKG
EWFKTYPLLSALTKG

SEQ ID NO: 203774 - protein, 15 aa, Artificial Sequence
  Description of Artificial Sequence: Synthetic peptide
  Seed: EWLKTRPILSPLTKG
EWFKTYPLLSFLTKG

SEQ ID NO: 203775 - protein, 15 aa, Artificial Sequence
  Description of Artificial Sequence: Synthetic peptide
  Seed: EWLKTRPILSPLTKG
EWFKTYPLLSILTKG

SEQ ID NO: 203776 - protein, 15 aa, Artificial Sequence
  Description of Artificial Sequence: Synthetic peptide
  Seed: EWLKTRPILSPLTKG
EWFKTYPLLSLLTKG

SEQ ID NO: 203777 - protein, 15 aa, Artificial Sequence
  Description of Artificial Sequence: Synthetic peptide
  Seed: EWLKTRPILSPLTKG
EWFKTYPLLSMLTKG

SEQ ID NO: 203778 - protein, 15 aa, Artificial Sequence
  Description of Artificial Sequence: Synthetic peptide
  Seed: EWLKTRPILSPLTKG
EWFKTYPLLSTLTKG

SEQ ID NO: 203779 - protein, 15 aa, Artificial Sequence
  Description of Artificial Sequence: Synthetic peptide
  Seed: EWLKTRPILSPLTKG
EWFKTYPLLSVLTKG

SEQ ID NO: 203780 - protein, 15 aa, Artificial Sequence
  Description of Artificial Sequence: Synthetic peptide
  Seed: EWLKTRPILSPLTKG
EWFKTYPLLSYLTKG

SEQ ID NO: 203781 - protein, 15 aa, Artificial Sequence
  Description of Artificial Sequence: Synthetic peptide
  Seed: EWLKTRPILSPLTKG
EWFKTYPMLSFLTKG

SEQ ID NO: 203782 - protein, 15 aa, Artificial Sequence
  Description of Artificial Sequence: Synthetic peptide
  Seed: EWLKTRPILSPLTKG
EWFKTYPMLSILTKG

SEQ ID NO: 203783 - protein, 15 aa, Artificial Sequence
  Description of Artificial Sequence: Synthetic peptide
  Seed: EWLKTRPILSPLTKG
EWFKTYPMLSLLTKG

SEQ ID NO: 203784 - protein, 15 aa, Artificial Sequence
  Description of Artificial Sequence: Synthetic peptide
  Seed: EWLKTRPILSPLTKG
EWFKTYPMLSMLTKG

SEQ ID NO: 203785 - protein, 15 aa, Artificial Sequence
  Description of Artificial Sequence: Synthetic peptide
  Seed: EWLKTRPILSPLTKG
EWFKTYPMLSVLTKG

SEQ ID NO: 203786 - protein, 15 aa, Artificial Sequence
  Description of Artificial Sequence: Synthetic peptide
  Seed: EWLKTRPILSPLTKG
EWFKTYPMLSYLTKG

SEQ ID NO: 203787 - protein, 15 aa, Artificial Sequence
  Description of Artificial Sequence: Synthetic peptide
  Seed: EWLKTRPILSPLTKG
EWFKTYPVLSFLTKG

SEQ ID NO: 203788 - protein, 15 aa, Artificial Sequence
  Description of Artificial Sequence: Synthetic peptide
  Seed: EWLKTRPILSPLTKG
EWFKTYPVLSILTKG

SEQ ID NO: 203789 - protein, 15 aa, Artificial Sequence
  Description of Artificial Sequence: Synthetic peptide
  Seed: EWLKTRPILSPLTKG
EWFKTYPVLSLLTKG

SEQ ID NO: 203790 - protein, 15 aa, Artificial Sequence
  Description of Artificial Sequence: Synthetic peptide
  Seed: EWLKTRPILSPLTKG
EWFKTYPVLSVLTKG

SEQ ID NO: 203791 - protein, 15 aa, Artificial Sequence
  Description of Artificial Sequence: Synthetic peptide
  Seed: EWLKTRPILSPLTKG
EWFKTYPWLSFLTKG

SEQ ID NO: 203792 - protein, 15 aa, Artificial Sequence
  Description of Artificial Sequence: Synthetic peptide
  Seed: EWLKTRPILSPLTKG
EWFKTYPWLSILTKG

SEQ ID NO: 203793 - protein, 15 aa, Artificial Sequence
  Description of Artificial Sequence: Synthetic peptide
  Seed: EWLKTRPILSPLTKG
EWFKTYPWLSLLTKG

SEQ ID NO: 203794 - protein, 15 aa, Artificial Sequence
  Description of Artificial Sequence: Synthetic peptide
  Seed: EWLKTRPILSPLTKG
EWFKTYPWLSMLTKG

SEQ ID NO: 203795 - protein, 15 aa, Artificial Sequence
  Description of Artificial Sequence: Synthetic peptide
  Seed: EWLKTRPILSPLTKG
EWFKTYPWLSVLTKG

SEQ ID NO: 203796 - protein, 15 aa, Artificial Sequence
  Description of Artificial Sequence: Synthetic peptide
  Seed: EWLKTRPILSPLTKG
EWFKTYPYLSFLTKG

SEQ ID NO: 203797 - protein, 15 aa, Artificial Sequence
  Description of Artificial Sequence: Synthetic peptide
  Seed: EWLKTRPILSPLTKG
EWFKTYPYLSILTKG

SEQ ID NO: 203798 - protein, 15 aa, Artificial Sequence
  Description of Artificial Sequence: Synthetic peptide
  Seed: EWLKTRPILSPLTKG
EWFKTYPYLSLLTKG

SEQ ID NO: 203799 - protein, 15 aa, Artificial Sequence
  Description of Artificial Sequence: Synthetic peptide
  Seed: EWLKTRPILSPLTKG
EWFKTYPYLSMLTKG

SEQ ID NO: 203800 - protein, 15 aa, Artificial Sequence
  Description of Artificial Sequence: Synthetic peptide
  Seed: EWLKTRPILSPLTKG
EWFKTYPYLSVLTKG

SEQ ID NO: 203801 - protein, 15 aa, Artificial Sequence
  Description of Artificial Sequence: Synthetic peptide
  Seed: EWLKTRPILSPLTKG
EWIKTAPALSRLTKG

SEQ ID NO: 203802 - protein, 15 aa, Artificial Sequence
  Description of Artificial Sequence: Synthetic peptide
  Seed: EWLKTRPILSPLTKG
EWIKTAPFLSALTKG

SEQ ID NO: 203803 - protein, 15 aa, Artificial Sequence
  Description of Artificial Sequence: Synthetic peptide
  Seed: EWLKTRPILSPLTKG
EWIKTAPFLSDLTKG

SEQ ID NO: 203804 - protein, 15 aa, Artificial Sequence
  Description of Artificial Sequence: Synthetic peptide
  Seed: EWLKTRPILSPLTKG
EWIKTAPFLSELTKG

SEQ ID NO: 203805 - protein, 15 aa, Artificial Sequence
  Description of Artificial Sequence: Synthetic peptide
  Seed: EWLKTRPILSPLTKG
EWIKTAPFLSFLTKG

SEQ ID NO: 203806 - protein, 15 aa, Artificial Sequence
  Description of Artificial Sequence: Synthetic peptide
  Seed: EWLKTRPILSPLTKG
EWIKTAPFLSILTKG

SEQ ID NO: 203807 - protein, 15 aa, Artificial Sequence
  Description of Artificial Sequence: Synthetic peptide
  Seed: EWLKTRPILSPLTKG
EWIKTAPFLSLLTKG

SEQ ID NO: 203808 - protein, 15 aa, Artificial Sequence
  Description of Artificial Sequence: Synthetic peptide
  Seed: EWLKTRPILSPLTKG
EWIKTAPFLSMLTKG

SEQ ID NO: 203809 - protein, 15 aa, Artificial Sequence
  Description of Artificial Sequence: Synthetic peptide
  Seed: EWLKTRPILSPLTKG
EWIKTAPFLSNLTKG

SEQ ID NO: 203810 - protein, 15 aa, Artificial Sequence
  Description of Artificial Sequence: Synthetic peptide
  Seed: EWLKTRPILSPLTKG
EWIKTAPFLSSLTKG

SEQ ID NO: 203811 - protein, 15 aa, Artificial Sequence
  Description of Artificial Sequence: Synthetic peptide
  Seed: EWLKTRPILSPLTKG
EWIKTAPFLSTLTKG

SEQ ID NO: 203812 - protein, 15 aa, Artificial Sequence
  Description of Artificial Sequence: Synthetic peptide
  Seed: EWLKTRPILSPLTKG
EWIKTAPFLSVLTKG

SEQ ID NO: 203813 - protein, 15 aa, Artificial Sequence
  Description of Artificial Sequence: Synthetic peptide
  Seed: EWLKTRPILSPLTKG
EWIKTAPFLSYLTKG

SEQ ID NO: 203814 - protein, 15 aa, Artificial Sequence
  Description of Artificial Sequence: Synthetic peptide
  Seed: EWLKTRPILSPLTKG
EWIKTAPKLSALTKG

SEQ ID NO: 203815 - protein, 15 aa, Artificial Sequence
  Description of Artificial Sequence: Synthetic peptide
  Seed: EWLKTRPILSPLTKG
EWIKTAPKLSFLTKG

SEQ ID NO: 203816 - protein, 15 aa, Artificial Sequence
  Description of Artificial Sequence: Synthetic peptide
  Seed: EWLKTRPILSPLTKG
EWIKTAPKLSGLTKG

SEQ ID NO: 203817 - protein, 15 aa, Artificial Sequence
  Description of Artificial Sequence: Synthetic peptide
  Seed: EWLKTRPILSPLTKG
EWIKTAPKLSHLTKG

SEQ ID NO: 203818 - protein, 15 aa, Artificial Sequence
  Description of Artificial Sequence: Synthetic peptide
  Seed: EWLKTRPILSPLTKG
EWIKTAPKLSILTKG

SEQ ID NO: 203819 - protein, 15 aa, Artificial Sequence
  Description of Artificial Sequence: Synthetic peptide
  Seed: EWLKTRPILSPLTKG
EWIKTAPKLSLLTKG

SEQ ID NO: 203820 - protein, 15 aa, Artificial Sequence
  Description of Artificial Sequence: Synthetic peptide
  Seed: EWLKTRPILSPLTKG
EWIKTAPKLSMLTKG

SEQ ID NO: 203821 - protein, 15 aa, Artificial Sequence
  Description of Artificial Sequence: Synthetic peptide
  Seed: EWLKTRPILSPLTKG
EWIKTAPKLSQLTKG

SEQ ID NO: 203822 - protein, 15 aa, Artificial Sequence
  Description of Artificial Sequence: Synthetic peptide
  Seed: EWLKTRPILSPLTKG
EWIKTAPKLSRLTKG

SEQ ID NO: 203823 - protein, 15 aa, Artificial Sequence
  Description of Artificial Sequence: Synthetic peptide
  Seed: EWLKTRPILSPLTKG
EWIKTAPKLSSLTKG

SEQ ID NO: 203824 - protein, 15 aa, Artificial Sequence
  Description of Artificial Sequence: Synthetic peptide
  Seed: EWLKTRPILSPLTKG
EWIKTAPKLSTLTKG

SEQ ID NO: 203825 - protein, 15 aa, Artificial Sequence
  Description of Artificial Sequence: Synthetic peptide
  Seed: EWLKTRPILSPLTKG
EWIKTAPKLSVLTKG

SEQ ID NO: 203826 - protein, 15 aa, Artificial Sequence
  Description of Artificial Sequence: Synthetic peptide
  Seed: EWLKTRPILSPLTKG
EWIKTAPKLSYLTKG

SEQ ID NO: 203827 - protein, 15 aa, Artificial Sequence
  Description of Artificial Sequence: Synthetic peptide
  Seed: EWLKTRPILSPLTKG
EWIKTAPLLSILTKG

SEQ ID NO: 203828 - protein, 15 aa, Artificial Sequence
  Description of Artificial Sequence: Synthetic peptide
  Seed: EWLKTRPILSPLTKG
EWIKTAPLLSLLTKG

SEQ ID NO: 203829 - protein, 15 aa, Artificial Sequence
  Description of Artificial Sequence: Synthetic peptide
  Seed: EWLKTRPILSPLTKG
EWIKTAPLLSVLTKG

SEQ ID NO: 203830 - protein, 15 aa, Artificial Sequence
  Description of Artificial Sequence: Synthetic peptide
  Seed: EWLKTRPILSPLTKG
EWIKTAPRLSALTKG

SEQ ID NO: 203831 - protein, 15 aa, Artificial Sequence
  Description of Artificial Sequence: Synthetic peptide
  Seed: EWLKTRPILSPLTKG
EWIKTAPRLSFLTKG

SEQ ID NO: 203832 - protein, 15 aa, Artificial Sequence
  Description of Artificial Sequence: Synthetic peptide
  Seed: EWLKTRPILSPLTKG
EWIKTAPRLSGLTKG

SEQ ID NO: 203833 - protein, 15 aa, Artificial Sequence
  Description of Artificial Sequence: Synthetic peptide
  Seed: EWLKTRPILSPLTKG
EWIKTAPRLSHLTKG

SEQ ID NO: 203834 - protein, 15 aa, Artificial Sequence
  Description of Artificial Sequence: Synthetic peptide
  Seed: EWLKTRPILSPLTKG
EWIKTAPRLSILTKG

SEQ ID NO: 203835 - protein, 15 aa, Artificial Sequence
  Description of Artificial Sequence: Synthetic peptide
  Seed: EWLKTRPILSPLTKG
EWIKTAPRLSKLTKG

SEQ ID NO: 203836 - protein, 15 aa, Artificial Sequence
  Description of Artificial Sequence: Synthetic peptide
  Seed: EWLKTRPILSPLTKG
EWIKTAPRLSLLTKG

SEQ ID NO: 203837 - protein, 15 aa, Artificial Sequence
  Description of Artificial Sequence: Synthetic peptide
  Seed: EWLKTRPILSPLTKG
EWIKTAPRLSMLTKG

SEQ ID NO: 203838 - protein, 15 aa, Artificial Sequence
  Description of Artificial Sequence: Synthetic peptide
  Seed: EWLKTRPILSPLTKG
EWIKTAPRLSQLTKG

SEQ ID NO: 203839 - protein, 15 aa, Artificial Sequence
  Description of Artificial Sequence: Synthetic peptide
  Seed: EWLKTRPILSPLTKG
EWIKTAPRLSRLTKG

SEQ ID NO: 203840 - protein, 15 aa, Artificial Sequence
  Description of Artificial Sequence: Synthetic peptide
  Seed: EWLKTRPILSPLTKG
EWIKTAPRLSSLTKG

SEQ ID NO: 203841 - protein, 15 aa, Artificial Sequence
  Description of Artificial Sequence: Synthetic peptide
  Seed: EWLKTRPILSPLTKG
EWIKTAPRLSTLTKG

SEQ ID NO: 203842 - protein, 15 aa, Artificial Sequence
  Description of Artificial Sequence: Synthetic peptide
  Seed: EWLKTRPILSPLTKG
EWIKTAPRLSVLTKG

SEQ ID NO: 203843 - protein, 15 aa, Artificial Sequence
  Description of Artificial Sequence: Synthetic peptide
  Seed: EWLKTRPILSPLTKG
EWIKTAPRLSYLTKG

SEQ ID NO: 203844 - protein, 15 aa, Artificial Sequence
  Description of Artificial Sequence: Synthetic peptide
  Seed: EWLKTRPILSPLTKG
EWIKTAPWLSILTKG

SEQ ID NO: 203845 - protein, 15 aa, Artificial Sequence
  Description of Artificial Sequence: Synthetic peptide
  Seed: EWLKTRPILSPLTKG
EWIKTAPWLSLLTKG

SEQ ID NO: 203846 - protein, 15 aa, Artificial Sequence
  Description of Artificial Sequence: Synthetic peptide
  Seed: EWLKTRPILSPLTKG
EWIKTAPWLSVLTKG

SEQ ID NO: 203847 - protein, 15 aa, Artificial Sequence
  Description of Artificial Sequence: Synthetic peptide
  Seed: EWLKTRPILSPLTKG
EWIKTAPYLSILTKG

SEQ ID NO: 203848 - protein, 15 aa, Artificial Sequence
  Description of Artificial Sequence: Synthetic peptide
  Seed: EWLKTRPILSPLTKG
EWIKTAPYLSLLTKG

SEQ ID NO: 203849 - protein, 15 aa, Artificial Sequence
  Description of Artificial Sequence: Synthetic peptide
  Seed: EWLKTRPILSPLTKG
EWIKTAPYLSVLTKG

SEQ ID NO: 203850 - protein, 15 aa, Artificial Sequence
  Description of Artificial Sequence: Synthetic peptide
  Seed: EWLKTRPILSPLTKG
EWIKTCPFLSFLTKG

SEQ ID NO: 203851 - protein, 15 aa, Artificial Sequence
  Description of Artificial Sequence: Synthetic peptide
  Seed: EWLKTRPILSPLTKG
EWIKTCPFLSILTKG

SEQ ID NO: 203852 - protein, 15 aa, Artificial Sequence
  Description of Artificial Sequence: Synthetic peptide
  Seed: EWLKTRPILSPLTKG
EWIKTCPFLSLLTKG

SEQ ID NO: 203853 - protein, 15 aa, Artificial Sequence
  Description of Artificial Sequence: Synthetic peptide
  Seed: EWLKTRPILSPLTKG
EWIKTCPFLSVLTKG

SEQ ID NO: 203854 - protein, 15 aa, Artificial Sequence
  Description of Artificial Sequence: Synthetic peptide
  Seed: EWLKTRPILSPLTKG
EWIKTCPRLSALTKG

SEQ ID NO: 203855 - protein, 15 aa, Artificial Sequence
  Description of Artificial Sequence: Synthetic peptide
  Seed: EWLKTRPILSPLTKG
EWIKTCPRLSSLTKG

SEQ ID NO: 203856 - protein, 15 aa, Artificial Sequence
  Description of Artificial Sequence: Synthetic peptide
  Seed: EWLKTRPILSPLTKG
EWIKTDPFLSILTKG

SEQ ID NO: 203857 - protein, 15 aa, Artificial Sequence
  Description of Artificial Sequence: Synthetic peptide
  Seed: EWLKTRPILSPLTKG
EWIKTDPFLSLLTKG

SEQ ID NO: 203858 - protein, 15 aa, Artificial Sequence
  Description of Artificial Sequence: Synthetic peptide
  Seed: EWLKTRPILSPLTKG
EWIKTDPFLSVLTKG

SEQ ID NO: 203859 - protein, 15 aa, Artificial Sequence
  Description of Artificial Sequence: Synthetic peptide
  Seed: EWLKTRPILSPLTKG
EWIKTEPFLSALTKG

SEQ ID NO: 203860 - protein, 15 aa, Artificial Sequence
  Description of Artificial Sequence: Synthetic peptide
  Seed: EWLKTRPILSPLTKG
EWIKTEPFLSFLTKG

SEQ ID NO: 203861 - protein, 15 aa, Artificial Sequence
  Description of Artificial Sequence: Synthetic peptide
  Seed: EWLKTRPILSPLTKG
EWIKTEPFLSILTKG

SEQ ID NO: 203862 - protein, 15 aa, Artificial Sequence
  Description of Artificial Sequence: Synthetic peptide
  Seed: EWLKTRPILSPLTKG
EWIKTEPFLSLLTKG

SEQ ID NO: 203863 - protein, 15 aa, Artificial Sequence
  Description of Artificial Sequence: Synthetic peptide
  Seed: EWLKTRPILSPLTKG
EWIKTEPFLSMLTKG

SEQ ID NO: 203864 - protein, 15 aa, Artificial Sequence
  Description of Artificial Sequence: Synthetic peptide
  Seed: EWLKTRPILSPLTKG
EWIKTEPFLSNLTKG

SEQ ID NO: 203865 - protein, 15 aa, Artificial Sequence
  Description of Artificial Sequence: Synthetic peptide
  Seed: EWLKTRPILSPLTKG
EWIKTEPFLSSLTKG

SEQ ID NO: 203866 - protein, 15 aa, Artificial Sequence
  Description of Artificial Sequence: Synthetic peptide
  Seed: EWLKTRPILSPLTKG
EWIKTEPFLSTLTKG

SEQ ID NO: 203867 - protein, 15 aa, Artificial Sequence
  Description of Artificial Sequence: Synthetic peptide
  Seed: EWLKTRPILSPLTKG
EWIKTEPFLSVLTKG

SEQ ID NO: 203868 - protein, 15 aa, Artificial Sequence
  Description of Artificial Sequence: Synthetic peptide
  Seed: EWLKTRPILSPLTKG
EWIKTEPFLSYLTKG

SEQ ID NO: 203869 - protein, 15 aa, Artificial Sequence
  Description of Artificial Sequence: Synthetic peptide
  Seed: EWLKTRPILSPLTKG
EWIKTEPLLSILTKG

SEQ ID NO: 203870 - protein, 15 aa, Artificial Sequence
  Description of Artificial Sequence: Synthetic peptide
  Seed: EWLKTRPILSPLTKG
EWIKTEPLLSLLTKG

SEQ ID NO: 203871 - protein, 15 aa, Artificial Sequence
  Description of Artificial Sequence: Synthetic peptide
  Seed: EWLKTRPILSPLTKG
EWIKTEPLLSVLTKG

SEQ ID NO: 203872 - protein, 15 aa, Artificial Sequence
  Description of Artificial Sequence: Synthetic peptide
  Seed: EWLKTRPILSPLTKG
EWIKTEPWLSILTKG

SEQ ID NO: 203873 - protein, 15 aa, Artificial Sequence
  Description of Artificial Sequence: Synthetic peptide
  Seed: EWLKTRPILSPLTKG
EWIKTEPWLSLLTKG

SEQ ID NO: 203874 - protein, 15 aa, Artificial Sequence
  Description of Artificial Sequence: Synthetic peptide
  Seed: EWLKTRPILSPLTKG
EWIKTEPWLSVLTKG

SEQ ID NO: 203875 - protein, 15 aa, Artificial Sequence
  Description of Artificial Sequence: Synthetic peptide
  Seed: EWLKTRPILSPLTKG
EWIKTEPYLSILTKG

SEQ ID NO: 203876 - protein, 15 aa, Artificial Sequence
  Description of Artificial Sequence: Synthetic peptide
  Seed: EWLKTRPILSPLTKG
EWIKTEPYLSLLTKG

SEQ ID NO: 203877 - protein, 15 aa, Artificial Sequence
  Description of Artificial Sequence: Synthetic peptide
  Seed: EWLKTRPILSPLTKG
EWIKTEPYLSVLTKG

SEQ ID NO: 203878 - protein, 15 aa, Artificial Sequence
  Description of Artificial Sequence: Synthetic peptide
  Seed: EWLKTRPILSPLTKG
EWIKTFPALSRLTKG

SEQ ID NO: 203879 - protein, 15 aa, Artificial Sequence
  Description of Artificial Sequence: Synthetic peptide
  Seed: EWLKTRPILSPLTKG
EWIKTFPALSYLTKG

SEQ ID NO: 203880 - protein, 15 aa, Artificial Sequence
  Description of Artificial Sequence: Synthetic peptide
  Seed: EWLKTRPILSPLTKG
EWIKTFPFLSALTKG

SEQ ID NO: 203881 - protein, 15 aa, Artificial Sequence
  Description of Artificial Sequence: Synthetic peptide
  Seed: EWLKTRPILSPLTKG
EWIKTFPFLSCLTKG

SEQ ID NO: 203882 - protein, 15 aa, Artificial Sequence
  Description of Artificial Sequence: Synthetic peptide
  Seed: EWLKTRPILSPLTKG
EWIKTFPFLSDLTKG

SEQ ID NO: 203883 - protein, 15 aa, Artificial Sequence
  Description of Artificial Sequence: Synthetic peptide
  Seed: EWLKTRPILSPLTKG
EWIKTFPFLSELTKG

SEQ ID NO: 203884 - protein, 15 aa, Artificial Sequence
  Description of Artificial Sequence: Synthetic peptide
  Seed: EWLKTRPILSPLTKG
EWIKTFPFLSFLTKG

SEQ ID NO: 203885 - protein, 15 aa, Artificial Sequence
  Description of Artificial Sequence: Synthetic peptide
  Seed: EWLKTRPILSPLTKG
EWIKTFPFLSHLTKG

SEQ ID NO: 203886 - protein, 15 aa, Artificial Sequence
  Description of Artificial Sequence: Synthetic peptide
  Seed: EWLKTRPILSPLTKG
EWIKTFPFLSILTKG

SEQ ID NO: 203887 - protein, 15 aa, Artificial Sequence
  Description of Artificial Sequence: Synthetic peptide
  Seed: EWLKTRPILSPLTKG
EWIKTFPFLSLLTKG

SEQ ID NO: 203888 - protein, 15 aa, Artificial Sequence
  Description of Artificial Sequence: Synthetic peptide
  Seed: EWLKTRPILSPLTKG
EWIKTFPFLSMLTKG

SEQ ID NO: 203889 - protein, 15 aa, Artificial Sequence
  Description of Artificial Sequence: Synthetic peptide
  Seed: EWLKTRPILSPLTKG
EWIKTFPFLSNLTKG

SEQ ID NO: 203890 - protein, 15 aa, Artificial Sequence
  Description of Artificial Sequence: Synthetic peptide
  Seed: EWLKTRPILSPLTKG
EWIKTFPFLSPLTKG

SEQ ID NO: 203891 - protein, 15 aa, Artificial Sequence
  Description of Artificial Sequence: Synthetic peptide
  Seed: EWLKTRPILSPLTKG
EWIKTFPFLSQLTKG

SEQ ID NO: 203892 - protein, 15 aa, Artificial Sequence
  Description of Artificial Sequence: Synthetic peptide
  Seed: EWLKTRPILSPLTKG
EWIKTFPFLSRLTKG

SEQ ID NO: 203893 - protein, 15 aa, Artificial Sequence
  Description of Artificial Sequence: Synthetic peptide
  Seed: EWLKTRPILSPLTKG
EWIKTFPFLSSLTKG

SEQ ID NO: 203894 - protein, 15 aa, Artificial Sequence
  Description of Artificial Sequence: Synthetic peptide
  Seed: EWLKTRPILSPLTKG
EWIKTFPFLSTLTKG

SEQ ID NO: 203895 - protein, 15 aa, Artificial Sequence
  Description of Artificial Sequence: Synthetic peptide
  Seed: EWLKTRPILSPLTKG
EWIKTFPFLSVLTKG

SEQ ID NO: 203896 - protein, 15 aa, Artificial Sequence
  Description of Artificial Sequence: Synthetic peptide
  Seed: EWLKTRPILSPLTKG
EWIKTFPFLSWLTKG

SEQ ID NO: 203897 - protein, 15 aa, Artificial Sequence
  Description of Artificial Sequence: Synthetic peptide
  Seed: EWLKTRPILSPLTKG
EWIKTFPFLSYLTKG

SEQ ID NO: 203898 - protein, 15 aa, Artificial Sequence
  Description of Artificial Sequence: Synthetic peptide
  Seed: EWLKTRPILSPLTKG
EWIKTFPILSFLTKG

SEQ ID NO: 203899 - protein, 15 aa, Artificial Sequence
  Description of Artificial Sequence: Synthetic peptide
  Seed: EWLKTRPILSPLTKG
EWIKTFPILSILTKG

SEQ ID NO: 203900 - protein, 15 aa, Artificial Sequence
  Description of Artificial Sequence: Synthetic peptide
  Seed: EWLKTRPILSPLTKG
EWIKTFPILSLLTKG

SEQ ID NO: 203901 - protein, 15 aa, Artificial Sequence
  Description of Artificial Sequence: Synthetic peptide
  Seed: EWLKTRPILSPLTKG
EWIKTFPILSMLTKG

SEQ ID NO: 203902 - protein, 15 aa, Artificial Sequence
  Description of Artificial Sequence: Synthetic peptide
  Seed: EWLKTRPILSPLTKG
EWIKTFPILSVLTKG

SEQ ID NO: 203903 - protein, 15 aa, Artificial Sequence
  Description of Artificial Sequence: Synthetic peptide
  Seed: EWLKTRPILSPLTKG
EWIKTFPKLSALTKG

SEQ ID NO: 203904 - protein, 15 aa, Artificial Sequence
  Description of Artificial Sequence: Synthetic peptide
  Seed: EWLKTRPILSPLTKG
EWIKTFPKLSFLTKG

SEQ ID NO: 203905 - protein, 15 aa, Artificial Sequence
  Description of Artificial Sequence: Synthetic peptide
  Seed: EWLKTRPILSPLTKG
EWIKTFPKLSGLTKG

SEQ ID NO: 203906 - protein, 15 aa, Artificial Sequence
  Description of Artificial Sequence: Synthetic peptide
  Seed: EWLKTRPILSPLTKG
EWIKTFPKLSHLTKG

SEQ ID NO: 203907 - protein, 15 aa, Artificial Sequence
  Description of Artificial Sequence: Synthetic peptide
  Seed: EWLKTRPILSPLTKG
EWIKTFPKLSILTKG

SEQ ID NO: 203908 - protein, 15 aa, Artificial Sequence
  Description of Artificial Sequence: Synthetic peptide
  Seed: EWLKTRPILSPLTKG
EWIKTFPKLSKLTKG

SEQ ID NO: 203909 - protein, 15 aa, Artificial Sequence
  Description of Artificial Sequence: Synthetic peptide
  Seed: EWLKTRPILSPLTKG
EWIKTFPKLSLLTKG

SEQ ID NO: 203910 - protein, 15 aa, Artificial Sequence
  Description of Artificial Sequence: Synthetic peptide
  Seed: EWLKTRPILSPLTKG
EWIKTFPKLSMLTKG

SEQ ID NO: 203911 - protein, 15 aa, Artificial Sequence
  Description of Artificial Sequence: Synthetic peptide
  Seed: EWLKTRPILSPLTKG
EWIKTFPKLSQLTKG

SEQ ID NO: 203912 - protein, 15 aa, Artificial Sequence
  Description of Artificial Sequence: Synthetic peptide
  Seed: EWLKTRPILSPLTKG
EWIKTFPKLSRLTKG

SEQ ID NO: 203913 - protein, 15 aa, Artificial Sequence
  Description of Artificial Sequence: Synthetic peptide
  Seed: EWLKTRPILSPLTKG
EWIKTFPKLSSLTKG

SEQ ID NO: 203914 - protein, 15 aa, Artificial Sequence
  Description of Artificial Sequence: Synthetic peptide
  Seed: EWLKTRPILSPLTKG
EWIKTFPKLSTLTKG

SEQ ID NO: 203915 - protein, 15 aa, Artificial Sequence
  Description of Artificial Sequence: Synthetic peptide
  Seed: EWLKTRPILSPLTKG
EWIKTFPKLSVLTKG

SEQ ID NO: 203916 - protein, 15 aa, Artificial Sequence
  Description of Artificial Sequence: Synthetic peptide
  Seed: EWLKTRPILSPLTKG
EWIKTFPKLSYLTKG

SEQ ID NO: 203917 - protein, 15 aa, Artificial Sequence
  Description of Artificial Sequence: Synthetic peptide
  Seed: EWLKTRPILSPLTKG
EWIKTFPLLSFLTKG

SEQ ID NO: 203918 - protein, 15 aa, Artificial Sequence
  Description of Artificial Sequence: Synthetic peptide
  Seed: EWLKTRPILSPLTKG
EWIKTFPLLSILTKG

SEQ ID NO: 203919 - protein, 15 aa, Artificial Sequence
  Description of Artificial Sequence: Synthetic peptide
  Seed: EWLKTRPILSPLTKG
EWIKTFPLLSLLTKG

SEQ ID NO: 203920 - protein, 15 aa, Artificial Sequence
  Description of Artificial Sequence: Synthetic peptide
  Seed: EWLKTRPILSPLTKG
EWIKTFPLLSMLTKG

SEQ ID NO: 203921 - protein, 15 aa, Artificial Sequence
  Description of Artificial Sequence: Synthetic peptide
  Seed: EWLKTRPILSPLTKG
EWIKTFPLLSTLTKG

SEQ ID NO: 203922 - protein, 15 aa, Artificial Sequence
  Description of Artificial Sequence: Synthetic peptide
  Seed: EWLKTRPILSPLTKG
EWIKTFPLLSVLTKG

SEQ ID NO: 203923 - protein, 15 aa, Artificial Sequence
  Description of Artificial Sequence: Synthetic peptide
  Seed: EWLKTRPILSPLTKG
EWIKTFPLLSYLTKG

SEQ ID NO: 203924 - protein, 15 aa, Artificial Sequence
  Description of Artificial Sequence: Synthetic peptide
  Seed: EWLKTRPILSPLTKG
EWIKTFPMLSFLTKG

SEQ ID NO: 203925 - protein, 15 aa, Artificial Sequence
  Description of Artificial Sequence: Synthetic peptide
  Seed: EWLKTRPILSPLTKG
EWIKTFPMLSILTKG

SEQ ID NO: 203926 - protein, 15 aa, Artificial Sequence
  Description of Artificial Sequence: Synthetic peptide
  Seed: EWLKTRPILSPLTKG
EWIKTFPMLSLLTKG

SEQ ID NO: 203927 - protein, 15 aa, Artificial Sequence
  Description of Artificial Sequence: Synthetic peptide
  Seed: EWLKTRPILSPLTKG
EWIKTFPMLSMLTKG

SEQ ID NO: 203928 - protein, 15 aa, Artificial Sequence
  Description of Artificial Sequence: Synthetic peptide
  Seed: EWLKTRPILSPLTKG
EWIKTFPMLSVLTKG

SEQ ID NO: 203929 - protein, 15 aa, Artificial Sequence
  Description of Artificial Sequence: Synthetic peptide
  Seed: EWLKTRPILSPLTKG
EWIKTFPPLSRLTKG

SEQ ID NO: 203930 - protein, 15 aa, Artificial Sequence
  Description of Artificial Sequence: Synthetic peptide
  Seed: EWLKTRPILSPLTKG
EWIKTFPRLSALTKG

SEQ ID NO: 203931 - protein, 15 aa, Artificial Sequence
  Description of Artificial Sequence: Synthetic peptide
  Seed: EWLKTRPILSPLTKG
EWIKTFPRLSFLTKG

SEQ ID NO: 203932 - protein, 15 aa, Artificial Sequence
  Description of Artificial Sequence: Synthetic peptide
  Seed: EWLKTRPILSPLTKG
EWIKTFPRLSGLTKG

SEQ ID NO: 203933 - protein, 15 aa, Artificial Sequence
  Description of Artificial Sequence: Synthetic peptide
  Seed: EWLKTRPILSPLTKG
EWIKTFPRLSHLTKG

SEQ ID NO: 203934 - protein, 15 aa, Artificial Sequence
  Description of Artificial Sequence: Synthetic peptide
  Seed: EWLKTRPILSPLTKG
EWIKTFPRLSILTKG

SEQ ID NO: 203935 - protein, 15 aa, Artificial Sequence
  Description of Artificial Sequence: Synthetic peptide
  Seed: EWLKTRPILSPLTKG
EWIKTFPRLSKLTKG

SEQ ID NO: 203936 - protein, 15 aa, Artificial Sequence
  Description of Artificial Sequence: Synthetic peptide
  Seed: EWLKTRPILSPLTKG
EWIKTFPRLSLLTKG

SEQ ID NO: 203937 - protein, 15 aa, Artificial Sequence
  Description of Artificial Sequence: Synthetic peptide
  Seed: EWLKTRPILSPLTKG
EWIKTFPRLSMLTKG

SEQ ID NO: 203938 - protein, 15 aa, Artificial Sequence
  Description of Artificial Sequence: Synthetic peptide
  Seed: EWLKTRPILSPLTKG
EWIKTFPRLSQLTKG

SEQ ID NO: 203939 - protein, 15 aa, Artificial Sequence
  Description of Artificial Sequence: Synthetic peptide
  Seed: EWLKTRPILSPLTKG
EWIKTFPRLSRLTKG

SEQ ID NO: 203940 - protein, 15 aa, Artificial Sequence
  Description of Artificial Sequence: Synthetic peptide
  Seed: EWLKTRPILSPLTKG
EWIKTFPRLSSLTKG

SEQ ID NO: 203941 - protein, 15 aa, Artificial Sequence
  Description of Artificial Sequence: Synthetic peptide
  Seed: EWLKTRPILSPLTKG
EWIKTFPRLSTLTKG

SEQ ID NO: 203942 - protein, 15 aa, Artificial Sequence
  Description of Artificial Sequence: Synthetic peptide
  Seed: EWLKTRPILSPLTKG
EWIKTFPRLSVLTKG

SEQ ID NO: 203943 - protein, 15 aa, Artificial Sequence
  Description of Artificial Sequence: Synthetic peptide
  Seed: EWLKTRPILSPLTKG
EWIKTFPRLSYLTKG

SEQ ID NO: 203944 - protein, 15 aa, Artificial Sequence
  Description of Artificial Sequence: Synthetic peptide
  Seed: EWLKTRPILSPLTKG
EWIKTFPSLSRLTKG

SEQ ID NO: 203945 - protein, 15 aa, Artificial Sequence
  Description of Artificial Sequence: Synthetic peptide
  Seed: EWLKTRPILSPLTKG
EWIKTFPSLSYLTKG

SEQ ID NO: 203946 - protein, 15 aa, Artificial Sequence
  Description of Artificial Sequence: Synthetic peptide
  Seed: EWLKTRPILSPLTKG
EWIKTFPTLSRLTKG

SEQ ID NO: 203947 - protein, 15 aa, Artificial Sequence
  Description of Artificial Sequence: Synthetic peptide
  Seed: EWLKTRPILSPLTKG
EWIKTFPVLSILTKG

SEQ ID NO: 203948 - protein, 15 aa, Artificial Sequence
  Description of Artificial Sequence: Synthetic peptide
  Seed: EWLKTRPILSPLTKG
EWIKTFPVLSLLTKG

SEQ ID NO: 203949 - protein, 15 aa, Artificial Sequence
  Description of Artificial Sequence: Synthetic peptide
  Seed: EWLKTRPILSPLTKG
EWIKTFPVLSRLTKG

SEQ ID NO: 203950 - protein, 15 aa, Artificial Sequence
  Description of Artificial Sequence: Synthetic peptide
  Seed: EWLKTRPILSPLTKG
EWIKTFPVLSVLTKG

SEQ ID NO: 203951 - protein, 15 aa, Artificial Sequence
  Description of Artificial Sequence: Synthetic peptide
  Seed: EWLKTRPILSPLTKG
EWIKTFPWLSFLTKG

SEQ ID NO: 203952 - protein, 15 aa, Artificial Sequence
  Description of Artificial Sequence: Synthetic peptide
  Seed: EWLKTRPILSPLTKG
EWIKTFPWLSILTKG

SEQ ID NO: 203953 - protein, 15 aa, Artificial Sequence
  Description of Artificial Sequence: Synthetic peptide
  Seed: EWLKTRPILSPLTKG
EWIKTFPWLSLLTKG

SEQ ID NO: 203954 - protein, 15 aa, Artificial Sequence
  Description of Artificial Sequence: Synthetic peptide
  Seed: EWLKTRPILSPLTKG
EWIKTFPWLSMLTKG

SEQ ID NO: 203955 - protein, 15 aa, Artificial Sequence
  Description of Artificial Sequence: Synthetic peptide
  Seed: EWLKTRPILSPLTKG
EWIKTFPWLSVLTKG

SEQ ID NO: 203956 - protein, 15 aa, Artificial Sequence
  Description of Artificial Sequence: Synthetic peptide
  Seed: EWLKTRPILSPLTKG
EWIKTFPYLSALTKG

SEQ ID NO: 203957 - protein, 15 aa, Artificial Sequence
  Description of Artificial Sequence: Synthetic peptide
  Seed: EWLKTRPILSPLTKG
EWIKTFPYLSFLTKG

SEQ ID NO: 203958 - protein, 15 aa, Artificial Sequence
  Description of Artificial Sequence: Synthetic peptide
  Seed: EWLKTRPILSPLTKG
EWIKTFPYLSILTKG

SEQ ID NO: 203959 - protein, 15 aa, Artificial Sequence
  Description of Artificial Sequence: Synthetic peptide
  Seed: EWLKTRPILSPLTKG
EWIKTFPYLSLLTKG

SEQ ID NO: 203960 - protein, 15 aa, Artificial Sequence
  Description of Artificial Sequence: Synthetic peptide
  Seed: EWLKTRPILSPLTKG
EWIKTFPYLSMLTKG

SEQ ID NO: 203961 - protein, 15 aa, Artificial Sequence
  Description of Artificial Sequence: Synthetic peptide
  Seed: EWLKTRPILSPLTKG
EWIKTFPYLSVLTKG

SEQ ID NO: 203962 - protein, 15 aa, Artificial Sequence
  Description of Artificial Sequence: Synthetic peptide
  Seed: EWLKTRPILSPLTKG
EWIKTGPFLSILTKG

SEQ ID NO: 203963 - protein, 15 aa, Artificial Sequence
  Description of Artificial Sequence: Synthetic peptide
  Seed: EWLKTRPILSPLTKG
EWIKTGPFLSLLTKG

SEQ ID NO: 203964 - protein, 15 aa, Artificial Sequence
  Description of Artificial Sequence: Synthetic peptide
  Seed: EWLKTRPILSPLTKG
EWIKTGPFLSVLTKG

SEQ ID NO: 203965 - protein, 15 aa, Artificial Sequence
  Description of Artificial Sequence: Synthetic peptide
  Seed: EWLKTRPILSPLTKG
EWIKTHPALSFLTKG

SEQ ID NO: 203966 - protein, 15 aa, Artificial Sequence
  Description of Artificial Sequence: Synthetic peptide
  Seed: EWLKTRPILSPLTKG
EWIKTHPALSKLTKG

SEQ ID NO: 203967 - protein, 15 aa, Artificial Sequence
  Description of Artificial Sequence: Synthetic peptide
  Seed: EWLKTRPILSPLTKG
EWIKTHPALSRLTKG

SEQ ID NO: 203968 - protein, 15 aa, Artificial Sequence
  Description of Artificial Sequence: Synthetic peptide
  Seed: EWLKTRPILSPLTKG
EWIKTHPALSYLTKG

SEQ ID NO: 203969 - protein, 15 aa, Artificial Sequence
  Description of Artificial Sequence: Synthetic peptide
  Seed: EWLKTRPILSPLTKG
EWIKTHPFLSALTKG

SEQ ID NO: 203970 - protein, 15 aa, Artificial Sequence
  Description of Artificial Sequence: Synthetic peptide
  Seed: EWLKTRPILSPLTKG
EWIKTHPFLSCLTKG

SEQ ID NO: 203971 - protein, 15 aa, Artificial Sequence
  Description of Artificial Sequence: Synthetic peptide
  Seed: EWLKTRPILSPLTKG
EWIKTHPFLSDLTKG

SEQ ID NO: 203972 - protein, 15 aa, Artificial Sequence
  Description of Artificial Sequence: Synthetic peptide
  Seed: EWLKTRPILSPLTKG
EWIKTHPFLSELTKG

SEQ ID NO: 203973 - protein, 15 aa, Artificial Sequence
  Description of Artificial Sequence: Synthetic peptide
  Seed: EWLKTRPILSPLTKG
EWIKTHPFLSFLTKG

SEQ ID NO: 203974 - protein, 15 aa, Artificial Sequence
  Description of Artificial Sequence: Synthetic peptide
  Seed: EWLKTRPILSPLTKG
EWIKTHPFLSILTKG

SEQ ID NO: 203975 - protein, 15 aa, Artificial Sequence
  Description of Artificial Sequence: Synthetic peptide
  Seed: EWLKTRPILSPLTKG
EWIKTHPFLSLLTKG

SEQ ID NO: 203976 - protein, 15 aa, Artificial Sequence
  Description of Artificial Sequence: Synthetic peptide
  Seed: EWLKTRPILSPLTKG
EWIKTHPFLSMLTKG

SEQ ID NO: 203977 - protein, 15 aa, Artificial Sequence
  Description of Artificial Sequence: Synthetic peptide
  Seed: EWLKTRPILSPLTKG
EWIKTHPFLSNLTKG

SEQ ID NO: 203978 - protein, 15 aa, Artificial Sequence
  Description of Artificial Sequence: Synthetic peptide
  Seed: EWLKTRPILSPLTKG
EWIKTHPFLSQLTKG

SEQ ID NO: 203979 - protein, 15 aa, Artificial Sequence
  Description of Artificial Sequence: Synthetic peptide
  Seed: EWLKTRPILSPLTKG
EWIKTHPFLSSLTKG

SEQ ID NO: 203980 - protein, 15 aa, Artificial Sequence
  Description of Artificial Sequence: Synthetic peptide
  Seed: EWLKTRPILSPLTKG
EWIKTHPFLSTLTKG

SEQ ID NO: 203981 - protein, 15 aa, Artificial Sequence
  Description of Artificial Sequence: Synthetic peptide
  Seed: EWLKTRPILSPLTKG
EWIKTHPFLSVLTKG

SEQ ID NO: 203982 - protein, 15 aa, Artificial Sequence
  Description of Artificial Sequence: Synthetic peptide
  Seed: EWLKTRPILSPLTKG
EWIKTHPFLSWLTKG

SEQ ID NO: 203983 - protein, 15 aa, Artificial Sequence
  Description of Artificial Sequence: Synthetic peptide
  Seed: EWLKTRPILSPLTKG
EWIKTHPFLSYLTKG

SEQ ID NO: 203984 - protein, 15 aa, Artificial Sequence
  Description of Artificial Sequence: Synthetic peptide
  Seed: EWLKTRPILSPLTKG
EWIKTHPGLSRLTKG

SEQ ID NO: 203985 - protein, 15 aa, Artificial Sequence
  Description of Artificial Sequence: Synthetic peptide
  Seed: EWLKTRPILSPLTKG
EWIKTHPILSILTKG

SEQ ID NO: 203986 - protein, 15 aa, Artificial Sequence
  Description of Artificial Sequence: Synthetic peptide
  Seed: EWLKTRPILSPLTKG
EWIKTHPILSLLTKG

SEQ ID NO: 203987 - protein, 15 aa, Artificial Sequence
  Description of Artificial Sequence: Synthetic peptide
  Seed: EWLKTRPILSPLTKG
EWIKTHPILSRLTKG

SEQ ID NO: 203988 - protein, 15 aa, Artificial Sequence
  Description of Artificial Sequence: Synthetic peptide
  Seed: EWLKTRPILSPLTKG
EWIKTHPKLSFLTKG

SEQ ID NO: 203989 - protein, 15 aa, Artificial Sequence
  Description of Artificial Sequence: Synthetic peptide
  Seed: EWLKTRPILSPLTKG
EWIKTHPKLSILTKG

SEQ ID NO: 203990 - protein, 15 aa, Artificial Sequence
  Description of Artificial Sequence: Synthetic peptide
  Seed: EWLKTRPILSPLTKG
EWIKTHPKLSLLTKG

SEQ ID NO: 203991 - protein, 15 aa, Artificial Sequence
  Description of Artificial Sequence: Synthetic peptide
  Seed: EWLKTRPILSPLTKG
EWIKTHPKLSMLTKG

SEQ ID NO: 203992 - protein, 15 aa, Artificial Sequence
  Description of Artificial Sequence: Synthetic peptide
  Seed: EWLKTRPILSPLTKG
EWIKTHPKLSRLTKG

SEQ ID NO: 203993 - protein, 15 aa, Artificial Sequence
  Description of Artificial Sequence: Synthetic peptide
  Seed: EWLKTRPILSPLTKG
EWIKTHPKLSVLTKG

SEQ ID NO: 203994 - protein, 15 aa, Artificial Sequence
  Description of Artificial Sequence: Synthetic peptide
  Seed: EWLKTRPILSPLTKG
EWIKTHPKLSYLTKG

SEQ ID NO: 203995 - protein, 15 aa, Artificial Sequence
  Description of Artificial Sequence: Synthetic peptide
  Seed: EWLKTRPILSPLTKG
EWIKTHPLLSFLTKG

SEQ ID NO: 203996 - protein, 15 aa, Artificial Sequence
  Description of Artificial Sequence: Synthetic peptide
  Seed: EWLKTRPILSPLTKG
EWIKTHPLLSILTKG

SEQ ID NO: 203997 - protein, 15 aa, Artificial Sequence
  Description of Artificial Sequence: Synthetic peptide
  Seed: EWLKTRPILSPLTKG
EWIKTHPLLSLLTKG

SEQ ID NO: 203998 - protein, 15 aa, Artificial Sequence
  Description of Artificial Sequence: Synthetic peptide
  Seed: EWLKTRPILSPLTKG
EWIKTHPLLSVLTKG

SEQ ID NO: 203999 - protein, 15 aa, Artificial Sequence
  Description of Artificial Sequence: Synthetic peptide
  Seed: EWLKTRPILSPLTKG
EWIKTHPMLSILTKG

SEQ ID NO: 204000 - protein, 15 aa, Artificial Sequence
  Description of Artificial Sequence: Synthetic peptide
  Seed: EWLKTRPILSPLTKG
EWIKTHPMLSLLTKG

SEQ ID NO: 204001 - protein, 15 aa, Artificial Sequence
  Description of Artificial Sequence: Synthetic peptide
  Seed: EWLKTRPILSPLTKG
EWIKTHPNLSRLTKG

SEQ ID NO: 204002 - protein, 15 aa, Artificial Sequence
  Description of Artificial Sequence: Synthetic peptide
  Seed: EWLKTRPILSPLTKG
EWIKTHPNLSYLTKG

SEQ ID NO: 204003 - protein, 15 aa, Artificial Sequence
  Description of Artificial Sequence: Synthetic peptide
  Seed: EWLKTRPILSPLTKG
EWIKTHPPLSRLTKG

SEQ ID NO: 204004 - protein, 15 aa, Artificial Sequence
  Description of Artificial Sequence: Synthetic peptide
  Seed: EWLKTRPILSPLTKG
EWIKTHPRLSALTKG

SEQ ID NO: 204005 - protein, 15 aa, Artificial Sequence
  Description of Artificial Sequence: Synthetic peptide
  Seed: EWLKTRPILSPLTKG
EWIKTHPRLSFLTKG

SEQ ID NO: 204006 - protein, 15 aa, Artificial Sequence
  Description of Artificial Sequence: Synthetic peptide
  Seed: EWLKTRPILSPLTKG
EWIKTHPRLSILTKG

SEQ ID NO: 204007 - protein, 15 aa, Artificial Sequence
  Description of Artificial Sequence: Synthetic peptide
  Seed: EWLKTRPILSPLTKG
EWIKTHPRLSKLTKG

SEQ ID NO: 204008 - protein, 15 aa, Artificial Sequence
  Description of Artificial Sequence: Synthetic peptide
  Seed: EWLKTRPILSPLTKG
EWIKTHPRLSLLTKG

SEQ ID NO: 204009 - protein, 15 aa, Artificial Sequence
  Description of Artificial Sequence: Synthetic peptide
  Seed: EWLKTRPILSPLTKG
EWIKTHPRLSMLTKG

SEQ ID NO: 204010 - protein, 15 aa, Artificial Sequence
  Description of Artificial Sequence: Synthetic peptide
  Seed: EWLKTRPILSPLTKG
EWIKTHPRLSRLTKG

SEQ ID NO: 204011 - protein, 15 aa, Artificial Sequence
  Description of Artificial Sequence: Synthetic peptide
  Seed: EWLKTRPILSPLTKG
EWIKTHPRLSSLTKG

SEQ ID NO: 204012 - protein, 15 aa, Artificial Sequence
  Description of Artificial Sequence: Synthetic peptide
  Seed: EWLKTRPILSPLTKG
EWIKTHPRLSVLTKG

SEQ ID NO: 204013 - protein, 15 aa, Artificial Sequence
  Description of Artificial Sequence: Synthetic peptide
  Seed: EWLKTRPILSPLTKG
EWIKTHPRLSWLTKG

SEQ ID NO: 204014 - protein, 15 aa, Artificial Sequence
  Description of Artificial Sequence: Synthetic peptide
  Seed: EWLKTRPILSPLTKG
EWIKTHPRLSYLTKG

SEQ ID NO: 204015 - protein, 15 aa, Artificial Sequence
  Description of Artificial Sequence: Synthetic peptide
  Seed: EWLKTRPILSPLTKG
EWIKTHPSLSKLTKG

SEQ ID NO: 204016 - protein, 15 aa, Artificial Sequence
  Description of Artificial Sequence: Synthetic peptide
  Seed: EWLKTRPILSPLTKG
EWIKTHPSLSRLTKG

SEQ ID NO: 204017 - protein, 15 aa, Artificial Sequence
  Description of Artificial Sequence: Synthetic peptide
  Seed: EWLKTRPILSPLTKG
EWIKTHPSLSYLTKG

SEQ ID NO: 204018 - protein, 15 aa, Artificial Sequence
  Description of Artificial Sequence: Synthetic peptide
  Seed: EWLKTRPILSPLTKG
EWIKTHPTLSRLTKG

SEQ ID NO: 204019 - protein, 15 aa, Artificial Sequence
  Description of Artificial Sequence: Synthetic peptide
  Seed: EWLKTRPILSPLTKG
EWIKTHPTLSYLTKG

SEQ ID NO: 204020 - protein, 15 aa, Artificial Sequence
  Description of Artificial Sequence: Synthetic peptide
  Seed: EWLKTRPILSPLTKG
EWIKTHPVLSRLTKG

SEQ ID NO: 204021 - protein, 15 aa, Artificial Sequence
  Description of Artificial Sequence: Synthetic peptide
  Seed: EWLKTRPILSPLTKG
EWIKTHPVLSYLTKG

SEQ ID NO: 204022 - protein, 15 aa, Artificial Sequence
  Description of Artificial Sequence: Synthetic peptide
  Seed: EWLKTRPILSPLTKG
EWIKTHPWLSILTKG

SEQ ID NO: 204023 - protein, 15 aa, Artificial Sequence
  Description of Artificial Sequence: Synthetic peptide
  Seed: EWLKTRPILSPLTKG
EWIKTHPWLSLLTKG

SEQ ID NO: 204024 - protein, 15 aa, Artificial Sequence
  Description of Artificial Sequence: Synthetic peptide
  Seed: EWLKTRPILSPLTKG
EWIKTHPWLSVLTKG

SEQ ID NO: 204025 - protein, 15 aa, Artificial Sequence
  Description of Artificial Sequence: Synthetic peptide
  Seed: EWLKTRPILSPLTKG
EWIKTHPYLSILTKG

SEQ ID NO: 204026 - protein, 15 aa, Artificial Sequence
  Description of Artificial Sequence: Synthetic peptide
  Seed: EWLKTRPILSPLTKG
EWIKTHPYLSLLTKG

SEQ ID NO: 204027 - protein, 15 aa, Artificial Sequence
  Description of Artificial Sequence: Synthetic peptide
  Seed: EWLKTRPILSPLTKG
EWIKTHPYLSVLTKG

SEQ ID NO: 204028 - protein, 15 aa, Artificial Sequence
  Description of Artificial Sequence: Synthetic peptide
  Seed: EWLKTRPILSPLTKG
EWIKTIPALSRLTKG

SEQ ID NO: 204029 - protein, 15 aa, Artificial Sequence
  Description of Artificial Sequence: Synthetic peptide
  Seed: EWLKTRPILSPLTKG
EWIKTIPALSYLTKG

SEQ ID NO: 204030 - protein, 15 aa, Artificial Sequence
  Description of Artificial Sequence: Synthetic peptide
  Seed: EWLKTRPILSPLTKG
EWIKTIPFLSALTKG

SEQ ID NO: 204031 - protein, 15 aa, Artificial Sequence
  Description of Artificial Sequence: Synthetic peptide
  Seed: EWLKTRPILSPLTKG
EWIKTIPFLSCLTKG

SEQ ID NO: 204032 - protein, 15 aa, Artificial Sequence
  Description of Artificial Sequence: Synthetic peptide
  Seed: EWLKTRPILSPLTKG
EWIKTIPFLSDLTKG

SEQ ID NO: 204033 - protein, 15 aa, Artificial Sequence
  Description of Artificial Sequence: Synthetic peptide
  Seed: EWLKTRPILSPLTKG
EWIKTIPFLSELTKG

SEQ ID NO: 204034 - protein, 15 aa, Artificial Sequence
  Description of Artificial Sequence: Synthetic peptide
  Seed: EWLKTRPILSPLTKG
EWIKTIPFLSFLTKG

SEQ ID NO: 204035 - protein, 15 aa, Artificial Sequence
  Description of Artificial Sequence: Synthetic peptide
  Seed: EWLKTRPILSPLTKG
EWIKTIPFLSHLTKG

SEQ ID NO: 204036 - protein, 15 aa, Artificial Sequence
  Description of Artificial Sequence: Synthetic peptide
  Seed: EWLKTRPILSPLTKG
EWIKTIPFLSILTKG

SEQ ID NO: 204037 - protein, 15 aa, Artificial Sequence
  Description of Artificial Sequence: Synthetic peptide
  Seed: EWLKTRPILSPLTKG
EWIKTIPFLSLLTKG

SEQ ID NO: 204038 - protein, 15 aa, Artificial Sequence
  Description of Artificial Sequence: Synthetic peptide
  Seed: EWLKTRPILSPLTKG
EWIKTIPFLSMLTKG

SEQ ID NO: 204039 - protein, 15 aa, Artificial Sequence
  Description of Artificial Sequence: Synthetic peptide
  Seed: EWLKTRPILSPLTKG
EWIKTIPFLSNLTKG

SEQ ID NO: 204040 - protein, 15 aa, Artificial Sequence
  Description of Artificial Sequence: Synthetic peptide
  Seed: EWLKTRPILSPLTKG
EWIKTIPFLSPLTKG

SEQ ID NO: 204041 - protein, 15 aa, Artificial Sequence
  Description of Artificial Sequence: Synthetic peptide
  Seed: EWLKTRPILSPLTKG
EWIKTIPFLSQLTKG

SEQ ID NO: 204042 - protein, 15 aa, Artificial Sequence
  Description of Artificial Sequence: Synthetic peptide
  Seed: EWLKTRPILSPLTKG
EWIKTIPFLSSLTKG

SEQ ID NO: 204043 - protein, 15 aa, Artificial Sequence
  Description of Artificial Sequence: Synthetic peptide
  Seed: EWLKTRPILSPLTKG
EWIKTIPFLSTLTKG

SEQ ID NO: 204044 - protein, 15 aa, Artificial Sequence
  Description of Artificial Sequence: Synthetic peptide
  Seed: EWLKTRPILSPLTKG
EWIKTIPFLSVLTKG

SEQ ID NO: 204045 - protein, 15 aa, Artificial Sequence
  Description of Artificial Sequence: Synthetic peptide
  Seed: EWLKTRPILSPLTKG
EWIKTIPFLSWLTKG

SEQ ID NO: 204046 - protein, 15 aa, Artificial Sequence
  Description of Artificial Sequence: Synthetic peptide
  Seed: EWLKTRPILSPLTKG
EWIKTIPFLSYLTKG

SEQ ID NO: 204047 - protein, 15 aa, Artificial Sequence
  Description of Artificial Sequence: Synthetic peptide
  Seed: EWLKTRPILSPLTKG
EWIKTIPGLSRLTKG

SEQ ID NO: 204048 - protein, 15 aa, Artificial Sequence
  Description of Artificial Sequence: Synthetic peptide
  Seed: EWLKTRPILSPLTKG
EWIKTIPHLSALTKG

SEQ ID NO: 204049 - protein, 15 aa, Artificial Sequence
  Description of Artificial Sequence: Synthetic peptide
  Seed: EWLKTRPILSPLTKG
EWIKTIPHLSSLTKG

SEQ ID NO: 204050 - protein, 15 aa, Artificial Sequence
  Description of Artificial Sequence: Synthetic peptide
  Seed: EWLKTRPILSPLTKG
EWIKTIPILSILTKG

SEQ ID NO: 204051 - protein, 15 aa, Artificial Sequence
  Description of Artificial Sequence: Synthetic peptide
  Seed: EWLKTRPILSPLTKG
EWIKTIPILSLLTKG

SEQ ID NO: 204052 - protein, 15 aa, Artificial Sequence
  Description of Artificial Sequence: Synthetic peptide
  Seed: EWLKTRPILSPLTKG
EWIKTIPILSVLTKG

SEQ ID NO: 204053 - protein, 15 aa, Artificial Sequence
  Description of Artificial Sequence: Synthetic peptide
  Seed: EWLKTRPILSPLTKG
EWIKTIPKLSALTKG

SEQ ID NO: 204054 - protein, 15 aa, Artificial Sequence
  Description of Artificial Sequence: Synthetic peptide
  Seed: EWLKTRPILSPLTKG
EWIKTIPKLSFLTKG

SEQ ID NO: 204055 - protein, 15 aa, Artificial Sequence
  Description of Artificial Sequence: Synthetic peptide
  Seed: EWLKTRPILSPLTKG
EWIKTIPKLSGLTKG

SEQ ID NO: 204056 - protein, 15 aa, Artificial Sequence
  Description of Artificial Sequence: Synthetic peptide
  Seed: EWLKTRPILSPLTKG
EWIKTIPKLSHLTKG

SEQ ID NO: 204057 - protein, 15 aa, Artificial Sequence
  Description of Artificial Sequence: Synthetic peptide
  Seed: EWLKTRPILSPLTKG
EWIKTIPKLSILTKG

SEQ ID NO: 204058 - protein, 15 aa, Artificial Sequence
  Description of Artificial Sequence: Synthetic peptide
  Seed: EWLKTRPILSPLTKG
EWIKTIPKLSKLTKG

SEQ ID NO: 204059 - protein, 15 aa, Artificial Sequence
  Description of Artificial Sequence: Synthetic peptide
  Seed: EWLKTRPILSPLTKG
EWIKTIPKLSLLTKG

SEQ ID NO: 204060 - protein, 15 aa, Artificial Sequence
  Description of Artificial Sequence: Synthetic peptide
  Seed: EWLKTRPILSPLTKG
EWIKTIPKLSMLTKG

SEQ ID NO: 204061 - protein, 15 aa, Artificial Sequence
  Description of Artificial Sequence: Synthetic peptide
  Seed: EWLKTRPILSPLTKG
EWIKTIPKLSNLTKG

SEQ ID NO: 204062 - protein, 15 aa, Artificial Sequence
  Description of Artificial Sequence: Synthetic peptide
  Seed: EWLKTRPILSPLTKG
EWIKTIPKLSPLTKG

SEQ ID NO: 204063 - protein, 15 aa, Artificial Sequence
  Description of Artificial Sequence: Synthetic peptide
  Seed: EWLKTRPILSPLTKG
EWIKTIPKLSQLTKG

SEQ ID NO: 204064 - protein, 15 aa, Artificial Sequence
  Description of Artificial Sequence: Synthetic peptide
  Seed: EWLKTRPILSPLTKG
EWIKTIPKLSRLTKG

SEQ ID NO: 204065 - protein, 15 aa, Artificial Sequence
  Description of Artificial Sequence: Synthetic peptide
  Seed: EWLKTRPILSPLTKG
EWIKTIPKLSSLTKG

SEQ ID NO: 204066 - protein, 15 aa, Artificial Sequence
  Description of Artificial Sequence: Synthetic peptide
  Seed: EWLKTRPILSPLTKG
EWIKTIPKLSTLTKG

SEQ ID NO: 204067 - protein, 15 aa, Artificial Sequence
  Description of Artificial Sequence: Synthetic peptide
  Seed: EWLKTRPILSPLTKG
EWIKTIPKLSVLTKG

SEQ ID NO: 204068 - protein, 15 aa, Artificial Sequence
  Description of Artificial Sequence: Synthetic peptide
  Seed: EWLKTRPILSPLTKG
EWIKTIPKLSYLTKG

SEQ ID NO: 204069 - protein, 15 aa, Artificial Sequence
  Description of Artificial Sequence: Synthetic peptide
  Seed: EWLKTRPILSPLTKG
EWIKTIPLLSFLTKG

SEQ ID NO: 204070 - protein, 15 aa, Artificial Sequence
  Description of Artificial Sequence: Synthetic peptide
  Seed: EWLKTRPILSPLTKG
EWIKTIPLLSILTKG

SEQ ID NO: 204071 - protein, 15 aa, Artificial Sequence
  Description of Artificial Sequence: Synthetic peptide
  Seed: EWLKTRPILSPLTKG
EWIKTIPLLSLLTKG

SEQ ID NO: 204072 - protein, 15 aa, Artificial Sequence
  Description of Artificial Sequence: Synthetic peptide
  Seed: EWLKTRPILSPLTKG
EWIKTIPLLSMLTKG

SEQ ID NO: 204073 - protein, 15 aa, Artificial Sequence
  Description of Artificial Sequence: Synthetic peptide
  Seed: EWLKTRPILSPLTKG
EWIKTIPLLSVLTKG

SEQ ID NO: 204074 - protein, 15 aa, Artificial Sequence
  Description of Artificial Sequence: Synthetic peptide
  Seed: EWLKTRPILSPLTKG
EWIKTIPMLSILTKG

SEQ ID NO: 204075 - protein, 15 aa, Artificial Sequence
  Description of Artificial Sequence: Synthetic peptide
  Seed: EWLKTRPILSPLTKG
EWIKTIPMLSLLTKG

SEQ ID NO: 204076 - protein, 15 aa, Artificial Sequence
  Description of Artificial Sequence: Synthetic peptide
  Seed: EWLKTRPILSPLTKG
EWIKTIPMLSVLTKG

SEQ ID NO: 204077 - protein, 15 aa, Artificial Sequence
  Description of Artificial Sequence: Synthetic peptide
  Seed: EWLKTRPILSPLTKG
EWIKTIPPLSRLTKG

SEQ ID NO: 204078 - protein, 15 aa, Artificial Sequence
  Description of Artificial Sequence: Synthetic peptide
  Seed: EWLKTRPILSPLTKG
EWIKTIPRLSCLTKG

SEQ ID NO: 204079 - protein, 15 aa, Artificial Sequence
  Description of Artificial Sequence: Synthetic peptide
  Seed: EWLKTRPILSPLTKG
EWIKTIPRLSFLTKG

SEQ ID NO: 204080 - protein, 15 aa, Artificial Sequence
  Description of Artificial Sequence: Synthetic peptide
  Seed: EWLKTRPILSPLTKG
EWIKTIPRLSGLTKG

SEQ ID NO: 204081 - protein, 15 aa, Artificial Sequence
  Description of Artificial Sequence: Synthetic peptide
  Seed: EWLKTRPILSPLTKG
EWIKTIPRLSHLTKG

SEQ ID NO: 204082 - protein, 15 aa, Artificial Sequence
  Description of Artificial Sequence: Synthetic peptide
  Seed: EWLKTRPILSPLTKG
EWIKTIPRLSILTKG

SEQ ID NO: 204083 - protein, 15 aa, Artificial Sequence
  Description of Artificial Sequence: Synthetic peptide
  Seed: EWLKTRPILSPLTKG
EWIKTIPRLSKLTKG

SEQ ID NO: 204084 - protein, 15 aa, Artificial Sequence
  Description of Artificial Sequence: Synthetic peptide
  Seed: EWLKTRPILSPLTKG
EWIKTIPRLSLLTKG

SEQ ID NO: 204085 - protein, 15 aa, Artificial Sequence
  Description of Artificial Sequence: Synthetic peptide
  Seed: EWLKTRPILSPLTKG
EWIKTIPRLSMLTKG

SEQ ID NO: 204086 - protein, 15 aa, Artificial Sequence
  Description of Artificial Sequence: Synthetic peptide
  Seed: EWLKTRPILSPLTKG
EWIKTIPRLSNLTKG

SEQ ID NO: 204087 - protein, 15 aa, Artificial Sequence
  Description of Artificial Sequence: Synthetic peptide
  Seed: EWLKTRPILSPLTKG
EWIKTIPRLSPLTKG

SEQ ID NO: 204088 - protein, 15 aa, Artificial Sequence
  Description of Artificial Sequence: Synthetic peptide
  Seed: EWLKTRPILSPLTKG
EWIKTIPRLSQLTKG

SEQ ID NO: 204089 - protein, 15 aa, Artificial Sequence
  Description of Artificial Sequence: Synthetic peptide
  Seed: EWLKTRPILSPLTKG
EWIKTIPRLSRLTKG

SEQ ID NO: 204090 - protein, 15 aa, Artificial Sequence
  Description of Artificial Sequence: Synthetic peptide
  Seed: EWLKTRPILSPLTKG
EWIKTIPRLSSLTKG

SEQ ID NO: 204091 - protein, 15 aa, Artificial Sequence
  Description of Artificial Sequence: Synthetic peptide
  Seed: EWLKTRPILSPLTKG
EWIKTIPRLSTLTKG

SEQ ID NO: 204092 - protein, 15 aa, Artificial Sequence
  Description of Artificial Sequence: Synthetic peptide
  Seed: EWLKTRPILSPLTKG
EWIKTIPRLSVLTKG

SEQ ID NO: 204093 - protein, 15 aa, Artificial Sequence
  Description of Artificial Sequence: Synthetic peptide
  Seed: EWLKTRPILSPLTKG
EWIKTIPRLSWLTKG

SEQ ID NO: 204094 - protein, 15 aa, Artificial Sequence
  Description of Artificial Sequence: Synthetic peptide
  Seed: EWLKTRPILSPLTKG
EWIKTIPRLSYLTKG

SEQ ID NO: 204095 - protein, 15 aa, Artificial Sequence
  Description of Artificial Sequence: Synthetic peptide
  Seed: EWLKTRPILSPLTKG
EWIKTIPSLSRLTKG

SEQ ID NO: 204096 - protein, 15 aa, Artificial Sequence
  Description of Artificial Sequence: Synthetic peptide
  Seed: EWLKTRPILSPLTKG
EWIKTIPSLSYLTKG

SEQ ID NO: 204097 - protein, 15 aa, Artificial Sequence
  Description of Artificial Sequence: Synthetic peptide
  Seed: EWLKTRPILSPLTKG
EWIKTIPTLSRLTKG

SEQ ID NO: 204098 - protein, 15 aa, Artificial Sequence
  Description of Artificial Sequence: Synthetic peptide
  Seed: EWLKTRPILSPLTKG
EWIKTIPVLSRLTKG

SEQ ID NO: 204099 - protein, 15 aa, Artificial Sequence
  Description of Artificial Sequence: Synthetic peptide
  Seed: EWLKTRPILSPLTKG
EWIKTIPWLSFLTKG

SEQ ID NO: 204100 - protein, 15 aa, Artificial Sequence
  Description of Artificial Sequence: Synthetic peptide
  Seed: EWLKTRPILSPLTKG
EWIKTIPWLSILTKG

SEQ ID NO: 204101 - protein, 15 aa, Artificial Sequence
  Description of Artificial Sequence: Synthetic peptide
  Seed: EWLKTRPILSPLTKG
EWIKTIPWLSLLTKG

SEQ ID NO: 204102 - protein, 15 aa, Artificial Sequence
  Description of Artificial Sequence: Synthetic peptide
  Seed: EWLKTRPILSPLTKG
EWIKTIPWLSMLTKG

SEQ ID NO: 204103 - protein, 15 aa, Artificial Sequence
  Description of Artificial Sequence: Synthetic peptide
  Seed: EWLKTRPILSPLTKG
EWIKTIPWLSVLTKG

SEQ ID NO: 204104 - protein, 15 aa, Artificial Sequence
  Description of Artificial Sequence: Synthetic peptide
  Seed: EWLKTRPILSPLTKG
EWIKTIPWLSYLTKG

SEQ ID NO: 204105 - protein, 15 aa, Artificial Sequence
  Description of Artificial Sequence: Synthetic peptide
  Seed: EWLKTRPILSPLTKG
EWIKTIPYLSFLTKG

SEQ ID NO: 204106 - protein, 15 aa, Artificial Sequence
  Description of Artificial Sequence: Synthetic peptide
  Seed: EWLKTRPILSPLTKG
EWIKTIPYLSILTKG

SEQ ID NO: 204107 - protein, 15 aa, Artificial Sequence
  Description of Artificial Sequence: Synthetic peptide
  Seed: EWLKTRPILSPLTKG
EWIKTIPYLSLLTKG

SEQ ID NO: 204108 - protein, 15 aa, Artificial Sequence
  Description of Artificial Sequence: Synthetic peptide
  Seed: EWLKTRPILSPLTKG
EWIKTIPYLSMLTKG

SEQ ID NO: 204109 - protein, 15 aa, Artificial Sequence
  Description of Artificial Sequence: Synthetic peptide
  Seed: EWLKTRPILSPLTKG
EWIKTIPYLSVLTKG

SEQ ID NO: 204110 - protein, 15 aa, Artificial Sequence
  Description of Artificial Sequence: Synthetic peptide
  Seed: EWLKTRPILSPLTKG
EWIKTKPALSRLTKG

SEQ ID NO: 204111 - protein, 15 aa, Artificial Sequence
  Description of Artificial Sequence: Synthetic peptide
  Seed: EWLKTRPILSPLTKG
EWIKTKPFLSFLTKG

SEQ ID NO: 204112 - protein, 15 aa, Artificial Sequence
  Description of Artificial Sequence: Synthetic peptide
  Seed: EWLKTRPILSPLTKG
EWIKTKPFLSILTKG

SEQ ID NO: 204113 - protein, 15 aa, Artificial Sequence
  Description of Artificial Sequence: Synthetic peptide
  Seed: EWLKTRPILSPLTKG
EWIKTKPFLSLLTKG

SEQ ID NO: 204114 - protein, 15 aa, Artificial Sequence
  Description of Artificial Sequence: Synthetic peptide
  Seed: EWLKTRPILSPLTKG
EWIKTKPFLSMLTKG

SEQ ID NO: 204115 - protein, 15 aa, Artificial Sequence
  Description of Artificial Sequence: Synthetic peptide
  Seed: EWLKTRPILSPLTKG
EWIKTKPFLSVLTKG

SEQ ID NO: 204116 - protein, 15 aa, Artificial Sequence
  Description of Artificial Sequence: Synthetic peptide
  Seed: EWLKTRPILSPLTKG
EWIKTKPRLSALTKG

SEQ ID NO: 204117 - protein, 15 aa, Artificial Sequence
  Description of Artificial Sequence: Synthetic peptide
  Seed: EWLKTRPILSPLTKG
EWIKTKPRLSFLTKG

SEQ ID NO: 204118 - protein, 15 aa, Artificial Sequence
  Description of Artificial Sequence: Synthetic peptide
  Seed: EWLKTRPILSPLTKG
EWIKTKPRLSILTKG

SEQ ID NO: 204119 - protein, 15 aa, Artificial Sequence
  Description of Artificial Sequence: Synthetic peptide
  Seed: EWLKTRPILSPLTKG
EWIKTKPRLSLLTKG

SEQ ID NO: 204120 - protein, 15 aa, Artificial Sequence
  Description of Artificial Sequence: Synthetic peptide
  Seed: EWLKTRPILSPLTKG
EWIKTKPRLSSLTKG

SEQ ID NO: 204121 - protein, 15 aa, Artificial Sequence
  Description of Artificial Sequence: Synthetic peptide
  Seed: EWLKTRPILSPLTKG
EWIKTKPRLSVLTKG

SEQ ID NO: 204122 - protein, 15 aa, Artificial Sequence
  Description of Artificial Sequence: Synthetic peptide
  Seed: EWLKTRPILSPLTKG
EWIKTKPSLSRLTKG

SEQ ID NO: 204123 - protein, 15 aa, Artificial Sequence
  Description of Artificial Sequence: Synthetic peptide
  Seed: EWLKTRPILSPLTKG
EWIKTLPALSRLTKG

SEQ ID NO: 204124 - protein, 15 aa, Artificial Sequence
  Description of Artificial Sequence: Synthetic peptide
  Seed: EWLKTRPILSPLTKG
EWIKTLPFLSALTKG

SEQ ID NO: 204125 - protein, 15 aa, Artificial Sequence
  Description of Artificial Sequence: Synthetic peptide
  Seed: EWLKTRPILSPLTKG
EWIKTLPFLSCLTKG

SEQ ID NO: 204126 - protein, 15 aa, Artificial Sequence
  Description of Artificial Sequence: Synthetic peptide
  Seed: EWLKTRPILSPLTKG
EWIKTLPFLSDLTKG

SEQ ID NO: 204127 - protein, 15 aa, Artificial Sequence
  Description of Artificial Sequence: Synthetic peptide
  Seed: EWLKTRPILSPLTKG
EWIKTLPFLSELTKG

SEQ ID NO: 204128 - protein, 15 aa, Artificial Sequence
  Description of Artificial Sequence: Synthetic peptide
  Seed: EWLKTRPILSPLTKG
EWIKTLPFLSFLTKG

SEQ ID NO: 204129 - protein, 15 aa, Artificial Sequence
  Description of Artificial Sequence: Synthetic peptide
  Seed: EWLKTRPILSPLTKG
EWIKTLPFLSHLTKG

SEQ ID NO: 204130 - protein, 15 aa, Artificial Sequence
  Description of Artificial Sequence: Synthetic peptide
  Seed: EWLKTRPILSPLTKG
EWIKTLPFLSILTKG

SEQ ID NO: 204131 - protein, 15 aa, Artificial Sequence
  Description of Artificial Sequence: Synthetic peptide
  Seed: EWLKTRPILSPLTKG
EWIKTLPFLSLLTKG

SEQ ID NO: 204132 - protein, 15 aa, Artificial Sequence
  Description of Artificial Sequence: Synthetic peptide
  Seed: EWLKTRPILSPLTKG
EWIKTLPFLSMLTKG

SEQ ID NO: 204133 - protein, 15 aa, Artificial Sequence
  Description of Artificial Sequence: Synthetic peptide
  Seed: EWLKTRPILSPLTKG
EWIKTLPFLSNLTKG

SEQ ID NO: 204134 - protein, 15 aa, Artificial Sequence
  Description of Artificial Sequence: Synthetic peptide
  Seed: EWLKTRPILSPLTKG
EWIKTLPFLSPLTKG

SEQ ID NO: 204135 - protein, 15 aa, Artificial Sequence
  Description of Artificial Sequence: Synthetic peptide
  Seed: EWLKTRPILSPLTKG
EWIKTLPFLSQLTKG

SEQ ID NO: 204136 - protein, 15 aa, Artificial Sequence
  Description of Artificial Sequence: Synthetic peptide
  Seed: EWLKTRPILSPLTKG
EWIKTLPFLSSLTKG

SEQ ID NO: 204137 - protein, 15 aa, Artificial Sequence
  Description of Artificial Sequence: Synthetic peptide
  Seed: EWLKTRPILSPLTKG
EWIKTLPFLSTLTKG

SEQ ID NO: 204138 - protein, 15 aa, Artificial Sequence
  Description of Artificial Sequence: Synthetic peptide
  Seed: EWLKTRPILSPLTKG
EWIKTLPFLSVLTKG

SEQ ID NO: 204139 - protein, 15 aa, Artificial Sequence
  Description of Artificial Sequence: Synthetic peptide
  Seed: EWLKTRPILSPLTKG
EWIKTLPFLSWLTKG

SEQ ID NO: 204140 - protein, 15 aa, Artificial Sequence
  Description of Artificial Sequence: Synthetic peptide
  Seed: EWLKTRPILSPLTKG
EWIKTLPFLSYLTKG

SEQ ID NO: 204141 - protein, 15 aa, Artificial Sequence
  Description of Artificial Sequence: Synthetic peptide
  Seed: EWLKTRPILSPLTKG
EWIKTLPHLSALTKG

SEQ ID NO: 204142 - protein, 15 aa, Artificial Sequence
  Description of Artificial Sequence: Synthetic peptide
  Seed: EWLKTRPILSPLTKG
EWIKTLPHLSSLTKG

SEQ ID NO: 204143 - protein, 15 aa, Artificial Sequence
  Description of Artificial Sequence: Synthetic peptide
  Seed: EWLKTRPILSPLTKG
EWIKTLPILSILTKG

SEQ ID NO: 204144 - protein, 15 aa, Artificial Sequence
  Description of Artificial Sequence: Synthetic peptide
  Seed: EWLKTRPILSPLTKG
EWIKTLPILSLLTKG

SEQ ID NO: 204145 - protein, 15 aa, Artificial Sequence
  Description of Artificial Sequence: Synthetic peptide
  Seed: EWLKTRPILSPLTKG
EWIKTLPILSVLTKG

SEQ ID NO: 204146 - protein, 15 aa, Artificial Sequence
  Description of Artificial Sequence: Synthetic peptide
  Seed: EWLKTRPILSPLTKG
EWIKTLPKLSALTKG

SEQ ID NO: 204147 - protein, 15 aa, Artificial Sequence
  Description of Artificial Sequence: Synthetic peptide
  Seed: EWLKTRPILSPLTKG
EWIKTLPKLSFLTKG

SEQ ID NO: 204148 - protein, 15 aa, Artificial Sequence
  Description of Artificial Sequence: Synthetic peptide
  Seed: EWLKTRPILSPLTKG
EWIKTLPKLSGLTKG

SEQ ID NO: 204149 - protein, 15 aa, Artificial Sequence
  Description of Artificial Sequence: Synthetic peptide
  Seed: EWLKTRPILSPLTKG
EWIKTLPKLSHLTKG

SEQ ID NO: 204150 - protein, 15 aa, Artificial Sequence
  Description of Artificial Sequence: Synthetic peptide
  Seed: EWLKTRPILSPLTKG
EWIKTLPKLSILTKG

SEQ ID NO: 204151 - protein, 15 aa, Artificial Sequence
  Description of Artificial Sequence: Synthetic peptide
  Seed: EWLKTRPILSPLTKG
EWIKTLPKLSKLTKG

SEQ ID NO: 204152 - protein, 15 aa, Artificial Sequence
  Description of Artificial Sequence: Synthetic peptide
  Seed: EWLKTRPILSPLTKG
EWIKTLPKLSLLTKG

SEQ ID NO: 204153 - protein, 15 aa, Artificial Sequence
  Description of Artificial Sequence: Synthetic peptide
  Seed: EWLKTRPILSPLTKG
EWIKTLPKLSMLTKG

SEQ ID NO: 204154 - protein, 15 aa, Artificial Sequence
  Description of Artificial Sequence: Synthetic peptide
  Seed: EWLKTRPILSPLTKG
EWIKTLPKLSNLTKG

SEQ ID NO: 204155 - protein, 15 aa, Artificial Sequence
  Description of Artificial Sequence: Synthetic peptide
  Seed: EWLKTRPILSPLTKG
EWIKTLPKLSPLTKG

SEQ ID NO: 204156 - protein, 15 aa, Artificial Sequence
  Description of Artificial Sequence: Synthetic peptide
  Seed: EWLKTRPILSPLTKG
EWIKTLPKLSQLTKG

SEQ ID NO: 204157 - protein, 15 aa, Artificial Sequence
  Description of Artificial Sequence: Synthetic peptide
  Seed: EWLKTRPILSPLTKG
EWIKTLPKLSRLTKG

SEQ ID NO: 204158 - protein, 15 aa, Artificial Sequence
  Description of Artificial Sequence: Synthetic peptide
  Seed: EWLKTRPILSPLTKG
EWIKTLPKLSSLTKG

SEQ ID NO: 204159 - protein, 15 aa, Artificial Sequence
  Description of Artificial Sequence: Synthetic peptide
  Seed: EWLKTRPILSPLTKG
EWIKTLPKLSTLTKG

SEQ ID NO: 204160 - protein, 15 aa, Artificial Sequence
  Description of Artificial Sequence: Synthetic peptide
  Seed: EWLKTRPILSPLTKG
EWIKTLPKLSVLTKG

SEQ ID NO: 204161 - protein, 15 aa, Artificial Sequence
  Description of Artificial Sequence: Synthetic peptide
  Seed: EWLKTRPILSPLTKG
EWIKTLPKLSYLTKG

SEQ ID NO: 204162 - protein, 15 aa, Artificial Sequence
  Description of Artificial Sequence: Synthetic peptide
  Seed: EWLKTRPILSPLTKG
EWIKTLPLLSILTKG

SEQ ID NO: 204163 - protein, 15 aa, Artificial Sequence
  Description of Artificial Sequence: Synthetic peptide
  Seed: EWLKTRPILSPLTKG
EWIKTLPLLSLLTKG

SEQ ID NO: 204164 - protein, 15 aa, Artificial Sequence
  Description of Artificial Sequence: Synthetic peptide
  Seed: EWLKTRPILSPLTKG
EWIKTLPLLSVLTKG

SEQ ID NO: 204165 - protein, 15 aa, Artificial Sequence
  Description of Artificial Sequence: Synthetic peptide
  Seed: EWLKTRPILSPLTKG
EWIKTLPMLSILTKG

SEQ ID NO: 204166 - protein, 15 aa, Artificial Sequence
  Description of Artificial Sequence: Synthetic peptide
  Seed: EWLKTRPILSPLTKG
EWIKTLPMLSLLTKG

SEQ ID NO: 204167 - protein, 15 aa, Artificial Sequence
  Description of Artificial Sequence: Synthetic peptide
  Seed: EWLKTRPILSPLTKG
EWIKTLPMLSVLTKG

SEQ ID NO: 204168 - protein, 15 aa, Artificial Sequence
  Description of Artificial Sequence: Synthetic peptide
  Seed: EWLKTRPILSPLTKG
EWIKTLPRLSALTKG

SEQ ID NO: 204169 - protein, 15 aa, Artificial Sequence
  Description of Artificial Sequence: Synthetic peptide
  Seed: EWLKTRPILSPLTKG
EWIKTLPRLSCLTKG

SEQ ID NO: 204170 - protein, 15 aa, Artificial Sequence
  Description of Artificial Sequence: Synthetic peptide
  Seed: EWLKTRPILSPLTKG
EWIKTLPRLSELTKG

SEQ ID NO: 204171 - protein, 15 aa, Artificial Sequence
  Description of Artificial Sequence: Synthetic peptide
  Seed: EWLKTRPILSPLTKG
EWIKTLPRLSFLTKG

SEQ ID NO: 204172 - protein, 15 aa, Artificial Sequence
  Description of Artificial Sequence: Synthetic peptide
  Seed: EWLKTRPILSPLTKG
EWIKTLPRLSGLTKG

SEQ ID NO: 204173 - protein, 15 aa, Artificial Sequence
  Description of Artificial Sequence: Synthetic peptide
  Seed: EWLKTRPILSPLTKG
EWIKTLPRLSHLTKG

SEQ ID NO: 204174 - protein, 15 aa, Artificial Sequence
  Description of Artificial Sequence: Synthetic peptide
  Seed: EWLKTRPILSPLTKG
EWIKTLPRLSILTKG

SEQ ID NO: 204175 - protein, 15 aa, Artificial Sequence
  Description of Artificial Sequence: Synthetic peptide
  Seed: EWLKTRPILSPLTKG
EWIKTLPRLSKLTKG

SEQ ID NO: 204176 - protein, 15 aa, Artificial Sequence
  Description of Artificial Sequence: Synthetic peptide
  Seed: EWLKTRPILSPLTKG
EWIKTLPRLSLLTKG

SEQ ID NO: 204177 - protein, 15 aa, Artificial Sequence
  Description of Artificial Sequence: Synthetic peptide
  Seed: EWLKTRPILSPLTKG
EWIKTLPRLSMLTKG

SEQ ID NO: 204178 - protein, 15 aa, Artificial Sequence
  Description of Artificial Sequence: Synthetic peptide
  Seed: EWLKTRPILSPLTKG
EWIKTLPRLSNLTKG

SEQ ID NO: 204179 - protein, 15 aa, Artificial Sequence
  Description of Artificial Sequence: Synthetic peptide
  Seed: EWLKTRPILSPLTKG
EWIKTLPRLSPLTKG

SEQ ID NO: 204180 - protein, 15 aa, Artificial Sequence
  Description of Artificial Sequence: Synthetic peptide
  Seed: EWLKTRPILSPLTKG
EWIKTLPRLSQLTKG

SEQ ID NO: 204181 - protein, 15 aa, Artificial Sequence
  Description of Artificial Sequence: Synthetic peptide
  Seed: EWLKTRPILSPLTKG
EWIKTLPRLSRLTKG

SEQ ID NO: 204182 - protein, 15 aa, Artificial Sequence
  Description of Artificial Sequence: Synthetic peptide
  Seed: EWLKTRPILSPLTKG
EWIKTLPRLSSLTKG

SEQ ID NO: 204183 - protein, 15 aa, Artificial Sequence
  Description of Artificial Sequence: Synthetic peptide
  Seed: EWLKTRPILSPLTKG
EWIKTLPRLSTLTKG

SEQ ID NO: 204184 - protein, 15 aa, Artificial Sequence
  Description of Artificial Sequence: Synthetic peptide
  Seed: EWLKTRPILSPLTKG
EWIKTLPRLSVLTKG

SEQ ID NO: 204185 - protein, 15 aa, Artificial Sequence
  Description of Artificial Sequence: Synthetic peptide
  Seed: EWLKTRPILSPLTKG
EWIKTLPRLSWLTKG

SEQ ID NO: 204186 - protein, 15 aa, Artificial Sequence
  Description of Artificial Sequence: Synthetic peptide
  Seed: EWLKTRPILSPLTKG
EWIKTLPRLSYLTKG

SEQ ID NO: 204187 - protein, 15 aa, Artificial Sequence
  Description of Artificial Sequence: Synthetic peptide
  Seed: EWLKTRPILSPLTKG
EWIKTLPSLSRLTKG

SEQ ID NO: 204188 - protein, 15 aa, Artificial Sequence
  Description of Artificial Sequence: Synthetic peptide
  Seed: EWLKTRPILSPLTKG
EWIKTLPWLSFLTKG

SEQ ID NO: 204189 - protein, 15 aa, Artificial Sequence
  Description of Artificial Sequence: Synthetic peptide
  Seed: EWLKTRPILSPLTKG
EWIKTLPWLSILTKG

SEQ ID NO: 204190 - protein, 15 aa, Artificial Sequence
  Description of Artificial Sequence: Synthetic peptide
  Seed: EWLKTRPILSPLTKG
EWIKTLPWLSLLTKG

SEQ ID NO: 204191 - protein, 15 aa, Artificial Sequence
  Description of Artificial Sequence: Synthetic peptide
  Seed: EWLKTRPILSPLTKG
EWIKTLPWLSMLTKG

SEQ ID NO: 204192 - protein, 15 aa, Artificial Sequence
  Description of Artificial Sequence: Synthetic peptide
  Seed: EWLKTRPILSPLTKG
EWIKTLPWLSVLTKG

SEQ ID NO: 204193 - protein, 15 aa, Artificial Sequence
  Description of Artificial Sequence: Synthetic peptide
  Seed: EWLKTRPILSPLTKG
EWIKTLPYLSFLTKG

SEQ ID NO: 204194 - protein, 15 aa, Artificial Sequence
  Description of Artificial Sequence: Synthetic peptide
  Seed: EWLKTRPILSPLTKG
EWIKTLPYLSILTKG

SEQ ID NO: 204195 - protein, 15 aa, Artificial Sequence
  Description of Artificial Sequence: Synthetic peptide
  Seed: EWLKTRPILSPLTKG
EWIKTLPYLSLLTKG

SEQ ID NO: 204196 - protein, 15 aa, Artificial Sequence
  Description of Artificial Sequence: Synthetic peptide
  Seed: EWLKTRPILSPLTKG
EWIKTLPYLSMLTKG

SEQ ID NO: 204197 - protein, 15 aa, Artificial Sequence
  Description of Artificial Sequence: Synthetic peptide
  Seed: EWLKTRPILSPLTKG
EWIKTLPYLSVLTKG

SEQ ID NO: 204198 - protein, 15 aa, Artificial Sequence
  Description of Artificial Sequence: Synthetic peptide
  Seed: EWLKTRPILSPLTKG
EWIKTMPALSALTKG

SEQ ID NO: 204199 - protein, 15 aa, Artificial Sequence
  Description of Artificial Sequence: Synthetic peptide
  Seed: EWLKTRPILSPLTKG
EWIKTMPALSKLTKG

SEQ ID NO: 204200 - protein, 15 aa, Artificial Sequence
  Description of Artificial Sequence: Synthetic peptide
  Seed: EWLKTRPILSPLTKG
EWIKTMPALSRLTKG

SEQ ID NO: 204201 - protein, 15 aa, Artificial Sequence
  Description of Artificial Sequence: Synthetic peptide
  Seed: EWLKTRPILSPLTKG
EWIKTMPALSSLTKG

SEQ ID NO: 204202 - protein, 15 aa, Artificial Sequence
  Description of Artificial Sequence: Synthetic peptide
  Seed: EWLKTRPILSPLTKG
EWIKTMPALSYLTKG

SEQ ID NO: 204203 - protein, 15 aa, Artificial Sequence
  Description of Artificial Sequence: Synthetic peptide
  Seed: EWLKTRPILSPLTKG
EWIKTMPFLSALTKG

SEQ ID NO: 204204 - protein, 15 aa, Artificial Sequence
  Description of Artificial Sequence: Synthetic peptide
  Seed: EWLKTRPILSPLTKG
EWIKTMPFLSCLTKG

SEQ ID NO: 204205 - protein, 15 aa, Artificial Sequence
  Description of Artificial Sequence: Synthetic peptide
  Seed: EWLKTRPILSPLTKG
EWIKTMPFLSDLTKG

SEQ ID NO: 204206 - protein, 15 aa, Artificial Sequence
  Description of Artificial Sequence: Synthetic peptide
  Seed: EWLKTRPILSPLTKG
EWIKTMPFLSELTKG

SEQ ID NO: 204207 - protein, 15 aa, Artificial Sequence
  Description of Artificial Sequence: Synthetic peptide
  Seed: EWLKTRPILSPLTKG
EWIKTMPFLSFLTKG

SEQ ID NO: 204208 - protein, 15 aa, Artificial Sequence
  Description of Artificial Sequence: Synthetic peptide
  Seed: EWLKTRPILSPLTKG
EWIKTMPFLSILTKG

SEQ ID NO: 204209 - protein, 15 aa, Artificial Sequence
  Description of Artificial Sequence: Synthetic peptide
  Seed: EWLKTRPILSPLTKG
EWIKTMPFLSLLTKG

SEQ ID NO: 204210 - protein, 15 aa, Artificial Sequence
  Description of Artificial Sequence: Synthetic peptide
  Seed: EWLKTRPILSPLTKG
EWIKTMPFLSMLTKG

SEQ ID NO: 204211 - protein, 15 aa, Artificial Sequence
  Description of Artificial Sequence: Synthetic peptide
  Seed: EWLKTRPILSPLTKG
EWIKTMPFLSNLTKG

SEQ ID NO: 204212 - protein, 15 aa, Artificial Sequence
  Description of Artificial Sequence: Synthetic peptide
  Seed: EWLKTRPILSPLTKG
EWIKTMPFLSSLTKG

SEQ ID NO: 204213 - protein, 15 aa, Artificial Sequence
  Description of Artificial Sequence: Synthetic peptide
  Seed: EWLKTRPILSPLTKG
EWIKTMPFLSTLTKG

SEQ ID NO: 204214 - protein, 15 aa, Artificial Sequence
  Description of Artificial Sequence: Synthetic peptide
  Seed: EWLKTRPILSPLTKG
EWIKTMPFLSVLTKG

SEQ ID NO: 204215 - protein, 15 aa, Artificial Sequence
  Description of Artificial Sequence: Synthetic peptide
  Seed: EWLKTRPILSPLTKG
EWIKTMPFLSYLTKG

SEQ ID NO: 204216 - protein, 15 aa, Artificial Sequence
  Description of Artificial Sequence: Synthetic peptide
  Seed: EWLKTRPILSPLTKG
EWIKTMPHLSALTKG

SEQ ID NO: 204217 - protein, 15 aa, Artificial Sequence
  Description of Artificial Sequence: Synthetic peptide
  Seed: EWLKTRPILSPLTKG
EWIKTMPHLSGLTKG

SEQ ID NO: 204218 - protein, 15 aa, Artificial Sequence
  Description of Artificial Sequence: Synthetic peptide
  Seed: EWLKTRPILSPLTKG
EWIKTMPHLSQLTKG

SEQ ID NO: 204219 - protein, 15 aa, Artificial Sequence
  Description of Artificial Sequence: Synthetic peptide
  Seed: EWLKTRPILSPLTKG
EWIKTMPHLSSLTKG

SEQ ID NO: 204220 - protein, 15 aa, Artificial Sequence
  Description of Artificial Sequence: Synthetic peptide
  Seed: EWLKTRPILSPLTKG
EWIKTMPKLSALTKG

SEQ ID NO: 204221 - protein, 15 aa, Artificial Sequence
  Description of Artificial Sequence: Synthetic peptide
  Seed: EWLKTRPILSPLTKG
EWIKTMPKLSFLTKG

SEQ ID NO: 204222 - protein, 15 aa, Artificial Sequence
  Description of Artificial Sequence: Synthetic peptide
  Seed: EWLKTRPILSPLTKG
EWIKTMPKLSGLTKG

SEQ ID NO: 204223 - protein, 15 aa, Artificial Sequence
  Description of Artificial Sequence: Synthetic peptide
  Seed: EWLKTRPILSPLTKG
EWIKTMPKLSHLTKG

SEQ ID NO: 204224 - protein, 15 aa, Artificial Sequence
  Description of Artificial Sequence: Synthetic peptide
  Seed: EWLKTRPILSPLTKG
EWIKTMPKLSILTKG

SEQ ID NO: 204225 - protein, 15 aa, Artificial Sequence
  Description of Artificial Sequence: Synthetic peptide
  Seed: EWLKTRPILSPLTKG
EWIKTMPKLSKLTKG

SEQ ID NO: 204226 - protein, 15 aa, Artificial Sequence
  Description of Artificial Sequence: Synthetic peptide
  Seed: EWLKTRPILSPLTKG
EWIKTMPKLSLLTKG

SEQ ID NO: 204227 - protein, 15 aa, Artificial Sequence
  Description of Artificial Sequence: Synthetic peptide
  Seed: EWLKTRPILSPLTKG
EWIKTMPKLSMLTKG

SEQ ID NO: 204228 - protein, 15 aa, Artificial Sequence
  Description of Artificial Sequence: Synthetic peptide
  Seed: EWLKTRPILSPLTKG
EWIKTMPKLSNLTKG

SEQ ID NO: 204229 - protein, 15 aa, Artificial Sequence
  Description of Artificial Sequence: Synthetic peptide
  Seed: EWLKTRPILSPLTKG
EWIKTMPKLSPLTKG

SEQ ID NO: 204230 - protein, 15 aa, Artificial Sequence
  Description of Artificial Sequence: Synthetic peptide
  Seed: EWLKTRPILSPLTKG
EWIKTMPKLSQLTKG

SEQ ID NO: 204231 - protein, 15 aa, Artificial Sequence
  Description of Artificial Sequence: Synthetic peptide
  Seed: EWLKTRPILSPLTKG
EWIKTMPKLSRLTKG

SEQ ID NO: 204232 - protein, 15 aa, Artificial Sequence
  Description of Artificial Sequence: Synthetic peptide
  Seed: EWLKTRPILSPLTKG
EWIKTMPKLSSLTKG

SEQ ID NO: 204233 - protein, 15 aa, Artificial Sequence
  Description of Artificial Sequence: Synthetic peptide
  Seed: EWLKTRPILSPLTKG
EWIKTMPKLSTLTKG

SEQ ID NO: 204234 - protein, 15 aa, Artificial Sequence
  Description of Artificial Sequence: Synthetic peptide
  Seed: EWLKTRPILSPLTKG
EWIKTMPKLSVLTKG

SEQ ID NO: 204235 - protein, 15 aa, Artificial Sequence
  Description of Artificial Sequence: Synthetic peptide
  Seed: EWLKTRPILSPLTKG
EWIKTMPKLSWLTKG

SEQ ID NO: 204236 - protein, 15 aa, Artificial Sequence
  Description of Artificial Sequence: Synthetic peptide
  Seed: EWLKTRPILSPLTKG
EWIKTMPKLSYLTKG

SEQ ID NO: 204237 - protein, 15 aa, Artificial Sequence
  Description of Artificial Sequence: Synthetic peptide
  Seed: EWLKTRPILSPLTKG
EWIKTMPLLSILTKG

SEQ ID NO: 204238 - protein, 15 aa, Artificial Sequence
  Description of Artificial Sequence: Synthetic peptide
  Seed: EWLKTRPILSPLTKG
EWIKTMPLLSLLTKG

SEQ ID NO: 204239 - protein, 15 aa, Artificial Sequence
  Description of Artificial Sequence: Synthetic peptide
  Seed: EWLKTRPILSPLTKG
EWIKTMPLLSVLTKG

SEQ ID NO: 204240 - protein, 15 aa, Artificial Sequence
  Description of Artificial Sequence: Synthetic peptide
  Seed: EWLKTRPILSPLTKG
EWIKTMPMLSILTKG

SEQ ID NO: 204241 - protein, 15 aa, Artificial Sequence
  Description of Artificial Sequence: Synthetic peptide
  Seed: EWLKTRPILSPLTKG
EWIKTMPMLSLLTKG

SEQ ID NO: 204242 - protein, 15 aa, Artificial Sequence
  Description of Artificial Sequence: Synthetic peptide
  Seed: EWLKTRPILSPLTKG
EWIKTMPRLSALTKG

SEQ ID NO: 204243 - protein, 15 aa, Artificial Sequence
  Description of Artificial Sequence: Synthetic peptide
  Seed: EWLKTRPILSPLTKG
EWIKTMPRLSCLTKG

SEQ ID NO: 204244 - protein, 15 aa, Artificial Sequence
  Description of Artificial Sequence: Synthetic peptide
  Seed: EWLKTRPILSPLTKG
EWIKTMPRLSELTKG

SEQ ID NO: 204245 - protein, 15 aa, Artificial Sequence
  Description of Artificial Sequence: Synthetic peptide
  Seed: EWLKTRPILSPLTKG
EWIKTMPRLSFLTKG

SEQ ID NO: 204246 - protein, 15 aa, Artificial Sequence
  Description of Artificial Sequence: Synthetic peptide
  Seed: EWLKTRPILSPLTKG
EWIKTMPRLSGLTKG

SEQ ID NO: 204247 - protein, 15 aa, Artificial Sequence
  Description of Artificial Sequence: Synthetic peptide
  Seed: EWLKTRPILSPLTKG
EWIKTMPRLSHLTKG

SEQ ID NO: 204248 - protein, 15 aa, Artificial Sequence
  Description of Artificial Sequence: Synthetic peptide
  Seed: EWLKTRPILSPLTKG
EWIKTMPRLSILTKG

SEQ ID NO: 204249 - protein, 15 aa, Artificial Sequence
  Description of Artificial Sequence: Synthetic peptide
  Seed: EWLKTRPILSPLTKG
EWIKTMPRLSKLTKG

SEQ ID NO: 204250 - protein, 15 aa, Artificial Sequence
  Description of Artificial Sequence: Synthetic peptide
  Seed: EWLKTRPILSPLTKG
EWIKTMPRLSLLTKG

SEQ ID NO: 204251 - protein, 15 aa, Artificial Sequence
  Description of Artificial Sequence: Synthetic peptide
  Seed: EWLKTRPILSPLTKG
EWIKTMPRLSMLTKG

SEQ ID NO: 204252 - protein, 15 aa, Artificial Sequence
  Description of Artificial Sequence: Synthetic peptide
  Seed: EWLKTRPILSPLTKG
EWIKTMPRLSNLTKG

SEQ ID NO: 204253 - protein, 15 aa, Artificial Sequence
  Description of Artificial Sequence: Synthetic peptide
  Seed: EWLKTRPILSPLTKG
EWIKTMPRLSPLTKG

SEQ ID NO: 204254 - protein, 15 aa, Artificial Sequence
  Description of Artificial Sequence: Synthetic peptide
  Seed: EWLKTRPILSPLTKG
EWIKTMPRLSQLTKG

SEQ ID NO: 204255 - protein, 15 aa, Artificial Sequence
  Description of Artificial Sequence: Synthetic peptide
  Seed: EWLKTRPILSPLTKG
EWIKTMPRLSRLTKG

SEQ ID NO: 204256 - protein, 15 aa, Artificial Sequence
  Description of Artificial Sequence: Synthetic peptide
  Seed: EWLKTRPILSPLTKG
EWIKTMPRLSSLTKG

SEQ ID NO: 204257 - protein, 15 aa, Artificial Sequence
  Description of Artificial Sequence: Synthetic peptide
  Seed: EWLKTRPILSPLTKG
EWIKTMPRLSTLTKG

SEQ ID NO: 204258 - protein, 15 aa, Artificial Sequence
  Description of Artificial Sequence: Synthetic peptide
  Seed: EWLKTRPILSPLTKG
EWIKTMPRLSWLTKG

SEQ ID NO: 204259 - protein, 15 aa, Artificial Sequence
  Description of Artificial Sequence: Synthetic peptide
  Seed: EWLKTRPILSPLTKG
EWIKTMPRLSYLTKG

SEQ ID NO: 204260 - protein, 15 aa, Artificial Sequence
  Description of Artificial Sequence: Synthetic peptide
  Seed: EWLKTRPILSPLTKG
EWIKTMPSLSRLTKG

SEQ ID NO: 204261 - protein, 15 aa, Artificial Sequence
  Description of Artificial Sequence: Synthetic peptide
  Seed: EWLKTRPILSPLTKG
EWIKTMPSLSSLTKG

SEQ ID NO: 204262 - protein, 15 aa, Artificial Sequence
  Description of Artificial Sequence: Synthetic peptide
  Seed: EWLKTRPILSPLTKG
EWIKTMPSLSYLTKG

SEQ ID NO: 204263 - protein, 15 aa, Artificial Sequence
  Description of Artificial Sequence: Synthetic peptide
  Seed: EWLKTRPILSPLTKG
EWIKTMPTLSRLTKG

SEQ ID NO: 204264 - protein, 15 aa, Artificial Sequence
  Description of Artificial Sequence: Synthetic peptide
  Seed: EWLKTRPILSPLTKG
EWIKTMPWLSFLTKG

SEQ ID NO: 204265 - protein, 15 aa, Artificial Sequence
  Description of Artificial Sequence: Synthetic peptide
  Seed: EWLKTRPILSPLTKG
EWIKTMPWLSILTKG

SEQ ID NO: 204266 - protein, 15 aa, Artificial Sequence
  Description of Artificial Sequence: Synthetic peptide
  Seed: EWLKTRPILSPLTKG
EWIKTMPWLSLLTKG

SEQ ID NO: 204267 - protein, 15 aa, Artificial Sequence
  Description of Artificial Sequence: Synthetic peptide
  Seed: EWLKTRPILSPLTKG
EWIKTMPWLSVLTKG

SEQ ID NO: 204268 - protein, 15 aa, Artificial Sequence
  Description of Artificial Sequence: Synthetic peptide
  Seed: EWLKTRPILSPLTKG
EWIKTMPYLSFLTKG

SEQ ID NO: 204269 - protein, 15 aa, Artificial Sequence
  Description of Artificial Sequence: Synthetic peptide
  Seed: EWLKTRPILSPLTKG
EWIKTMPYLSILTKG

SEQ ID NO: 204270 - protein, 15 aa, Artificial Sequence
  Description of Artificial Sequence: Synthetic peptide
  Seed: EWLKTRPILSPLTKG
EWIKTMPYLSLLTKG

SEQ ID NO: 204271 - protein, 15 aa, Artificial Sequence
  Description of Artificial Sequence: Synthetic peptide
  Seed: EWLKTRPILSPLTKG
EWIKTMPYLSVLTKG

SEQ ID NO: 204272 - protein, 15 aa, Artificial Sequence
  Description of Artificial Sequence: Synthetic peptide
  Seed: EWLKTRPILSPLTKG
EWIKTNPFLSFLTKG

SEQ ID NO: 204273 - protein, 15 aa, Artificial Sequence
  Description of Artificial Sequence: Synthetic peptide
  Seed: EWLKTRPILSPLTKG
EWIKTNPFLSILTKG

SEQ ID NO: 204274 - protein, 15 aa, Artificial Sequence
  Description of Artificial Sequence: Synthetic peptide
  Seed: EWLKTRPILSPLTKG
EWIKTNPFLSLLTKG

SEQ ID NO: 204275 - protein, 15 aa, Artificial Sequence
  Description of Artificial Sequence: Synthetic peptide
  Seed: EWLKTRPILSPLTKG
EWIKTNPFLSMLTKG

SEQ ID NO: 204276 - protein, 15 aa, Artificial Sequence
  Description of Artificial Sequence: Synthetic peptide
  Seed: EWLKTRPILSPLTKG
EWIKTNPFLSVLTKG

SEQ ID NO: 204277 - protein, 15 aa, Artificial Sequence
  Description of Artificial Sequence: Synthetic peptide
  Seed: EWLKTRPILSPLTKG
EWIKTQPFLSALTKG

SEQ ID NO: 204278 - protein, 15 aa, Artificial Sequence
  Description of Artificial Sequence: Synthetic peptide
  Seed: EWLKTRPILSPLTKG
EWIKTQPFLSFLTKG

SEQ ID NO: 204279 - protein, 15 aa, Artificial Sequence
  Description of Artificial Sequence: Synthetic peptide
  Seed: EWLKTRPILSPLTKG
EWIKTQPFLSILTKG

SEQ ID NO: 204280 - protein, 15 aa, Artificial Sequence
  Description of Artificial Sequence: Synthetic peptide
  Seed: EWLKTRPILSPLTKG
EWIKTQPFLSLLTKG

SEQ ID NO: 204281 - protein, 15 aa, Artificial Sequence
  Description of Artificial Sequence: Synthetic peptide
  Seed: EWLKTRPILSPLTKG
EWIKTQPFLSMLTKG

SEQ ID NO: 204282 - protein, 15 aa, Artificial Sequence
  Description of Artificial Sequence: Synthetic peptide
  Seed: EWLKTRPILSPLTKG
EWIKTQPFLSTLTKG

SEQ ID NO: 204283 - protein, 15 aa, Artificial Sequence
  Description of Artificial Sequence: Synthetic peptide
  Seed: EWLKTRPILSPLTKG
EWIKTQPFLSVLTKG

SEQ ID NO: 204284 - protein, 15 aa, Artificial Sequence
  Description of Artificial Sequence: Synthetic peptide
  Seed: EWLKTRPILSPLTKG
EWIKTQPFLSYLTKG

SEQ ID NO: 204285 - protein, 15 aa, Artificial Sequence
  Description of Artificial Sequence: Synthetic peptide
  Seed: EWLKTRPILSPLTKG
EWIKTQPKLSALTKG

SEQ ID NO: 204286 - protein, 15 aa, Artificial Sequence
  Description of Artificial Sequence: Synthetic peptide
  Seed: EWLKTRPILSPLTKG
EWIKTQPKLSSLTKG

SEQ ID NO: 204287 - protein, 15 aa, Artificial Sequence
  Description of Artificial Sequence: Synthetic peptide
  Seed: EWLKTRPILSPLTKG
EWIKTQPRLSALTKG

SEQ ID NO: 204288 - protein, 15 aa, Artificial Sequence
  Description of Artificial Sequence: Synthetic peptide
  Seed: EWLKTRPILSPLTKG
EWIKTQPRLSFLTKG

SEQ ID NO: 204289 - protein, 15 aa, Artificial Sequence
  Description of Artificial Sequence: Synthetic peptide
  Seed: EWLKTRPILSPLTKG
EWIKTQPRLSGLTKG

SEQ ID NO: 204290 - protein, 15 aa, Artificial Sequence
  Description of Artificial Sequence: Synthetic peptide
  Seed: EWLKTRPILSPLTKG
EWIKTQPRLSILTKG

SEQ ID NO: 204291 - protein, 15 aa, Artificial Sequence
  Description of Artificial Sequence: Synthetic peptide
  Seed: EWLKTRPILSPLTKG
EWIKTQPRLSLLTKG

SEQ ID NO: 204292 - protein, 15 aa, Artificial Sequence
  Description of Artificial Sequence: Synthetic peptide
  Seed: EWLKTRPILSPLTKG
EWIKTQPRLSMLTKG

SEQ ID NO: 204293 - protein, 15 aa, Artificial Sequence
  Description of Artificial Sequence: Synthetic peptide
  Seed: EWLKTRPILSPLTKG
EWIKTQPRLSQLTKG

SEQ ID NO: 204294 - protein, 15 aa, Artificial Sequence
  Description of Artificial Sequence: Synthetic peptide
  Seed: EWLKTRPILSPLTKG
EWIKTQPRLSRLTKG

SEQ ID NO: 204295 - protein, 15 aa, Artificial Sequence
  Description of Artificial Sequence: Synthetic peptide
  Seed: EWLKTRPILSPLTKG
EWIKTQPRLSSLTKG

SEQ ID NO: 204296 - protein, 15 aa, Artificial Sequence
  Description of Artificial Sequence: Synthetic peptide
  Seed: EWLKTRPILSPLTKG
EWIKTQPRLSVLTKG

SEQ ID NO: 204297 - protein, 15 aa, Artificial Sequence
  Description of Artificial Sequence: Synthetic peptide
  Seed: EWLKTRPILSPLTKG
EWIKTQPRLSYLTKG

SEQ ID NO: 204298 - protein, 15 aa, Artificial Sequence
  Description of Artificial Sequence: Synthetic peptide
  Seed: EWLKTRPILSPLTKG
EWIKTRPALSRLTKG

SEQ ID NO: 204299 - protein, 15 aa, Artificial Sequence
  Description of Artificial Sequence: Synthetic peptide
  Seed: EWLKTRPILSPLTKG
EWIKTRPALSYLTKG

SEQ ID NO: 204300 - protein, 15 aa, Artificial Sequence
  Description of Artificial Sequence: Synthetic peptide
  Seed: EWLKTRPILSPLTKG
EWIKTRPFLSILTKG

SEQ ID NO: 204301 - protein, 15 aa, Artificial Sequence
  Description of Artificial Sequence: Synthetic peptide
  Seed: EWLKTRPILSPLTKG
EWIKTRPFLSLLTKG

SEQ ID NO: 204302 - protein, 15 aa, Artificial Sequence
  Description of Artificial Sequence: Synthetic peptide
  Seed: EWLKTRPILSPLTKG
EWIKTRPFLSVLTKG

SEQ ID NO: 204303 - protein, 15 aa, Artificial Sequence
  Description of Artificial Sequence: Synthetic peptide
  Seed: EWLKTRPILSPLTKG
EWIKTRPRLSALTKG

SEQ ID NO: 204304 - protein, 15 aa, Artificial Sequence
  Description of Artificial Sequence: Synthetic peptide
  Seed: EWLKTRPILSPLTKG
EWIKTRPRLSFLTKG

SEQ ID NO: 204305 - protein, 15 aa, Artificial Sequence
  Description of Artificial Sequence: Synthetic peptide
  Seed: EWLKTRPILSPLTKG
EWIKTRPRLSILTKG

SEQ ID NO: 204306 - protein, 15 aa, Artificial Sequence
  Description of Artificial Sequence: Synthetic peptide
  Seed: EWLKTRPILSPLTKG
EWIKTRPRLSLLTKG

SEQ ID NO: 204307 - protein, 15 aa, Artificial Sequence
  Description of Artificial Sequence: Synthetic peptide
  Seed: EWLKTRPILSPLTKG
EWIKTRPRLSMLTKG

SEQ ID NO: 204308 - protein, 15 aa, Artificial Sequence
  Description of Artificial Sequence: Synthetic peptide
  Seed: EWLKTRPILSPLTKG
EWIKTRPRLSSLTKG

SEQ ID NO: 204309 - protein, 15 aa, Artificial Sequence
  Description of Artificial Sequence: Synthetic peptide
  Seed: EWLKTRPILSPLTKG
EWIKTRPRLSVLTKG

SEQ ID NO: 204310 - protein, 15 aa, Artificial Sequence
  Description of Artificial Sequence: Synthetic peptide
  Seed: EWLKTRPILSPLTKG
EWIKTRPRLSYLTKG

SEQ ID NO: 204311 - protein, 15 aa, Artificial Sequence
  Description of Artificial Sequence: Synthetic peptide
  Seed: EWLKTRPILSPLTKG
EWIKTRPSLSRLTKG

SEQ ID NO: 204312 - protein, 15 aa, Artificial Sequence
  Description of Artificial Sequence: Synthetic peptide
  Seed: EWLKTRPILSPLTKG
EWIKTRPSLSYLTKG

SEQ ID NO: 204313 - protein, 15 aa, Artificial Sequence
  Description of Artificial Sequence: Synthetic peptide
  Seed: EWLKTRPILSPLTKG
EWIKTRPTLSRLTKG

SEQ ID NO: 204314 - protein, 15 aa, Artificial Sequence
  Description of Artificial Sequence: Synthetic peptide
  Seed: EWLKTRPILSPLTKG
EWIKTSPALSRLTKG

SEQ ID NO: 204315 - protein, 15 aa, Artificial Sequence
  Description of Artificial Sequence: Synthetic peptide
  Seed: EWLKTRPILSPLTKG
EWIKTSPFLSALTKG

SEQ ID NO: 204316 - protein, 15 aa, Artificial Sequence
  Description of Artificial Sequence: Synthetic peptide
  Seed: EWLKTRPILSPLTKG
EWIKTSPFLSCLTKG

SEQ ID NO: 204317 - protein, 15 aa, Artificial Sequence
  Description of Artificial Sequence: Synthetic peptide
  Seed: EWLKTRPILSPLTKG
EWIKTSPFLSDLTKG

SEQ ID NO: 204318 - protein, 15 aa, Artificial Sequence
  Description of Artificial Sequence: Synthetic peptide
  Seed: EWLKTRPILSPLTKG
EWIKTSPFLSELTKG

SEQ ID NO: 204319 - protein, 15 aa, Artificial Sequence
  Description of Artificial Sequence: Synthetic peptide
  Seed: EWLKTRPILSPLTKG
EWIKTSPFLSFLTKG

SEQ ID NO: 204320 - protein, 15 aa, Artificial Sequence
  Description of Artificial Sequence: Synthetic peptide
  Seed: EWLKTRPILSPLTKG
EWIKTSPFLSILTKG

SEQ ID NO: 204321 - protein, 15 aa, Artificial Sequence
  Description of Artificial Sequence: Synthetic peptide
  Seed: EWLKTRPILSPLTKG
EWIKTSPFLSLLTKG

SEQ ID NO: 204322 - protein, 15 aa, Artificial Sequence
  Description of Artificial Sequence: Synthetic peptide
  Seed: EWLKTRPILSPLTKG
EWIKTSPFLSMLTKG

SEQ ID NO: 204323 - protein, 15 aa, Artificial Sequence
  Description of Artificial Sequence: Synthetic peptide
  Seed: EWLKTRPILSPLTKG
EWIKTSPFLSNLTKG

SEQ ID NO: 204324 - protein, 15 aa, Artificial Sequence
  Description of Artificial Sequence: Synthetic peptide
  Seed: EWLKTRPILSPLTKG
EWIKTSPFLSQLTKG

SEQ ID NO: 204325 - protein, 15 aa, Artificial Sequence
  Description of Artificial Sequence: Synthetic peptide
  Seed: EWLKTRPILSPLTKG
EWIKTSPFLSSLTKG

SEQ ID NO: 204326 - protein, 15 aa, Artificial Sequence
  Description of Artificial Sequence: Synthetic peptide
  Seed: EWLKTRPILSPLTKG
EWIKTSPFLSTLTKG

SEQ ID NO: 204327 - protein, 15 aa, Artificial Sequence
  Description of Artificial Sequence: Synthetic peptide
  Seed: EWLKTRPILSPLTKG
EWIKTSPFLSVLTKG

SEQ ID NO: 204328 - protein, 15 aa, Artificial Sequence
  Description of Artificial Sequence: Synthetic peptide
  Seed: EWLKTRPILSPLTKG
EWIKTSPFLSWLTKG

SEQ ID NO: 204329 - protein, 15 aa, Artificial Sequence
  Description of Artificial Sequence: Synthetic peptide
  Seed: EWLKTRPILSPLTKG
EWIKTSPFLSYLTKG

SEQ ID NO: 204330 - protein, 15 aa, Artificial Sequence
  Description of Artificial Sequence: Synthetic peptide
  Seed: EWLKTRPILSPLTKG
EWIKTSPKLSRLTKG

SEQ ID NO: 204331 - protein, 15 aa, Artificial Sequence
  Description of Artificial Sequence: Synthetic peptide
  Seed: EWLKTRPILSPLTKG
EWIKTSPKLSYLTKG

SEQ ID NO: 204332 - protein, 15 aa, Artificial Sequence
  Description of Artificial Sequence: Synthetic peptide
  Seed: EWLKTRPILSPLTKG
EWIKTSPLLSILTKG

SEQ ID NO: 204333 - protein, 15 aa, Artificial Sequence
  Description of Artificial Sequence: Synthetic peptide
  Seed: EWLKTRPILSPLTKG
EWIKTSPLLSLLTKG

SEQ ID NO: 204334 - protein, 15 aa, Artificial Sequence
  Description of Artificial Sequence: Synthetic peptide
  Seed: EWLKTRPILSPLTKG
EWIKTSPLLSVLTKG

SEQ ID NO: 204335 - protein, 15 aa, Artificial Sequence
  Description of Artificial Sequence: Synthetic peptide
  Seed: EWLKTRPILSPLTKG
EWIKTSPRLSALTKG

SEQ ID NO: 204336 - protein, 15 aa, Artificial Sequence
  Description of Artificial Sequence: Synthetic peptide
  Seed: EWLKTRPILSPLTKG
EWIKTSPRLSFLTKG

SEQ ID NO: 204337 - protein, 15 aa, Artificial Sequence
  Description of Artificial Sequence: Synthetic peptide
  Seed: EWLKTRPILSPLTKG
EWIKTSPRLSILTKG

SEQ ID NO: 204338 - protein, 15 aa, Artificial Sequence
  Description of Artificial Sequence: Synthetic peptide
  Seed: EWLKTRPILSPLTKG
EWIKTSPRLSLLTKG

SEQ ID NO: 204339 - protein, 15 aa, Artificial Sequence
  Description of Artificial Sequence: Synthetic peptide
  Seed: EWLKTRPILSPLTKG
EWIKTSPRLSQLTKG

SEQ ID NO: 204340 - protein, 15 aa, Artificial Sequence
  Description of Artificial Sequence: Synthetic peptide
  Seed: EWLKTRPILSPLTKG
EWIKTSPRLSRLTKG

SEQ ID NO: 204341 - protein, 15 aa, Artificial Sequence
  Description of Artificial Sequence: Synthetic peptide
  Seed: EWLKTRPILSPLTKG
EWIKTSPRLSSLTKG

SEQ ID NO: 204342 - protein, 15 aa, Artificial Sequence
  Description of Artificial Sequence: Synthetic peptide
  Seed: EWLKTRPILSPLTKG
EWIKTSPRLSVLTKG

SEQ ID NO: 204343 - protein, 15 aa, Artificial Sequence
  Description of Artificial Sequence: Synthetic peptide
  Seed: EWLKTRPILSPLTKG
EWIKTSPRLSYLTKG

SEQ ID NO: 204344 - protein, 15 aa, Artificial Sequence
  Description of Artificial Sequence: Synthetic peptide
  Seed: EWLKTRPILSPLTKG
EWIKTSPWLSILTKG

SEQ ID NO: 204345 - protein, 15 aa, Artificial Sequence
  Description of Artificial Sequence: Synthetic peptide
  Seed: EWLKTRPILSPLTKG
EWIKTSPWLSLLTKG

SEQ ID NO: 204346 - protein, 15 aa, Artificial Sequence
  Description of Artificial Sequence: Synthetic peptide
  Seed: EWLKTRPILSPLTKG
EWIKTSPWLSVLTKG

SEQ ID NO: 204347 - protein, 15 aa, Artificial Sequence
  Description of Artificial Sequence: Synthetic peptide
  Seed: EWLKTRPILSPLTKG
EWIKTSPYLSILTKG

SEQ ID NO: 204348 - protein, 15 aa, Artificial Sequence
  Description of Artificial Sequence: Synthetic peptide
  Seed: EWLKTRPILSPLTKG
EWIKTSPYLSLLTKG

SEQ ID NO: 204349 - protein, 15 aa, Artificial Sequence
  Description of Artificial Sequence: Synthetic peptide
  Seed: EWLKTRPILSPLTKG
EWIKTSPYLSVLTKG

SEQ ID NO: 204350 - protein, 15 aa, Artificial Sequence
  Description of Artificial Sequence: Synthetic peptide
  Seed: EWLKTRPILSPLTKG
EWIKTTPFLSALTKG

SEQ ID NO: 204351 - protein, 15 aa, Artificial Sequence
  Description of Artificial Sequence: Synthetic peptide
  Seed: EWLKTRPILSPLTKG
EWIKTTPFLSCLTKG

SEQ ID NO: 204352 - protein, 15 aa, Artificial Sequence
  Description of Artificial Sequence: Synthetic peptide
  Seed: EWLKTRPILSPLTKG
EWIKTTPFLSDLTKG

SEQ ID NO: 204353 - protein, 15 aa, Artificial Sequence
  Description of Artificial Sequence: Synthetic peptide
  Seed: EWLKTRPILSPLTKG
EWIKTTPFLSELTKG

SEQ ID NO: 204354 - protein, 15 aa, Artificial Sequence
  Description of Artificial Sequence: Synthetic peptide
  Seed: EWLKTRPILSPLTKG
EWIKTTPFLSFLTKG

SEQ ID NO: 204355 - protein, 15 aa, Artificial Sequence
  Description of Artificial Sequence: Synthetic peptide
  Seed: EWLKTRPILSPLTKG
EWIKTTPFLSHLTKG

SEQ ID NO: 204356 - protein, 15 aa, Artificial Sequence
  Description of Artificial Sequence: Synthetic peptide
  Seed: EWLKTRPILSPLTKG
EWIKTTPFLSILTKG

SEQ ID NO: 204357 - protein, 15 aa, Artificial Sequence
  Description of Artificial Sequence: Synthetic peptide
  Seed: EWLKTRPILSPLTKG
EWIKTTPFLSLLTKG

SEQ ID NO: 204358 - protein, 15 aa, Artificial Sequence
  Description of Artificial Sequence: Synthetic peptide
  Seed: EWLKTRPILSPLTKG
EWIKTTPFLSMLTKG

SEQ ID NO: 204359 - protein, 15 aa, Artificial Sequence
  Description of Artificial Sequence: Synthetic peptide
  Seed: EWLKTRPILSPLTKG
EWIKTTPFLSNLTKG

SEQ ID NO: 204360 - protein, 15 aa, Artificial Sequence
  Description of Artificial Sequence: Synthetic peptide
  Seed: EWLKTRPILSPLTKG
EWIKTTPFLSPLTKG

SEQ ID NO: 204361 - protein, 15 aa, Artificial Sequence
  Description of Artificial Sequence: Synthetic peptide
  Seed: EWLKTRPILSPLTKG
EWIKTTPFLSQLTKG

SEQ ID NO: 204362 - protein, 15 aa, Artificial Sequence
  Description of Artificial Sequence: Synthetic peptide
  Seed: EWLKTRPILSPLTKG
EWIKTTPFLSSLTKG

SEQ ID NO: 204363 - protein, 15 aa, Artificial Sequence
  Description of Artificial Sequence: Synthetic peptide
  Seed: EWLKTRPILSPLTKG
EWIKTTPFLSTLTKG

SEQ ID NO: 204364 - protein, 15 aa, Artificial Sequence
  Description of Artificial Sequence: Synthetic peptide
  Seed: EWLKTRPILSPLTKG
EWIKTTPFLSVLTKG

SEQ ID NO: 204365 - protein, 15 aa, Artificial Sequence
  Description of Artificial Sequence: Synthetic peptide
  Seed: EWLKTRPILSPLTKG
EWIKTTPFLSWLTKG

SEQ ID NO: 204366 - protein, 15 aa, Artificial Sequence
  Description of Artificial Sequence: Synthetic peptide
  Seed: EWLKTRPILSPLTKG
EWIKTTPFLSYLTKG

SEQ ID NO: 204367 - protein, 15 aa, Artificial Sequence
  Description of Artificial Sequence: Synthetic peptide
  Seed: EWLKTRPILSPLTKG
EWIKTTPILSILTKG

SEQ ID NO: 204368 - protein, 15 aa, Artificial Sequence
  Description of Artificial Sequence: Synthetic peptide
  Seed: EWLKTRPILSPLTKG
EWIKTTPILSLLTKG

SEQ ID NO: 204369 - protein, 15 aa, Artificial Sequence
  Description of Artificial Sequence: Synthetic peptide
  Seed: EWLKTRPILSPLTKG
EWIKTTPILSVLTKG

SEQ ID NO: 204370 - protein, 15 aa, Artificial Sequence
  Description of Artificial Sequence: Synthetic peptide
  Seed: EWLKTRPILSPLTKG
EWIKTTPLLSFLTKG

SEQ ID NO: 204371 - protein, 15 aa, Artificial Sequence
  Description of Artificial Sequence: Synthetic peptide
  Seed: EWLKTRPILSPLTKG
EWIKTTPLLSILTKG

SEQ ID NO: 204372 - protein, 15 aa, Artificial Sequence
  Description of Artificial Sequence: Synthetic peptide
  Seed: EWLKTRPILSPLTKG
EWIKTTPLLSLLTKG

SEQ ID NO: 204373 - protein, 15 aa, Artificial Sequence
  Description of Artificial Sequence: Synthetic peptide
  Seed: EWLKTRPILSPLTKG
EWIKTTPLLSMLTKG

SEQ ID NO: 204374 - protein, 15 aa, Artificial Sequence
  Description of Artificial Sequence: Synthetic peptide
  Seed: EWLKTRPILSPLTKG
EWIKTTPLLSVLTKG

SEQ ID NO: 204375 - protein, 15 aa, Artificial Sequence
  Description of Artificial Sequence: Synthetic peptide
  Seed: EWLKTRPILSPLTKG
EWIKTTPMLSILTKG

SEQ ID NO: 204376 - protein, 15 aa, Artificial Sequence
  Description of Artificial Sequence: Synthetic peptide
  Seed: EWLKTRPILSPLTKG
EWIKTTPMLSLLTKG

SEQ ID NO: 204377 - protein, 15 aa, Artificial Sequence
  Description of Artificial Sequence: Synthetic peptide
  Seed: EWLKTRPILSPLTKG
EWIKTTPMLSVLTKG

SEQ ID NO: 204378 - protein, 15 aa, Artificial Sequence
  Description of Artificial Sequence: Synthetic peptide
  Seed: EWLKTRPILSPLTKG
EWIKTTPRLSALTKG

SEQ ID NO: 204379 - protein, 15 aa, Artificial Sequence
  Description of Artificial Sequence: Synthetic peptide
  Seed: EWLKTRPILSPLTKG
EWIKTTPRLSRLTKG

SEQ ID NO: 204380 - protein, 15 aa, Artificial Sequence
  Description of Artificial Sequence: Synthetic peptide
  Seed: EWLKTRPILSPLTKG
EWIKTTPRLSSLTKG

SEQ ID NO: 204381 - protein, 15 aa, Artificial Sequence
  Description of Artificial Sequence: Synthetic peptide
  Seed: EWLKTRPILSPLTKG
EWIKTTPRLSYLTKG

SEQ ID NO: 204382 - protein, 15 aa, Artificial Sequence
  Description of Artificial Sequence: Synthetic peptide
  Seed: EWLKTRPILSPLTKG
EWIKTTPWLSFLTKG

SEQ ID NO: 204383 - protein, 15 aa, Artificial Sequence
  Description of Artificial Sequence: Synthetic peptide
  Seed: EWLKTRPILSPLTKG
EWIKTTPWLSILTKG

SEQ ID NO: 204384 - protein, 15 aa, Artificial Sequence
  Description of Artificial Sequence: Synthetic peptide
  Seed: EWLKTRPILSPLTKG
EWIKTTPWLSLLTKG

SEQ ID NO: 204385 - protein, 15 aa, Artificial Sequence
  Description of Artificial Sequence: Synthetic peptide
  Seed: EWLKTRPILSPLTKG
EWIKTTPWLSMLTKG

SEQ ID NO: 204386 - protein, 15 aa, Artificial Sequence
  Description of Artificial Sequence: Synthetic peptide
  Seed: EWLKTRPILSPLTKG
EWIKTTPWLSVLTKG

SEQ ID NO: 204387 - protein, 15 aa, Artificial Sequence
  Description of Artificial Sequence: Synthetic peptide
  Seed: EWLKTRPILSPLTKG
EWIKTTPYLSFLTKG

SEQ ID NO: 204388 - protein, 15 aa, Artificial Sequence
  Description of Artificial Sequence: Synthetic peptide
  Seed: EWLKTRPILSPLTKG
EWIKTTPYLSILTKG

SEQ ID NO: 204389 - protein, 15 aa, Artificial Sequence
  Description of Artificial Sequence: Synthetic peptide
  Seed: EWLKTRPILSPLTKG
EWIKTTPYLSLLTKG

SEQ ID NO: 204390 - protein, 15 aa, Artificial Sequence
  Description of Artificial Sequence: Synthetic peptide
  Seed: EWLKTRPILSPLTKG
EWIKTTPYLSMLTKG

SEQ ID NO: 204391 - protein, 15 aa, Artificial Sequence
  Description of Artificial Sequence: Synthetic peptide
  Seed: EWLKTRPILSPLTKG
EWIKTTPYLSVLTKG

SEQ ID NO: 204392 - protein, 15 aa, Artificial Sequence
  Description of Artificial Sequence: Synthetic peptide
  Seed: EWLKTRPILSPLTKG
EWIKTVPALSRLTKG

SEQ ID NO: 204393 - protein, 15 aa, Artificial Sequence
  Description of Artificial Sequence: Synthetic peptide
  Seed: EWLKTRPILSPLTKG
EWIKTVPFLSALTKG

SEQ ID NO: 204394 - protein, 15 aa, Artificial Sequence
  Description of Artificial Sequence: Synthetic peptide
  Seed: EWLKTRPILSPLTKG
EWIKTVPFLSCLTKG

SEQ ID NO: 204395 - protein, 15 aa, Artificial Sequence
  Description of Artificial Sequence: Synthetic peptide
  Seed: EWLKTRPILSPLTKG
EWIKTVPFLSDLTKG

SEQ ID NO: 204396 - protein, 15 aa, Artificial Sequence
  Description of Artificial Sequence: Synthetic peptide
  Seed: EWLKTRPILSPLTKG
EWIKTVPFLSELTKG

SEQ ID NO: 204397 - protein, 15 aa, Artificial Sequence
  Description of Artificial Sequence: Synthetic peptide
  Seed: EWLKTRPILSPLTKG
EWIKTVPFLSFLTKG

SEQ ID NO: 204398 - protein, 15 aa, Artificial Sequence
  Description of Artificial Sequence: Synthetic peptide
  Seed: EWLKTRPILSPLTKG
EWIKTVPFLSHLTKG

SEQ ID NO: 204399 - protein, 15 aa, Artificial Sequence
  Description of Artificial Sequence: Synthetic peptide
  Seed: EWLKTRPILSPLTKG
EWIKTVPFLSILTKG

SEQ ID NO: 204400 - protein, 15 aa, Artificial Sequence
  Description of Artificial Sequence: Synthetic peptide
  Seed: EWLKTRPILSPLTKG
EWIKTVPFLSLLTKG

SEQ ID NO: 204401 - protein, 15 aa, Artificial Sequence
  Description of Artificial Sequence: Synthetic peptide
  Seed: EWLKTRPILSPLTKG
EWIKTVPFLSMLTKG

SEQ ID NO: 204402 - protein, 15 aa, Artificial Sequence
  Description of Artificial Sequence: Synthetic peptide
  Seed: EWLKTRPILSPLTKG
EWIKTVPFLSNLTKG

SEQ ID NO: 204403 - protein, 15 aa, Artificial Sequence
  Description of Artificial Sequence: Synthetic peptide
  Seed: EWLKTRPILSPLTKG
EWIKTVPFLSPLTKG

SEQ ID NO: 204404 - protein, 15 aa, Artificial Sequence
  Description of Artificial Sequence: Synthetic peptide
  Seed: EWLKTRPILSPLTKG
EWIKTVPFLSQLTKG

SEQ ID NO: 204405 - protein, 15 aa, Artificial Sequence
  Description of Artificial Sequence: Synthetic peptide
  Seed: EWLKTRPILSPLTKG
EWIKTVPFLSSLTKG

SEQ ID NO: 204406 - protein, 15 aa, Artificial Sequence
  Description of Artificial Sequence: Synthetic peptide
  Seed: EWLKTRPILSPLTKG
EWIKTVPFLSTLTKG

SEQ ID NO: 204407 - protein, 15 aa, Artificial Sequence
  Description of Artificial Sequence: Synthetic peptide
  Seed: EWLKTRPILSPLTKG
EWIKTVPFLSVLTKG

SEQ ID NO: 204408 - protein, 15 aa, Artificial Sequence
  Description of Artificial Sequence: Synthetic peptide
  Seed: EWLKTRPILSPLTKG
EWIKTVPFLSWLTKG

SEQ ID NO: 204409 - protein, 15 aa, Artificial Sequence
  Description of Artificial Sequence: Synthetic peptide
  Seed: EWLKTRPILSPLTKG
EWIKTVPFLSYLTKG

SEQ ID NO: 204410 - protein, 15 aa, Artificial Sequence
  Description of Artificial Sequence: Synthetic peptide
  Seed: EWLKTRPILSPLTKG
EWIKTVPILSILTKG

SEQ ID NO: 204411 - protein, 15 aa, Artificial Sequence
  Description of Artificial Sequence: Synthetic peptide
  Seed: EWLKTRPILSPLTKG
EWIKTVPILSLLTKG

SEQ ID NO: 204412 - protein, 15 aa, Artificial Sequence
  Description of Artificial Sequence: Synthetic peptide
  Seed: EWLKTRPILSPLTKG
EWIKTVPILSVLTKG

SEQ ID NO: 204413 - protein, 15 aa, Artificial Sequence
  Description of Artificial Sequence: Synthetic peptide
  Seed: EWLKTRPILSPLTKG
EWIKTVPKLSALTKG

SEQ ID NO: 204414 - protein, 15 aa, Artificial Sequence
  Description of Artificial Sequence: Synthetic peptide
  Seed: EWLKTRPILSPLTKG
EWIKTVPKLSFLTKG

SEQ ID NO: 204415 - protein, 15 aa, Artificial Sequence
  Description of Artificial Sequence: Synthetic peptide
  Seed: EWLKTRPILSPLTKG
EWIKTVPKLSGLTKG

SEQ ID NO: 204416 - protein, 15 aa, Artificial Sequence
  Description of Artificial Sequence: Synthetic peptide
  Seed: EWLKTRPILSPLTKG
EWIKTVPKLSHLTKG

SEQ ID NO: 204417 - protein, 15 aa, Artificial Sequence
  Description of Artificial Sequence: Synthetic peptide
  Seed: EWLKTRPILSPLTKG
EWIKTVPKLSILTKG

SEQ ID NO: 204418 - protein, 15 aa, Artificial Sequence
  Description of Artificial Sequence: Synthetic peptide
  Seed: EWLKTRPILSPLTKG
EWIKTVPKLSKLTKG

SEQ ID NO: 204419 - protein, 15 aa, Artificial Sequence
  Description of Artificial Sequence: Synthetic peptide
  Seed: EWLKTRPILSPLTKG
EWIKTVPKLSLLTKG

SEQ ID NO: 204420 - protein, 15 aa, Artificial Sequence
  Description of Artificial Sequence: Synthetic peptide
  Seed: EWLKTRPILSPLTKG
EWIKTVPKLSMLTKG

SEQ ID NO: 204421 - protein, 15 aa, Artificial Sequence
  Description of Artificial Sequence: Synthetic peptide
  Seed: EWLKTRPILSPLTKG
EWIKTVPKLSNLTKG

SEQ ID NO: 204422 - protein, 15 aa, Artificial Sequence
  Description of Artificial Sequence: Synthetic peptide
  Seed: EWLKTRPILSPLTKG
EWIKTVPKLSQLTKG

SEQ ID NO: 204423 - protein, 15 aa, Artificial Sequence
  Description of Artificial Sequence: Synthetic peptide
  Seed: EWLKTRPILSPLTKG
EWIKTVPKLSRLTKG

SEQ ID NO: 204424 - protein, 15 aa, Artificial Sequence
  Description of Artificial Sequence: Synthetic peptide
  Seed: EWLKTRPILSPLTKG
EWIKTVPKLSSLTKG

SEQ ID NO: 204425 - protein, 15 aa, Artificial Sequence
  Description of Artificial Sequence: Synthetic peptide
  Seed: EWLKTRPILSPLTKG
EWIKTVPKLSTLTKG

SEQ ID NO: 204426 - protein, 15 aa, Artificial Sequence
  Description of Artificial Sequence: Synthetic peptide
  Seed: EWLKTRPILSPLTKG
EWIKTVPKLSVLTKG

SEQ ID NO: 204427 - protein, 15 aa, Artificial Sequence
  Description of Artificial Sequence: Synthetic peptide
  Seed: EWLKTRPILSPLTKG
EWIKTVPKLSYLTKG

SEQ ID NO: 204428 - protein, 15 aa, Artificial Sequence
  Description of Artificial Sequence: Synthetic peptide
  Seed: EWLKTRPILSPLTKG
EWIKTVPLLSFLTKG

SEQ ID NO: 204429 - protein, 15 aa, Artificial Sequence
  Description of Artificial Sequence: Synthetic peptide
  Seed: EWLKTRPILSPLTKG
EWIKTVPLLSILTKG

SEQ ID NO: 204430 - protein, 15 aa, Artificial Sequence
  Description of Artificial Sequence: Synthetic peptide
  Seed: EWLKTRPILSPLTKG
EWIKTVPLLSLLTKG

SEQ ID NO: 204431 - protein, 15 aa, Artificial Sequence
  Description of Artificial Sequence: Synthetic peptide
  Seed: EWLKTRPILSPLTKG
EWIKTVPLLSMLTKG

SEQ ID NO: 204432 - protein, 15 aa, Artificial Sequence
  Description of Artificial Sequence: Synthetic peptide
  Seed: EWLKTRPILSPLTKG
EWIKTVPLLSVLTKG

SEQ ID NO: 204433 - protein, 15 aa, Artificial Sequence
  Description of Artificial Sequence: Synthetic peptide
  Seed: EWLKTRPILSPLTKG
EWIKTVPMLSILTKG

SEQ ID NO: 204434 - protein, 15 aa, Artificial Sequence
  Description of Artificial Sequence: Synthetic peptide
  Seed: EWLKTRPILSPLTKG
EWIKTVPMLSLLTKG

SEQ ID NO: 204435 - protein, 15 aa, Artificial Sequence
  Description of Artificial Sequence: Synthetic peptide
  Seed: EWLKTRPILSPLTKG
EWIKTVPMLSVLTKG

SEQ ID NO: 204436 - protein, 15 aa, Artificial Sequence
  Description of Artificial Sequence: Synthetic peptide
  Seed: EWLKTRPILSPLTKG
EWIKTVPRLSALTKG

SEQ ID NO: 204437 - protein, 15 aa, Artificial Sequence
  Description of Artificial Sequence: Synthetic peptide
  Seed: EWLKTRPILSPLTKG
EWIKTVPRLSFLTKG

SEQ ID NO: 204438 - protein, 15 aa, Artificial Sequence
  Description of Artificial Sequence: Synthetic peptide
  Seed: EWLKTRPILSPLTKG
EWIKTVPRLSGLTKG

SEQ ID NO: 204439 - protein, 15 aa, Artificial Sequence
  Description of Artificial Sequence: Synthetic peptide
  Seed: EWLKTRPILSPLTKG
EWIKTVPRLSHLTKG

SEQ ID NO: 204440 - protein, 15 aa, Artificial Sequence
  Description of Artificial Sequence: Synthetic peptide
  Seed: EWLKTRPILSPLTKG
EWIKTVPRLSILTKG

SEQ ID NO: 204441 - protein, 15 aa, Artificial Sequence
  Description of Artificial Sequence: Synthetic peptide
  Seed: EWLKTRPILSPLTKG
EWIKTVPRLSKLTKG

SEQ ID NO: 204442 - protein, 15 aa, Artificial Sequence
  Description of Artificial Sequence: Synthetic peptide
  Seed: EWLKTRPILSPLTKG
EWIKTVPRLSLLTKG

SEQ ID NO: 204443 - protein, 15 aa, Artificial Sequence
  Description of Artificial Sequence: Synthetic peptide
  Seed: EWLKTRPILSPLTKG
EWIKTVPRLSMLTKG

SEQ ID NO: 204444 - protein, 15 aa, Artificial Sequence
  Description of Artificial Sequence: Synthetic peptide
  Seed: EWLKTRPILSPLTKG
EWIKTVPRLSNLTKG

SEQ ID NO: 204445 - protein, 15 aa, Artificial Sequence
  Description of Artificial Sequence: Synthetic peptide
  Seed: EWLKTRPILSPLTKG
EWIKTVPRLSPLTKG

SEQ ID NO: 204446 - protein, 15 aa, Artificial Sequence
  Description of Artificial Sequence: Synthetic peptide
  Seed: EWLKTRPILSPLTKG
EWIKTVPRLSQLTKG

SEQ ID NO: 204447 - protein, 15 aa, Artificial Sequence
  Description of Artificial Sequence: Synthetic peptide
  Seed: EWLKTRPILSPLTKG
EWIKTVPRLSRLTKG

SEQ ID NO: 204448 - protein, 15 aa, Artificial Sequence
  Description of Artificial Sequence: Synthetic peptide
  Seed: EWLKTRPILSPLTKG
EWIKTVPRLSSLTKG

SEQ ID NO: 204449 - protein, 15 aa, Artificial Sequence
  Description of Artificial Sequence: Synthetic peptide
  Seed: EWLKTRPILSPLTKG
EWIKTVPRLSTLTKG

SEQ ID NO: 204450 - protein, 15 aa, Artificial Sequence
  Description of Artificial Sequence: Synthetic peptide
  Seed: EWLKTRPILSPLTKG
EWIKTVPRLSVLTKG

SEQ ID NO: 204451 - protein, 15 aa, Artificial Sequence
  Description of Artificial Sequence: Synthetic peptide
  Seed: EWLKTRPILSPLTKG
EWIKTVPRLSYLTKG

SEQ ID NO: 204452 - protein, 15 aa, Artificial Sequence
  Description of Artificial Sequence: Synthetic peptide
  Seed: EWLKTRPILSPLTKG
EWIKTVPSLSRLTKG

SEQ ID NO: 204453 - protein, 15 aa, Artificial Sequence
  Description of Artificial Sequence: Synthetic peptide
  Seed: EWLKTRPILSPLTKG
EWIKTVPTLSRLTKG

SEQ ID NO: 204454 - protein, 15 aa, Artificial Sequence
  Description of Artificial Sequence: Synthetic peptide
  Seed: EWLKTRPILSPLTKG
EWIKTVPWLSFLTKG

SEQ ID NO: 204455 - protein, 15 aa, Artificial Sequence
  Description of Artificial Sequence: Synthetic peptide
  Seed: EWLKTRPILSPLTKG
EWIKTVPWLSILTKG

SEQ ID NO: 204456 - protein, 15 aa, Artificial Sequence
  Description of Artificial Sequence: Synthetic peptide
  Seed: EWLKTRPILSPLTKG
EWIKTVPWLSLLTKG

SEQ ID NO: 204457 - protein, 15 aa, Artificial Sequence
  Description of Artificial Sequence: Synthetic peptide
  Seed: EWLKTRPILSPLTKG
EWIKTVPWLSMLTKG

SEQ ID NO: 204458 - protein, 15 aa, Artificial Sequence
  Description of Artificial Sequence: Synthetic peptide
  Seed: EWLKTRPILSPLTKG
EWIKTVPWLSTLTKG

SEQ ID NO: 204459 - protein, 15 aa, Artificial Sequence
  Description of Artificial Sequence: Synthetic peptide
  Seed: EWLKTRPILSPLTKG
EWIKTVPWLSVLTKG

SEQ ID NO: 204460 - protein, 15 aa, Artificial Sequence
  Description of Artificial Sequence: Synthetic peptide
  Seed: EWLKTRPILSPLTKG
EWIKTVPWLSYLTKG

SEQ ID NO: 204461 - protein, 15 aa, Artificial Sequence
  Description of Artificial Sequence: Synthetic peptide
  Seed: EWLKTRPILSPLTKG
EWIKTVPYLSFLTKG

SEQ ID NO: 204462 - protein, 15 aa, Artificial Sequence
  Description of Artificial Sequence: Synthetic peptide
  Seed: EWLKTRPILSPLTKG
EWIKTVPYLSILTKG

SEQ ID NO: 204463 - protein, 15 aa, Artificial Sequence
  Description of Artificial Sequence: Synthetic peptide
  Seed: EWLKTRPILSPLTKG
EWIKTVPYLSLLTKG

SEQ ID NO: 204464 - protein, 15 aa, Artificial Sequence
  Description of Artificial Sequence: Synthetic peptide
  Seed: EWLKTRPILSPLTKG
EWIKTVPYLSMLTKG

SEQ ID NO: 204465 - protein, 15 aa, Artificial Sequence
  Description of Artificial Sequence: Synthetic peptide
  Seed: EWLKTRPILSPLTKG
EWIKTVPYLSVLTKG

SEQ ID NO: 204466 - protein, 15 aa, Artificial Sequence
  Description of Artificial Sequence: Synthetic peptide
  Seed: EWLKTRPILSPLTKG
EWIKTWPALSRLTKG

SEQ ID NO: 204467 - protein, 15 aa, Artificial Sequence
  Description of Artificial Sequence: Synthetic peptide
  Seed: EWLKTRPILSPLTKG
EWIKTWPFLSFLTKG

SEQ ID NO: 204468 - protein, 15 aa, Artificial Sequence
  Description of Artificial Sequence: Synthetic peptide
  Seed: EWLKTRPILSPLTKG
EWIKTWPFLSILTKG

SEQ ID NO: 204469 - protein, 15 aa, Artificial Sequence
  Description of Artificial Sequence: Synthetic peptide
  Seed: EWLKTRPILSPLTKG
EWIKTWPFLSLLTKG

SEQ ID NO: 204470 - protein, 15 aa, Artificial Sequence
  Description of Artificial Sequence: Synthetic peptide
  Seed: EWLKTRPILSPLTKG
EWIKTWPFLSMLTKG

SEQ ID NO: 204471 - protein, 15 aa, Artificial Sequence
  Description of Artificial Sequence: Synthetic peptide
  Seed: EWLKTRPILSPLTKG
EWIKTWPFLSVLTKG

SEQ ID NO: 204472 - protein, 15 aa, Artificial Sequence
  Description of Artificial Sequence: Synthetic peptide
  Seed: EWLKTRPILSPLTKG
EWIKTWPKLSALTKG

SEQ ID NO: 204473 - protein, 15 aa, Artificial Sequence
  Description of Artificial Sequence: Synthetic peptide
  Seed: EWLKTRPILSPLTKG
EWIKTWPKLSFLTKG

SEQ ID NO: 204474 - protein, 15 aa, Artificial Sequence
  Description of Artificial Sequence: Synthetic peptide
  Seed: EWLKTRPILSPLTKG
EWIKTWPKLSILTKG

SEQ ID NO: 204475 - protein, 15 aa, Artificial Sequence
  Description of Artificial Sequence: Synthetic peptide
  Seed: EWLKTRPILSPLTKG
EWIKTWPKLSLLTKG

SEQ ID NO: 204476 - protein, 15 aa, Artificial Sequence
  Description of Artificial Sequence: Synthetic peptide
  Seed: EWLKTRPILSPLTKG
EWIKTWPKLSRLTKG

SEQ ID NO: 204477 - protein, 15 aa, Artificial Sequence
  Description of Artificial Sequence: Synthetic peptide
  Seed: EWLKTRPILSPLTKG
EWIKTWPKLSSLTKG

SEQ ID NO: 204478 - protein, 15 aa, Artificial Sequence
  Description of Artificial Sequence: Synthetic peptide
  Seed: EWLKTRPILSPLTKG
EWIKTWPKLSVLTKG

SEQ ID NO: 204479 - protein, 15 aa, Artificial Sequence
  Description of Artificial Sequence: Synthetic peptide
  Seed: EWLKTRPILSPLTKG
EWIKTWPKLSYLTKG

SEQ ID NO: 204480 - protein, 15 aa, Artificial Sequence
  Description of Artificial Sequence: Synthetic peptide
  Seed: EWLKTRPILSPLTKG
EWIKTWPLLSILTKG

SEQ ID NO: 204481 - protein, 15 aa, Artificial Sequence
  Description of Artificial Sequence: Synthetic peptide
  Seed: EWLKTRPILSPLTKG
EWIKTWPLLSLLTKG

SEQ ID NO: 204482 - protein, 15 aa, Artificial Sequence
  Description of Artificial Sequence: Synthetic peptide
  Seed: EWLKTRPILSPLTKG
EWIKTWPLLSVLTKG

SEQ ID NO: 204483 - protein, 15 aa, Artificial Sequence
  Description of Artificial Sequence: Synthetic peptide
  Seed: EWLKTRPILSPLTKG
EWIKTWPRLSALTKG

SEQ ID NO: 204484 - protein, 15 aa, Artificial Sequence
  Description of Artificial Sequence: Synthetic peptide
  Seed: EWLKTRPILSPLTKG
EWIKTWPRLSFLTKG

SEQ ID NO: 204485 - protein, 15 aa, Artificial Sequence
  Description of Artificial Sequence: Synthetic peptide
  Seed: EWLKTRPILSPLTKG
EWIKTWPRLSHLTKG

SEQ ID NO: 204486 - protein, 15 aa, Artificial Sequence
  Description of Artificial Sequence: Synthetic peptide
  Seed: EWLKTRPILSPLTKG
EWIKTWPRLSILTKG

SEQ ID NO: 204487 - protein, 15 aa, Artificial Sequence
  Description of Artificial Sequence: Synthetic peptide
  Seed: EWLKTRPILSPLTKG
EWIKTWPRLSKLTKG

SEQ ID NO: 204488 - protein, 15 aa, Artificial Sequence
  Description of Artificial Sequence: Synthetic peptide
  Seed: EWLKTRPILSPLTKG
EWIKTWPRLSLLTKG

SEQ ID NO: 204489 - protein, 15 aa, Artificial Sequence
  Description of Artificial Sequence: Synthetic peptide
  Seed: EWLKTRPILSPLTKG
EWIKTWPRLSMLTKG

SEQ ID NO: 204490 - protein, 15 aa, Artificial Sequence
  Description of Artificial Sequence: Synthetic peptide
  Seed: EWLKTRPILSPLTKG
EWIKTWPRLSRLTKG

SEQ ID NO: 204491 - protein, 15 aa, Artificial Sequence
  Description of Artificial Sequence: Synthetic peptide
  Seed: EWLKTRPILSPLTKG
EWIKTWPRLSSLTKG

SEQ ID NO: 204492 - protein, 15 aa, Artificial Sequence
  Description of Artificial Sequence: Synthetic peptide
  Seed: EWLKTRPILSPLTKG
EWIKTWPRLSVLTKG

SEQ ID NO: 204493 - protein, 15 aa, Artificial Sequence
  Description of Artificial Sequence: Synthetic peptide
  Seed: EWLKTRPILSPLTKG
EWIKTWPRLSYLTKG

SEQ ID NO: 204494 - protein, 15 aa, Artificial Sequence
  Description of Artificial Sequence: Synthetic peptide
  Seed: EWLKTRPILSPLTKG
EWIKTWPSLSRLTKG

SEQ ID NO: 204495 - protein, 15 aa, Artificial Sequence
  Description of Artificial Sequence: Synthetic peptide
  Seed: EWLKTRPILSPLTKG
EWIKTYPALSRLTKG

SEQ ID NO: 204496 - protein, 15 aa, Artificial Sequence
  Description of Artificial Sequence: Synthetic peptide
  Seed: EWLKTRPILSPLTKG
EWIKTYPFLSALTKG

SEQ ID NO: 204497 - protein, 15 aa, Artificial Sequence
  Description of Artificial Sequence: Synthetic peptide
  Seed: EWLKTRPILSPLTKG
EWIKTYPFLSFLTKG

SEQ ID NO: 204498 - protein, 15 aa, Artificial Sequence
  Description of Artificial Sequence: Synthetic peptide
  Seed: EWLKTRPILSPLTKG
EWIKTYPFLSILTKG

SEQ ID NO: 204499 - protein, 15 aa, Artificial Sequence
  Description of Artificial Sequence: Synthetic peptide
  Seed: EWLKTRPILSPLTKG
EWIKTYPFLSLLTKG

SEQ ID NO: 204500 - protein, 15 aa, Artificial Sequence
  Description of Artificial Sequence: Synthetic peptide
  Seed: EWLKTRPILSPLTKG
EWIKTYPFLSMLTKG

SEQ ID NO: 204501 - protein, 15 aa, Artificial Sequence
  Description of Artificial Sequence: Synthetic peptide
  Seed: EWLKTRPILSPLTKG
EWIKTYPFLSSLTKG

SEQ ID NO: 204502 - protein, 15 aa, Artificial Sequence
  Description of Artificial Sequence: Synthetic peptide
  Seed: EWLKTRPILSPLTKG
EWIKTYPFLSTLTKG

SEQ ID NO: 204503 - protein, 15 aa, Artificial Sequence
  Description of Artificial Sequence: Synthetic peptide
  Seed: EWLKTRPILSPLTKG
EWIKTYPFLSVLTKG

SEQ ID NO: 204504 - protein, 15 aa, Artificial Sequence
  Description of Artificial Sequence: Synthetic peptide
  Seed: EWLKTRPILSPLTKG
EWIKTYPFLSYLTKG

SEQ ID NO: 204505 - protein, 15 aa, Artificial Sequence
  Description of Artificial Sequence: Synthetic peptide
  Seed: EWLKTRPILSPLTKG
EWIKTYPKLSFLTKG

SEQ ID NO: 204506 - protein, 15 aa, Artificial Sequence
  Description of Artificial Sequence: Synthetic peptide
  Seed: EWLKTRPILSPLTKG
EWIKTYPKLSILTKG

SEQ ID NO: 204507 - protein, 15 aa, Artificial Sequence
  Description of Artificial Sequence: Synthetic peptide
  Seed: EWLKTRPILSPLTKG
EWIKTYPKLSLLTKG

SEQ ID NO: 204508 - protein, 15 aa, Artificial Sequence
  Description of Artificial Sequence: Synthetic peptide
  Seed: EWLKTRPILSPLTKG
EWIKTYPKLSMLTKG

SEQ ID NO: 204509 - protein, 15 aa, Artificial Sequence
  Description of Artificial Sequence: Synthetic peptide
  Seed: EWLKTRPILSPLTKG
EWIKTYPKLSRLTKG

SEQ ID NO: 204510 - protein, 15 aa, Artificial Sequence
  Description of Artificial Sequence: Synthetic peptide
  Seed: EWLKTRPILSPLTKG
EWIKTYPKLSVLTKG

SEQ ID NO: 204511 - protein, 15 aa, Artificial Sequence
  Description of Artificial Sequence: Synthetic peptide
  Seed: EWLKTRPILSPLTKG
EWIKTYPKLSYLTKG

SEQ ID NO: 204512 - protein, 15 aa, Artificial Sequence
  Description of Artificial Sequence: Synthetic peptide
  Seed: EWLKTRPILSPLTKG
EWIKTYPLLSFLTKG

SEQ ID NO: 204513 - protein, 15 aa, Artificial Sequence
  Description of Artificial Sequence: Synthetic peptide
  Seed: EWLKTRPILSPLTKG
EWIKTYPLLSILTKG

SEQ ID NO: 204514 - protein, 15 aa, Artificial Sequence
  Description of Artificial Sequence: Synthetic peptide
  Seed: EWLKTRPILSPLTKG
EWIKTYPLLSLLTKG

SEQ ID NO: 204515 - protein, 15 aa, Artificial Sequence
  Description of Artificial Sequence: Synthetic peptide
  Seed: EWLKTRPILSPLTKG
EWIKTYPLLSMLTKG

SEQ ID NO: 204516 - protein, 15 aa, Artificial Sequence
  Description of Artificial Sequence: Synthetic peptide
  Seed: EWLKTRPILSPLTKG
EWIKTYPLLSVLTKG

SEQ ID NO: 204517 - protein, 15 aa, Artificial Sequence
  Description of Artificial Sequence: Synthetic peptide
  Seed: EWLKTRPILSPLTKG
EWIKTYPMLSILTKG

SEQ ID NO: 204518 - protein, 15 aa, Artificial Sequence
  Description of Artificial Sequence: Synthetic peptide
  Seed: EWLKTRPILSPLTKG
EWIKTYPMLSLLTKG

SEQ ID NO: 204519 - protein, 15 aa, Artificial Sequence
  Description of Artificial Sequence: Synthetic peptide
  Seed: EWLKTRPILSPLTKG
EWIKTYPRLSALTKG

SEQ ID NO: 204520 - protein, 15 aa, Artificial Sequence
  Description of Artificial Sequence: Synthetic peptide
  Seed: EWLKTRPILSPLTKG
EWIKTYPRLSFLTKG

SEQ ID NO: 204521 - protein, 15 aa, Artificial Sequence
  Description of Artificial Sequence: Synthetic peptide
  Seed: EWLKTRPILSPLTKG
EWIKTYPRLSHLTKG

SEQ ID NO: 204522 - protein, 15 aa, Artificial Sequence
  Description of Artificial Sequence: Synthetic peptide
  Seed: EWLKTRPILSPLTKG
EWIKTYPRLSILTKG

SEQ ID NO: 204523 - protein, 15 aa, Artificial Sequence
  Description of Artificial Sequence: Synthetic peptide
  Seed: EWLKTRPILSPLTKG
EWIKTYPRLSKLTKG

SEQ ID NO: 204524 - protein, 15 aa, Artificial Sequence
  Description of Artificial Sequence: Synthetic peptide
  Seed: EWLKTRPILSPLTKG
EWIKTYPRLSLLTKG

SEQ ID NO: 204525 - protein, 15 aa, Artificial Sequence
  Description of Artificial Sequence: Synthetic peptide
  Seed: EWLKTRPILSPLTKG
EWIKTYPRLSMLTKG

SEQ ID NO: 204526 - protein, 15 aa, Artificial Sequence
  Description of Artificial Sequence: Synthetic peptide
  Seed: EWLKTRPILSPLTKG
EWIKTYPRLSRLTKG

SEQ ID NO: 204527 - protein, 15 aa, Artificial Sequence
  Description of Artificial Sequence: Synthetic peptide
  Seed: EWLKTRPILSPLTKG
EWIKTYPRLSSLTKG

SEQ ID NO: 204528 - protein, 15 aa, Artificial Sequence
  Description of Artificial Sequence: Synthetic peptide
  Seed: EWLKTRPILSPLTKG
EWIKTYPRLSVLTKG

SEQ ID NO: 204529 - protein, 15 aa, Artificial Sequence
  Description of Artificial Sequence: Synthetic peptide
  Seed: EWLKTRPILSPLTKG
EWIKTYPRLSYLTKG

SEQ ID NO: 204530 - protein, 15 aa, Artificial Sequence
  Description of Artificial Sequence: Synthetic peptide
  Seed: EWLKTRPILSPLTKG
EWIKTYPWLSILTKG

SEQ ID NO: 204531 - protein, 15 aa, Artificial Sequence
  Description of Artificial Sequence: Synthetic peptide
  Seed: EWLKTRPILSPLTKG
EWIKTYPWLSLLTKG

SEQ ID NO: 204532 - protein, 15 aa, Artificial Sequence
  Description of Artificial Sequence: Synthetic peptide
  Seed: EWLKTRPILSPLTKG
EWIKTYPWLSVLTKG

SEQ ID NO: 204533 - protein, 15 aa, Artificial Sequence
  Description of Artificial Sequence: Synthetic peptide
  Seed: EWLKTRPILSPLTKG
EWIKTYPYLSILTKG

SEQ ID NO: 204534 - protein, 15 aa, Artificial Sequence
  Description of Artificial Sequence: Synthetic peptide
  Seed: EWLKTRPILSPLTKG
EWIKTYPYLSLLTKG

SEQ ID NO: 204535 - protein, 15 aa, Artificial Sequence
  Description of Artificial Sequence: Synthetic peptide
  Seed: EWLKTRPILSPLTKG
EWIKTYPYLSVLTKG

SEQ ID NO: 204536 - protein, 15 aa, Artificial Sequence
  Description of Artificial Sequence: Synthetic peptide
  Seed: EWLKTRPILSPLTKG
EWLKTAPFLSALTKG

SEQ ID NO: 204537 - protein, 15 aa, Artificial Sequence
  Description of Artificial Sequence: Synthetic peptide
  Seed: EWLKTRPILSPLTKG
EWLKTAPFLSCLTKG

SEQ ID NO: 204538 - protein, 15 aa, Artificial Sequence
  Description of Artificial Sequence: Synthetic peptide
  Seed: EWLKTRPILSPLTKG
EWLKTAPFLSDLTKG

SEQ ID NO: 204539 - protein, 15 aa, Artificial Sequence
  Description of Artificial Sequence: Synthetic peptide
  Seed: EWLKTRPILSPLTKG
EWLKTAPFLSELTKG

SEQ ID NO: 204540 - protein, 15 aa, Artificial Sequence
  Description of Artificial Sequence: Synthetic peptide
  Seed: EWLKTRPILSPLTKG
EWLKTAPFLSFLTKG

SEQ ID NO: 204541 - protein, 15 aa, Artificial Sequence
  Description of Artificial Sequence: Synthetic peptide
  Seed: EWLKTRPILSPLTKG
EWLKTAPFLSILTKG

SEQ ID NO: 204542 - protein, 15 aa, Artificial Sequence
  Description of Artificial Sequence: Synthetic peptide
  Seed: EWLKTRPILSPLTKG
EWLKTAPFLSLLTKG

SEQ ID NO: 204543 - protein, 15 aa, Artificial Sequence
  Description of Artificial Sequence: Synthetic peptide
  Seed: EWLKTRPILSPLTKG
EWLKTAPFLSMLTKG

SEQ ID NO: 204544 - protein, 15 aa, Artificial Sequence
  Description of Artificial Sequence: Synthetic peptide
  Seed: EWLKTRPILSPLTKG
EWLKTAPFLSNLTKG

SEQ ID NO: 204545 - protein, 15 aa, Artificial Sequence
  Description of Artificial Sequence: Synthetic peptide
  Seed: EWLKTRPILSPLTKG
EWLKTAPFLSQLTKG

SEQ ID NO: 204546 - protein, 15 aa, Artificial Sequence
  Description of Artificial Sequence: Synthetic peptide
  Seed: EWLKTRPILSPLTKG
EWLKTAPFLSSLTKG

SEQ ID NO: 204547 - protein, 15 aa, Artificial Sequence
  Description of Artificial Sequence: Synthetic peptide
  Seed: EWLKTRPILSPLTKG
EWLKTAPFLSTLTKG

SEQ ID NO: 204548 - protein, 15 aa, Artificial Sequence
  Description of Artificial Sequence: Synthetic peptide
  Seed: EWLKTRPILSPLTKG
EWLKTAPFLSVLTKG

SEQ ID NO: 204549 - protein, 15 aa, Artificial Sequence
  Description of Artificial Sequence: Synthetic peptide
  Seed: EWLKTRPILSPLTKG
EWLKTAPFLSYLTKG

SEQ ID NO: 204550 - protein, 15 aa, Artificial Sequence
  Description of Artificial Sequence: Synthetic peptide
  Seed: EWLKTRPILSPLTKG
EWLKTAPKLSALTKG

SEQ ID NO: 204551 - protein, 15 aa, Artificial Sequence
  Description of Artificial Sequence: Synthetic peptide
  Seed: EWLKTRPILSPLTKG
EWLKTAPKLSQLTKG

SEQ ID NO: 204552 - protein, 15 aa, Artificial Sequence
  Description of Artificial Sequence: Synthetic peptide
  Seed: EWLKTRPILSPLTKG
EWLKTAPKLSSLTKG

SEQ ID NO: 204553 - protein, 15 aa, Artificial Sequence
  Description of Artificial Sequence: Synthetic peptide
  Seed: EWLKTRPILSPLTKG
EWLKTAPLLSILTKG

SEQ ID NO: 204554 - protein, 15 aa, Artificial Sequence
  Description of Artificial Sequence: Synthetic peptide
  Seed: EWLKTRPILSPLTKG
EWLKTAPLLSLLTKG

SEQ ID NO: 204555 - protein, 15 aa, Artificial Sequence
  Description of Artificial Sequence: Synthetic peptide
  Seed: EWLKTRPILSPLTKG
EWLKTAPLLSVLTKG

SEQ ID NO: 204556 - protein, 15 aa, Artificial Sequence
  Description of Artificial Sequence: Synthetic peptide
  Seed: EWLKTRPILSPLTKG
EWLKTAPRLSALTKG

SEQ ID NO: 204557 - protein, 15 aa, Artificial Sequence
  Description of Artificial Sequence: Synthetic peptide
  Seed: EWLKTRPILSPLTKG
EWLKTAPRLSGLTKG

SEQ ID NO: 204558 - protein, 15 aa, Artificial Sequence
  Description of Artificial Sequence: Synthetic peptide
  Seed: EWLKTRPILSPLTKG
EWLKTAPRLSHLTKG

SEQ ID NO: 204559 - protein, 15 aa, Artificial Sequence
  Description of Artificial Sequence: Synthetic peptide
  Seed: EWLKTRPILSPLTKG
EWLKTAPRLSQLTKG

SEQ ID NO: 204560 - protein, 15 aa, Artificial Sequence
  Description of Artificial Sequence: Synthetic peptide
  Seed: EWLKTRPILSPLTKG
EWLKTAPRLSRLTKG

SEQ ID NO: 204561 - protein, 15 aa, Artificial Sequence
  Description of Artificial Sequence: Synthetic peptide
  Seed: EWLKTRPILSPLTKG
EWLKTAPRLSSLTKG

SEQ ID NO: 204562 - protein, 15 aa, Artificial Sequence
  Description of Artificial Sequence: Synthetic peptide
  Seed: EWLKTRPILSPLTKG
EWLKTAPRLSTLTKG

SEQ ID NO: 204563 - protein, 15 aa, Artificial Sequence
  Description of Artificial Sequence: Synthetic peptide
  Seed: EWLKTRPILSPLTKG
EWLKTAPRLSYLTKG

SEQ ID NO: 204564 - protein, 15 aa, Artificial Sequence
  Description of Artificial Sequence: Synthetic peptide
  Seed: EWLKTRPILSPLTKG
EWLKTAPWLSILTKG

SEQ ID NO: 204565 - protein, 15 aa, Artificial Sequence
  Description of Artificial Sequence: Synthetic peptide
  Seed: EWLKTRPILSPLTKG
EWLKTAPWLSLLTKG

SEQ ID NO: 204566 - protein, 15 aa, Artificial Sequence
  Description of Artificial Sequence: Synthetic peptide
  Seed: EWLKTRPILSPLTKG
EWLKTAPWLSVLTKG

SEQ ID NO: 204567 - protein, 15 aa, Artificial Sequence
  Description of Artificial Sequence: Synthetic peptide
  Seed: EWLKTRPILSPLTKG
EWLKTAPYLSILTKG

SEQ ID NO: 204568 - protein, 15 aa, Artificial Sequence
  Description of Artificial Sequence: Synthetic peptide
  Seed: EWLKTRPILSPLTKG
EWLKTAPYLSLLTKG

SEQ ID NO: 204569 - protein, 15 aa, Artificial Sequence
  Description of Artificial Sequence: Synthetic peptide
  Seed: EWLKTRPILSPLTKG
EWLKTAPYLSVLTKG

SEQ ID NO: 204570 - protein, 15 aa, Artificial Sequence
  Description of Artificial Sequence: Synthetic peptide
  Seed: EWLKTRPILSPLTKG
EWLKTCPFLSFLTKG

SEQ ID NO: 204571 - protein, 15 aa, Artificial Sequence
  Description of Artificial Sequence: Synthetic peptide
  Seed: EWLKTRPILSPLTKG
EWLKTCPFLSILTKG

SEQ ID NO: 204572 - protein, 15 aa, Artificial Sequence
  Description of Artificial Sequence: Synthetic peptide
  Seed: EWLKTRPILSPLTKG
EWLKTCPFLSLLTKG

SEQ ID NO: 204573 - protein, 15 aa, Artificial Sequence
  Description of Artificial Sequence: Synthetic peptide
  Seed: EWLKTRPILSPLTKG
EWLKTCPFLSVLTKG

SEQ ID NO: 204574 - protein, 15 aa, Artificial Sequence
  Description of Artificial Sequence: Synthetic peptide
  Seed: EWLKTRPILSPLTKG
EWLKTDPFLSILTKG

SEQ ID NO: 204575 - protein, 15 aa, Artificial Sequence
  Description of Artificial Sequence: Synthetic peptide
  Seed: EWLKTRPILSPLTKG
EWLKTDPFLSVLTKG

SEQ ID NO: 204576 - protein, 15 aa, Artificial Sequence
  Description of Artificial Sequence: Synthetic peptide
  Seed: EWLKTRPILSPLTKG
EWLKTEPFLSALTKG

SEQ ID NO: 204577 - protein, 15 aa, Artificial Sequence
  Description of Artificial Sequence: Synthetic peptide
  Seed: EWLKTRPILSPLTKG
EWLKTEPFLSFLTKG

SEQ ID NO: 204578 - protein, 15 aa, Artificial Sequence
  Description of Artificial Sequence: Synthetic peptide
  Seed: EWLKTRPILSPLTKG
EWLKTEPFLSILTKG

SEQ ID NO: 204579 - protein, 15 aa, Artificial Sequence
  Description of Artificial Sequence: Synthetic peptide
  Seed: EWLKTRPILSPLTKG
EWLKTEPFLSLLTKG

SEQ ID NO: 204580 - protein, 15 aa, Artificial Sequence
  Description of Artificial Sequence: Synthetic peptide
  Seed: EWLKTRPILSPLTKG
EWLKTEPFLSMLTKG

SEQ ID NO: 204581 - protein, 15 aa, Artificial Sequence
  Description of Artificial Sequence: Synthetic peptide
  Seed: EWLKTRPILSPLTKG
EWLKTEPFLSNLTKG

SEQ ID NO: 204582 - protein, 15 aa, Artificial Sequence
  Description of Artificial Sequence: Synthetic peptide
  Seed: EWLKTRPILSPLTKG
EWLKTEPFLSSLTKG

SEQ ID NO: 204583 - protein, 15 aa, Artificial Sequence
  Description of Artificial Sequence: Synthetic peptide
  Seed: EWLKTRPILSPLTKG
EWLKTEPFLSTLTKG

SEQ ID NO: 204584 - protein, 15 aa, Artificial Sequence
  Description of Artificial Sequence: Synthetic peptide
  Seed: EWLKTRPILSPLTKG
EWLKTEPFLSVLTKG

SEQ ID NO: 204585 - protein, 15 aa, Artificial Sequence
  Description of Artificial Sequence: Synthetic peptide
  Seed: EWLKTRPILSPLTKG
EWLKTEPFLSYLTKG

SEQ ID NO: 204586 - protein, 15 aa, Artificial Sequence
  Description of Artificial Sequence: Synthetic peptide
  Seed: EWLKTRPILSPLTKG
EWLKTEPLLSILTKG

SEQ ID NO: 204587 - protein, 15 aa, Artificial Sequence
  Description of Artificial Sequence: Synthetic peptide
  Seed: EWLKTRPILSPLTKG
EWLKTEPLLSLLTKG

SEQ ID NO: 204588 - protein, 15 aa, Artificial Sequence
  Description of Artificial Sequence: Synthetic peptide
  Seed: EWLKTRPILSPLTKG
EWLKTEPLLSVLTKG

SEQ ID NO: 204589 - protein, 15 aa, Artificial Sequence
  Description of Artificial Sequence: Synthetic peptide
  Seed: EWLKTRPILSPLTKG
EWLKTEPWLSILTKG

SEQ ID NO: 204590 - protein, 15 aa, Artificial Sequence
  Description of Artificial Sequence: Synthetic peptide
  Seed: EWLKTRPILSPLTKG
EWLKTEPWLSVLTKG

SEQ ID NO: 204591 - protein, 15 aa, Artificial Sequence
  Description of Artificial Sequence: Synthetic peptide
  Seed: EWLKTRPILSPLTKG
EWLKTEPYLSILTKG

SEQ ID NO: 204592 - protein, 15 aa, Artificial Sequence
  Description of Artificial Sequence: Synthetic peptide
  Seed: EWLKTRPILSPLTKG
EWLKTEPYLSLLTKG

SEQ ID NO: 204593 - protein, 15 aa, Artificial Sequence
  Description of Artificial Sequence: Synthetic peptide
  Seed: EWLKTRPILSPLTKG
EWLKTEPYLSVLTKG

SEQ ID NO: 204594 - protein, 15 aa, Artificial Sequence
  Description of Artificial Sequence: Synthetic peptide
  Seed: EWLKTRPILSPLTKG
EWLKTFPALSRLTKG

SEQ ID NO: 204595 - protein, 15 aa, Artificial Sequence
  Description of Artificial Sequence: Synthetic peptide
  Seed: EWLKTRPILSPLTKG
EWLKTFPFLSALTKG

SEQ ID NO: 204596 - protein, 15 aa, Artificial Sequence
  Description of Artificial Sequence: Synthetic peptide
  Seed: EWLKTRPILSPLTKG
EWLKTFPFLSCLTKG

SEQ ID NO: 204597 - protein, 15 aa, Artificial Sequence
  Description of Artificial Sequence: Synthetic peptide
  Seed: EWLKTRPILSPLTKG
EWLKTFPFLSDLTKG

SEQ ID NO: 204598 - protein, 15 aa, Artificial Sequence
  Description of Artificial Sequence: Synthetic peptide
  Seed: EWLKTRPILSPLTKG
EWLKTFPFLSELTKG

SEQ ID NO: 204599 - protein, 15 aa, Artificial Sequence
  Description of Artificial Sequence: Synthetic peptide
  Seed: EWLKTRPILSPLTKG
EWLKTFPFLSFLTKG

SEQ ID NO: 204600 - protein, 15 aa, Artificial Sequence
  Description of Artificial Sequence: Synthetic peptide
  Seed: EWLKTRPILSPLTKG
EWLKTFPFLSHLTKG

SEQ ID NO: 204601 - protein, 15 aa, Artificial Sequence
  Description of Artificial Sequence: Synthetic peptide
  Seed: EWLKTRPILSPLTKG
EWLKTFPFLSILTKG

SEQ ID NO: 204602 - protein, 15 aa, Artificial Sequence
  Description of Artificial Sequence: Synthetic peptide
  Seed: EWLKTRPILSPLTKG
EWLKTFPFLSLLTKG

SEQ ID NO: 204603 - protein, 15 aa, Artificial Sequence
  Description of Artificial Sequence: Synthetic peptide
  Seed: EWLKTRPILSPLTKG
EWLKTFPFLSMLTKG

SEQ ID NO: 204604 - protein, 15 aa, Artificial Sequence
  Description of Artificial Sequence: Synthetic peptide
  Seed: EWLKTRPILSPLTKG
EWLKTFPFLSNLTKG

SEQ ID NO: 204605 - protein, 15 aa, Artificial Sequence
  Description of Artificial Sequence: Synthetic peptide
  Seed: EWLKTRPILSPLTKG
EWLKTFPFLSPLTKG

SEQ ID NO: 204606 - protein, 15 aa, Artificial Sequence
  Description of Artificial Sequence: Synthetic peptide
  Seed: EWLKTRPILSPLTKG
EWLKTFPFLSQLTKG

SEQ ID NO: 204607 - protein, 15 aa, Artificial Sequence
  Description of Artificial Sequence: Synthetic peptide
  Seed: EWLKTRPILSPLTKG
EWLKTFPFLSSLTKG

SEQ ID NO: 204608 - protein, 15 aa, Artificial Sequence
  Description of Artificial Sequence: Synthetic peptide
  Seed: EWLKTRPILSPLTKG
EWLKTFPFLSTLTKG

SEQ ID NO: 204609 - protein, 15 aa, Artificial Sequence
  Description of Artificial Sequence: Synthetic peptide
  Seed: EWLKTRPILSPLTKG
EWLKTFPFLSVLTKG

SEQ ID NO: 204610 - protein, 15 aa, Artificial Sequence
  Description of Artificial Sequence: Synthetic peptide
  Seed: EWLKTRPILSPLTKG
EWLKTFPFLSYLTKG

SEQ ID NO: 204611 - protein, 15 aa, Artificial Sequence
  Description of Artificial Sequence: Synthetic peptide
  Seed: EWLKTRPILSPLTKG
EWLKTFPILSFLTKG

SEQ ID NO: 204612 - protein, 15 aa, Artificial Sequence
  Description of Artificial Sequence: Synthetic peptide
  Seed: EWLKTRPILSPLTKG
EWLKTFPILSILTKG

SEQ ID NO: 204613 - protein, 15 aa, Artificial Sequence
  Description of Artificial Sequence: Synthetic peptide
  Seed: EWLKTRPILSPLTKG
EWLKTFPILSLLTKG

SEQ ID NO: 204614 - protein, 15 aa, Artificial Sequence
  Description of Artificial Sequence: Synthetic peptide
  Seed: EWLKTRPILSPLTKG
EWLKTFPILSMLTKG

SEQ ID NO: 204615 - protein, 15 aa, Artificial Sequence
  Description of Artificial Sequence: Synthetic peptide
  Seed: EWLKTRPILSPLTKG
EWLKTFPILSVLTKG

SEQ ID NO: 204616 - protein, 15 aa, Artificial Sequence
  Description of Artificial Sequence: Synthetic peptide
  Seed: EWLKTRPILSPLTKG
EWLKTFPKLSALTKG

SEQ ID NO: 204617 - protein, 15 aa, Artificial Sequence
  Description of Artificial Sequence: Synthetic peptide
  Seed: EWLKTRPILSPLTKG
EWLKTFPKLSFLTKG

SEQ ID NO: 204618 - protein, 15 aa, Artificial Sequence
  Description of Artificial Sequence: Synthetic peptide
  Seed: EWLKTRPILSPLTKG
EWLKTFPKLSGLTKG

SEQ ID NO: 204619 - protein, 15 aa, Artificial Sequence
  Description of Artificial Sequence: Synthetic peptide
  Seed: EWLKTRPILSPLTKG
EWLKTFPKLSILTKG

SEQ ID NO: 204620 - protein, 15 aa, Artificial Sequence
  Description of Artificial Sequence: Synthetic peptide
  Seed: EWLKTRPILSPLTKG
EWLKTFPKLSKLTKG

SEQ ID NO: 204621 - protein, 15 aa, Artificial Sequence
  Description of Artificial Sequence: Synthetic peptide
  Seed: EWLKTRPILSPLTKG
EWLKTFPKLSLLTKG

SEQ ID NO: 204622 - protein, 15 aa, Artificial Sequence
  Description of Artificial Sequence: Synthetic peptide
  Seed: EWLKTRPILSPLTKG
EWLKTFPKLSMLTKG

SEQ ID NO: 204623 - protein, 15 aa, Artificial Sequence
  Description of Artificial Sequence: Synthetic peptide
  Seed: EWLKTRPILSPLTKG
EWLKTFPKLSRLTKG

SEQ ID NO: 204624 - protein, 15 aa, Artificial Sequence
  Description of Artificial Sequence: Synthetic peptide
  Seed: EWLKTRPILSPLTKG
EWLKTFPKLSSLTKG

SEQ ID NO: 204625 - protein, 15 aa, Artificial Sequence
  Description of Artificial Sequence: Synthetic peptide
  Seed: EWLKTRPILSPLTKG
EWLKTFPKLSVLTKG

SEQ ID NO: 204626 - protein, 15 aa, Artificial Sequence
  Description of Artificial Sequence: Synthetic peptide
  Seed: EWLKTRPILSPLTKG
EWLKTFPKLSYLTKG

SEQ ID NO: 204627 - protein, 15 aa, Artificial Sequence
  Description of Artificial Sequence: Synthetic peptide
  Seed: EWLKTRPILSPLTKG
EWLKTFPLLSALTKG

SEQ ID NO: 204628 - protein, 15 aa, Artificial Sequence
  Description of Artificial Sequence: Synthetic peptide
  Seed: EWLKTRPILSPLTKG
EWLKTFPLLSFLTKG

SEQ ID NO: 204629 - protein, 15 aa, Artificial Sequence
  Description of Artificial Sequence: Synthetic peptide
  Seed: EWLKTRPILSPLTKG
EWLKTFPLLSILTKG

SEQ ID NO: 204630 - protein, 15 aa, Artificial Sequence
  Description of Artificial Sequence: Synthetic peptide
  Seed: EWLKTRPILSPLTKG
EWLKTFPLLSLLTKG

SEQ ID NO: 204631 - protein, 15 aa, Artificial Sequence
  Description of Artificial Sequence: Synthetic peptide
  Seed: EWLKTRPILSPLTKG
EWLKTFPLLSMLTKG

SEQ ID NO: 204632 - protein, 15 aa, Artificial Sequence
  Description of Artificial Sequence: Synthetic peptide
  Seed: EWLKTRPILSPLTKG
EWLKTFPLLSTLTKG

SEQ ID NO: 204633 - protein, 15 aa, Artificial Sequence
  Description of Artificial Sequence: Synthetic peptide
  Seed: EWLKTRPILSPLTKG
EWLKTFPLLSVLTKG

SEQ ID NO: 204634 - protein, 15 aa, Artificial Sequence
  Description of Artificial Sequence: Synthetic peptide
  Seed: EWLKTRPILSPLTKG
EWLKTFPLLSYLTKG

SEQ ID NO: 204635 - protein, 15 aa, Artificial Sequence
  Description of Artificial Sequence: Synthetic peptide
  Seed: EWLKTRPILSPLTKG
EWLKTFPMLSFLTKG

SEQ ID NO: 204636 - protein, 15 aa, Artificial Sequence
  Description of Artificial Sequence: Synthetic peptide
  Seed: EWLKTRPILSPLTKG
EWLKTFPMLSILTKG

SEQ ID NO: 204637 - protein, 15 aa, Artificial Sequence
  Description of Artificial Sequence: Synthetic peptide
  Seed: EWLKTRPILSPLTKG
EWLKTFPMLSLLTKG

SEQ ID NO: 204638 - protein, 15 aa, Artificial Sequence
  Description of Artificial Sequence: Synthetic peptide
  Seed: EWLKTRPILSPLTKG
EWLKTFPMLSMLTKG

SEQ ID NO: 204639 - protein, 15 aa, Artificial Sequence
  Description of Artificial Sequence: Synthetic peptide
  Seed: EWLKTRPILSPLTKG
EWLKTFPMLSVLTKG

SEQ ID NO: 204640 - protein, 15 aa, Artificial Sequence
  Description of Artificial Sequence: Synthetic peptide
  Seed: EWLKTRPILSPLTKG
EWLKTFPRLSALTKG

SEQ ID NO: 204641 - protein, 15 aa, Artificial Sequence
  Description of Artificial Sequence: Synthetic peptide
  Seed: EWLKTRPILSPLTKG
EWLKTFPRLSFLTKG

SEQ ID NO: 204642 - protein, 15 aa, Artificial Sequence
  Description of Artificial Sequence: Synthetic peptide
  Seed: EWLKTRPILSPLTKG
EWLKTFPRLSGLTKG

SEQ ID NO: 204643 - protein, 15 aa, Artificial Sequence
  Description of Artificial Sequence: Synthetic peptide
  Seed: EWLKTRPILSPLTKG
EWLKTFPRLSHLTKG

SEQ ID NO: 204644 - protein, 15 aa, Artificial Sequence
  Description of Artificial Sequence: Synthetic peptide
  Seed: EWLKTRPILSPLTKG
EWLKTFPRLSILTKG

SEQ ID NO: 204645 - protein, 15 aa, Artificial Sequence
  Description of Artificial Sequence: Synthetic peptide
  Seed: EWLKTRPILSPLTKG
EWLKTFPRLSKLTKG

SEQ ID NO: 204646 - protein, 15 aa, Artificial Sequence
  Description of Artificial Sequence: Synthetic peptide
  Seed: EWLKTRPILSPLTKG
EWLKTFPRLSLLTKG

SEQ ID NO: 204647 - protein, 15 aa, Artificial Sequence
  Description of Artificial Sequence: Synthetic peptide
  Seed: EWLKTRPILSPLTKG
EWLKTFPRLSMLTKG

SEQ ID NO: 204648 - protein, 15 aa, Artificial Sequence
  Description of Artificial Sequence: Synthetic peptide
  Seed: EWLKTRPILSPLTKG
EWLKTFPRLSQLTKG

SEQ ID NO: 204649 - protein, 15 aa, Artificial Sequence
  Description of Artificial Sequence: Synthetic peptide
  Seed: EWLKTRPILSPLTKG
EWLKTFPRLSRLTKG

SEQ ID NO: 204650 - protein, 15 aa, Artificial Sequence
  Description of Artificial Sequence: Synthetic peptide
  Seed: EWLKTRPILSPLTKG
EWLKTFPRLSSLTKG

SEQ ID NO: 204651 - protein, 15 aa, Artificial Sequence
  Description of Artificial Sequence: Synthetic peptide
  Seed: EWLKTRPILSPLTKG
EWLKTFPRLSTLTKG

SEQ ID NO: 204652 - protein, 15 aa, Artificial Sequence
  Description of Artificial Sequence: Synthetic peptide
  Seed: EWLKTRPILSPLTKG
EWLKTFPRLSVLTKG

SEQ ID NO: 204653 - protein, 15 aa, Artificial Sequence
  Description of Artificial Sequence: Synthetic peptide
  Seed: EWLKTRPILSPLTKG
EWLKTFPRLSYLTKG

SEQ ID NO: 204654 - protein, 15 aa, Artificial Sequence
  Description of Artificial Sequence: Synthetic peptide
  Seed: EWLKTRPILSPLTKG
EWLKTFPVLSILTKG

SEQ ID NO: 204655 - protein, 15 aa, Artificial Sequence
  Description of Artificial Sequence: Synthetic peptide
  Seed: EWLKTRPILSPLTKG
EWLKTFPVLSLLTKG

SEQ ID NO: 204656 - protein, 15 aa, Artificial Sequence
  Description of Artificial Sequence: Synthetic peptide
  Seed: EWLKTRPILSPLTKG
EWLKTFPVLSVLTKG

SEQ ID NO: 204657 - protein, 15 aa, Artificial Sequence
  Description of Artificial Sequence: Synthetic peptide
  Seed: EWLKTRPILSPLTKG
EWLKTFPWLSFLTKG

SEQ ID NO: 204658 - protein, 15 aa, Artificial Sequence
  Description of Artificial Sequence: Synthetic peptide
  Seed: EWLKTRPILSPLTKG
EWLKTFPWLSILTKG

SEQ ID NO: 204659 - protein, 15 aa, Artificial Sequence
  Description of Artificial Sequence: Synthetic peptide
  Seed: EWLKTRPILSPLTKG
EWLKTFPWLSLLTKG

SEQ ID NO: 204660 - protein, 15 aa, Artificial Sequence
  Description of Artificial Sequence: Synthetic peptide
  Seed: EWLKTRPILSPLTKG
EWLKTFPWLSMLTKG

SEQ ID NO: 204661 - protein, 15 aa, Artificial Sequence
  Description of Artificial Sequence: Synthetic peptide
  Seed: EWLKTRPILSPLTKG
EWLKTFPWLSVLTKG

SEQ ID NO: 204662 - protein, 15 aa, Artificial Sequence
  Description of Artificial Sequence: Synthetic peptide
  Seed: EWLKTRPILSPLTKG
EWLKTFPYLSALTKG

SEQ ID NO: 204663 - protein, 15 aa, Artificial Sequence
  Description of Artificial Sequence: Synthetic peptide
  Seed: EWLKTRPILSPLTKG
EWLKTFPYLSFLTKG

SEQ ID NO: 204664 - protein, 15 aa, Artificial Sequence
  Description of Artificial Sequence: Synthetic peptide
  Seed: EWLKTRPILSPLTKG
EWLKTFPYLSILTKG

SEQ ID NO: 204665 - protein, 15 aa, Artificial Sequence
  Description of Artificial Sequence: Synthetic peptide
  Seed: EWLKTRPILSPLTKG
EWLKTFPYLSLLTKG

SEQ ID NO: 204666 - protein, 15 aa, Artificial Sequence
  Description of Artificial Sequence: Synthetic peptide
  Seed: EWLKTRPILSPLTKG
EWLKTFPYLSMLTKG

SEQ ID NO: 204667 - protein, 15 aa, Artificial Sequence
  Description of Artificial Sequence: Synthetic peptide
  Seed: EWLKTRPILSPLTKG
EWLKTFPYLSVLTKG

SEQ ID NO: 204668 - protein, 15 aa, Artificial Sequence
  Description of Artificial Sequence: Synthetic peptide
  Seed: EWLKTRPILSPLTKG
EWLKTGPFLSILTKG

SEQ ID NO: 204669 - protein, 15 aa, Artificial Sequence
  Description of Artificial Sequence: Synthetic peptide
  Seed: EWLKTRPILSPLTKG
EWLKTGPFLSLLTKG

SEQ ID NO: 204670 - protein, 15 aa, Artificial Sequence
  Description of Artificial Sequence: Synthetic peptide
  Seed: EWLKTRPILSPLTKG
EWLKTGPFLSVLTKG

SEQ ID NO: 204671 - protein, 15 aa, Artificial Sequence
  Description of Artificial Sequence: Synthetic peptide
  Seed: EWLKTRPILSPLTKG
EWLKTHPALSRLTKG

SEQ ID NO: 204672 - protein, 15 aa, Artificial Sequence
  Description of Artificial Sequence: Synthetic peptide
  Seed: EWLKTRPILSPLTKG
EWLKTHPALSYLTKG

SEQ ID NO: 204673 - protein, 15 aa, Artificial Sequence
  Description of Artificial Sequence: Synthetic peptide
  Seed: EWLKTRPILSPLTKG
EWLKTHPFLSALTKG

SEQ ID NO: 204674 - protein, 15 aa, Artificial Sequence
  Description of Artificial Sequence: Synthetic peptide
  Seed: EWLKTRPILSPLTKG
EWLKTHPFLSCLTKG

SEQ ID NO: 204675 - protein, 15 aa, Artificial Sequence
  Description of Artificial Sequence: Synthetic peptide
  Seed: EWLKTRPILSPLTKG
EWLKTHPFLSDLTKG

SEQ ID NO: 204676 - protein, 15 aa, Artificial Sequence
  Description of Artificial Sequence: Synthetic peptide
  Seed: EWLKTRPILSPLTKG
EWLKTHPFLSELTKG

SEQ ID NO: 204677 - protein, 15 aa, Artificial Sequence
  Description of Artificial Sequence: Synthetic peptide
  Seed: EWLKTRPILSPLTKG
EWLKTHPFLSFLTKG

SEQ ID NO: 204678 - protein, 15 aa, Artificial Sequence
  Description of Artificial Sequence: Synthetic peptide
  Seed: EWLKTRPILSPLTKG
EWLKTHPFLSILTKG

SEQ ID NO: 204679 - protein, 15 aa, Artificial Sequence
  Description of Artificial Sequence: Synthetic peptide
  Seed: EWLKTRPILSPLTKG
EWLKTHPFLSLLTKG

SEQ ID NO: 204680 - protein, 15 aa, Artificial Sequence
  Description of Artificial Sequence: Synthetic peptide
  Seed: EWLKTRPILSPLTKG
EWLKTHPFLSMLTKG

SEQ ID NO: 204681 - protein, 15 aa, Artificial Sequence
  Description of Artificial Sequence: Synthetic peptide
  Seed: EWLKTRPILSPLTKG
EWLKTHPFLSNLTKG

SEQ ID NO: 204682 - protein, 15 aa, Artificial Sequence
  Description of Artificial Sequence: Synthetic peptide
  Seed: EWLKTRPILSPLTKG
EWLKTHPFLSQLTKG

SEQ ID NO: 204683 - protein, 15 aa, Artificial Sequence
  Description of Artificial Sequence: Synthetic peptide
  Seed: EWLKTRPILSPLTKG
EWLKTHPFLSSLTKG

SEQ ID NO: 204684 - protein, 15 aa, Artificial Sequence
  Description of Artificial Sequence: Synthetic peptide
  Seed: EWLKTRPILSPLTKG
EWLKTHPFLSTLTKG

SEQ ID NO: 204685 - protein, 15 aa, Artificial Sequence
  Description of Artificial Sequence: Synthetic peptide
  Seed: EWLKTRPILSPLTKG
EWLKTHPFLSVLTKG

SEQ ID NO: 204686 - protein, 15 aa, Artificial Sequence
  Description of Artificial Sequence: Synthetic peptide
  Seed: EWLKTRPILSPLTKG
EWLKTHPFLSWLTKG

SEQ ID NO: 204687 - protein, 15 aa, Artificial Sequence
  Description of Artificial Sequence: Synthetic peptide
  Seed: EWLKTRPILSPLTKG
EWLKTHPFLSYLTKG

SEQ ID NO: 204688 - protein, 15 aa, Artificial Sequence
  Description of Artificial Sequence: Synthetic peptide
  Seed: EWLKTRPILSPLTKG
EWLKTHPILSILTKG

SEQ ID NO: 204689 - protein, 15 aa, Artificial Sequence
  Description of Artificial Sequence: Synthetic peptide
  Seed: EWLKTRPILSPLTKG
EWLKTHPILSLLTKG

SEQ ID NO: 204690 - protein, 15 aa, Artificial Sequence
  Description of Artificial Sequence: Synthetic peptide
  Seed: EWLKTRPILSPLTKG
EWLKTHPILSVLTKG

SEQ ID NO: 204691 - protein, 15 aa, Artificial Sequence
  Description of Artificial Sequence: Synthetic peptide
  Seed: EWLKTRPILSPLTKG
EWLKTHPLLSFLTKG

SEQ ID NO: 204692 - protein, 15 aa, Artificial Sequence
  Description of Artificial Sequence: Synthetic peptide
  Seed: EWLKTRPILSPLTKG
EWLKTHPLLSILTKG

SEQ ID NO: 204693 - protein, 15 aa, Artificial Sequence
  Description of Artificial Sequence: Synthetic peptide
  Seed: EWLKTRPILSPLTKG
EWLKTHPLLSLLTKG

SEQ ID NO: 204694 - protein, 15 aa, Artificial Sequence
  Description of Artificial Sequence: Synthetic peptide
  Seed: EWLKTRPILSPLTKG
EWLKTHPLLSMLTKG

SEQ ID NO: 204695 - protein, 15 aa, Artificial Sequence
  Description of Artificial Sequence: Synthetic peptide
  Seed: EWLKTRPILSPLTKG
EWLKTHPLLSVLTKG

SEQ ID NO: 204696 - protein, 15 aa, Artificial Sequence
  Description of Artificial Sequence: Synthetic peptide
  Seed: EWLKTRPILSPLTKG
EWLKTHPMLSILTKG

SEQ ID NO: 204697 - protein, 15 aa, Artificial Sequence
  Description of Artificial Sequence: Synthetic peptide
  Seed: EWLKTRPILSPLTKG
EWLKTHPMLSLLTKG

SEQ ID NO: 204698 - protein, 15 aa, Artificial Sequence
  Description of Artificial Sequence: Synthetic peptide
  Seed: EWLKTRPILSPLTKG
EWLKTHPMLSVLTKG

SEQ ID NO: 204699 - protein, 15 aa, Artificial Sequence
  Description of Artificial Sequence: Synthetic peptide
  Seed: EWLKTRPILSPLTKG
EWLKTHPRLSRLTKG

SEQ ID NO: 204700 - protein, 15 aa, Artificial Sequence
  Description of Artificial Sequence: Synthetic peptide
  Seed: EWLKTRPILSPLTKG
EWLKTHPRLSYLTKG

SEQ ID NO: 204701 - protein, 15 aa, Artificial Sequence
  Description of Artificial Sequence: Synthetic peptide
  Seed: EWLKTRPILSPLTKG
EWLKTHPSLSRLTKG

SEQ ID NO: 204702 - protein, 15 aa, Artificial Sequence
  Description of Artificial Sequence: Synthetic peptide
  Seed: EWLKTRPILSPLTKG
EWLKTHPTLSRLTKG

SEQ ID NO: 204703 - protein, 15 aa, Artificial Sequence
  Description of Artificial Sequence: Synthetic peptide
  Seed: EWLKTRPILSPLTKG
EWLKTHPVLSRLTKG

SEQ ID NO: 204704 - protein, 15 aa, Artificial Sequence
  Description of Artificial Sequence: Synthetic peptide
  Seed: EWLKTRPILSPLTKG
EWLKTHPWLSILTKG

SEQ ID NO: 204705 - protein, 15 aa, Artificial Sequence
  Description of Artificial Sequence: Synthetic peptide
  Seed: EWLKTRPILSPLTKG
EWLKTHPWLSLLTKG

SEQ ID NO: 204706 - protein, 15 aa, Artificial Sequence
  Description of Artificial Sequence: Synthetic peptide
  Seed: EWLKTRPILSPLTKG
EWLKTHPWLSVLTKG

SEQ ID NO: 204707 - protein, 15 aa, Artificial Sequence
  Description of Artificial Sequence: Synthetic peptide
  Seed: EWLKTRPILSPLTKG
EWLKTHPYLSILTKG

SEQ ID NO: 204708 - protein, 15 aa, Artificial Sequence
  Description of Artificial Sequence: Synthetic peptide
  Seed: EWLKTRPILSPLTKG
EWLKTHPYLSLLTKG

SEQ ID NO: 204709 - protein, 15 aa, Artificial Sequence
  Description of Artificial Sequence: Synthetic peptide
  Seed: EWLKTRPILSPLTKG
EWLKTHPYLSVLTKG

SEQ ID NO: 204710 - protein, 15 aa, Artificial Sequence
  Description of Artificial Sequence: Synthetic peptide
  Seed: EWLKTRPILSPLTKG
EWLKTIPALSRLTKG

SEQ ID NO: 204711 - protein, 15 aa, Artificial Sequence
  Description of Artificial Sequence: Synthetic peptide
  Seed: EWLKTRPILSPLTKG
EWLKTIPFLSALTKG

SEQ ID NO: 204712 - protein, 15 aa, Artificial Sequence
  Description of Artificial Sequence: Synthetic peptide
  Seed: EWLKTRPILSPLTKG
EWLKTIPFLSCLTKG

SEQ ID NO: 204713 - protein, 15 aa, Artificial Sequence
  Description of Artificial Sequence: Synthetic peptide
  Seed: EWLKTRPILSPLTKG
EWLKTIPFLSDLTKG

SEQ ID NO: 204714 - protein, 15 aa, Artificial Sequence
  Description of Artificial Sequence: Synthetic peptide
  Seed: EWLKTRPILSPLTKG
EWLKTIPFLSELTKG

SEQ ID NO: 204715 - protein, 15 aa, Artificial Sequence
  Description of Artificial Sequence: Synthetic peptide
  Seed: EWLKTRPILSPLTKG
EWLKTIPFLSFLTKG

SEQ ID NO: 204716 - protein, 15 aa, Artificial Sequence
  Description of Artificial Sequence: Synthetic peptide
  Seed: EWLKTRPILSPLTKG
EWLKTIPFLSHLTKG

SEQ ID NO: 204717 - protein, 15 aa, Artificial Sequence
  Description of Artificial Sequence: Synthetic peptide
  Seed: EWLKTRPILSPLTKG
EWLKTIPFLSILTKG

SEQ ID NO: 204718 - protein, 15 aa, Artificial Sequence
  Description of Artificial Sequence: Synthetic peptide
  Seed: EWLKTRPILSPLTKG
EWLKTIPFLSLLTKG

SEQ ID NO: 204719 - protein, 15 aa, Artificial Sequence
  Description of Artificial Sequence: Synthetic peptide
  Seed: EWLKTRPILSPLTKG
EWLKTIPFLSMLTKG

SEQ ID NO: 204720 - protein, 15 aa, Artificial Sequence
  Description of Artificial Sequence: Synthetic peptide
  Seed: EWLKTRPILSPLTKG
EWLKTIPFLSNLTKG

SEQ ID NO: 204721 - protein, 15 aa, Artificial Sequence
  Description of Artificial Sequence: Synthetic peptide
  Seed: EWLKTRPILSPLTKG
EWLKTIPFLSPLTKG

SEQ ID NO: 204722 - protein, 15 aa, Artificial Sequence
  Description of Artificial Sequence: Synthetic peptide
  Seed: EWLKTRPILSPLTKG
EWLKTIPFLSQLTKG

SEQ ID NO: 204723 - protein, 15 aa, Artificial Sequence
  Description of Artificial Sequence: Synthetic peptide
  Seed: EWLKTRPILSPLTKG
EWLKTIPFLSSLTKG

SEQ ID NO: 204724 - protein, 15 aa, Artificial Sequence
  Description of Artificial Sequence: Synthetic peptide
  Seed: EWLKTRPILSPLTKG
EWLKTIPFLSTLTKG

SEQ ID NO: 204725 - protein, 15 aa, Artificial Sequence
  Description of Artificial Sequence: Synthetic peptide
  Seed: EWLKTRPILSPLTKG
EWLKTIPFLSVLTKG

SEQ ID NO: 204726 - protein, 15 aa, Artificial Sequence
  Description of Artificial Sequence: Synthetic peptide
  Seed: EWLKTRPILSPLTKG
EWLKTIPFLSWLTKG

SEQ ID NO: 204727 - protein, 15 aa, Artificial Sequence
  Description of Artificial Sequence: Synthetic peptide
  Seed: EWLKTRPILSPLTKG
EWLKTIPFLSYLTKG

SEQ ID NO: 204728 - protein, 15 aa, Artificial Sequence
  Description of Artificial Sequence: Synthetic peptide
  Seed: EWLKTRPILSPLTKG
EWLKTIPILSILTKG

SEQ ID NO: 204729 - protein, 15 aa, Artificial Sequence
  Description of Artificial Sequence: Synthetic peptide
  Seed: EWLKTRPILSPLTKG
EWLKTIPILSLLTKG

SEQ ID NO: 204730 - protein, 15 aa, Artificial Sequence
  Description of Artificial Sequence: Synthetic peptide
  Seed: EWLKTRPILSPLTKG
EWLKTIPILSVLTKG

SEQ ID NO: 204731 - protein, 15 aa, Artificial Sequence
  Description of Artificial Sequence: Synthetic peptide
  Seed: EWLKTRPILSPLTKG
EWLKTIPKLSALTKG

SEQ ID NO: 204732 - protein, 15 aa, Artificial Sequence
  Description of Artificial Sequence: Synthetic peptide
  Seed: EWLKTRPILSPLTKG
EWLKTIPKLSFLTKG

SEQ ID NO: 204733 - protein, 15 aa, Artificial Sequence
  Description of Artificial Sequence: Synthetic peptide
  Seed: EWLKTRPILSPLTKG
EWLKTIPKLSGLTKG

SEQ ID NO: 204734 - protein, 15 aa, Artificial Sequence
  Description of Artificial Sequence: Synthetic peptide
  Seed: EWLKTRPILSPLTKG
EWLKTIPKLSHLTKG

SEQ ID NO: 204735 - protein, 15 aa, Artificial Sequence
  Description of Artificial Sequence: Synthetic peptide
  Seed: EWLKTRPILSPLTKG
EWLKTIPKLSILTKG

SEQ ID NO: 204736 - protein, 15 aa, Artificial Sequence
  Description of Artificial Sequence: Synthetic peptide
  Seed: EWLKTRPILSPLTKG
EWLKTIPKLSKLTKG

SEQ ID NO: 204737 - protein, 15 aa, Artificial Sequence
  Description of Artificial Sequence: Synthetic peptide
  Seed: EWLKTRPILSPLTKG
EWLKTIPKLSLLTKG

SEQ ID NO: 204738 - protein, 15 aa, Artificial Sequence
  Description of Artificial Sequence: Synthetic peptide
  Seed: EWLKTRPILSPLTKG
EWLKTIPKLSMLTKG

SEQ ID NO: 204739 - protein, 15 aa, Artificial Sequence
  Description of Artificial Sequence: Synthetic peptide
  Seed: EWLKTRPILSPLTKG
EWLKTIPKLSNLTKG

SEQ ID NO: 204740 - protein, 15 aa, Artificial Sequence
  Description of Artificial Sequence: Synthetic peptide
  Seed: EWLKTRPILSPLTKG
EWLKTIPKLSQLTKG

SEQ ID NO: 204741 - protein, 15 aa, Artificial Sequence
  Description of Artificial Sequence: Synthetic peptide
  Seed: EWLKTRPILSPLTKG
EWLKTIPKLSRLTKG

SEQ ID NO: 204742 - protein, 15 aa, Artificial Sequence
  Description of Artificial Sequence: Synthetic peptide
  Seed: EWLKTRPILSPLTKG
EWLKTIPKLSSLTKG

SEQ ID NO: 204743 - protein, 15 aa, Artificial Sequence
  Description of Artificial Sequence: Synthetic peptide
  Seed: EWLKTRPILSPLTKG
EWLKTIPKLSTLTKG

SEQ ID NO: 204744 - protein, 15 aa, Artificial Sequence
  Description of Artificial Sequence: Synthetic peptide
  Seed: EWLKTRPILSPLTKG
EWLKTIPKLSVLTKG

SEQ ID NO: 204745 - protein, 15 aa, Artificial Sequence
  Description of Artificial Sequence: Synthetic peptide
  Seed: EWLKTRPILSPLTKG
EWLKTIPKLSYLTKG

SEQ ID NO: 204746 - protein, 15 aa, Artificial Sequence
  Description of Artificial Sequence: Synthetic peptide
  Seed: EWLKTRPILSPLTKG
EWLKTIPLLSFLTKG

SEQ ID NO: 204747 - protein, 15 aa, Artificial Sequence
  Description of Artificial Sequence: Synthetic peptide
  Seed: EWLKTRPILSPLTKG
EWLKTIPLLSILTKG

SEQ ID NO: 204748 - protein, 15 aa, Artificial Sequence
  Description of Artificial Sequence: Synthetic peptide
  Seed: EWLKTRPILSPLTKG
EWLKTIPLLSLLTKG

SEQ ID NO: 204749 - protein, 15 aa, Artificial Sequence
  Description of Artificial Sequence: Synthetic peptide
  Seed: EWLKTRPILSPLTKG
EWLKTIPLLSMLTKG

SEQ ID NO: 204750 - protein, 15 aa, Artificial Sequence
  Description of Artificial Sequence: Synthetic peptide
  Seed: EWLKTRPILSPLTKG
EWLKTIPLLSVLTKG

SEQ ID NO: 204751 - protein, 15 aa, Artificial Sequence
  Description of Artificial Sequence: Synthetic peptide
  Seed: EWLKTRPILSPLTKG
EWLKTIPMLSILTKG

SEQ ID NO: 204752 - protein, 15 aa, Artificial Sequence
  Description of Artificial Sequence: Synthetic peptide
  Seed: EWLKTRPILSPLTKG
EWLKTIPMLSLLTKG

SEQ ID NO: 204753 - protein, 15 aa, Artificial Sequence
  Description of Artificial Sequence: Synthetic peptide
  Seed: EWLKTRPILSPLTKG
EWLKTIPMLSVLTKG

SEQ ID NO: 204754 - protein, 15 aa, Artificial Sequence
  Description of Artificial Sequence: Synthetic peptide
  Seed: EWLKTRPILSPLTKG
EWLKTIPRLSALTKG

SEQ ID NO: 204755 - protein, 15 aa, Artificial Sequence
  Description of Artificial Sequence: Synthetic peptide
  Seed: EWLKTRPILSPLTKG
EWLKTIPRLSFLTKG

SEQ ID NO: 204756 - protein, 15 aa, Artificial Sequence
  Description of Artificial Sequence: Synthetic peptide
  Seed: EWLKTRPILSPLTKG
EWLKTIPRLSGLTKG

SEQ ID NO: 204757 - protein, 15 aa, Artificial Sequence
  Description of Artificial Sequence: Synthetic peptide
  Seed: EWLKTRPILSPLTKG
EWLKTIPRLSHLTKG

SEQ ID NO: 204758 - protein, 15 aa, Artificial Sequence
  Description of Artificial Sequence: Synthetic peptide
  Seed: EWLKTRPILSPLTKG
EWLKTIPRLSILTKG

SEQ ID NO: 204759 - protein, 15 aa, Artificial Sequence
  Description of Artificial Sequence: Synthetic peptide
  Seed: EWLKTRPILSPLTKG
EWLKTIPRLSKLTKG

SEQ ID NO: 204760 - protein, 15 aa, Artificial Sequence
  Description of Artificial Sequence: Synthetic peptide
  Seed: EWLKTRPILSPLTKG
EWLKTIPRLSLLTKG

SEQ ID NO: 204761 - protein, 15 aa, Artificial Sequence
  Description of Artificial Sequence: Synthetic peptide
  Seed: EWLKTRPILSPLTKG
EWLKTIPRLSMLTKG

SEQ ID NO: 204762 - protein, 15 aa, Artificial Sequence
  Description of Artificial Sequence: Synthetic peptide
  Seed: EWLKTRPILSPLTKG
EWLKTIPRLSNLTKG

SEQ ID NO: 204763 - protein, 15 aa, Artificial Sequence
  Description of Artificial Sequence: Synthetic peptide
  Seed: EWLKTRPILSPLTKG
EWLKTIPRLSPLTKG

SEQ ID NO: 204764 - protein, 15 aa, Artificial Sequence
  Description of Artificial Sequence: Synthetic peptide
  Seed: EWLKTRPILSPLTKG
EWLKTIPRLSQLTKG

SEQ ID NO: 204765 - protein, 15 aa, Artificial Sequence
  Description of Artificial Sequence: Synthetic peptide
  Seed: EWLKTRPILSPLTKG
EWLKTIPRLSRLTKG

SEQ ID NO: 204766 - protein, 15 aa, Artificial Sequence
  Description of Artificial Sequence: Synthetic peptide
  Seed: EWLKTRPILSPLTKG
EWLKTIPRLSSLTKG

SEQ ID NO: 204767 - protein, 15 aa, Artificial Sequence
  Description of Artificial Sequence: Synthetic peptide
  Seed: EWLKTRPILSPLTKG
EWLKTIPRLSTLTKG

SEQ ID NO: 204768 - protein, 15 aa, Artificial Sequence
  Description of Artificial Sequence: Synthetic peptide
  Seed: EWLKTRPILSPLTKG
EWLKTIPRLSVLTKG

SEQ ID NO: 204769 - protein, 15 aa, Artificial Sequence
  Description of Artificial Sequence: Synthetic peptide
  Seed: EWLKTRPILSPLTKG
EWLKTIPRLSYLTKG

SEQ ID NO: 204770 - protein, 15 aa, Artificial Sequence
  Description of Artificial Sequence: Synthetic peptide
  Seed: EWLKTRPILSPLTKG
EWLKTIPSLSRLTKG

SEQ ID NO: 204771 - protein, 15 aa, Artificial Sequence
  Description of Artificial Sequence: Synthetic peptide
  Seed: EWLKTRPILSPLTKG
EWLKTIPWLSFLTKG

SEQ ID NO: 204772 - protein, 15 aa, Artificial Sequence
  Description of Artificial Sequence: Synthetic peptide
  Seed: EWLKTRPILSPLTKG
EWLKTIPWLSILTKG

SEQ ID NO: 204773 - protein, 15 aa, Artificial Sequence
  Description of Artificial Sequence: Synthetic peptide
  Seed: EWLKTRPILSPLTKG
EWLKTIPWLSLLTKG

SEQ ID NO: 204774 - protein, 15 aa, Artificial Sequence
  Description of Artificial Sequence: Synthetic peptide
  Seed: EWLKTRPILSPLTKG
EWLKTIPWLSMLTKG

SEQ ID NO: 204775 - protein, 15 aa, Artificial Sequence
  Description of Artificial Sequence: Synthetic peptide
  Seed: EWLKTRPILSPLTKG
EWLKTIPWLSVLTKG

SEQ ID NO: 204776 - protein, 15 aa, Artificial Sequence
  Description of Artificial Sequence: Synthetic peptide
  Seed: EWLKTRPILSPLTKG
EWLKTIPYLSFLTKG

SEQ ID NO: 204777 - protein, 15 aa, Artificial Sequence
  Description of Artificial Sequence: Synthetic peptide
  Seed: EWLKTRPILSPLTKG
EWLKTIPYLSILTKG

SEQ ID NO: 204778 - protein, 15 aa, Artificial Sequence
  Description of Artificial Sequence: Synthetic peptide
  Seed: EWLKTRPILSPLTKG
EWLKTIPYLSLLTKG

SEQ ID NO: 204779 - protein, 15 aa, Artificial Sequence
  Description of Artificial Sequence: Synthetic peptide
  Seed: EWLKTRPILSPLTKG
EWLKTIPYLSMLTKG

SEQ ID NO: 204780 - protein, 15 aa, Artificial Sequence
  Description of Artificial Sequence: Synthetic peptide
  Seed: EWLKTRPILSPLTKG
EWLKTIPYLSVLTKG

SEQ ID NO: 204781 - protein, 15 aa, Artificial Sequence
  Description of Artificial Sequence: Synthetic peptide
  Seed: EWLKTRPILSPLTKG
EWLKTKPFLSFLTKG

SEQ ID NO: 204782 - protein, 15 aa, Artificial Sequence
  Description of Artificial Sequence: Synthetic peptide
  Seed: EWLKTRPILSPLTKG
EWLKTKPFLSILTKG

SEQ ID NO: 204783 - protein, 15 aa, Artificial Sequence
  Description of Artificial Sequence: Synthetic peptide
  Seed: EWLKTRPILSPLTKG
EWLKTKPFLSLLTKG

SEQ ID NO: 204784 - protein, 15 aa, Artificial Sequence
  Description of Artificial Sequence: Synthetic peptide
  Seed: EWLKTRPILSPLTKG
EWLKTKPFLSMLTKG

SEQ ID NO: 204785 - protein, 15 aa, Artificial Sequence
  Description of Artificial Sequence: Synthetic peptide
  Seed: EWLKTRPILSPLTKG
EWLKTKPFLSVLTKG

SEQ ID NO: 204786 - protein, 15 aa, Artificial Sequence
  Description of Artificial Sequence: Synthetic peptide
  Seed: EWLKTRPILSPLTKG
EWLKTLPFLSALTKG

SEQ ID NO: 204787 - protein, 15 aa, Artificial Sequence
  Description of Artificial Sequence: Synthetic peptide
  Seed: EWLKTRPILSPLTKG
EWLKTLPFLSCLTKG

SEQ ID NO: 204788 - protein, 15 aa, Artificial Sequence
  Description of Artificial Sequence: Synthetic peptide
  Seed: EWLKTRPILSPLTKG
EWLKTLPFLSDLTKG

SEQ ID NO: 204789 - protein, 15 aa, Artificial Sequence
  Description of Artificial Sequence: Synthetic peptide
  Seed: EWLKTRPILSPLTKG
EWLKTLPFLSELTKG

SEQ ID NO: 204790 - protein, 15 aa, Artificial Sequence
  Description of Artificial Sequence: Synthetic peptide
  Seed: EWLKTRPILSPLTKG
EWLKTLPFLSFLTKG

SEQ ID NO: 204791 - protein, 15 aa, Artificial Sequence
  Description of Artificial Sequence: Synthetic peptide
  Seed: EWLKTRPILSPLTKG
EWLKTLPFLSHLTKG

SEQ ID NO: 204792 - protein, 15 aa, Artificial Sequence
  Description of Artificial Sequence: Synthetic peptide
  Seed: EWLKTRPILSPLTKG
EWLKTLPFLSILTKG

SEQ ID NO: 204793 - protein, 15 aa, Artificial Sequence
  Description of Artificial Sequence: Synthetic peptide
  Seed: EWLKTRPILSPLTKG
EWLKTLPFLSLLTKG

SEQ ID NO: 204794 - protein, 15 aa, Artificial Sequence
  Description of Artificial Sequence: Synthetic peptide
  Seed: EWLKTRPILSPLTKG
EWLKTLPFLSMLTKG

SEQ ID NO: 204795 - protein, 15 aa, Artificial Sequence
  Description of Artificial Sequence: Synthetic peptide
  Seed: EWLKTRPILSPLTKG
EWLKTLPFLSNLTKG

SEQ ID NO: 204796 - protein, 15 aa, Artificial Sequence
  Description of Artificial Sequence: Synthetic peptide
  Seed: EWLKTRPILSPLTKG
EWLKTLPFLSPLTKG

SEQ ID NO: 204797 - protein, 15 aa, Artificial Sequence
  Description of Artificial Sequence: Synthetic peptide
  Seed: EWLKTRPILSPLTKG
EWLKTLPFLSQLTKG

SEQ ID NO: 204798 - protein, 15 aa, Artificial Sequence
  Description of Artificial Sequence: Synthetic peptide
  Seed: EWLKTRPILSPLTKG
EWLKTLPFLSSLTKG

SEQ ID NO: 204799 - protein, 15 aa, Artificial Sequence
  Description of Artificial Sequence: Synthetic peptide
  Seed: EWLKTRPILSPLTKG
EWLKTLPFLSTLTKG

SEQ ID NO: 204800 - protein, 15 aa, Artificial Sequence
  Description of Artificial Sequence: Synthetic peptide
  Seed: EWLKTRPILSPLTKG
EWLKTLPFLSVLTKG

SEQ ID NO: 204801 - protein, 15 aa, Artificial Sequence
  Description of Artificial Sequence: Synthetic peptide
  Seed: EWLKTRPILSPLTKG
EWLKTLPFLSWLTKG

SEQ ID NO: 204802 - protein, 15 aa, Artificial Sequence
  Description of Artificial Sequence: Synthetic peptide
  Seed: EWLKTRPILSPLTKG
EWLKTLPFLSYLTKG

SEQ ID NO: 204803 - protein, 15 aa, Artificial Sequence
  Description of Artificial Sequence: Synthetic peptide
  Seed: EWLKTRPILSPLTKG
EWLKTLPILSILTKG

SEQ ID NO: 204804 - protein, 15 aa, Artificial Sequence
  Description of Artificial Sequence: Synthetic peptide
  Seed: EWLKTRPILSPLTKG
EWLKTLPILSLLTKG

SEQ ID NO: 204805 - protein, 15 aa, Artificial Sequence
  Description of Artificial Sequence: Synthetic peptide
  Seed: EWLKTRPILSPLTKG
EWLKTLPILSVLTKG

SEQ ID NO: 204806 - protein, 15 aa, Artificial Sequence
  Description of Artificial Sequence: Synthetic peptide
  Seed: EWLKTRPILSPLTKG
EWLKTLPKLSALTKG

SEQ ID NO: 204807 - protein, 15 aa, Artificial Sequence
  Description of Artificial Sequence: Synthetic peptide
  Seed: EWLKTRPILSPLTKG
EWLKTLPKLSGLTKG

SEQ ID NO: 204808 - protein, 15 aa, Artificial Sequence
  Description of Artificial Sequence: Synthetic peptide
  Seed: EWLKTRPILSPLTKG
EWLKTLPKLSHLTKG

SEQ ID NO: 204809 - protein, 15 aa, Artificial Sequence
  Description of Artificial Sequence: Synthetic peptide
  Seed: EWLKTRPILSPLTKG
EWLKTLPKLSILTKG

SEQ ID NO: 204810 - protein, 15 aa, Artificial Sequence
  Description of Artificial Sequence: Synthetic peptide
  Seed: EWLKTRPILSPLTKG
EWLKTLPKLSKLTKG

SEQ ID NO: 204811 - protein, 15 aa, Artificial Sequence
  Description of Artificial Sequence: Synthetic peptide
  Seed: EWLKTRPILSPLTKG
EWLKTLPKLSLLTKG

SEQ ID NO: 204812 - protein, 15 aa, Artificial Sequence
  Description of Artificial Sequence: Synthetic peptide
  Seed: EWLKTRPILSPLTKG
EWLKTLPKLSMLTKG

SEQ ID NO: 204813 - protein, 15 aa, Artificial Sequence
  Description of Artificial Sequence: Synthetic peptide
  Seed: EWLKTRPILSPLTKG
EWLKTLPKLSNLTKG

SEQ ID NO: 204814 - protein, 15 aa, Artificial Sequence
  Description of Artificial Sequence: Synthetic peptide
  Seed: EWLKTRPILSPLTKG
EWLKTLPKLSQLTKG

SEQ ID NO: 204815 - protein, 15 aa, Artificial Sequence
  Description of Artificial Sequence: Synthetic peptide
  Seed: EWLKTRPILSPLTKG
EWLKTLPKLSRLTKG

SEQ ID NO: 204816 - protein, 15 aa, Artificial Sequence
  Description of Artificial Sequence: Synthetic peptide
  Seed: EWLKTRPILSPLTKG
EWLKTLPKLSSLTKG

SEQ ID NO: 204817 - protein, 15 aa, Artificial Sequence
  Description of Artificial Sequence: Synthetic peptide
  Seed: EWLKTRPILSPLTKG
EWLKTLPKLSTLTKG

SEQ ID NO: 204818 - protein, 15 aa, Artificial Sequence
  Description of Artificial Sequence: Synthetic peptide
  Seed: EWLKTRPILSPLTKG
EWLKTLPKLSVLTKG

SEQ ID NO: 204819 - protein, 15 aa, Artificial Sequence
  Description of Artificial Sequence: Synthetic peptide
  Seed: EWLKTRPILSPLTKG
EWLKTLPKLSYLTKG

SEQ ID NO: 204820 - protein, 15 aa, Artificial Sequence
  Description of Artificial Sequence: Synthetic peptide
  Seed: EWLKTRPILSPLTKG
EWLKTLPLLSFLTKG

SEQ ID NO: 204821 - protein, 15 aa, Artificial Sequence
  Description of Artificial Sequence: Synthetic peptide
  Seed: EWLKTRPILSPLTKG
EWLKTLPLLSILTKG

SEQ ID NO: 204822 - protein, 15 aa, Artificial Sequence
  Description of Artificial Sequence: Synthetic peptide
  Seed: EWLKTRPILSPLTKG
EWLKTLPLLSLLTKG

SEQ ID NO: 204823 - protein, 15 aa, Artificial Sequence
  Description of Artificial Sequence: Synthetic peptide
  Seed: EWLKTRPILSPLTKG
EWLKTLPLLSMLTKG

SEQ ID NO: 204824 - protein, 15 aa, Artificial Sequence
  Description of Artificial Sequence: Synthetic peptide
  Seed: EWLKTRPILSPLTKG
EWLKTLPLLSVLTKG

SEQ ID NO: 204825 - protein, 15 aa, Artificial Sequence
  Description of Artificial Sequence: Synthetic peptide
  Seed: EWLKTRPILSPLTKG
EWLKTLPMLSILTKG

SEQ ID NO: 204826 - protein, 15 aa, Artificial Sequence
  Description of Artificial Sequence: Synthetic peptide
  Seed: EWLKTRPILSPLTKG
EWLKTLPMLSLLTKG

SEQ ID NO: 204827 - protein, 15 aa, Artificial Sequence
  Description of Artificial Sequence: Synthetic peptide
  Seed: EWLKTRPILSPLTKG
EWLKTLPMLSVLTKG

SEQ ID NO: 204828 - protein, 15 aa, Artificial Sequence
  Description of Artificial Sequence: Synthetic peptide
  Seed: EWLKTRPILSPLTKG
EWLKTLPRLSALTKG

SEQ ID NO: 204829 - protein, 15 aa, Artificial Sequence
  Description of Artificial Sequence: Synthetic peptide
  Seed: EWLKTRPILSPLTKG
EWLKTLPRLSCLTKG

SEQ ID NO: 204830 - protein, 15 aa, Artificial Sequence
  Description of Artificial Sequence: Synthetic peptide
  Seed: EWLKTRPILSPLTKG
EWLKTLPRLSFLTKG

SEQ ID NO: 204831 - protein, 15 aa, Artificial Sequence
  Description of Artificial Sequence: Synthetic peptide
  Seed: EWLKTRPILSPLTKG
EWLKTLPRLSGLTKG

SEQ ID NO: 204832 - protein, 15 aa, Artificial Sequence
  Description of Artificial Sequence: Synthetic peptide
  Seed: EWLKTRPILSPLTKG
EWLKTLPRLSHLTKG

SEQ ID NO: 204833 - protein, 15 aa, Artificial Sequence
  Description of Artificial Sequence: Synthetic peptide
  Seed: EWLKTRPILSPLTKG
EWLKTLPRLSILTKG

SEQ ID NO: 204834 - protein, 15 aa, Artificial Sequence
  Description of Artificial Sequence: Synthetic peptide
  Seed: EWLKTRPILSPLTKG
EWLKTLPRLSKLTKG

SEQ ID NO: 204835 - protein, 15 aa, Artificial Sequence
  Description of Artificial Sequence: Synthetic peptide
  Seed: EWLKTRPILSPLTKG
EWLKTLPRLSLLTKG

SEQ ID NO: 204836 - protein, 15 aa, Artificial Sequence
  Description of Artificial Sequence: Synthetic peptide
  Seed: EWLKTRPILSPLTKG
EWLKTLPRLSMLTKG

SEQ ID NO: 204837 - protein, 15 aa, Artificial Sequence
  Description of Artificial Sequence: Synthetic peptide
  Seed: EWLKTRPILSPLTKG
EWLKTLPRLSNLTKG

SEQ ID NO: 204838 - protein, 15 aa, Artificial Sequence
  Description of Artificial Sequence: Synthetic peptide
  Seed: EWLKTRPILSPLTKG
EWLKTLPRLSPLTKG

SEQ ID NO: 204839 - protein, 15 aa, Artificial Sequence
  Description of Artificial Sequence: Synthetic peptide
  Seed: EWLKTRPILSPLTKG
EWLKTLPRLSQLTKG

SEQ ID NO: 204840 - protein, 15 aa, Artificial Sequence
  Description of Artificial Sequence: Synthetic peptide
  Seed: EWLKTRPILSPLTKG
EWLKTLPRLSRLTKG

SEQ ID NO: 204841 - protein, 15 aa, Artificial Sequence
  Description of Artificial Sequence: Synthetic peptide
  Seed: EWLKTRPILSPLTKG
EWLKTLPRLSSLTKG

SEQ ID NO: 204842 - protein, 15 aa, Artificial Sequence
  Description of Artificial Sequence: Synthetic peptide
  Seed: EWLKTRPILSPLTKG
EWLKTLPRLSTLTKG

SEQ ID NO: 204843 - protein, 15 aa, Artificial Sequence
  Description of Artificial Sequence: Synthetic peptide
  Seed: EWLKTRPILSPLTKG
EWLKTLPRLSVLTKG

SEQ ID NO: 204844 - protein, 15 aa, Artificial Sequence
  Description of Artificial Sequence: Synthetic peptide
  Seed: EWLKTRPILSPLTKG
EWLKTLPRLSYLTKG

SEQ ID NO: 204845 - protein, 15 aa, Artificial Sequence
  Description of Artificial Sequence: Synthetic peptide
  Seed: EWLKTRPILSPLTKG
EWLKTLPWLSFLTKG

SEQ ID NO: 204846 - protein, 15 aa, Artificial Sequence
  Description of Artificial Sequence: Synthetic peptide
  Seed: EWLKTRPILSPLTKG
EWLKTLPWLSILTKG

SEQ ID NO: 204847 - protein, 15 aa, Artificial Sequence
  Description of Artificial Sequence: Synthetic peptide
  Seed: EWLKTRPILSPLTKG
EWLKTLPWLSLLTKG

SEQ ID NO: 204848 - protein, 15 aa, Artificial Sequence
  Description of Artificial Sequence: Synthetic peptide
  Seed: EWLKTRPILSPLTKG
EWLKTLPWLSMLTKG

SEQ ID NO: 204849 - protein, 15 aa, Artificial Sequence
  Description of Artificial Sequence: Synthetic peptide
  Seed: EWLKTRPILSPLTKG
EWLKTLPWLSVLTKG

SEQ ID NO: 204850 - protein, 15 aa, Artificial Sequence
  Description of Artificial Sequence: Synthetic peptide
  Seed: EWLKTRPILSPLTKG
EWLKTLPYLSFLTKG

SEQ ID NO: 204851 - protein, 15 aa, Artificial Sequence
  Description of Artificial Sequence: Synthetic peptide
  Seed: EWLKTRPILSPLTKG
EWLKTLPYLSILTKG

SEQ ID NO: 204852 - protein, 15 aa, Artificial Sequence
  Description of Artificial Sequence: Synthetic peptide
  Seed: EWLKTRPILSPLTKG
EWLKTLPYLSLLTKG

SEQ ID NO: 204853 - protein, 15 aa, Artificial Sequence
  Description of Artificial Sequence: Synthetic peptide
  Seed: EWLKTRPILSPLTKG
EWLKTLPYLSMLTKG

SEQ ID NO: 204854 - protein, 15 aa, Artificial Sequence
  Description of Artificial Sequence: Synthetic peptide
  Seed: EWLKTRPILSPLTKG
EWLKTLPYLSVLTKG

SEQ ID NO: 204855 - protein, 15 aa, Artificial Sequence
  Description of Artificial Sequence: Synthetic peptide
  Seed: EWLKTRPILSPLTKG
EWLKTMPFLSALTKG

SEQ ID NO: 204856 - protein, 15 aa, Artificial Sequence
  Description of Artificial Sequence: Synthetic peptide
  Seed: EWLKTRPILSPLTKG
EWLKTMPFLSDLTKG

SEQ ID NO: 204857 - protein, 15 aa, Artificial Sequence
  Description of Artificial Sequence: Synthetic peptide
  Seed: EWLKTRPILSPLTKG
EWLKTMPFLSELTKG

SEQ ID NO: 204858 - protein, 15 aa, Artificial Sequence
  Description of Artificial Sequence: Synthetic peptide
  Seed: EWLKTRPILSPLTKG
EWLKTMPFLSFLTKG

SEQ ID NO: 204859 - protein, 15 aa, Artificial Sequence
  Description of Artificial Sequence: Synthetic peptide
  Seed: EWLKTRPILSPLTKG
EWLKTMPFLSILTKG

SEQ ID NO: 204860 - protein, 15 aa, Artificial Sequence
  Description of Artificial Sequence: Synthetic peptide
  Seed: EWLKTRPILSPLTKG
EWLKTMPFLSLLTKG

SEQ ID NO: 204861 - protein, 15 aa, Artificial Sequence
  Description of Artificial Sequence: Synthetic peptide
  Seed: EWLKTRPILSPLTKG
EWLKTMPFLSMLTKG

SEQ ID NO: 204862 - protein, 15 aa, Artificial Sequence
  Description of Artificial Sequence: Synthetic peptide
  Seed: EWLKTRPILSPLTKG
EWLKTMPFLSNLTKG

SEQ ID NO: 204863 - protein, 15 aa, Artificial Sequence
  Description of Artificial Sequence: Synthetic peptide
  Seed: EWLKTRPILSPLTKG
EWLKTMPFLSSLTKG

SEQ ID NO: 204864 - protein, 15 aa, Artificial Sequence
  Description of Artificial Sequence: Synthetic peptide
  Seed: EWLKTRPILSPLTKG
EWLKTMPFLSTLTKG

SEQ ID NO: 204865 - protein, 15 aa, Artificial Sequence
  Description of Artificial Sequence: Synthetic peptide
  Seed: EWLKTRPILSPLTKG
EWLKTMPFLSVLTKG

SEQ ID NO: 204866 - protein, 15 aa, Artificial Sequence
  Description of Artificial Sequence: Synthetic peptide
  Seed: EWLKTRPILSPLTKG
EWLKTMPFLSYLTKG

SEQ ID NO: 204867 - protein, 15 aa, Artificial Sequence
  Description of Artificial Sequence: Synthetic peptide
  Seed: EWLKTRPILSPLTKG
EWLKTMPHLSALTKG

SEQ ID NO: 204868 - protein, 15 aa, Artificial Sequence
  Description of Artificial Sequence: Synthetic peptide
  Seed: EWLKTRPILSPLTKG
EWLKTMPHLSSLTKG

SEQ ID NO: 204869 - protein, 15 aa, Artificial Sequence
  Description of Artificial Sequence: Synthetic peptide
  Seed: EWLKTRPILSPLTKG
EWLKTMPKLSALTKG

SEQ ID NO: 204870 - protein, 15 aa, Artificial Sequence
  Description of Artificial Sequence: Synthetic peptide
  Seed: EWLKTRPILSPLTKG
EWLKTMPKLSFLTKG

SEQ ID NO: 204871 - protein, 15 aa, Artificial Sequence
  Description of Artificial Sequence: Synthetic peptide
  Seed: EWLKTRPILSPLTKG
EWLKTMPKLSGLTKG

SEQ ID NO: 204872 - protein, 15 aa, Artificial Sequence
  Description of Artificial Sequence: Synthetic peptide
  Seed: EWLKTRPILSPLTKG
EWLKTMPKLSHLTKG

SEQ ID NO: 204873 - protein, 15 aa, Artificial Sequence
  Description of Artificial Sequence: Synthetic peptide
  Seed: EWLKTRPILSPLTKG
EWLKTMPKLSILTKG

SEQ ID NO: 204874 - protein, 15 aa, Artificial Sequence
  Description of Artificial Sequence: Synthetic peptide
  Seed: EWLKTRPILSPLTKG
EWLKTMPKLSKLTKG

SEQ ID NO: 204875 - protein, 15 aa, Artificial Sequence
  Description of Artificial Sequence: Synthetic peptide
  Seed: EWLKTRPILSPLTKG
EWLKTMPKLSLLTKG

SEQ ID NO: 204876 - protein, 15 aa, Artificial Sequence
  Description of Artificial Sequence: Synthetic peptide
  Seed: EWLKTRPILSPLTKG
EWLKTMPKLSMLTKG

SEQ ID NO: 204877 - protein, 15 aa, Artificial Sequence
  Description of Artificial Sequence: Synthetic peptide
  Seed: EWLKTRPILSPLTKG
EWLKTMPKLSNLTKG

SEQ ID NO: 204878 - protein, 15 aa, Artificial Sequence
  Description of Artificial Sequence: Synthetic peptide
  Seed: EWLKTRPILSPLTKG
EWLKTMPKLSPLTKG

SEQ ID NO: 204879 - protein, 15 aa, Artificial Sequence
  Description of Artificial Sequence: Synthetic peptide
  Seed: EWLKTRPILSPLTKG
EWLKTMPKLSQLTKG

SEQ ID NO: 204880 - protein, 15 aa, Artificial Sequence
  Description of Artificial Sequence: Synthetic peptide
  Seed: EWLKTRPILSPLTKG
EWLKTMPKLSRLTKG

SEQ ID NO: 204881 - protein, 15 aa, Artificial Sequence
  Description of Artificial Sequence: Synthetic peptide
  Seed: EWLKTRPILSPLTKG
EWLKTMPKLSSLTKG

SEQ ID NO: 204882 - protein, 15 aa, Artificial Sequence
  Description of Artificial Sequence: Synthetic peptide
  Seed: EWLKTRPILSPLTKG
EWLKTMPKLSTLTKG

SEQ ID NO: 204883 - protein, 15 aa, Artificial Sequence
  Description of Artificial Sequence: Synthetic peptide
  Seed: EWLKTRPILSPLTKG
EWLKTMPKLSVLTKG

SEQ ID NO: 204884 - protein, 15 aa, Artificial Sequence
  Description of Artificial Sequence: Synthetic peptide
  Seed: EWLKTRPILSPLTKG
EWLKTMPKLSYLTKG

SEQ ID NO: 204885 - protein, 15 aa, Artificial Sequence
  Description of Artificial Sequence: Synthetic peptide
  Seed: EWLKTRPILSPLTKG
EWLKTMPLLSILTKG

SEQ ID NO: 204886 - protein, 15 aa, Artificial Sequence
  Description of Artificial Sequence: Synthetic peptide
  Seed: EWLKTRPILSPLTKG
EWLKTMPLLSLLTKG

SEQ ID NO: 204887 - protein, 15 aa, Artificial Sequence
  Description of Artificial Sequence: Synthetic peptide
  Seed: EWLKTRPILSPLTKG
EWLKTMPLLSVLTKG

SEQ ID NO: 204888 - protein, 15 aa, Artificial Sequence
  Description of Artificial Sequence: Synthetic peptide
  Seed: EWLKTRPILSPLTKG
EWLKTMPMLSILTKG

SEQ ID NO: 204889 - protein, 15 aa, Artificial Sequence
  Description of Artificial Sequence: Synthetic peptide
  Seed: EWLKTRPILSPLTKG
EWLKTMPMLSLLTKG

SEQ ID NO: 204890 - protein, 15 aa, Artificial Sequence
  Description of Artificial Sequence: Synthetic peptide
  Seed: EWLKTRPILSPLTKG
EWLKTMPMLSVLTKG

SEQ ID NO: 204891 - protein, 15 aa, Artificial Sequence
  Description of Artificial Sequence: Synthetic peptide
  Seed: EWLKTRPILSPLTKG
EWLKTMPRLSALTKG

SEQ ID NO: 204892 - protein, 15 aa, Artificial Sequence
  Description of Artificial Sequence: Synthetic peptide
  Seed: EWLKTRPILSPLTKG
EWLKTMPRLSCLTKG

SEQ ID NO: 204893 - protein, 15 aa, Artificial Sequence
  Description of Artificial Sequence: Synthetic peptide
  Seed: EWLKTRPILSPLTKG
EWLKTMPRLSFLTKG

SEQ ID NO: 204894 - protein, 15 aa, Artificial Sequence
  Description of Artificial Sequence: Synthetic peptide
  Seed: EWLKTRPILSPLTKG
EWLKTMPRLSGLTKG

SEQ ID NO: 204895 - protein, 15 aa, Artificial Sequence
  Description of Artificial Sequence: Synthetic peptide
  Seed: EWLKTRPILSPLTKG
EWLKTMPRLSHLTKG

SEQ ID NO: 204896 - protein, 15 aa, Artificial Sequence
  Description of Artificial Sequence: Synthetic peptide
  Seed: EWLKTRPILSPLTKG
EWLKTMPRLSILTKG

SEQ ID NO: 204897 - protein, 15 aa, Artificial Sequence
  Description of Artificial Sequence: Synthetic peptide
  Seed: EWLKTRPILSPLTKG
EWLKTMPRLSKLTKG

SEQ ID NO: 204898 - protein, 15 aa, Artificial Sequence
  Description of Artificial Sequence: Synthetic peptide
  Seed: EWLKTRPILSPLTKG
EWLKTMPRLSLLTKG

SEQ ID NO: 204899 - protein, 15 aa, Artificial Sequence
  Description of Artificial Sequence: Synthetic peptide
  Seed: EWLKTRPILSPLTKG
EWLKTMPRLSMLTKG

SEQ ID NO: 204900 - protein, 15 aa, Artificial Sequence
  Description of Artificial Sequence: Synthetic peptide
  Seed: EWLKTRPILSPLTKG
EWLKTMPRLSNLTKG

SEQ ID NO: 204901 - protein, 15 aa, Artificial Sequence
  Description of Artificial Sequence: Synthetic peptide
  Seed: EWLKTRPILSPLTKG
EWLKTMPRLSPLTKG

SEQ ID NO: 204902 - protein, 15 aa, Artificial Sequence
  Description of Artificial Sequence: Synthetic peptide
  Seed: EWLKTRPILSPLTKG
EWLKTMPRLSQLTKG

SEQ ID NO: 204903 - protein, 15 aa, Artificial Sequence
  Description of Artificial Sequence: Synthetic peptide
  Seed: EWLKTRPILSPLTKG
EWLKTMPRLSRLTKG

SEQ ID NO: 204904 - protein, 15 aa, Artificial Sequence
  Description of Artificial Sequence: Synthetic peptide
  Seed: EWLKTRPILSPLTKG
EWLKTMPRLSSLTKG

SEQ ID NO: 204905 - protein, 15 aa, Artificial Sequence
  Description of Artificial Sequence: Synthetic peptide
  Seed: EWLKTRPILSPLTKG
EWLKTMPRLSTLTKG

SEQ ID NO: 204906 - protein, 15 aa, Artificial Sequence
  Description of Artificial Sequence: Synthetic peptide
  Seed: EWLKTRPILSPLTKG
EWLKTMPRLSVLTKG

SEQ ID NO: 204907 - protein, 15 aa, Artificial Sequence
  Description of Artificial Sequence: Synthetic peptide
  Seed: EWLKTRPILSPLTKG
EWLKTMPRLSWLTKG

SEQ ID NO: 204908 - protein, 15 aa, Artificial Sequence
  Description of Artificial Sequence: Synthetic peptide
  Seed: EWLKTRPILSPLTKG
EWLKTMPRLSYLTKG

SEQ ID NO: 204909 - protein, 15 aa, Artificial Sequence
  Description of Artificial Sequence: Synthetic peptide
  Seed: EWLKTRPILSPLTKG
EWLKTMPWLSFLTKG

SEQ ID NO: 204910 - protein, 15 aa, Artificial Sequence
  Description of Artificial Sequence: Synthetic peptide
  Seed: EWLKTRPILSPLTKG
EWLKTMPWLSILTKG

SEQ ID NO: 204911 - protein, 15 aa, Artificial Sequence
  Description of Artificial Sequence: Synthetic peptide
  Seed: EWLKTRPILSPLTKG
EWLKTMPWLSLLTKG

SEQ ID NO: 204912 - protein, 15 aa, Artificial Sequence
  Description of Artificial Sequence: Synthetic peptide
  Seed: EWLKTRPILSPLTKG
EWLKTMPWLSVLTKG

SEQ ID NO: 204913 - protein, 15 aa, Artificial Sequence
  Description of Artificial Sequence: Synthetic peptide
  Seed: EWLKTRPILSPLTKG
EWLKTMPYLSFLTKG

SEQ ID NO: 204914 - protein, 15 aa, Artificial Sequence
  Description of Artificial Sequence: Synthetic peptide
  Seed: EWLKTRPILSPLTKG
EWLKTMPYLSILTKG

SEQ ID NO: 204915 - protein, 15 aa, Artificial Sequence
  Description of Artificial Sequence: Synthetic peptide
  Seed: EWLKTRPILSPLTKG
EWLKTMPYLSLLTKG

SEQ ID NO: 204916 - protein, 15 aa, Artificial Sequence
  Description of Artificial Sequence: Synthetic peptide
  Seed: EWLKTRPILSPLTKG
EWLKTMPYLSVLTKG

SEQ ID NO: 204917 - protein, 15 aa, Artificial Sequence
  Description of Artificial Sequence: Synthetic peptide
  Seed: EWLKTRPILSPLTKG
EWLKTNPFLSFLTKG

SEQ ID NO: 204918 - protein, 15 aa, Artificial Sequence
  Description of Artificial Sequence: Synthetic peptide
  Seed: EWLKTRPILSPLTKG
EWLKTNPFLSILTKG

SEQ ID NO: 204919 - protein, 15 aa, Artificial Sequence
  Description of Artificial Sequence: Synthetic peptide
  Seed: EWLKTRPILSPLTKG
EWLKTNPFLSLLTKG

SEQ ID NO: 204920 - protein, 15 aa, Artificial Sequence
  Description of Artificial Sequence: Synthetic peptide
  Seed: EWLKTRPILSPLTKG
EWLKTNPFLSMLTKG

SEQ ID NO: 204921 - protein, 15 aa, Artificial Sequence
  Description of Artificial Sequence: Synthetic peptide
  Seed: EWLKTRPILSPLTKG
EWLKTNPFLSVLTKG

SEQ ID NO: 204922 - protein, 15 aa, Artificial Sequence
  Description of Artificial Sequence: Synthetic peptide
  Seed: EWLKTRPILSPLTKG
EWLKTQPFLSALTKG

SEQ ID NO: 204923 - protein, 15 aa, Artificial Sequence
  Description of Artificial Sequence: Synthetic peptide
  Seed: EWLKTRPILSPLTKG
EWLKTQPFLSFLTKG

SEQ ID NO: 204924 - protein, 15 aa, Artificial Sequence
  Description of Artificial Sequence: Synthetic peptide
  Seed: EWLKTRPILSPLTKG
EWLKTQPFLSILTKG

SEQ ID NO: 204925 - protein, 15 aa, Artificial Sequence
  Description of Artificial Sequence: Synthetic peptide
  Seed: EWLKTRPILSPLTKG
EWLKTQPFLSLLTKG

SEQ ID NO: 204926 - protein, 15 aa, Artificial Sequence
  Description of Artificial Sequence: Synthetic peptide
  Seed: EWLKTRPILSPLTKG
EWLKTQPFLSMLTKG

SEQ ID NO: 204927 - protein, 15 aa, Artificial Sequence
  Description of Artificial Sequence: Synthetic peptide
  Seed: EWLKTRPILSPLTKG
EWLKTQPFLSTLTKG

SEQ ID NO: 204928 - protein, 15 aa, Artificial Sequence
  Description of Artificial Sequence: Synthetic peptide
  Seed: EWLKTRPILSPLTKG
EWLKTQPFLSVLTKG

SEQ ID NO: 204929 - protein, 15 aa, Artificial Sequence
  Description of Artificial Sequence: Synthetic peptide
  Seed: EWLKTRPILSPLTKG
EWLKTQPFLSYLTKG

SEQ ID NO: 204930 - protein, 15 aa, Artificial Sequence
  Description of Artificial Sequence: Synthetic peptide
  Seed: EWLKTRPILSPLTKG
EWLKTQPLLSILTKG

SEQ ID NO: 204931 - protein, 15 aa, Artificial Sequence
  Description of Artificial Sequence: Synthetic peptide
  Seed: EWLKTRPILSPLTKG
EWLKTQPRLSALTKG

SEQ ID NO: 204932 - protein, 15 aa, Artificial Sequence
  Description of Artificial Sequence: Synthetic peptide
  Seed: EWLKTRPILSPLTKG
EWLKTQPRLSSLTKG

SEQ ID NO: 204933 - protein, 15 aa, Artificial Sequence
  Description of Artificial Sequence: Synthetic peptide
  Seed: EWLKTRPILSPLTKG
EWLKTRPFLSILTKG

SEQ ID NO: 204934 - protein, 15 aa, Artificial Sequence
  Description of Artificial Sequence: Synthetic peptide
  Seed: EWLKTRPILSPLTKG
EWLKTRPFLSLLTKG

SEQ ID NO: 204935 - protein, 15 aa, Artificial Sequence
  Description of Artificial Sequence: Synthetic peptide
  Seed: EWLKTRPILSPLTKG
EWLKTRPFLSVLTKG

SEQ ID NO: 204936 - protein, 15 aa, Artificial Sequence
  Description of Artificial Sequence: Synthetic peptide
  Seed: EWLKTRPILSPLTKG
EWLKTSPFLSALTKG

SEQ ID NO: 204937 - protein, 15 aa, Artificial Sequence
  Description of Artificial Sequence: Synthetic peptide
  Seed: EWLKTRPILSPLTKG
EWLKTSPFLSCLTKG

SEQ ID NO: 204938 - protein, 15 aa, Artificial Sequence
  Description of Artificial Sequence: Synthetic peptide
  Seed: EWLKTRPILSPLTKG
EWLKTSPFLSDLTKG

SEQ ID NO: 204939 - protein, 15 aa, Artificial Sequence
  Description of Artificial Sequence: Synthetic peptide
  Seed: EWLKTRPILSPLTKG
EWLKTSPFLSELTKG

SEQ ID NO: 204940 - protein, 15 aa, Artificial Sequence
  Description of Artificial Sequence: Synthetic peptide
  Seed: EWLKTRPILSPLTKG
EWLKTSPFLSFLTKG

SEQ ID NO: 204941 - protein, 15 aa, Artificial Sequence
  Description of Artificial Sequence: Synthetic peptide
  Seed: EWLKTRPILSPLTKG
EWLKTSPFLSILTKG

SEQ ID NO: 204942 - protein, 15 aa, Artificial Sequence
  Description of Artificial Sequence: Synthetic peptide
  Seed: EWLKTRPILSPLTKG
EWLKTSPFLSLLTKG

SEQ ID NO: 204943 - protein, 15 aa, Artificial Sequence
  Description of Artificial Sequence: Synthetic peptide
  Seed: EWLKTRPILSPLTKG
EWLKTSPFLSMLTKG

SEQ ID NO: 204944 - protein, 15 aa, Artificial Sequence
  Description of Artificial Sequence: Synthetic peptide
  Seed: EWLKTRPILSPLTKG
EWLKTSPFLSNLTKG

SEQ ID NO: 204945 - protein, 15 aa, Artificial Sequence
  Description of Artificial Sequence: Synthetic peptide
  Seed: EWLKTRPILSPLTKG
EWLKTSPFLSQLTKG

SEQ ID NO: 204946 - protein, 15 aa, Artificial Sequence
  Description of Artificial Sequence: Synthetic peptide
  Seed: EWLKTRPILSPLTKG
EWLKTSPFLSSLTKG

SEQ ID NO: 204947 - protein, 15 aa, Artificial Sequence
  Description of Artificial Sequence: Synthetic peptide
  Seed: EWLKTRPILSPLTKG
EWLKTSPFLSTLTKG

SEQ ID NO: 204948 - protein, 15 aa, Artificial Sequence
  Description of Artificial Sequence: Synthetic peptide
  Seed: EWLKTRPILSPLTKG
EWLKTSPFLSVLTKG

SEQ ID NO: 204949 - protein, 15 aa, Artificial Sequence
  Description of Artificial Sequence: Synthetic peptide
  Seed: EWLKTRPILSPLTKG
EWLKTSPFLSWLTKG

SEQ ID NO: 204950 - protein, 15 aa, Artificial Sequence
  Description of Artificial Sequence: Synthetic peptide
  Seed: EWLKTRPILSPLTKG
EWLKTSPFLSYLTKG

SEQ ID NO: 204951 - protein, 15 aa, Artificial Sequence
  Description of Artificial Sequence: Synthetic peptide
  Seed: EWLKTRPILSPLTKG
EWLKTSPLLSILTKG

SEQ ID NO: 204952 - protein, 15 aa, Artificial Sequence
  Description of Artificial Sequence: Synthetic peptide
  Seed: EWLKTRPILSPLTKG
EWLKTSPLLSLLTKG

SEQ ID NO: 204953 - protein, 15 aa, Artificial Sequence
  Description of Artificial Sequence: Synthetic peptide
  Seed: EWLKTRPILSPLTKG
EWLKTSPLLSVLTKG

SEQ ID NO: 204954 - protein, 15 aa, Artificial Sequence
  Description of Artificial Sequence: Synthetic peptide
  Seed: EWLKTRPILSPLTKG
EWLKTSPMLSLLTKG

SEQ ID NO: 204955 - protein, 15 aa, Artificial Sequence
  Description of Artificial Sequence: Synthetic peptide
  Seed: EWLKTRPILSPLTKG
EWLKTSPRLSRLTKG

SEQ ID NO: 204956 - protein, 15 aa, Artificial Sequence
  Description of Artificial Sequence: Synthetic peptide
  Seed: EWLKTRPILSPLTKG
EWLKTSPWLSILTKG

SEQ ID NO: 204957 - protein, 15 aa, Artificial Sequence
  Description of Artificial Sequence: Synthetic peptide
  Seed: EWLKTRPILSPLTKG
EWLKTSPWLSLLTKG

SEQ ID NO: 204958 - protein, 15 aa, Artificial Sequence
  Description of Artificial Sequence: Synthetic peptide
  Seed: EWLKTRPILSPLTKG
EWLKTSPWLSVLTKG

SEQ ID NO: 204959 - protein, 15 aa, Artificial Sequence
  Description of Artificial Sequence: Synthetic peptide
  Seed: EWLKTRPILSPLTKG
EWLKTSPYLSILTKG

SEQ ID NO: 204960 - protein, 15 aa, Artificial Sequence
  Description of Artificial Sequence: Synthetic peptide
  Seed: EWLKTRPILSPLTKG
EWLKTSPYLSLLTKG

SEQ ID NO: 204961 - protein, 15 aa, Artificial Sequence
  Description of Artificial Sequence: Synthetic peptide
  Seed: EWLKTRPILSPLTKG
EWLKTSPYLSVLTKG

SEQ ID NO: 204962 - protein, 15 aa, Artificial Sequence
  Description of Artificial Sequence: Synthetic peptide
  Seed: EWLKTRPILSPLTKG
EWLKTTPFLSALTKG

SEQ ID NO: 204963 - protein, 15 aa, Artificial Sequence
  Description of Artificial Sequence: Synthetic peptide
  Seed: EWLKTRPILSPLTKG
EWLKTTPFLSCLTKG

SEQ ID NO: 204964 - protein, 15 aa, Artificial Sequence
  Description of Artificial Sequence: Synthetic peptide
  Seed: EWLKTRPILSPLTKG
EWLKTTPFLSDLTKG

SEQ ID NO: 204965 - protein, 15 aa, Artificial Sequence
  Description of Artificial Sequence: Synthetic peptide
  Seed: EWLKTRPILSPLTKG
EWLKTTPFLSELTKG

SEQ ID NO: 204966 - protein, 15 aa, Artificial Sequence
  Description of Artificial Sequence: Synthetic peptide
  Seed: EWLKTRPILSPLTKG
EWLKTTPFLSFLTKG

SEQ ID NO: 204967 - protein, 15 aa, Artificial Sequence
  Description of Artificial Sequence: Synthetic peptide
  Seed: EWLKTRPILSPLTKG
EWLKTTPFLSHLTKG

SEQ ID NO: 204968 - protein, 15 aa, Artificial Sequence
  Description of Artificial Sequence: Synthetic peptide
  Seed: EWLKTRPILSPLTKG
EWLKTTPFLSILTKG

SEQ ID NO: 204969 - protein, 15 aa, Artificial Sequence
  Description of Artificial Sequence: Synthetic peptide
  Seed: EWLKTRPILSPLTKG
EWLKTTPFLSLLTKG

SEQ ID NO: 204970 - protein, 15 aa, Artificial Sequence
  Description of Artificial Sequence: Synthetic peptide
  Seed: EWLKTRPILSPLTKG
EWLKTTPFLSMLTKG

SEQ ID NO: 204971 - protein, 15 aa, Artificial Sequence
  Description of Artificial Sequence: Synthetic peptide
  Seed: EWLKTRPILSPLTKG
EWLKTTPFLSNLTKG

SEQ ID NO: 204972 - protein, 15 aa, Artificial Sequence
  Description of Artificial Sequence: Synthetic peptide
  Seed: EWLKTRPILSPLTKG
EWLKTTPFLSPLTKG

SEQ ID NO: 204973 - protein, 15 aa, Artificial Sequence
  Description of Artificial Sequence: Synthetic peptide
  Seed: EWLKTRPILSPLTKG
EWLKTTPFLSQLTKG

SEQ ID NO: 204974 - protein, 15 aa, Artificial Sequence
  Description of Artificial Sequence: Synthetic peptide
  Seed: EWLKTRPILSPLTKG
EWLKTTPFLSSLTKG

SEQ ID NO: 204975 - protein, 15 aa, Artificial Sequence
  Description of Artificial Sequence: Synthetic peptide
  Seed: EWLKTRPILSPLTKG
EWLKTTPFLSTLTKG

SEQ ID NO: 204976 - protein, 15 aa, Artificial Sequence
  Description of Artificial Sequence: Synthetic peptide
  Seed: EWLKTRPILSPLTKG
EWLKTTPFLSVLTKG

SEQ ID NO: 204977 - protein, 15 aa, Artificial Sequence
  Description of Artificial Sequence: Synthetic peptide
  Seed: EWLKTRPILSPLTKG
EWLKTTPFLSWLTKG

SEQ ID NO: 204978 - protein, 15 aa, Artificial Sequence
  Description of Artificial Sequence: Synthetic peptide
  Seed: EWLKTRPILSPLTKG
EWLKTTPFLSYLTKG

SEQ ID NO: 204979 - protein, 15 aa, Artificial Sequence
  Description of Artificial Sequence: Synthetic peptide
  Seed: EWLKTRPILSPLTKG
EWLKTTPILSILTKG

SEQ ID NO: 204980 - protein, 15 aa, Artificial Sequence
  Description of Artificial Sequence: Synthetic peptide
  Seed: EWLKTRPILSPLTKG
EWLKTTPILSLLTKG

SEQ ID NO: 204981 - protein, 15 aa, Artificial Sequence
  Description of Artificial Sequence: Synthetic peptide
  Seed: EWLKTRPILSPLTKG
EWLKTTPILSVLTKG

SEQ ID NO: 204982 - protein, 15 aa, Artificial Sequence
  Description of Artificial Sequence: Synthetic peptide
  Seed: EWLKTRPILSPLTKG
EWLKTTPLLSFLTKG

SEQ ID NO: 204983 - protein, 15 aa, Artificial Sequence
  Description of Artificial Sequence: Synthetic peptide
  Seed: EWLKTRPILSPLTKG
EWLKTTPLLSILTKG

SEQ ID NO: 204984 - protein, 15 aa, Artificial Sequence
  Description of Artificial Sequence: Synthetic peptide
  Seed: EWLKTRPILSPLTKG
EWLKTTPLLSLLTKG

SEQ ID NO: 204985 - protein, 15 aa, Artificial Sequence
  Description of Artificial Sequence: Synthetic peptide
  Seed: EWLKTRPILSPLTKG
EWLKTTPLLSMLTKG

SEQ ID NO: 204986 - protein, 15 aa, Artificial Sequence
  Description of Artificial Sequence: Synthetic peptide
  Seed: EWLKTRPILSPLTKG
EWLKTTPLLSVLTKG

SEQ ID NO: 204987 - protein, 15 aa, Artificial Sequence
  Description of Artificial Sequence: Synthetic peptide
  Seed: EWLKTRPILSPLTKG
EWLKTTPMLSILTKG

SEQ ID NO: 204988 - protein, 15 aa, Artificial Sequence
  Description of Artificial Sequence: Synthetic peptide
  Seed: EWLKTRPILSPLTKG
EWLKTTPMLSLLTKG

SEQ ID NO: 204989 - protein, 15 aa, Artificial Sequence
  Description of Artificial Sequence: Synthetic peptide
  Seed: EWLKTRPILSPLTKG
EWLKTTPMLSVLTKG

SEQ ID NO: 204990 - protein, 15 aa, Artificial Sequence
  Description of Artificial Sequence: Synthetic peptide
  Seed: EWLKTRPILSPLTKG
EWLKTTPRLSALTKG

SEQ ID NO: 204991 - protein, 15 aa, Artificial Sequence
  Description of Artificial Sequence: Synthetic peptide
  Seed: EWLKTRPILSPLTKG
EWLKTTPRLSSLTKG

SEQ ID NO: 204992 - protein, 15 aa, Artificial Sequence
  Description of Artificial Sequence: Synthetic peptide
  Seed: EWLKTRPILSPLTKG
EWLKTTPWLSFLTKG

SEQ ID NO: 204993 - protein, 15 aa, Artificial Sequence
  Description of Artificial Sequence: Synthetic peptide
  Seed: EWLKTRPILSPLTKG
EWLKTTPWLSILTKG

SEQ ID NO: 204994 - protein, 15 aa, Artificial Sequence
  Description of Artificial Sequence: Synthetic peptide
  Seed: EWLKTRPILSPLTKG
EWLKTTPWLSLLTKG

SEQ ID NO: 204995 - protein, 15 aa, Artificial Sequence
  Description of Artificial Sequence: Synthetic peptide
  Seed: EWLKTRPILSPLTKG
EWLKTTPWLSMLTKG

SEQ ID NO: 204996 - protein, 15 aa, Artificial Sequence
  Description of Artificial Sequence: Synthetic peptide
  Seed: EWLKTRPILSPLTKG
EWLKTTPWLSVLTKG

SEQ ID NO: 204997 - protein, 15 aa, Artificial Sequence
  Description of Artificial Sequence: Synthetic peptide
  Seed: EWLKTRPILSPLTKG
EWLKTTPYLSFLTKG

SEQ ID NO: 204998 - protein, 15 aa, Artificial Sequence
  Description of Artificial Sequence: Synthetic peptide
  Seed: EWLKTRPILSPLTKG
EWLKTTPYLSILTKG

SEQ ID NO: 204999 - protein, 15 aa, Artificial Sequence
  Description of Artificial Sequence: Synthetic peptide
  Seed: EWLKTRPILSPLTKG
EWLKTTPYLSLLTKG

SEQ ID NO: 205000 - protein, 15 aa, Artificial Sequence
  Description of Artificial Sequence: Synthetic peptide
  Seed: EWLKTRPILSPLTKG
EWLKTTPYLSMLTKG

SEQ ID NO: 205001 - protein, 15 aa, Artificial Sequence
  Description of Artificial Sequence: Synthetic peptide
  Seed: EWLKTRPILSPLTKG
EWLKTTPYLSVLTKG

SEQ ID NO: 205002 - protein, 15 aa, Artificial Sequence
  Description of Artificial Sequence: Synthetic peptide
  Seed: EWLKTRPILSPLTKG
EWLKTVPALSRLTKG

SEQ ID NO: 205003 - protein, 15 aa, Artificial Sequence
  Description of Artificial Sequence: Synthetic peptide
  Seed: EWLKTRPILSPLTKG
EWLKTVPFLSALTKG

SEQ ID NO: 205004 - protein, 15 aa, Artificial Sequence
  Description of Artificial Sequence: Synthetic peptide
  Seed: EWLKTRPILSPLTKG
EWLKTVPFLSCLTKG

SEQ ID NO: 205005 - protein, 15 aa, Artificial Sequence
  Description of Artificial Sequence: Synthetic peptide
  Seed: EWLKTRPILSPLTKG
EWLKTVPFLSDLTKG

SEQ ID NO: 205006 - protein, 15 aa, Artificial Sequence
  Description of Artificial Sequence: Synthetic peptide
  Seed: EWLKTRPILSPLTKG
EWLKTVPFLSELTKG

SEQ ID NO: 205007 - protein, 15 aa, Artificial Sequence
  Description of Artificial Sequence: Synthetic peptide
  Seed: EWLKTRPILSPLTKG
EWLKTVPFLSFLTKG

SEQ ID NO: 205008 - protein, 15 aa, Artificial Sequence
  Description of Artificial Sequence: Synthetic peptide
  Seed: EWLKTRPILSPLTKG
EWLKTVPFLSHLTKG

SEQ ID NO: 205009 - protein, 15 aa, Artificial Sequence
  Description of Artificial Sequence: Synthetic peptide
  Seed: EWLKTRPILSPLTKG
EWLKTVPFLSILTKG

SEQ ID NO: 205010 - protein, 15 aa, Artificial Sequence
  Description of Artificial Sequence: Synthetic peptide
  Seed: EWLKTRPILSPLTKG
EWLKTVPFLSLLTKG

SEQ ID NO: 205011 - protein, 15 aa, Artificial Sequence
  Description of Artificial Sequence: Synthetic peptide
  Seed: EWLKTRPILSPLTKG
EWLKTVPFLSMLTKG

SEQ ID NO: 205012 - protein, 15 aa, Artificial Sequence
  Description of Artificial Sequence: Synthetic peptide
  Seed: EWLKTRPILSPLTKG
EWLKTVPFLSNLTKG

SEQ ID NO: 205013 - protein, 15 aa, Artificial Sequence
  Description of Artificial Sequence: Synthetic peptide
  Seed: EWLKTRPILSPLTKG
EWLKTVPFLSPLTKG

SEQ ID NO: 205014 - protein, 15 aa, Artificial Sequence
  Description of Artificial Sequence: Synthetic peptide
  Seed: EWLKTRPILSPLTKG
EWLKTVPFLSQLTKG

SEQ ID NO: 205015 - protein, 15 aa, Artificial Sequence
  Description of Artificial Sequence: Synthetic peptide
  Seed: EWLKTRPILSPLTKG
EWLKTVPFLSSLTKG

SEQ ID NO: 205016 - protein, 15 aa, Artificial Sequence
  Description of Artificial Sequence: Synthetic peptide
  Seed: EWLKTRPILSPLTKG
EWLKTVPFLSTLTKG

SEQ ID NO: 205017 - protein, 15 aa, Artificial Sequence
  Description of Artificial Sequence: Synthetic peptide
  Seed: EWLKTRPILSPLTKG
EWLKTVPFLSVLTKG

SEQ ID NO: 205018 - protein, 15 aa, Artificial Sequence
  Description of Artificial Sequence: Synthetic peptide
  Seed: EWLKTRPILSPLTKG
EWLKTVPFLSWLTKG

SEQ ID NO: 205019 - protein, 15 aa, Artificial Sequence
  Description of Artificial Sequence: Synthetic peptide
  Seed: EWLKTRPILSPLTKG
EWLKTVPFLSYLTKG

SEQ ID NO: 205020 - protein, 15 aa, Artificial Sequence
  Description of Artificial Sequence: Synthetic peptide
  Seed: EWLKTRPILSPLTKG
EWLKTVPILSILTKG

SEQ ID NO: 205021 - protein, 15 aa, Artificial Sequence
  Description of Artificial Sequence: Synthetic peptide
  Seed: EWLKTRPILSPLTKG
EWLKTVPILSLLTKG

SEQ ID NO: 205022 - protein, 15 aa, Artificial Sequence
  Description of Artificial Sequence: Synthetic peptide
  Seed: EWLKTRPILSPLTKG
EWLKTVPILSVLTKG

SEQ ID NO: 205023 - protein, 15 aa, Artificial Sequence
  Description of Artificial Sequence: Synthetic peptide
  Seed: EWLKTRPILSPLTKG
EWLKTVPKLSALTKG

SEQ ID NO: 205024 - protein, 15 aa, Artificial Sequence
  Description of Artificial Sequence: Synthetic peptide
  Seed: EWLKTRPILSPLTKG
EWLKTVPKLSFLTKG

SEQ ID NO: 205025 - protein, 15 aa, Artificial Sequence
  Description of Artificial Sequence: Synthetic peptide
  Seed: EWLKTRPILSPLTKG
EWLKTVPKLSGLTKG

SEQ ID NO: 205026 - protein, 15 aa, Artificial Sequence
  Description of Artificial Sequence: Synthetic peptide
  Seed: EWLKTRPILSPLTKG
EWLKTVPKLSHLTKG

SEQ ID NO: 205027 - protein, 15 aa, Artificial Sequence
  Description of Artificial Sequence: Synthetic peptide
  Seed: EWLKTRPILSPLTKG
EWLKTVPKLSILTKG

SEQ ID NO: 205028 - protein, 15 aa, Artificial Sequence
  Description of Artificial Sequence: Synthetic peptide
  Seed: EWLKTRPILSPLTKG
EWLKTVPKLSKLTKG

SEQ ID NO: 205029 - protein, 15 aa, Artificial Sequence
  Description of Artificial Sequence: Synthetic peptide
  Seed: EWLKTRPILSPLTKG
EWLKTVPKLSLLTKG

SEQ ID NO: 205030 - protein, 15 aa, Artificial Sequence
  Description of Artificial Sequence: Synthetic peptide
  Seed: EWLKTRPILSPLTKG
EWLKTVPKLSQLTKG

SEQ ID NO: 205031 - protein, 15 aa, Artificial Sequence
  Description of Artificial Sequence: Synthetic peptide
  Seed: EWLKTRPILSPLTKG
EWLKTVPKLSRLTKG

SEQ ID NO: 205032 - protein, 15 aa, Artificial Sequence
  Description of Artificial Sequence: Synthetic peptide
  Seed: EWLKTRPILSPLTKG
EWLKTVPKLSSLTKG

SEQ ID NO: 205033 - protein, 15 aa, Artificial Sequence
  Description of Artificial Sequence: Synthetic peptide
  Seed: EWLKTRPILSPLTKG
EWLKTVPKLSTLTKG

SEQ ID NO: 205034 - protein, 15 aa, Artificial Sequence
  Description of Artificial Sequence: Synthetic peptide
  Seed: EWLKTRPILSPLTKG
EWLKTVPKLSVLTKG

SEQ ID NO: 205035 - protein, 15 aa, Artificial Sequence
  Description of Artificial Sequence: Synthetic peptide
  Seed: EWLKTRPILSPLTKG
EWLKTVPKLSYLTKG

SEQ ID NO: 205036 - protein, 15 aa, Artificial Sequence
  Description of Artificial Sequence: Synthetic peptide
  Seed: EWLKTRPILSPLTKG
EWLKTVPLLSFLTKG

SEQ ID NO: 205037 - protein, 15 aa, Artificial Sequence
  Description of Artificial Sequence: Synthetic peptide
  Seed: EWLKTRPILSPLTKG
EWLKTVPLLSILTKG

SEQ ID NO: 205038 - protein, 15 aa, Artificial Sequence
  Description of Artificial Sequence: Synthetic peptide
  Seed: EWLKTRPILSPLTKG
EWLKTVPLLSLLTKG

SEQ ID NO: 205039 - protein, 15 aa, Artificial Sequence
  Description of Artificial Sequence: Synthetic peptide
  Seed: EWLKTRPILSPLTKG
EWLKTVPLLSMLTKG

SEQ ID NO: 205040 - protein, 15 aa, Artificial Sequence
  Description of Artificial Sequence: Synthetic peptide
  Seed: EWLKTRPILSPLTKG
EWLKTVPLLSVLTKG

SEQ ID NO: 205041 - protein, 15 aa, Artificial Sequence
  Description of Artificial Sequence: Synthetic peptide
  Seed: EWLKTRPILSPLTKG
EWLKTVPMLSILTKG

SEQ ID NO: 205042 - protein, 15 aa, Artificial Sequence
  Description of Artificial Sequence: Synthetic peptide
  Seed: EWLKTRPILSPLTKG
EWLKTVPMLSLLTKG

SEQ ID NO: 205043 - protein, 15 aa, Artificial Sequence
  Description of Artificial Sequence: Synthetic peptide
  Seed: EWLKTRPILSPLTKG
EWLKTVPMLSVLTKG

SEQ ID NO: 205044 - protein, 15 aa, Artificial Sequence
  Description of Artificial Sequence: Synthetic peptide
  Seed: EWLKTRPILSPLTKG
EWLKTVPRLSALTKG

SEQ ID NO: 205045 - protein, 15 aa, Artificial Sequence
  Description of Artificial Sequence: Synthetic peptide
  Seed: EWLKTRPILSPLTKG
EWLKTVPRLSFLTKG

SEQ ID NO: 205046 - protein, 15 aa, Artificial Sequence
  Description of Artificial Sequence: Synthetic peptide
  Seed: EWLKTRPILSPLTKG
EWLKTVPRLSGLTKG

SEQ ID NO: 205047 - protein, 15 aa, Artificial Sequence
  Description of Artificial Sequence: Synthetic peptide
  Seed: EWLKTRPILSPLTKG
EWLKTVPRLSHLTKG

SEQ ID NO: 205048 - protein, 15 aa, Artificial Sequence
  Description of Artificial Sequence: Synthetic peptide
  Seed: EWLKTRPILSPLTKG
EWLKTVPRLSILTKG

SEQ ID NO: 205049 - protein, 15 aa, Artificial Sequence
  Description of Artificial Sequence: Synthetic peptide
  Seed: EWLKTRPILSPLTKG
EWLKTVPRLSKLTKG

SEQ ID NO: 205050 - protein, 15 aa, Artificial Sequence
  Description of Artificial Sequence: Synthetic peptide
  Seed: EWLKTRPILSPLTKG
EWLKTVPRLSLLTKG

SEQ ID NO: 205051 - protein, 15 aa, Artificial Sequence
  Description of Artificial Sequence: Synthetic peptide
  Seed: EWLKTRPILSPLTKG
EWLKTVPRLSMLTKG

SEQ ID NO: 205052 - protein, 15 aa, Artificial Sequence
  Description of Artificial Sequence: Synthetic peptide
  Seed: EWLKTRPILSPLTKG
EWLKTVPRLSNLTKG

SEQ ID NO: 205053 - protein, 15 aa, Artificial Sequence
  Description of Artificial Sequence: Synthetic peptide
  Seed: EWLKTRPILSPLTKG
EWLKTVPRLSQLTKG

SEQ ID NO: 205054 - protein, 15 aa, Artificial Sequence
  Description of Artificial Sequence: Synthetic peptide
  Seed: EWLKTRPILSPLTKG
EWLKTVPRLSRLTKG

SEQ ID NO: 205055 - protein, 15 aa, Artificial Sequence
  Description of Artificial Sequence: Synthetic peptide
  Seed: EWLKTRPILSPLTKG
EWLKTVPRLSSLTKG

SEQ ID NO: 205056 - protein, 15 aa, Artificial Sequence
  Description of Artificial Sequence: Synthetic peptide
  Seed: EWLKTRPILSPLTKG
EWLKTVPRLSTLTKG

SEQ ID NO: 205057 - protein, 15 aa, Artificial Sequence
  Description of Artificial Sequence: Synthetic peptide
  Seed: EWLKTRPILSPLTKG
EWLKTVPRLSVLTKG

SEQ ID NO: 205058 - protein, 15 aa, Artificial Sequence
  Description of Artificial Sequence: Synthetic peptide
  Seed: EWLKTRPILSPLTKG
EWLKTVPRLSYLTKG

SEQ ID NO: 205059 - protein, 15 aa, Artificial Sequence
  Description of Artificial Sequence: Synthetic peptide
  Seed: EWLKTRPILSPLTKG
EWLKTVPWLSFLTKG

SEQ ID NO: 205060 - protein, 15 aa, Artificial Sequence
  Description of Artificial Sequence: Synthetic peptide
  Seed: EWLKTRPILSPLTKG
EWLKTVPWLSILTKG

SEQ ID NO: 205061 - protein, 15 aa, Artificial Sequence
  Description of Artificial Sequence: Synthetic peptide
  Seed: EWLKTRPILSPLTKG
EWLKTVPWLSLLTKG

SEQ ID NO: 205062 - protein, 15 aa, Artificial Sequence
  Description of Artificial Sequence: Synthetic peptide
  Seed: EWLKTRPILSPLTKG
EWLKTVPWLSMLTKG

SEQ ID NO: 205063 - protein, 15 aa, Artificial Sequence
  Description of Artificial Sequence: Synthetic peptide
  Seed: EWLKTRPILSPLTKG
EWLKTVPWLSVLTKG

SEQ ID NO: 205064 - protein, 15 aa, Artificial Sequence
  Description of Artificial Sequence: Synthetic peptide
  Seed: EWLKTRPILSPLTKG
EWLKTVPYLSFLTKG

SEQ ID NO: 205065 - protein, 15 aa, Artificial Sequence
  Description of Artificial Sequence: Synthetic peptide
  Seed: EWLKTRPILSPLTKG
EWLKTVPYLSILTKG

SEQ ID NO: 205066 - protein, 15 aa, Artificial Sequence
  Description of Artificial Sequence: Synthetic peptide
  Seed: EWLKTRPILSPLTKG
EWLKTVPYLSLLTKG

SEQ ID NO: 205067 - protein, 15 aa, Artificial Sequence
  Description of Artificial Sequence: Synthetic peptide
  Seed: EWLKTRPILSPLTKG
EWLKTVPYLSMLTKG

SEQ ID NO: 205068 - protein, 15 aa, Artificial Sequence
  Description of Artificial Sequence: Synthetic peptide
  Seed: EWLKTRPILSPLTKG
EWLKTVPYLSVLTKG

SEQ ID NO: 205069 - protein, 15 aa, Artificial Sequence
  Description of Artificial Sequence: Synthetic peptide
  Seed: EWLKTRPILSPLTKG
EWLKTWPFLSFLTKG

SEQ ID NO: 205070 - protein, 15 aa, Artificial Sequence
  Description of Artificial Sequence: Synthetic peptide
  Seed: EWLKTRPILSPLTKG
EWLKTWPFLSILTKG

SEQ ID NO: 205071 - protein, 15 aa, Artificial Sequence
  Description of Artificial Sequence: Synthetic peptide
  Seed: EWLKTRPILSPLTKG
EWLKTWPFLSLLTKG

SEQ ID NO: 205072 - protein, 15 aa, Artificial Sequence
  Description of Artificial Sequence: Synthetic peptide
  Seed: EWLKTRPILSPLTKG
EWLKTWPFLSMLTKG

SEQ ID NO: 205073 - protein, 15 aa, Artificial Sequence
  Description of Artificial Sequence: Synthetic peptide
  Seed: EWLKTRPILSPLTKG
EWLKTWPFLSVLTKG

SEQ ID NO: 205074 - protein, 15 aa, Artificial Sequence
  Description of Artificial Sequence: Synthetic peptide
  Seed: EWLKTRPILSPLTKG
EWLKTWPKLSFLTKG

SEQ ID NO: 205075 - protein, 15 aa, Artificial Sequence
  Description of Artificial Sequence: Synthetic peptide
  Seed: EWLKTRPILSPLTKG
EWLKTWPLLSILTKG

SEQ ID NO: 205076 - protein, 15 aa, Artificial Sequence
  Description of Artificial Sequence: Synthetic peptide
  Seed: EWLKTRPILSPLTKG
EWLKTWPLLSLLTKG

SEQ ID NO: 205077 - protein, 15 aa, Artificial Sequence
  Description of Artificial Sequence: Synthetic peptide
  Seed: EWLKTRPILSPLTKG
EWLKTWPLLSVLTKG

SEQ ID NO: 205078 - protein, 15 aa, Artificial Sequence
  Description of Artificial Sequence: Synthetic peptide
  Seed: EWLKTRPILSPLTKG
EWLKTWPRLSALTKG

SEQ ID NO: 205079 - protein, 15 aa, Artificial Sequence
  Description of Artificial Sequence: Synthetic peptide
  Seed: EWLKTRPILSPLTKG
EWLKTWPRLSFLTKG

SEQ ID NO: 205080 - protein, 15 aa, Artificial Sequence
  Description of Artificial Sequence: Synthetic peptide
  Seed: EWLKTRPILSPLTKG
EWLKTWPRLSILTKG

SEQ ID NO: 205081 - protein, 15 aa, Artificial Sequence
  Description of Artificial Sequence: Synthetic peptide
  Seed: EWLKTRPILSPLTKG
EWLKTWPRLSLLTKG

SEQ ID NO: 205082 - protein, 15 aa, Artificial Sequence
  Description of Artificial Sequence: Synthetic peptide
  Seed: EWLKTRPILSPLTKG
EWLKTWPRLSRLTKG

SEQ ID NO: 205083 - protein, 15 aa, Artificial Sequence
  Description of Artificial Sequence: Synthetic peptide
  Seed: EWLKTRPILSPLTKG
EWLKTWPRLSSLTKG

SEQ ID NO: 205084 - protein, 15 aa, Artificial Sequence
  Description of Artificial Sequence: Synthetic peptide
  Seed: EWLKTRPILSPLTKG
EWLKTWPRLSVLTKG

SEQ ID NO: 205085 - protein, 15 aa, Artificial Sequence
  Description of Artificial Sequence: Synthetic peptide
  Seed: EWLKTRPILSPLTKG
EWLKTWPRLSYLTKG

SEQ ID NO: 205086 - protein, 15 aa, Artificial Sequence
  Description of Artificial Sequence: Synthetic peptide
  Seed: EWLKTRPILSPLTKG
EWLKTYPFLSALTKG

SEQ ID NO: 205087 - protein, 15 aa, Artificial Sequence
  Description of Artificial Sequence: Synthetic peptide
  Seed: EWLKTRPILSPLTKG
EWLKTYPFLSFLTKG

SEQ ID NO: 205088 - protein, 15 aa, Artificial Sequence
  Description of Artificial Sequence: Synthetic peptide
  Seed: EWLKTRPILSPLTKG
EWLKTYPFLSILTKG

SEQ ID NO: 205089 - protein, 15 aa, Artificial Sequence
  Description of Artificial Sequence: Synthetic peptide
  Seed: EWLKTRPILSPLTKG
EWLKTYPFLSLLTKG

SEQ ID NO: 205090 - protein, 15 aa, Artificial Sequence
  Description of Artificial Sequence: Synthetic peptide
  Seed: EWLKTRPILSPLTKG
EWLKTYPFLSMLTKG

SEQ ID NO: 205091 - protein, 15 aa, Artificial Sequence
  Description of Artificial Sequence: Synthetic peptide
  Seed: EWLKTRPILSPLTKG
EWLKTYPFLSSLTKG

SEQ ID NO: 205092 - protein, 15 aa, Artificial Sequence
  Description of Artificial Sequence: Synthetic peptide
  Seed: EWLKTRPILSPLTKG
EWLKTYPFLSTLTKG

SEQ ID NO: 205093 - protein, 15 aa, Artificial Sequence
  Description of Artificial Sequence: Synthetic peptide
  Seed: EWLKTRPILSPLTKG
EWLKTYPFLSVLTKG

SEQ ID NO: 205094 - protein, 15 aa, Artificial Sequence
  Description of Artificial Sequence: Synthetic peptide
  Seed: EWLKTRPILSPLTKG
EWLKTYPFLSYLTKG

SEQ ID NO: 205095 - protein, 15 aa, Artificial Sequence
  Description of Artificial Sequence: Synthetic peptide
  Seed: EWLKTRPILSPLTKG
EWLKTYPLLSFLTKG

SEQ ID NO: 205096 - protein, 15 aa, Artificial Sequence
  Description of Artificial Sequence: Synthetic peptide
  Seed: EWLKTRPILSPLTKG
EWLKTYPLLSILTKG

SEQ ID NO: 205097 - protein, 15 aa, Artificial Sequence
  Description of Artificial Sequence: Synthetic peptide
  Seed: EWLKTRPILSPLTKG
EWLKTYPLLSLLTKG

SEQ ID NO: 205098 - protein, 15 aa, Artificial Sequence
  Description of Artificial Sequence: Synthetic peptide
  Seed: EWLKTRPILSPLTKG
EWLKTYPLLSMLTKG

SEQ ID NO: 205099 - protein, 15 aa, Artificial Sequence
  Description of Artificial Sequence: Synthetic peptide
  Seed: EWLKTRPILSPLTKG
EWLKTYPLLSVLTKG

SEQ ID NO: 205100 - protein, 15 aa, Artificial Sequence
  Description of Artificial Sequence: Synthetic peptide
  Seed: EWLKTRPILSPLTKG
EWLKTYPMLSILTKG

SEQ ID NO: 205101 - protein, 15 aa, Artificial Sequence
  Description of Artificial Sequence: Synthetic peptide
  Seed: EWLKTRPILSPLTKG
EWLKTYPMLSLLTKG

SEQ ID NO: 205102 - protein, 15 aa, Artificial Sequence
  Description of Artificial Sequence: Synthetic peptide
  Seed: EWLKTRPILSPLTKG
EWLKTYPMLSVLTKG

SEQ ID NO: 205103 - protein, 15 aa, Artificial Sequence
  Description of Artificial Sequence: Synthetic peptide
  Seed: EWLKTRPILSPLTKG
EWLKTYPRLSFLTKG

SEQ ID NO: 205104 - protein, 15 aa, Artificial Sequence
  Description of Artificial Sequence: Synthetic peptide
  Seed: EWLKTRPILSPLTKG
EWLKTYPRLSYLTKG

SEQ ID NO: 205105 - protein, 15 aa, Artificial Sequence
  Description of Artificial Sequence: Synthetic peptide
  Seed: EWLKTRPILSPLTKG
EWLKTYPWLSILTKG

SEQ ID NO: 205106 - protein, 15 aa, Artificial Sequence
  Description of Artificial Sequence: Synthetic peptide
  Seed: EWLKTRPILSPLTKG
EWLKTYPWLSVLTKG

SEQ ID NO: 205107 - protein, 15 aa, Artificial Sequence
  Description of Artificial Sequence: Synthetic peptide
  Seed: EWLKTRPILSPLTKG
EWLKTYPYLSILTKG

SEQ ID NO: 205108 - protein, 15 aa, Artificial Sequence
  Description of Artificial Sequence: Synthetic peptide
  Seed: EWLKTRPILSPLTKG
EWLKTYPYLSLLTKG

SEQ ID NO: 205109 - protein, 15 aa, Artificial Sequence
  Description of Artificial Sequence: Synthetic peptide
  Seed: EWLKTRPILSPLTKG
EWLKTYPYLSVLTKG

SEQ ID NO: 205110 - protein, 15 aa, Artificial Sequence
  Description of Artificial Sequence: Synthetic peptide
  Seed: EWLKTRPILSPLTKG
EWMKTAPFLSALTKG

SEQ ID NO: 205111 - protein, 15 aa, Artificial Sequence
  Description of Artificial Sequence: Synthetic peptide
  Seed: EWLKTRPILSPLTKG
EWMKTAPFLSFLTKG

SEQ ID NO: 205112 - protein, 15 aa, Artificial Sequence
  Description of Artificial Sequence: Synthetic peptide
  Seed: EWLKTRPILSPLTKG
EWMKTAPFLSILTKG

SEQ ID NO: 205113 - protein, 15 aa, Artificial Sequence
  Description of Artificial Sequence: Synthetic peptide
  Seed: EWLKTRPILSPLTKG
EWMKTAPFLSLLTKG

SEQ ID NO: 205114 - protein, 15 aa, Artificial Sequence
  Description of Artificial Sequence: Synthetic peptide
  Seed: EWLKTRPILSPLTKG
EWMKTAPFLSMLTKG

SEQ ID NO: 205115 - protein, 15 aa, Artificial Sequence
  Description of Artificial Sequence: Synthetic peptide
  Seed: EWLKTRPILSPLTKG
EWMKTAPFLSTLTKG

SEQ ID NO: 205116 - protein, 15 aa, Artificial Sequence
  Description of Artificial Sequence: Synthetic peptide
  Seed: EWLKTRPILSPLTKG
EWMKTAPFLSVLTKG

SEQ ID NO: 205117 - protein, 15 aa, Artificial Sequence
  Description of Artificial Sequence: Synthetic peptide
  Seed: EWLKTRPILSPLTKG
EWMKTAPFLSYLTKG

SEQ ID NO: 205118 - protein, 15 aa, Artificial Sequence
  Description of Artificial Sequence: Synthetic peptide
  Seed: EWLKTRPILSPLTKG
EWMKTAPRLSALTKG

SEQ ID NO: 205119 - protein, 15 aa, Artificial Sequence
  Description of Artificial Sequence: Synthetic peptide
  Seed: EWLKTRPILSPLTKG
EWMKTAPRLSQLTKG

SEQ ID NO: 205120 - protein, 15 aa, Artificial Sequence
  Description of Artificial Sequence: Synthetic peptide
  Seed: EWLKTRPILSPLTKG
EWMKTAPRLSSLTKG

SEQ ID NO: 205121 - protein, 15 aa, Artificial Sequence
  Description of Artificial Sequence: Synthetic peptide
  Seed: EWLKTRPILSPLTKG
EWMKTEPFLSFLTKG

SEQ ID NO: 205122 - protein, 15 aa, Artificial Sequence
  Description of Artificial Sequence: Synthetic peptide
  Seed: EWLKTRPILSPLTKG
EWMKTEPFLSILTKG

SEQ ID NO: 205123 - protein, 15 aa, Artificial Sequence
  Description of Artificial Sequence: Synthetic peptide
  Seed: EWLKTRPILSPLTKG
EWMKTEPFLSLLTKG

SEQ ID NO: 205124 - protein, 15 aa, Artificial Sequence
  Description of Artificial Sequence: Synthetic peptide
  Seed: EWLKTRPILSPLTKG
EWMKTEPFLSMLTKG

SEQ ID NO: 205125 - protein, 15 aa, Artificial Sequence
  Description of Artificial Sequence: Synthetic peptide
  Seed: EWLKTRPILSPLTKG
EWMKTEPFLSVLTKG

SEQ ID NO: 205126 - protein, 15 aa, Artificial Sequence
  Description of Artificial Sequence: Synthetic peptide
  Seed: EWLKTRPILSPLTKG
EWMKTFPFLSALTKG

SEQ ID NO: 205127 - protein, 15 aa, Artificial Sequence
  Description of Artificial Sequence: Synthetic peptide
  Seed: EWLKTRPILSPLTKG
EWMKTFPFLSFLTKG

SEQ ID NO: 205128 - protein, 15 aa, Artificial Sequence
  Description of Artificial Sequence: Synthetic peptide
  Seed: EWLKTRPILSPLTKG
EWMKTFPFLSILTKG

SEQ ID NO: 205129 - protein, 15 aa, Artificial Sequence
  Description of Artificial Sequence: Synthetic peptide
  Seed: EWLKTRPILSPLTKG
EWMKTFPFLSLLTKG

SEQ ID NO: 205130 - protein, 15 aa, Artificial Sequence
  Description of Artificial Sequence: Synthetic peptide
  Seed: EWLKTRPILSPLTKG
EWMKTFPFLSMLTKG

SEQ ID NO: 205131 - protein, 15 aa, Artificial Sequence
  Description of Artificial Sequence: Synthetic peptide
  Seed: EWLKTRPILSPLTKG
EWMKTFPFLSNLTKG

SEQ ID NO: 205132 - protein, 15 aa, Artificial Sequence
  Description of Artificial Sequence: Synthetic peptide
  Seed: EWLKTRPILSPLTKG
EWMKTFPFLSSLTKG

SEQ ID NO: 205133 - protein, 15 aa, Artificial Sequence
  Description of Artificial Sequence: Synthetic peptide
  Seed: EWLKTRPILSPLTKG
EWMKTFPFLSTLTKG

SEQ ID NO: 205134 - protein, 15 aa, Artificial Sequence
  Description of Artificial Sequence: Synthetic peptide
  Seed: EWLKTRPILSPLTKG
EWMKTFPFLSVLTKG

SEQ ID NO: 205135 - protein, 15 aa, Artificial Sequence
  Description of Artificial Sequence: Synthetic peptide
  Seed: EWLKTRPILSPLTKG
EWMKTFPFLSYLTKG

SEQ ID NO: 205136 - protein, 15 aa, Artificial Sequence
  Description of Artificial Sequence: Synthetic peptide
  Seed: EWLKTRPILSPLTKG
EWMKTFPILSILTKG

SEQ ID NO: 205137 - protein, 15 aa, Artificial Sequence
  Description of Artificial Sequence: Synthetic peptide
  Seed: EWLKTRPILSPLTKG
EWMKTFPILSLLTKG

SEQ ID NO: 205138 - protein, 15 aa, Artificial Sequence
  Description of Artificial Sequence: Synthetic peptide
  Seed: EWLKTRPILSPLTKG
EWMKTFPILSVLTKG

SEQ ID NO: 205139 - protein, 15 aa, Artificial Sequence
  Description of Artificial Sequence: Synthetic peptide
  Seed: EWLKTRPILSPLTKG
EWMKTFPKLSALTKG

SEQ ID NO: 205140 - protein, 15 aa, Artificial Sequence
  Description of Artificial Sequence: Synthetic peptide
  Seed: EWLKTRPILSPLTKG
EWMKTFPKLSFLTKG

SEQ ID NO: 205141 - protein, 15 aa, Artificial Sequence
  Description of Artificial Sequence: Synthetic peptide
  Seed: EWLKTRPILSPLTKG
EWMKTFPKLSSLTKG

SEQ ID NO: 205142 - protein, 15 aa, Artificial Sequence
  Description of Artificial Sequence: Synthetic peptide
  Seed: EWLKTRPILSPLTKG
EWMKTFPKLSVLTKG

SEQ ID NO: 205143 - protein, 15 aa, Artificial Sequence
  Description of Artificial Sequence: Synthetic peptide
  Seed: EWLKTRPILSPLTKG
EWMKTFPKLSYLTKG

SEQ ID NO: 205144 - protein, 15 aa, Artificial Sequence
  Description of Artificial Sequence: Synthetic peptide
  Seed: EWLKTRPILSPLTKG
EWMKTFPLLSFLTKG

SEQ ID NO: 205145 - protein, 15 aa, Artificial Sequence
  Description of Artificial Sequence: Synthetic peptide
  Seed: EWLKTRPILSPLTKG
EWMKTFPLLSILTKG

SEQ ID NO: 205146 - protein, 15 aa, Artificial Sequence
  Description of Artificial Sequence: Synthetic peptide
  Seed: EWLKTRPILSPLTKG
EWMKTFPLLSLLTKG

SEQ ID NO: 205147 - protein, 15 aa, Artificial Sequence
  Description of Artificial Sequence: Synthetic peptide
  Seed: EWLKTRPILSPLTKG
EWMKTFPLLSMLTKG

SEQ ID NO: 205148 - protein, 15 aa, Artificial Sequence
  Description of Artificial Sequence: Synthetic peptide
  Seed: EWLKTRPILSPLTKG
EWMKTFPLLSVLTKG

SEQ ID NO: 205149 - protein, 15 aa, Artificial Sequence
  Description of Artificial Sequence: Synthetic peptide
  Seed: EWLKTRPILSPLTKG
EWMKTFPMLSILTKG

SEQ ID NO: 205150 - protein, 15 aa, Artificial Sequence
  Description of Artificial Sequence: Synthetic peptide
  Seed: EWLKTRPILSPLTKG
EWMKTFPMLSLLTKG

SEQ ID NO: 205151 - protein, 15 aa, Artificial Sequence
  Description of Artificial Sequence: Synthetic peptide
  Seed: EWLKTRPILSPLTKG
EWMKTFPMLSVLTKG

SEQ ID NO: 205152 - protein, 15 aa, Artificial Sequence
  Description of Artificial Sequence: Synthetic peptide
  Seed: EWLKTRPILSPLTKG
EWMKTFPRLSALTKG

SEQ ID NO: 205153 - protein, 15 aa, Artificial Sequence
  Description of Artificial Sequence: Synthetic peptide
  Seed: EWLKTRPILSPLTKG
EWMKTFPRLSFLTKG

SEQ ID NO: 205154 - protein, 15 aa, Artificial Sequence
  Description of Artificial Sequence: Synthetic peptide
  Seed: EWLKTRPILSPLTKG
EWMKTFPRLSGLTKG

SEQ ID NO: 205155 - protein, 15 aa, Artificial Sequence
  Description of Artificial Sequence: Synthetic peptide
  Seed: EWLKTRPILSPLTKG
EWMKTFPRLSILTKG

SEQ ID NO: 205156 - protein, 15 aa, Artificial Sequence
  Description of Artificial Sequence: Synthetic peptide
  Seed: EWLKTRPILSPLTKG
EWMKTFPRLSKLTKG

SEQ ID NO: 205157 - protein, 15 aa, Artificial Sequence
  Description of Artificial Sequence: Synthetic peptide
  Seed: EWLKTRPILSPLTKG
EWMKTFPRLSLLTKG

SEQ ID NO: 205158 - protein, 15 aa, Artificial Sequence
  Description of Artificial Sequence: Synthetic peptide
  Seed: EWLKTRPILSPLTKG
EWMKTFPRLSMLTKG

SEQ ID NO: 205159 - protein, 15 aa, Artificial Sequence
  Description of Artificial Sequence: Synthetic peptide
  Seed: EWLKTRPILSPLTKG
EWMKTFPRLSQLTKG

SEQ ID NO: 205160 - protein, 15 aa, Artificial Sequence
  Description of Artificial Sequence: Synthetic peptide
  Seed: EWLKTRPILSPLTKG
EWMKTFPRLSRLTKG

SEQ ID NO: 205161 - protein, 15 aa, Artificial Sequence
  Description of Artificial Sequence: Synthetic peptide
  Seed: EWLKTRPILSPLTKG
EWMKTFPRLSSLTKG

SEQ ID NO: 205162 - protein, 15 aa, Artificial Sequence
  Description of Artificial Sequence: Synthetic peptide
  Seed: EWLKTRPILSPLTKG
EWMKTFPRLSVLTKG

SEQ ID NO: 205163 - protein, 15 aa, Artificial Sequence
  Description of Artificial Sequence: Synthetic peptide
  Seed: EWLKTRPILSPLTKG
EWMKTFPRLSYLTKG

SEQ ID NO: 205164 - protein, 15 aa, Artificial Sequence
  Description of Artificial Sequence: Synthetic peptide
  Seed: EWLKTRPILSPLTKG
EWMKTFPWLSILTKG

SEQ ID NO: 205165 - protein, 15 aa, Artificial Sequence
  Description of Artificial Sequence: Synthetic peptide
  Seed: EWLKTRPILSPLTKG
EWMKTFPWLSLLTKG

SEQ ID NO: 205166 - protein, 15 aa, Artificial Sequence
  Description of Artificial Sequence: Synthetic peptide
  Seed: EWLKTRPILSPLTKG
EWMKTFPWLSVLTKG

SEQ ID NO: 205167 - protein, 15 aa, Artificial Sequence
  Description of Artificial Sequence: Synthetic peptide
  Seed: EWLKTRPILSPLTKG
EWMKTFPYLSFLTKG

SEQ ID NO: 205168 - protein, 15 aa, Artificial Sequence
  Description of Artificial Sequence: Synthetic peptide
  Seed: EWLKTRPILSPLTKG
EWMKTFPYLSILTKG

SEQ ID NO: 205169 - protein, 15 aa, Artificial Sequence
  Description of Artificial Sequence: Synthetic peptide
  Seed: EWLKTRPILSPLTKG
EWMKTFPYLSLLTKG

SEQ ID NO: 205170 - protein, 15 aa, Artificial Sequence
  Description of Artificial Sequence: Synthetic peptide
  Seed: EWLKTRPILSPLTKG
EWMKTFPYLSMLTKG

SEQ ID NO: 205171 - protein, 15 aa, Artificial Sequence
  Description of Artificial Sequence: Synthetic peptide
  Seed: EWLKTRPILSPLTKG
EWMKTFPYLSVLTKG

SEQ ID NO: 205172 - protein, 15 aa, Artificial Sequence
  Description of Artificial Sequence: Synthetic peptide
  Seed: EWLKTRPILSPLTKG
EWMKTHPFLSALTKG

SEQ ID NO: 205173 - protein, 15 aa, Artificial Sequence
  Description of Artificial Sequence: Synthetic peptide
  Seed: EWLKTRPILSPLTKG
EWMKTHPFLSFLTKG

SEQ ID NO: 205174 - protein, 15 aa, Artificial Sequence
  Description of Artificial Sequence: Synthetic peptide
  Seed: EWLKTRPILSPLTKG
EWMKTHPFLSILTKG

SEQ ID NO: 205175 - protein, 15 aa, Artificial Sequence
  Description of Artificial Sequence: Synthetic peptide
  Seed: EWLKTRPILSPLTKG
EWMKTHPFLSLLTKG

SEQ ID NO: 205176 - protein, 15 aa, Artificial Sequence
  Description of Artificial Sequence: Synthetic peptide
  Seed: EWLKTRPILSPLTKG
EWMKTHPFLSMLTKG

SEQ ID NO: 205177 - protein, 15 aa, Artificial Sequence
  Description of Artificial Sequence: Synthetic peptide
  Seed: EWLKTRPILSPLTKG
EWMKTHPFLSVLTKG

SEQ ID NO: 205178 - protein, 15 aa, Artificial Sequence
  Description of Artificial Sequence: Synthetic peptide
  Seed: EWLKTRPILSPLTKG
EWMKTHPLLSLLTKG

SEQ ID NO: 205179 - protein, 15 aa, Artificial Sequence
  Description of Artificial Sequence: Synthetic peptide
  Seed: EWLKTRPILSPLTKG
EWMKTIPFLSALTKG

SEQ ID NO: 205180 - protein, 15 aa, Artificial Sequence
  Description of Artificial Sequence: Synthetic peptide
  Seed: EWLKTRPILSPLTKG
EWMKTIPFLSELTKG

SEQ ID NO: 205181 - protein, 15 aa, Artificial Sequence
  Description of Artificial Sequence: Synthetic peptide
  Seed: EWLKTRPILSPLTKG
EWMKTIPFLSFLTKG

SEQ ID NO: 205182 - protein, 15 aa, Artificial Sequence
  Description of Artificial Sequence: Synthetic peptide
  Seed: EWLKTRPILSPLTKG
EWMKTIPFLSILTKG

SEQ ID NO: 205183 - protein, 15 aa, Artificial Sequence
  Description of Artificial Sequence: Synthetic peptide
  Seed: EWLKTRPILSPLTKG
EWMKTIPFLSLLTKG

SEQ ID NO: 205184 - protein, 15 aa, Artificial Sequence
  Description of Artificial Sequence: Synthetic peptide
  Seed: EWLKTRPILSPLTKG
EWMKTIPFLSMLTKG

SEQ ID NO: 205185 - protein, 15 aa, Artificial Sequence
  Description of Artificial Sequence: Synthetic peptide
  Seed: EWLKTRPILSPLTKG
EWMKTIPFLSNLTKG

SEQ ID NO: 205186 - protein, 15 aa, Artificial Sequence
  Description of Artificial Sequence: Synthetic peptide
  Seed: EWLKTRPILSPLTKG
EWMKTIPFLSSLTKG

SEQ ID NO: 205187 - protein, 15 aa, Artificial Sequence
  Description of Artificial Sequence: Synthetic peptide
  Seed: EWLKTRPILSPLTKG
EWMKTIPFLSTLTKG

SEQ ID NO: 205188 - protein, 15 aa, Artificial Sequence
  Description of Artificial Sequence: Synthetic peptide
  Seed: EWLKTRPILSPLTKG
EWMKTIPFLSVLTKG

SEQ ID NO: 205189 - protein, 15 aa, Artificial Sequence
  Description of Artificial Sequence: Synthetic peptide
  Seed: EWLKTRPILSPLTKG
EWMKTIPFLSYLTKG

SEQ ID NO: 205190 - protein, 15 aa, Artificial Sequence
  Description of Artificial Sequence: Synthetic peptide
  Seed: EWLKTRPILSPLTKG
EWMKTIPKLSALTKG

SEQ ID NO: 205191 - protein, 15 aa, Artificial Sequence
  Description of Artificial Sequence: Synthetic peptide
  Seed: EWLKTRPILSPLTKG
EWMKTIPKLSGLTKG

SEQ ID NO: 205192 - protein, 15 aa, Artificial Sequence
  Description of Artificial Sequence: Synthetic peptide
  Seed: EWLKTRPILSPLTKG
EWMKTIPKLSHLTKG

SEQ ID NO: 205193 - protein, 15 aa, Artificial Sequence
  Description of Artificial Sequence: Synthetic peptide
  Seed: EWLKTRPILSPLTKG
EWMKTIPKLSKLTKG

SEQ ID NO: 205194 - protein, 15 aa, Artificial Sequence
  Description of Artificial Sequence: Synthetic peptide
  Seed: EWLKTRPILSPLTKG
EWMKTIPKLSQLTKG

SEQ ID NO: 205195 - protein, 15 aa, Artificial Sequence
  Description of Artificial Sequence: Synthetic peptide
  Seed: EWLKTRPILSPLTKG
EWMKTIPKLSRLTKG

SEQ ID NO: 205196 - protein, 15 aa, Artificial Sequence
  Description of Artificial Sequence: Synthetic peptide
  Seed: EWLKTRPILSPLTKG
EWMKTIPKLSSLTKG

SEQ ID NO: 205197 - protein, 15 aa, Artificial Sequence
  Description of Artificial Sequence: Synthetic peptide
  Seed: EWLKTRPILSPLTKG
EWMKTIPKLSTLTKG

SEQ ID NO: 205198 - protein, 15 aa, Artificial Sequence
  Description of Artificial Sequence: Synthetic peptide
  Seed: EWLKTRPILSPLTKG
EWMKTIPKLSVLTKG

SEQ ID NO: 205199 - protein, 15 aa, Artificial Sequence
  Description of Artificial Sequence: Synthetic peptide
  Seed: EWLKTRPILSPLTKG
EWMKTIPLLSILTKG

SEQ ID NO: 205200 - protein, 15 aa, Artificial Sequence
  Description of Artificial Sequence: Synthetic peptide
  Seed: EWLKTRPILSPLTKG
EWMKTIPLLSLLTKG

SEQ ID NO: 205201 - protein, 15 aa, Artificial Sequence
  Description of Artificial Sequence: Synthetic peptide
  Seed: EWLKTRPILSPLTKG
EWMKTIPLLSVLTKG

SEQ ID NO: 205202 - protein, 15 aa, Artificial Sequence
  Description of Artificial Sequence: Synthetic peptide
  Seed: EWLKTRPILSPLTKG
EWMKTIPRLSALTKG

SEQ ID NO: 205203 - protein, 15 aa, Artificial Sequence
  Description of Artificial Sequence: Synthetic peptide
  Seed: EWLKTRPILSPLTKG
EWMKTIPRLSFLTKG

SEQ ID NO: 205204 - protein, 15 aa, Artificial Sequence
  Description of Artificial Sequence: Synthetic peptide
  Seed: EWLKTRPILSPLTKG
EWMKTIPRLSGLTKG

SEQ ID NO: 205205 - protein, 15 aa, Artificial Sequence
  Description of Artificial Sequence: Synthetic peptide
  Seed: EWLKTRPILSPLTKG
EWMKTIPRLSHLTKG

SEQ ID NO: 205206 - protein, 15 aa, Artificial Sequence
  Description of Artificial Sequence: Synthetic peptide
  Seed: EWLKTRPILSPLTKG
EWMKTIPRLSILTKG

SEQ ID NO: 205207 - protein, 15 aa, Artificial Sequence
  Description of Artificial Sequence: Synthetic peptide
  Seed: EWLKTRPILSPLTKG
EWMKTIPRLSKLTKG

SEQ ID NO: 205208 - protein, 15 aa, Artificial Sequence
  Description of Artificial Sequence: Synthetic peptide
  Seed: EWLKTRPILSPLTKG
EWMKTIPRLSLLTKG

SEQ ID NO: 205209 - protein, 15 aa, Artificial Sequence
  Description of Artificial Sequence: Synthetic peptide
  Seed: EWLKTRPILSPLTKG
EWMKTIPRLSMLTKG

SEQ ID NO: 205210 - protein, 15 aa, Artificial Sequence
  Description of Artificial Sequence: Synthetic peptide
  Seed: EWLKTRPILSPLTKG
EWMKTIPRLSQLTKG

SEQ ID NO: 205211 - protein, 15 aa, Artificial Sequence
  Description of Artificial Sequence: Synthetic peptide
  Seed: EWLKTRPILSPLTKG
EWMKTIPRLSRLTKG

SEQ ID NO: 205212 - protein, 15 aa, Artificial Sequence
  Description of Artificial Sequence: Synthetic peptide
  Seed: EWLKTRPILSPLTKG
EWMKTIPRLSSLTKG

SEQ ID NO: 205213 - protein, 15 aa, Artificial Sequence
  Description of Artificial Sequence: Synthetic peptide
  Seed: EWLKTRPILSPLTKG
EWMKTIPRLSTLTKG

SEQ ID NO: 205214 - protein, 15 aa, Artificial Sequence
  Description of Artificial Sequence: Synthetic peptide
  Seed: EWLKTRPILSPLTKG
EWMKTIPRLSVLTKG

SEQ ID NO: 205215 - protein, 15 aa, Artificial Sequence
  Description of Artificial Sequence: Synthetic peptide
  Seed: EWLKTRPILSPLTKG
EWMKTIPRLSYLTKG

SEQ ID NO: 205216 - protein, 15 aa, Artificial Sequence
  Description of Artificial Sequence: Synthetic peptide
  Seed: EWLKTRPILSPLTKG
EWMKTIPWLSILTKG

SEQ ID NO: 205217 - protein, 15 aa, Artificial Sequence
  Description of Artificial Sequence: Synthetic peptide
  Seed: EWLKTRPILSPLTKG
EWMKTIPWLSLLTKG

SEQ ID NO: 205218 - protein, 15 aa, Artificial Sequence
  Description of Artificial Sequence: Synthetic peptide
  Seed: EWLKTRPILSPLTKG
EWMKTIPWLSVLTKG

SEQ ID NO: 205219 - protein, 15 aa, Artificial Sequence
  Description of Artificial Sequence: Synthetic peptide
  Seed: EWLKTRPILSPLTKG
EWMKTIPYLSFLTKG

SEQ ID NO: 205220 - protein, 15 aa, Artificial Sequence
  Description of Artificial Sequence: Synthetic peptide
  Seed: EWLKTRPILSPLTKG
EWMKTIPYLSILTKG

SEQ ID NO: 205221 - protein, 15 aa, Artificial Sequence
  Description of Artificial Sequence: Synthetic peptide
  Seed: EWLKTRPILSPLTKG
EWMKTIPYLSLLTKG

SEQ ID NO: 205222 - protein, 15 aa, Artificial Sequence
  Description of Artificial Sequence: Synthetic peptide
  Seed: EWLKTRPILSPLTKG
EWMKTIPYLSVLTKG

SEQ ID NO: 205223 - protein, 15 aa, Artificial Sequence
  Description of Artificial Sequence: Synthetic peptide
  Seed: EWLKTRPILSPLTKG
EWMKTKPFLSILTKG

SEQ ID NO: 205224 - protein, 15 aa, Artificial Sequence
  Description of Artificial Sequence: Synthetic peptide
  Seed: EWLKTRPILSPLTKG
EWMKTKPFLSLLTKG

SEQ ID NO: 205225 - protein, 15 aa, Artificial Sequence
  Description of Artificial Sequence: Synthetic peptide
  Seed: EWLKTRPILSPLTKG
EWMKTLPFLSALTKG

SEQ ID NO: 205226 - protein, 15 aa, Artificial Sequence
  Description of Artificial Sequence: Synthetic peptide
  Seed: EWLKTRPILSPLTKG
EWMKTLPFLSDLTKG

SEQ ID NO: 205227 - protein, 15 aa, Artificial Sequence
  Description of Artificial Sequence: Synthetic peptide
  Seed: EWLKTRPILSPLTKG
EWMKTLPFLSELTKG

SEQ ID NO: 205228 - protein, 15 aa, Artificial Sequence
  Description of Artificial Sequence: Synthetic peptide
  Seed: EWLKTRPILSPLTKG
EWMKTLPFLSFLTKG

SEQ ID NO: 205229 - protein, 15 aa, Artificial Sequence
  Description of Artificial Sequence: Synthetic peptide
  Seed: EWLKTRPILSPLTKG
EWMKTLPFLSILTKG

SEQ ID NO: 205230 - protein, 15 aa, Artificial Sequence
  Description of Artificial Sequence: Synthetic peptide
  Seed: EWLKTRPILSPLTKG
EWMKTLPFLSLLTKG

SEQ ID NO: 205231 - protein, 15 aa, Artificial Sequence
  Description of Artificial Sequence: Synthetic peptide
  Seed: EWLKTRPILSPLTKG
EWMKTLPFLSMLTKG

SEQ ID NO: 205232 - protein, 15 aa, Artificial Sequence
  Description of Artificial Sequence: Synthetic peptide
  Seed: EWLKTRPILSPLTKG
EWMKTLPFLSNLTKG

SEQ ID NO: 205233 - protein, 15 aa, Artificial Sequence
  Description of Artificial Sequence: Synthetic peptide
  Seed: EWLKTRPILSPLTKG
EWMKTLPFLSSLTKG

SEQ ID NO: 205234 - protein, 15 aa, Artificial Sequence
  Description of Artificial Sequence: Synthetic peptide
  Seed: EWLKTRPILSPLTKG
EWMKTLPFLSTLTKG

SEQ ID NO: 205235 - protein, 15 aa, Artificial Sequence
  Description of Artificial Sequence: Synthetic peptide
  Seed: EWLKTRPILSPLTKG
EWMKTLPFLSVLTKG

SEQ ID NO: 205236 - protein, 15 aa, Artificial Sequence
  Description of Artificial Sequence: Synthetic peptide
  Seed: EWLKTRPILSPLTKG
EWMKTLPFLSYLTKG

SEQ ID NO: 205237 - protein, 15 aa, Artificial Sequence
  Description of Artificial Sequence: Synthetic peptide
  Seed: EWLKTRPILSPLTKG
EWMKTLPKLSALTKG

SEQ ID NO: 205238 - protein, 15 aa, Artificial Sequence
  Description of Artificial Sequence: Synthetic peptide
  Seed: EWLKTRPILSPLTKG
EWMKTLPKLSGLTKG

SEQ ID NO: 205239 - protein, 15 aa, Artificial Sequence
  Description of Artificial Sequence: Synthetic peptide
  Seed: EWLKTRPILSPLTKG
EWMKTLPKLSHLTKG

SEQ ID NO: 205240 - protein, 15 aa, Artificial Sequence
  Description of Artificial Sequence: Synthetic peptide
  Seed: EWLKTRPILSPLTKG
EWMKTLPKLSKLTKG

SEQ ID NO: 205241 - protein, 15 aa, Artificial Sequence
  Description of Artificial Sequence: Synthetic peptide
  Seed: EWLKTRPILSPLTKG
EWMKTLPKLSMLTKG

SEQ ID NO: 205242 - protein, 15 aa, Artificial Sequence
  Description of Artificial Sequence: Synthetic peptide
  Seed: EWLKTRPILSPLTKG
EWMKTLPKLSQLTKG

SEQ ID NO: 205243 - protein, 15 aa, Artificial Sequence
  Description of Artificial Sequence: Synthetic peptide
  Seed: EWLKTRPILSPLTKG
EWMKTLPKLSRLTKG

SEQ ID NO: 205244 - protein, 15 aa, Artificial Sequence
  Description of Artificial Sequence: Synthetic peptide
  Seed: EWLKTRPILSPLTKG
EWMKTLPKLSSLTKG

SEQ ID NO: 205245 - protein, 15 aa, Artificial Sequence
  Description of Artificial Sequence: Synthetic peptide
  Seed: EWLKTRPILSPLTKG
EWMKTLPKLSTLTKG

SEQ ID NO: 205246 - protein, 15 aa, Artificial Sequence
  Description of Artificial Sequence: Synthetic peptide
  Seed: EWLKTRPILSPLTKG
EWMKTLPKLSVLTKG

SEQ ID NO: 205247 - protein, 15 aa, Artificial Sequence
  Description of Artificial Sequence: Synthetic peptide
  Seed: EWLKTRPILSPLTKG
EWMKTLPLLSILTKG

SEQ ID NO: 205248 - protein, 15 aa, Artificial Sequence
  Description of Artificial Sequence: Synthetic peptide
  Seed: EWLKTRPILSPLTKG
EWMKTLPLLSLLTKG

SEQ ID NO: 205249 - protein, 15 aa, Artificial Sequence
  Description of Artificial Sequence: Synthetic peptide
  Seed: EWLKTRPILSPLTKG
EWMKTLPLLSVLTKG

SEQ ID NO: 205250 - protein, 15 aa, Artificial Sequence
  Description of Artificial Sequence: Synthetic peptide
  Seed: EWLKTRPILSPLTKG
EWMKTLPRLSALTKG

SEQ ID NO: 205251 - protein, 15 aa, Artificial Sequence
  Description of Artificial Sequence: Synthetic peptide
  Seed: EWLKTRPILSPLTKG
EWMKTLPRLSGLTKG

SEQ ID NO: 205252 - protein, 15 aa, Artificial Sequence
  Description of Artificial Sequence: Synthetic peptide
  Seed: EWLKTRPILSPLTKG
EWMKTLPRLSHLTKG

SEQ ID NO: 205253 - protein, 15 aa, Artificial Sequence
  Description of Artificial Sequence: Synthetic peptide
  Seed: EWLKTRPILSPLTKG
EWMKTLPRLSILTKG

SEQ ID NO: 205254 - protein, 15 aa, Artificial Sequence
  Description of Artificial Sequence: Synthetic peptide
  Seed: EWLKTRPILSPLTKG
EWMKTLPRLSKLTKG

SEQ ID NO: 205255 - protein, 15 aa, Artificial Sequence
  Description of Artificial Sequence: Synthetic peptide
  Seed: EWLKTRPILSPLTKG
EWMKTLPRLSLLTKG

SEQ ID NO: 205256 - protein, 15 aa, Artificial Sequence
  Description of Artificial Sequence: Synthetic peptide
  Seed: EWLKTRPILSPLTKG
EWMKTLPRLSMLTKG

SEQ ID NO: 205257 - protein, 15 aa, Artificial Sequence
  Description of Artificial Sequence: Synthetic peptide
  Seed: EWLKTRPILSPLTKG
EWMKTLPRLSNLTKG

SEQ ID NO: 205258 - protein, 15 aa, Artificial Sequence
  Description of Artificial Sequence: Synthetic peptide
  Seed: EWLKTRPILSPLTKG
EWMKTLPRLSQLTKG

SEQ ID NO: 205259 - protein, 15 aa, Artificial Sequence
  Description of Artificial Sequence: Synthetic peptide
  Seed: EWLKTRPILSPLTKG
EWMKTLPRLSRLTKG

SEQ ID NO: 205260 - protein, 15 aa, Artificial Sequence
  Description of Artificial Sequence: Synthetic peptide
  Seed: EWLKTRPILSPLTKG
EWMKTLPRLSSLTKG

SEQ ID NO: 205261 - protein, 15 aa, Artificial Sequence
  Description of Artificial Sequence: Synthetic peptide
  Seed: EWLKTRPILSPLTKG
EWMKTLPRLSTLTKG

SEQ ID NO: 205262 - protein, 15 aa, Artificial Sequence
  Description of Artificial Sequence: Synthetic peptide
  Seed: EWLKTRPILSPLTKG
EWMKTLPRLSVLTKG

SEQ ID NO: 205263 - protein, 15 aa, Artificial Sequence
  Description of Artificial Sequence: Synthetic peptide
  Seed: EWLKTRPILSPLTKG
EWMKTLPRLSYLTKG

SEQ ID NO: 205264 - protein, 15 aa, Artificial Sequence
  Description of Artificial Sequence: Synthetic peptide
  Seed: EWLKTRPILSPLTKG
EWMKTLPWLSILTKG

SEQ ID NO: 205265 - protein, 15 aa, Artificial Sequence
  Description of Artificial Sequence: Synthetic peptide
  Seed: EWLKTRPILSPLTKG
EWMKTLPWLSLLTKG

SEQ ID NO: 205266 - protein, 15 aa, Artificial Sequence
  Description of Artificial Sequence: Synthetic peptide
  Seed: EWLKTRPILSPLTKG
EWMKTLPWLSVLTKG

SEQ ID NO: 205267 - protein, 15 aa, Artificial Sequence
  Description of Artificial Sequence: Synthetic peptide
  Seed: EWLKTRPILSPLTKG
EWMKTLPYLSILTKG

SEQ ID NO: 205268 - protein, 15 aa, Artificial Sequence
  Description of Artificial Sequence: Synthetic peptide
  Seed: EWLKTRPILSPLTKG
EWMKTLPYLSLLTKG

SEQ ID NO: 205269 - protein, 15 aa, Artificial Sequence
  Description of Artificial Sequence: Synthetic peptide
  Seed: EWLKTRPILSPLTKG
EWMKTLPYLSVLTKG

SEQ ID NO: 205270 - protein, 15 aa, Artificial Sequence
  Description of Artificial Sequence: Synthetic peptide
  Seed: EWLKTRPILSPLTKG
EWMKTMPFLSALTKG

SEQ ID NO: 205271 - protein, 15 aa, Artificial Sequence
  Description of Artificial Sequence: Synthetic peptide
  Seed: EWLKTRPILSPLTKG
EWMKTMPFLSFLTKG

SEQ ID NO: 205272 - protein, 15 aa, Artificial Sequence
  Description of Artificial Sequence: Synthetic peptide
  Seed: EWLKTRPILSPLTKG
EWMKTMPFLSILTKG

SEQ ID NO: 205273 - protein, 15 aa, Artificial Sequence
  Description of Artificial Sequence: Synthetic peptide
  Seed: EWLKTRPILSPLTKG
EWMKTMPFLSLLTKG

SEQ ID NO: 205274 - protein, 15 aa, Artificial Sequence
  Description of Artificial Sequence: Synthetic peptide
  Seed: EWLKTRPILSPLTKG
EWMKTMPFLSMLTKG

SEQ ID NO: 205275 - protein, 15 aa, Artificial Sequence
  Description of Artificial Sequence: Synthetic peptide
  Seed: EWLKTRPILSPLTKG
EWMKTMPFLSTLTKG

SEQ ID NO: 205276 - protein, 15 aa, Artificial Sequence
  Description of Artificial Sequence: Synthetic peptide
  Seed: EWLKTRPILSPLTKG
EWMKTMPFLSVLTKG

SEQ ID NO: 205277 - protein, 15 aa, Artificial Sequence
  Description of Artificial Sequence: Synthetic peptide
  Seed: EWLKTRPILSPLTKG
EWMKTMPFLSYLTKG

SEQ ID NO: 205278 - protein, 15 aa, Artificial Sequence
  Description of Artificial Sequence: Synthetic peptide
  Seed: EWLKTRPILSPLTKG
EWMKTMPKLSALTKG

SEQ ID NO: 205279 - protein, 15 aa, Artificial Sequence
  Description of Artificial Sequence: Synthetic peptide
  Seed: EWLKTRPILSPLTKG
EWMKTMPKLSGLTKG

SEQ ID NO: 205280 - protein, 15 aa, Artificial Sequence
  Description of Artificial Sequence: Synthetic peptide
  Seed: EWLKTRPILSPLTKG
EWMKTMPKLSHLTKG

SEQ ID NO: 205281 - protein, 15 aa, Artificial Sequence
  Description of Artificial Sequence: Synthetic peptide
  Seed: EWLKTRPILSPLTKG
EWMKTMPKLSILTKG

SEQ ID NO: 205282 - protein, 15 aa, Artificial Sequence
  Description of Artificial Sequence: Synthetic peptide
  Seed: EWLKTRPILSPLTKG
EWMKTMPKLSKLTKG

SEQ ID NO: 205283 - protein, 15 aa, Artificial Sequence
  Description of Artificial Sequence: Synthetic peptide
  Seed: EWLKTRPILSPLTKG
EWMKTMPKLSLLTKG

SEQ ID NO: 205284 - protein, 15 aa, Artificial Sequence
  Description of Artificial Sequence: Synthetic peptide
  Seed: EWLKTRPILSPLTKG
EWMKTMPKLSMLTKG

SEQ ID NO: 205285 - protein, 15 aa, Artificial Sequence
  Description of Artificial Sequence: Synthetic peptide
  Seed: EWLKTRPILSPLTKG
EWMKTMPKLSQLTKG

SEQ ID NO: 205286 - protein, 15 aa, Artificial Sequence
  Description of Artificial Sequence: Synthetic peptide
  Seed: EWLKTRPILSPLTKG
EWMKTMPKLSRLTKG

SEQ ID NO: 205287 - protein, 15 aa, Artificial Sequence
  Description of Artificial Sequence: Synthetic peptide
  Seed: EWLKTRPILSPLTKG
EWMKTMPKLSSLTKG

SEQ ID NO: 205288 - protein, 15 aa, Artificial Sequence
  Description of Artificial Sequence: Synthetic peptide
  Seed: EWLKTRPILSPLTKG
EWMKTMPKLSTLTKG

SEQ ID NO: 205289 - protein, 15 aa, Artificial Sequence
  Description of Artificial Sequence: Synthetic peptide
  Seed: EWLKTRPILSPLTKG
EWMKTMPKLSVLTKG

SEQ ID NO: 205290 - protein, 15 aa, Artificial Sequence
  Description of Artificial Sequence: Synthetic peptide
  Seed: EWLKTRPILSPLTKG
EWMKTMPRLSALTKG

SEQ ID NO: 205291 - protein, 15 aa, Artificial Sequence
  Description of Artificial Sequence: Synthetic peptide
  Seed: EWLKTRPILSPLTKG
EWMKTMPRLSFLTKG

SEQ ID NO: 205292 - protein, 15 aa, Artificial Sequence
  Description of Artificial Sequence: Synthetic peptide
  Seed: EWLKTRPILSPLTKG
EWMKTMPRLSGLTKG

SEQ ID NO: 205293 - protein, 15 aa, Artificial Sequence
  Description of Artificial Sequence: Synthetic peptide
  Seed: EWLKTRPILSPLTKG
EWMKTMPRLSHLTKG

SEQ ID NO: 205294 - protein, 15 aa, Artificial Sequence
  Description of Artificial Sequence: Synthetic peptide
  Seed: EWLKTRPILSPLTKG
EWMKTMPRLSILTKG

SEQ ID NO: 205295 - protein, 15 aa, Artificial Sequence
  Description of Artificial Sequence: Synthetic peptide
  Seed: EWLKTRPILSPLTKG
EWMKTMPRLSKLTKG

SEQ ID NO: 205296 - protein, 15 aa, Artificial Sequence
  Description of Artificial Sequence: Synthetic peptide
  Seed: EWLKTRPILSPLTKG
EWMKTMPRLSLLTKG

SEQ ID NO: 205297 - protein, 15 aa, Artificial Sequence
  Description of Artificial Sequence: Synthetic peptide
  Seed: EWLKTRPILSPLTKG
EWMKTMPRLSMLTKG

SEQ ID NO: 205298 - protein, 15 aa, Artificial Sequence
  Description of Artificial Sequence: Synthetic peptide
  Seed: EWLKTRPILSPLTKG
EWMKTMPRLSNLTKG

SEQ ID NO: 205299 - protein, 15 aa, Artificial Sequence
  Description of Artificial Sequence: Synthetic peptide
  Seed: EWLKTRPILSPLTKG
EWMKTMPRLSPLTKG

SEQ ID NO: 205300 - protein, 15 aa, Artificial Sequence
  Description of Artificial Sequence: Synthetic peptide
  Seed: EWLKTRPILSPLTKG
EWMKTMPRLSQLTKG

SEQ ID NO: 205301 - protein, 15 aa, Artificial Sequence
  Description of Artificial Sequence: Synthetic peptide
  Seed: EWLKTRPILSPLTKG
EWMKTMPRLSRLTKG

SEQ ID NO: 205302 - protein, 15 aa, Artificial Sequence
  Description of Artificial Sequence: Synthetic peptide
  Seed: EWLKTRPILSPLTKG
EWMKTMPRLSSLTKG

SEQ ID NO: 205303 - protein, 15 aa, Artificial Sequence
  Description of Artificial Sequence: Synthetic peptide
  Seed: EWLKTRPILSPLTKG
EWMKTMPRLSTLTKG

SEQ ID NO: 205304 - protein, 15 aa, Artificial Sequence
  Description of Artificial Sequence: Synthetic peptide
  Seed: EWLKTRPILSPLTKG
EWMKTMPRLSVLTKG

SEQ ID NO: 205305 - protein, 15 aa, Artificial Sequence
  Description of Artificial Sequence: Synthetic peptide
  Seed: EWLKTRPILSPLTKG
EWMKTMPRLSYLTKG

SEQ ID NO: 205306 - protein, 15 aa, Artificial Sequence
  Description of Artificial Sequence: Synthetic peptide
  Seed: EWLKTRPILSPLTKG
EWMKTNPFLSILTKG

SEQ ID NO: 205307 - protein, 15 aa, Artificial Sequence
  Description of Artificial Sequence: Synthetic peptide
  Seed: EWLKTRPILSPLTKG
EWMKTNPFLSLLTKG

SEQ ID NO: 205308 - protein, 15 aa, Artificial Sequence
  Description of Artificial Sequence: Synthetic peptide
  Seed: EWLKTRPILSPLTKG
EWMKTNPFLSVLTKG

SEQ ID NO: 205309 - protein, 15 aa, Artificial Sequence
  Description of Artificial Sequence: Synthetic peptide
  Seed: EWLKTRPILSPLTKG
EWMKTQPFLSFLTKG

SEQ ID NO: 205310 - protein, 15 aa, Artificial Sequence
  Description of Artificial Sequence: Synthetic peptide
  Seed: EWLKTRPILSPLTKG
EWMKTQPFLSILTKG

SEQ ID NO: 205311 - protein, 15 aa, Artificial Sequence
  Description of Artificial Sequence: Synthetic peptide
  Seed: EWLKTRPILSPLTKG
EWMKTQPFLSLLTKG

SEQ ID NO: 205312 - protein, 15 aa, Artificial Sequence
  Description of Artificial Sequence: Synthetic peptide
  Seed: EWLKTRPILSPLTKG
EWMKTQPFLSVLTKG

SEQ ID NO: 205313 - protein, 15 aa, Artificial Sequence
  Description of Artificial Sequence: Synthetic peptide
  Seed: EWLKTRPILSPLTKG
EWMKTSPFLSALTKG

SEQ ID NO: 205314 - protein, 15 aa, Artificial Sequence
  Description of Artificial Sequence: Synthetic peptide
  Seed: EWLKTRPILSPLTKG
EWMKTSPFLSFLTKG

SEQ ID NO: 205315 - protein, 15 aa, Artificial Sequence
  Description of Artificial Sequence: Synthetic peptide
  Seed: EWLKTRPILSPLTKG
EWMKTSPFLSILTKG

SEQ ID NO: 205316 - protein, 15 aa, Artificial Sequence
  Description of Artificial Sequence: Synthetic peptide
  Seed: EWLKTRPILSPLTKG
EWMKTSPFLSLLTKG

SEQ ID NO: 205317 - protein, 15 aa, Artificial Sequence
  Description of Artificial Sequence: Synthetic peptide
  Seed: EWLKTRPILSPLTKG
EWMKTSPFLSMLTKG

SEQ ID NO: 205318 - protein, 15 aa, Artificial Sequence
  Description of Artificial Sequence: Synthetic peptide
  Seed: EWLKTRPILSPLTKG
EWMKTSPFLSVLTKG

SEQ ID NO: 205319 - protein, 15 aa, Artificial Sequence
  Description of Artificial Sequence: Synthetic peptide
  Seed: EWLKTRPILSPLTKG
EWMKTSPFLSYLTKG

SEQ ID NO: 205320 - protein, 15 aa, Artificial Sequence
  Description of Artificial Sequence: Synthetic peptide
  Seed: EWLKTRPILSPLTKG
EWMKTTPFLSALTKG

SEQ ID NO: 205321 - protein, 15 aa, Artificial Sequence
  Description of Artificial Sequence: Synthetic peptide
  Seed: EWLKTRPILSPLTKG
EWMKTTPFLSFLTKG

SEQ ID NO: 205322 - protein, 15 aa, Artificial Sequence
  Description of Artificial Sequence: Synthetic peptide
  Seed: EWLKTRPILSPLTKG
EWMKTTPFLSILTKG

SEQ ID NO: 205323 - protein, 15 aa, Artificial Sequence
  Description of Artificial Sequence: Synthetic peptide
  Seed: EWLKTRPILSPLTKG
EWMKTTPFLSLLTKG

SEQ ID NO: 205324 - protein, 15 aa, Artificial Sequence
  Description of Artificial Sequence: Synthetic peptide
  Seed: EWLKTRPILSPLTKG
EWMKTTPFLSMLTKG

SEQ ID NO: 205325 - protein, 15 aa, Artificial Sequence
  Description of Artificial Sequence: Synthetic peptide
  Seed: EWLKTRPILSPLTKG
EWMKTTPFLSNLTKG

SEQ ID NO: 205326 - protein, 15 aa, Artificial Sequence
  Description of Artificial Sequence: Synthetic peptide
  Seed: EWLKTRPILSPLTKG
EWMKTTPFLSSLTKG

SEQ ID NO: 205327 - protein, 15 aa, Artificial Sequence
  Description of Artificial Sequence: Synthetic peptide
  Seed: EWLKTRPILSPLTKG
EWMKTTPFLSTLTKG

SEQ ID NO: 205328 - protein, 15 aa, Artificial Sequence
  Description of Artificial Sequence: Synthetic peptide
  Seed: EWLKTRPILSPLTKG
EWMKTTPFLSVLTKG

SEQ ID NO: 205329 - protein, 15 aa, Artificial Sequence
  Description of Artificial Sequence: Synthetic peptide
  Seed: EWLKTRPILSPLTKG
EWMKTTPFLSYLTKG

SEQ ID NO: 205330 - protein, 15 aa, Artificial Sequence
  Description of Artificial Sequence: Synthetic peptide
  Seed: EWLKTRPILSPLTKG
EWMKTTPLLSILTKG

SEQ ID NO: 205331 - protein, 15 aa, Artificial Sequence
  Description of Artificial Sequence: Synthetic peptide
  Seed: EWLKTRPILSPLTKG
EWMKTTPLLSLLTKG

SEQ ID NO: 205332 - protein, 15 aa, Artificial Sequence
  Description of Artificial Sequence: Synthetic peptide
  Seed: EWLKTRPILSPLTKG
EWMKTTPLLSVLTKG

SEQ ID NO: 205333 - protein, 15 aa, Artificial Sequence
  Description of Artificial Sequence: Synthetic peptide
  Seed: EWLKTRPILSPLTKG
EWMKTTPWLSILTKG

SEQ ID NO: 205334 - protein, 15 aa, Artificial Sequence
  Description of Artificial Sequence: Synthetic peptide
  Seed: EWLKTRPILSPLTKG
EWMKTTPWLSLLTKG

SEQ ID NO: 205335 - protein, 15 aa, Artificial Sequence
  Description of Artificial Sequence: Synthetic peptide
  Seed: EWLKTRPILSPLTKG
EWMKTTPWLSVLTKG

SEQ ID NO: 205336 - protein, 15 aa, Artificial Sequence
  Description of Artificial Sequence: Synthetic peptide
  Seed: EWLKTRPILSPLTKG
EWMKTTPYLSILTKG

SEQ ID NO: 205337 - protein, 15 aa, Artificial Sequence
  Description of Artificial Sequence: Synthetic peptide
  Seed: EWLKTRPILSPLTKG
EWMKTTPYLSLLTKG

SEQ ID NO: 205338 - protein, 15 aa, Artificial Sequence
  Description of Artificial Sequence: Synthetic peptide
  Seed: EWLKTRPILSPLTKG
EWMKTTPYLSVLTKG

SEQ ID NO: 205339 - protein, 15 aa, Artificial Sequence
  Description of Artificial Sequence: Synthetic peptide
  Seed: EWLKTRPILSPLTKG
EWMKTVPFLSALTKG

SEQ ID NO: 205340 - protein, 15 aa, Artificial Sequence
  Description of Artificial Sequence: Synthetic peptide
  Seed: EWLKTRPILSPLTKG
EWMKTVPFLSFLTKG

SEQ ID NO: 205341 - protein, 15 aa, Artificial Sequence
  Description of Artificial Sequence: Synthetic peptide
  Seed: EWLKTRPILSPLTKG
EWMKTVPFLSILTKG

SEQ ID NO: 205342 - protein, 15 aa, Artificial Sequence
  Description of Artificial Sequence: Synthetic peptide
  Seed: EWLKTRPILSPLTKG
EWMKTVPFLSLLTKG

SEQ ID NO: 205343 - protein, 15 aa, Artificial Sequence
  Description of Artificial Sequence: Synthetic peptide
  Seed: EWLKTRPILSPLTKG
EWMKTVPFLSMLTKG

SEQ ID NO: 205344 - protein, 15 aa, Artificial Sequence
  Description of Artificial Sequence: Synthetic peptide
  Seed: EWLKTRPILSPLTKG
EWMKTVPFLSNLTKG

SEQ ID NO: 205345 - protein, 15 aa, Artificial Sequence
  Description of Artificial Sequence: Synthetic peptide
  Seed: EWLKTRPILSPLTKG
EWMKTVPFLSSLTKG

SEQ ID NO: 205346 - protein, 15 aa, Artificial Sequence
  Description of Artificial Sequence: Synthetic peptide
  Seed: EWLKTRPILSPLTKG
EWMKTVPFLSTLTKG

SEQ ID NO: 205347 - protein, 15 aa, Artificial Sequence
  Description of Artificial Sequence: Synthetic peptide
  Seed: EWLKTRPILSPLTKG
EWMKTVPFLSVLTKG

SEQ ID NO: 205348 - protein, 15 aa, Artificial Sequence
  Description of Artificial Sequence: Synthetic peptide
  Seed: EWLKTRPILSPLTKG
EWMKTVPFLSYLTKG

SEQ ID NO: 205349 - protein, 15 aa, Artificial Sequence
  Description of Artificial Sequence: Synthetic peptide
  Seed: EWLKTRPILSPLTKG
EWMKTVPKLSALTKG

SEQ ID NO: 205350 - protein, 15 aa, Artificial Sequence
  Description of Artificial Sequence: Synthetic peptide
  Seed: EWLKTRPILSPLTKG
EWMKTVPKLSSLTKG

SEQ ID NO: 205351 - protein, 15 aa, Artificial Sequence
  Description of Artificial Sequence: Synthetic peptide
  Seed: EWLKTRPILSPLTKG
EWMKTVPLLSILTKG

SEQ ID NO: 205352 - protein, 15 aa, Artificial Sequence
  Description of Artificial Sequence: Synthetic peptide
  Seed: EWLKTRPILSPLTKG
EWMKTVPLLSLLTKG

SEQ ID NO: 205353 - protein, 15 aa, Artificial Sequence
  Description of Artificial Sequence: Synthetic peptide
  Seed: EWLKTRPILSPLTKG
EWMKTVPLLSVLTKG

SEQ ID NO: 205354 - protein, 15 aa, Artificial Sequence
  Description of Artificial Sequence: Synthetic peptide
  Seed: EWLKTRPILSPLTKG
EWMKTVPRLSALTKG

SEQ ID NO: 205355 - protein, 15 aa, Artificial Sequence
  Description of Artificial Sequence: Synthetic peptide
  Seed: EWLKTRPILSPLTKG
EWMKTVPRLSGLTKG

SEQ ID NO: 205356 - protein, 15 aa, Artificial Sequence
  Description of Artificial Sequence: Synthetic peptide
  Seed: EWLKTRPILSPLTKG
EWMKTVPRLSHLTKG

SEQ ID NO: 205357 - protein, 15 aa, Artificial Sequence
  Description of Artificial Sequence: Synthetic peptide
  Seed: EWLKTRPILSPLTKG
EWMKTVPRLSKLTKG

SEQ ID NO: 205358 - protein, 15 aa, Artificial Sequence
  Description of Artificial Sequence: Synthetic peptide
  Seed: EWLKTRPILSPLTKG
EWMKTVPRLSQLTKG

SEQ ID NO: 205359 - protein, 15 aa, Artificial Sequence
  Description of Artificial Sequence: Synthetic peptide
  Seed: EWLKTRPILSPLTKG
EWMKTVPRLSRLTKG

SEQ ID NO: 205360 - protein, 15 aa, Artificial Sequence
  Description of Artificial Sequence: Synthetic peptide
  Seed: EWLKTRPILSPLTKG
EWMKTVPRLSSLTKG

SEQ ID NO: 205361 - protein, 15 aa, Artificial Sequence
  Description of Artificial Sequence: Synthetic peptide
  Seed: EWLKTRPILSPLTKG
EWMKTVPRLSTLTKG

SEQ ID NO: 205362 - protein, 15 aa, Artificial Sequence
  Description of Artificial Sequence: Synthetic peptide
  Seed: EWLKTRPILSPLTKG
EWMKTVPRLSYLTKG

SEQ ID NO: 205363 - protein, 15 aa, Artificial Sequence
  Description of Artificial Sequence: Synthetic peptide
  Seed: EWLKTRPILSPLTKG
EWMKTVPWLSILTKG

SEQ ID NO: 205364 - protein, 15 aa, Artificial Sequence
  Description of Artificial Sequence: Synthetic peptide
  Seed: EWLKTRPILSPLTKG
EWMKTVPWLSLLTKG

SEQ ID NO: 205365 - protein, 15 aa, Artificial Sequence
  Description of Artificial Sequence: Synthetic peptide
  Seed: EWLKTRPILSPLTKG
EWMKTVPWLSVLTKG

SEQ ID NO: 205366 - protein, 15 aa, Artificial Sequence
  Description of Artificial Sequence: Synthetic peptide
  Seed: EWLKTRPILSPLTKG
EWMKTVPYLSILTKG

SEQ ID NO: 205367 - protein, 15 aa, Artificial Sequence
  Description of Artificial Sequence: Synthetic peptide
  Seed: EWLKTRPILSPLTKG
EWMKTVPYLSLLTKG

SEQ ID NO: 205368 - protein, 15 aa, Artificial Sequence
  Description of Artificial Sequence: Synthetic peptide
  Seed: EWLKTRPILSPLTKG
EWMKTVPYLSVLTKG

SEQ ID NO: 205369 - protein, 15 aa, Artificial Sequence
  Description of Artificial Sequence: Synthetic peptide
  Seed: EWLKTRPILSPLTKG
EWMKTWPFLSILTKG

SEQ ID NO: 205370 - protein, 15 aa, Artificial Sequence
  Description of Artificial Sequence: Synthetic peptide
  Seed: EWLKTRPILSPLTKG
EWMKTWPFLSLLTKG

SEQ ID NO: 205371 - protein, 15 aa, Artificial Sequence
  Description of Artificial Sequence: Synthetic peptide
  Seed: EWLKTRPILSPLTKG
EWMKTWPFLSVLTKG

SEQ ID NO: 205372 - protein, 15 aa, Artificial Sequence
  Description of Artificial Sequence: Synthetic peptide
  Seed: EWLKTRPILSPLTKG
EWMKTYPFLSFLTKG

SEQ ID NO: 205373 - protein, 15 aa, Artificial Sequence
  Description of Artificial Sequence: Synthetic peptide
  Seed: EWLKTRPILSPLTKG
EWMKTYPFLSILTKG

SEQ ID NO: 205374 - protein, 15 aa, Artificial Sequence
  Description of Artificial Sequence: Synthetic peptide
  Seed: EWLKTRPILSPLTKG
EWMKTYPFLSLLTKG

SEQ ID NO: 205375 - protein, 15 aa, Artificial Sequence
  Description of Artificial Sequence: Synthetic peptide
  Seed: EWLKTRPILSPLTKG
EWMKTYPFLSMLTKG

SEQ ID NO: 205376 - protein, 15 aa, Artificial Sequence
  Description of Artificial Sequence: Synthetic peptide
  Seed: EWLKTRPILSPLTKG
EWMKTYPFLSVLTKG

SEQ ID NO: 205377 - protein, 15 aa, Artificial Sequence
  Description of Artificial Sequence: Synthetic peptide
  Seed: EWLKTRPILSPLTKG
EWVKTAPFLSALTKG

SEQ ID NO: 205378 - protein, 15 aa, Artificial Sequence
  Description of Artificial Sequence: Synthetic peptide
  Seed: EWLKTRPILSPLTKG
EWVKTAPFLSFLTKG

SEQ ID NO: 205379 - protein, 15 aa, Artificial Sequence
  Description of Artificial Sequence: Synthetic peptide
  Seed: EWLKTRPILSPLTKG
EWVKTAPFLSILTKG

SEQ ID NO: 205380 - protein, 15 aa, Artificial Sequence
  Description of Artificial Sequence: Synthetic peptide
  Seed: EWLKTRPILSPLTKG
EWVKTAPFLSLLTKG

SEQ ID NO: 205381 - protein, 15 aa, Artificial Sequence
  Description of Artificial Sequence: Synthetic peptide
  Seed: EWLKTRPILSPLTKG
EWVKTAPFLSMLTKG

SEQ ID NO: 205382 - protein, 15 aa, Artificial Sequence
  Description of Artificial Sequence: Synthetic peptide
  Seed: EWLKTRPILSPLTKG
EWVKTAPFLSTLTKG

SEQ ID NO: 205383 - protein, 15 aa, Artificial Sequence
  Description of Artificial Sequence: Synthetic peptide
  Seed: EWLKTRPILSPLTKG
EWVKTAPFLSVLTKG

SEQ ID NO: 205384 - protein, 15 aa, Artificial Sequence
  Description of Artificial Sequence: Synthetic peptide
  Seed: EWLKTRPILSPLTKG
EWVKTAPFLSYLTKG

SEQ ID NO: 205385 - protein, 15 aa, Artificial Sequence
  Description of Artificial Sequence: Synthetic peptide
  Seed: EWLKTRPILSPLTKG
EWVKTAPRLSALTKG

SEQ ID NO: 205386 - protein, 15 aa, Artificial Sequence
  Description of Artificial Sequence: Synthetic peptide
  Seed: EWLKTRPILSPLTKG
EWVKTAPRLSQLTKG

SEQ ID NO: 205387 - protein, 15 aa, Artificial Sequence
  Description of Artificial Sequence: Synthetic peptide
  Seed: EWLKTRPILSPLTKG
EWVKTAPRLSSLTKG

SEQ ID NO: 205388 - protein, 15 aa, Artificial Sequence
  Description of Artificial Sequence: Synthetic peptide
  Seed: EWLKTRPILSPLTKG
EWVKTAPYLSILTKG

SEQ ID NO: 205389 - protein, 15 aa, Artificial Sequence
  Description of Artificial Sequence: Synthetic peptide
  Seed: EWLKTRPILSPLTKG
EWVKTAPYLSLLTKG

SEQ ID NO: 205390 - protein, 15 aa, Artificial Sequence
  Description of Artificial Sequence: Synthetic peptide
  Seed: EWLKTRPILSPLTKG
EWVKTCPFLSILTKG

SEQ ID NO: 205391 - protein, 15 aa, Artificial Sequence
  Description of Artificial Sequence: Synthetic peptide
  Seed: EWLKTRPILSPLTKG
EWVKTCPFLSLLTKG

SEQ ID NO: 205392 - protein, 15 aa, Artificial Sequence
  Description of Artificial Sequence: Synthetic peptide
  Seed: EWLKTRPILSPLTKG
EWVKTCPFLSVLTKG

SEQ ID NO: 205393 - protein, 15 aa, Artificial Sequence
  Description of Artificial Sequence: Synthetic peptide
  Seed: EWLKTRPILSPLTKG
EWVKTEPFLSALTKG

SEQ ID NO: 205394 - protein, 15 aa, Artificial Sequence
  Description of Artificial Sequence: Synthetic peptide
  Seed: EWLKTRPILSPLTKG
EWVKTEPFLSFLTKG

SEQ ID NO: 205395 - protein, 15 aa, Artificial Sequence
  Description of Artificial Sequence: Synthetic peptide
  Seed: EWLKTRPILSPLTKG
EWVKTEPFLSILTKG

SEQ ID NO: 205396 - protein, 15 aa, Artificial Sequence
  Description of Artificial Sequence: Synthetic peptide
  Seed: EWLKTRPILSPLTKG
EWVKTEPFLSLLTKG

SEQ ID NO: 205397 - protein, 15 aa, Artificial Sequence
  Description of Artificial Sequence: Synthetic peptide
  Seed: EWLKTRPILSPLTKG
EWVKTEPFLSMLTKG

SEQ ID NO: 205398 - protein, 15 aa, Artificial Sequence
  Description of Artificial Sequence: Synthetic peptide
  Seed: EWLKTRPILSPLTKG
EWVKTEPFLSTLTKG

SEQ ID NO: 205399 - protein, 15 aa, Artificial Sequence
  Description of Artificial Sequence: Synthetic peptide
  Seed: EWLKTRPILSPLTKG
EWVKTEPFLSVLTKG

SEQ ID NO: 205400 - protein, 15 aa, Artificial Sequence
  Description of Artificial Sequence: Synthetic peptide
  Seed: EWLKTRPILSPLTKG
EWVKTEPFLSYLTKG

SEQ ID NO: 205401 - protein, 15 aa, Artificial Sequence
  Description of Artificial Sequence: Synthetic peptide
  Seed: EWLKTRPILSPLTKG
EWVKTFPFLSALTKG

SEQ ID NO: 205402 - protein, 15 aa, Artificial Sequence
  Description of Artificial Sequence: Synthetic peptide
  Seed: EWLKTRPILSPLTKG
EWVKTFPFLSELTKG

SEQ ID NO: 205403 - protein, 15 aa, Artificial Sequence
  Description of Artificial Sequence: Synthetic peptide
  Seed: EWLKTRPILSPLTKG
EWVKTFPFLSFLTKG

SEQ ID NO: 205404 - protein, 15 aa, Artificial Sequence
  Description of Artificial Sequence: Synthetic peptide
  Seed: EWLKTRPILSPLTKG
EWVKTFPFLSILTKG

SEQ ID NO: 205405 - protein, 15 aa, Artificial Sequence
  Description of Artificial Sequence: Synthetic peptide
  Seed: EWLKTRPILSPLTKG
EWVKTFPFLSLLTKG

SEQ ID NO: 205406 - protein, 15 aa, Artificial Sequence
  Description of Artificial Sequence: Synthetic peptide
  Seed: EWLKTRPILSPLTKG
EWVKTFPFLSMLTKG

SEQ ID NO: 205407 - protein, 15 aa, Artificial Sequence
  Description of Artificial Sequence: Synthetic peptide
  Seed: EWLKTRPILSPLTKG
EWVKTFPFLSNLTKG

SEQ ID NO: 205408 - protein, 15 aa, Artificial Sequence
  Description of Artificial Sequence: Synthetic peptide
  Seed: EWLKTRPILSPLTKG
EWVKTFPFLSSLTKG

SEQ ID NO: 205409 - protein, 15 aa, Artificial Sequence
  Description of Artificial Sequence: Synthetic peptide
  Seed: EWLKTRPILSPLTKG
EWVKTFPFLSTLTKG

SEQ ID NO: 205410 - protein, 15 aa, Artificial Sequence
  Description of Artificial Sequence: Synthetic peptide
  Seed: EWLKTRPILSPLTKG
EWVKTFPFLSVLTKG

SEQ ID NO: 205411 - protein, 15 aa, Artificial Sequence
  Description of Artificial Sequence: Synthetic peptide
  Seed: EWLKTRPILSPLTKG
EWVKTFPFLSYLTKG

SEQ ID NO: 205412 - protein, 15 aa, Artificial Sequence
  Description of Artificial Sequence: Synthetic peptide
  Seed: EWLKTRPILSPLTKG
EWVKTFPILSILTKG

SEQ ID NO: 205413 - protein, 15 aa, Artificial Sequence
  Description of Artificial Sequence: Synthetic peptide
  Seed: EWLKTRPILSPLTKG
EWVKTFPILSLLTKG

SEQ ID NO: 205414 - protein, 15 aa, Artificial Sequence
  Description of Artificial Sequence: Synthetic peptide
  Seed: EWLKTRPILSPLTKG
EWVKTFPILSVLTKG

SEQ ID NO: 205415 - protein, 15 aa, Artificial Sequence
  Description of Artificial Sequence: Synthetic peptide
  Seed: EWLKTRPILSPLTKG
EWVKTFPKLSALTKG

SEQ ID NO: 205416 - protein, 15 aa, Artificial Sequence
  Description of Artificial Sequence: Synthetic peptide
  Seed: EWLKTRPILSPLTKG
EWVKTFPKLSFLTKG

SEQ ID NO: 205417 - protein, 15 aa, Artificial Sequence
  Description of Artificial Sequence: Synthetic peptide
  Seed: EWLKTRPILSPLTKG
EWVKTFPKLSILTKG

SEQ ID NO: 205418 - protein, 15 aa, Artificial Sequence
  Description of Artificial Sequence: Synthetic peptide
  Seed: EWLKTRPILSPLTKG
EWVKTFPKLSLLTKG

SEQ ID NO: 205419 - protein, 15 aa, Artificial Sequence
  Description of Artificial Sequence: Synthetic peptide
  Seed: EWLKTRPILSPLTKG
EWVKTFPKLSSLTKG

SEQ ID NO: 205420 - protein, 15 aa, Artificial Sequence
  Description of Artificial Sequence: Synthetic peptide
  Seed: EWLKTRPILSPLTKG
EWVKTFPKLSVLTKG

SEQ ID NO: 205421 - protein, 15 aa, Artificial Sequence
  Description of Artificial Sequence: Synthetic peptide
  Seed: EWLKTRPILSPLTKG
EWVKTFPKLSYLTKG

SEQ ID NO: 205422 - protein, 15 aa, Artificial Sequence
  Description of Artificial Sequence: Synthetic peptide
  Seed: EWLKTRPILSPLTKG
EWVKTFPLLSFLTKG

SEQ ID NO: 205423 - protein, 15 aa, Artificial Sequence
  Description of Artificial Sequence: Synthetic peptide
  Seed: EWLKTRPILSPLTKG
EWVKTFPLLSILTKG

SEQ ID NO: 205424 - protein, 15 aa, Artificial Sequence
  Description of Artificial Sequence: Synthetic peptide
  Seed: EWLKTRPILSPLTKG
EWVKTFPLLSLLTKG

SEQ ID NO: 205425 - protein, 15 aa, Artificial Sequence
  Description of Artificial Sequence: Synthetic peptide
  Seed: EWLKTRPILSPLTKG
EWVKTFPLLSMLTKG

SEQ ID NO: 205426 - protein, 15 aa, Artificial Sequence
  Description of Artificial Sequence: Synthetic peptide
  Seed: EWLKTRPILSPLTKG
EWVKTFPLLSVLTKG

SEQ ID NO: 205427 - protein, 15 aa, Artificial Sequence
  Description of Artificial Sequence: Synthetic peptide
  Seed: EWLKTRPILSPLTKG
EWVKTFPMLSILTKG

SEQ ID NO: 205428 - protein, 15 aa, Artificial Sequence
  Description of Artificial Sequence: Synthetic peptide
  Seed: EWLKTRPILSPLTKG
EWVKTFPMLSLLTKG

SEQ ID NO: 205429 - protein, 15 aa, Artificial Sequence
  Description of Artificial Sequence: Synthetic peptide
  Seed: EWLKTRPILSPLTKG
EWVKTFPMLSVLTKG

SEQ ID NO: 205430 - protein, 15 aa, Artificial Sequence
  Description of Artificial Sequence: Synthetic peptide
  Seed: EWLKTRPILSPLTKG
EWVKTFPRLSALTKG

SEQ ID NO: 205431 - protein, 15 aa, Artificial Sequence
  Description of Artificial Sequence: Synthetic peptide
  Seed: EWLKTRPILSPLTKG
EWVKTFPRLSFLTKG

SEQ ID NO: 205432 - protein, 15 aa, Artificial Sequence
  Description of Artificial Sequence: Synthetic peptide
  Seed: EWLKTRPILSPLTKG
EWVKTFPRLSGLTKG

SEQ ID NO: 205433 - protein, 15 aa, Artificial Sequence
  Description of Artificial Sequence: Synthetic peptide
  Seed: EWLKTRPILSPLTKG
EWVKTFPRLSHLTKG

SEQ ID NO: 205434 - protein, 15 aa, Artificial Sequence
  Description of Artificial Sequence: Synthetic peptide
  Seed: EWLKTRPILSPLTKG
EWVKTFPRLSILTKG

SEQ ID NO: 205435 - protein, 15 aa, Artificial Sequence
  Description of Artificial Sequence: Synthetic peptide
  Seed: EWLKTRPILSPLTKG
EWVKTFPRLSKLTKG

SEQ ID NO: 205436 - protein, 15 aa, Artificial Sequence
  Description of Artificial Sequence: Synthetic peptide
  Seed: EWLKTRPILSPLTKG
EWVKTFPRLSLLTKG

SEQ ID NO: 205437 - protein, 15 aa, Artificial Sequence
  Description of Artificial Sequence: Synthetic peptide
  Seed: EWLKTRPILSPLTKG
EWVKTFPRLSMLTKG

SEQ ID NO: 205438 - protein, 15 aa, Artificial Sequence
  Description of Artificial Sequence: Synthetic peptide
  Seed: EWLKTRPILSPLTKG
EWVKTFPRLSRLTKG

SEQ ID NO: 205439 - protein, 15 aa, Artificial Sequence
  Description of Artificial Sequence: Synthetic peptide
  Seed: EWLKTRPILSPLTKG
EWVKTFPRLSSLTKG

SEQ ID NO: 205440 - protein, 15 aa, Artificial Sequence
  Description of Artificial Sequence: Synthetic peptide
  Seed: EWLKTRPILSPLTKG
EWVKTFPRLSVLTKG

SEQ ID NO: 205441 - protein, 15 aa, Artificial Sequence
  Description of Artificial Sequence: Synthetic peptide
  Seed: EWLKTRPILSPLTKG
EWVKTFPRLSYLTKG

SEQ ID NO: 205442 - protein, 15 aa, Artificial Sequence
  Description of Artificial Sequence: Synthetic peptide
  Seed: EWLKTRPILSPLTKG
EWVKTFPWLSFLTKG

SEQ ID NO: 205443 - protein, 15 aa, Artificial Sequence
  Description of Artificial Sequence: Synthetic peptide
  Seed: EWLKTRPILSPLTKG
EWVKTFPWLSILTKG

SEQ ID NO: 205444 - protein, 15 aa, Artificial Sequence
  Description of Artificial Sequence: Synthetic peptide
  Seed: EWLKTRPILSPLTKG
EWVKTFPWLSLLTKG

SEQ ID NO: 205445 - protein, 15 aa, Artificial Sequence
  Description of Artificial Sequence: Synthetic peptide
  Seed: EWLKTRPILSPLTKG
EWVKTFPWLSVLTKG

SEQ ID NO: 205446 - protein, 15 aa, Artificial Sequence
  Description of Artificial Sequence: Synthetic peptide
  Seed: EWLKTRPILSPLTKG
EWVKTFPYLSFLTKG

SEQ ID NO: 205447 - protein, 15 aa, Artificial Sequence
  Description of Artificial Sequence: Synthetic peptide
  Seed: EWLKTRPILSPLTKG
EWVKTFPYLSILTKG

SEQ ID NO: 205448 - protein, 15 aa, Artificial Sequence
  Description of Artificial Sequence: Synthetic peptide
  Seed: EWLKTRPILSPLTKG
EWVKTFPYLSLLTKG

SEQ ID NO: 205449 - protein, 15 aa, Artificial Sequence
  Description of Artificial Sequence: Synthetic peptide
  Seed: EWLKTRPILSPLTKG
EWVKTFPYLSMLTKG

SEQ ID NO: 205450 - protein, 15 aa, Artificial Sequence
  Description of Artificial Sequence: Synthetic peptide
  Seed: EWLKTRPILSPLTKG
EWVKTFPYLSVLTKG

SEQ ID NO: 205451 - protein, 15 aa, Artificial Sequence
  Description of Artificial Sequence: Synthetic peptide
  Seed: EWLKTRPILSPLTKG
EWVKTHPALSRLTKG

SEQ ID NO: 205452 - protein, 15 aa, Artificial Sequence
  Description of Artificial Sequence: Synthetic peptide
  Seed: EWLKTRPILSPLTKG
EWVKTHPFLSALTKG

SEQ ID NO: 205453 - protein, 15 aa, Artificial Sequence
  Description of Artificial Sequence: Synthetic peptide
  Seed: EWLKTRPILSPLTKG
EWVKTHPFLSFLTKG

SEQ ID NO: 205454 - protein, 15 aa, Artificial Sequence
  Description of Artificial Sequence: Synthetic peptide
  Seed: EWLKTRPILSPLTKG
EWVKTHPFLSILTKG

SEQ ID NO: 205455 - protein, 15 aa, Artificial Sequence
  Description of Artificial Sequence: Synthetic peptide
  Seed: EWLKTRPILSPLTKG
EWVKTHPFLSLLTKG

SEQ ID NO: 205456 - protein, 15 aa, Artificial Sequence
  Description of Artificial Sequence: Synthetic peptide
  Seed: EWLKTRPILSPLTKG
EWVKTHPFLSMLTKG

SEQ ID NO: 205457 - protein, 15 aa, Artificial Sequence
  Description of Artificial Sequence: Synthetic peptide
  Seed: EWLKTRPILSPLTKG
EWVKTHPFLSTLTKG

SEQ ID NO: 205458 - protein, 15 aa, Artificial Sequence
  Description of Artificial Sequence: Synthetic peptide
  Seed: EWLKTRPILSPLTKG
EWVKTHPFLSVLTKG

SEQ ID NO: 205459 - protein, 15 aa, Artificial Sequence
  Description of Artificial Sequence: Synthetic peptide
  Seed: EWLKTRPILSPLTKG
EWVKTHPLLSILTKG

SEQ ID NO: 205460 - protein, 15 aa, Artificial Sequence
  Description of Artificial Sequence: Synthetic peptide
  Seed: EWLKTRPILSPLTKG
EWVKTHPLLSLLTKG

SEQ ID NO: 205461 - protein, 15 aa, Artificial Sequence
  Description of Artificial Sequence: Synthetic peptide
  Seed: EWLKTRPILSPLTKG
EWVKTHPSLSRLTKG

SEQ ID NO: 205462 - protein, 15 aa, Artificial Sequence
  Description of Artificial Sequence: Synthetic peptide
  Seed: EWLKTRPILSPLTKG
EWVKTIPFLSALTKG

SEQ ID NO: 205463 - protein, 15 aa, Artificial Sequence
  Description of Artificial Sequence: Synthetic peptide
  Seed: EWLKTRPILSPLTKG
EWVKTIPFLSELTKG

SEQ ID NO: 205464 - protein, 15 aa, Artificial Sequence
  Description of Artificial Sequence: Synthetic peptide
  Seed: EWLKTRPILSPLTKG
EWVKTIPFLSFLTKG

SEQ ID NO: 205465 - protein, 15 aa, Artificial Sequence
  Description of Artificial Sequence: Synthetic peptide
  Seed: EWLKTRPILSPLTKG
EWVKTIPFLSILTKG

SEQ ID NO: 205466 - protein, 15 aa, Artificial Sequence
  Description of Artificial Sequence: Synthetic peptide
  Seed: EWLKTRPILSPLTKG
EWVKTIPFLSLLTKG

SEQ ID NO: 205467 - protein, 15 aa, Artificial Sequence
  Description of Artificial Sequence: Synthetic peptide
  Seed: EWLKTRPILSPLTKG
EWVKTIPFLSMLTKG

SEQ ID NO: 205468 - protein, 15 aa, Artificial Sequence
  Description of Artificial Sequence: Synthetic peptide
  Seed: EWLKTRPILSPLTKG
EWVKTIPFLSNLTKG

SEQ ID NO: 205469 - protein, 15 aa, Artificial Sequence
  Description of Artificial Sequence: Synthetic peptide
  Seed: EWLKTRPILSPLTKG
EWVKTIPFLSSLTKG

SEQ ID NO: 205470 - protein, 15 aa, Artificial Sequence
  Description of Artificial Sequence: Synthetic peptide
  Seed: EWLKTRPILSPLTKG
EWVKTIPFLSTLTKG

SEQ ID NO: 205471 - protein, 15 aa, Artificial Sequence
  Description of Artificial Sequence: Synthetic peptide
  Seed: EWLKTRPILSPLTKG
EWVKTIPFLSVLTKG

SEQ ID NO: 205472 - protein, 15 aa, Artificial Sequence
  Description of Artificial Sequence: Synthetic peptide
  Seed: EWLKTRPILSPLTKG
EWVKTIPFLSYLTKG

SEQ ID NO: 205473 - protein, 15 aa, Artificial Sequence
  Description of Artificial Sequence: Synthetic peptide
  Seed: EWLKTRPILSPLTKG
EWVKTIPKLSALTKG

SEQ ID NO: 205474 - protein, 15 aa, Artificial Sequence
  Description of Artificial Sequence: Synthetic peptide
  Seed: EWLKTRPILSPLTKG
EWVKTIPKLSFLTKG

SEQ ID NO: 205475 - protein, 15 aa, Artificial Sequence
  Description of Artificial Sequence: Synthetic peptide
  Seed: EWLKTRPILSPLTKG
EWVKTIPKLSGLTKG

SEQ ID NO: 205476 - protein, 15 aa, Artificial Sequence
  Description of Artificial Sequence: Synthetic peptide
  Seed: EWLKTRPILSPLTKG
EWVKTIPKLSHLTKG

SEQ ID NO: 205477 - protein, 15 aa, Artificial Sequence
  Description of Artificial Sequence: Synthetic peptide
  Seed: EWLKTRPILSPLTKG
EWVKTIPKLSILTKG

SEQ ID NO: 205478 - protein, 15 aa, Artificial Sequence
  Description of Artificial Sequence: Synthetic peptide
  Seed: EWLKTRPILSPLTKG
EWVKTIPKLSKLTKG

SEQ ID NO: 205479 - protein, 15 aa, Artificial Sequence
  Description of Artificial Sequence: Synthetic peptide
  Seed: EWLKTRPILSPLTKG
EWVKTIPKLSQLTKG

SEQ ID NO: 205480 - protein, 15 aa, Artificial Sequence
  Description of Artificial Sequence: Synthetic peptide
  Seed: EWLKTRPILSPLTKG
EWVKTIPKLSRLTKG

SEQ ID NO: 205481 - protein, 15 aa, Artificial Sequence
  Description of Artificial Sequence: Synthetic peptide
  Seed: EWLKTRPILSPLTKG
EWVKTIPKLSSLTKG

SEQ ID NO: 205482 - protein, 15 aa, Artificial Sequence
  Description of Artificial Sequence: Synthetic peptide
  Seed: EWLKTRPILSPLTKG
EWVKTIPKLSTLTKG

SEQ ID NO: 205483 - protein, 15 aa, Artificial Sequence
  Description of Artificial Sequence: Synthetic peptide
  Seed: EWLKTRPILSPLTKG
EWVKTIPKLSVLTKG

SEQ ID NO: 205484 - protein, 15 aa, Artificial Sequence
  Description of Artificial Sequence: Synthetic peptide
  Seed: EWLKTRPILSPLTKG
EWVKTIPKLSYLTKG

SEQ ID NO: 205485 - protein, 15 aa, Artificial Sequence
  Description of Artificial Sequence: Synthetic peptide
  Seed: EWLKTRPILSPLTKG
EWVKTIPLLSILTKG

SEQ ID NO: 205486 - protein, 15 aa, Artificial Sequence
  Description of Artificial Sequence: Synthetic peptide
  Seed: EWLKTRPILSPLTKG
EWVKTIPLLSLLTKG

SEQ ID NO: 205487 - protein, 15 aa, Artificial Sequence
  Description of Artificial Sequence: Synthetic peptide
  Seed: EWLKTRPILSPLTKG
EWVKTIPLLSVLTKG

SEQ ID NO: 205488 - protein, 15 aa, Artificial Sequence
  Description of Artificial Sequence: Synthetic peptide
  Seed: EWLKTRPILSPLTKG
EWVKTIPRLSALTKG

SEQ ID NO: 205489 - protein, 15 aa, Artificial Sequence
  Description of Artificial Sequence: Synthetic peptide
  Seed: EWLKTRPILSPLTKG
EWVKTIPRLSFLTKG

SEQ ID NO: 205490 - protein, 15 aa, Artificial Sequence
  Description of Artificial Sequence: Synthetic peptide
  Seed: EWLKTRPILSPLTKG
EWVKTIPRLSGLTKG

SEQ ID NO: 205491 - protein, 15 aa, Artificial Sequence
  Description of Artificial Sequence: Synthetic peptide
  Seed: EWLKTRPILSPLTKG
EWVKTIPRLSHLTKG

SEQ ID NO: 205492 - protein, 15 aa, Artificial Sequence
  Description of Artificial Sequence: Synthetic peptide
  Seed: EWLKTRPILSPLTKG
EWVKTIPRLSILTKG

SEQ ID NO: 205493 - protein, 15 aa, Artificial Sequence
  Description of Artificial Sequence: Synthetic peptide
  Seed: EWLKTRPILSPLTKG
EWVKTIPRLSKLTKG

SEQ ID NO: 205494 - protein, 15 aa, Artificial Sequence
  Description of Artificial Sequence: Synthetic peptide
  Seed: EWLKTRPILSPLTKG
EWVKTIPRLSLLTKG

SEQ ID NO: 205495 - protein, 15 aa, Artificial Sequence
  Description of Artificial Sequence: Synthetic peptide
  Seed: EWLKTRPILSPLTKG
EWVKTIPRLSMLTKG

SEQ ID NO: 205496 - protein, 15 aa, Artificial Sequence
  Description of Artificial Sequence: Synthetic peptide
  Seed: EWLKTRPILSPLTKG
EWVKTIPRLSQLTKG

SEQ ID NO: 205497 - protein, 15 aa, Artificial Sequence
  Description of Artificial Sequence: Synthetic peptide
  Seed: EWLKTRPILSPLTKG
EWVKTIPRLSRLTKG

SEQ ID NO: 205498 - protein, 15 aa, Artificial Sequence
  Description of Artificial Sequence: Synthetic peptide
  Seed: EWLKTRPILSPLTKG
EWVKTIPRLSSLTKG

SEQ ID NO: 205499 - protein, 15 aa, Artificial Sequence
  Description of Artificial Sequence: Synthetic peptide
  Seed: EWLKTRPILSPLTKG
EWVKTIPRLSTLTKG

SEQ ID NO: 205500 - protein, 15 aa, Artificial Sequence
  Description of Artificial Sequence: Synthetic peptide
  Seed: EWLKTRPILSPLTKG
EWVKTIPRLSVLTKG

SEQ ID NO: 205501 - protein, 15 aa, Artificial Sequence
  Description of Artificial Sequence: Synthetic peptide
  Seed: EWLKTRPILSPLTKG
EWVKTIPRLSYLTKG

SEQ ID NO: 205502 - protein, 15 aa, Artificial Sequence
  Description of Artificial Sequence: Synthetic peptide
  Seed: EWLKTRPILSPLTKG
EWVKTIPWLSFLTKG

SEQ ID NO: 205503 - protein, 15 aa, Artificial Sequence
  Description of Artificial Sequence: Synthetic peptide
  Seed: EWLKTRPILSPLTKG
EWVKTIPWLSILTKG

SEQ ID NO: 205504 - protein, 15 aa, Artificial Sequence
  Description of Artificial Sequence: Synthetic peptide
  Seed: EWLKTRPILSPLTKG
EWVKTIPWLSLLTKG

SEQ ID NO: 205505 - protein, 15 aa, Artificial Sequence
  Description of Artificial Sequence: Synthetic peptide
  Seed: EWLKTRPILSPLTKG
EWVKTIPWLSVLTKG

SEQ ID NO: 205506 - protein, 15 aa, Artificial Sequence
  Description of Artificial Sequence: Synthetic peptide
  Seed: EWLKTRPILSPLTKG
EWVKTIPYLSFLTKG

SEQ ID NO: 205507 - protein, 15 aa, Artificial Sequence
  Description of Artificial Sequence: Synthetic peptide
  Seed: EWLKTRPILSPLTKG
EWVKTIPYLSILTKG

SEQ ID NO: 205508 - protein, 15 aa, Artificial Sequence
  Description of Artificial Sequence: Synthetic peptide
  Seed: EWLKTRPILSPLTKG
EWVKTIPYLSLLTKG

SEQ ID NO: 205509 - protein, 15 aa, Artificial Sequence
  Description of Artificial Sequence: Synthetic peptide
  Seed: EWLKTRPILSPLTKG
EWVKTIPYLSVLTKG

SEQ ID NO: 205510 - protein, 15 aa, Artificial Sequence
  Description of Artificial Sequence: Synthetic peptide
  Seed: EWLKTRPILSPLTKG
EWVKTKPFLSILTKG

SEQ ID NO: 205511 - protein, 15 aa, Artificial Sequence
  Description of Artificial Sequence: Synthetic peptide
  Seed: EWLKTRPILSPLTKG
EWVKTKPFLSLLTKG

SEQ ID NO: 205512 - protein, 15 aa, Artificial Sequence
  Description of Artificial Sequence: Synthetic peptide
  Seed: EWLKTRPILSPLTKG
EWVKTKPFLSVLTKG

SEQ ID NO: 205513 - protein, 15 aa, Artificial Sequence
  Description of Artificial Sequence: Synthetic peptide
  Seed: EWLKTRPILSPLTKG
EWVKTLPFLSALTKG

SEQ ID NO: 205514 - protein, 15 aa, Artificial Sequence
  Description of Artificial Sequence: Synthetic peptide
  Seed: EWLKTRPILSPLTKG
EWVKTLPFLSDLTKG

SEQ ID NO: 205515 - protein, 15 aa, Artificial Sequence
  Description of Artificial Sequence: Synthetic peptide
  Seed: EWLKTRPILSPLTKG
EWVKTLPFLSELTKG

SEQ ID NO: 205516 - protein, 15 aa, Artificial Sequence
  Description of Artificial Sequence: Synthetic peptide
  Seed: EWLKTRPILSPLTKG
EWVKTLPFLSFLTKG

SEQ ID NO: 205517 - protein, 15 aa, Artificial Sequence
  Description of Artificial Sequence: Synthetic peptide
  Seed: EWLKTRPILSPLTKG
EWVKTLPFLSILTKG

SEQ ID NO: 205518 - protein, 15 aa, Artificial Sequence
  Description of Artificial Sequence: Synthetic peptide
  Seed: EWLKTRPILSPLTKG
EWVKTLPFLSLLTKG

SEQ ID NO: 205519 - protein, 15 aa, Artificial Sequence
  Description of Artificial Sequence: Synthetic peptide
  Seed: EWLKTRPILSPLTKG
EWVKTLPFLSMLTKG

SEQ ID NO: 205520 - protein, 15 aa, Artificial Sequence
  Description of Artificial Sequence: Synthetic peptide
  Seed: EWLKTRPILSPLTKG
EWVKTLPFLSNLTKG

SEQ ID NO: 205521 - protein, 15 aa, Artificial Sequence
  Description of Artificial Sequence: Synthetic peptide
  Seed: EWLKTRPILSPLTKG
EWVKTLPFLSSLTKG

SEQ ID NO: 205522 - protein, 15 aa, Artificial Sequence
  Description of Artificial Sequence: Synthetic peptide
  Seed: EWLKTRPILSPLTKG
EWVKTLPFLSTLTKG

SEQ ID NO: 205523 - protein, 15 aa, Artificial Sequence
  Description of Artificial Sequence: Synthetic peptide
  Seed: EWLKTRPILSPLTKG
EWVKTLPFLSVLTKG

SEQ ID NO: 205524 - protein, 15 aa, Artificial Sequence
  Description of Artificial Sequence: Synthetic peptide
  Seed: EWLKTRPILSPLTKG
EWVKTLPFLSYLTKG

SEQ ID NO: 205525 - protein, 15 aa, Artificial Sequence
  Description of Artificial Sequence: Synthetic peptide
  Seed: EWLKTRPILSPLTKG
EWVKTLPKLSALTKG

SEQ ID NO: 205526 - protein, 15 aa, Artificial Sequence
  Description of Artificial Sequence: Synthetic peptide
  Seed: EWLKTRPILSPLTKG
EWVKTLPKLSGLTKG

SEQ ID NO: 205527 - protein, 15 aa, Artificial Sequence
  Description of Artificial Sequence: Synthetic peptide
  Seed: EWLKTRPILSPLTKG
EWVKTLPKLSHLTKG

SEQ ID NO: 205528 - protein, 15 aa, Artificial Sequence
  Description of Artificial Sequence: Synthetic peptide
  Seed: EWLKTRPILSPLTKG
EWVKTLPKLSKLTKG

SEQ ID NO: 205529 - protein, 15 aa, Artificial Sequence
  Description of Artificial Sequence: Synthetic peptide
  Seed: EWLKTRPILSPLTKG
EWVKTLPKLSMLTKG

SEQ ID NO: 205530 - protein, 15 aa, Artificial Sequence
  Description of Artificial Sequence: Synthetic peptide
  Seed: EWLKTRPILSPLTKG
EWVKTLPKLSQLTKG

SEQ ID NO: 205531 - protein, 15 aa, Artificial Sequence
  Description of Artificial Sequence: Synthetic peptide
  Seed: EWLKTRPILSPLTKG
EWVKTLPKLSRLTKG

SEQ ID NO: 205532 - protein, 15 aa, Artificial Sequence
  Description of Artificial Sequence: Synthetic peptide
  Seed: EWLKTRPILSPLTKG
EWVKTLPKLSSLTKG

SEQ ID NO: 205533 - protein, 15 aa, Artificial Sequence
  Description of Artificial Sequence: Synthetic peptide
  Seed: EWLKTRPILSPLTKG
EWVKTLPKLSTLTKG

SEQ ID NO: 205534 - protein, 15 aa, Artificial Sequence
  Description of Artificial Sequence: Synthetic peptide
  Seed: EWLKTRPILSPLTKG
EWVKTLPKLSVLTKG

SEQ ID NO: 205535 - protein, 15 aa, Artificial Sequence
  Description of Artificial Sequence: Synthetic peptide
  Seed: EWLKTRPILSPLTKG
EWVKTLPLLSILTKG

SEQ ID NO: 205536 - protein, 15 aa, Artificial Sequence
  Description of Artificial Sequence: Synthetic peptide
  Seed: EWLKTRPILSPLTKG
EWVKTLPLLSLLTKG

SEQ ID NO: 205537 - protein, 15 aa, Artificial Sequence
  Description of Artificial Sequence: Synthetic peptide
  Seed: EWLKTRPILSPLTKG
EWVKTLPLLSVLTKG

SEQ ID NO: 205538 - protein, 15 aa, Artificial Sequence
  Description of Artificial Sequence: Synthetic peptide
  Seed: EWLKTRPILSPLTKG
EWVKTLPRLSALTKG

SEQ ID NO: 205539 - protein, 15 aa, Artificial Sequence
  Description of Artificial Sequence: Synthetic peptide
  Seed: EWLKTRPILSPLTKG
EWVKTLPRLSGLTKG

SEQ ID NO: 205540 - protein, 15 aa, Artificial Sequence
  Description of Artificial Sequence: Synthetic peptide
  Seed: EWLKTRPILSPLTKG
EWVKTLPRLSHLTKG

SEQ ID NO: 205541 - protein, 15 aa, Artificial Sequence
  Description of Artificial Sequence: Synthetic peptide
  Seed: EWLKTRPILSPLTKG
EWVKTLPRLSILTKG

SEQ ID NO: 205542 - protein, 15 aa, Artificial Sequence
  Description of Artificial Sequence: Synthetic peptide
  Seed: EWLKTRPILSPLTKG
EWVKTLPRLSKLTKG

SEQ ID NO: 205543 - protein, 15 aa, Artificial Sequence
  Description of Artificial Sequence: Synthetic peptide
  Seed: EWLKTRPILSPLTKG
EWVKTLPRLSLLTKG

SEQ ID NO: 205544 - protein, 15 aa, Artificial Sequence
  Description of Artificial Sequence: Synthetic peptide
  Seed: EWLKTRPILSPLTKG
EWVKTLPRLSMLTKG

SEQ ID NO: 205545 - protein, 15 aa, Artificial Sequence
  Description of Artificial Sequence: Synthetic peptide
  Seed: EWLKTRPILSPLTKG
EWVKTLPRLSNLTKG

SEQ ID NO: 205546 - protein, 15 aa, Artificial Sequence
  Description of Artificial Sequence: Synthetic peptide
  Seed: EWLKTRPILSPLTKG
EWVKTLPRLSPLTKG

SEQ ID NO: 205547 - protein, 15 aa, Artificial Sequence
  Description of Artificial Sequence: Synthetic peptide
  Seed: EWLKTRPILSPLTKG
EWVKTLPRLSQLTKG

SEQ ID NO: 205548 - protein, 15 aa, Artificial Sequence
  Description of Artificial Sequence: Synthetic peptide
  Seed: EWLKTRPILSPLTKG
EWVKTLPRLSRLTKG

SEQ ID NO: 205549 - protein, 15 aa, Artificial Sequence
  Description of Artificial Sequence: Synthetic peptide
  Seed: EWLKTRPILSPLTKG
EWVKTLPRLSSLTKG

SEQ ID NO: 205550 - protein, 15 aa, Artificial Sequence
  Description of Artificial Sequence: Synthetic peptide
  Seed: EWLKTRPILSPLTKG
EWVKTLPRLSTLTKG

SEQ ID NO: 205551 - protein, 15 aa, Artificial Sequence
  Description of Artificial Sequence: Synthetic peptide
  Seed: EWLKTRPILSPLTKG
EWVKTLPRLSVLTKG

SEQ ID NO: 205552 - protein, 15 aa, Artificial Sequence
  Description of Artificial Sequence: Synthetic peptide
  Seed: EWLKTRPILSPLTKG
EWVKTLPRLSYLTKG

SEQ ID NO: 205553 - protein, 15 aa, Artificial Sequence
  Description of Artificial Sequence: Synthetic peptide
  Seed: EWLKTRPILSPLTKG
EWVKTLPWLSILTKG

SEQ ID NO: 205554 - protein, 15 aa, Artificial Sequence
  Description of Artificial Sequence: Synthetic peptide
  Seed: EWLKTRPILSPLTKG
EWVKTLPWLSLLTKG

SEQ ID NO: 205555 - protein, 15 aa, Artificial Sequence
  Description of Artificial Sequence: Synthetic peptide
  Seed: EWLKTRPILSPLTKG
EWVKTLPWLSVLTKG

SEQ ID NO: 205556 - protein, 15 aa, Artificial Sequence
  Description of Artificial Sequence: Synthetic peptide
  Seed: EWLKTRPILSPLTKG
EWVKTLPYLSFLTKG

SEQ ID NO: 205557 - protein, 15 aa, Artificial Sequence
  Description of Artificial Sequence: Synthetic peptide
  Seed: EWLKTRPILSPLTKG
EWVKTLPYLSILTKG

SEQ ID NO: 205558 - protein, 15 aa, Artificial Sequence
  Description of Artificial Sequence: Synthetic peptide
  Seed: EWLKTRPILSPLTKG
EWVKTLPYLSLLTKG

SEQ ID NO: 205559 - protein, 15 aa, Artificial Sequence
  Description of Artificial Sequence: Synthetic peptide
  Seed: EWLKTRPILSPLTKG
EWVKTLPYLSVLTKG

SEQ ID NO: 205560 - protein, 15 aa, Artificial Sequence
  Description of Artificial Sequence: Synthetic peptide
  Seed: EWLKTRPILSPLTKG
EWVKTMPFLSALTKG

SEQ ID NO: 205561 - protein, 15 aa, Artificial Sequence
  Description of Artificial Sequence: Synthetic peptide
  Seed: EWLKTRPILSPLTKG
EWVKTMPFLSFLTKG

SEQ ID NO: 205562 - protein, 15 aa, Artificial Sequence
  Description of Artificial Sequence: Synthetic peptide
  Seed: EWLKTRPILSPLTKG
EWVKTMPFLSILTKG

SEQ ID NO: 205563 - protein, 15 aa, Artificial Sequence
  Description of Artificial Sequence: Synthetic peptide
  Seed: EWLKTRPILSPLTKG
EWVKTMPFLSLLTKG

SEQ ID NO: 205564 - protein, 15 aa, Artificial Sequence
  Description of Artificial Sequence: Synthetic peptide
  Seed: EWLKTRPILSPLTKG
EWVKTMPFLSMLTKG

SEQ ID NO: 205565 - protein, 15 aa, Artificial Sequence
  Description of Artificial Sequence: Synthetic peptide
  Seed: EWLKTRPILSPLTKG
EWVKTMPFLSSLTKG

SEQ ID NO: 205566 - protein, 15 aa, Artificial Sequence
  Description of Artificial Sequence: Synthetic peptide
  Seed: EWLKTRPILSPLTKG
EWVKTMPFLSTLTKG

SEQ ID NO: 205567 - protein, 15 aa, Artificial Sequence
  Description of Artificial Sequence: Synthetic peptide
  Seed: EWLKTRPILSPLTKG
EWVKTMPFLSVLTKG

SEQ ID NO: 205568 - protein, 15 aa, Artificial Sequence
  Description of Artificial Sequence: Synthetic peptide
  Seed: EWLKTRPILSPLTKG
EWVKTMPFLSYLTKG

SEQ ID NO: 205569 - protein, 15 aa, Artificial Sequence
  Description of Artificial Sequence: Synthetic peptide
  Seed: EWLKTRPILSPLTKG
EWVKTMPKLSALTKG

SEQ ID NO: 205570 - protein, 15 aa, Artificial Sequence
  Description of Artificial Sequence: Synthetic peptide
  Seed: EWLKTRPILSPLTKG
EWVKTMPKLSGLTKG

SEQ ID NO: 205571 - protein, 15 aa, Artificial Sequence
  Description of Artificial Sequence: Synthetic peptide
  Seed: EWLKTRPILSPLTKG
EWVKTMPKLSHLTKG

SEQ ID NO: 205572 - protein, 15 aa, Artificial Sequence
  Description of Artificial Sequence: Synthetic peptide
  Seed: EWLKTRPILSPLTKG
EWVKTMPKLSILTKG

SEQ ID NO: 205573 - protein, 15 aa, Artificial Sequence
  Description of Artificial Sequence: Synthetic peptide
  Seed: EWLKTRPILSPLTKG
EWVKTMPKLSKLTKG

SEQ ID NO: 205574 - protein, 15 aa, Artificial Sequence
  Description of Artificial Sequence: Synthetic peptide
  Seed: EWLKTRPILSPLTKG
EWVKTMPKLSLLTKG

SEQ ID NO: 205575 - protein, 15 aa, Artificial Sequence
  Description of Artificial Sequence: Synthetic peptide
  Seed: EWLKTRPILSPLTKG
EWVKTMPKLSMLTKG

SEQ ID NO: 205576 - protein, 15 aa, Artificial Sequence
  Description of Artificial Sequence: Synthetic peptide
  Seed: EWLKTRPILSPLTKG
EWVKTMPKLSQLTKG

SEQ ID NO: 205577 - protein, 15 aa, Artificial Sequence
  Description of Artificial Sequence: Synthetic peptide
  Seed: EWLKTRPILSPLTKG
EWVKTMPKLSRLTKG

SEQ ID NO: 205578 - protein, 15 aa, Artificial Sequence
  Description of Artificial Sequence: Synthetic peptide
  Seed: EWLKTRPILSPLTKG
EWVKTMPKLSSLTKG

SEQ ID NO: 205579 - protein, 15 aa, Artificial Sequence
  Description of Artificial Sequence: Synthetic peptide
  Seed: EWLKTRPILSPLTKG
EWVKTMPKLSTLTKG

SEQ ID NO: 205580 - protein, 15 aa, Artificial Sequence
  Description of Artificial Sequence: Synthetic peptide
  Seed: EWLKTRPILSPLTKG
EWVKTMPKLSVLTKG

SEQ ID NO: 205581 - protein, 15 aa, Artificial Sequence
  Description of Artificial Sequence: Synthetic peptide
  Seed: EWLKTRPILSPLTKG
EWVKTMPLLSILTKG

SEQ ID NO: 205582 - protein, 15 aa, Artificial Sequence
  Description of Artificial Sequence: Synthetic peptide
  Seed: EWLKTRPILSPLTKG
EWVKTMPRLSALTKG

SEQ ID NO: 205583 - protein, 15 aa, Artificial Sequence
  Description of Artificial Sequence: Synthetic peptide
  Seed: EWLKTRPILSPLTKG
EWVKTMPRLSFLTKG

SEQ ID NO: 205584 - protein, 15 aa, Artificial Sequence
  Description of Artificial Sequence: Synthetic peptide
  Seed: EWLKTRPILSPLTKG
EWVKTMPRLSGLTKG

SEQ ID NO: 205585 - protein, 15 aa, Artificial Sequence
  Description of Artificial Sequence: Synthetic peptide
  Seed: EWLKTRPILSPLTKG
EWVKTMPRLSHLTKG

SEQ ID NO: 205586 - protein, 15 aa, Artificial Sequence
  Description of Artificial Sequence: Synthetic peptide
  Seed: EWLKTRPILSPLTKG
EWVKTMPRLSILTKG

SEQ ID NO: 205587 - protein, 15 aa, Artificial Sequence
  Description of Artificial Sequence: Synthetic peptide
  Seed: EWLKTRPILSPLTKG
EWVKTMPRLSKLTKG

SEQ ID NO: 205588 - protein, 15 aa, Artificial Sequence
  Description of Artificial Sequence: Synthetic peptide
  Seed: EWLKTRPILSPLTKG
EWVKTMPRLSLLTKG

SEQ ID NO: 205589 - protein, 15 aa, Artificial Sequence
  Description of Artificial Sequence: Synthetic peptide
  Seed: EWLKTRPILSPLTKG
EWVKTMPRLSMLTKG

SEQ ID NO: 205590 - protein, 15 aa, Artificial Sequence
  Description of Artificial Sequence: Synthetic peptide
  Seed: EWLKTRPILSPLTKG
EWVKTMPRLSNLTKG

SEQ ID NO: 205591 - protein, 15 aa, Artificial Sequence
  Description of Artificial Sequence: Synthetic peptide
  Seed: EWLKTRPILSPLTKG
EWVKTMPRLSPLTKG

SEQ ID NO: 205592 - protein, 15 aa, Artificial Sequence
  Description of Artificial Sequence: Synthetic peptide
  Seed: EWLKTRPILSPLTKG
EWVKTMPRLSQLTKG

SEQ ID NO: 205593 - protein, 15 aa, Artificial Sequence
  Description of Artificial Sequence: Synthetic peptide
  Seed: EWLKTRPILSPLTKG
EWVKTMPRLSRLTKG

SEQ ID NO: 205594 - protein, 15 aa, Artificial Sequence
  Description of Artificial Sequence: Synthetic peptide
  Seed: EWLKTRPILSPLTKG
EWVKTMPRLSSLTKG

SEQ ID NO: 205595 - protein, 15 aa, Artificial Sequence
  Description of Artificial Sequence: Synthetic peptide
  Seed: EWLKTRPILSPLTKG
EWVKTMPRLSTLTKG

SEQ ID NO: 205596 - protein, 15 aa, Artificial Sequence
  Description of Artificial Sequence: Synthetic peptide
  Seed: EWLKTRPILSPLTKG
EWVKTMPRLSVLTKG

SEQ ID NO: 205597 - protein, 15 aa, Artificial Sequence
  Description of Artificial Sequence: Synthetic peptide
  Seed: EWLKTRPILSPLTKG
EWVKTMPRLSYLTKG

SEQ ID NO: 205598 - protein, 15 aa, Artificial Sequence
  Description of Artificial Sequence: Synthetic peptide
  Seed: EWLKTRPILSPLTKG
EWVKTMPYLSILTKG

SEQ ID NO: 205599 - protein, 15 aa, Artificial Sequence
  Description of Artificial Sequence: Synthetic peptide
  Seed: EWLKTRPILSPLTKG
EWVKTMPYLSLLTKG

SEQ ID NO: 205600 - protein, 15 aa, Artificial Sequence
  Description of Artificial Sequence: Synthetic peptide
  Seed: EWLKTRPILSPLTKG
EWVKTNPFLSILTKG

SEQ ID NO: 205601 - protein, 15 aa, Artificial Sequence
  Description of Artificial Sequence: Synthetic peptide
  Seed: EWLKTRPILSPLTKG
EWVKTNPFLSLLTKG

SEQ ID NO: 205602 - protein, 15 aa, Artificial Sequence
  Description of Artificial Sequence: Synthetic peptide
  Seed: EWLKTRPILSPLTKG
EWVKTNPFLSVLTKG

SEQ ID NO: 205603 - protein, 15 aa, Artificial Sequence
  Description of Artificial Sequence: Synthetic peptide
  Seed: EWLKTRPILSPLTKG
EWVKTQPFLSFLTKG

SEQ ID NO: 205604 - protein, 15 aa, Artificial Sequence
  Description of Artificial Sequence: Synthetic peptide
  Seed: EWLKTRPILSPLTKG
EWVKTQPFLSILTKG

SEQ ID NO: 205605 - protein, 15 aa, Artificial Sequence
  Description of Artificial Sequence: Synthetic peptide
  Seed: EWLKTRPILSPLTKG
EWVKTQPFLSLLTKG

SEQ ID NO: 205606 - protein, 15 aa, Artificial Sequence
  Description of Artificial Sequence: Synthetic peptide
  Seed: EWLKTRPILSPLTKG
EWVKTQPFLSMLTKG

SEQ ID NO: 205607 - protein, 15 aa, Artificial Sequence
  Description of Artificial Sequence: Synthetic peptide
  Seed: EWLKTRPILSPLTKG
EWVKTQPFLSVLTKG

SEQ ID NO: 205608 - protein, 15 aa, Artificial Sequence
  Description of Artificial Sequence: Synthetic peptide
  Seed: EWLKTRPILSPLTKG
EWVKTRPFLSLLTKG

SEQ ID NO: 205609 - protein, 15 aa, Artificial Sequence
  Description of Artificial Sequence: Synthetic peptide
  Seed: EWLKTRPILSPLTKG
EWVKTSPFLSALTKG

SEQ ID NO: 205610 - protein, 15 aa, Artificial Sequence
  Description of Artificial Sequence: Synthetic peptide
  Seed: EWLKTRPILSPLTKG
EWVKTSPFLSFLTKG

SEQ ID NO: 205611 - protein, 15 aa, Artificial Sequence
  Description of Artificial Sequence: Synthetic peptide
  Seed: EWLKTRPILSPLTKG
EWVKTSPFLSILTKG

SEQ ID NO: 205612 - protein, 15 aa, Artificial Sequence
  Description of Artificial Sequence: Synthetic peptide
  Seed: EWLKTRPILSPLTKG
EWVKTSPFLSLLTKG

SEQ ID NO: 205613 - protein, 15 aa, Artificial Sequence
  Description of Artificial Sequence: Synthetic peptide
  Seed: EWLKTRPILSPLTKG
EWVKTSPFLSMLTKG

SEQ ID NO: 205614 - protein, 15 aa, Artificial Sequence
  Description of Artificial Sequence: Synthetic peptide
  Seed: EWLKTRPILSPLTKG
EWVKTSPFLSTLTKG

SEQ ID NO: 205615 - protein, 15 aa, Artificial Sequence
  Description of Artificial Sequence: Synthetic peptide
  Seed: EWLKTRPILSPLTKG
EWVKTSPFLSVLTKG

SEQ ID NO: 205616 - protein, 15 aa, Artificial Sequence
  Description of Artificial Sequence: Synthetic peptide
  Seed: EWLKTRPILSPLTKG
EWVKTSPFLSYLTKG

SEQ ID NO: 205617 - protein, 15 aa, Artificial Sequence
  Description of Artificial Sequence: Synthetic peptide
  Seed: EWLKTRPILSPLTKG
EWVKTSPYLSILTKG

SEQ ID NO: 205618 - protein, 15 aa, Artificial Sequence
  Description of Artificial Sequence: Synthetic peptide
  Seed: EWLKTRPILSPLTKG
EWVKTSPYLSLLTKG

SEQ ID NO: 205619 - protein, 15 aa, Artificial Sequence
  Description of Artificial Sequence: Synthetic peptide
  Seed: EWLKTRPILSPLTKG
EWVKTTPFLSALTKG

SEQ ID NO: 205620 - protein, 15 aa, Artificial Sequence
  Description of Artificial Sequence: Synthetic peptide
  Seed: EWLKTRPILSPLTKG
EWVKTTPFLSFLTKG

SEQ ID NO: 205621 - protein, 15 aa, Artificial Sequence
  Description of Artificial Sequence: Synthetic peptide
  Seed: EWLKTRPILSPLTKG
EWVKTTPFLSILTKG

SEQ ID NO: 205622 - protein, 15 aa, Artificial Sequence
  Description of Artificial Sequence: Synthetic peptide
  Seed: EWLKTRPILSPLTKG
EWVKTTPFLSLLTKG

SEQ ID NO: 205623 - protein, 15 aa, Artificial Sequence
  Description of Artificial Sequence: Synthetic peptide
  Seed: EWLKTRPILSPLTKG
EWVKTTPFLSMLTKG

SEQ ID NO: 205624 - protein, 15 aa, Artificial Sequence
  Description of Artificial Sequence: Synthetic peptide
  Seed: EWLKTRPILSPLTKG
EWVKTTPFLSNLTKG

SEQ ID NO: 205625 - protein, 15 aa, Artificial Sequence
  Description of Artificial Sequence: Synthetic peptide
  Seed: EWLKTRPILSPLTKG
EWVKTTPFLSSLTKG

SEQ ID NO: 205626 - protein, 15 aa, Artificial Sequence
  Description of Artificial Sequence: Synthetic peptide
  Seed: EWLKTRPILSPLTKG
EWVKTTPFLSTLTKG

SEQ ID NO: 205627 - protein, 15 aa, Artificial Sequence
  Description of Artificial Sequence: Synthetic peptide
  Seed: EWLKTRPILSPLTKG
EWVKTTPFLSVLTKG

SEQ ID NO: 205628 - protein, 15 aa, Artificial Sequence
  Description of Artificial Sequence: Synthetic peptide
  Seed: EWLKTRPILSPLTKG
EWVKTTPFLSYLTKG

SEQ ID NO: 205629 - protein, 15 aa, Artificial Sequence
  Description of Artificial Sequence: Synthetic peptide
  Seed: EWLKTRPILSPLTKG
EWVKTTPLLSILTKG

SEQ ID NO: 205630 - protein, 15 aa, Artificial Sequence
  Description of Artificial Sequence: Synthetic peptide
  Seed: EWLKTRPILSPLTKG
EWVKTTPLLSLLTKG

SEQ ID NO: 205631 - protein, 15 aa, Artificial Sequence
  Description of Artificial Sequence: Synthetic peptide
  Seed: EWLKTRPILSPLTKG
EWVKTTPLLSVLTKG

SEQ ID NO: 205632 - protein, 15 aa, Artificial Sequence
  Description of Artificial Sequence: Synthetic peptide
  Seed: EWLKTRPILSPLTKG
EWVKTTPWLSILTKG

SEQ ID NO: 205633 - protein, 15 aa, Artificial Sequence
  Description of Artificial Sequence: Synthetic peptide
  Seed: EWLKTRPILSPLTKG
EWVKTTPWLSLLTKG

SEQ ID NO: 205634 - protein, 15 aa, Artificial Sequence
  Description of Artificial Sequence: Synthetic peptide
  Seed: EWLKTRPILSPLTKG
EWVKTTPWLSVLTKG

SEQ ID NO: 205635 - protein, 15 aa, Artificial Sequence
  Description of Artificial Sequence: Synthetic peptide
  Seed: EWLKTRPILSPLTKG
EWVKTTPYLSILTKG

SEQ ID NO: 205636 - protein, 15 aa, Artificial Sequence
  Description of Artificial Sequence: Synthetic peptide
  Seed: EWLKTRPILSPLTKG
EWVKTTPYLSLLTKG

SEQ ID NO: 205637 - protein, 15 aa, Artificial Sequence
  Description of Artificial Sequence: Synthetic peptide
  Seed: EWLKTRPILSPLTKG
EWVKTTPYLSVLTKG

SEQ ID NO: 205638 - protein, 15 aa, Artificial Sequence
  Description of Artificial Sequence: Synthetic peptide
  Seed: EWLKTRPILSPLTKG
EWVKTVPFLSALTKG

SEQ ID NO: 205639 - protein, 15 aa, Artificial Sequence
  Description of Artificial Sequence: Synthetic peptide
  Seed: EWLKTRPILSPLTKG
EWVKTVPFLSELTKG

SEQ ID NO: 205640 - protein, 15 aa, Artificial Sequence
  Description of Artificial Sequence: Synthetic peptide
  Seed: EWLKTRPILSPLTKG
EWVKTVPFLSFLTKG

SEQ ID NO: 205641 - protein, 15 aa, Artificial Sequence
  Description of Artificial Sequence: Synthetic peptide
  Seed: EWLKTRPILSPLTKG
EWVKTVPFLSILTKG

SEQ ID NO: 205642 - protein, 15 aa, Artificial Sequence
  Description of Artificial Sequence: Synthetic peptide
  Seed: EWLKTRPILSPLTKG
EWVKTVPFLSLLTKG

SEQ ID NO: 205643 - protein, 15 aa, Artificial Sequence
  Description of Artificial Sequence: Synthetic peptide
  Seed: EWLKTRPILSPLTKG
EWVKTVPFLSMLTKG

SEQ ID NO: 205644 - protein, 15 aa, Artificial Sequence
  Description of Artificial Sequence: Synthetic peptide
  Seed: EWLKTRPILSPLTKG
EWVKTVPFLSNLTKG

SEQ ID NO: 205645 - protein, 15 aa, Artificial Sequence
  Description of Artificial Sequence: Synthetic peptide
  Seed: EWLKTRPILSPLTKG
EWVKTVPFLSSLTKG

SEQ ID NO: 205646 - protein, 15 aa, Artificial Sequence
  Description of Artificial Sequence: Synthetic peptide
  Seed: EWLKTRPILSPLTKG
EWVKTVPFLSTLTKG

SEQ ID NO: 205647 - protein, 15 aa, Artificial Sequence
  Description of Artificial Sequence: Synthetic peptide
  Seed: EWLKTRPILSPLTKG
EWVKTVPFLSVLTKG

SEQ ID NO: 205648 - protein, 15 aa, Artificial Sequence
  Description of Artificial Sequence: Synthetic peptide
  Seed: EWLKTRPILSPLTKG
EWVKTVPFLSYLTKG

SEQ ID NO: 205649 - protein, 15 aa, Artificial Sequence
  Description of Artificial Sequence: Synthetic peptide
  Seed: EWLKTRPILSPLTKG
EWVKTVPKLSALTKG

SEQ ID NO: 205650 - protein, 15 aa, Artificial Sequence
  Description of Artificial Sequence: Synthetic peptide
  Seed: EWLKTRPILSPLTKG
EWVKTVPKLSSLTKG

SEQ ID NO: 205651 - protein, 15 aa, Artificial Sequence
  Description of Artificial Sequence: Synthetic peptide
  Seed: EWLKTRPILSPLTKG
EWVKTVPLLSILTKG

SEQ ID NO: 205652 - protein, 15 aa, Artificial Sequence
  Description of Artificial Sequence: Synthetic peptide
  Seed: EWLKTRPILSPLTKG
EWVKTVPLLSLLTKG

SEQ ID NO: 205653 - protein, 15 aa, Artificial Sequence
  Description of Artificial Sequence: Synthetic peptide
  Seed: EWLKTRPILSPLTKG
EWVKTVPLLSVLTKG

SEQ ID NO: 205654 - protein, 15 aa, Artificial Sequence
  Description of Artificial Sequence: Synthetic peptide
  Seed: EWLKTRPILSPLTKG
EWVKTVPRLSALTKG

SEQ ID NO: 205655 - protein, 15 aa, Artificial Sequence
  Description of Artificial Sequence: Synthetic peptide
  Seed: EWLKTRPILSPLTKG
EWVKTVPRLSGLTKG

SEQ ID NO: 205656 - protein, 15 aa, Artificial Sequence
  Description of Artificial Sequence: Synthetic peptide
  Seed: EWLKTRPILSPLTKG
EWVKTVPRLSHLTKG

SEQ ID NO: 205657 - protein, 15 aa, Artificial Sequence
  Description of Artificial Sequence: Synthetic peptide
  Seed: EWLKTRPILSPLTKG
EWVKTVPRLSKLTKG

SEQ ID NO: 205658 - protein, 15 aa, Artificial Sequence
  Description of Artificial Sequence: Synthetic peptide
  Seed: EWLKTRPILSPLTKG
EWVKTVPRLSQLTKG

SEQ ID NO: 205659 - protein, 15 aa, Artificial Sequence
  Description of Artificial Sequence: Synthetic peptide
  Seed: EWLKTRPILSPLTKG
EWVKTVPRLSRLTKG

SEQ ID NO: 205660 - protein, 15 aa, Artificial Sequence
  Description of Artificial Sequence: Synthetic peptide
  Seed: EWLKTRPILSPLTKG
EWVKTVPRLSSLTKG

SEQ ID NO: 205661 - protein, 15 aa, Artificial Sequence
  Description of Artificial Sequence: Synthetic peptide
  Seed: EWLKTRPILSPLTKG
EWVKTVPRLSTLTKG

SEQ ID NO: 205662 - protein, 15 aa, Artificial Sequence
  Description of Artificial Sequence: Synthetic peptide
  Seed: EWLKTRPILSPLTKG
EWVKTVPRLSVLTKG

SEQ ID NO: 205663 - protein, 15 aa, Artificial Sequence
  Description of Artificial Sequence: Synthetic peptide
  Seed: EWLKTRPILSPLTKG
EWVKTVPRLSYLTKG

SEQ ID NO: 205664 - protein, 15 aa, Artificial Sequence
  Description of Artificial Sequence: Synthetic peptide
  Seed: EWLKTRPILSPLTKG
EWVKTVPWLSILTKG

SEQ ID NO: 205665 - protein, 15 aa, Artificial Sequence
  Description of Artificial Sequence: Synthetic peptide
  Seed: EWLKTRPILSPLTKG
EWVKTVPWLSLLTKG

SEQ ID NO: 205666 - protein, 15 aa, Artificial Sequence
  Description of Artificial Sequence: Synthetic peptide
  Seed: EWLKTRPILSPLTKG
EWVKTVPWLSVLTKG

SEQ ID NO: 205667 - protein, 15 aa, Artificial Sequence
  Description of Artificial Sequence: Synthetic peptide
  Seed: EWLKTRPILSPLTKG
EWVKTVPYLSILTKG

SEQ ID NO: 205668 - protein, 15 aa, Artificial Sequence
  Description of Artificial Sequence: Synthetic peptide
  Seed: EWLKTRPILSPLTKG
EWVKTVPYLSLLTKG

SEQ ID NO: 205669 - protein, 15 aa, Artificial Sequence
  Description of Artificial Sequence: Synthetic peptide
  Seed: EWLKTRPILSPLTKG
EWVKTVPYLSVLTKG

SEQ ID NO: 205670 - protein, 15 aa, Artificial Sequence
  Description of Artificial Sequence: Synthetic peptide
  Seed: EWLKTRPILSPLTKG
EWVKTWPFLSILTKG

SEQ ID NO: 205671 - protein, 15 aa, Artificial Sequence
  Description of Artificial Sequence: Synthetic peptide
  Seed: EWLKTRPILSPLTKG
EWVKTWPFLSLLTKG

SEQ ID NO: 205672 - protein, 15 aa, Artificial Sequence
  Description of Artificial Sequence: Synthetic peptide
  Seed: EWLKTRPILSPLTKG
EWVKTWPFLSVLTKG

SEQ ID NO: 205673 - protein, 15 aa, Artificial Sequence
  Description of Artificial Sequence: Synthetic peptide
  Seed: EWLKTRPILSPLTKG
EWVKTYPFLSFLTKG

SEQ ID NO: 205674 - protein, 15 aa, Artificial Sequence
  Description of Artificial Sequence: Synthetic peptide
  Seed: EWLKTRPILSPLTKG
EWVKTYPFLSILTKG

SEQ ID NO: 205675 - protein, 15 aa, Artificial Sequence
  Description of Artificial Sequence: Synthetic peptide
  Seed: EWLKTRPILSPLTKG
EWVKTYPFLSLLTKG

SEQ ID NO: 205676 - protein, 15 aa, Artificial Sequence
  Description of Artificial Sequence: Synthetic peptide
  Seed: EWLKTRPILSPLTKG
EWVKTYPFLSMLTKG

SEQ ID NO: 205677 - protein, 15 aa, Artificial Sequence
  Description of Artificial Sequence: Synthetic peptide
  Seed: EWLKTRPILSPLTKG
EWVKTYPFLSVLTKG

SEQ ID NO: 205678 - protein, 15 aa, Artificial Sequence
  Description of Artificial Sequence: Synthetic peptide
  Seed: EWLKTRPILSPLTKG
EWVKTYPLLSILTKG

SEQ ID NO: 205679 - protein, 15 aa, Artificial Sequence
  Description of Artificial Sequence: Synthetic peptide
  Seed: EWLKTRPILSPLTKG
EWVKTYPLLSLLTKG

SEQ ID NO: 205680 - protein, 15 aa, Artificial Sequence
  Description of Artificial Sequence: Synthetic peptide
  Seed: EWLKTRPILSPLTKG
EWVKTYPLLSVLTKG

SEQ ID NO: 205681 - protein, 15 aa, Artificial Sequence
  Description of Artificial Sequence: Synthetic peptide
  Seed: EWLKTRPILSPLTKG
EWWKTAPFLSALTKG

SEQ ID NO: 205682 - protein, 15 aa, Artificial Sequence
  Description of Artificial Sequence: Synthetic peptide
  Seed: EWLKTRPILSPLTKG
EWWKTAPFLSFLTKG

SEQ ID NO: 205683 - protein, 15 aa, Artificial Sequence
  Description of Artificial Sequence: Synthetic peptide
  Seed: EWLKTRPILSPLTKG
EWWKTAPFLSILTKG

SEQ ID NO: 205684 - protein, 15 aa, Artificial Sequence
  Description of Artificial Sequence: Synthetic peptide
  Seed: EWLKTRPILSPLTKG
EWWKTAPFLSLLTKG

SEQ ID NO: 205685 - protein, 15 aa, Artificial Sequence
  Description of Artificial Sequence: Synthetic peptide
  Seed: EWLKTRPILSPLTKG
EWWKTAPFLSMLTKG

SEQ ID NO: 205686 - protein, 15 aa, Artificial Sequence
  Description of Artificial Sequence: Synthetic peptide
  Seed: EWLKTRPILSPLTKG
EWWKTAPFLSTLTKG

SEQ ID NO: 205687 - protein, 15 aa, Artificial Sequence
  Description of Artificial Sequence: Synthetic peptide
  Seed: EWLKTRPILSPLTKG
EWWKTAPFLSVLTKG

SEQ ID NO: 205688 - protein, 15 aa, Artificial Sequence
  Description of Artificial Sequence: Synthetic peptide
  Seed: EWLKTRPILSPLTKG
EWWKTAPFLSYLTKG

SEQ ID NO: 205689 - protein, 15 aa, Artificial Sequence
  Description of Artificial Sequence: Synthetic peptide
  Seed: EWLKTRPILSPLTKG
EWWKTAPYLSILTKG

SEQ ID NO: 205690 - protein, 15 aa, Artificial Sequence
  Description of Artificial Sequence: Synthetic peptide
  Seed: EWLKTRPILSPLTKG
EWWKTAPYLSLLTKG

SEQ ID NO: 205691 - protein, 15 aa, Artificial Sequence
  Description of Artificial Sequence: Synthetic peptide
  Seed: EWLKTRPILSPLTKG
EWWKTCPFLSILTKG

SEQ ID NO: 205692 - protein, 15 aa, Artificial Sequence
  Description of Artificial Sequence: Synthetic peptide
  Seed: EWLKTRPILSPLTKG
EWWKTCPFLSLLTKG

SEQ ID NO: 205693 - protein, 15 aa, Artificial Sequence
  Description of Artificial Sequence: Synthetic peptide
  Seed: EWLKTRPILSPLTKG
EWWKTCPFLSVLTKG

SEQ ID NO: 205694 - protein, 15 aa, Artificial Sequence
  Description of Artificial Sequence: Synthetic peptide
  Seed: EWLKTRPILSPLTKG
EWWKTEPFLSALTKG

SEQ ID NO: 205695 - protein, 15 aa, Artificial Sequence
  Description of Artificial Sequence: Synthetic peptide
  Seed: EWLKTRPILSPLTKG
EWWKTEPFLSFLTKG

SEQ ID NO: 205696 - protein, 15 aa, Artificial Sequence
  Description of Artificial Sequence: Synthetic peptide
  Seed: EWLKTRPILSPLTKG
EWWKTEPFLSILTKG

SEQ ID NO: 205697 - protein, 15 aa, Artificial Sequence
  Description of Artificial Sequence: Synthetic peptide
  Seed: EWLKTRPILSPLTKG
EWWKTEPFLSLLTKG

SEQ ID NO: 205698 - protein, 15 aa, Artificial Sequence
  Description of Artificial Sequence: Synthetic peptide
  Seed: EWLKTRPILSPLTKG
EWWKTEPFLSMLTKG

SEQ ID NO: 205699 - protein, 15 aa, Artificial Sequence
  Description of Artificial Sequence: Synthetic peptide
  Seed: EWLKTRPILSPLTKG
EWWKTEPFLSVLTKG

SEQ ID NO: 205700 - protein, 15 aa, Artificial Sequence
  Description of Artificial Sequence: Synthetic peptide
  Seed: EWLKTRPILSPLTKG
EWWKTFPFLSALTKG

SEQ ID NO: 205701 - protein, 15 aa, Artificial Sequence
  Description of Artificial Sequence: Synthetic peptide
  Seed: EWLKTRPILSPLTKG
EWWKTFPFLSELTKG

SEQ ID NO: 205702 - protein, 15 aa, Artificial Sequence
  Description of Artificial Sequence: Synthetic peptide
  Seed: EWLKTRPILSPLTKG
EWWKTFPFLSFLTKG

SEQ ID NO: 205703 - protein, 15 aa, Artificial Sequence
  Description of Artificial Sequence: Synthetic peptide
  Seed: EWLKTRPILSPLTKG
EWWKTFPFLSILTKG

SEQ ID NO: 205704 - protein, 15 aa, Artificial Sequence
  Description of Artificial Sequence: Synthetic peptide
  Seed: EWLKTRPILSPLTKG
EWWKTFPFLSLLTKG

SEQ ID NO: 205705 - protein, 15 aa, Artificial Sequence
  Description of Artificial Sequence: Synthetic peptide
  Seed: EWLKTRPILSPLTKG
EWWKTFPFLSMLTKG

SEQ ID NO: 205706 - protein, 15 aa, Artificial Sequence
  Description of Artificial Sequence: Synthetic peptide
  Seed: EWLKTRPILSPLTKG
EWWKTFPFLSNLTKG

SEQ ID NO: 205707 - protein, 15 aa, Artificial Sequence
  Description of Artificial Sequence: Synthetic peptide
  Seed: EWLKTRPILSPLTKG
EWWKTFPFLSSLTKG

SEQ ID NO: 205708 - protein, 15 aa, Artificial Sequence
  Description of Artificial Sequence: Synthetic peptide
  Seed: EWLKTRPILSPLTKG
EWWKTFPFLSTLTKG

SEQ ID NO: 205709 - protein, 15 aa, Artificial Sequence
  Description of Artificial Sequence: Synthetic peptide
  Seed: EWLKTRPILSPLTKG
EWWKTFPFLSVLTKG

SEQ ID NO: 205710 - protein, 15 aa, Artificial Sequence
  Description of Artificial Sequence: Synthetic peptide
  Seed: EWLKTRPILSPLTKG
EWWKTFPFLSYLTKG

SEQ ID NO: 205711 - protein, 15 aa, Artificial Sequence
  Description of Artificial Sequence: Synthetic peptide
  Seed: EWLKTRPILSPLTKG
EWWKTFPILSILTKG

SEQ ID NO: 205712 - protein, 15 aa, Artificial Sequence
  Description of Artificial Sequence: Synthetic peptide
  Seed: EWLKTRPILSPLTKG
EWWKTFPILSLLTKG

SEQ ID NO: 205713 - protein, 15 aa, Artificial Sequence
  Description of Artificial Sequence: Synthetic peptide
  Seed: EWLKTRPILSPLTKG
EWWKTFPILSVLTKG

SEQ ID NO: 205714 - protein, 15 aa, Artificial Sequence
  Description of Artificial Sequence: Synthetic peptide
  Seed: EWLKTRPILSPLTKG
EWWKTFPLLSFLTKG

SEQ ID NO: 205715 - protein, 15 aa, Artificial Sequence
  Description of Artificial Sequence: Synthetic peptide
  Seed: EWLKTRPILSPLTKG
EWWKTFPLLSILTKG

SEQ ID NO: 205716 - protein, 15 aa, Artificial Sequence
  Description of Artificial Sequence: Synthetic peptide
  Seed: EWLKTRPILSPLTKG
EWWKTFPLLSLLTKG

SEQ ID NO: 205717 - protein, 15 aa, Artificial Sequence
  Description of Artificial Sequence: Synthetic peptide
  Seed: EWLKTRPILSPLTKG
EWWKTFPLLSMLTKG

SEQ ID NO: 205718 - protein, 15 aa, Artificial Sequence
  Description of Artificial Sequence: Synthetic peptide
  Seed: EWLKTRPILSPLTKG
EWWKTFPLLSVLTKG

SEQ ID NO: 205719 - protein, 15 aa, Artificial Sequence
  Description of Artificial Sequence: Synthetic peptide
  Seed: EWLKTRPILSPLTKG
EWWKTFPMLSILTKG

SEQ ID NO: 205720 - protein, 15 aa, Artificial Sequence
  Description of Artificial Sequence: Synthetic peptide
  Seed: EWLKTRPILSPLTKG
EWWKTFPMLSLLTKG

SEQ ID NO: 205721 - protein, 15 aa, Artificial Sequence
  Description of Artificial Sequence: Synthetic peptide
  Seed: EWLKTRPILSPLTKG
EWWKTFPMLSVLTKG

SEQ ID NO: 205722 - protein, 15 aa, Artificial Sequence
  Description of Artificial Sequence: Synthetic peptide
  Seed: EWLKTRPILSPLTKG
EWWKTFPWLSILTKG

SEQ ID NO: 205723 - protein, 15 aa, Artificial Sequence
  Description of Artificial Sequence: Synthetic peptide
  Seed: EWLKTRPILSPLTKG
EWWKTFPWLSLLTKG

SEQ ID NO: 205724 - protein, 15 aa, Artificial Sequence
  Description of Artificial Sequence: Synthetic peptide
  Seed: EWLKTRPILSPLTKG
EWWKTFPWLSVLTKG

SEQ ID NO: 205725 - protein, 15 aa, Artificial Sequence
  Description of Artificial Sequence: Synthetic peptide
  Seed: EWLKTRPILSPLTKG
EWWKTFPYLSFLTKG

SEQ ID NO: 205726 - protein, 15 aa, Artificial Sequence
  Description of Artificial Sequence: Synthetic peptide
  Seed: EWLKTRPILSPLTKG
EWWKTFPYLSILTKG

SEQ ID NO: 205727 - protein, 15 aa, Artificial Sequence
  Description of Artificial Sequence: Synthetic peptide
  Seed: EWLKTRPILSPLTKG
EWWKTFPYLSLLTKG

SEQ ID NO: 205728 - protein, 15 aa, Artificial Sequence
  Description of Artificial Sequence: Synthetic peptide
  Seed: EWLKTRPILSPLTKG
EWWKTFPYLSMLTKG

SEQ ID NO: 205729 - protein, 15 aa, Artificial Sequence
  Description of Artificial Sequence: Synthetic peptide
  Seed: EWLKTRPILSPLTKG
EWWKTFPYLSVLTKG

SEQ ID NO: 205730 - protein, 15 aa, Artificial Sequence
  Description of Artificial Sequence: Synthetic peptide
  Seed: EWLKTRPILSPLTKG
EWWKTHPFLSALTKG

SEQ ID NO: 205731 - protein, 15 aa, Artificial Sequence
  Description of Artificial Sequence: Synthetic peptide
  Seed: EWLKTRPILSPLTKG
EWWKTHPFLSFLTKG

SEQ ID NO: 205732 - protein, 15 aa, Artificial Sequence
  Description of Artificial Sequence: Synthetic peptide
  Seed: EWLKTRPILSPLTKG
EWWKTHPFLSILTKG

SEQ ID NO: 205733 - protein, 15 aa, Artificial Sequence
  Description of Artificial Sequence: Synthetic peptide
  Seed: EWLKTRPILSPLTKG
EWWKTHPFLSLLTKG

SEQ ID NO: 205734 - protein, 15 aa, Artificial Sequence
  Description of Artificial Sequence: Synthetic peptide
  Seed: EWLKTRPILSPLTKG
EWWKTHPFLSMLTKG

SEQ ID NO: 205735 - protein, 15 aa, Artificial Sequence
  Description of Artificial Sequence: Synthetic peptide
  Seed: EWLKTRPILSPLTKG
EWWKTHPFLSSLTKG

SEQ ID NO: 205736 - protein, 15 aa, Artificial Sequence
  Description of Artificial Sequence: Synthetic peptide
  Seed: EWLKTRPILSPLTKG
EWWKTHPFLSTLTKG

SEQ ID NO: 205737 - protein, 15 aa, Artificial Sequence
  Description of Artificial Sequence: Synthetic peptide
  Seed: EWLKTRPILSPLTKG
EWWKTHPFLSVLTKG

SEQ ID NO: 205738 - protein, 15 aa, Artificial Sequence
  Description of Artificial Sequence: Synthetic peptide
  Seed: EWLKTRPILSPLTKG
EWWKTHPFLSYLTKG

SEQ ID NO: 205739 - protein, 15 aa, Artificial Sequence
  Description of Artificial Sequence: Synthetic peptide
  Seed: EWLKTRPILSPLTKG
EWWKTHPLLSILTKG

SEQ ID NO: 205740 - protein, 15 aa, Artificial Sequence
  Description of Artificial Sequence: Synthetic peptide
  Seed: EWLKTRPILSPLTKG
EWWKTHPLLSLLTKG

SEQ ID NO: 205741 - protein, 15 aa, Artificial Sequence
  Description of Artificial Sequence: Synthetic peptide
  Seed: EWLKTRPILSPLTKG
EWWKTHPLLSVLTKG

SEQ ID NO: 205742 - protein, 15 aa, Artificial Sequence
  Description of Artificial Sequence: Synthetic peptide
  Seed: EWLKTRPILSPLTKG
EWWKTIPFLSALTKG

SEQ ID NO: 205743 - protein, 15 aa, Artificial Sequence
  Description of Artificial Sequence: Synthetic peptide
  Seed: EWLKTRPILSPLTKG
EWWKTIPFLSDLTKG

SEQ ID NO: 205744 - protein, 15 aa, Artificial Sequence
  Description of Artificial Sequence: Synthetic peptide
  Seed: EWLKTRPILSPLTKG
EWWKTIPFLSELTKG

SEQ ID NO: 205745 - protein, 15 aa, Artificial Sequence
  Description of Artificial Sequence: Synthetic peptide
  Seed: EWLKTRPILSPLTKG
EWWKTIPFLSFLTKG

SEQ ID NO: 205746 - protein, 15 aa, Artificial Sequence
  Description of Artificial Sequence: Synthetic peptide
  Seed: EWLKTRPILSPLTKG
EWWKTIPFLSILTKG

SEQ ID NO: 205747 - protein, 15 aa, Artificial Sequence
  Description of Artificial Sequence: Synthetic peptide
  Seed: EWLKTRPILSPLTKG
EWWKTIPFLSLLTKG

SEQ ID NO: 205748 - protein, 15 aa, Artificial Sequence
  Description of Artificial Sequence: Synthetic peptide
  Seed: EWLKTRPILSPLTKG
EWWKTIPFLSMLTKG

SEQ ID NO: 205749 - protein, 15 aa, Artificial Sequence
  Description of Artificial Sequence: Synthetic peptide
  Seed: EWLKTRPILSPLTKG
EWWKTIPFLSNLTKG

SEQ ID NO: 205750 - protein, 15 aa, Artificial Sequence
  Description of Artificial Sequence: Synthetic peptide
  Seed: EWLKTRPILSPLTKG
EWWKTIPFLSSLTKG

SEQ ID NO: 205751 - protein, 15 aa, Artificial Sequence
  Description of Artificial Sequence: Synthetic peptide
  Seed: EWLKTRPILSPLTKG
EWWKTIPFLSTLTKG

SEQ ID NO: 205752 - protein, 15 aa, Artificial Sequence
  Description of Artificial Sequence: Synthetic peptide
  Seed: EWLKTRPILSPLTKG
EWWKTIPFLSVLTKG

SEQ ID NO: 205753 - protein, 15 aa, Artificial Sequence
  Description of Artificial Sequence: Synthetic peptide
  Seed: EWLKTRPILSPLTKG
EWWKTIPFLSYLTKG

SEQ ID NO: 205754 - protein, 15 aa, Artificial Sequence
  Description of Artificial Sequence: Synthetic peptide
  Seed: EWLKTRPILSPLTKG
EWWKTIPILSILTKG

SEQ ID NO: 205755 - protein, 15 aa, Artificial Sequence
  Description of Artificial Sequence: Synthetic peptide
  Seed: EWLKTRPILSPLTKG
EWWKTIPLLSILTKG

SEQ ID NO: 205756 - protein, 15 aa, Artificial Sequence
  Description of Artificial Sequence: Synthetic peptide
  Seed: EWLKTRPILSPLTKG
EWWKTIPLLSLLTKG

SEQ ID NO: 205757 - protein, 15 aa, Artificial Sequence
  Description of Artificial Sequence: Synthetic peptide
  Seed: EWLKTRPILSPLTKG
EWWKTIPLLSVLTKG

SEQ ID NO: 205758 - protein, 15 aa, Artificial Sequence
  Description of Artificial Sequence: Synthetic peptide
  Seed: EWLKTRPILSPLTKG
EWWKTIPMLSILTKG

SEQ ID NO: 205759 - protein, 15 aa, Artificial Sequence
  Description of Artificial Sequence: Synthetic peptide
  Seed: EWLKTRPILSPLTKG
EWWKTIPMLSLLTKG

SEQ ID NO: 205760 - protein, 15 aa, Artificial Sequence
  Description of Artificial Sequence: Synthetic peptide
  Seed: EWLKTRPILSPLTKG
EWWKTIPRLSALTKG

SEQ ID NO: 205761 - protein, 15 aa, Artificial Sequence
  Description of Artificial Sequence: Synthetic peptide
  Seed: EWLKTRPILSPLTKG
EWWKTIPRLSSLTKG

SEQ ID NO: 205762 - protein, 15 aa, Artificial Sequence
  Description of Artificial Sequence: Synthetic peptide
  Seed: EWLKTRPILSPLTKG
EWWKTIPWLSILTKG

SEQ ID NO: 205763 - protein, 15 aa, Artificial Sequence
  Description of Artificial Sequence: Synthetic peptide
  Seed: EWLKTRPILSPLTKG
EWWKTIPWLSLLTKG

SEQ ID NO: 205764 - protein, 15 aa, Artificial Sequence
  Description of Artificial Sequence: Synthetic peptide
  Seed: EWLKTRPILSPLTKG
EWWKTIPWLSVLTKG

SEQ ID NO: 205765 - protein, 15 aa, Artificial Sequence
  Description of Artificial Sequence: Synthetic peptide
  Seed: EWLKTRPILSPLTKG
EWWKTIPYLSFLTKG

SEQ ID NO: 205766 - protein, 15 aa, Artificial Sequence
  Description of Artificial Sequence: Synthetic peptide
  Seed: EWLKTRPILSPLTKG
EWWKTIPYLSILTKG

SEQ ID NO: 205767 - protein, 15 aa, Artificial Sequence
  Description of Artificial Sequence: Synthetic peptide
  Seed: EWLKTRPILSPLTKG
EWWKTIPYLSLLTKG

SEQ ID NO: 205768 - protein, 15 aa, Artificial Sequence
  Description of Artificial Sequence: Synthetic peptide
  Seed: EWLKTRPILSPLTKG
EWWKTIPYLSVLTKG

SEQ ID NO: 205769 - protein, 15 aa, Artificial Sequence
  Description of Artificial Sequence: Synthetic peptide
  Seed: EWLKTRPILSPLTKG
EWWKTKPFLSILTKG

SEQ ID NO: 205770 - protein, 15 aa, Artificial Sequence
  Description of Artificial Sequence: Synthetic peptide
  Seed: EWLKTRPILSPLTKG
EWWKTKPFLSLLTKG

SEQ ID NO: 205771 - protein, 15 aa, Artificial Sequence
  Description of Artificial Sequence: Synthetic peptide
  Seed: EWLKTRPILSPLTKG
EWWKTKPFLSVLTKG

SEQ ID NO: 205772 - protein, 15 aa, Artificial Sequence
  Description of Artificial Sequence: Synthetic peptide
  Seed: EWLKTRPILSPLTKG
EWWKTLPFLSALTKG

SEQ ID NO: 205773 - protein, 15 aa, Artificial Sequence
  Description of Artificial Sequence: Synthetic peptide
  Seed: EWLKTRPILSPLTKG
EWWKTLPFLSELTKG

SEQ ID NO: 205774 - protein, 15 aa, Artificial Sequence
  Description of Artificial Sequence: Synthetic peptide
  Seed: EWLKTRPILSPLTKG
EWWKTLPFLSFLTKG

SEQ ID NO: 205775 - protein, 15 aa, Artificial Sequence
  Description of Artificial Sequence: Synthetic peptide
  Seed: EWLKTRPILSPLTKG
EWWKTLPFLSILTKG

SEQ ID NO: 205776 - protein, 15 aa, Artificial Sequence
  Description of Artificial Sequence: Synthetic peptide
  Seed: EWLKTRPILSPLTKG
EWWKTLPFLSLLTKG

SEQ ID NO: 205777 - protein, 15 aa, Artificial Sequence
  Description of Artificial Sequence: Synthetic peptide
  Seed: EWLKTRPILSPLTKG
EWWKTLPFLSMLTKG

SEQ ID NO: 205778 - protein, 15 aa, Artificial Sequence
  Description of Artificial Sequence: Synthetic peptide
  Seed: EWLKTRPILSPLTKG
EWWKTLPFLSNLTKG

SEQ ID NO: 205779 - protein, 15 aa, Artificial Sequence
  Description of Artificial Sequence: Synthetic peptide
  Seed: EWLKTRPILSPLTKG
EWWKTLPFLSSLTKG

SEQ ID NO: 205780 - protein, 15 aa, Artificial Sequence
  Description of Artificial Sequence: Synthetic peptide
  Seed: EWLKTRPILSPLTKG
EWWKTLPFLSTLTKG

SEQ ID NO: 205781 - protein, 15 aa, Artificial Sequence
  Description of Artificial Sequence: Synthetic peptide
  Seed: EWLKTRPILSPLTKG
EWWKTLPFLSVLTKG

SEQ ID NO: 205782 - protein, 15 aa, Artificial Sequence
  Description of Artificial Sequence: Synthetic peptide
  Seed: EWLKTRPILSPLTKG
EWWKTLPFLSYLTKG

SEQ ID NO: 205783 - protein, 15 aa, Artificial Sequence
  Description of Artificial Sequence: Synthetic peptide
  Seed: EWLKTRPILSPLTKG
EWWKTLPLLSILTKG

SEQ ID NO: 205784 - protein, 15 aa, Artificial Sequence
  Description of Artificial Sequence: Synthetic peptide
  Seed: EWLKTRPILSPLTKG
EWWKTLPLLSLLTKG

SEQ ID NO: 205785 - protein, 15 aa, Artificial Sequence
  Description of Artificial Sequence: Synthetic peptide
  Seed: EWLKTRPILSPLTKG
EWWKTLPLLSVLTKG

SEQ ID NO: 205786 - protein, 15 aa, Artificial Sequence
  Description of Artificial Sequence: Synthetic peptide
  Seed: EWLKTRPILSPLTKG
EWWKTLPRLSALTKG

SEQ ID NO: 205787 - protein, 15 aa, Artificial Sequence
  Description of Artificial Sequence: Synthetic peptide
  Seed: EWLKTRPILSPLTKG
EWWKTLPRLSSLTKG

SEQ ID NO: 205788 - protein, 15 aa, Artificial Sequence
  Description of Artificial Sequence: Synthetic peptide
  Seed: EWLKTRPILSPLTKG
EWWKTLPWLSLLTKG

SEQ ID NO: 205789 - protein, 15 aa, Artificial Sequence
  Description of Artificial Sequence: Synthetic peptide
  Seed: EWLKTRPILSPLTKG
EWWKTLPWLSVLTKG

SEQ ID NO: 205790 - protein, 15 aa, Artificial Sequence
  Description of Artificial Sequence: Synthetic peptide
  Seed: EWLKTRPILSPLTKG
EWWKTLPYLSILTKG

SEQ ID NO: 205791 - protein, 15 aa, Artificial Sequence
  Description of Artificial Sequence: Synthetic peptide
  Seed: EWLKTRPILSPLTKG
EWWKTLPYLSLLTKG

SEQ ID NO: 205792 - protein, 15 aa, Artificial Sequence
  Description of Artificial Sequence: Synthetic peptide
  Seed: EWLKTRPILSPLTKG
EWWKTLPYLSVLTKG

SEQ ID NO: 205793 - protein, 15 aa, Artificial Sequence
  Description of Artificial Sequence: Synthetic peptide
  Seed: EWLKTRPILSPLTKG
EWWKTMPFLSALTKG

SEQ ID NO: 205794 - protein, 15 aa, Artificial Sequence
  Description of Artificial Sequence: Synthetic peptide
  Seed: EWLKTRPILSPLTKG
EWWKTMPFLSFLTKG

SEQ ID NO: 205795 - protein, 15 aa, Artificial Sequence
  Description of Artificial Sequence: Synthetic peptide
  Seed: EWLKTRPILSPLTKG
EWWKTMPFLSILTKG

SEQ ID NO: 205796 - protein, 15 aa, Artificial Sequence
  Description of Artificial Sequence: Synthetic peptide
  Seed: EWLKTRPILSPLTKG
EWWKTMPFLSLLTKG

SEQ ID NO: 205797 - protein, 15 aa, Artificial Sequence
  Description of Artificial Sequence: Synthetic peptide
  Seed: EWLKTRPILSPLTKG
EWWKTMPFLSMLTKG

SEQ ID NO: 205798 - protein, 15 aa, Artificial Sequence
  Description of Artificial Sequence: Synthetic peptide
  Seed: EWLKTRPILSPLTKG
EWWKTMPFLSTLTKG

SEQ ID NO: 205799 - protein, 15 aa, Artificial Sequence
  Description of Artificial Sequence: Synthetic peptide
  Seed: EWLKTRPILSPLTKG
EWWKTMPFLSVLTKG

SEQ ID NO: 205800 - protein, 15 aa, Artificial Sequence
  Description of Artificial Sequence: Synthetic peptide
  Seed: EWLKTRPILSPLTKG
EWWKTMPFLSYLTKG

SEQ ID NO: 205801 - protein, 15 aa, Artificial Sequence
  Description of Artificial Sequence: Synthetic peptide
  Seed: EWLKTRPILSPLTKG
EWWKTMPRLSALTKG

SEQ ID NO: 205802 - protein, 15 aa, Artificial Sequence
  Description of Artificial Sequence: Synthetic peptide
  Seed: EWLKTRPILSPLTKG
EWWKTMPRLSSLTKG

SEQ ID NO: 205803 - protein, 15 aa, Artificial Sequence
  Description of Artificial Sequence: Synthetic peptide
  Seed: EWLKTRPILSPLTKG
EWWKTMPYLSILTKG

SEQ ID NO: 205804 - protein, 15 aa, Artificial Sequence
  Description of Artificial Sequence: Synthetic peptide
  Seed: EWLKTRPILSPLTKG
EWWKTMPYLSLLTKG

SEQ ID NO: 205805 - protein, 15 aa, Artificial Sequence
  Description of Artificial Sequence: Synthetic peptide
  Seed: EWLKTRPILSPLTKG
EWWKTMPYLSVLTKG

SEQ ID NO: 205806 - protein, 15 aa, Artificial Sequence
  Description of Artificial Sequence: Synthetic peptide
  Seed: EWLKTRPILSPLTKG
EWWKTNPFLSILTKG

SEQ ID NO: 205807 - protein, 15 aa, Artificial Sequence
  Description of Artificial Sequence: Synthetic peptide
  Seed: EWLKTRPILSPLTKG
EWWKTNPFLSLLTKG

SEQ ID NO: 205808 - protein, 15 aa, Artificial Sequence
  Description of Artificial Sequence: Synthetic peptide
  Seed: EWLKTRPILSPLTKG
EWWKTNPFLSVLTKG

SEQ ID NO: 205809 - protein, 15 aa, Artificial Sequence
  Description of Artificial Sequence: Synthetic peptide
  Seed: EWLKTRPILSPLTKG
EWWKTQPFLSFLTKG

SEQ ID NO: 205810 - protein, 15 aa, Artificial Sequence
  Description of Artificial Sequence: Synthetic peptide
  Seed: EWLKTRPILSPLTKG
EWWKTQPFLSILTKG

SEQ ID NO: 205811 - protein, 15 aa, Artificial Sequence
  Description of Artificial Sequence: Synthetic peptide
  Seed: EWLKTRPILSPLTKG
EWWKTQPFLSLLTKG

SEQ ID NO: 205812 - protein, 15 aa, Artificial Sequence
  Description of Artificial Sequence: Synthetic peptide
  Seed: EWLKTRPILSPLTKG
EWWKTQPFLSMLTKG

SEQ ID NO: 205813 - protein, 15 aa, Artificial Sequence
  Description of Artificial Sequence: Synthetic peptide
  Seed: EWLKTRPILSPLTKG
EWWKTQPFLSVLTKG

SEQ ID NO: 205814 - protein, 15 aa, Artificial Sequence
  Description of Artificial Sequence: Synthetic peptide
  Seed: EWLKTRPILSPLTKG
EWWKTRPFLSILTKG

SEQ ID NO: 205815 - protein, 15 aa, Artificial Sequence
  Description of Artificial Sequence: Synthetic peptide
  Seed: EWLKTRPILSPLTKG
EWWKTRPFLSLLTKG

SEQ ID NO: 205816 - protein, 15 aa, Artificial Sequence
  Description of Artificial Sequence: Synthetic peptide
  Seed: EWLKTRPILSPLTKG
EWWKTSPFLSALTKG

SEQ ID NO: 205817 - protein, 15 aa, Artificial Sequence
  Description of Artificial Sequence: Synthetic peptide
  Seed: EWLKTRPILSPLTKG
EWWKTSPFLSFLTKG

SEQ ID NO: 205818 - protein, 15 aa, Artificial Sequence
  Description of Artificial Sequence: Synthetic peptide
  Seed: EWLKTRPILSPLTKG
EWWKTSPFLSILTKG

SEQ ID NO: 205819 - protein, 15 aa, Artificial Sequence
  Description of Artificial Sequence: Synthetic peptide
  Seed: EWLKTRPILSPLTKG
EWWKTSPFLSLLTKG

SEQ ID NO: 205820 - protein, 15 aa, Artificial Sequence
  Description of Artificial Sequence: Synthetic peptide
  Seed: EWLKTRPILSPLTKG
EWWKTSPFLSMLTKG

SEQ ID NO: 205821 - protein, 15 aa, Artificial Sequence
  Description of Artificial Sequence: Synthetic peptide
  Seed: EWLKTRPILSPLTKG
EWWKTSPFLSSLTKG

SEQ ID NO: 205822 - protein, 15 aa, Artificial Sequence
  Description of Artificial Sequence: Synthetic peptide
  Seed: EWLKTRPILSPLTKG
EWWKTSPFLSTLTKG

SEQ ID NO: 205823 - protein, 15 aa, Artificial Sequence
  Description of Artificial Sequence: Synthetic peptide
  Seed: EWLKTRPILSPLTKG
EWWKTSPFLSVLTKG

SEQ ID NO: 205824 - protein, 15 aa, Artificial Sequence
  Description of Artificial Sequence: Synthetic peptide
  Seed: EWLKTRPILSPLTKG
EWWKTSPFLSYLTKG

SEQ ID NO: 205825 - protein, 15 aa, Artificial Sequence
  Description of Artificial Sequence: Synthetic peptide
  Seed: EWLKTRPILSPLTKG
EWWKTSPLLSLLTKG

SEQ ID NO: 205826 - protein, 15 aa, Artificial Sequence
  Description of Artificial Sequence: Synthetic peptide
  Seed: EWLKTRPILSPLTKG
EWWKTSPYLSILTKG

SEQ ID NO: 205827 - protein, 15 aa, Artificial Sequence
  Description of Artificial Sequence: Synthetic peptide
  Seed: EWLKTRPILSPLTKG
EWWKTSPYLSLLTKG

SEQ ID NO: 205828 - protein, 15 aa, Artificial Sequence
  Description of Artificial Sequence: Synthetic peptide
  Seed: EWLKTRPILSPLTKG
EWWKTTPFLSALTKG

SEQ ID NO: 205829 - protein, 15 aa, Artificial Sequence
  Description of Artificial Sequence: Synthetic peptide
  Seed: EWLKTRPILSPLTKG
EWWKTTPFLSELTKG

SEQ ID NO: 205830 - protein, 15 aa, Artificial Sequence
  Description of Artificial Sequence: Synthetic peptide
  Seed: EWLKTRPILSPLTKG
EWWKTTPFLSFLTKG

SEQ ID NO: 205831 - protein, 15 aa, Artificial Sequence
  Description of Artificial Sequence: Synthetic peptide
  Seed: EWLKTRPILSPLTKG
EWWKTTPFLSILTKG

SEQ ID NO: 205832 - protein, 15 aa, Artificial Sequence
  Description of Artificial Sequence: Synthetic peptide
  Seed: EWLKTRPILSPLTKG
EWWKTTPFLSLLTKG

SEQ ID NO: 205833 - protein, 15 aa, Artificial Sequence
  Description of Artificial Sequence: Synthetic peptide
  Seed: EWLKTRPILSPLTKG
EWWKTTPFLSMLTKG

SEQ ID NO: 205834 - protein, 15 aa, Artificial Sequence
  Description of Artificial Sequence: Synthetic peptide
  Seed: EWLKTRPILSPLTKG
EWWKTTPFLSNLTKG

SEQ ID NO: 205835 - protein, 15 aa, Artificial Sequence
  Description of Artificial Sequence: Synthetic peptide
  Seed: EWLKTRPILSPLTKG
EWWKTTPFLSSLTKG

SEQ ID NO: 205836 - protein, 15 aa, Artificial Sequence
  Description of Artificial Sequence: Synthetic peptide
  Seed: EWLKTRPILSPLTKG
EWWKTTPFLSTLTKG

SEQ ID NO: 205837 - protein, 15 aa, Artificial Sequence
  Description of Artificial Sequence: Synthetic peptide
  Seed: EWLKTRPILSPLTKG
EWWKTTPFLSVLTKG

SEQ ID NO: 205838 - protein, 15 aa, Artificial Sequence
  Description of Artificial Sequence: Synthetic peptide
  Seed: EWLKTRPILSPLTKG
EWWKTTPFLSYLTKG

SEQ ID NO: 205839 - protein, 15 aa, Artificial Sequence
  Description of Artificial Sequence: Synthetic peptide
  Seed: EWLKTRPILSPLTKG
EWWKTTPLLSILTKG

SEQ ID NO: 205840 - protein, 15 aa, Artificial Sequence
  Description of Artificial Sequence: Synthetic peptide
  Seed: EWLKTRPILSPLTKG
EWWKTTPLLSLLTKG

SEQ ID NO: 205841 - protein, 15 aa, Artificial Sequence
  Description of Artificial Sequence: Synthetic peptide
  Seed: EWLKTRPILSPLTKG
EWWKTTPLLSVLTKG

SEQ ID NO: 205842 - protein, 15 aa, Artificial Sequence
  Description of Artificial Sequence: Synthetic peptide
  Seed: EWLKTRPILSPLTKG
EWWKTTPWLSILTKG

SEQ ID NO: 205843 - protein, 15 aa, Artificial Sequence
  Description of Artificial Sequence: Synthetic peptide
  Seed: EWLKTRPILSPLTKG
EWWKTTPWLSLLTKG

SEQ ID NO: 205844 - protein, 15 aa, Artificial Sequence
  Description of Artificial Sequence: Synthetic peptide
  Seed: EWLKTRPILSPLTKG
EWWKTTPWLSVLTKG

SEQ ID NO: 205845 - protein, 15 aa, Artificial Sequence
  Description of Artificial Sequence: Synthetic peptide
  Seed: EWLKTRPILSPLTKG
EWWKTTPYLSILTKG

SEQ ID NO: 205846 - protein, 15 aa, Artificial Sequence
  Description of Artificial Sequence: Synthetic peptide
  Seed: EWLKTRPILSPLTKG
EWWKTTPYLSLLTKG

SEQ ID NO: 205847 - protein, 15 aa, Artificial Sequence
  Description of Artificial Sequence: Synthetic peptide
  Seed: EWLKTRPILSPLTKG
EWWKTTPYLSVLTKG

SEQ ID NO: 205848 - protein, 15 aa, Artificial Sequence
  Description of Artificial Sequence: Synthetic peptide
  Seed: EWLKTRPILSPLTKG
EWWKTVPFLSALTKG

SEQ ID NO: 205849 - protein, 15 aa, Artificial Sequence
  Description of Artificial Sequence: Synthetic peptide
  Seed: EWLKTRPILSPLTKG
EWWKTVPFLSDLTKG

SEQ ID NO: 205850 - protein, 15 aa, Artificial Sequence
  Description of Artificial Sequence: Synthetic peptide
  Seed: EWLKTRPILSPLTKG
EWWKTVPFLSELTKG

SEQ ID NO: 205851 - protein, 15 aa, Artificial Sequence
  Description of Artificial Sequence: Synthetic peptide
  Seed: EWLKTRPILSPLTKG
EWWKTVPFLSFLTKG

SEQ ID NO: 205852 - protein, 15 aa, Artificial Sequence
  Description of Artificial Sequence: Synthetic peptide
  Seed: EWLKTRPILSPLTKG
EWWKTVPFLSILTKG

SEQ ID NO: 205853 - protein, 15 aa, Artificial Sequence
  Description of Artificial Sequence: Synthetic peptide
  Seed: EWLKTRPILSPLTKG
EWWKTVPFLSLLTKG

SEQ ID NO: 205854 - protein, 15 aa, Artificial Sequence
  Description of Artificial Sequence: Synthetic peptide
  Seed: EWLKTRPILSPLTKG
EWWKTVPFLSMLTKG

SEQ ID NO: 205855 - protein, 15 aa, Artificial Sequence
  Description of Artificial Sequence: Synthetic peptide
  Seed: EWLKTRPILSPLTKG
EWWKTVPFLSNLTKG

SEQ ID NO: 205856 - protein, 15 aa, Artificial Sequence
  Description of Artificial Sequence: Synthetic peptide
  Seed: EWLKTRPILSPLTKG
EWWKTVPFLSSLTKG

SEQ ID NO: 205857 - protein, 15 aa, Artificial Sequence
  Description of Artificial Sequence: Synthetic peptide
  Seed: EWLKTRPILSPLTKG
EWWKTVPFLSTLTKG

SEQ ID NO: 205858 - protein, 15 aa, Artificial Sequence
  Description of Artificial Sequence: Synthetic peptide
  Seed: EWLKTRPILSPLTKG
EWWKTVPFLSVLTKG

SEQ ID NO: 205859 - protein, 15 aa, Artificial Sequence
  Description of Artificial Sequence: Synthetic peptide
  Seed: EWLKTRPILSPLTKG
EWWKTVPFLSYLTKG

SEQ ID NO: 205860 - protein, 15 aa, Artificial Sequence
  Description of Artificial Sequence: Synthetic peptide
  Seed: EWLKTRPILSPLTKG
EWWKTVPLLSILTKG

SEQ ID NO: 205861 - protein, 15 aa, Artificial Sequence
  Description of Artificial Sequence: Synthetic peptide
  Seed: EWLKTRPILSPLTKG
EWWKTVPLLSLLTKG

SEQ ID NO: 205862 - protein, 15 aa, Artificial Sequence
  Description of Artificial Sequence: Synthetic peptide
  Seed: EWLKTRPILSPLTKG
EWWKTVPLLSVLTKG

SEQ ID NO: 205863 - protein, 15 aa, Artificial Sequence
  Description of Artificial Sequence: Synthetic peptide
  Seed: EWLKTRPILSPLTKG
EWWKTVPWLSILTKG

SEQ ID NO: 205864 - protein, 15 aa, Artificial Sequence
  Description of Artificial Sequence: Synthetic peptide
  Seed: EWLKTRPILSPLTKG
EWWKTVPWLSLLTKG

SEQ ID NO: 205865 - protein, 15 aa, Artificial Sequence
  Description of Artificial Sequence: Synthetic peptide
  Seed: EWLKTRPILSPLTKG
EWWKTVPWLSVLTKG

SEQ ID NO: 205866 - protein, 15 aa, Artificial Sequence
  Description of Artificial Sequence: Synthetic peptide
  Seed: EWLKTRPILSPLTKG
EWWKTVPYLSILTKG

SEQ ID NO: 205867 - protein, 15 aa, Artificial Sequence
  Description of Artificial Sequence: Synthetic peptide
  Seed: EWLKTRPILSPLTKG
EWWKTVPYLSLLTKG

SEQ ID NO: 205868 - protein, 15 aa, Artificial Sequence
  Description of Artificial Sequence: Synthetic peptide
  Seed: EWLKTRPILSPLTKG
EWWKTVPYLSVLTKG

SEQ ID NO: 205869 - protein, 15 aa, Artificial Sequence
  Description of Artificial Sequence: Synthetic peptide
  Seed: EWLKTRPILSPLTKG
EWWKTWPFLSFLTKG

SEQ ID NO: 205870 - protein, 15 aa, Artificial Sequence
  Description of Artificial Sequence: Synthetic peptide
  Seed: EWLKTRPILSPLTKG
EWWKTWPFLSILTKG

SEQ ID NO: 205871 - protein, 15 aa, Artificial Sequence
  Description of Artificial Sequence: Synthetic peptide
  Seed: EWLKTRPILSPLTKG
EWWKTWPFLSLLTKG

SEQ ID NO: 205872 - protein, 15 aa, Artificial Sequence
  Description of Artificial Sequence: Synthetic peptide
  Seed: EWLKTRPILSPLTKG
EWWKTWPFLSMLTKG

SEQ ID NO: 205873 - protein, 15 aa, Artificial Sequence
  Description of Artificial Sequence: Synthetic peptide
  Seed: EWLKTRPILSPLTKG
EWWKTWPFLSVLTKG

SEQ ID NO: 205874 - protein, 15 aa, Artificial Sequence
  Description of Artificial Sequence: Synthetic peptide
  Seed: EWLKTRPILSPLTKG
EWWKTYPFLSFLTKG

SEQ ID NO: 205875 - protein, 15 aa, Artificial Sequence
  Description of Artificial Sequence: Synthetic peptide
  Seed: EWLKTRPILSPLTKG
EWWKTYPFLSILTKG

SEQ ID NO: 205876 - protein, 15 aa, Artificial Sequence
  Description of Artificial Sequence: Synthetic peptide
  Seed: EWLKTRPILSPLTKG
EWWKTYPFLSLLTKG

SEQ ID NO: 205877 - protein, 15 aa, Artificial Sequence
  Description of Artificial Sequence: Synthetic peptide
  Seed: EWLKTRPILSPLTKG
EWWKTYPFLSMLTKG

SEQ ID NO: 205878 - protein, 15 aa, Artificial Sequence
  Description of Artificial Sequence: Synthetic peptide
  Seed: EWLKTRPILSPLTKG
EWWKTYPFLSVLTKG

SEQ ID NO: 205879 - protein, 15 aa, Artificial Sequence
  Description of Artificial Sequence: Synthetic peptide
  Seed: EWLKTRPILSPLTKG
EWWKTYPLLSILTKG

SEQ ID NO: 205880 - protein, 15 aa, Artificial Sequence
  Description of Artificial Sequence: Synthetic peptide
  Seed: EWLKTRPILSPLTKG
EWWKTYPLLSLLTKG

SEQ ID NO: 205881 - protein, 15 aa, Artificial Sequence
  Description of Artificial Sequence: Synthetic peptide
  Seed: EWLKTRPILSPLTKG
EWWKTYPLLSVLTKG

SEQ ID NO: 205882 - protein, 15 aa, Artificial Sequence
  Description of Artificial Sequence: Synthetic peptide
  Seed: EWLKTRPILSPLTKG
EWYKTAPFLSALTKG

SEQ ID NO: 205883 - protein, 15 aa, Artificial Sequence
  Description of Artificial Sequence: Synthetic peptide
  Seed: EWLKTRPILSPLTKG
EWYKTAPFLSFLTKG

SEQ ID NO: 205884 - protein, 15 aa, Artificial Sequence
  Description of Artificial Sequence: Synthetic peptide
  Seed: EWLKTRPILSPLTKG
EWYKTAPFLSILTKG

SEQ ID NO: 205885 - protein, 15 aa, Artificial Sequence
  Description of Artificial Sequence: Synthetic peptide
  Seed: EWLKTRPILSPLTKG
EWYKTAPFLSLLTKG

SEQ ID NO: 205886 - protein, 15 aa, Artificial Sequence
  Description of Artificial Sequence: Synthetic peptide
  Seed: EWLKTRPILSPLTKG
EWYKTAPFLSMLTKG

SEQ ID NO: 205887 - protein, 15 aa, Artificial Sequence
  Description of Artificial Sequence: Synthetic peptide
  Seed: EWLKTRPILSPLTKG
EWYKTAPFLSNLTKG

SEQ ID NO: 205888 - protein, 15 aa, Artificial Sequence
  Description of Artificial Sequence: Synthetic peptide
  Seed: EWLKTRPILSPLTKG
EWYKTAPFLSSLTKG

SEQ ID NO: 205889 - protein, 15 aa, Artificial Sequence
  Description of Artificial Sequence: Synthetic peptide
  Seed: EWLKTRPILSPLTKG
EWYKTAPFLSTLTKG

SEQ ID NO: 205890 - protein, 15 aa, Artificial Sequence
  Description of Artificial Sequence: Synthetic peptide
  Seed: EWLKTRPILSPLTKG
EWYKTAPFLSVLTKG

SEQ ID NO: 205891 - protein, 15 aa, Artificial Sequence
  Description of Artificial Sequence: Synthetic peptide
  Seed: EWLKTRPILSPLTKG
EWYKTAPFLSYLTKG

SEQ ID NO: 205892 - protein, 15 aa, Artificial Sequence
  Description of Artificial Sequence: Synthetic peptide
  Seed: EWLKTRPILSPLTKG
EWYKTAPLLSILTKG

SEQ ID NO: 205893 - protein, 15 aa, Artificial Sequence
  Description of Artificial Sequence: Synthetic peptide
  Seed: EWLKTRPILSPLTKG
EWYKTAPLLSLLTKG

SEQ ID NO: 205894 - protein, 15 aa, Artificial Sequence
  Description of Artificial Sequence: Synthetic peptide
  Seed: EWLKTRPILSPLTKG
EWYKTAPLLSVLTKG

SEQ ID NO: 205895 - protein, 15 aa, Artificial Sequence
  Description of Artificial Sequence: Synthetic peptide
  Seed: EWLKTRPILSPLTKG
EWYKTAPWLSILTKG

SEQ ID NO: 205896 - protein, 15 aa, Artificial Sequence
  Description of Artificial Sequence: Synthetic peptide
  Seed: EWLKTRPILSPLTKG
EWYKTAPWLSLLTKG

SEQ ID NO: 205897 - protein, 15 aa, Artificial Sequence
  Description of Artificial Sequence: Synthetic peptide
  Seed: EWLKTRPILSPLTKG
EWYKTAPWLSVLTKG

SEQ ID NO: 205898 - protein, 15 aa, Artificial Sequence
  Description of Artificial Sequence: Synthetic peptide
  Seed: EWLKTRPILSPLTKG
EWYKTAPYLSILTKG

SEQ ID NO: 205899 - protein, 15 aa, Artificial Sequence
  Description of Artificial Sequence: Synthetic peptide
  Seed: EWLKTRPILSPLTKG
EWYKTAPYLSLLTKG

SEQ ID NO: 205900 - protein, 15 aa, Artificial Sequence
  Description of Artificial Sequence: Synthetic peptide
  Seed: EWLKTRPILSPLTKG
EWYKTAPYLSVLTKG

SEQ ID NO: 205901 - protein, 15 aa, Artificial Sequence
  Description of Artificial Sequence: Synthetic peptide
  Seed: EWLKTRPILSPLTKG
EWYKTCPFLSILTKG

SEQ ID NO: 205902 - protein, 15 aa, Artificial Sequence
  Description of Artificial Sequence: Synthetic peptide
  Seed: EWLKTRPILSPLTKG
EWYKTCPFLSLLTKG

SEQ ID NO: 205903 - protein, 15 aa, Artificial Sequence
  Description of Artificial Sequence: Synthetic peptide
  Seed: EWLKTRPILSPLTKG
EWYKTCPFLSVLTKG

SEQ ID NO: 205904 - protein, 15 aa, Artificial Sequence
  Description of Artificial Sequence: Synthetic peptide
  Seed: EWLKTRPILSPLTKG
EWYKTEPFLSALTKG

SEQ ID NO: 205905 - protein, 15 aa, Artificial Sequence
  Description of Artificial Sequence: Synthetic peptide
  Seed: EWLKTRPILSPLTKG
EWYKTEPFLSFLTKG

SEQ ID NO: 205906 - protein, 15 aa, Artificial Sequence
  Description of Artificial Sequence: Synthetic peptide
  Seed: EWLKTRPILSPLTKG
EWYKTEPFLSILTKG

SEQ ID NO: 205907 - protein, 15 aa, Artificial Sequence
  Description of Artificial Sequence: Synthetic peptide
  Seed: EWLKTRPILSPLTKG
EWYKTEPFLSLLTKG

SEQ ID NO: 205908 - protein, 15 aa, Artificial Sequence
  Description of Artificial Sequence: Synthetic peptide
  Seed: EWLKTRPILSPLTKG
EWYKTEPFLSMLTKG

SEQ ID NO: 205909 - protein, 15 aa, Artificial Sequence
  Description of Artificial Sequence: Synthetic peptide
  Seed: EWLKTRPILSPLTKG
EWYKTEPFLSTLTKG

SEQ ID NO: 205910 - protein, 15 aa, Artificial Sequence
  Description of Artificial Sequence: Synthetic peptide
  Seed: EWLKTRPILSPLTKG
EWYKTEPFLSVLTKG

SEQ ID NO: 205911 - protein, 15 aa, Artificial Sequence
  Description of Artificial Sequence: Synthetic peptide
  Seed: EWLKTRPILSPLTKG
EWYKTEPFLSYLTKG

SEQ ID NO: 205912 - protein, 15 aa, Artificial Sequence
  Description of Artificial Sequence: Synthetic peptide
  Seed: EWLKTRPILSPLTKG
EWYKTFPFLSALTKG

SEQ ID NO: 205913 - protein, 15 aa, Artificial Sequence
  Description of Artificial Sequence: Synthetic peptide
  Seed: EWLKTRPILSPLTKG
EWYKTFPFLSDLTKG

SEQ ID NO: 205914 - protein, 15 aa, Artificial Sequence
  Description of Artificial Sequence: Synthetic peptide
  Seed: EWLKTRPILSPLTKG
EWYKTFPFLSELTKG

SEQ ID NO: 205915 - protein, 15 aa, Artificial Sequence
  Description of Artificial Sequence: Synthetic peptide
  Seed: EWLKTRPILSPLTKG
EWYKTFPFLSFLTKG

SEQ ID NO: 205916 - protein, 15 aa, Artificial Sequence
  Description of Artificial Sequence: Synthetic peptide
  Seed: EWLKTRPILSPLTKG
EWYKTFPFLSILTKG

SEQ ID NO: 205917 - protein, 15 aa, Artificial Sequence
  Description of Artificial Sequence: Synthetic peptide
  Seed: EWLKTRPILSPLTKG
EWYKTFPFLSLLTKG

SEQ ID NO: 205918 - protein, 15 aa, Artificial Sequence
  Description of Artificial Sequence: Synthetic peptide
  Seed: EWLKTRPILSPLTKG
EWYKTFPFLSMLTKG

SEQ ID NO: 205919 - protein, 15 aa, Artificial Sequence
  Description of Artificial Sequence: Synthetic peptide
  Seed: EWLKTRPILSPLTKG
EWYKTFPFLSNLTKG

SEQ ID NO: 205920 - protein, 15 aa, Artificial Sequence
  Description of Artificial Sequence: Synthetic peptide
  Seed: EWLKTRPILSPLTKG
EWYKTFPFLSSLTKG

SEQ ID NO: 205921 - protein, 15 aa, Artificial Sequence
  Description of Artificial Sequence: Synthetic peptide
  Seed: EWLKTRPILSPLTKG
EWYKTFPFLSTLTKG

SEQ ID NO: 205922 - protein, 15 aa, Artificial Sequence
  Description of Artificial Sequence: Synthetic peptide
  Seed: EWLKTRPILSPLTKG
EWYKTFPFLSVLTKG

SEQ ID NO: 205923 - protein, 15 aa, Artificial Sequence
  Description of Artificial Sequence: Synthetic peptide
  Seed: EWLKTRPILSPLTKG
EWYKTFPFLSYLTKG

SEQ ID NO: 205924 - protein, 15 aa, Artificial Sequence
  Description of Artificial Sequence: Synthetic peptide
  Seed: EWLKTRPILSPLTKG
EWYKTFPILSFLTKG

SEQ ID NO: 205925 - protein, 15 aa, Artificial Sequence
  Description of Artificial Sequence: Synthetic peptide
  Seed: EWLKTRPILSPLTKG
EWYKTFPILSILTKG

SEQ ID NO: 205926 - protein, 15 aa, Artificial Sequence
  Description of Artificial Sequence: Synthetic peptide
  Seed: EWLKTRPILSPLTKG
EWYKTFPILSLLTKG

SEQ ID NO: 205927 - protein, 15 aa, Artificial Sequence
  Description of Artificial Sequence: Synthetic peptide
  Seed: EWLKTRPILSPLTKG
EWYKTFPILSMLTKG

SEQ ID NO: 205928 - protein, 15 aa, Artificial Sequence
  Description of Artificial Sequence: Synthetic peptide
  Seed: EWLKTRPILSPLTKG
EWYKTFPILSVLTKG

SEQ ID NO: 205929 - protein, 15 aa, Artificial Sequence
  Description of Artificial Sequence: Synthetic peptide
  Seed: EWLKTRPILSPLTKG
EWYKTFPLLSFLTKG

SEQ ID NO: 205930 - protein, 15 aa, Artificial Sequence
  Description of Artificial Sequence: Synthetic peptide
  Seed: EWLKTRPILSPLTKG
EWYKTFPLLSILTKG

SEQ ID NO: 205931 - protein, 15 aa, Artificial Sequence
  Description of Artificial Sequence: Synthetic peptide
  Seed: EWLKTRPILSPLTKG
EWYKTFPLLSLLTKG

SEQ ID NO: 205932 - protein, 15 aa, Artificial Sequence
  Description of Artificial Sequence: Synthetic peptide
  Seed: EWLKTRPILSPLTKG
EWYKTFPLLSMLTKG

SEQ ID NO: 205933 - protein, 15 aa, Artificial Sequence
  Description of Artificial Sequence: Synthetic peptide
  Seed: EWLKTRPILSPLTKG
EWYKTFPLLSVLTKG

SEQ ID NO: 205934 - protein, 15 aa, Artificial Sequence
  Description of Artificial Sequence: Synthetic peptide
  Seed: EWLKTRPILSPLTKG
EWYKTFPLLSYLTKG

SEQ ID NO: 205935 - protein, 15 aa, Artificial Sequence
  Description of Artificial Sequence: Synthetic peptide
  Seed: EWLKTRPILSPLTKG
EWYKTFPMLSFLTKG

SEQ ID NO: 205936 - protein, 15 aa, Artificial Sequence
  Description of Artificial Sequence: Synthetic peptide
  Seed: EWLKTRPILSPLTKG
EWYKTFPMLSILTKG

SEQ ID NO: 205937 - protein, 15 aa, Artificial Sequence
  Description of Artificial Sequence: Synthetic peptide
  Seed: EWLKTRPILSPLTKG
EWYKTFPMLSLLTKG

SEQ ID NO: 205938 - protein, 15 aa, Artificial Sequence
  Description of Artificial Sequence: Synthetic peptide
  Seed: EWLKTRPILSPLTKG
EWYKTFPMLSMLTKG

SEQ ID NO: 205939 - protein, 15 aa, Artificial Sequence
  Description of Artificial Sequence: Synthetic peptide
  Seed: EWLKTRPILSPLTKG
EWYKTFPMLSVLTKG

SEQ ID NO: 205940 - protein, 15 aa, Artificial Sequence
  Description of Artificial Sequence: Synthetic peptide
  Seed: EWLKTRPILSPLTKG
EWYKTFPVLSLLTKG

SEQ ID NO: 205941 - protein, 15 aa, Artificial Sequence
  Description of Artificial Sequence: Synthetic peptide
  Seed: EWLKTRPILSPLTKG
EWYKTFPWLSFLTKG

SEQ ID NO: 205942 - protein, 15 aa, Artificial Sequence
  Description of Artificial Sequence: Synthetic peptide
  Seed: EWLKTRPILSPLTKG
EWYKTFPWLSILTKG

SEQ ID NO: 205943 - protein, 15 aa, Artificial Sequence
  Description of Artificial Sequence: Synthetic peptide
  Seed: EWLKTRPILSPLTKG
EWYKTFPWLSLLTKG

SEQ ID NO: 205944 - protein, 15 aa, Artificial Sequence
  Description of Artificial Sequence: Synthetic peptide
  Seed: EWLKTRPILSPLTKG
EWYKTFPWLSMLTKG

SEQ ID NO: 205945 - protein, 15 aa, Artificial Sequence
  Description of Artificial Sequence: Synthetic peptide
  Seed: EWLKTRPILSPLTKG
EWYKTFPWLSVLTKG

SEQ ID NO: 205946 - protein, 15 aa, Artificial Sequence
  Description of Artificial Sequence: Synthetic peptide
  Seed: EWLKTRPILSPLTKG
EWYKTFPYLSFLTKG

SEQ ID NO: 205947 - protein, 15 aa, Artificial Sequence
  Description of Artificial Sequence: Synthetic peptide
  Seed: EWLKTRPILSPLTKG
EWYKTFPYLSILTKG

SEQ ID NO: 205948 - protein, 15 aa, Artificial Sequence
  Description of Artificial Sequence: Synthetic peptide
  Seed: EWLKTRPILSPLTKG
EWYKTFPYLSLLTKG

SEQ ID NO: 205949 - protein, 15 aa, Artificial Sequence
  Description of Artificial Sequence: Synthetic peptide
  Seed: EWLKTRPILSPLTKG
EWYKTFPYLSMLTKG

SEQ ID NO: 205950 - protein, 15 aa, Artificial Sequence
  Description of Artificial Sequence: Synthetic peptide
  Seed: EWLKTRPILSPLTKG
EWYKTFPYLSVLTKG

SEQ ID NO: 205951 - protein, 15 aa, Artificial Sequence
  Description of Artificial Sequence: Synthetic peptide
  Seed: EWLKTRPILSPLTKG
EWYKTGPFLSILTKG

SEQ ID NO: 205952 - protein, 15 aa, Artificial Sequence
  Description of Artificial Sequence: Synthetic peptide
  Seed: EWLKTRPILSPLTKG
EWYKTGPFLSLLTKG

SEQ ID NO: 205953 - protein, 15 aa, Artificial Sequence
  Description of Artificial Sequence: Synthetic peptide
  Seed: EWLKTRPILSPLTKG
EWYKTGPFLSVLTKG

SEQ ID NO: 205954 - protein, 15 aa, Artificial Sequence
  Description of Artificial Sequence: Synthetic peptide
  Seed: EWLKTRPILSPLTKG
EWYKTHPFLSALTKG

SEQ ID NO: 205955 - protein, 15 aa, Artificial Sequence
  Description of Artificial Sequence: Synthetic peptide
  Seed: EWLKTRPILSPLTKG
EWYKTHPFLSELTKG

SEQ ID NO: 205956 - protein, 15 aa, Artificial Sequence
  Description of Artificial Sequence: Synthetic peptide
  Seed: EWLKTRPILSPLTKG
EWYKTHPFLSFLTKG

SEQ ID NO: 205957 - protein, 15 aa, Artificial Sequence
  Description of Artificial Sequence: Synthetic peptide
  Seed: EWLKTRPILSPLTKG
EWYKTHPFLSILTKG

SEQ ID NO: 205958 - protein, 15 aa, Artificial Sequence
  Description of Artificial Sequence: Synthetic peptide
  Seed: EWLKTRPILSPLTKG
EWYKTHPFLSLLTKG

SEQ ID NO: 205959 - protein, 15 aa, Artificial Sequence
  Description of Artificial Sequence: Synthetic peptide
  Seed: EWLKTRPILSPLTKG
EWYKTHPFLSMLTKG

SEQ ID NO: 205960 - protein, 15 aa, Artificial Sequence
  Description of Artificial Sequence: Synthetic peptide
  Seed: EWLKTRPILSPLTKG
EWYKTHPFLSSLTKG

SEQ ID NO: 205961 - protein, 15 aa, Artificial Sequence
  Description of Artificial Sequence: Synthetic peptide
  Seed: EWLKTRPILSPLTKG
EWYKTHPFLSTLTKG

SEQ ID NO: 205962 - protein, 15 aa, Artificial Sequence
  Description of Artificial Sequence: Synthetic peptide
  Seed: EWLKTRPILSPLTKG
EWYKTHPFLSVLTKG

SEQ ID NO: 205963 - protein, 15 aa, Artificial Sequence
  Description of Artificial Sequence: Synthetic peptide
  Seed: EWLKTRPILSPLTKG
EWYKTHPFLSYLTKG

SEQ ID NO: 205964 - protein, 15 aa, Artificial Sequence
  Description of Artificial Sequence: Synthetic peptide
  Seed: EWLKTRPILSPLTKG
EWYKTHPILSILTKG

SEQ ID NO: 205965 - protein, 15 aa, Artificial Sequence
  Description of Artificial Sequence: Synthetic peptide
  Seed: EWLKTRPILSPLTKG
EWYKTHPILSLLTKG

SEQ ID NO: 205966 - protein, 15 aa, Artificial Sequence
  Description of Artificial Sequence: Synthetic peptide
  Seed: EWLKTRPILSPLTKG
EWYKTHPLLSFLTKG

SEQ ID NO: 205967 - protein, 15 aa, Artificial Sequence
  Description of Artificial Sequence: Synthetic peptide
  Seed: EWLKTRPILSPLTKG
EWYKTHPLLSILTKG

SEQ ID NO: 205968 - protein, 15 aa, Artificial Sequence
  Description of Artificial Sequence: Synthetic peptide
  Seed: EWLKTRPILSPLTKG
EWYKTHPLLSLLTKG

SEQ ID NO: 205969 - protein, 15 aa, Artificial Sequence
  Description of Artificial Sequence: Synthetic peptide
  Seed: EWLKTRPILSPLTKG
EWYKTHPLLSVLTKG

SEQ ID NO: 205970 - protein, 15 aa, Artificial Sequence
  Description of Artificial Sequence: Synthetic peptide
  Seed: EWLKTRPILSPLTKG
EWYKTHPMLSILTKG

SEQ ID NO: 205971 - protein, 15 aa, Artificial Sequence
  Description of Artificial Sequence: Synthetic peptide
  Seed: EWLKTRPILSPLTKG
EWYKTHPMLSLLTKG

SEQ ID NO: 205972 - protein, 15 aa, Artificial Sequence
  Description of Artificial Sequence: Synthetic peptide
  Seed: EWLKTRPILSPLTKG
EWYKTHPWLSILTKG

SEQ ID NO: 205973 - protein, 15 aa, Artificial Sequence
  Description of Artificial Sequence: Synthetic peptide
  Seed: EWLKTRPILSPLTKG
EWYKTHPWLSLLTKG

SEQ ID NO: 205974 - protein, 15 aa, Artificial Sequence
  Description of Artificial Sequence: Synthetic peptide
  Seed: EWLKTRPILSPLTKG
EWYKTHPWLSVLTKG

SEQ ID NO: 205975 - protein, 15 aa, Artificial Sequence
  Description of Artificial Sequence: Synthetic peptide
  Seed: EWLKTRPILSPLTKG
EWYKTHPYLSILTKG

SEQ ID NO: 205976 - protein, 15 aa, Artificial Sequence
  Description of Artificial Sequence: Synthetic peptide
  Seed: EWLKTRPILSPLTKG
EWYKTHPYLSLLTKG

SEQ ID NO: 205977 - protein, 15 aa, Artificial Sequence
  Description of Artificial Sequence: Synthetic peptide
  Seed: EWLKTRPILSPLTKG
EWYKTIPFLSALTKG

SEQ ID NO: 205978 - protein, 15 aa, Artificial Sequence
  Description of Artificial Sequence: Synthetic peptide
  Seed: EWLKTRPILSPLTKG
EWYKTIPFLSCLTKG

SEQ ID NO: 205979 - protein, 15 aa, Artificial Sequence
  Description of Artificial Sequence: Synthetic peptide
  Seed: EWLKTRPILSPLTKG
EWYKTIPFLSDLTKG

SEQ ID NO: 205980 - protein, 15 aa, Artificial Sequence
  Description of Artificial Sequence: Synthetic peptide
  Seed: EWLKTRPILSPLTKG
EWYKTIPFLSELTKG

SEQ ID NO: 205981 - protein, 15 aa, Artificial Sequence
  Description of Artificial Sequence: Synthetic peptide
  Seed: EWLKTRPILSPLTKG
EWYKTIPFLSFLTKG

SEQ ID NO: 205982 - protein, 15 aa, Artificial Sequence
  Description of Artificial Sequence: Synthetic peptide
  Seed: EWLKTRPILSPLTKG
EWYKTIPFLSILTKG

SEQ ID NO: 205983 - protein, 15 aa, Artificial Sequence
  Description of Artificial Sequence: Synthetic peptide
  Seed: EWLKTRPILSPLTKG
EWYKTIPFLSLLTKG

SEQ ID NO: 205984 - protein, 15 aa, Artificial Sequence
  Description of Artificial Sequence: Synthetic peptide
  Seed: EWLKTRPILSPLTKG
EWYKTIPFLSMLTKG

SEQ ID NO: 205985 - protein, 15 aa, Artificial Sequence
  Description of Artificial Sequence: Synthetic peptide
  Seed: EWLKTRPILSPLTKG
EWYKTIPFLSNLTKG

SEQ ID NO: 205986 - protein, 15 aa, Artificial Sequence
  Description of Artificial Sequence: Synthetic peptide
  Seed: EWLKTRPILSPLTKG
EWYKTIPFLSPLTKG

SEQ ID NO: 205987 - protein, 15 aa, Artificial Sequence
  Description of Artificial Sequence: Synthetic peptide
  Seed: EWLKTRPILSPLTKG
EWYKTIPFLSQLTKG

SEQ ID NO: 205988 - protein, 15 aa, Artificial Sequence
  Description of Artificial Sequence: Synthetic peptide
  Seed: EWLKTRPILSPLTKG
EWYKTIPFLSSLTKG

SEQ ID NO: 205989 - protein, 15 aa, Artificial Sequence
  Description of Artificial Sequence: Synthetic peptide
  Seed: EWLKTRPILSPLTKG
EWYKTIPFLSTLTKG

SEQ ID NO: 205990 - protein, 15 aa, Artificial Sequence
  Description of Artificial Sequence: Synthetic peptide
  Seed: EWLKTRPILSPLTKG
EWYKTIPFLSVLTKG

SEQ ID NO: 205991 - protein, 15 aa, Artificial Sequence
  Description of Artificial Sequence: Synthetic peptide
  Seed: EWLKTRPILSPLTKG
EWYKTIPFLSWLTKG

SEQ ID NO: 205992 - protein, 15 aa, Artificial Sequence
  Description of Artificial Sequence: Synthetic peptide
  Seed: EWLKTRPILSPLTKG
EWYKTIPFLSYLTKG

SEQ ID NO: 205993 - protein, 15 aa, Artificial Sequence
  Description of Artificial Sequence: Synthetic peptide
  Seed: EWLKTRPILSPLTKG
EWYKTIPILSILTKG

SEQ ID NO: 205994 - protein, 15 aa, Artificial Sequence
  Description of Artificial Sequence: Synthetic peptide
  Seed: EWLKTRPILSPLTKG
EWYKTIPILSLLTKG

SEQ ID NO: 205995 - protein, 15 aa, Artificial Sequence
  Description of Artificial Sequence: Synthetic peptide
  Seed: EWLKTRPILSPLTKG
EWYKTIPILSVLTKG

SEQ ID NO: 205996 - protein, 15 aa, Artificial Sequence
  Description of Artificial Sequence: Synthetic peptide
  Seed: EWLKTRPILSPLTKG
EWYKTIPKLSALTKG

SEQ ID NO: 205997 - protein, 15 aa, Artificial Sequence
  Description of Artificial Sequence: Synthetic peptide
  Seed: EWLKTRPILSPLTKG
EWYKTIPKLSRLTKG

SEQ ID NO: 205998 - protein, 15 aa, Artificial Sequence
  Description of Artificial Sequence: Synthetic peptide
  Seed: EWLKTRPILSPLTKG
EWYKTIPKLSSLTKG

SEQ ID NO: 205999 - protein, 15 aa, Artificial Sequence
  Description of Artificial Sequence: Synthetic peptide
  Seed: EWLKTRPILSPLTKG
EWYKTIPLLSFLTKG

SEQ ID NO: 206000 - protein, 15 aa, Artificial Sequence
  Description of Artificial Sequence: Synthetic peptide
  Seed: EWLKTRPILSPLTKG
EWYKTIPLLSILTKG

SEQ ID NO: 206001 - protein, 15 aa, Artificial Sequence
  Description of Artificial Sequence: Synthetic peptide
  Seed: EWLKTRPILSPLTKG
EWYKTIPLLSLLTKG

SEQ ID NO: 206002 - protein, 15 aa, Artificial Sequence
  Description of Artificial Sequence: Synthetic peptide
  Seed: EWLKTRPILSPLTKG
EWYKTIPLLSMLTKG

SEQ ID NO: 206003 - protein, 15 aa, Artificial Sequence
  Description of Artificial Sequence: Synthetic peptide
  Seed: EWLKTRPILSPLTKG
EWYKTIPLLSVLTKG

SEQ ID NO: 206004 - protein, 15 aa, Artificial Sequence
  Description of Artificial Sequence: Synthetic peptide
  Seed: EWLKTRPILSPLTKG
EWYKTIPMLSILTKG

SEQ ID NO: 206005 - protein, 15 aa, Artificial Sequence
  Description of Artificial Sequence: Synthetic peptide
  Seed: EWLKTRPILSPLTKG
EWYKTIPMLSLLTKG

SEQ ID NO: 206006 - protein, 15 aa, Artificial Sequence
  Description of Artificial Sequence: Synthetic peptide
  Seed: EWLKTRPILSPLTKG
EWYKTIPMLSVLTKG

SEQ ID NO: 206007 - protein, 15 aa, Artificial Sequence
  Description of Artificial Sequence: Synthetic peptide
  Seed: EWLKTRPILSPLTKG
EWYKTIPRLSALTKG

SEQ ID NO: 206008 - protein, 15 aa, Artificial Sequence
  Description of Artificial Sequence: Synthetic peptide
  Seed: EWLKTRPILSPLTKG
EWYKTIPRLSGLTKG

SEQ ID NO: 206009 - protein, 15 aa, Artificial Sequence
  Description of Artificial Sequence: Synthetic peptide
  Seed: EWLKTRPILSPLTKG
EWYKTIPRLSKLTKG

SEQ ID NO: 206010 - protein, 15 aa, Artificial Sequence
  Description of Artificial Sequence: Synthetic peptide
  Seed: EWLKTRPILSPLTKG
EWYKTIPRLSQLTKG

SEQ ID NO: 206011 - protein, 15 aa, Artificial Sequence
  Description of Artificial Sequence: Synthetic peptide
  Seed: EWLKTRPILSPLTKG
EWYKTIPRLSRLTKG

SEQ ID NO: 206012 - protein, 15 aa, Artificial Sequence
  Description of Artificial Sequence: Synthetic peptide
  Seed: EWLKTRPILSPLTKG
EWYKTIPRLSSLTKG

SEQ ID NO: 206013 - protein, 15 aa, Artificial Sequence
  Description of Artificial Sequence: Synthetic peptide
  Seed: EWLKTRPILSPLTKG
EWYKTIPRLSTLTKG

SEQ ID NO: 206014 - protein, 15 aa, Artificial Sequence
  Description of Artificial Sequence: Synthetic peptide
  Seed: EWLKTRPILSPLTKG
EWYKTIPWLSFLTKG

SEQ ID NO: 206015 - protein, 15 aa, Artificial Sequence
  Description of Artificial Sequence: Synthetic peptide
  Seed: EWLKTRPILSPLTKG
EWYKTIPWLSILTKG

SEQ ID NO: 206016 - protein, 15 aa, Artificial Sequence
  Description of Artificial Sequence: Synthetic peptide
  Seed: EWLKTRPILSPLTKG
EWYKTIPWLSLLTKG

SEQ ID NO: 206017 - protein, 15 aa, Artificial Sequence
  Description of Artificial Sequence: Synthetic peptide
  Seed: EWLKTRPILSPLTKG
EWYKTIPWLSVLTKG

SEQ ID NO: 206018 - protein, 15 aa, Artificial Sequence
  Description of Artificial Sequence: Synthetic peptide
  Seed: EWLKTRPILSPLTKG
EWYKTIPYLSFLTKG

SEQ ID NO: 206019 - protein, 15 aa, Artificial Sequence
  Description of Artificial Sequence: Synthetic peptide
  Seed: EWLKTRPILSPLTKG
EWYKTIPYLSILTKG

SEQ ID NO: 206020 - protein, 15 aa, Artificial Sequence
  Description of Artificial Sequence: Synthetic peptide
  Seed: EWLKTRPILSPLTKG
EWYKTIPYLSLLTKG

SEQ ID NO: 206021 - protein, 15 aa, Artificial Sequence
  Description of Artificial Sequence: Synthetic peptide
  Seed: EWLKTRPILSPLTKG
EWYKTIPYLSMLTKG

SEQ ID NO: 206022 - protein, 15 aa, Artificial Sequence
  Description of Artificial Sequence: Synthetic peptide
  Seed: EWLKTRPILSPLTKG
EWYKTIPYLSVLTKG

SEQ ID NO: 206023 - protein, 15 aa, Artificial Sequence
  Description of Artificial Sequence: Synthetic peptide
  Seed: EWLKTRPILSPLTKG
EWYKTKPFLSILTKG

SEQ ID NO: 206024 - protein, 15 aa, Artificial Sequence
  Description of Artificial Sequence: Synthetic peptide
  Seed: EWLKTRPILSPLTKG
EWYKTKPFLSLLTKG

SEQ ID NO: 206025 - protein, 15 aa, Artificial Sequence
  Description of Artificial Sequence: Synthetic peptide
  Seed: EWLKTRPILSPLTKG
EWYKTKPFLSVLTKG

SEQ ID NO: 206026 - protein, 15 aa, Artificial Sequence
  Description of Artificial Sequence: Synthetic peptide
  Seed: EWLKTRPILSPLTKG
EWYKTLPFLSALTKG

SEQ ID NO: 206027 - protein, 15 aa, Artificial Sequence
  Description of Artificial Sequence: Synthetic peptide
  Seed: EWLKTRPILSPLTKG
EWYKTLPFLSDLTKG

SEQ ID NO: 206028 - protein, 15 aa, Artificial Sequence
  Description of Artificial Sequence: Synthetic peptide
  Seed: EWLKTRPILSPLTKG
EWYKTLPFLSELTKG

SEQ ID NO: 206029 - protein, 15 aa, Artificial Sequence
  Description of Artificial Sequence: Synthetic peptide
  Seed: EWLKTRPILSPLTKG
EWYKTLPFLSFLTKG

SEQ ID NO: 206030 - protein, 15 aa, Artificial Sequence
  Description of Artificial Sequence: Synthetic peptide
  Seed: EWLKTRPILSPLTKG
EWYKTLPFLSILTKG

SEQ ID NO: 206031 - protein, 15 aa, Artificial Sequence
  Description of Artificial Sequence: Synthetic peptide
  Seed: EWLKTRPILSPLTKG
EWYKTLPFLSLLTKG

SEQ ID NO: 206032 - protein, 15 aa, Artificial Sequence
  Description of Artificial Sequence: Synthetic peptide
  Seed: EWLKTRPILSPLTKG
EWYKTLPFLSMLTKG

SEQ ID NO: 206033 - protein, 15 aa, Artificial Sequence
  Description of Artificial Sequence: Synthetic peptide
  Seed: EWLKTRPILSPLTKG
EWYKTLPFLSNLTKG

SEQ ID NO: 206034 - protein, 15 aa, Artificial Sequence
  Description of Artificial Sequence: Synthetic peptide
  Seed: EWLKTRPILSPLTKG
EWYKTLPFLSSLTKG

SEQ ID NO: 206035 - protein, 15 aa, Artificial Sequence
  Description of Artificial Sequence: Synthetic peptide
  Seed: EWLKTRPILSPLTKG
EWYKTLPFLSTLTKG

SEQ ID NO: 206036 - protein, 15 aa, Artificial Sequence
  Description of Artificial Sequence: Synthetic peptide
  Seed: EWLKTRPILSPLTKG
EWYKTLPFLSVLTKG

SEQ ID NO: 206037 - protein, 15 aa, Artificial Sequence
  Description of Artificial Sequence: Synthetic peptide
  Seed: EWLKTRPILSPLTKG
EWYKTLPFLSYLTKG

SEQ ID NO: 206038 - protein, 15 aa, Artificial Sequence
  Description of Artificial Sequence: Synthetic peptide
  Seed: EWLKTRPILSPLTKG
EWYKTLPILSILTKG

SEQ ID NO: 206039 - protein, 15 aa, Artificial Sequence
  Description of Artificial Sequence: Synthetic peptide
  Seed: EWLKTRPILSPLTKG
EWYKTLPILSLLTKG

SEQ ID NO: 206040 - protein, 15 aa, Artificial Sequence
  Description of Artificial Sequence: Synthetic peptide
  Seed: EWLKTRPILSPLTKG
EWYKTLPKLSALTKG

SEQ ID NO: 206041 - protein, 15 aa, Artificial Sequence
  Description of Artificial Sequence: Synthetic peptide
  Seed: EWLKTRPILSPLTKG
EWYKTLPKLSSLTKG

SEQ ID NO: 206042 - protein, 15 aa, Artificial Sequence
  Description of Artificial Sequence: Synthetic peptide
  Seed: EWLKTRPILSPLTKG
EWYKTLPLLSILTKG

SEQ ID NO: 206043 - protein, 15 aa, Artificial Sequence
  Description of Artificial Sequence: Synthetic peptide
  Seed: EWLKTRPILSPLTKG
EWYKTLPLLSLLTKG

SEQ ID NO: 206044 - protein, 15 aa, Artificial Sequence
  Description of Artificial Sequence: Synthetic peptide
  Seed: EWLKTRPILSPLTKG
EWYKTLPLLSVLTKG

SEQ ID NO: 206045 - protein, 15 aa, Artificial Sequence
  Description of Artificial Sequence: Synthetic peptide
  Seed: EWLKTRPILSPLTKG
EWYKTLPMLSILTKG

SEQ ID NO: 206046 - protein, 15 aa, Artificial Sequence
  Description of Artificial Sequence: Synthetic peptide
  Seed: EWLKTRPILSPLTKG
EWYKTLPMLSLLTKG

SEQ ID NO: 206047 - protein, 15 aa, Artificial Sequence
  Description of Artificial Sequence: Synthetic peptide
  Seed: EWLKTRPILSPLTKG
EWYKTLPMLSVLTKG

SEQ ID NO: 206048 - protein, 15 aa, Artificial Sequence
  Description of Artificial Sequence: Synthetic peptide
  Seed: EWLKTRPILSPLTKG
EWYKTLPRLSALTKG

SEQ ID NO: 206049 - protein, 15 aa, Artificial Sequence
  Description of Artificial Sequence: Synthetic peptide
  Seed: EWLKTRPILSPLTKG
EWYKTLPRLSGLTKG

SEQ ID NO: 206050 - protein, 15 aa, Artificial Sequence
  Description of Artificial Sequence: Synthetic peptide
  Seed: EWLKTRPILSPLTKG
EWYKTLPRLSQLTKG

SEQ ID NO: 206051 - protein, 15 aa, Artificial Sequence
  Description of Artificial Sequence: Synthetic peptide
  Seed: EWLKTRPILSPLTKG
EWYKTLPRLSRLTKG

SEQ ID NO: 206052 - protein, 15 aa, Artificial Sequence
  Description of Artificial Sequence: Synthetic peptide
  Seed: EWLKTRPILSPLTKG
EWYKTLPRLSSLTKG

SEQ ID NO: 206053 - protein, 15 aa, Artificial Sequence
  Description of Artificial Sequence: Synthetic peptide
  Seed: EWLKTRPILSPLTKG
EWYKTLPRLSTLTKG

SEQ ID NO: 206054 - protein, 15 aa, Artificial Sequence
  Description of Artificial Sequence: Synthetic peptide
  Seed: EWLKTRPILSPLTKG
EWYKTLPWLSILTKG

SEQ ID NO: 206055 - protein, 15 aa, Artificial Sequence
  Description of Artificial Sequence: Synthetic peptide
  Seed: EWLKTRPILSPLTKG
EWYKTLPWLSLLTKG

SEQ ID NO: 206056 - protein, 15 aa, Artificial Sequence
  Description of Artificial Sequence: Synthetic peptide
  Seed: EWLKTRPILSPLTKG
EWYKTLPWLSVLTKG

SEQ ID NO: 206057 - protein, 15 aa, Artificial Sequence
  Description of Artificial Sequence: Synthetic peptide
  Seed: EWLKTRPILSPLTKG
EWYKTLPYLSFLTKG

SEQ ID NO: 206058 - protein, 15 aa, Artificial Sequence
  Description of Artificial Sequence: Synthetic peptide
  Seed: EWLKTRPILSPLTKG
EWYKTLPYLSILTKG

SEQ ID NO: 206059 - protein, 15 aa, Artificial Sequence
  Description of Artificial Sequence: Synthetic peptide
  Seed: EWLKTRPILSPLTKG
EWYKTLPYLSLLTKG

SEQ ID NO: 206060 - protein, 15 aa, Artificial Sequence
  Description of Artificial Sequence: Synthetic peptide
  Seed: EWLKTRPILSPLTKG
EWYKTLPYLSVLTKG

SEQ ID NO: 206061 - protein, 15 aa, Artificial Sequence
  Description of Artificial Sequence: Synthetic peptide
  Seed: EWLKTRPILSPLTKG
EWYKTMPFLSALTKG

SEQ ID NO: 206062 - protein, 15 aa, Artificial Sequence
  Description of Artificial Sequence: Synthetic peptide
  Seed: EWLKTRPILSPLTKG
EWYKTMPFLSFLTKG

SEQ ID NO: 206063 - protein, 15 aa, Artificial Sequence
  Description of Artificial Sequence: Synthetic peptide
  Seed: EWLKTRPILSPLTKG
EWYKTMPFLSILTKG

SEQ ID NO: 206064 - protein, 15 aa, Artificial Sequence
  Description of Artificial Sequence: Synthetic peptide
  Seed: EWLKTRPILSPLTKG
EWYKTMPFLSLLTKG

SEQ ID NO: 206065 - protein, 15 aa, Artificial Sequence
  Description of Artificial Sequence: Synthetic peptide
  Seed: EWLKTRPILSPLTKG
EWYKTMPFLSMLTKG

SEQ ID NO: 206066 - protein, 15 aa, Artificial Sequence
  Description of Artificial Sequence: Synthetic peptide
  Seed: EWLKTRPILSPLTKG
EWYKTMPFLSNLTKG

SEQ ID NO: 206067 - protein, 15 aa, Artificial Sequence
  Description of Artificial Sequence: Synthetic peptide
  Seed: EWLKTRPILSPLTKG
EWYKTMPFLSSLTKG

SEQ ID NO: 206068 - protein, 15 aa, Artificial Sequence
  Description of Artificial Sequence: Synthetic peptide
  Seed: EWLKTRPILSPLTKG
EWYKTMPFLSTLTKG

SEQ ID NO: 206069 - protein, 15 aa, Artificial Sequence
  Description of Artificial Sequence: Synthetic peptide
  Seed: EWLKTRPILSPLTKG
EWYKTMPFLSVLTKG

SEQ ID NO: 206070 - protein, 15 aa, Artificial Sequence
  Description of Artificial Sequence: Synthetic peptide
  Seed: EWLKTRPILSPLTKG
EWYKTMPFLSYLTKG

SEQ ID NO: 206071 - protein, 15 aa, Artificial Sequence
  Description of Artificial Sequence: Synthetic peptide
  Seed: EWLKTRPILSPLTKG
EWYKTMPKLSALTKG

SEQ ID NO: 206072 - protein, 15 aa, Artificial Sequence
  Description of Artificial Sequence: Synthetic peptide
  Seed: EWLKTRPILSPLTKG
EWYKTMPKLSSLTKG

SEQ ID NO: 206073 - protein, 15 aa, Artificial Sequence
  Description of Artificial Sequence: Synthetic peptide
  Seed: EWLKTRPILSPLTKG
EWYKTMPLLSILTKG

SEQ ID NO: 206074 - protein, 15 aa, Artificial Sequence
  Description of Artificial Sequence: Synthetic peptide
  Seed: EWLKTRPILSPLTKG
EWYKTMPLLSLLTKG

SEQ ID NO: 206075 - protein, 15 aa, Artificial Sequence
  Description of Artificial Sequence: Synthetic peptide
  Seed: EWLKTRPILSPLTKG
EWYKTMPLLSVLTKG

SEQ ID NO: 206076 - protein, 15 aa, Artificial Sequence
  Description of Artificial Sequence: Synthetic peptide
  Seed: EWLKTRPILSPLTKG
EWYKTMPRLSALTKG

SEQ ID NO: 206077 - protein, 15 aa, Artificial Sequence
  Description of Artificial Sequence: Synthetic peptide
  Seed: EWLKTRPILSPLTKG
EWYKTMPRLSGLTKG

SEQ ID NO: 206078 - protein, 15 aa, Artificial Sequence
  Description of Artificial Sequence: Synthetic peptide
  Seed: EWLKTRPILSPLTKG
EWYKTMPRLSHLTKG

SEQ ID NO: 206079 - protein, 15 aa, Artificial Sequence
  Description of Artificial Sequence: Synthetic peptide
  Seed: EWLKTRPILSPLTKG
EWYKTMPRLSKLTKG

SEQ ID NO: 206080 - protein, 15 aa, Artificial Sequence
  Description of Artificial Sequence: Synthetic peptide
  Seed: EWLKTRPILSPLTKG
EWYKTMPRLSMLTKG

SEQ ID NO: 206081 - protein, 15 aa, Artificial Sequence
  Description of Artificial Sequence: Synthetic peptide
  Seed: EWLKTRPILSPLTKG
EWYKTMPRLSQLTKG

SEQ ID NO: 206082 - protein, 15 aa, Artificial Sequence
  Description of Artificial Sequence: Synthetic peptide
  Seed: EWLKTRPILSPLTKG
EWYKTMPRLSRLTKG

SEQ ID NO: 206083 - protein, 15 aa, Artificial Sequence
  Description of Artificial Sequence: Synthetic peptide
  Seed: EWLKTRPILSPLTKG
EWYKTMPRLSSLTKG

SEQ ID NO: 206084 - protein, 15 aa, Artificial Sequence
  Description of Artificial Sequence: Synthetic peptide
  Seed: EWLKTRPILSPLTKG
EWYKTMPRLSTLTKG

SEQ ID NO: 206085 - protein, 15 aa, Artificial Sequence
  Description of Artificial Sequence: Synthetic peptide
  Seed: EWLKTRPILSPLTKG
EWYKTMPRLSVLTKG

SEQ ID NO: 206086 - protein, 15 aa, Artificial Sequence
  Description of Artificial Sequence: Synthetic peptide
  Seed: EWLKTRPILSPLTKG
EWYKTMPWLSILTKG

SEQ ID NO: 206087 - protein, 15 aa, Artificial Sequence
  Description of Artificial Sequence: Synthetic peptide
  Seed: EWLKTRPILSPLTKG
EWYKTMPWLSLLTKG

SEQ ID NO: 206088 - protein, 15 aa, Artificial Sequence
  Description of Artificial Sequence: Synthetic peptide
  Seed: EWLKTRPILSPLTKG
EWYKTMPWLSVLTKG

SEQ ID NO: 206089 - protein, 15 aa, Artificial Sequence
  Description of Artificial Sequence: Synthetic peptide
  Seed: EWLKTRPILSPLTKG
EWYKTMPYLSILTKG

SEQ ID NO: 206090 - protein, 15 aa, Artificial Sequence
  Description of Artificial Sequence: Synthetic peptide
  Seed: EWLKTRPILSPLTKG
EWYKTMPYLSLLTKG

SEQ ID NO: 206091 - protein, 15 aa, Artificial Sequence
  Description of Artificial Sequence: Synthetic peptide
  Seed: EWLKTRPILSPLTKG
EWYKTMPYLSVLTKG

SEQ ID NO: 206092 - protein, 15 aa, Artificial Sequence
  Description of Artificial Sequence: Synthetic peptide
  Seed: EWLKTRPILSPLTKG
EWYKTNPFLSFLTKG

SEQ ID NO: 206093 - protein, 15 aa, Artificial Sequence
  Description of Artificial Sequence: Synthetic peptide
  Seed: EWLKTRPILSPLTKG
EWYKTNPFLSILTKG

SEQ ID NO: 206094 - protein, 15 aa, Artificial Sequence
  Description of Artificial Sequence: Synthetic peptide
  Seed: EWLKTRPILSPLTKG
EWYKTNPFLSLLTKG

SEQ ID NO: 206095 - protein, 15 aa, Artificial Sequence
  Description of Artificial Sequence: Synthetic peptide
  Seed: EWLKTRPILSPLTKG
EWYKTNPFLSMLTKG

SEQ ID NO: 206096 - protein, 15 aa, Artificial Sequence
  Description of Artificial Sequence: Synthetic peptide
  Seed: EWLKTRPILSPLTKG
EWYKTNPFLSVLTKG

SEQ ID NO: 206097 - protein, 15 aa, Artificial Sequence
  Description of Artificial Sequence: Synthetic peptide
  Seed: EWLKTRPILSPLTKG
EWYKTQPFLSFLTKG

SEQ ID NO: 206098 - protein, 15 aa, Artificial Sequence
  Description of Artificial Sequence: Synthetic peptide
  Seed: EWLKTRPILSPLTKG
EWYKTQPFLSILTKG

SEQ ID NO: 206099 - protein, 15 aa, Artificial Sequence
  Description of Artificial Sequence: Synthetic peptide
  Seed: EWLKTRPILSPLTKG
EWYKTQPFLSLLTKG

SEQ ID NO: 206100 - protein, 15 aa, Artificial Sequence
  Description of Artificial Sequence: Synthetic peptide
  Seed: EWLKTRPILSPLTKG
EWYKTQPFLSMLTKG

SEQ ID NO: 206101 - protein, 15 aa, Artificial Sequence
  Description of Artificial Sequence: Synthetic peptide
  Seed: EWLKTRPILSPLTKG
EWYKTQPFLSVLTKG

SEQ ID NO: 206102 - protein, 15 aa, Artificial Sequence
  Description of Artificial Sequence: Synthetic peptide
  Seed: EWLKTRPILSPLTKG
EWYKTRPFLSILTKG

SEQ ID NO: 206103 - protein, 15 aa, Artificial Sequence
  Description of Artificial Sequence: Synthetic peptide
  Seed: EWLKTRPILSPLTKG
EWYKTRPFLSLLTKG

SEQ ID NO: 206104 - protein, 15 aa, Artificial Sequence
  Description of Artificial Sequence: Synthetic peptide
  Seed: EWLKTRPILSPLTKG
EWYKTRPFLSVLTKG

SEQ ID NO: 206105 - protein, 15 aa, Artificial Sequence
  Description of Artificial Sequence: Synthetic peptide
  Seed: EWLKTRPILSPLTKG
EWYKTSPFLSALTKG

SEQ ID NO: 206106 - protein, 15 aa, Artificial Sequence
  Description of Artificial Sequence: Synthetic peptide
  Seed: EWLKTRPILSPLTKG
EWYKTSPFLSELTKG

SEQ ID NO: 206107 - protein, 15 aa, Artificial Sequence
  Description of Artificial Sequence: Synthetic peptide
  Seed: EWLKTRPILSPLTKG
EWYKTSPFLSFLTKG

SEQ ID NO: 206108 - protein, 15 aa, Artificial Sequence
  Description of Artificial Sequence: Synthetic peptide
  Seed: EWLKTRPILSPLTKG
EWYKTSPFLSILTKG

SEQ ID NO: 206109 - protein, 15 aa, Artificial Sequence
  Description of Artificial Sequence: Synthetic peptide
  Seed: EWLKTRPILSPLTKG
EWYKTSPFLSLLTKG

SEQ ID NO: 206110 - protein, 15 aa, Artificial Sequence
  Description of Artificial Sequence: Synthetic peptide
  Seed: EWLKTRPILSPLTKG
EWYKTSPFLSMLTKG

SEQ ID NO: 206111 - protein, 15 aa, Artificial Sequence
  Description of Artificial Sequence: Synthetic peptide
  Seed: EWLKTRPILSPLTKG
EWYKTSPFLSNLTKG

SEQ ID NO: 206112 - protein, 15 aa, Artificial Sequence
  Description of Artificial Sequence: Synthetic peptide
  Seed: EWLKTRPILSPLTKG
EWYKTSPFLSSLTKG

SEQ ID NO: 206113 - protein, 15 aa, Artificial Sequence
  Description of Artificial Sequence: Synthetic peptide
  Seed: EWLKTRPILSPLTKG
EWYKTSPFLSTLTKG

SEQ ID NO: 206114 - protein, 15 aa, Artificial Sequence
  Description of Artificial Sequence: Synthetic peptide
  Seed: EWLKTRPILSPLTKG
EWYKTSPFLSVLTKG

SEQ ID NO: 206115 - protein, 15 aa, Artificial Sequence
  Description of Artificial Sequence: Synthetic peptide
  Seed: EWLKTRPILSPLTKG
EWYKTSPFLSYLTKG

SEQ ID NO: 206116 - protein, 15 aa, Artificial Sequence
  Description of Artificial Sequence: Synthetic peptide
  Seed: EWLKTRPILSPLTKG
EWYKTSPLLSILTKG

SEQ ID NO: 206117 - protein, 15 aa, Artificial Sequence
  Description of Artificial Sequence: Synthetic peptide
  Seed: EWLKTRPILSPLTKG
EWYKTSPLLSLLTKG

SEQ ID NO: 206118 - protein, 15 aa, Artificial Sequence
  Description of Artificial Sequence: Synthetic peptide
  Seed: EWLKTRPILSPLTKG
EWYKTSPLLSVLTKG

SEQ ID NO: 206119 - protein, 15 aa, Artificial Sequence
  Description of Artificial Sequence: Synthetic peptide
  Seed: EWLKTRPILSPLTKG
EWYKTSPMLSLLTKG

SEQ ID NO: 206120 - protein, 15 aa, Artificial Sequence
  Description of Artificial Sequence: Synthetic peptide
  Seed: EWLKTRPILSPLTKG
EWYKTSPWLSILTKG

SEQ ID NO: 206121 - protein, 15 aa, Artificial Sequence
  Description of Artificial Sequence: Synthetic peptide
  Seed: EWLKTRPILSPLTKG
EWYKTSPWLSLLTKG

SEQ ID NO: 206122 - protein, 15 aa, Artificial Sequence
  Description of Artificial Sequence: Synthetic peptide
  Seed: EWLKTRPILSPLTKG
EWYKTSPWLSVLTKG

SEQ ID NO: 206123 - protein, 15 aa, Artificial Sequence
  Description of Artificial Sequence: Synthetic peptide
  Seed: EWLKTRPILSPLTKG
EWYKTSPYLSILTKG

SEQ ID NO: 206124 - protein, 15 aa, Artificial Sequence
  Description of Artificial Sequence: Synthetic peptide
  Seed: EWLKTRPILSPLTKG
EWYKTSPYLSLLTKG

SEQ ID NO: 206125 - protein, 15 aa, Artificial Sequence
  Description of Artificial Sequence: Synthetic peptide
  Seed: EWLKTRPILSPLTKG
EWYKTSPYLSVLTKG

SEQ ID NO: 206126 - protein, 15 aa, Artificial Sequence
  Description of Artificial Sequence: Synthetic peptide
  Seed: EWLKTRPILSPLTKG
EWYKTTPFLSALTKG

SEQ ID NO: 206127 - protein, 15 aa, Artificial Sequence
  Description of Artificial Sequence: Synthetic peptide
  Seed: EWLKTRPILSPLTKG
EWYKTTPFLSDLTKG

SEQ ID NO: 206128 - protein, 15 aa, Artificial Sequence
  Description of Artificial Sequence: Synthetic peptide
  Seed: EWLKTRPILSPLTKG
EWYKTTPFLSELTKG

SEQ ID NO: 206129 - protein, 15 aa, Artificial Sequence
  Description of Artificial Sequence: Synthetic peptide
  Seed: EWLKTRPILSPLTKG
EWYKTTPFLSFLTKG

SEQ ID NO: 206130 - protein, 15 aa, Artificial Sequence
  Description of Artificial Sequence: Synthetic peptide
  Seed: EWLKTRPILSPLTKG
EWYKTTPFLSILTKG

SEQ ID NO: 206131 - protein, 15 aa, Artificial Sequence
  Description of Artificial Sequence: Synthetic peptide
  Seed: EWLKTRPILSPLTKG
EWYKTTPFLSLLTKG

SEQ ID NO: 206132 - protein, 15 aa, Artificial Sequence
  Description of Artificial Sequence: Synthetic peptide
  Seed: EWLKTRPILSPLTKG
EWYKTTPFLSMLTKG

SEQ ID NO: 206133 - protein, 15 aa, Artificial Sequence
  Description of Artificial Sequence: Synthetic peptide
  Seed: EWLKTRPILSPLTKG
EWYKTTPFLSNLTKG

SEQ ID NO: 206134 - protein, 15 aa, Artificial Sequence
  Description of Artificial Sequence: Synthetic peptide
  Seed: EWLKTRPILSPLTKG
EWYKTTPFLSQLTKG

SEQ ID NO: 206135 - protein, 15 aa, Artificial Sequence
  Description of Artificial Sequence: Synthetic peptide
  Seed: EWLKTRPILSPLTKG
EWYKTTPFLSSLTKG

SEQ ID NO: 206136 - protein, 15 aa, Artificial Sequence
  Description of Artificial Sequence: Synthetic peptide
  Seed: EWLKTRPILSPLTKG
EWYKTTPFLSTLTKG

SEQ ID NO: 206137 - protein, 15 aa, Artificial Sequence
  Description of Artificial Sequence: Synthetic peptide
  Seed: EWLKTRPILSPLTKG
EWYKTTPFLSVLTKG

SEQ ID NO: 206138 - protein, 15 aa, Artificial Sequence
  Description of Artificial Sequence: Synthetic peptide
  Seed: EWLKTRPILSPLTKG
EWYKTTPFLSWLTKG

SEQ ID NO: 206139 - protein, 15 aa, Artificial Sequence
  Description of Artificial Sequence: Synthetic peptide
  Seed: EWLKTRPILSPLTKG
EWYKTTPFLSYLTKG

SEQ ID NO: 206140 - protein, 15 aa, Artificial Sequence
  Description of Artificial Sequence: Synthetic peptide
  Seed: EWLKTRPILSPLTKG
EWYKTTPILSILTKG

SEQ ID NO: 206141 - protein, 15 aa, Artificial Sequence
  Description of Artificial Sequence: Synthetic peptide
  Seed: EWLKTRPILSPLTKG
EWYKTTPILSLLTKG

SEQ ID NO: 206142 - protein, 15 aa, Artificial Sequence
  Description of Artificial Sequence: Synthetic peptide
  Seed: EWLKTRPILSPLTKG
EWYKTTPILSVLTKG

SEQ ID NO: 206143 - protein, 15 aa, Artificial Sequence
  Description of Artificial Sequence: Synthetic peptide
  Seed: EWLKTRPILSPLTKG
EWYKTTPLLSFLTKG

SEQ ID NO: 206144 - protein, 15 aa, Artificial Sequence
  Description of Artificial Sequence: Synthetic peptide
  Seed: EWLKTRPILSPLTKG
EWYKTTPLLSILTKG

SEQ ID NO: 206145 - protein, 15 aa, Artificial Sequence
  Description of Artificial Sequence: Synthetic peptide
  Seed: EWLKTRPILSPLTKG
EWYKTTPLLSLLTKG

SEQ ID NO: 206146 - protein, 15 aa, Artificial Sequence
  Description of Artificial Sequence: Synthetic peptide
  Seed: EWLKTRPILSPLTKG
EWYKTTPLLSMLTKG

SEQ ID NO: 206147 - protein, 15 aa, Artificial Sequence
  Description of Artificial Sequence: Synthetic peptide
  Seed: EWLKTRPILSPLTKG
EWYKTTPLLSVLTKG

SEQ ID NO: 206148 - protein, 15 aa, Artificial Sequence
  Description of Artificial Sequence: Synthetic peptide
  Seed: EWLKTRPILSPLTKG
EWYKTTPMLSILTKG

SEQ ID NO: 206149 - protein, 15 aa, Artificial Sequence
  Description of Artificial Sequence: Synthetic peptide
  Seed: EWLKTRPILSPLTKG
EWYKTTPMLSLLTKG

SEQ ID NO: 206150 - protein, 15 aa, Artificial Sequence
  Description of Artificial Sequence: Synthetic peptide
  Seed: EWLKTRPILSPLTKG
EWYKTTPMLSVLTKG

SEQ ID NO: 206151 - protein, 15 aa, Artificial Sequence
  Description of Artificial Sequence: Synthetic peptide
  Seed: EWLKTRPILSPLTKG
EWYKTTPWLSILTKG

SEQ ID NO: 206152 - protein, 15 aa, Artificial Sequence
  Description of Artificial Sequence: Synthetic peptide
  Seed: EWLKTRPILSPLTKG
EWYKTTPWLSLLTKG

SEQ ID NO: 206153 - protein, 15 aa, Artificial Sequence
  Description of Artificial Sequence: Synthetic peptide
  Seed: EWLKTRPILSPLTKG
EWYKTTPWLSVLTKG

SEQ ID NO: 206154 - protein, 15 aa, Artificial Sequence
  Description of Artificial Sequence: Synthetic peptide
  Seed: EWLKTRPILSPLTKG
EWYKTTPYLSILTKG

SEQ ID NO: 206155 - protein, 15 aa, Artificial Sequence
  Description of Artificial Sequence: Synthetic peptide
  Seed: EWLKTRPILSPLTKG
EWYKTTPYLSLLTKG

SEQ ID NO: 206156 - protein, 15 aa, Artificial Sequence
  Description of Artificial Sequence: Synthetic peptide
  Seed: EWLKTRPILSPLTKG
EWYKTTPYLSMLTKG

SEQ ID NO: 206157 - protein, 15 aa, Artificial Sequence
  Description of Artificial Sequence: Synthetic peptide
  Seed: EWLKTRPILSPLTKG
EWYKTTPYLSVLTKG

SEQ ID NO: 206158 - protein, 15 aa, Artificial Sequence
  Description of Artificial Sequence: Synthetic peptide
  Seed: EWLKTRPILSPLTKG
EWYKTVPFLSALTKG

SEQ ID NO: 206159 - protein, 15 aa, Artificial Sequence
  Description of Artificial Sequence: Synthetic peptide
  Seed: EWLKTRPILSPLTKG
EWYKTVPFLSCLTKG

SEQ ID NO: 206160 - protein, 15 aa, Artificial Sequence
  Description of Artificial Sequence: Synthetic peptide
  Seed: EWLKTRPILSPLTKG
EWYKTVPFLSDLTKG

SEQ ID NO: 206161 - protein, 15 aa, Artificial Sequence
  Description of Artificial Sequence: Synthetic peptide
  Seed: EWLKTRPILSPLTKG
EWYKTVPFLSELTKG

SEQ ID NO: 206162 - protein, 15 aa, Artificial Sequence
  Description of Artificial Sequence: Synthetic peptide
  Seed: EWLKTRPILSPLTKG
EWYKTVPFLSFLTKG

SEQ ID NO: 206163 - protein, 15 aa, Artificial Sequence
  Description of Artificial Sequence: Synthetic peptide
  Seed: EWLKTRPILSPLTKG
EWYKTVPFLSILTKG

SEQ ID NO: 206164 - protein, 15 aa, Artificial Sequence
  Description of Artificial Sequence: Synthetic peptide
  Seed: EWLKTRPILSPLTKG
EWYKTVPFLSLLTKG

SEQ ID NO: 206165 - protein, 15 aa, Artificial Sequence
  Description of Artificial Sequence: Synthetic peptide
  Seed: EWLKTRPILSPLTKG
EWYKTVPFLSMLTKG

SEQ ID NO: 206166 - protein, 15 aa, Artificial Sequence
  Description of Artificial Sequence: Synthetic peptide
  Seed: EWLKTRPILSPLTKG
EWYKTVPFLSNLTKG

SEQ ID NO: 206167 - protein, 15 aa, Artificial Sequence
  Description of Artificial Sequence: Synthetic peptide
  Seed: EWLKTRPILSPLTKG
EWYKTVPFLSPLTKG

SEQ ID NO: 206168 - protein, 15 aa, Artificial Sequence
  Description of Artificial Sequence: Synthetic peptide
  Seed: EWLKTRPILSPLTKG
EWYKTVPFLSQLTKG

SEQ ID NO: 206169 - protein, 15 aa, Artificial Sequence
  Description of Artificial Sequence: Synthetic peptide
  Seed: EWLKTRPILSPLTKG
EWYKTVPFLSSLTKG

SEQ ID NO: 206170 - protein, 15 aa, Artificial Sequence
  Description of Artificial Sequence: Synthetic peptide
  Seed: EWLKTRPILSPLTKG
EWYKTVPFLSTLTKG

SEQ ID NO: 206171 - protein, 15 aa, Artificial Sequence
  Description of Artificial Sequence: Synthetic peptide
  Seed: EWLKTRPILSPLTKG
EWYKTVPFLSVLTKG

SEQ ID NO: 206172 - protein, 15 aa, Artificial Sequence
  Description of Artificial Sequence: Synthetic peptide
  Seed: EWLKTRPILSPLTKG
EWYKTVPFLSYLTKG

SEQ ID NO: 206173 - protein, 15 aa, Artificial Sequence
  Description of Artificial Sequence: Synthetic peptide
  Seed: EWLKTRPILSPLTKG
EWYKTVPILSILTKG

SEQ ID NO: 206174 - protein, 15 aa, Artificial Sequence
  Description of Artificial Sequence: Synthetic peptide
  Seed: EWLKTRPILSPLTKG
EWYKTVPILSLLTKG

SEQ ID NO: 206175 - protein, 15 aa, Artificial Sequence
  Description of Artificial Sequence: Synthetic peptide
  Seed: EWLKTRPILSPLTKG
EWYKTVPILSVLTKG

SEQ ID NO: 206176 - protein, 15 aa, Artificial Sequence
  Description of Artificial Sequence: Synthetic peptide
  Seed: EWLKTRPILSPLTKG
EWYKTVPLLSFLTKG

SEQ ID NO: 206177 - protein, 15 aa, Artificial Sequence
  Description of Artificial Sequence: Synthetic peptide
  Seed: EWLKTRPILSPLTKG
EWYKTVPLLSILTKG

SEQ ID NO: 206178 - protein, 15 aa, Artificial Sequence
  Description of Artificial Sequence: Synthetic peptide
  Seed: EWLKTRPILSPLTKG
EWYKTVPLLSLLTKG

SEQ ID NO: 206179 - protein, 15 aa, Artificial Sequence
  Description of Artificial Sequence: Synthetic peptide
  Seed: EWLKTRPILSPLTKG
EWYKTVPLLSMLTKG

SEQ ID NO: 206180 - protein, 15 aa, Artificial Sequence
  Description of Artificial Sequence: Synthetic peptide
  Seed: EWLKTRPILSPLTKG
EWYKTVPLLSVLTKG

SEQ ID NO: 206181 - protein, 15 aa, Artificial Sequence
  Description of Artificial Sequence: Synthetic peptide
  Seed: EWLKTRPILSPLTKG
EWYKTVPMLSILTKG

SEQ ID NO: 206182 - protein, 15 aa, Artificial Sequence
  Description of Artificial Sequence: Synthetic peptide
  Seed: EWLKTRPILSPLTKG
EWYKTVPMLSLLTKG

SEQ ID NO: 206183 - protein, 15 aa, Artificial Sequence
  Description of Artificial Sequence: Synthetic peptide
  Seed: EWLKTRPILSPLTKG
EWYKTVPMLSVLTKG

SEQ ID NO: 206184 - protein, 15 aa, Artificial Sequence
  Description of Artificial Sequence: Synthetic peptide
  Seed: EWLKTRPILSPLTKG
EWYKTVPRLSALTKG

SEQ ID NO: 206185 - protein, 15 aa, Artificial Sequence
  Description of Artificial Sequence: Synthetic peptide
  Seed: EWLKTRPILSPLTKG
EWYKTVPRLSSLTKG

SEQ ID NO: 206186 - protein, 15 aa, Artificial Sequence
  Description of Artificial Sequence: Synthetic peptide
  Seed: EWLKTRPILSPLTKG
EWYKTVPWLSFLTKG

SEQ ID NO: 206187 - protein, 15 aa, Artificial Sequence
  Description of Artificial Sequence: Synthetic peptide
  Seed: EWLKTRPILSPLTKG
EWYKTVPWLSILTKG

SEQ ID NO: 206188 - protein, 15 aa, Artificial Sequence
  Description of Artificial Sequence: Synthetic peptide
  Seed: EWLKTRPILSPLTKG
EWYKTVPWLSLLTKG

SEQ ID NO: 206189 - protein, 15 aa, Artificial Sequence
  Description of Artificial Sequence: Synthetic peptide
  Seed: EWLKTRPILSPLTKG
EWYKTVPWLSVLTKG

SEQ ID NO: 206190 - protein, 15 aa, Artificial Sequence
  Description of Artificial Sequence: Synthetic peptide
  Seed: EWLKTRPILSPLTKG
EWYKTVPYLSFLTKG

SEQ ID NO: 206191 - protein, 15 aa, Artificial Sequence
  Description of Artificial Sequence: Synthetic peptide
  Seed: EWLKTRPILSPLTKG
EWYKTVPYLSILTKG

SEQ ID NO: 206192 - protein, 15 aa, Artificial Sequence
  Description of Artificial Sequence: Synthetic peptide
  Seed: EWLKTRPILSPLTKG
EWYKTVPYLSLLTKG

SEQ ID NO: 206193 - protein, 15 aa, Artificial Sequence
  Description of Artificial Sequence: Synthetic peptide
  Seed: EWLKTRPILSPLTKG
EWYKTVPYLSMLTKG

SEQ ID NO: 206194 - protein, 15 aa, Artificial Sequence
  Description of Artificial Sequence: Synthetic peptide
  Seed: EWLKTRPILSPLTKG
EWYKTVPYLSVLTKG

SEQ ID NO: 206195 - protein, 15 aa, Artificial Sequence
  Description of Artificial Sequence: Synthetic peptide
  Seed: EWLKTRPILSPLTKG
EWYKTWPFLSFLTKG

SEQ ID NO: 206196 - protein, 15 aa, Artificial Sequence
  Description of Artificial Sequence: Synthetic peptide
  Seed: EWLKTRPILSPLTKG
EWYKTWPFLSILTKG

SEQ ID NO: 206197 - protein, 15 aa, Artificial Sequence
  Description of Artificial Sequence: Synthetic peptide
  Seed: EWLKTRPILSPLTKG
EWYKTWPFLSLLTKG

SEQ ID NO: 206198 - protein, 15 aa, Artificial Sequence
  Description of Artificial Sequence: Synthetic peptide
  Seed: EWLKTRPILSPLTKG
EWYKTWPFLSMLTKG

SEQ ID NO: 206199 - protein, 15 aa, Artificial Sequence
  Description of Artificial Sequence: Synthetic peptide
  Seed: EWLKTRPILSPLTKG
EWYKTWPFLSVLTKG

SEQ ID NO: 206200 - protein, 15 aa, Artificial Sequence
  Description of Artificial Sequence: Synthetic peptide
  Seed: EWLKTRPILSPLTKG
EWYKTWPLLSILTKG

SEQ ID NO: 206201 - protein, 15 aa, Artificial Sequence
  Description of Artificial Sequence: Synthetic peptide
  Seed: EWLKTRPILSPLTKG
EWYKTWPLLSLLTKG

SEQ ID NO: 206202 - protein, 15 aa, Artificial Sequence
  Description of Artificial Sequence: Synthetic peptide
  Seed: EWLKTRPILSPLTKG
EWYKTWPLLSVLTKG

SEQ ID NO: 206203 - protein, 15 aa, Artificial Sequence
  Description of Artificial Sequence: Synthetic peptide
  Seed: EWLKTRPILSPLTKG
EWYKTYPFLSALTKG

SEQ ID NO: 206204 - protein, 15 aa, Artificial Sequence
  Description of Artificial Sequence: Synthetic peptide
  Seed: EWLKTRPILSPLTKG
EWYKTYPFLSFLTKG

SEQ ID NO: 206205 - protein, 15 aa, Artificial Sequence
  Description of Artificial Sequence: Synthetic peptide
  Seed: EWLKTRPILSPLTKG
EWYKTYPFLSILTKG

SEQ ID NO: 206206 - protein, 15 aa, Artificial Sequence
  Description of Artificial Sequence: Synthetic peptide
  Seed: EWLKTRPILSPLTKG
EWYKTYPFLSLLTKG

SEQ ID NO: 206207 - protein, 15 aa, Artificial Sequence
  Description of Artificial Sequence: Synthetic peptide
  Seed: EWLKTRPILSPLTKG
EWYKTYPFLSMLTKG

SEQ ID NO: 206208 - protein, 15 aa, Artificial Sequence
  Description of Artificial Sequence: Synthetic peptide
  Seed: EWLKTRPILSPLTKG
EWYKTYPFLSTLTKG

SEQ ID NO: 206209 - protein, 15 aa, Artificial Sequence
  Description of Artificial Sequence: Synthetic peptide
  Seed: EWLKTRPILSPLTKG
EWYKTYPFLSVLTKG

SEQ ID NO: 206210 - protein, 15 aa, Artificial Sequence
  Description of Artificial Sequence: Synthetic peptide
  Seed: EWLKTRPILSPLTKG
EWYKTYPFLSYLTKG

SEQ ID NO: 206211 - protein, 15 aa, Artificial Sequence
  Description of Artificial Sequence: Synthetic peptide
  Seed: EWLKTRPILSPLTKG
EWYKTYPLLSFLTKG

SEQ ID NO: 206212 - protein, 15 aa, Artificial Sequence
  Description of Artificial Sequence: Synthetic peptide
  Seed: EWLKTRPILSPLTKG
EWYKTYPLLSILTKG

SEQ ID NO: 206213 - protein, 15 aa, Artificial Sequence
  Description of Artificial Sequence: Synthetic peptide
  Seed: EWLKTRPILSPLTKG
EWYKTYPLLSLLTKG

SEQ ID NO: 206214 - protein, 15 aa, Artificial Sequence
  Description of Artificial Sequence: Synthetic peptide
  Seed: EWLKTRPILSPLTKG
EWYKTYPLLSVLTKG

SEQ ID NO: 206215 - protein, 15 aa, Artificial Sequence
  Description of Artificial Sequence: Synthetic peptide
  Seed: EWLKTRPILSPLTKG
EWYKTYPMLSILTKG

SEQ ID NO: 206216 - protein, 15 aa, Artificial Sequence
  Description of Artificial Sequence: Synthetic peptide
  Seed: EWLKTRPILSPLTKG
EWYKTYPMLSLLTKG

SEQ ID NO: 206217 - protein, 15 aa, Artificial Sequence
  Description of Artificial Sequence: Synthetic peptide
  Seed: EWLKTRPILSPLTKG
EWYKTYPYLSLLTKG

SEQ ID NO: 206218 - protein, 15 aa, Artificial Sequence
  Description of Artificial Sequence: Synthetic peptide
  Seed: EWLKTRPILSPLTKG
EWLKARPILAPLTKG

SEQ ID NO: 206219 - protein, 15 aa, Artificial Sequence
  Description of Artificial Sequence: Synthetic peptide
  Seed: EWLKTRPILSPLTKG
EWLKARPILGPLTKG

SEQ ID NO: 206220 - protein, 15 aa, Artificial Sequence
  Description of Artificial Sequence: Synthetic peptide
  Seed: EWLKTRPILSPLTKG
EWLKARPILIPLTKG

SEQ ID NO: 206221 - protein, 15 aa, Artificial Sequence
  Description of Artificial Sequence: Synthetic peptide
  Seed: EWLKTRPILSPLTKG
EWLKARPILLPLTKG

SEQ ID NO: 206222 - protein, 15 aa, Artificial Sequence
  Description of Artificial Sequence: Synthetic peptide
  Seed: EWLKTRPILSPLTKG
EWLKARPILMPLTKG

SEQ ID NO: 206223 - protein, 15 aa, Artificial Sequence
  Description of Artificial Sequence: Synthetic peptide
  Seed: EWLKTRPILSPLTKG
EWLKARPILSPLTKG

SEQ ID NO: 206224 - protein, 15 aa, Artificial Sequence
  Description of Artificial Sequence: Synthetic peptide
  Seed: EWLKTRPILSPLTKG
EWLKARPILTPLTKG

SEQ ID NO: 206225 - protein, 15 aa, Artificial Sequence
  Description of Artificial Sequence: Synthetic peptide
  Seed: EWLKTRPILSPLTKG
EWLKARPILVPLTKG

SEQ ID NO: 206226 - protein, 15 aa, Artificial Sequence
  Description of Artificial Sequence: Synthetic peptide
  Seed: EWLKTRPILSPLTKG
EWLKCRPILAPLTKG

SEQ ID NO: 206227 - protein, 15 aa, Artificial Sequence
  Description of Artificial Sequence: Synthetic peptide
  Seed: EWLKTRPILSPLTKG
EWLKFRPALAPLAKG

SEQ ID NO: 206228 - protein, 15 aa, Artificial Sequence
  Description of Artificial Sequence: Synthetic peptide
  Seed: EWLKTRPILSPLTKG
EWLKFRPALAPLIKG

SEQ ID NO: 206229 - protein, 15 aa, Artificial Sequence
  Description of Artificial Sequence: Synthetic peptide
  Seed: EWLKTRPILSPLTKG
EWLKFRPALAPLLKG

SEQ ID NO: 206230 - protein, 15 aa, Artificial Sequence
  Description of Artificial Sequence: Synthetic peptide
  Seed: EWLKTRPILSPLTKG
EWLKFRPALAPLMKG

SEQ ID NO: 206231 - protein, 15 aa, Artificial Sequence
  Description of Artificial Sequence: Synthetic peptide
  Seed: EWLKTRPILSPLTKG
EWLKFRPALAPLSKG

SEQ ID NO: 206232 - protein, 15 aa, Artificial Sequence
  Description of Artificial Sequence: Synthetic peptide
  Seed: EWLKTRPILSPLTKG
EWLKFRPALAPLVKG

SEQ ID NO: 206233 - protein, 15 aa, Artificial Sequence
  Description of Artificial Sequence: Synthetic peptide
  Seed: EWLKTRPILSPLTKG
EWLKFRPALDPLAKG

SEQ ID NO: 206234 - protein, 15 aa, Artificial Sequence
  Description of Artificial Sequence: Synthetic peptide
  Seed: EWLKTRPILSPLTKG
EWLKFRPALDPLSKG

SEQ ID NO: 206235 - protein, 15 aa, Artificial Sequence
  Description of Artificial Sequence: Synthetic peptide
  Seed: EWLKTRPILSPLTKG
EWLKFRPALGPLAKG

SEQ ID NO: 206236 - protein, 15 aa, Artificial Sequence
  Description of Artificial Sequence: Synthetic peptide
  Seed: EWLKTRPILSPLTKG
EWLKFRPALGPLIKG

SEQ ID NO: 206237 - protein, 15 aa, Artificial Sequence
  Description of Artificial Sequence: Synthetic peptide
  Seed: EWLKTRPILSPLTKG
EWLKFRPALGPLLKG

SEQ ID NO: 206238 - protein, 15 aa, Artificial Sequence
  Description of Artificial Sequence: Synthetic peptide
  Seed: EWLKTRPILSPLTKG
EWLKFRPALGPLMKG

SEQ ID NO: 206239 - protein, 15 aa, Artificial Sequence
  Description of Artificial Sequence: Synthetic peptide
  Seed: EWLKTRPILSPLTKG
EWLKFRPALGPLVKG

SEQ ID NO: 206240 - protein, 15 aa, Artificial Sequence
  Description of Artificial Sequence: Synthetic peptide
  Seed: EWLKTRPILSPLTKG
EWLKFRPALIPLAKG

SEQ ID NO: 206241 - protein, 15 aa, Artificial Sequence
  Description of Artificial Sequence: Synthetic peptide
  Seed: EWLKTRPILSPLTKG
EWLKFRPALIPLSKG

SEQ ID NO: 206242 - protein, 15 aa, Artificial Sequence
  Description of Artificial Sequence: Synthetic peptide
  Seed: EWLKTRPILSPLTKG
EWLKFRPALNPLAKG

SEQ ID NO: 206243 - protein, 15 aa, Artificial Sequence
  Description of Artificial Sequence: Synthetic peptide
  Seed: EWLKTRPILSPLTKG
EWLKFRPALNPLDKG

SEQ ID NO: 206244 - protein, 15 aa, Artificial Sequence
  Description of Artificial Sequence: Synthetic peptide
  Seed: EWLKTRPILSPLTKG
EWLKFRPALNPLEKG

SEQ ID NO: 206245 - protein, 15 aa, Artificial Sequence
  Description of Artificial Sequence: Synthetic peptide
  Seed: EWLKTRPILSPLTKG
EWLKFRPALNPLGKG

SEQ ID NO: 206246 - protein, 15 aa, Artificial Sequence
  Description of Artificial Sequence: Synthetic peptide
  Seed: EWLKTRPILSPLTKG
EWLKFRPALNPLHKG

SEQ ID NO: 206247 - protein, 15 aa, Artificial Sequence
  Description of Artificial Sequence: Synthetic peptide
  Seed: EWLKTRPILSPLTKG
EWLKFRPALNPLIKG

SEQ ID NO: 206248 - protein, 15 aa, Artificial Sequence
  Description of Artificial Sequence: Synthetic peptide
  Seed: EWLKTRPILSPLTKG
EWLKFRPALNPLLKG

SEQ ID NO: 206249 - protein, 15 aa, Artificial Sequence
  Description of Artificial Sequence: Synthetic peptide
  Seed: EWLKTRPILSPLTKG
EWLKFRPALNPLMKG

SEQ ID NO: 206250 - protein, 15 aa, Artificial Sequence
  Description of Artificial Sequence: Synthetic peptide
  Seed: EWLKTRPILSPLTKG
EWLKFRPALNPLNKG

SEQ ID NO: 206251 - protein, 15 aa, Artificial Sequence
  Description of Artificial Sequence: Synthetic peptide
  Seed: EWLKTRPILSPLTKG
EWLKFRPALNPLPKG

SEQ ID NO: 206252 - protein, 15 aa, Artificial Sequence
  Description of Artificial Sequence: Synthetic peptide
  Seed: EWLKTRPILSPLTKG
EWLKFRPALNPLQKG

SEQ ID NO: 206253 - protein, 15 aa, Artificial Sequence
  Description of Artificial Sequence: Synthetic peptide
  Seed: EWLKTRPILSPLTKG
EWLKFRPALNPLSKG

SEQ ID NO: 206254 - protein, 15 aa, Artificial Sequence
  Description of Artificial Sequence: Synthetic peptide
  Seed: EWLKTRPILSPLTKG
EWLKFRPALNPLTKG

SEQ ID NO: 206255 - protein, 15 aa, Artificial Sequence
  Description of Artificial Sequence: Synthetic peptide
  Seed: EWLKTRPILSPLTKG
EWLKFRPALNPLVKG

SEQ ID NO: 206256 - protein, 15 aa, Artificial Sequence
  Description of Artificial Sequence: Synthetic peptide
  Seed: EWLKTRPILSPLTKG
EWLKFRPALPPLAKG

SEQ ID NO: 206257 - protein, 15 aa, Artificial Sequence
  Description of Artificial Sequence: Synthetic peptide
  Seed: EWLKTRPILSPLTKG
EWLKFRPALPPLIKG

SEQ ID NO: 206258 - protein, 15 aa, Artificial Sequence
  Description of Artificial Sequence: Synthetic peptide
  Seed: EWLKTRPILSPLTKG
EWLKFRPALPPLLKG

SEQ ID NO: 206259 - protein, 15 aa, Artificial Sequence
  Description of Artificial Sequence: Synthetic peptide
  Seed: EWLKTRPILSPLTKG
EWLKFRPALPPLSKG

SEQ ID NO: 206260 - protein, 15 aa, Artificial Sequence
  Description of Artificial Sequence: Synthetic peptide
  Seed: EWLKTRPILSPLTKG
EWLKFRPALPPLVKG

SEQ ID NO: 206261 - protein, 15 aa, Artificial Sequence
  Description of Artificial Sequence: Synthetic peptide
  Seed: EWLKTRPILSPLTKG
EWLKFRPALSPLDKG

SEQ ID NO: 206262 - protein, 15 aa, Artificial Sequence
  Description of Artificial Sequence: Synthetic peptide
  Seed: EWLKTRPILSPLTKG
EWLKFRPALSPLEKG

SEQ ID NO: 206263 - protein, 15 aa, Artificial Sequence
  Description of Artificial Sequence: Synthetic peptide
  Seed: EWLKTRPILSPLTKG
EWLKFRPALSPLFKG

SEQ ID NO: 206264 - protein, 15 aa, Artificial Sequence
  Description of Artificial Sequence: Synthetic peptide
  Seed: EWLKTRPILSPLTKG
EWLKFRPALSPLGKG

SEQ ID NO: 206265 - protein, 15 aa, Artificial Sequence
  Description of Artificial Sequence: Synthetic peptide
  Seed: EWLKTRPILSPLTKG
EWLKFRPALSPLHKG

SEQ ID NO: 206266 - protein, 15 aa, Artificial Sequence
  Description of Artificial Sequence: Synthetic peptide
  Seed: EWLKTRPILSPLTKG
EWLKFRPALSPLIKG

SEQ ID NO: 206267 - protein, 15 aa, Artificial Sequence
  Description of Artificial Sequence: Synthetic peptide
  Seed: EWLKTRPILSPLTKG
EWLKFRPALSPLKKG

SEQ ID NO: 206268 - protein, 15 aa, Artificial Sequence
  Description of Artificial Sequence: Synthetic peptide
  Seed: EWLKTRPILSPLTKG
EWLKFRPALSPLLKG

SEQ ID NO: 206269 - protein, 15 aa, Artificial Sequence
  Description of Artificial Sequence: Synthetic peptide
  Seed: EWLKTRPILSPLTKG
EWLKFRPALSPLMKG

SEQ ID NO: 206270 - protein, 15 aa, Artificial Sequence
  Description of Artificial Sequence: Synthetic peptide
  Seed: EWLKTRPILSPLTKG
EWLKFRPALSPLNKG

SEQ ID NO: 206271 - protein, 15 aa, Artificial Sequence
  Description of Artificial Sequence: Synthetic peptide
  Seed: EWLKTRPILSPLTKG
EWLKFRPALSPLPKG

SEQ ID NO: 206272 - protein, 15 aa, Artificial Sequence
  Description of Artificial Sequence: Synthetic peptide
  Seed: EWLKTRPILSPLTKG
EWLKFRPALSPLQKG

SEQ ID NO: 206273 - protein, 15 aa, Artificial Sequence
  Description of Artificial Sequence: Synthetic peptide
  Seed: EWLKTRPILSPLTKG
EWLKFRPALSPLRKG

SEQ ID NO: 206274 - protein, 15 aa, Artificial Sequence
  Description of Artificial Sequence: Synthetic peptide
  Seed: EWLKTRPILSPLTKG
EWLKFRPALSPLSKG

SEQ ID NO: 206275 - protein, 15 aa, Artificial Sequence
  Description of Artificial Sequence: Synthetic peptide
  Seed: EWLKTRPILSPLTKG
EWLKFRPALSPLTKG

SEQ ID NO: 206276 - protein, 15 aa, Artificial Sequence
  Description of Artificial Sequence: Synthetic peptide
  Seed: EWLKTRPILSPLTKG
EWLKFRPALSPLVKG

SEQ ID NO: 206277 - protein, 15 aa, Artificial Sequence
  Description of Artificial Sequence: Synthetic peptide
  Seed: EWLKTRPILSPLTKG
EWLKFRPALTPLAKG

SEQ ID NO: 206278 - protein, 15 aa, Artificial Sequence
  Description of Artificial Sequence: Synthetic peptide
  Seed: EWLKTRPILSPLTKG
EWLKFRPALTPLDKG

SEQ ID NO: 206279 - protein, 15 aa, Artificial Sequence
  Description of Artificial Sequence: Synthetic peptide
  Seed: EWLKTRPILSPLTKG
EWLKFRPALTPLEKG

SEQ ID NO: 206280 - protein, 15 aa, Artificial Sequence
  Description of Artificial Sequence: Synthetic peptide
  Seed: EWLKTRPILSPLTKG
EWLKFRPALTPLGKG

SEQ ID NO: 206281 - protein, 15 aa, Artificial Sequence
  Description of Artificial Sequence: Synthetic peptide
  Seed: EWLKTRPILSPLTKG
EWLKFRPALTPLHKG

SEQ ID NO: 206282 - protein, 15 aa, Artificial Sequence
  Description of Artificial Sequence: Synthetic peptide
  Seed: EWLKTRPILSPLTKG
EWLKFRPALTPLIKG

SEQ ID NO: 206283 - protein, 15 aa, Artificial Sequence
  Description of Artificial Sequence: Synthetic peptide
  Seed: EWLKTRPILSPLTKG
EWLKFRPALTPLLKG

SEQ ID NO: 206284 - protein, 15 aa, Artificial Sequence
  Description of Artificial Sequence: Synthetic peptide
  Seed: EWLKTRPILSPLTKG
EWLKFRPALTPLMKG

SEQ ID NO: 206285 - protein, 15 aa, Artificial Sequence
  Description of Artificial Sequence: Synthetic peptide
  Seed: EWLKTRPILSPLTKG
EWLKFRPALTPLNKG

SEQ ID NO: 206286 - protein, 15 aa, Artificial Sequence
  Description of Artificial Sequence: Synthetic peptide
  Seed: EWLKTRPILSPLTKG
EWLKFRPALTPLPKG

SEQ ID NO: 206287 - protein, 15 aa, Artificial Sequence
  Description of Artificial Sequence: Synthetic peptide
  Seed: EWLKTRPILSPLTKG
EWLKFRPALTPLQKG

SEQ ID NO: 206288 - protein, 15 aa, Artificial Sequence
  Description of Artificial Sequence: Synthetic peptide
  Seed: EWLKTRPILSPLTKG
EWLKFRPALTPLSKG

SEQ ID NO: 206289 - protein, 15 aa, Artificial Sequence
  Description of Artificial Sequence: Synthetic peptide
  Seed: EWLKTRPILSPLTKG
EWLKFRPALTPLTKG

SEQ ID NO: 206290 - protein, 15 aa, Artificial Sequence
  Description of Artificial Sequence: Synthetic peptide
  Seed: EWLKTRPILSPLTKG
EWLKFRPALTPLVKG

SEQ ID NO: 206291 - protein, 15 aa, Artificial Sequence
  Description of Artificial Sequence: Synthetic peptide
  Seed: EWLKTRPILSPLTKG
EWLKFRPALVPLAKG

SEQ ID NO: 206292 - protein, 15 aa, Artificial Sequence
  Description of Artificial Sequence: Synthetic peptide
  Seed: EWLKTRPILSPLTKG
EWLKFRPALVPLGKG

SEQ ID NO: 206293 - protein, 15 aa, Artificial Sequence
  Description of Artificial Sequence: Synthetic peptide
  Seed: EWLKTRPILSPLTKG
EWLKFRPALVPLNKG

SEQ ID NO: 206294 - protein, 15 aa, Artificial Sequence
  Description of Artificial Sequence: Synthetic peptide
  Seed: EWLKTRPILSPLTKG
EWLKFRPALVPLQKG

SEQ ID NO: 206295 - protein, 15 aa, Artificial Sequence
  Description of Artificial Sequence: Synthetic peptide
  Seed: EWLKTRPILSPLTKG
EWLKFRPALVPLSKG

SEQ ID NO: 206296 - protein, 15 aa, Artificial Sequence
  Description of Artificial Sequence: Synthetic peptide
  Seed: EWLKTRPILSPLTKG
EWLKFRPDLNPLAKG

SEQ ID NO: 206297 - protein, 15 aa, Artificial Sequence
  Description of Artificial Sequence: Synthetic peptide
  Seed: EWLKTRPILSPLTKG
EWLKFRPDLNPLSKG

SEQ ID NO: 206298 - protein, 15 aa, Artificial Sequence
  Description of Artificial Sequence: Synthetic peptide
  Seed: EWLKTRPILSPLTKG
EWLKFRPDLSPLAKG

SEQ ID NO: 206299 - protein, 15 aa, Artificial Sequence
  Description of Artificial Sequence: Synthetic peptide
  Seed: EWLKTRPILSPLTKG
EWLKFRPDLSPLSKG

SEQ ID NO: 206300 - protein, 15 aa, Artificial Sequence
  Description of Artificial Sequence: Synthetic peptide
  Seed: EWLKTRPILSPLTKG
EWLKFRPDLTPLAKG

SEQ ID NO: 206301 - protein, 15 aa, Artificial Sequence
  Description of Artificial Sequence: Synthetic peptide
  Seed: EWLKTRPILSPLTKG
EWLKFRPDLTPLSKG

SEQ ID NO: 206302 - protein, 15 aa, Artificial Sequence
  Description of Artificial Sequence: Synthetic peptide
  Seed: EWLKTRPILSPLTKG
EWLKFRPDLVPLAKG

SEQ ID NO: 206303 - protein, 15 aa, Artificial Sequence
  Description of Artificial Sequence: Synthetic peptide
  Seed: EWLKTRPILSPLTKG
EWLKFRPELNPLAKG

SEQ ID NO: 206304 - protein, 15 aa, Artificial Sequence
  Description of Artificial Sequence: Synthetic peptide
  Seed: EWLKTRPILSPLTKG
EWLKFRPELNPLGKG

SEQ ID NO: 206305 - protein, 15 aa, Artificial Sequence
  Description of Artificial Sequence: Synthetic peptide
  Seed: EWLKTRPILSPLTKG
EWLKFRPELNPLSKG

SEQ ID NO: 206306 - protein, 15 aa, Artificial Sequence
  Description of Artificial Sequence: Synthetic peptide
  Seed: EWLKTRPILSPLTKG
EWLKFRPELSPLAKG

SEQ ID NO: 206307 - protein, 15 aa, Artificial Sequence
  Description of Artificial Sequence: Synthetic peptide
  Seed: EWLKTRPILSPLTKG
EWLKFRPELSPLSKG

SEQ ID NO: 206308 - protein, 15 aa, Artificial Sequence
  Description of Artificial Sequence: Synthetic peptide
  Seed: EWLKTRPILSPLTKG
EWLKFRPELTPLAKG

SEQ ID NO: 206309 - protein, 15 aa, Artificial Sequence
  Description of Artificial Sequence: Synthetic peptide
  Seed: EWLKTRPILSPLTKG
EWLKFRPELTPLSKG

SEQ ID NO: 206310 - protein, 15 aa, Artificial Sequence
  Description of Artificial Sequence: Synthetic peptide
  Seed: EWLKTRPILSPLTKG
EWLKFRPFLAPLAKG

SEQ ID NO: 206311 - protein, 15 aa, Artificial Sequence
  Description of Artificial Sequence: Synthetic peptide
  Seed: EWLKTRPILSPLTKG
EWLKFRPFLAPLFKG

SEQ ID NO: 206312 - protein, 15 aa, Artificial Sequence
  Description of Artificial Sequence: Synthetic peptide
  Seed: EWLKTRPILSPLTKG
EWLKFRPFLAPLGKG

SEQ ID NO: 206313 - protein, 15 aa, Artificial Sequence
  Description of Artificial Sequence: Synthetic peptide
  Seed: EWLKTRPILSPLTKG
EWLKFRPFLAPLHKG

SEQ ID NO: 206314 - protein, 15 aa, Artificial Sequence
  Description of Artificial Sequence: Synthetic peptide
  Seed: EWLKTRPILSPLTKG
EWLKFRPFLAPLIKG

SEQ ID NO: 206315 - protein, 15 aa, Artificial Sequence
  Description of Artificial Sequence: Synthetic peptide
  Seed: EWLKTRPILSPLTKG
EWLKFRPFLAPLKKG

SEQ ID NO: 206316 - protein, 15 aa, Artificial Sequence
  Description of Artificial Sequence: Synthetic peptide
  Seed: EWLKTRPILSPLTKG
EWLKFRPFLAPLLKG

SEQ ID NO: 206317 - protein, 15 aa, Artificial Sequence
  Description of Artificial Sequence: Synthetic peptide
  Seed: EWLKTRPILSPLTKG
EWLKFRPFLAPLMKG

SEQ ID NO: 206318 - protein, 15 aa, Artificial Sequence
  Description of Artificial Sequence: Synthetic peptide
  Seed: EWLKTRPILSPLTKG
EWLKFRPFLAPLNKG

SEQ ID NO: 206319 - protein, 15 aa, Artificial Sequence
  Description of Artificial Sequence: Synthetic peptide
  Seed: EWLKTRPILSPLTKG
EWLKFRPFLAPLQKG

SEQ ID NO: 206320 - protein, 15 aa, Artificial Sequence
  Description of Artificial Sequence: Synthetic peptide
  Seed: EWLKTRPILSPLTKG
EWLKFRPFLAPLRKG

SEQ ID NO: 206321 - protein, 15 aa, Artificial Sequence
  Description of Artificial Sequence: Synthetic peptide
  Seed: EWLKTRPILSPLTKG
EWLKFRPFLAPLSKG

SEQ ID NO: 206322 - protein, 15 aa, Artificial Sequence
  Description of Artificial Sequence: Synthetic peptide
  Seed: EWLKTRPILSPLTKG
EWLKFRPFLAPLTKG

SEQ ID NO: 206323 - protein, 15 aa, Artificial Sequence
  Description of Artificial Sequence: Synthetic peptide
  Seed: EWLKTRPILSPLTKG
EWLKFRPFLAPLVKG

SEQ ID NO: 206324 - protein, 15 aa, Artificial Sequence
  Description of Artificial Sequence: Synthetic peptide
  Seed: EWLKTRPILSPLTKG
EWLKFRPFLGPLAKG

SEQ ID NO: 206325 - protein, 15 aa, Artificial Sequence
  Description of Artificial Sequence: Synthetic peptide
  Seed: EWLKTRPILSPLTKG
EWLKFRPFLGPLGKG

SEQ ID NO: 206326 - protein, 15 aa, Artificial Sequence
  Description of Artificial Sequence: Synthetic peptide
  Seed: EWLKTRPILSPLTKG
EWLKFRPFLGPLHKG

SEQ ID NO: 206327 - protein, 15 aa, Artificial Sequence
  Description of Artificial Sequence: Synthetic peptide
  Seed: EWLKTRPILSPLTKG
EWLKFRPFLGPLIKG

SEQ ID NO: 206328 - protein, 15 aa, Artificial Sequence
  Description of Artificial Sequence: Synthetic peptide
  Seed: EWLKTRPILSPLTKG
EWLKFRPFLGPLKKG

SEQ ID NO: 206329 - protein, 15 aa, Artificial Sequence
  Description of Artificial Sequence: Synthetic peptide
  Seed: EWLKTRPILSPLTKG
EWLKFRPFLGPLLKG

SEQ ID NO: 206330 - protein, 15 aa, Artificial Sequence
  Description of Artificial Sequence: Synthetic peptide
  Seed: EWLKTRPILSPLTKG
EWLKFRPFLGPLMKG

SEQ ID NO: 206331 - protein, 15 aa, Artificial Sequence
  Description of Artificial Sequence: Synthetic peptide
  Seed: EWLKTRPILSPLTKG
EWLKFRPFLGPLRKG

SEQ ID NO: 206332 - protein, 15 aa, Artificial Sequence
  Description of Artificial Sequence: Synthetic peptide
  Seed: EWLKTRPILSPLTKG
EWLKFRPFLGPLSKG

SEQ ID NO: 206333 - protein, 15 aa, Artificial Sequence
  Description of Artificial Sequence: Synthetic peptide
  Seed: EWLKTRPILSPLTKG
EWLKFRPFLGPLTKG

SEQ ID NO: 206334 - protein, 15 aa, Artificial Sequence
  Description of Artificial Sequence: Synthetic peptide
  Seed: EWLKTRPILSPLTKG
EWLKFRPFLGPLVKG

SEQ ID NO: 206335 - protein, 15 aa, Artificial Sequence
  Description of Artificial Sequence: Synthetic peptide
  Seed: EWLKTRPILSPLTKG
EWLKFRPFLNPLAKG

SEQ ID NO: 206336 - protein, 15 aa, Artificial Sequence
  Description of Artificial Sequence: Synthetic peptide
  Seed: EWLKTRPILSPLTKG
EWLKFRPFLNPLDKG

SEQ ID NO: 206337 - protein, 15 aa, Artificial Sequence
  Description of Artificial Sequence: Synthetic peptide
  Seed: EWLKTRPILSPLTKG
EWLKFRPFLNPLGKG

SEQ ID NO: 206338 - protein, 15 aa, Artificial Sequence
  Description of Artificial Sequence: Synthetic peptide
  Seed: EWLKTRPILSPLTKG
EWLKFRPFLNPLIKG

SEQ ID NO: 206339 - protein, 15 aa, Artificial Sequence
  Description of Artificial Sequence: Synthetic peptide
  Seed: EWLKTRPILSPLTKG
EWLKFRPFLNPLLKG

SEQ ID NO: 206340 - protein, 15 aa, Artificial Sequence
  Description of Artificial Sequence: Synthetic peptide
  Seed: EWLKTRPILSPLTKG
EWLKFRPFLNPLMKG

SEQ ID NO: 206341 - protein, 15 aa, Artificial Sequence
  Description of Artificial Sequence: Synthetic peptide
  Seed: EWLKTRPILSPLTKG
EWLKFRPFLNPLRKG

SEQ ID NO: 206342 - protein, 15 aa, Artificial Sequence
  Description of Artificial Sequence: Synthetic peptide
  Seed: EWLKTRPILSPLTKG
EWLKFRPFLNPLSKG

SEQ ID NO: 206343 - protein, 15 aa, Artificial Sequence
  Description of Artificial Sequence: Synthetic peptide
  Seed: EWLKTRPILSPLTKG
EWLKFRPFLNPLTKG

SEQ ID NO: 206344 - protein, 15 aa, Artificial Sequence
  Description of Artificial Sequence: Synthetic peptide
  Seed: EWLKTRPILSPLTKG
EWLKFRPFLNPLVKG

SEQ ID NO: 206345 - protein, 15 aa, Artificial Sequence
  Description of Artificial Sequence: Synthetic peptide
  Seed: EWLKTRPILSPLTKG
EWLKFRPFLPPLAKG

SEQ ID NO: 206346 - protein, 15 aa, Artificial Sequence
  Description of Artificial Sequence: Synthetic peptide
  Seed: EWLKTRPILSPLTKG
EWLKFRPFLPPLIKG

SEQ ID NO: 206347 - protein, 15 aa, Artificial Sequence
  Description of Artificial Sequence: Synthetic peptide
  Seed: EWLKTRPILSPLTKG
EWLKFRPFLPPLLKG

SEQ ID NO: 206348 - protein, 15 aa, Artificial Sequence
  Description of Artificial Sequence: Synthetic peptide
  Seed: EWLKTRPILSPLTKG
EWLKFRPFLPPLVKG

SEQ ID NO: 206349 - protein, 15 aa, Artificial Sequence
  Description of Artificial Sequence: Synthetic peptide
  Seed: EWLKTRPILSPLTKG
EWLKFRPFLSPLAKG

SEQ ID NO: 206350 - protein, 15 aa, Artificial Sequence
  Description of Artificial Sequence: Synthetic peptide
  Seed: EWLKTRPILSPLTKG
EWLKFRPFLSPLCKG

SEQ ID NO: 206351 - protein, 15 aa, Artificial Sequence
  Description of Artificial Sequence: Synthetic peptide
  Seed: EWLKTRPILSPLTKG
EWLKFRPFLSPLDKG

SEQ ID NO: 206352 - protein, 15 aa, Artificial Sequence
  Description of Artificial Sequence: Synthetic peptide
  Seed: EWLKTRPILSPLTKG
EWLKFRPFLSPLFKG

SEQ ID NO: 206353 - protein, 15 aa, Artificial Sequence
  Description of Artificial Sequence: Synthetic peptide
  Seed: EWLKTRPILSPLTKG
EWLKFRPFLSPLGKG

SEQ ID NO: 206354 - protein, 15 aa, Artificial Sequence
  Description of Artificial Sequence: Synthetic peptide
  Seed: EWLKTRPILSPLTKG
EWLKFRPFLSPLHKG

SEQ ID NO: 206355 - protein, 15 aa, Artificial Sequence
  Description of Artificial Sequence: Synthetic peptide
  Seed: EWLKTRPILSPLTKG
EWLKFRPFLSPLIKG

SEQ ID NO: 206356 - protein, 15 aa, Artificial Sequence
  Description of Artificial Sequence: Synthetic peptide
  Seed: EWLKTRPILSPLTKG
EWLKFRPFLSPLKKG

SEQ ID NO: 206357 - protein, 15 aa, Artificial Sequence
  Description of Artificial Sequence: Synthetic peptide
  Seed: EWLKTRPILSPLTKG
EWLKFRPFLSPLLKG

SEQ ID NO: 206358 - protein, 15 aa, Artificial Sequence
  Description of Artificial Sequence: Synthetic peptide
  Seed: EWLKTRPILSPLTKG
EWLKFRPFLSPLMKG

SEQ ID NO: 206359 - protein, 15 aa, Artificial Sequence
  Description of Artificial Sequence: Synthetic peptide
  Seed: EWLKTRPILSPLTKG
EWLKFRPFLSPLNKG

SEQ ID NO: 206360 - protein, 15 aa, Artificial Sequence
  Description of Artificial Sequence: Synthetic peptide
  Seed: EWLKTRPILSPLTKG
EWLKFRPFLSPLPKG

SEQ ID NO: 206361 - protein, 15 aa, Artificial Sequence
  Description of Artificial Sequence: Synthetic peptide
  Seed: EWLKTRPILSPLTKG
EWLKFRPFLSPLQKG

SEQ ID NO: 206362 - protein, 15 aa, Artificial Sequence
  Description of Artificial Sequence: Synthetic peptide
  Seed: EWLKTRPILSPLTKG
EWLKFRPFLSPLRKG

SEQ ID NO: 206363 - protein, 15 aa, Artificial Sequence
  Description of Artificial Sequence: Synthetic peptide
  Seed: EWLKTRPILSPLTKG
EWLKFRPFLSPLSKG

SEQ ID NO: 206364 - protein, 15 aa, Artificial Sequence
  Description of Artificial Sequence: Synthetic peptide
  Seed: EWLKTRPILSPLTKG
EWLKFRPFLSPLTKG

SEQ ID NO: 206365 - protein, 15 aa, Artificial Sequence
  Description of Artificial Sequence: Synthetic peptide
  Seed: EWLKTRPILSPLTKG
EWLKFRPFLSPLVKG

SEQ ID NO: 206366 - protein, 15 aa, Artificial Sequence
  Description of Artificial Sequence: Synthetic peptide
  Seed: EWLKTRPILSPLTKG
EWLKFRPFLTPLAKG

SEQ ID NO: 206367 - protein, 15 aa, Artificial Sequence
  Description of Artificial Sequence: Synthetic peptide
  Seed: EWLKTRPILSPLTKG
EWLKFRPFLTPLDKG

SEQ ID NO: 206368 - protein, 15 aa, Artificial Sequence
  Description of Artificial Sequence: Synthetic peptide
  Seed: EWLKTRPILSPLTKG
EWLKFRPFLTPLEKG

SEQ ID NO: 206369 - protein, 15 aa, Artificial Sequence
  Description of Artificial Sequence: Synthetic peptide
  Seed: EWLKTRPILSPLTKG
EWLKFRPFLTPLGKG

SEQ ID NO: 206370 - protein, 15 aa, Artificial Sequence
  Description of Artificial Sequence: Synthetic peptide
  Seed: EWLKTRPILSPLTKG
EWLKFRPFLTPLHKG

SEQ ID NO: 206371 - protein, 15 aa, Artificial Sequence
  Description of Artificial Sequence: Synthetic peptide
  Seed: EWLKTRPILSPLTKG
EWLKFRPFLTPLIKG

SEQ ID NO: 206372 - protein, 15 aa, Artificial Sequence
  Description of Artificial Sequence: Synthetic peptide
  Seed: EWLKTRPILSPLTKG
EWLKFRPFLTPLKKG

SEQ ID NO: 206373 - protein, 15 aa, Artificial Sequence
  Description of Artificial Sequence: Synthetic peptide
  Seed: EWLKTRPILSPLTKG
EWLKFRPFLTPLLKG

SEQ ID NO: 206374 - protein, 15 aa, Artificial Sequence
  Description of Artificial Sequence: Synthetic peptide
  Seed: EWLKTRPILSPLTKG
EWLKFRPFLTPLMKG

SEQ ID NO: 206375 - protein, 15 aa, Artificial Sequence
  Description of Artificial Sequence: Synthetic peptide
  Seed: EWLKTRPILSPLTKG
EWLKFRPFLTPLNKG

SEQ ID NO: 206376 - protein, 15 aa, Artificial Sequence
  Description of Artificial Sequence: Synthetic peptide
  Seed: EWLKTRPILSPLTKG
EWLKFRPFLTPLQKG

SEQ ID NO: 206377 - protein, 15 aa, Artificial Sequence
  Description of Artificial Sequence: Synthetic peptide
  Seed: EWLKTRPILSPLTKG
EWLKFRPFLTPLRKG

SEQ ID NO: 206378 - protein, 15 aa, Artificial Sequence
  Description of Artificial Sequence: Synthetic peptide
  Seed: EWLKTRPILSPLTKG
EWLKFRPFLTPLSKG

SEQ ID NO: 206379 - protein, 15 aa, Artificial Sequence
  Description of Artificial Sequence: Synthetic peptide
  Seed: EWLKTRPILSPLTKG
EWLKFRPFLTPLTKG

SEQ ID NO: 206380 - protein, 15 aa, Artificial Sequence
  Description of Artificial Sequence: Synthetic peptide
  Seed: EWLKTRPILSPLTKG
EWLKFRPFLTPLVKG

SEQ ID NO: 206381 - protein, 15 aa, Artificial Sequence
  Description of Artificial Sequence: Synthetic peptide
  Seed: EWLKTRPILSPLTKG
EWLKFRPFLVPLAKG

SEQ ID NO: 206382 - protein, 15 aa, Artificial Sequence
  Description of Artificial Sequence: Synthetic peptide
  Seed: EWLKTRPILSPLTKG
EWLKFRPFLVPLDKG

SEQ ID NO: 206383 - protein, 15 aa, Artificial Sequence
  Description of Artificial Sequence: Synthetic peptide
  Seed: EWLKTRPILSPLTKG
EWLKFRPFLVPLRKG

SEQ ID NO: 206384 - protein, 15 aa, Artificial Sequence
  Description of Artificial Sequence: Synthetic peptide
  Seed: EWLKTRPILSPLTKG
EWLKFRPHLSPLIKG

SEQ ID NO: 206385 - protein, 15 aa, Artificial Sequence
  Description of Artificial Sequence: Synthetic peptide
  Seed: EWLKTRPILSPLTKG
EWLKFRPHLSPLLKG

SEQ ID NO: 206386 - protein, 15 aa, Artificial Sequence
  Description of Artificial Sequence: Synthetic peptide
  Seed: EWLKTRPILSPLTKG
EWLKFRPHLSPLVKG

SEQ ID NO: 206387 - protein, 15 aa, Artificial Sequence
  Description of Artificial Sequence: Synthetic peptide
  Seed: EWLKTRPILSPLTKG
EWLKFRPILAPLAKG

SEQ ID NO: 206388 - protein, 15 aa, Artificial Sequence
  Description of Artificial Sequence: Synthetic peptide
  Seed: EWLKTRPILSPLTKG
EWLKFRPILAPLGKG

SEQ ID NO: 206389 - protein, 15 aa, Artificial Sequence
  Description of Artificial Sequence: Synthetic peptide
  Seed: EWLKTRPILSPLTKG
EWLKFRPILAPLHKG

SEQ ID NO: 206390 - protein, 15 aa, Artificial Sequence
  Description of Artificial Sequence: Synthetic peptide
  Seed: EWLKTRPILSPLTKG
EWLKFRPILAPLIKG

SEQ ID NO: 206391 - protein, 15 aa, Artificial Sequence
  Description of Artificial Sequence: Synthetic peptide
  Seed: EWLKTRPILSPLTKG
EWLKFRPILAPLKKG

SEQ ID NO: 206392 - protein, 15 aa, Artificial Sequence
  Description of Artificial Sequence: Synthetic peptide
  Seed: EWLKTRPILSPLTKG
EWLKFRPILAPLLKG

SEQ ID NO: 206393 - protein, 15 aa, Artificial Sequence
  Description of Artificial Sequence: Synthetic peptide
  Seed: EWLKTRPILSPLTKG
EWLKFRPILAPLMKG

SEQ ID NO: 206394 - protein, 15 aa, Artificial Sequence
  Description of Artificial Sequence: Synthetic peptide
  Seed: EWLKTRPILSPLTKG
EWLKFRPILAPLNKG

SEQ ID NO: 206395 - protein, 15 aa, Artificial Sequence
  Description of Artificial Sequence: Synthetic peptide
  Seed: EWLKTRPILSPLTKG
EWLKFRPILAPLQKG

SEQ ID NO: 206396 - protein, 15 aa, Artificial Sequence
  Description of Artificial Sequence: Synthetic peptide
  Seed: EWLKTRPILSPLTKG
EWLKFRPILAPLRKG

SEQ ID NO: 206397 - protein, 15 aa, Artificial Sequence
  Description of Artificial Sequence: Synthetic peptide
  Seed: EWLKTRPILSPLTKG
EWLKFRPILAPLSKG

SEQ ID NO: 206398 - protein, 15 aa, Artificial Sequence
  Description of Artificial Sequence: Synthetic peptide
  Seed: EWLKTRPILSPLTKG
EWLKFRPILAPLTKG

SEQ ID NO: 206399 - protein, 15 aa, Artificial Sequence
  Description of Artificial Sequence: Synthetic peptide
  Seed: EWLKTRPILSPLTKG
EWLKFRPILAPLVKG

SEQ ID NO: 206400 - protein, 15 aa, Artificial Sequence
  Description of Artificial Sequence: Synthetic peptide
  Seed: EWLKTRPILSPLTKG
EWLKFRPILDPLAKG

SEQ ID NO: 206401 - protein, 15 aa, Artificial Sequence
  Description of Artificial Sequence: Synthetic peptide
  Seed: EWLKTRPILSPLTKG
EWLKFRPILDPLSKG

SEQ ID NO: 206402 - protein, 15 aa, Artificial Sequence
  Description of Artificial Sequence: Synthetic peptide
  Seed: EWLKTRPILSPLTKG
EWLKFRPILGPLAKG

SEQ ID NO: 206403 - protein, 15 aa, Artificial Sequence
  Description of Artificial Sequence: Synthetic peptide
  Seed: EWLKTRPILSPLTKG
EWLKFRPILGPLIKG

SEQ ID NO: 206404 - protein, 15 aa, Artificial Sequence
  Description of Artificial Sequence: Synthetic peptide
  Seed: EWLKTRPILSPLTKG
EWLKFRPILGPLKKG

SEQ ID NO: 206405 - protein, 15 aa, Artificial Sequence
  Description of Artificial Sequence: Synthetic peptide
  Seed: EWLKTRPILSPLTKG
EWLKFRPILGPLLKG

SEQ ID NO: 206406 - protein, 15 aa, Artificial Sequence
  Description of Artificial Sequence: Synthetic peptide
  Seed: EWLKTRPILSPLTKG
EWLKFRPILGPLMKG

SEQ ID NO: 206407 - protein, 15 aa, Artificial Sequence
  Description of Artificial Sequence: Synthetic peptide
  Seed: EWLKTRPILSPLTKG
EWLKFRPILGPLRKG

SEQ ID NO: 206408 - protein, 15 aa, Artificial Sequence
  Description of Artificial Sequence: Synthetic peptide
  Seed: EWLKTRPILSPLTKG
EWLKFRPILGPLSKG

SEQ ID NO: 206409 - protein, 15 aa, Artificial Sequence
  Description of Artificial Sequence: Synthetic peptide
  Seed: EWLKTRPILSPLTKG
EWLKFRPILGPLTKG

SEQ ID NO: 206410 - protein, 15 aa, Artificial Sequence
  Description of Artificial Sequence: Synthetic peptide
  Seed: EWLKTRPILSPLTKG
EWLKFRPILGPLVKG

SEQ ID NO: 206411 - protein, 15 aa, Artificial Sequence
  Description of Artificial Sequence: Synthetic peptide
  Seed: EWLKTRPILSPLTKG
EWLKFRPILIPLAKG

SEQ ID NO: 206412 - protein, 15 aa, Artificial Sequence
  Description of Artificial Sequence: Synthetic peptide
  Seed: EWLKTRPILSPLTKG
EWLKFRPILIPLSKG

SEQ ID NO: 206413 - protein, 15 aa, Artificial Sequence
  Description of Artificial Sequence: Synthetic peptide
  Seed: EWLKTRPILSPLTKG
EWLKFRPILLPLTKG

SEQ ID NO: 206414 - protein, 15 aa, Artificial Sequence
  Description of Artificial Sequence: Synthetic peptide
  Seed: EWLKTRPILSPLTKG
EWLKFRPILNPLAKG

SEQ ID NO: 206415 - protein, 15 aa, Artificial Sequence
  Description of Artificial Sequence: Synthetic peptide
  Seed: EWLKTRPILSPLTKG
EWLKFRPILNPLCKG

SEQ ID NO: 206416 - protein, 15 aa, Artificial Sequence
  Description of Artificial Sequence: Synthetic peptide
  Seed: EWLKTRPILSPLTKG
EWLKFRPILNPLDKG

SEQ ID NO: 206417 - protein, 15 aa, Artificial Sequence
  Description of Artificial Sequence: Synthetic peptide
  Seed: EWLKTRPILSPLTKG
EWLKFRPILNPLEKG

SEQ ID NO: 206418 - protein, 15 aa, Artificial Sequence
  Description of Artificial Sequence: Synthetic peptide
  Seed: EWLKTRPILSPLTKG
EWLKFRPILNPLGKG

SEQ ID NO: 206419 - protein, 15 aa, Artificial Sequence
  Description of Artificial Sequence: Synthetic peptide
  Seed: EWLKTRPILSPLTKG
EWLKFRPILNPLHKG

SEQ ID NO: 206420 - protein, 15 aa, Artificial Sequence
  Description of Artificial Sequence: Synthetic peptide
  Seed: EWLKTRPILSPLTKG
EWLKFRPILNPLIKG

SEQ ID NO: 206421 - protein, 15 aa, Artificial Sequence
  Description of Artificial Sequence: Synthetic peptide
  Seed: EWLKTRPILSPLTKG
EWLKFRPILNPLLKG

SEQ ID NO: 206422 - protein, 15 aa, Artificial Sequence
  Description of Artificial Sequence: Synthetic peptide
  Seed: EWLKTRPILSPLTKG
EWLKFRPILNPLMKG

SEQ ID NO: 206423 - protein, 15 aa, Artificial Sequence
  Description of Artificial Sequence: Synthetic peptide
  Seed: EWLKTRPILSPLTKG
EWLKFRPILNPLNKG

SEQ ID NO: 206424 - protein, 15 aa, Artificial Sequence
  Description of Artificial Sequence: Synthetic peptide
  Seed: EWLKTRPILSPLTKG
EWLKFRPILNPLPKG

SEQ ID NO: 206425 - protein, 15 aa, Artificial Sequence
  Description of Artificial Sequence: Synthetic peptide
  Seed: EWLKTRPILSPLTKG
EWLKFRPILNPLQKG

SEQ ID NO: 206426 - protein, 15 aa, Artificial Sequence
  Description of Artificial Sequence: Synthetic peptide
  Seed: EWLKTRPILSPLTKG
EWLKFRPILNPLSKG

SEQ ID NO: 206427 - protein, 15 aa, Artificial Sequence
  Description of Artificial Sequence: Synthetic peptide
  Seed: EWLKTRPILSPLTKG
EWLKFRPILNPLTKG

SEQ ID NO: 206428 - protein, 15 aa, Artificial Sequence
  Description of Artificial Sequence: Synthetic peptide
  Seed: EWLKTRPILSPLTKG
EWLKFRPILNPLVKG

SEQ ID NO: 206429 - protein, 15 aa, Artificial Sequence
  Description of Artificial Sequence: Synthetic peptide
  Seed: EWLKTRPILSPLTKG
EWLKFRPILPPLAKG

SEQ ID NO: 206430 - protein, 15 aa, Artificial Sequence
  Description of Artificial Sequence: Synthetic peptide
  Seed: EWLKTRPILSPLTKG
EWLKFRPILPPLIKG

SEQ ID NO: 206431 - protein, 15 aa, Artificial Sequence
  Description of Artificial Sequence: Synthetic peptide
  Seed: EWLKTRPILSPLTKG
EWLKFRPILPPLLKG

SEQ ID NO: 206432 - protein, 15 aa, Artificial Sequence
  Description of Artificial Sequence: Synthetic peptide
  Seed: EWLKTRPILSPLTKG
EWLKFRPILPPLSKG

SEQ ID NO: 206433 - protein, 15 aa, Artificial Sequence
  Description of Artificial Sequence: Synthetic peptide
  Seed: EWLKTRPILSPLTKG
EWLKFRPILPPLVKG

SEQ ID NO: 206434 - protein, 15 aa, Artificial Sequence
  Description of Artificial Sequence: Synthetic peptide
  Seed: EWLKTRPILSPLTKG
EWLKFRPILSPLAKG

SEQ ID NO: 206435 - protein, 15 aa, Artificial Sequence
  Description of Artificial Sequence: Synthetic peptide
  Seed: EWLKTRPILSPLTKG
EWLKFRPILSPLCKG

SEQ ID NO: 206436 - protein, 15 aa, Artificial Sequence
  Description of Artificial Sequence: Synthetic peptide
  Seed: EWLKTRPILSPLTKG
EWLKFRPILSPLDKG

SEQ ID NO: 206437 - protein, 15 aa, Artificial Sequence
  Description of Artificial Sequence: Synthetic peptide
  Seed: EWLKTRPILSPLTKG
EWLKFRPILSPLEKG

SEQ ID NO: 206438 - protein, 15 aa, Artificial Sequence
  Description of Artificial Sequence: Synthetic peptide
  Seed: EWLKTRPILSPLTKG
EWLKFRPILSPLFKG

SEQ ID NO: 206439 - protein, 15 aa, Artificial Sequence
  Description of Artificial Sequence: Synthetic peptide
  Seed: EWLKTRPILSPLTKG
EWLKFRPILSPLGKG

SEQ ID NO: 206440 - protein, 15 aa, Artificial Sequence
  Description of Artificial Sequence: Synthetic peptide
  Seed: EWLKTRPILSPLTKG
EWLKFRPILSPLHKG

SEQ ID NO: 206441 - protein, 15 aa, Artificial Sequence
  Description of Artificial Sequence: Synthetic peptide
  Seed: EWLKTRPILSPLTKG
EWLKFRPILSPLIKG

SEQ ID NO: 206442 - protein, 15 aa, Artificial Sequence
  Description of Artificial Sequence: Synthetic peptide
  Seed: EWLKTRPILSPLTKG
EWLKFRPILSPLKKG

SEQ ID NO: 206443 - protein, 15 aa, Artificial Sequence
  Description of Artificial Sequence: Synthetic peptide
  Seed: EWLKTRPILSPLTKG
EWLKFRPILSPLLKG

SEQ ID NO: 206444 - protein, 15 aa, Artificial Sequence
  Description of Artificial Sequence: Synthetic peptide
  Seed: EWLKTRPILSPLTKG
EWLKFRPILSPLMKG

SEQ ID NO: 206445 - protein, 15 aa, Artificial Sequence
  Description of Artificial Sequence: Synthetic peptide
  Seed: EWLKTRPILSPLTKG
EWLKFRPILSPLNKG

SEQ ID NO: 206446 - protein, 15 aa, Artificial Sequence
  Description of Artificial Sequence: Synthetic peptide
  Seed: EWLKTRPILSPLTKG
EWLKFRPILSPLPKG

SEQ ID NO: 206447 - protein, 15 aa, Artificial Sequence
  Description of Artificial Sequence: Synthetic peptide
  Seed: EWLKTRPILSPLTKG
EWLKFRPILSPLQKG

SEQ ID NO: 206448 - protein, 15 aa, Artificial Sequence
  Description of Artificial Sequence: Synthetic peptide
  Seed: EWLKTRPILSPLTKG
EWLKFRPILSPLRKG

SEQ ID NO: 206449 - protein, 15 aa, Artificial Sequence
  Description of Artificial Sequence: Synthetic peptide
  Seed: EWLKTRPILSPLTKG
EWLKFRPILSPLSKG

SEQ ID NO: 206450 - protein, 15 aa, Artificial Sequence
  Description of Artificial Sequence: Synthetic peptide
  Seed: EWLKTRPILSPLTKG
EWLKFRPILSPLTKG

SEQ ID NO: 206451 - protein, 15 aa, Artificial Sequence
  Description of Artificial Sequence: Synthetic peptide
  Seed: EWLKTRPILSPLTKG
EWLKFRPILSPLVKG

SEQ ID NO: 206452 - protein, 15 aa, Artificial Sequence
  Description of Artificial Sequence: Synthetic peptide
  Seed: EWLKTRPILSPLTKG
EWLKFRPILTPLAKG

SEQ ID NO: 206453 - protein, 15 aa, Artificial Sequence
  Description of Artificial Sequence: Synthetic peptide
  Seed: EWLKTRPILSPLTKG
EWLKFRPILTPLCKG

SEQ ID NO: 206454 - protein, 15 aa, Artificial Sequence
  Description of Artificial Sequence: Synthetic peptide
  Seed: EWLKTRPILSPLTKG
EWLKFRPILTPLDKG

SEQ ID NO: 206455 - protein, 15 aa, Artificial Sequence
  Description of Artificial Sequence: Synthetic peptide
  Seed: EWLKTRPILSPLTKG
EWLKFRPILTPLEKG

SEQ ID NO: 206456 - protein, 15 aa, Artificial Sequence
  Description of Artificial Sequence: Synthetic peptide
  Seed: EWLKTRPILSPLTKG
EWLKFRPILTPLGKG

SEQ ID NO: 206457 - protein, 15 aa, Artificial Sequence
  Description of Artificial Sequence: Synthetic peptide
  Seed: EWLKTRPILSPLTKG
EWLKFRPILTPLHKG

SEQ ID NO: 206458 - protein, 15 aa, Artificial Sequence
  Description of Artificial Sequence: Synthetic peptide
  Seed: EWLKTRPILSPLTKG
EWLKFRPILTPLIKG

SEQ ID NO: 206459 - protein, 15 aa, Artificial Sequence
  Description of Artificial Sequence: Synthetic peptide
  Seed: EWLKTRPILSPLTKG
EWLKFRPILTPLLKG

SEQ ID NO: 206460 - protein, 15 aa, Artificial Sequence
  Description of Artificial Sequence: Synthetic peptide
  Seed: EWLKTRPILSPLTKG
EWLKFRPILTPLMKG

SEQ ID NO: 206461 - protein, 15 aa, Artificial Sequence
  Description of Artificial Sequence: Synthetic peptide
  Seed: EWLKTRPILSPLTKG
EWLKFRPILTPLNKG

SEQ ID NO: 206462 - protein, 15 aa, Artificial Sequence
  Description of Artificial Sequence: Synthetic peptide
  Seed: EWLKTRPILSPLTKG
EWLKFRPILTPLPKG

SEQ ID NO: 206463 - protein, 15 aa, Artificial Sequence
  Description of Artificial Sequence: Synthetic peptide
  Seed: EWLKTRPILSPLTKG
EWLKFRPILTPLQKG

SEQ ID NO: 206464 - protein, 15 aa, Artificial Sequence
  Description of Artificial Sequence: Synthetic peptide
  Seed: EWLKTRPILSPLTKG
EWLKFRPILTPLRKG

SEQ ID NO: 206465 - protein, 15 aa, Artificial Sequence
  Description of Artificial Sequence: Synthetic peptide
  Seed: EWLKTRPILSPLTKG
EWLKFRPILTPLSKG

SEQ ID NO: 206466 - protein, 15 aa, Artificial Sequence
  Description of Artificial Sequence: Synthetic peptide
  Seed: EWLKTRPILSPLTKG
EWLKFRPILTPLTKG

SEQ ID NO: 206467 - protein, 15 aa, Artificial Sequence
  Description of Artificial Sequence: Synthetic peptide
  Seed: EWLKTRPILSPLTKG
EWLKFRPILTPLVKG

SEQ ID NO: 206468 - protein, 15 aa, Artificial Sequence
  Description of Artificial Sequence: Synthetic peptide
  Seed: EWLKTRPILSPLTKG
EWLKFRPILVPLAKG

SEQ ID NO: 206469 - protein, 15 aa, Artificial Sequence
  Description of Artificial Sequence: Synthetic peptide
  Seed: EWLKTRPILSPLTKG
EWLKFRPILVPLDKG

SEQ ID NO: 206470 - protein, 15 aa, Artificial Sequence
  Description of Artificial Sequence: Synthetic peptide
  Seed: EWLKTRPILSPLTKG
EWLKFRPILVPLGKG

SEQ ID NO: 206471 - protein, 15 aa, Artificial Sequence
  Description of Artificial Sequence: Synthetic peptide
  Seed: EWLKTRPILSPLTKG
EWLKFRPILVPLHKG

SEQ ID NO: 206472 - protein, 15 aa, Artificial Sequence
  Description of Artificial Sequence: Synthetic peptide
  Seed: EWLKTRPILSPLTKG
EWLKFRPILVPLNKG

SEQ ID NO: 206473 - protein, 15 aa, Artificial Sequence
  Description of Artificial Sequence: Synthetic peptide
  Seed: EWLKTRPILSPLTKG
EWLKFRPILVPLQKG

SEQ ID NO: 206474 - protein, 15 aa, Artificial Sequence
  Description of Artificial Sequence: Synthetic peptide
  Seed: EWLKTRPILSPLTKG
EWLKFRPILVPLSKG

SEQ ID NO: 206475 - protein, 15 aa, Artificial Sequence
  Description of Artificial Sequence: Synthetic peptide
  Seed: EWLKTRPILSPLTKG
EWLKFRPILVPLTKG

SEQ ID NO: 206476 - protein, 15 aa, Artificial Sequence
  Description of Artificial Sequence: Synthetic peptide
  Seed: EWLKTRPILSPLTKG
EWLKFRPLLAPLAKG

SEQ ID NO: 206477 - protein, 15 aa, Artificial Sequence
  Description of Artificial Sequence: Synthetic peptide
  Seed: EWLKTRPILSPLTKG
EWLKFRPLLAPLGKG

SEQ ID NO: 206478 - protein, 15 aa, Artificial Sequence
  Description of Artificial Sequence: Synthetic peptide
  Seed: EWLKTRPILSPLTKG
EWLKFRPLLAPLHKG

SEQ ID NO: 206479 - protein, 15 aa, Artificial Sequence
  Description of Artificial Sequence: Synthetic peptide
  Seed: EWLKTRPILSPLTKG
EWLKFRPLLAPLIKG

SEQ ID NO: 206480 - protein, 15 aa, Artificial Sequence
  Description of Artificial Sequence: Synthetic peptide
  Seed: EWLKTRPILSPLTKG
EWLKFRPLLAPLKKG

SEQ ID NO: 206481 - protein, 15 aa, Artificial Sequence
  Description of Artificial Sequence: Synthetic peptide
  Seed: EWLKTRPILSPLTKG
EWLKFRPLLAPLLKG

SEQ ID NO: 206482 - protein, 15 aa, Artificial Sequence
  Description of Artificial Sequence: Synthetic peptide
  Seed: EWLKTRPILSPLTKG
EWLKFRPLLAPLMKG

SEQ ID NO: 206483 - protein, 15 aa, Artificial Sequence
  Description of Artificial Sequence: Synthetic peptide
  Seed: EWLKTRPILSPLTKG
EWLKFRPLLAPLRKG

SEQ ID NO: 206484 - protein, 15 aa, Artificial Sequence
  Description of Artificial Sequence: Synthetic peptide
  Seed: EWLKTRPILSPLTKG
EWLKFRPLLAPLSKG

SEQ ID NO: 206485 - protein, 15 aa, Artificial Sequence
  Description of Artificial Sequence: Synthetic peptide
  Seed: EWLKTRPILSPLTKG
EWLKFRPLLAPLTKG

SEQ ID NO: 206486 - protein, 15 aa, Artificial Sequence
  Description of Artificial Sequence: Synthetic peptide
  Seed: EWLKTRPILSPLTKG
EWLKFRPLLAPLVKG

SEQ ID NO: 206487 - protein, 15 aa, Artificial Sequence
  Description of Artificial Sequence: Synthetic peptide
  Seed: EWLKTRPILSPLTKG
EWLKFRPLLDPLAKG

SEQ ID NO: 206488 - protein, 15 aa, Artificial Sequence
  Description of Artificial Sequence: Synthetic peptide
  Seed: EWLKTRPILSPLTKG
EWLKFRPLLDPLSKG

SEQ ID NO: 206489 - protein, 15 aa, Artificial Sequence
  Description of Artificial Sequence: Synthetic peptide
  Seed: EWLKTRPILSPLTKG
EWLKFRPLLGPLAKG

SEQ ID NO: 206490 - protein, 15 aa, Artificial Sequence
  Description of Artificial Sequence: Synthetic peptide
  Seed: EWLKTRPILSPLTKG
EWLKFRPLLGPLGKG

SEQ ID NO: 206491 - protein, 15 aa, Artificial Sequence
  Description of Artificial Sequence: Synthetic peptide
  Seed: EWLKTRPILSPLTKG
EWLKFRPLLGPLIKG

SEQ ID NO: 206492 - protein, 15 aa, Artificial Sequence
  Description of Artificial Sequence: Synthetic peptide
  Seed: EWLKTRPILSPLTKG
EWLKFRPLLGPLKKG

SEQ ID NO: 206493 - protein, 15 aa, Artificial Sequence
  Description of Artificial Sequence: Synthetic peptide
  Seed: EWLKTRPILSPLTKG
EWLKFRPLLGPLLKG

SEQ ID NO: 206494 - protein, 15 aa, Artificial Sequence
  Description of Artificial Sequence: Synthetic peptide
  Seed: EWLKTRPILSPLTKG
EWLKFRPLLGPLMKG

SEQ ID NO: 206495 - protein, 15 aa, Artificial Sequence
  Description of Artificial Sequence: Synthetic peptide
  Seed: EWLKTRPILSPLTKG
EWLKFRPLLGPLRKG

SEQ ID NO: 206496 - protein, 15 aa, Artificial Sequence
  Description of Artificial Sequence: Synthetic peptide
  Seed: EWLKTRPILSPLTKG
EWLKFRPLLGPLSKG

SEQ ID NO: 206497 - protein, 15 aa, Artificial Sequence
  Description of Artificial Sequence: Synthetic peptide
  Seed: EWLKTRPILSPLTKG
EWLKFRPLLGPLTKG

SEQ ID NO: 206498 - protein, 15 aa, Artificial Sequence
  Description of Artificial Sequence: Synthetic peptide
  Seed: EWLKTRPILSPLTKG
EWLKFRPLLGPLVKG

SEQ ID NO: 206499 - protein, 15 aa, Artificial Sequence
  Description of Artificial Sequence: Synthetic peptide
  Seed: EWLKTRPILSPLTKG
EWLKFRPLLIPLAKG

SEQ ID NO: 206500 - protein, 15 aa, Artificial Sequence
  Description of Artificial Sequence: Synthetic peptide
  Seed: EWLKTRPILSPLTKG
EWLKFRPLLIPLSKG

SEQ ID NO: 206501 - protein, 15 aa, Artificial Sequence
  Description of Artificial Sequence: Synthetic peptide
  Seed: EWLKTRPILSPLTKG
EWLKFRPLLNPLAKG

SEQ ID NO: 206502 - protein, 15 aa, Artificial Sequence
  Description of Artificial Sequence: Synthetic peptide
  Seed: EWLKTRPILSPLTKG
EWLKFRPLLNPLDKG

SEQ ID NO: 206503 - protein, 15 aa, Artificial Sequence
  Description of Artificial Sequence: Synthetic peptide
  Seed: EWLKTRPILSPLTKG
EWLKFRPLLNPLEKG

SEQ ID NO: 206504 - protein, 15 aa, Artificial Sequence
  Description of Artificial Sequence: Synthetic peptide
  Seed: EWLKTRPILSPLTKG
EWLKFRPLLNPLGKG

SEQ ID NO: 206505 - protein, 15 aa, Artificial Sequence
  Description of Artificial Sequence: Synthetic peptide
  Seed: EWLKTRPILSPLTKG
EWLKFRPLLNPLHKG

SEQ ID NO: 206506 - protein, 15 aa, Artificial Sequence
  Description of Artificial Sequence: Synthetic peptide
  Seed: EWLKTRPILSPLTKG
EWLKFRPLLNPLIKG

SEQ ID NO: 206507 - protein, 15 aa, Artificial Sequence
  Description of Artificial Sequence: Synthetic peptide
  Seed: EWLKTRPILSPLTKG
EWLKFRPLLNPLLKG

SEQ ID NO: 206508 - protein, 15 aa, Artificial Sequence
  Description of Artificial Sequence: Synthetic peptide
  Seed: EWLKTRPILSPLTKG
EWLKFRPLLNPLMKG

SEQ ID NO: 206509 - protein, 15 aa, Artificial Sequence
  Description of Artificial Sequence: Synthetic peptide
  Seed: EWLKTRPILSPLTKG
EWLKFRPLLNPLNKG

SEQ ID NO: 206510 - protein, 15 aa, Artificial Sequence
  Description of Artificial Sequence: Synthetic peptide
  Seed: EWLKTRPILSPLTKG
EWLKFRPLLNPLPKG

SEQ ID NO: 206511 - protein, 15 aa, Artificial Sequence
  Description of Artificial Sequence: Synthetic peptide
  Seed: EWLKTRPILSPLTKG
EWLKFRPLLNPLQKG

SEQ ID NO: 206512 - protein, 15 aa, Artificial Sequence
  Description of Artificial Sequence: Synthetic peptide
  Seed: EWLKTRPILSPLTKG
EWLKFRPLLNPLSKG

SEQ ID NO: 206513 - protein, 15 aa, Artificial Sequence
  Description of Artificial Sequence: Synthetic peptide
  Seed: EWLKTRPILSPLTKG
EWLKFRPLLNPLTKG

SEQ ID NO: 206514 - protein, 15 aa, Artificial Sequence
  Description of Artificial Sequence: Synthetic peptide
  Seed: EWLKTRPILSPLTKG
EWLKFRPLLNPLVKG

SEQ ID NO: 206515 - protein, 15 aa, Artificial Sequence
  Description of Artificial Sequence: Synthetic peptide
  Seed: EWLKTRPILSPLTKG
EWLKFRPLLPPLAKG

SEQ ID NO: 206516 - protein, 15 aa, Artificial Sequence
  Description of Artificial Sequence: Synthetic peptide
  Seed: EWLKTRPILSPLTKG
EWLKFRPLLPPLIKG

SEQ ID NO: 206517 - protein, 15 aa, Artificial Sequence
  Description of Artificial Sequence: Synthetic peptide
  Seed: EWLKTRPILSPLTKG
EWLKFRPLLPPLLKG

SEQ ID NO: 206518 - protein, 15 aa, Artificial Sequence
  Description of Artificial Sequence: Synthetic peptide
  Seed: EWLKTRPILSPLTKG
EWLKFRPLLPPLSKG

SEQ ID NO: 206519 - protein, 15 aa, Artificial Sequence
  Description of Artificial Sequence: Synthetic peptide
  Seed: EWLKTRPILSPLTKG
EWLKFRPLLPPLVKG

SEQ ID NO: 206520 - protein, 15 aa, Artificial Sequence
  Description of Artificial Sequence: Synthetic peptide
  Seed: EWLKTRPILSPLTKG
EWLKFRPLLSPLAKG

SEQ ID NO: 206521 - protein, 15 aa, Artificial Sequence
  Description of Artificial Sequence: Synthetic peptide
  Seed: EWLKTRPILSPLTKG
EWLKFRPLLSPLCKG

SEQ ID NO: 206522 - protein, 15 aa, Artificial Sequence
  Description of Artificial Sequence: Synthetic peptide
  Seed: EWLKTRPILSPLTKG
EWLKFRPLLSPLDKG

SEQ ID NO: 206523 - protein, 15 aa, Artificial Sequence
  Description of Artificial Sequence: Synthetic peptide
  Seed: EWLKTRPILSPLTKG
EWLKFRPLLSPLEKG

SEQ ID NO: 206524 - protein, 15 aa, Artificial Sequence
  Description of Artificial Sequence: Synthetic peptide
  Seed: EWLKTRPILSPLTKG
EWLKFRPLLSPLFKG

SEQ ID NO: 206525 - protein, 15 aa, Artificial Sequence
  Description of Artificial Sequence: Synthetic peptide
  Seed: EWLKTRPILSPLTKG
EWLKFRPLLSPLGKG

SEQ ID NO: 206526 - protein, 15 aa, Artificial Sequence
  Description of Artificial Sequence: Synthetic peptide
  Seed: EWLKTRPILSPLTKG
EWLKFRPLLSPLHKG

SEQ ID NO: 206527 - protein, 15 aa, Artificial Sequence
  Description of Artificial Sequence: Synthetic peptide
  Seed: EWLKTRPILSPLTKG
EWLKFRPLLSPLIKG

SEQ ID NO: 206528 - protein, 15 aa, Artificial Sequence
  Description of Artificial Sequence: Synthetic peptide
  Seed: EWLKTRPILSPLTKG
EWLKFRPLLSPLKKG

SEQ ID NO: 206529 - protein, 15 aa, Artificial Sequence
  Description of Artificial Sequence: Synthetic peptide
  Seed: EWLKTRPILSPLTKG
EWLKFRPLLSPLLKG

SEQ ID NO: 206530 - protein, 15 aa, Artificial Sequence
  Description of Artificial Sequence: Synthetic peptide
  Seed: EWLKTRPILSPLTKG
EWLKFRPLLSPLMKG

SEQ ID NO: 206531 - protein, 15 aa, Artificial Sequence
  Description of Artificial Sequence: Synthetic peptide
  Seed: EWLKTRPILSPLTKG
EWLKFRPLLSPLNKG

SEQ ID NO: 206532 - protein, 15 aa, Artificial Sequence
  Description of Artificial Sequence: Synthetic peptide
  Seed: EWLKTRPILSPLTKG
EWLKFRPLLSPLPKG

SEQ ID NO: 206533 - protein, 15 aa, Artificial Sequence
  Description of Artificial Sequence: Synthetic peptide
  Seed: EWLKTRPILSPLTKG
EWLKFRPLLSPLQKG

SEQ ID NO: 206534 - protein, 15 aa, Artificial Sequence
  Description of Artificial Sequence: Synthetic peptide
  Seed: EWLKTRPILSPLTKG
EWLKFRPLLSPLRKG

SEQ ID NO: 206535 - protein, 15 aa, Artificial Sequence
  Description of Artificial Sequence: Synthetic peptide
  Seed: EWLKTRPILSPLTKG
EWLKFRPLLSPLSKG

SEQ ID NO: 206536 - protein, 15 aa, Artificial Sequence
  Description of Artificial Sequence: Synthetic peptide
  Seed: EWLKTRPILSPLTKG
EWLKFRPLLSPLTKG

SEQ ID NO: 206537 - protein, 15 aa, Artificial Sequence
  Description of Artificial Sequence: Synthetic peptide
  Seed: EWLKTRPILSPLTKG
EWLKFRPLLSPLVKG

SEQ ID NO: 206538 - protein, 15 aa, Artificial Sequence
  Description of Artificial Sequence: Synthetic peptide
  Seed: EWLKTRPILSPLTKG
EWLKFRPLLTPLAKG

SEQ ID NO: 206539 - protein, 15 aa, Artificial Sequence
  Description of Artificial Sequence: Synthetic peptide
  Seed: EWLKTRPILSPLTKG
EWLKFRPLLTPLDKG

SEQ ID NO: 206540 - protein, 15 aa, Artificial Sequence
  Description of Artificial Sequence: Synthetic peptide
  Seed: EWLKTRPILSPLTKG
EWLKFRPLLTPLEKG

SEQ ID NO: 206541 - protein, 15 aa, Artificial Sequence
  Description of Artificial Sequence: Synthetic peptide
  Seed: EWLKTRPILSPLTKG
EWLKFRPLLTPLGKG

SEQ ID NO: 206542 - protein, 15 aa, Artificial Sequence
  Description of Artificial Sequence: Synthetic peptide
  Seed: EWLKTRPILSPLTKG
EWLKFRPLLTPLHKG

SEQ ID NO: 206543 - protein, 15 aa, Artificial Sequence
  Description of Artificial Sequence: Synthetic peptide
  Seed: EWLKTRPILSPLTKG
EWLKFRPLLTPLIKG

SEQ ID NO: 206544 - protein, 15 aa, Artificial Sequence
  Description of Artificial Sequence: Synthetic peptide
  Seed: EWLKTRPILSPLTKG
EWLKFRPLLTPLLKG

SEQ ID NO: 206545 - protein, 15 aa, Artificial Sequence
  Description of Artificial Sequence: Synthetic peptide
  Seed: EWLKTRPILSPLTKG
EWLKFRPLLTPLMKG

SEQ ID NO: 206546 - protein, 15 aa, Artificial Sequence
  Description of Artificial Sequence: Synthetic peptide
  Seed: EWLKTRPILSPLTKG
EWLKFRPLLTPLNKG

SEQ ID NO: 206547 - protein, 15 aa, Artificial Sequence
  Description of Artificial Sequence: Synthetic peptide
  Seed: EWLKTRPILSPLTKG
EWLKFRPLLTPLPKG

SEQ ID NO: 206548 - protein, 15 aa, Artificial Sequence
  Description of Artificial Sequence: Synthetic peptide
  Seed: EWLKTRPILSPLTKG
EWLKFRPLLTPLQKG

SEQ ID NO: 206549 - protein, 15 aa, Artificial Sequence
  Description of Artificial Sequence: Synthetic peptide
  Seed: EWLKTRPILSPLTKG
EWLKFRPLLTPLRKG

SEQ ID NO: 206550 - protein, 15 aa, Artificial Sequence
  Description of Artificial Sequence: Synthetic peptide
  Seed: EWLKTRPILSPLTKG
EWLKFRPLLTPLSKG

SEQ ID NO: 206551 - protein, 15 aa, Artificial Sequence
  Description of Artificial Sequence: Synthetic peptide
  Seed: EWLKTRPILSPLTKG
EWLKFRPLLTPLTKG

SEQ ID NO: 206552 - protein, 15 aa, Artificial Sequence
  Description of Artificial Sequence: Synthetic peptide
  Seed: EWLKTRPILSPLTKG
EWLKFRPLLTPLVKG

SEQ ID NO: 206553 - protein, 15 aa, Artificial Sequence
  Description of Artificial Sequence: Synthetic peptide
  Seed: EWLKTRPILSPLTKG
EWLKFRPLLVPLAKG

SEQ ID NO: 206554 - protein, 15 aa, Artificial Sequence
  Description of Artificial Sequence: Synthetic peptide
  Seed: EWLKTRPILSPLTKG
EWLKFRPLLVPLDKG

SEQ ID NO: 206555 - protein, 15 aa, Artificial Sequence
  Description of Artificial Sequence: Synthetic peptide
  Seed: EWLKTRPILSPLTKG
EWLKFRPLLVPLEKG

SEQ ID NO: 206556 - protein, 15 aa, Artificial Sequence
  Description of Artificial Sequence: Synthetic peptide
  Seed: EWLKTRPILSPLTKG
EWLKFRPLLVPLGKG

SEQ ID NO: 206557 - protein, 15 aa, Artificial Sequence
  Description of Artificial Sequence: Synthetic peptide
  Seed: EWLKTRPILSPLTKG
EWLKFRPLLVPLHKG

SEQ ID NO: 206558 - protein, 15 aa, Artificial Sequence
  Description of Artificial Sequence: Synthetic peptide
  Seed: EWLKTRPILSPLTKG
EWLKFRPLLVPLLKG

SEQ ID NO: 206559 - protein, 15 aa, Artificial Sequence
  Description of Artificial Sequence: Synthetic peptide
  Seed: EWLKTRPILSPLTKG
EWLKFRPLLVPLNKG

SEQ ID NO: 206560 - protein, 15 aa, Artificial Sequence
  Description of Artificial Sequence: Synthetic peptide
  Seed: EWLKTRPILSPLTKG
EWLKFRPLLVPLQKG

SEQ ID NO: 206561 - protein, 15 aa, Artificial Sequence
  Description of Artificial Sequence: Synthetic peptide
  Seed: EWLKTRPILSPLTKG
EWLKFRPLLVPLSKG

SEQ ID NO: 206562 - protein, 15 aa, Artificial Sequence
  Description of Artificial Sequence: Synthetic peptide
  Seed: EWLKTRPILSPLTKG
EWLKFRPLLVPLTKG

SEQ ID NO: 206563 - protein, 15 aa, Artificial Sequence
  Description of Artificial Sequence: Synthetic peptide
  Seed: EWLKTRPILSPLTKG
EWLKFRPLLVPLVKG

SEQ ID NO: 206564 - protein, 15 aa, Artificial Sequence
  Description of Artificial Sequence: Synthetic peptide
  Seed: EWLKTRPILSPLTKG
EWLKFRPMLAPLAKG

SEQ ID NO: 206565 - protein, 15 aa, Artificial Sequence
  Description of Artificial Sequence: Synthetic peptide
  Seed: EWLKTRPILSPLTKG
EWLKFRPMLAPLDKG

SEQ ID NO: 206566 - protein, 15 aa, Artificial Sequence
  Description of Artificial Sequence: Synthetic peptide
  Seed: EWLKTRPILSPLTKG
EWLKFRPMLAPLGKG

SEQ ID NO: 206567 - protein, 15 aa, Artificial Sequence
  Description of Artificial Sequence: Synthetic peptide
  Seed: EWLKTRPILSPLTKG
EWLKFRPMLAPLHKG

SEQ ID NO: 206568 - protein, 15 aa, Artificial Sequence
  Description of Artificial Sequence: Synthetic peptide
  Seed: EWLKTRPILSPLTKG
EWLKFRPMLAPLIKG

SEQ ID NO: 206569 - protein, 15 aa, Artificial Sequence
  Description of Artificial Sequence: Synthetic peptide
  Seed: EWLKTRPILSPLTKG
EWLKFRPMLAPLKKG

SEQ ID NO: 206570 - protein, 15 aa, Artificial Sequence
  Description of Artificial Sequence: Synthetic peptide
  Seed: EWLKTRPILSPLTKG
EWLKFRPMLAPLMKG

SEQ ID NO: 206571 - protein, 15 aa, Artificial Sequence
  Description of Artificial Sequence: Synthetic peptide
  Seed: EWLKTRPILSPLTKG
EWLKFRPMLAPLNKG

SEQ ID NO: 206572 - protein, 15 aa, Artificial Sequence
  Description of Artificial Sequence: Synthetic peptide
  Seed: EWLKTRPILSPLTKG
EWLKFRPMLAPLQKG

SEQ ID NO: 206573 - protein, 15 aa, Artificial Sequence
  Description of Artificial Sequence: Synthetic peptide
  Seed: EWLKTRPILSPLTKG
EWLKFRPMLAPLRKG

SEQ ID NO: 206574 - protein, 15 aa, Artificial Sequence
  Description of Artificial Sequence: Synthetic peptide
  Seed: EWLKTRPILSPLTKG
EWLKFRPMLAPLSKG

SEQ ID NO: 206575 - protein, 15 aa, Artificial Sequence
  Description of Artificial Sequence: Synthetic peptide
  Seed: EWLKTRPILSPLTKG
EWLKFRPMLAPLTKG

SEQ ID NO: 206576 - protein, 15 aa, Artificial Sequence
  Description of Artificial Sequence: Synthetic peptide
  Seed: EWLKTRPILSPLTKG
EWLKFRPMLAPLVKG

SEQ ID NO: 206577 - protein, 15 aa, Artificial Sequence
  Description of Artificial Sequence: Synthetic peptide
  Seed: EWLKTRPILSPLTKG
EWLKFRPMLDPLAKG

SEQ ID NO: 206578 - protein, 15 aa, Artificial Sequence
  Description of Artificial Sequence: Synthetic peptide
  Seed: EWLKTRPILSPLTKG
EWLKFRPMLDPLSKG

SEQ ID NO: 206579 - protein, 15 aa, Artificial Sequence
  Description of Artificial Sequence: Synthetic peptide
  Seed: EWLKTRPILSPLTKG
EWLKFRPMLGPLAKG

SEQ ID NO: 206580 - protein, 15 aa, Artificial Sequence
  Description of Artificial Sequence: Synthetic peptide
  Seed: EWLKTRPILSPLTKG
EWLKFRPMLGPLIKG

SEQ ID NO: 206581 - protein, 15 aa, Artificial Sequence
  Description of Artificial Sequence: Synthetic peptide
  Seed: EWLKTRPILSPLTKG
EWLKFRPMLGPLKKG

SEQ ID NO: 206582 - protein, 15 aa, Artificial Sequence
  Description of Artificial Sequence: Synthetic peptide
  Seed: EWLKTRPILSPLTKG
EWLKFRPMLGPLLKG

SEQ ID NO: 206583 - protein, 15 aa, Artificial Sequence
  Description of Artificial Sequence: Synthetic peptide
  Seed: EWLKTRPILSPLTKG
EWLKFRPMLGPLMKG

SEQ ID NO: 206584 - protein, 15 aa, Artificial Sequence
  Description of Artificial Sequence: Synthetic peptide
  Seed: EWLKTRPILSPLTKG
EWLKFRPMLGPLRKG

SEQ ID NO: 206585 - protein, 15 aa, Artificial Sequence
  Description of Artificial Sequence: Synthetic peptide
  Seed: EWLKTRPILSPLTKG
EWLKFRPMLGPLSKG

SEQ ID NO: 206586 - protein, 15 aa, Artificial Sequence
  Description of Artificial Sequence: Synthetic peptide
  Seed: EWLKTRPILSPLTKG
EWLKFRPMLGPLTKG

SEQ ID NO: 206587 - protein, 15 aa, Artificial Sequence
  Description of Artificial Sequence: Synthetic peptide
  Seed: EWLKTRPILSPLTKG
EWLKFRPMLGPLVKG

SEQ ID NO: 206588 - protein, 15 aa, Artificial Sequence
  Description of Artificial Sequence: Synthetic peptide
  Seed: EWLKTRPILSPLTKG
EWLKFRPMLIPLAKG

SEQ ID NO: 206589 - protein, 15 aa, Artificial Sequence
  Description of Artificial Sequence: Synthetic peptide
  Seed: EWLKTRPILSPLTKG
EWLKFRPMLIPLDKG

SEQ ID NO: 206590 - protein, 15 aa, Artificial Sequence
  Description of Artificial Sequence: Synthetic peptide
  Seed: EWLKTRPILSPLTKG
EWLKFRPMLIPLGKG

SEQ ID NO: 206591 - protein, 15 aa, Artificial Sequence
  Description of Artificial Sequence: Synthetic peptide
  Seed: EWLKTRPILSPLTKG
EWLKFRPMLIPLHKG

SEQ ID NO: 206592 - protein, 15 aa, Artificial Sequence
  Description of Artificial Sequence: Synthetic peptide
  Seed: EWLKTRPILSPLTKG
EWLKFRPMLIPLNKG

SEQ ID NO: 206593 - protein, 15 aa, Artificial Sequence
  Description of Artificial Sequence: Synthetic peptide
  Seed: EWLKTRPILSPLTKG
EWLKFRPMLIPLQKG

SEQ ID NO: 206594 - protein, 15 aa, Artificial Sequence
  Description of Artificial Sequence: Synthetic peptide
  Seed: EWLKTRPILSPLTKG
EWLKFRPMLIPLSKG

SEQ ID NO: 206595 - protein, 15 aa, Artificial Sequence
  Description of Artificial Sequence: Synthetic peptide
  Seed: EWLKTRPILSPLTKG
EWLKFRPMLIPLTKG

SEQ ID NO: 206596 - protein, 15 aa, Artificial Sequence
  Description of Artificial Sequence: Synthetic peptide
  Seed: EWLKTRPILSPLTKG
EWLKFRPMLNPLAKG

SEQ ID NO: 206597 - protein, 15 aa, Artificial Sequence
  Description of Artificial Sequence: Synthetic peptide
  Seed: EWLKTRPILSPLTKG
EWLKFRPMLNPLCKG

SEQ ID NO: 206598 - protein, 15 aa, Artificial Sequence
  Description of Artificial Sequence: Synthetic peptide
  Seed: EWLKTRPILSPLTKG
EWLKFRPMLNPLDKG

SEQ ID NO: 206599 - protein, 15 aa, Artificial Sequence
  Description of Artificial Sequence: Synthetic peptide
  Seed: EWLKTRPILSPLTKG
EWLKFRPMLNPLEKG

SEQ ID NO: 206600 - protein, 15 aa, Artificial Sequence
  Description of Artificial Sequence: Synthetic peptide
  Seed: EWLKTRPILSPLTKG
EWLKFRPMLNPLFKG

SEQ ID NO: 206601 - protein, 15 aa, Artificial Sequence
  Description of Artificial Sequence: Synthetic peptide
  Seed: EWLKTRPILSPLTKG
EWLKFRPMLNPLGKG

SEQ ID NO: 206602 - protein, 15 aa, Artificial Sequence
  Description of Artificial Sequence: Synthetic peptide
  Seed: EWLKTRPILSPLTKG
EWLKFRPMLNPLHKG

SEQ ID NO: 206603 - protein, 15 aa, Artificial Sequence
  Description of Artificial Sequence: Synthetic peptide
  Seed: EWLKTRPILSPLTKG
EWLKFRPMLNPLIKG

SEQ ID NO: 206604 - protein, 15 aa, Artificial Sequence
  Description of Artificial Sequence: Synthetic peptide
  Seed: EWLKTRPILSPLTKG
EWLKFRPMLNPLLKG

SEQ ID NO: 206605 - protein, 15 aa, Artificial Sequence
  Description of Artificial Sequence: Synthetic peptide
  Seed: EWLKTRPILSPLTKG
EWLKFRPMLNPLMKG

SEQ ID NO: 206606 - protein, 15 aa, Artificial Sequence
  Description of Artificial Sequence: Synthetic peptide
  Seed: EWLKTRPILSPLTKG
EWLKFRPMLNPLNKG

SEQ ID NO: 206607 - protein, 15 aa, Artificial Sequence
  Description of Artificial Sequence: Synthetic peptide
  Seed: EWLKTRPILSPLTKG
EWLKFRPMLNPLPKG

SEQ ID NO: 206608 - protein, 15 aa, Artificial Sequence
  Description of Artificial Sequence: Synthetic peptide
  Seed: EWLKTRPILSPLTKG
EWLKFRPMLNPLQKG

SEQ ID NO: 206609 - protein, 15 aa, Artificial Sequence
  Description of Artificial Sequence: Synthetic peptide
  Seed: EWLKTRPILSPLTKG
EWLKFRPMLNPLSKG

SEQ ID NO: 206610 - protein, 15 aa, Artificial Sequence
  Description of Artificial Sequence: Synthetic peptide
  Seed: EWLKTRPILSPLTKG
EWLKFRPMLNPLTKG

SEQ ID NO: 206611 - protein, 15 aa, Artificial Sequence
  Description of Artificial Sequence: Synthetic peptide
  Seed: EWLKTRPILSPLTKG
EWLKFRPMLNPLVKG

SEQ ID NO: 206612 - protein, 15 aa, Artificial Sequence
  Description of Artificial Sequence: Synthetic peptide
  Seed: EWLKTRPILSPLTKG
EWLKFRPMLPPLAKG

SEQ ID NO: 206613 - protein, 15 aa, Artificial Sequence
  Description of Artificial Sequence: Synthetic peptide
  Seed: EWLKTRPILSPLTKG
EWLKFRPMLPPLIKG

SEQ ID NO: 206614 - protein, 15 aa, Artificial Sequence
  Description of Artificial Sequence: Synthetic peptide
  Seed: EWLKTRPILSPLTKG
EWLKFRPMLPPLLKG

SEQ ID NO: 206615 - protein, 15 aa, Artificial Sequence
  Description of Artificial Sequence: Synthetic peptide
  Seed: EWLKTRPILSPLTKG
EWLKFRPMLPPLSKG

SEQ ID NO: 206616 - protein, 15 aa, Artificial Sequence
  Description of Artificial Sequence: Synthetic peptide
  Seed: EWLKTRPILSPLTKG
EWLKFRPMLPPLVKG

SEQ ID NO: 206617 - protein, 15 aa, Artificial Sequence
  Description of Artificial Sequence: Synthetic peptide
  Seed: EWLKTRPILSPLTKG
EWLKFRPMLSPLAKG

SEQ ID NO: 206618 - protein, 15 aa, Artificial Sequence
  Description of Artificial Sequence: Synthetic peptide
  Seed: EWLKTRPILSPLTKG
EWLKFRPMLSPLCKG

SEQ ID NO: 206619 - protein, 15 aa, Artificial Sequence
  Description of Artificial Sequence: Synthetic peptide
  Seed: EWLKTRPILSPLTKG
EWLKFRPMLSPLDKG

SEQ ID NO: 206620 - protein, 15 aa, Artificial Sequence
  Description of Artificial Sequence: Synthetic peptide
  Seed: EWLKTRPILSPLTKG
EWLKFRPMLSPLEKG

SEQ ID NO: 206621 - protein, 15 aa, Artificial Sequence
  Description of Artificial Sequence: Synthetic peptide
  Seed: EWLKTRPILSPLTKG
EWLKFRPMLSPLFKG

SEQ ID NO: 206622 - protein, 15 aa, Artificial Sequence
  Description of Artificial Sequence: Synthetic peptide
  Seed: EWLKTRPILSPLTKG
EWLKFRPMLSPLGKG

SEQ ID NO: 206623 - protein, 15 aa, Artificial Sequence
  Description of Artificial Sequence: Synthetic peptide
  Seed: EWLKTRPILSPLTKG
EWLKFRPMLSPLHKG

SEQ ID NO: 206624 - protein, 15 aa, Artificial Sequence
  Description of Artificial Sequence: Synthetic peptide
  Seed: EWLKTRPILSPLTKG
EWLKFRPMLSPLIKG

SEQ ID NO: 206625 - protein, 15 aa, Artificial Sequence
  Description of Artificial Sequence: Synthetic peptide
  Seed: EWLKTRPILSPLTKG
EWLKFRPMLSPLKKG

SEQ ID NO: 206626 - protein, 15 aa, Artificial Sequence
  Description of Artificial Sequence: Synthetic peptide
  Seed: EWLKTRPILSPLTKG
EWLKFRPMLSPLLKG

SEQ ID NO: 206627 - protein, 15 aa, Artificial Sequence
  Description of Artificial Sequence: Synthetic peptide
  Seed: EWLKTRPILSPLTKG
EWLKFRPMLSPLMKG

SEQ ID NO: 206628 - protein, 15 aa, Artificial Sequence
  Description of Artificial Sequence: Synthetic peptide
  Seed: EWLKTRPILSPLTKG
EWLKFRPMLSPLNKG

SEQ ID NO: 206629 - protein, 15 aa, Artificial Sequence
  Description of Artificial Sequence: Synthetic peptide
  Seed: EWLKTRPILSPLTKG
EWLKFRPMLSPLPKG

SEQ ID NO: 206630 - protein, 15 aa, Artificial Sequence
  Description of Artificial Sequence: Synthetic peptide
  Seed: EWLKTRPILSPLTKG
EWLKFRPMLSPLQKG

SEQ ID NO: 206631 - protein, 15 aa, Artificial Sequence
  Description of Artificial Sequence: Synthetic peptide
  Seed: EWLKTRPILSPLTKG
EWLKFRPMLSPLRKG

SEQ ID NO: 206632 - protein, 15 aa, Artificial Sequence
  Description of Artificial Sequence: Synthetic peptide
  Seed: EWLKTRPILSPLTKG
EWLKFRPMLSPLSKG

SEQ ID NO: 206633 - protein, 15 aa, Artificial Sequence
  Description of Artificial Sequence: Synthetic peptide
  Seed: EWLKTRPILSPLTKG
EWLKFRPMLSPLTKG

SEQ ID NO: 206634 - protein, 15 aa, Artificial Sequence
  Description of Artificial Sequence: Synthetic peptide
  Seed: EWLKTRPILSPLTKG
EWLKFRPMLSPLVKG

SEQ ID NO: 206635 - protein, 15 aa, Artificial Sequence
  Description of Artificial Sequence: Synthetic peptide
  Seed: EWLKTRPILSPLTKG
EWLKFRPMLSPLWKG

SEQ ID NO: 206636 - protein, 15 aa, Artificial Sequence
  Description of Artificial Sequence: Synthetic peptide
  Seed: EWLKTRPILSPLTKG
EWLKFRPMLTPLAKG

SEQ ID NO: 206637 - protein, 15 aa, Artificial Sequence
  Description of Artificial Sequence: Synthetic peptide
  Seed: EWLKTRPILSPLTKG
EWLKFRPMLTPLCKG

SEQ ID NO: 206638 - protein, 15 aa, Artificial Sequence
  Description of Artificial Sequence: Synthetic peptide
  Seed: EWLKTRPILSPLTKG
EWLKFRPMLTPLDKG

SEQ ID NO: 206639 - protein, 15 aa, Artificial Sequence
  Description of Artificial Sequence: Synthetic peptide
  Seed: EWLKTRPILSPLTKG
EWLKFRPMLTPLEKG

SEQ ID NO: 206640 - protein, 15 aa, Artificial Sequence
  Description of Artificial Sequence: Synthetic peptide
  Seed: EWLKTRPILSPLTKG
EWLKFRPMLTPLGKG

SEQ ID NO: 206641 - protein, 15 aa, Artificial Sequence
  Description of Artificial Sequence: Synthetic peptide
  Seed: EWLKTRPILSPLTKG
EWLKFRPMLTPLHKG

SEQ ID NO: 206642 - protein, 15 aa, Artificial Sequence
  Description of Artificial Sequence: Synthetic peptide
  Seed: EWLKTRPILSPLTKG
EWLKFRPMLTPLIKG

SEQ ID NO: 206643 - protein, 15 aa, Artificial Sequence
  Description of Artificial Sequence: Synthetic peptide
  Seed: EWLKTRPILSPLTKG
EWLKFRPMLTPLLKG

SEQ ID NO: 206644 - protein, 15 aa, Artificial Sequence
  Description of Artificial Sequence: Synthetic peptide
  Seed: EWLKTRPILSPLTKG
EWLKFRPMLTPLMKG

SEQ ID NO: 206645 - protein, 15 aa, Artificial Sequence
  Description of Artificial Sequence: Synthetic peptide
  Seed: EWLKTRPILSPLTKG
EWLKFRPMLTPLNKG

SEQ ID NO: 206646 - protein, 15 aa, Artificial Sequence
  Description of Artificial Sequence: Synthetic peptide
  Seed: EWLKTRPILSPLTKG
EWLKFRPMLTPLPKG

SEQ ID NO: 206647 - protein, 15 aa, Artificial Sequence
  Description of Artificial Sequence: Synthetic peptide
  Seed: EWLKTRPILSPLTKG
EWLKFRPMLTPLQKG

SEQ ID NO: 206648 - protein, 15 aa, Artificial Sequence
  Description of Artificial Sequence: Synthetic peptide
  Seed: EWLKTRPILSPLTKG
EWLKFRPMLTPLRKG

SEQ ID NO: 206649 - protein, 15 aa, Artificial Sequence
  Description of Artificial Sequence: Synthetic peptide
  Seed: EWLKTRPILSPLTKG
EWLKFRPMLTPLSKG

SEQ ID NO: 206650 - protein, 15 aa, Artificial Sequence
  Description of Artificial Sequence: Synthetic peptide
  Seed: EWLKTRPILSPLTKG
EWLKFRPMLTPLTKG

SEQ ID NO: 206651 - protein, 15 aa, Artificial Sequence
  Description of Artificial Sequence: Synthetic peptide
  Seed: EWLKTRPILSPLTKG
EWLKFRPMLTPLVKG

SEQ ID NO: 206652 - protein, 15 aa, Artificial Sequence
  Description of Artificial Sequence: Synthetic peptide
  Seed: EWLKTRPILSPLTKG
EWLKFRPMLVPLAKG

SEQ ID NO: 206653 - protein, 15 aa, Artificial Sequence
  Description of Artificial Sequence: Synthetic peptide
  Seed: EWLKTRPILSPLTKG
EWLKFRPMLVPLDKG

SEQ ID NO: 206654 - protein, 15 aa, Artificial Sequence
  Description of Artificial Sequence: Synthetic peptide
  Seed: EWLKTRPILSPLTKG
EWLKFRPMLVPLEKG

SEQ ID NO: 206655 - protein, 15 aa, Artificial Sequence
  Description of Artificial Sequence: Synthetic peptide
  Seed: EWLKTRPILSPLTKG
EWLKFRPMLVPLGKG

SEQ ID NO: 206656 - protein, 15 aa, Artificial Sequence
  Description of Artificial Sequence: Synthetic peptide
  Seed: EWLKTRPILSPLTKG
EWLKFRPMLVPLHKG

SEQ ID NO: 206657 - protein, 15 aa, Artificial Sequence
  Description of Artificial Sequence: Synthetic peptide
  Seed: EWLKTRPILSPLTKG
EWLKFRPMLVPLMKG

SEQ ID NO: 206658 - protein, 15 aa, Artificial Sequence
  Description of Artificial Sequence: Synthetic peptide
  Seed: EWLKTRPILSPLTKG
EWLKFRPMLVPLNKG

SEQ ID NO: 206659 - protein, 15 aa, Artificial Sequence
  Description of Artificial Sequence: Synthetic peptide
  Seed: EWLKTRPILSPLTKG
EWLKFRPMLVPLPKG

SEQ ID NO: 206660 - protein, 15 aa, Artificial Sequence
  Description of Artificial Sequence: Synthetic peptide
  Seed: EWLKTRPILSPLTKG
EWLKFRPMLVPLQKG

SEQ ID NO: 206661 - protein, 15 aa, Artificial Sequence
  Description of Artificial Sequence: Synthetic peptide
  Seed: EWLKTRPILSPLTKG
EWLKFRPMLVPLSKG

SEQ ID NO: 206662 - protein, 15 aa, Artificial Sequence
  Description of Artificial Sequence: Synthetic peptide
  Seed: EWLKTRPILSPLTKG
EWLKFRPMLVPLTKG

SEQ ID NO: 206663 - protein, 15 aa, Artificial Sequence
  Description of Artificial Sequence: Synthetic peptide
  Seed: EWLKTRPILSPLTKG
EWLKFRPMLVPLVKG

SEQ ID NO: 206664 - protein, 15 aa, Artificial Sequence
  Description of Artificial Sequence: Synthetic peptide
  Seed: EWLKTRPILSPLTKG
EWLKFRPNLAPLIKG

SEQ ID NO: 206665 - protein, 15 aa, Artificial Sequence
  Description of Artificial Sequence: Synthetic peptide
  Seed: EWLKTRPILSPLTKG
EWLKFRPNLAPLLKG

SEQ ID NO: 206666 - protein, 15 aa, Artificial Sequence
  Description of Artificial Sequence: Synthetic peptide
  Seed: EWLKTRPILSPLTKG
EWLKFRPNLAPLVKG

SEQ ID NO: 206667 - protein, 15 aa, Artificial Sequence
  Description of Artificial Sequence: Synthetic peptide
  Seed: EWLKTRPILSPLTKG
EWLKFRPNLNPLAKG

SEQ ID NO: 206668 - protein, 15 aa, Artificial Sequence
  Description of Artificial Sequence: Synthetic peptide
  Seed: EWLKTRPILSPLTKG
EWLKFRPNLNPLSKG

SEQ ID NO: 206669 - protein, 15 aa, Artificial Sequence
  Description of Artificial Sequence: Synthetic peptide
  Seed: EWLKTRPILSPLTKG
EWLKFRPNLSPLIKG

SEQ ID NO: 206670 - protein, 15 aa, Artificial Sequence
  Description of Artificial Sequence: Synthetic peptide
  Seed: EWLKTRPILSPLTKG
EWLKFRPNLSPLLKG

SEQ ID NO: 206671 - protein, 15 aa, Artificial Sequence
  Description of Artificial Sequence: Synthetic peptide
  Seed: EWLKTRPILSPLTKG
EWLKFRPNLSPLVKG

SEQ ID NO: 206672 - protein, 15 aa, Artificial Sequence
  Description of Artificial Sequence: Synthetic peptide
  Seed: EWLKTRPILSPLTKG
EWLKFRPNLTPLAKG

SEQ ID NO: 206673 - protein, 15 aa, Artificial Sequence
  Description of Artificial Sequence: Synthetic peptide
  Seed: EWLKTRPILSPLTKG
EWLKFRPQLAPLAKG

SEQ ID NO: 206674 - protein, 15 aa, Artificial Sequence
  Description of Artificial Sequence: Synthetic peptide
  Seed: EWLKTRPILSPLTKG
EWLKFRPQLAPLIKG

SEQ ID NO: 206675 - protein, 15 aa, Artificial Sequence
  Description of Artificial Sequence: Synthetic peptide
  Seed: EWLKTRPILSPLTKG
EWLKFRPQLAPLLKG

SEQ ID NO: 206676 - protein, 15 aa, Artificial Sequence
  Description of Artificial Sequence: Synthetic peptide
  Seed: EWLKTRPILSPLTKG
EWLKFRPQLAPLVKG

SEQ ID NO: 206677 - protein, 15 aa, Artificial Sequence
  Description of Artificial Sequence: Synthetic peptide
  Seed: EWLKTRPILSPLTKG
EWLKFRPQLNPLAKG

SEQ ID NO: 206678 - protein, 15 aa, Artificial Sequence
  Description of Artificial Sequence: Synthetic peptide
  Seed: EWLKTRPILSPLTKG
EWLKFRPQLNPLGKG

SEQ ID NO: 206679 - protein, 15 aa, Artificial Sequence
  Description of Artificial Sequence: Synthetic peptide
  Seed: EWLKTRPILSPLTKG
EWLKFRPQLNPLLKG

SEQ ID NO: 206680 - protein, 15 aa, Artificial Sequence
  Description of Artificial Sequence: Synthetic peptide
  Seed: EWLKTRPILSPLTKG
EWLKFRPQLNPLQKG

SEQ ID NO: 206681 - protein, 15 aa, Artificial Sequence
  Description of Artificial Sequence: Synthetic peptide
  Seed: EWLKTRPILSPLTKG
EWLKFRPQLNPLSKG

SEQ ID NO: 206682 - protein, 15 aa, Artificial Sequence
  Description of Artificial Sequence: Synthetic peptide
  Seed: EWLKTRPILSPLTKG
EWLKFRPQLNPLTKG

SEQ ID NO: 206683 - protein, 15 aa, Artificial Sequence
  Description of Artificial Sequence: Synthetic peptide
  Seed: EWLKTRPILSPLTKG
EWLKFRPQLNPLVKG

SEQ ID NO: 206684 - protein, 15 aa, Artificial Sequence
  Description of Artificial Sequence: Synthetic peptide
  Seed: EWLKTRPILSPLTKG
EWLKFRPQLSPLAKG

SEQ ID NO: 206685 - protein, 15 aa, Artificial Sequence
  Description of Artificial Sequence: Synthetic peptide
  Seed: EWLKTRPILSPLTKG
EWLKFRPQLSPLGKG

SEQ ID NO: 206686 - protein, 15 aa, Artificial Sequence
  Description of Artificial Sequence: Synthetic peptide
  Seed: EWLKTRPILSPLTKG
EWLKFRPQLSPLIKG

SEQ ID NO: 206687 - protein, 15 aa, Artificial Sequence
  Description of Artificial Sequence: Synthetic peptide
  Seed: EWLKTRPILSPLTKG
EWLKFRPQLSPLLKG

SEQ ID NO: 206688 - protein, 15 aa, Artificial Sequence
  Description of Artificial Sequence: Synthetic peptide
  Seed: EWLKTRPILSPLTKG
EWLKFRPQLSPLQKG

SEQ ID NO: 206689 - protein, 15 aa, Artificial Sequence
  Description of Artificial Sequence: Synthetic peptide
  Seed: EWLKTRPILSPLTKG
EWLKFRPQLSPLSKG

SEQ ID NO: 206690 - protein, 15 aa, Artificial Sequence
  Description of Artificial Sequence: Synthetic peptide
  Seed: EWLKTRPILSPLTKG
EWLKFRPQLSPLVKG

SEQ ID NO: 206691 - protein, 15 aa, Artificial Sequence
  Description of Artificial Sequence: Synthetic peptide
  Seed: EWLKTRPILSPLTKG
EWLKFRPQLTPLAKG

SEQ ID NO: 206692 - protein, 15 aa, Artificial Sequence
  Description of Artificial Sequence: Synthetic peptide
  Seed: EWLKTRPILSPLTKG
EWLKFRPQLTPLGKG

SEQ ID NO: 206693 - protein, 15 aa, Artificial Sequence
  Description of Artificial Sequence: Synthetic peptide
  Seed: EWLKTRPILSPLTKG
EWLKFRPQLTPLHKG

SEQ ID NO: 206694 - protein, 15 aa, Artificial Sequence
  Description of Artificial Sequence: Synthetic peptide
  Seed: EWLKTRPILSPLTKG
EWLKFRPQLTPLNKG

SEQ ID NO: 206695 - protein, 15 aa, Artificial Sequence
  Description of Artificial Sequence: Synthetic peptide
  Seed: EWLKTRPILSPLTKG
EWLKFRPQLTPLQKG

SEQ ID NO: 206696 - protein, 15 aa, Artificial Sequence
  Description of Artificial Sequence: Synthetic peptide
  Seed: EWLKTRPILSPLTKG
EWLKFRPQLTPLSKG

SEQ ID NO: 206697 - protein, 15 aa, Artificial Sequence
  Description of Artificial Sequence: Synthetic peptide
  Seed: EWLKTRPILSPLTKG
EWLKFRPQLTPLTKG

SEQ ID NO: 206698 - protein, 15 aa, Artificial Sequence
  Description of Artificial Sequence: Synthetic peptide
  Seed: EWLKTRPILSPLTKG
EWLKFRPQLTPLVKG

SEQ ID NO: 206699 - protein, 15 aa, Artificial Sequence
  Description of Artificial Sequence: Synthetic peptide
  Seed: EWLKTRPILSPLTKG
EWLKFRPQLVPLAKG

SEQ ID NO: 206700 - protein, 15 aa, Artificial Sequence
  Description of Artificial Sequence: Synthetic peptide
  Seed: EWLKTRPILSPLTKG
EWLKFRPQLVPLSKG

SEQ ID NO: 206701 - protein, 15 aa, Artificial Sequence
  Description of Artificial Sequence: Synthetic peptide
  Seed: EWLKTRPILSPLTKG
EWLKFRPSLAPLAKG

SEQ ID NO: 206702 - protein, 15 aa, Artificial Sequence
  Description of Artificial Sequence: Synthetic peptide
  Seed: EWLKTRPILSPLTKG
EWLKFRPSLAPLIKG

SEQ ID NO: 206703 - protein, 15 aa, Artificial Sequence
  Description of Artificial Sequence: Synthetic peptide
  Seed: EWLKTRPILSPLTKG
EWLKFRPSLAPLLKG

SEQ ID NO: 206704 - protein, 15 aa, Artificial Sequence
  Description of Artificial Sequence: Synthetic peptide
  Seed: EWLKTRPILSPLTKG
EWLKFRPSLAPLVKG

SEQ ID NO: 206705 - protein, 15 aa, Artificial Sequence
  Description of Artificial Sequence: Synthetic peptide
  Seed: EWLKTRPILSPLTKG
EWLKFRPSLGPLIKG

SEQ ID NO: 206706 - protein, 15 aa, Artificial Sequence
  Description of Artificial Sequence: Synthetic peptide
  Seed: EWLKTRPILSPLTKG
EWLKFRPSLGPLLKG

SEQ ID NO: 206707 - protein, 15 aa, Artificial Sequence
  Description of Artificial Sequence: Synthetic peptide
  Seed: EWLKTRPILSPLTKG
EWLKFRPSLGPLVKG

SEQ ID NO: 206708 - protein, 15 aa, Artificial Sequence
  Description of Artificial Sequence: Synthetic peptide
  Seed: EWLKTRPILSPLTKG
EWLKFRPSLNPLAKG

SEQ ID NO: 206709 - protein, 15 aa, Artificial Sequence
  Description of Artificial Sequence: Synthetic peptide
  Seed: EWLKTRPILSPLTKG
EWLKFRPSLNPLGKG

SEQ ID NO: 206710 - protein, 15 aa, Artificial Sequence
  Description of Artificial Sequence: Synthetic peptide
  Seed: EWLKTRPILSPLTKG
EWLKFRPSLNPLIKG

SEQ ID NO: 206711 - protein, 15 aa, Artificial Sequence
  Description of Artificial Sequence: Synthetic peptide
  Seed: EWLKTRPILSPLTKG
EWLKFRPSLNPLLKG

SEQ ID NO: 206712 - protein, 15 aa, Artificial Sequence
  Description of Artificial Sequence: Synthetic peptide
  Seed: EWLKTRPILSPLTKG
EWLKFRPSLNPLNKG

SEQ ID NO: 206713 - protein, 15 aa, Artificial Sequence
  Description of Artificial Sequence: Synthetic peptide
  Seed: EWLKTRPILSPLTKG
EWLKFRPSLNPLQKG

SEQ ID NO: 206714 - protein, 15 aa, Artificial Sequence
  Description of Artificial Sequence: Synthetic peptide
  Seed: EWLKTRPILSPLTKG
EWLKFRPSLNPLSKG

SEQ ID NO: 206715 - protein, 15 aa, Artificial Sequence
  Description of Artificial Sequence: Synthetic peptide
  Seed: EWLKTRPILSPLTKG
EWLKFRPSLNPLTKG

SEQ ID NO: 206716 - protein, 15 aa, Artificial Sequence
  Description of Artificial Sequence: Synthetic peptide
  Seed: EWLKTRPILSPLTKG
EWLKFRPSLNPLVKG

SEQ ID NO: 206717 - protein, 15 aa, Artificial Sequence
  Description of Artificial Sequence: Synthetic peptide
  Seed: EWLKTRPILSPLTKG
EWLKFRPSLSPLAKG

SEQ ID NO: 206718 - protein, 15 aa, Artificial Sequence
  Description of Artificial Sequence: Synthetic peptide
  Seed: EWLKTRPILSPLTKG
EWLKFRPSLSPLGKG

SEQ ID NO: 206719 - protein, 15 aa, Artificial Sequence
  Description of Artificial Sequence: Synthetic peptide
  Seed: EWLKTRPILSPLTKG
EWLKFRPSLSPLIKG

SEQ ID NO: 206720 - protein, 15 aa, Artificial Sequence
  Description of Artificial Sequence: Synthetic peptide
  Seed: EWLKTRPILSPLTKG
EWLKFRPSLSPLLKG

SEQ ID NO: 206721 - protein, 15 aa, Artificial Sequence
  Description of Artificial Sequence: Synthetic peptide
  Seed: EWLKTRPILSPLTKG
EWLKFRPSLSPLMKG

SEQ ID NO: 206722 - protein, 15 aa, Artificial Sequence
  Description of Artificial Sequence: Synthetic peptide
  Seed: EWLKTRPILSPLTKG
EWLKFRPSLSPLQKG

SEQ ID NO: 206723 - protein, 15 aa, Artificial Sequence
  Description of Artificial Sequence: Synthetic peptide
  Seed: EWLKTRPILSPLTKG
EWLKFRPSLSPLSKG

SEQ ID NO: 206724 - protein, 15 aa, Artificial Sequence
  Description of Artificial Sequence: Synthetic peptide
  Seed: EWLKTRPILSPLTKG
EWLKFRPSLSPLVKG

SEQ ID NO: 206725 - protein, 15 aa, Artificial Sequence
  Description of Artificial Sequence: Synthetic peptide
  Seed: EWLKTRPILSPLTKG
EWLKFRPSLTPLAKG

SEQ ID NO: 206726 - protein, 15 aa, Artificial Sequence
  Description of Artificial Sequence: Synthetic peptide
  Seed: EWLKTRPILSPLTKG
EWLKFRPSLTPLGKG

SEQ ID NO: 206727 - protein, 15 aa, Artificial Sequence
  Description of Artificial Sequence: Synthetic peptide
  Seed: EWLKTRPILSPLTKG
EWLKFRPSLTPLHKG

SEQ ID NO: 206728 - protein, 15 aa, Artificial Sequence
  Description of Artificial Sequence: Synthetic peptide
  Seed: EWLKTRPILSPLTKG
EWLKFRPSLTPLIKG

SEQ ID NO: 206729 - protein, 15 aa, Artificial Sequence
  Description of Artificial Sequence: Synthetic peptide
  Seed: EWLKTRPILSPLTKG
EWLKFRPSLTPLLKG

SEQ ID NO: 206730 - protein, 15 aa, Artificial Sequence
  Description of Artificial Sequence: Synthetic peptide
  Seed: EWLKTRPILSPLTKG
EWLKFRPSLTPLNKG

SEQ ID NO: 206731 - protein, 15 aa, Artificial Sequence
  Description of Artificial Sequence: Synthetic peptide
  Seed: EWLKTRPILSPLTKG
EWLKFRPSLTPLQKG

SEQ ID NO: 206732 - protein, 15 aa, Artificial Sequence
  Description of Artificial Sequence: Synthetic peptide
  Seed: EWLKTRPILSPLTKG
EWLKFRPSLTPLSKG

SEQ ID NO: 206733 - protein, 15 aa, Artificial Sequence
  Description of Artificial Sequence: Synthetic peptide
  Seed: EWLKTRPILSPLTKG
EWLKFRPSLTPLTKG

SEQ ID NO: 206734 - protein, 15 aa, Artificial Sequence
  Description of Artificial Sequence: Synthetic peptide
  Seed: EWLKTRPILSPLTKG
EWLKFRPSLTPLVKG

SEQ ID NO: 206735 - protein, 15 aa, Artificial Sequence
  Description of Artificial Sequence: Synthetic peptide
  Seed: EWLKTRPILSPLTKG
EWLKFRPSLVPLAKG

SEQ ID NO: 206736 - protein, 15 aa, Artificial Sequence
  Description of Artificial Sequence: Synthetic peptide
  Seed: EWLKTRPILSPLTKG
EWLKFRPSLVPLSKG

SEQ ID NO: 206737 - protein, 15 aa, Artificial Sequence
  Description of Artificial Sequence: Synthetic peptide
  Seed: EWLKTRPILSPLTKG
EWLKFRPTLAPLIKG

SEQ ID NO: 206738 - protein, 15 aa, Artificial Sequence
  Description of Artificial Sequence: Synthetic peptide
  Seed: EWLKTRPILSPLTKG
EWLKFRPTLAPLLKG

SEQ ID NO: 206739 - protein, 15 aa, Artificial Sequence
  Description of Artificial Sequence: Synthetic peptide
  Seed: EWLKTRPILSPLTKG
EWLKFRPTLAPLVKG

SEQ ID NO: 206740 - protein, 15 aa, Artificial Sequence
  Description of Artificial Sequence: Synthetic peptide
  Seed: EWLKTRPILSPLTKG
EWLKFRPTLGPLIKG

SEQ ID NO: 206741 - protein, 15 aa, Artificial Sequence
  Description of Artificial Sequence: Synthetic peptide
  Seed: EWLKTRPILSPLTKG
EWLKFRPTLGPLLKG

SEQ ID NO: 206742 - protein, 15 aa, Artificial Sequence
  Description of Artificial Sequence: Synthetic peptide
  Seed: EWLKTRPILSPLTKG
EWLKFRPTLGPLVKG

SEQ ID NO: 206743 - protein, 15 aa, Artificial Sequence
  Description of Artificial Sequence: Synthetic peptide
  Seed: EWLKTRPILSPLTKG
EWLKFRPTLNPLAKG

SEQ ID NO: 206744 - protein, 15 aa, Artificial Sequence
  Description of Artificial Sequence: Synthetic peptide
  Seed: EWLKTRPILSPLTKG
EWLKFRPTLNPLGKG

SEQ ID NO: 206745 - protein, 15 aa, Artificial Sequence
  Description of Artificial Sequence: Synthetic peptide
  Seed: EWLKTRPILSPLTKG
EWLKFRPTLNPLIKG

SEQ ID NO: 206746 - protein, 15 aa, Artificial Sequence
  Description of Artificial Sequence: Synthetic peptide
  Seed: EWLKTRPILSPLTKG
EWLKFRPTLNPLLKG

SEQ ID NO: 206747 - protein, 15 aa, Artificial Sequence
  Description of Artificial Sequence: Synthetic peptide
  Seed: EWLKTRPILSPLTKG
EWLKFRPTLNPLSKG

SEQ ID NO: 206748 - protein, 15 aa, Artificial Sequence
  Description of Artificial Sequence: Synthetic peptide
  Seed: EWLKTRPILSPLTKG
EWLKFRPTLNPLVKG

SEQ ID NO: 206749 - protein, 15 aa, Artificial Sequence
  Description of Artificial Sequence: Synthetic peptide
  Seed: EWLKTRPILSPLTKG
EWLKFRPTLSPLAKG

SEQ ID NO: 206750 - protein, 15 aa, Artificial Sequence
  Description of Artificial Sequence: Synthetic peptide
  Seed: EWLKTRPILSPLTKG
EWLKFRPTLSPLGKG

SEQ ID NO: 206751 - protein, 15 aa, Artificial Sequence
  Description of Artificial Sequence: Synthetic peptide
  Seed: EWLKTRPILSPLTKG
EWLKFRPTLSPLIKG

SEQ ID NO: 206752 - protein, 15 aa, Artificial Sequence
  Description of Artificial Sequence: Synthetic peptide
  Seed: EWLKTRPILSPLTKG
EWLKFRPTLSPLLKG

SEQ ID NO: 206753 - protein, 15 aa, Artificial Sequence
  Description of Artificial Sequence: Synthetic peptide
  Seed: EWLKTRPILSPLTKG
EWLKFRPTLSPLMKG

SEQ ID NO: 206754 - protein, 15 aa, Artificial Sequence
  Description of Artificial Sequence: Synthetic peptide
  Seed: EWLKTRPILSPLTKG
EWLKFRPTLSPLSKG

SEQ ID NO: 206755 - protein, 15 aa, Artificial Sequence
  Description of Artificial Sequence: Synthetic peptide
  Seed: EWLKTRPILSPLTKG
EWLKFRPTLSPLTKG

SEQ ID NO: 206756 - protein, 15 aa, Artificial Sequence
  Description of Artificial Sequence: Synthetic peptide
  Seed: EWLKTRPILSPLTKG
EWLKFRPTLSPLVKG

SEQ ID NO: 206757 - protein, 15 aa, Artificial Sequence
  Description of Artificial Sequence: Synthetic peptide
  Seed: EWLKTRPILSPLTKG
EWLKFRPTLTPLAKG

SEQ ID NO: 206758 - protein, 15 aa, Artificial Sequence
  Description of Artificial Sequence: Synthetic peptide
  Seed: EWLKTRPILSPLTKG
EWLKFRPTLTPLGKG

SEQ ID NO: 206759 - protein, 15 aa, Artificial Sequence
  Description of Artificial Sequence: Synthetic peptide
  Seed: EWLKTRPILSPLTKG
EWLKFRPTLTPLIKG

SEQ ID NO: 206760 - protein, 15 aa, Artificial Sequence
  Description of Artificial Sequence: Synthetic peptide
  Seed: EWLKTRPILSPLTKG
EWLKFRPTLTPLLKG

SEQ ID NO: 206761 - protein, 15 aa, Artificial Sequence
  Description of Artificial Sequence: Synthetic peptide
  Seed: EWLKTRPILSPLTKG
EWLKFRPTLTPLQKG

SEQ ID NO: 206762 - protein, 15 aa, Artificial Sequence
  Description of Artificial Sequence: Synthetic peptide
  Seed: EWLKTRPILSPLTKG
EWLKFRPTLTPLSKG

SEQ ID NO: 206763 - protein, 15 aa, Artificial Sequence
  Description of Artificial Sequence: Synthetic peptide
  Seed: EWLKTRPILSPLTKG
EWLKFRPTLTPLTKG

SEQ ID NO: 206764 - protein, 15 aa, Artificial Sequence
  Description of Artificial Sequence: Synthetic peptide
  Seed: EWLKTRPILSPLTKG
EWLKFRPTLTPLVKG

SEQ ID NO: 206765 - protein, 15 aa, Artificial Sequence
  Description of Artificial Sequence: Synthetic peptide
  Seed: EWLKTRPILSPLTKG
EWLKFRPVLAPLAKG

SEQ ID NO: 206766 - protein, 15 aa, Artificial Sequence
  Description of Artificial Sequence: Synthetic peptide
  Seed: EWLKTRPILSPLTKG
EWLKFRPVLAPLIKG

SEQ ID NO: 206767 - protein, 15 aa, Artificial Sequence
  Description of Artificial Sequence: Synthetic peptide
  Seed: EWLKTRPILSPLTKG
EWLKFRPVLAPLKKG

SEQ ID NO: 206768 - protein, 15 aa, Artificial Sequence
  Description of Artificial Sequence: Synthetic peptide
  Seed: EWLKTRPILSPLTKG
EWLKFRPVLAPLLKG

SEQ ID NO: 206769 - protein, 15 aa, Artificial Sequence
  Description of Artificial Sequence: Synthetic peptide
  Seed: EWLKTRPILSPLTKG
EWLKFRPVLAPLMKG

SEQ ID NO: 206770 - protein, 15 aa, Artificial Sequence
  Description of Artificial Sequence: Synthetic peptide
  Seed: EWLKTRPILSPLTKG
EWLKFRPVLAPLRKG

SEQ ID NO: 206771 - protein, 15 aa, Artificial Sequence
  Description of Artificial Sequence: Synthetic peptide
  Seed: EWLKTRPILSPLTKG
EWLKFRPVLAPLSKG

SEQ ID NO: 206772 - protein, 15 aa, Artificial Sequence
  Description of Artificial Sequence: Synthetic peptide
  Seed: EWLKTRPILSPLTKG
EWLKFRPVLAPLTKG

SEQ ID NO: 206773 - protein, 15 aa, Artificial Sequence
  Description of Artificial Sequence: Synthetic peptide
  Seed: EWLKTRPILSPLTKG
EWLKFRPVLAPLVKG

SEQ ID NO: 206774 - protein, 15 aa, Artificial Sequence
  Description of Artificial Sequence: Synthetic peptide
  Seed: EWLKTRPILSPLTKG
EWLKFRPVLDPLAKG

SEQ ID NO: 206775 - protein, 15 aa, Artificial Sequence
  Description of Artificial Sequence: Synthetic peptide
  Seed: EWLKTRPILSPLTKG
EWLKFRPVLGPLAKG

SEQ ID NO: 206776 - protein, 15 aa, Artificial Sequence
  Description of Artificial Sequence: Synthetic peptide
  Seed: EWLKTRPILSPLTKG
EWLKFRPVLGPLIKG

SEQ ID NO: 206777 - protein, 15 aa, Artificial Sequence
  Description of Artificial Sequence: Synthetic peptide
  Seed: EWLKTRPILSPLTKG
EWLKFRPVLGPLLKG

SEQ ID NO: 206778 - protein, 15 aa, Artificial Sequence
  Description of Artificial Sequence: Synthetic peptide
  Seed: EWLKTRPILSPLTKG
EWLKFRPVLGPLMKG

SEQ ID NO: 206779 - protein, 15 aa, Artificial Sequence
  Description of Artificial Sequence: Synthetic peptide
  Seed: EWLKTRPILSPLTKG
EWLKFRPVLGPLSKG

SEQ ID NO: 206780 - protein, 15 aa, Artificial Sequence
  Description of Artificial Sequence: Synthetic peptide
  Seed: EWLKTRPILSPLTKG
EWLKFRPVLGPLTKG

SEQ ID NO: 206781 - protein, 15 aa, Artificial Sequence
  Description of Artificial Sequence: Synthetic peptide
  Seed: EWLKTRPILSPLTKG
EWLKFRPVLGPLVKG

SEQ ID NO: 206782 - protein, 15 aa, Artificial Sequence
  Description of Artificial Sequence: Synthetic peptide
  Seed: EWLKTRPILSPLTKG
EWLKFRPVLIPLAKG

SEQ ID NO: 206783 - protein, 15 aa, Artificial Sequence
  Description of Artificial Sequence: Synthetic peptide
  Seed: EWLKTRPILSPLTKG
EWLKFRPVLIPLSKG

SEQ ID NO: 206784 - protein, 15 aa, Artificial Sequence
  Description of Artificial Sequence: Synthetic peptide
  Seed: EWLKTRPILSPLTKG
EWLKFRPVLNPLAKG

SEQ ID NO: 206785 - protein, 15 aa, Artificial Sequence
  Description of Artificial Sequence: Synthetic peptide
  Seed: EWLKTRPILSPLTKG
EWLKFRPVLNPLDKG

SEQ ID NO: 206786 - protein, 15 aa, Artificial Sequence
  Description of Artificial Sequence: Synthetic peptide
  Seed: EWLKTRPILSPLTKG
EWLKFRPVLNPLEKG

SEQ ID NO: 206787 - protein, 15 aa, Artificial Sequence
  Description of Artificial Sequence: Synthetic peptide
  Seed: EWLKTRPILSPLTKG
EWLKFRPVLNPLGKG

SEQ ID NO: 206788 - protein, 15 aa, Artificial Sequence
  Description of Artificial Sequence: Synthetic peptide
  Seed: EWLKTRPILSPLTKG
EWLKFRPVLNPLHKG

SEQ ID NO: 206789 - protein, 15 aa, Artificial Sequence
  Description of Artificial Sequence: Synthetic peptide
  Seed: EWLKTRPILSPLTKG
EWLKFRPVLNPLIKG

SEQ ID NO: 206790 - protein, 15 aa, Artificial Sequence
  Description of Artificial Sequence: Synthetic peptide
  Seed: EWLKTRPILSPLTKG
EWLKFRPVLNPLLKG

SEQ ID NO: 206791 - protein, 15 aa, Artificial Sequence
  Description of Artificial Sequence: Synthetic peptide
  Seed: EWLKTRPILSPLTKG
EWLKFRPVLNPLMKG

SEQ ID NO: 206792 - protein, 15 aa, Artificial Sequence
  Description of Artificial Sequence: Synthetic peptide
  Seed: EWLKTRPILSPLTKG
EWLKFRPVLNPLNKG

SEQ ID NO: 206793 - protein, 15 aa, Artificial Sequence
  Description of Artificial Sequence: Synthetic peptide
  Seed: EWLKTRPILSPLTKG
EWLKFRPVLNPLPKG

SEQ ID NO: 206794 - protein, 15 aa, Artificial Sequence
  Description of Artificial Sequence: Synthetic peptide
  Seed: EWLKTRPILSPLTKG
EWLKFRPVLNPLQKG

SEQ ID NO: 206795 - protein, 15 aa, Artificial Sequence
  Description of Artificial Sequence: Synthetic peptide
  Seed: EWLKTRPILSPLTKG
EWLKFRPVLNPLSKG

SEQ ID NO: 206796 - protein, 15 aa, Artificial Sequence
  Description of Artificial Sequence: Synthetic peptide
  Seed: EWLKTRPILSPLTKG
EWLKFRPVLNPLTKG

SEQ ID NO: 206797 - protein, 15 aa, Artificial Sequence
  Description of Artificial Sequence: Synthetic peptide
  Seed: EWLKTRPILSPLTKG
EWLKFRPVLNPLVKG

SEQ ID NO: 206798 - protein, 15 aa, Artificial Sequence
  Description of Artificial Sequence: Synthetic peptide
  Seed: EWLKTRPILSPLTKG
EWLKFRPVLPPLAKG

SEQ ID NO: 206799 - protein, 15 aa, Artificial Sequence
  Description of Artificial Sequence: Synthetic peptide
  Seed: EWLKTRPILSPLTKG
EWLKFRPVLPPLSKG

SEQ ID NO: 206800 - protein, 15 aa, Artificial Sequence
  Description of Artificial Sequence: Synthetic peptide
  Seed: EWLKTRPILSPLTKG
EWLKFRPVLPPLVKG

SEQ ID NO: 206801 - protein, 15 aa, Artificial Sequence
  Description of Artificial Sequence: Synthetic peptide
  Seed: EWLKTRPILSPLTKG
EWLKFRPVLSPLAKG

SEQ ID NO: 206802 - protein, 15 aa, Artificial Sequence
  Description of Artificial Sequence: Synthetic peptide
  Seed: EWLKTRPILSPLTKG
EWLKFRPVLSPLDKG

SEQ ID NO: 206803 - protein, 15 aa, Artificial Sequence
  Description of Artificial Sequence: Synthetic peptide
  Seed: EWLKTRPILSPLTKG
EWLKFRPVLSPLFKG

SEQ ID NO: 206804 - protein, 15 aa, Artificial Sequence
  Description of Artificial Sequence: Synthetic peptide
  Seed: EWLKTRPILSPLTKG
EWLKFRPVLSPLGKG

SEQ ID NO: 206805 - protein, 15 aa, Artificial Sequence
  Description of Artificial Sequence: Synthetic peptide
  Seed: EWLKTRPILSPLTKG
EWLKFRPVLSPLHKG

SEQ ID NO: 206806 - protein, 15 aa, Artificial Sequence
  Description of Artificial Sequence: Synthetic peptide
  Seed: EWLKTRPILSPLTKG
EWLKFRPVLSPLIKG

SEQ ID NO: 206807 - protein, 15 aa, Artificial Sequence
  Description of Artificial Sequence: Synthetic peptide
  Seed: EWLKTRPILSPLTKG
EWLKFRPVLSPLKKG

SEQ ID NO: 206808 - protein, 15 aa, Artificial Sequence
  Description of Artificial Sequence: Synthetic peptide
  Seed: EWLKTRPILSPLTKG
EWLKFRPVLSPLLKG

SEQ ID NO: 206809 - protein, 15 aa, Artificial Sequence
  Description of Artificial Sequence: Synthetic peptide
  Seed: EWLKTRPILSPLTKG
EWLKFRPVLSPLMKG

SEQ ID NO: 206810 - protein, 15 aa, Artificial Sequence
  Description of Artificial Sequence: Synthetic peptide
  Seed: EWLKTRPILSPLTKG
EWLKFRPVLSPLNKG

SEQ ID NO: 206811 - protein, 15 aa, Artificial Sequence
  Description of Artificial Sequence: Synthetic peptide
  Seed: EWLKTRPILSPLTKG
EWLKFRPVLSPLQKG

SEQ ID NO: 206812 - protein, 15 aa, Artificial Sequence
  Description of Artificial Sequence: Synthetic peptide
  Seed: EWLKTRPILSPLTKG
EWLKFRPVLSPLRKG

SEQ ID NO: 206813 - protein, 15 aa, Artificial Sequence
  Description of Artificial Sequence: Synthetic peptide
  Seed: EWLKTRPILSPLTKG
EWLKFRPVLSPLSKG

SEQ ID NO: 206814 - protein, 15 aa, Artificial Sequence
  Description of Artificial Sequence: Synthetic peptide
  Seed: EWLKTRPILSPLTKG
EWLKFRPVLSPLTKG

SEQ ID NO: 206815 - protein, 15 aa, Artificial Sequence
  Description of Artificial Sequence: Synthetic peptide
  Seed: EWLKTRPILSPLTKG
EWLKFRPVLSPLVKG

SEQ ID NO: 206816 - protein, 15 aa, Artificial Sequence
  Description of Artificial Sequence: Synthetic peptide
  Seed: EWLKTRPILSPLTKG
EWLKFRPVLTPLAKG

SEQ ID NO: 206817 - protein, 15 aa, Artificial Sequence
  Description of Artificial Sequence: Synthetic peptide
  Seed: EWLKTRPILSPLTKG
EWLKFRPVLTPLDKG

SEQ ID NO: 206818 - protein, 15 aa, Artificial Sequence
  Description of Artificial Sequence: Synthetic peptide
  Seed: EWLKTRPILSPLTKG
EWLKFRPVLTPLGKG

SEQ ID NO: 206819 - protein, 15 aa, Artificial Sequence
  Description of Artificial Sequence: Synthetic peptide
  Seed: EWLKTRPILSPLTKG
EWLKFRPVLTPLHKG

SEQ ID NO: 206820 - protein, 15 aa, Artificial Sequence
  Description of Artificial Sequence: Synthetic peptide
  Seed: EWLKTRPILSPLTKG
EWLKFRPVLTPLIKG

SEQ ID NO: 206821 - protein, 15 aa, Artificial Sequence
  Description of Artificial Sequence: Synthetic peptide
  Seed: EWLKTRPILSPLTKG
EWLKFRPVLTPLLKG

SEQ ID NO: 206822 - protein, 15 aa, Artificial Sequence
  Description of Artificial Sequence: Synthetic peptide
  Seed: EWLKTRPILSPLTKG
EWLKFRPVLTPLMKG

SEQ ID NO: 206823 - protein, 15 aa, Artificial Sequence
  Description of Artificial Sequence: Synthetic peptide
  Seed: EWLKTRPILSPLTKG
EWLKFRPVLTPLNKG

SEQ ID NO: 206824 - protein, 15 aa, Artificial Sequence
  Description of Artificial Sequence: Synthetic peptide
  Seed: EWLKTRPILSPLTKG
EWLKFRPVLTPLPKG

SEQ ID NO: 206825 - protein, 15 aa, Artificial Sequence
  Description of Artificial Sequence: Synthetic peptide
  Seed: EWLKTRPILSPLTKG
EWLKFRPVLTPLQKG

SEQ ID NO: 206826 - protein, 15 aa, Artificial Sequence
  Description of Artificial Sequence: Synthetic peptide
  Seed: EWLKTRPILSPLTKG
EWLKFRPVLTPLSKG

SEQ ID NO: 206827 - protein, 15 aa, Artificial Sequence
  Description of Artificial Sequence: Synthetic peptide
  Seed: EWLKTRPILSPLTKG
EWLKFRPVLTPLTKG

SEQ ID NO: 206828 - protein, 15 aa, Artificial Sequence
  Description of Artificial Sequence: Synthetic peptide
  Seed: EWLKTRPILSPLTKG
EWLKFRPVLTPLVKG

SEQ ID NO: 206829 - protein, 15 aa, Artificial Sequence
  Description of Artificial Sequence: Synthetic peptide
  Seed: EWLKTRPILSPLTKG
EWLKFRPVLVPLAKG

SEQ ID NO: 206830 - protein, 15 aa, Artificial Sequence
  Description of Artificial Sequence: Synthetic peptide
  Seed: EWLKTRPILSPLTKG
EWLKFRPVLVPLGKG

SEQ ID NO: 206831 - protein, 15 aa, Artificial Sequence
  Description of Artificial Sequence: Synthetic peptide
  Seed: EWLKTRPILSPLTKG
EWLKFRPVLVPLSKG

SEQ ID NO: 206832 - protein, 15 aa, Artificial Sequence
  Description of Artificial Sequence: Synthetic peptide
  Seed: EWLKTRPILSPLTKG
EWLKFRPWLAPLAKG

SEQ ID NO: 206833 - protein, 15 aa, Artificial Sequence
  Description of Artificial Sequence: Synthetic peptide
  Seed: EWLKTRPILSPLTKG
EWLKFRPWLAPLIKG

SEQ ID NO: 206834 - protein, 15 aa, Artificial Sequence
  Description of Artificial Sequence: Synthetic peptide
  Seed: EWLKTRPILSPLTKG
EWLKFRPWLAPLLKG

SEQ ID NO: 206835 - protein, 15 aa, Artificial Sequence
  Description of Artificial Sequence: Synthetic peptide
  Seed: EWLKTRPILSPLTKG
EWLKFRPWLAPLRKG

SEQ ID NO: 206836 - protein, 15 aa, Artificial Sequence
  Description of Artificial Sequence: Synthetic peptide
  Seed: EWLKTRPILSPLTKG
EWLKFRPWLAPLVKG

SEQ ID NO: 206837 - protein, 15 aa, Artificial Sequence
  Description of Artificial Sequence: Synthetic peptide
  Seed: EWLKTRPILSPLTKG
EWLKFRPWLNPLIKG

SEQ ID NO: 206838 - protein, 15 aa, Artificial Sequence
  Description of Artificial Sequence: Synthetic peptide
  Seed: EWLKTRPILSPLTKG
EWLKFRPWLNPLLKG

SEQ ID NO: 206839 - protein, 15 aa, Artificial Sequence
  Description of Artificial Sequence: Synthetic peptide
  Seed: EWLKTRPILSPLTKG
EWLKFRPWLNPLVKG

SEQ ID NO: 206840 - protein, 15 aa, Artificial Sequence
  Description of Artificial Sequence: Synthetic peptide
  Seed: EWLKTRPILSPLTKG
EWLKFRPWLSPLAKG

SEQ ID NO: 206841 - protein, 15 aa, Artificial Sequence
  Description of Artificial Sequence: Synthetic peptide
  Seed: EWLKTRPILSPLTKG
EWLKFRPWLSPLIKG

SEQ ID NO: 206842 - protein, 15 aa, Artificial Sequence
  Description of Artificial Sequence: Synthetic peptide
  Seed: EWLKTRPILSPLTKG
EWLKFRPWLSPLLKG

SEQ ID NO: 206843 - protein, 15 aa, Artificial Sequence
  Description of Artificial Sequence: Synthetic peptide
  Seed: EWLKTRPILSPLTKG
EWLKFRPWLSPLSKG

SEQ ID NO: 206844 - protein, 15 aa, Artificial Sequence
  Description of Artificial Sequence: Synthetic peptide
  Seed: EWLKTRPILSPLTKG
EWLKFRPWLSPLVKG

SEQ ID NO: 206845 - protein, 15 aa, Artificial Sequence
  Description of Artificial Sequence: Synthetic peptide
  Seed: EWLKTRPILSPLTKG
EWLKFRPYLAPLAKG

SEQ ID NO: 206846 - protein, 15 aa, Artificial Sequence
  Description of Artificial Sequence: Synthetic peptide
  Seed: EWLKTRPILSPLTKG
EWLKFRPYLAPLIKG

SEQ ID NO: 206847 - protein, 15 aa, Artificial Sequence
  Description of Artificial Sequence: Synthetic peptide
  Seed: EWLKTRPILSPLTKG
EWLKFRPYLAPLKKG

SEQ ID NO: 206848 - protein, 15 aa, Artificial Sequence
  Description of Artificial Sequence: Synthetic peptide
  Seed: EWLKTRPILSPLTKG
EWLKFRPYLAPLLKG

SEQ ID NO: 206849 - protein, 15 aa, Artificial Sequence
  Description of Artificial Sequence: Synthetic peptide
  Seed: EWLKTRPILSPLTKG
EWLKFRPYLAPLRKG

SEQ ID NO: 206850 - protein, 15 aa, Artificial Sequence
  Description of Artificial Sequence: Synthetic peptide
  Seed: EWLKTRPILSPLTKG
EWLKFRPYLAPLVKG

SEQ ID NO: 206851 - protein, 15 aa, Artificial Sequence
  Description of Artificial Sequence: Synthetic peptide
  Seed: EWLKTRPILSPLTKG
EWLKFRPYLGPLAKG

SEQ ID NO: 206852 - protein, 15 aa, Artificial Sequence
  Description of Artificial Sequence: Synthetic peptide
  Seed: EWLKTRPILSPLTKG
EWLKFRPYLGPLIKG

SEQ ID NO: 206853 - protein, 15 aa, Artificial Sequence
  Description of Artificial Sequence: Synthetic peptide
  Seed: EWLKTRPILSPLTKG
EWLKFRPYLGPLLKG

SEQ ID NO: 206854 - protein, 15 aa, Artificial Sequence
  Description of Artificial Sequence: Synthetic peptide
  Seed: EWLKTRPILSPLTKG
EWLKFRPYLGPLVKG

SEQ ID NO: 206855 - protein, 15 aa, Artificial Sequence
  Description of Artificial Sequence: Synthetic peptide
  Seed: EWLKTRPILSPLTKG
EWLKFRPYLNPLAKG

SEQ ID NO: 206856 - protein, 15 aa, Artificial Sequence
  Description of Artificial Sequence: Synthetic peptide
  Seed: EWLKTRPILSPLTKG
EWLKFRPYLNPLIKG

SEQ ID NO: 206857 - protein, 15 aa, Artificial Sequence
  Description of Artificial Sequence: Synthetic peptide
  Seed: EWLKTRPILSPLTKG
EWLKFRPYLNPLLKG

SEQ ID NO: 206858 - protein, 15 aa, Artificial Sequence
  Description of Artificial Sequence: Synthetic peptide
  Seed: EWLKTRPILSPLTKG
EWLKFRPYLNPLVKG

SEQ ID NO: 206859 - protein, 15 aa, Artificial Sequence
  Description of Artificial Sequence: Synthetic peptide
  Seed: EWLKTRPILSPLTKG
EWLKFRPYLSPLAKG

SEQ ID NO: 206860 - protein, 15 aa, Artificial Sequence
  Description of Artificial Sequence: Synthetic peptide
  Seed: EWLKTRPILSPLTKG
EWLKFRPYLSPLIKG

SEQ ID NO: 206861 - protein, 15 aa, Artificial Sequence
  Description of Artificial Sequence: Synthetic peptide
  Seed: EWLKTRPILSPLTKG
EWLKFRPYLSPLKKG

SEQ ID NO: 206862 - protein, 15 aa, Artificial Sequence
  Description of Artificial Sequence: Synthetic peptide
  Seed: EWLKTRPILSPLTKG
EWLKFRPYLSPLLKG

SEQ ID NO: 206863 - protein, 15 aa, Artificial Sequence
  Description of Artificial Sequence: Synthetic peptide
  Seed: EWLKTRPILSPLTKG
EWLKFRPYLSPLMKG

SEQ ID NO: 206864 - protein, 15 aa, Artificial Sequence
  Description of Artificial Sequence: Synthetic peptide
  Seed: EWLKTRPILSPLTKG
EWLKFRPYLSPLRKG

SEQ ID NO: 206865 - protein, 15 aa, Artificial Sequence
  Description of Artificial Sequence: Synthetic peptide
  Seed: EWLKTRPILSPLTKG
EWLKFRPYLSPLSKG

SEQ ID NO: 206866 - protein, 15 aa, Artificial Sequence
  Description of Artificial Sequence: Synthetic peptide
  Seed: EWLKTRPILSPLTKG
EWLKFRPYLSPLTKG

SEQ ID NO: 206867 - protein, 15 aa, Artificial Sequence
  Description of Artificial Sequence: Synthetic peptide
  Seed: EWLKTRPILSPLTKG
EWLKFRPYLSPLVKG

SEQ ID NO: 206868 - protein, 15 aa, Artificial Sequence
  Description of Artificial Sequence: Synthetic peptide
  Seed: EWLKTRPILSPLTKG
EWLKFRPYLTPLAKG

SEQ ID NO: 206869 - protein, 15 aa, Artificial Sequence
  Description of Artificial Sequence: Synthetic peptide
  Seed: EWLKTRPILSPLTKG
EWLKFRPYLTPLIKG

SEQ ID NO: 206870 - protein, 15 aa, Artificial Sequence
  Description of Artificial Sequence: Synthetic peptide
  Seed: EWLKTRPILSPLTKG
EWLKFRPYLTPLLKG

SEQ ID NO: 206871 - protein, 15 aa, Artificial Sequence
  Description of Artificial Sequence: Synthetic peptide
  Seed: EWLKTRPILSPLTKG
EWLKFRPYLTPLVKG

SEQ ID NO: 206872 - protein, 15 aa, Artificial Sequence
  Description of Artificial Sequence: Synthetic peptide
  Seed: EWLKTRPILSPLTKG
EWLKGRPILAPLTKG

SEQ ID NO: 206873 - protein, 15 aa, Artificial Sequence
  Description of Artificial Sequence: Synthetic peptide
  Seed: EWLKTRPILSPLTKG
EWLKGRPILIPLTKG

SEQ ID NO: 206874 - protein, 15 aa, Artificial Sequence
  Description of Artificial Sequence: Synthetic peptide
  Seed: EWLKTRPILSPLTKG
EWLKGRPILLPLTKG

SEQ ID NO: 206875 - protein, 15 aa, Artificial Sequence
  Description of Artificial Sequence: Synthetic peptide
  Seed: EWLKTRPILSPLTKG
EWLKGRPILVPLTKG

SEQ ID NO: 206876 - protein, 15 aa, Artificial Sequence
  Description of Artificial Sequence: Synthetic peptide
  Seed: EWLKTRPILSPLTKG
EWLKIRPALAPLSKG

SEQ ID NO: 206877 - protein, 15 aa, Artificial Sequence
  Description of Artificial Sequence: Synthetic peptide
  Seed: EWLKTRPILSPLTKG
EWLKIRPALDPLAKG

SEQ ID NO: 206878 - protein, 15 aa, Artificial Sequence
  Description of Artificial Sequence: Synthetic peptide
  Seed: EWLKTRPILSPLTKG
EWLKIRPALKPLAKG

SEQ ID NO: 206879 - protein, 15 aa, Artificial Sequence
  Description of Artificial Sequence: Synthetic peptide
  Seed: EWLKTRPILSPLTKG
EWLKIRPALKPLVKG

SEQ ID NO: 206880 - protein, 15 aa, Artificial Sequence
  Description of Artificial Sequence: Synthetic peptide
  Seed: EWLKTRPILSPLTKG
EWLKIRPALNPLAKG

SEQ ID NO: 206881 - protein, 15 aa, Artificial Sequence
  Description of Artificial Sequence: Synthetic peptide
  Seed: EWLKTRPILSPLTKG
EWLKIRPALNPLGKG

SEQ ID NO: 206882 - protein, 15 aa, Artificial Sequence
  Description of Artificial Sequence: Synthetic peptide
  Seed: EWLKTRPILSPLTKG
EWLKIRPALNPLHKG

SEQ ID NO: 206883 - protein, 15 aa, Artificial Sequence
  Description of Artificial Sequence: Synthetic peptide
  Seed: EWLKTRPILSPLTKG
EWLKIRPALNPLMKG

SEQ ID NO: 206884 - protein, 15 aa, Artificial Sequence
  Description of Artificial Sequence: Synthetic peptide
  Seed: EWLKTRPILSPLTKG
EWLKIRPALNPLNKG

SEQ ID NO: 206885 - protein, 15 aa, Artificial Sequence
  Description of Artificial Sequence: Synthetic peptide
  Seed: EWLKTRPILSPLTKG
EWLKIRPALNPLQKG

SEQ ID NO: 206886 - protein, 15 aa, Artificial Sequence
  Description of Artificial Sequence: Synthetic peptide
  Seed: EWLKTRPILSPLTKG
EWLKIRPALNPLSKG

SEQ ID NO: 206887 - protein, 15 aa, Artificial Sequence
  Description of Artificial Sequence: Synthetic peptide
  Seed: EWLKTRPILSPLTKG
EWLKIRPALNPLTKG

SEQ ID NO: 206888 - protein, 15 aa, Artificial Sequence
  Description of Artificial Sequence: Synthetic peptide
  Seed: EWLKTRPILSPLTKG
EWLKIRPALNPLVKG

SEQ ID NO: 206889 - protein, 15 aa, Artificial Sequence
  Description of Artificial Sequence: Synthetic peptide
  Seed: EWLKTRPILSPLTKG
EWLKIRPALRPLAKG

SEQ ID NO: 206890 - protein, 15 aa, Artificial Sequence
  Description of Artificial Sequence: Synthetic peptide
  Seed: EWLKTRPILSPLTKG
EWLKIRPALRPLIKG

SEQ ID NO: 206891 - protein, 15 aa, Artificial Sequence
  Description of Artificial Sequence: Synthetic peptide
  Seed: EWLKTRPILSPLTKG
EWLKIRPALRPLLKG

SEQ ID NO: 206892 - protein, 15 aa, Artificial Sequence
  Description of Artificial Sequence: Synthetic peptide
  Seed: EWLKTRPILSPLTKG
EWLKIRPALRPLMKG

SEQ ID NO: 206893 - protein, 15 aa, Artificial Sequence
  Description of Artificial Sequence: Synthetic peptide
  Seed: EWLKTRPILSPLTKG
EWLKIRPALRPLRKG

SEQ ID NO: 206894 - protein, 15 aa, Artificial Sequence
  Description of Artificial Sequence: Synthetic peptide
  Seed: EWLKTRPILSPLTKG
EWLKIRPALRPLSKG

SEQ ID NO: 206895 - protein, 15 aa, Artificial Sequence
  Description of Artificial Sequence: Synthetic peptide
  Seed: EWLKTRPILSPLTKG
EWLKIRPALRPLVKG

SEQ ID NO: 206896 - protein, 15 aa, Artificial Sequence
  Description of Artificial Sequence: Synthetic peptide
  Seed: EWLKTRPILSPLTKG
EWLKIRPALRPLYKG

SEQ ID NO: 206897 - protein, 15 aa, Artificial Sequence
  Description of Artificial Sequence: Synthetic peptide
  Seed: EWLKTRPILSPLTKG
EWLKIRPALSPLAKG

SEQ ID NO: 206898 - protein, 15 aa, Artificial Sequence
  Description of Artificial Sequence: Synthetic peptide
  Seed: EWLKTRPILSPLTKG
EWLKIRPALSPLGKG

SEQ ID NO: 206899 - protein, 15 aa, Artificial Sequence
  Description of Artificial Sequence: Synthetic peptide
  Seed: EWLKTRPILSPLTKG
EWLKIRPALSPLHKG

SEQ ID NO: 206900 - protein, 15 aa, Artificial Sequence
  Description of Artificial Sequence: Synthetic peptide
  Seed: EWLKTRPILSPLTKG
EWLKIRPALSPLQKG

SEQ ID NO: 206901 - protein, 15 aa, Artificial Sequence
  Description of Artificial Sequence: Synthetic peptide
  Seed: EWLKTRPILSPLTKG
EWLKIRPALSPLSKG

SEQ ID NO: 206902 - protein, 15 aa, Artificial Sequence
  Description of Artificial Sequence: Synthetic peptide
  Seed: EWLKTRPILSPLTKG
EWLKIRPALSPLTKG

SEQ ID NO: 206903 - protein, 15 aa, Artificial Sequence
  Description of Artificial Sequence: Synthetic peptide
  Seed: EWLKTRPILSPLTKG
EWLKIRPALTPLAKG

SEQ ID NO: 206904 - protein, 15 aa, Artificial Sequence
  Description of Artificial Sequence: Synthetic peptide
  Seed: EWLKTRPILSPLTKG
EWLKIRPALTPLGKG

SEQ ID NO: 206905 - protein, 15 aa, Artificial Sequence
  Description of Artificial Sequence: Synthetic peptide
  Seed: EWLKTRPILSPLTKG
EWLKIRPALTPLHKG

SEQ ID NO: 206906 - protein, 15 aa, Artificial Sequence
  Description of Artificial Sequence: Synthetic peptide
  Seed: EWLKTRPILSPLTKG
EWLKIRPALTPLMKG

SEQ ID NO: 206907 - protein, 15 aa, Artificial Sequence
  Description of Artificial Sequence: Synthetic peptide
  Seed: EWLKTRPILSPLTKG
EWLKIRPALTPLQKG

SEQ ID NO: 206908 - protein, 15 aa, Artificial Sequence
  Description of Artificial Sequence: Synthetic peptide
  Seed: EWLKTRPILSPLTKG
EWLKIRPALTPLSKG

SEQ ID NO: 206909 - protein, 15 aa, Artificial Sequence
  Description of Artificial Sequence: Synthetic peptide
  Seed: EWLKTRPILSPLTKG
EWLKIRPALTPLTKG

SEQ ID NO: 206910 - protein, 15 aa, Artificial Sequence
  Description of Artificial Sequence: Synthetic peptide
  Seed: EWLKTRPILSPLTKG
EWLKIRPALTPLVKG

SEQ ID NO: 206911 - protein, 15 aa, Artificial Sequence
  Description of Artificial Sequence: Synthetic peptide
  Seed: EWLKTRPILSPLTKG
EWLKIRPCLNPLAKG

SEQ ID NO: 206912 - protein, 15 aa, Artificial Sequence
  Description of Artificial Sequence: Synthetic peptide
  Seed: EWLKTRPILSPLTKG
EWLKIRPCLNPLSKG

SEQ ID NO: 206913 - protein, 15 aa, Artificial Sequence
  Description of Artificial Sequence: Synthetic peptide
  Seed: EWLKTRPILSPLTKG
EWLKIRPCLSPLAKG

SEQ ID NO: 206914 - protein, 15 aa, Artificial Sequence
  Description of Artificial Sequence: Synthetic peptide
  Seed: EWLKTRPILSPLTKG
EWLKIRPCLTPLAKG

SEQ ID NO: 206915 - protein, 15 aa, Artificial Sequence
  Description of Artificial Sequence: Synthetic peptide
  Seed: EWLKTRPILSPLTKG
EWLKIRPCLTPLSKG

SEQ ID NO: 206916 - protein, 15 aa, Artificial Sequence
  Description of Artificial Sequence: Synthetic peptide
  Seed: EWLKTRPILSPLTKG
EWLKIRPELNPLAKG

SEQ ID NO: 206917 - protein, 15 aa, Artificial Sequence
  Description of Artificial Sequence: Synthetic peptide
  Seed: EWLKTRPILSPLTKG
EWLKIRPELNPLSKG

SEQ ID NO: 206918 - protein, 15 aa, Artificial Sequence
  Description of Artificial Sequence: Synthetic peptide
  Seed: EWLKTRPILSPLTKG
EWLKIRPELTPLAKG

SEQ ID NO: 206919 - protein, 15 aa, Artificial Sequence
  Description of Artificial Sequence: Synthetic peptide
  Seed: EWLKTRPILSPLTKG
EWLKIRPFLAPLIKG

SEQ ID NO: 206920 - protein, 15 aa, Artificial Sequence
  Description of Artificial Sequence: Synthetic peptide
  Seed: EWLKTRPILSPLTKG
EWLKIRPFLAPLKKG

SEQ ID NO: 206921 - protein, 15 aa, Artificial Sequence
  Description of Artificial Sequence: Synthetic peptide
  Seed: EWLKTRPILSPLTKG
EWLKIRPFLAPLLKG

SEQ ID NO: 206922 - protein, 15 aa, Artificial Sequence
  Description of Artificial Sequence: Synthetic peptide
  Seed: EWLKTRPILSPLTKG
EWLKIRPFLAPLRKG

SEQ ID NO: 206923 - protein, 15 aa, Artificial Sequence
  Description of Artificial Sequence: Synthetic peptide
  Seed: EWLKTRPILSPLTKG
EWLKIRPFLAPLSKG

SEQ ID NO: 206924 - protein, 15 aa, Artificial Sequence
  Description of Artificial Sequence: Synthetic peptide
  Seed: EWLKTRPILSPLTKG
EWLKIRPFLAPLVKG

SEQ ID NO: 206925 - protein, 15 aa, Artificial Sequence
  Description of Artificial Sequence: Synthetic peptide
  Seed: EWLKTRPILSPLTKG
EWLKIRPFLGPLLKG

SEQ ID NO: 206926 - protein, 15 aa, Artificial Sequence
  Description of Artificial Sequence: Synthetic peptide
  Seed: EWLKTRPILSPLTKG
EWLKIRPFLGPLVKG

SEQ ID NO: 206927 - protein, 15 aa, Artificial Sequence
  Description of Artificial Sequence: Synthetic peptide
  Seed: EWLKTRPILSPLTKG
EWLKIRPFLIPLAKG

SEQ ID NO: 206928 - protein, 15 aa, Artificial Sequence
  Description of Artificial Sequence: Synthetic peptide
  Seed: EWLKTRPILSPLTKG
EWLKIRPFLNPLAKG

SEQ ID NO: 206929 - protein, 15 aa, Artificial Sequence
  Description of Artificial Sequence: Synthetic peptide
  Seed: EWLKTRPILSPLTKG
EWLKIRPFLNPLEKG

SEQ ID NO: 206930 - protein, 15 aa, Artificial Sequence
  Description of Artificial Sequence: Synthetic peptide
  Seed: EWLKTRPILSPLTKG
EWLKIRPFLNPLGKG

SEQ ID NO: 206931 - protein, 15 aa, Artificial Sequence
  Description of Artificial Sequence: Synthetic peptide
  Seed: EWLKTRPILSPLTKG
EWLKIRPFLNPLIKG

SEQ ID NO: 206932 - protein, 15 aa, Artificial Sequence
  Description of Artificial Sequence: Synthetic peptide
  Seed: EWLKTRPILSPLTKG
EWLKIRPFLNPLLKG

SEQ ID NO: 206933 - protein, 15 aa, Artificial Sequence
  Description of Artificial Sequence: Synthetic peptide
  Seed: EWLKTRPILSPLTKG
EWLKIRPFLNPLSKG

SEQ ID NO: 206934 - protein, 15 aa, Artificial Sequence
  Description of Artificial Sequence: Synthetic peptide
  Seed: EWLKTRPILSPLTKG
EWLKIRPFLNPLVKG

SEQ ID NO: 206935 - protein, 15 aa, Artificial Sequence
  Description of Artificial Sequence: Synthetic peptide
  Seed: EWLKTRPILSPLTKG
EWLKIRPFLSPLAKG

SEQ ID NO: 206936 - protein, 15 aa, Artificial Sequence
  Description of Artificial Sequence: Synthetic peptide
  Seed: EWLKTRPILSPLTKG
EWLKIRPFLSPLDKG

SEQ ID NO: 206937 - protein, 15 aa, Artificial Sequence
  Description of Artificial Sequence: Synthetic peptide
  Seed: EWLKTRPILSPLTKG
EWLKIRPFLSPLEKG

SEQ ID NO: 206938 - protein, 15 aa, Artificial Sequence
  Description of Artificial Sequence: Synthetic peptide
  Seed: EWLKTRPILSPLTKG
EWLKIRPFLSPLGKG

SEQ ID NO: 206939 - protein, 15 aa, Artificial Sequence
  Description of Artificial Sequence: Synthetic peptide
  Seed: EWLKTRPILSPLTKG
EWLKIRPFLSPLIKG

SEQ ID NO: 206940 - protein, 15 aa, Artificial Sequence
  Description of Artificial Sequence: Synthetic peptide
  Seed: EWLKTRPILSPLTKG
EWLKIRPFLSPLKKG

SEQ ID NO: 206941 - protein, 15 aa, Artificial Sequence
  Description of Artificial Sequence: Synthetic peptide
  Seed: EWLKTRPILSPLTKG
EWLKIRPFLSPLLKG

SEQ ID NO: 206942 - protein, 15 aa, Artificial Sequence
  Description of Artificial Sequence: Synthetic peptide
  Seed: EWLKTRPILSPLTKG
EWLKIRPFLSPLMKG

SEQ ID NO: 206943 - protein, 15 aa, Artificial Sequence
  Description of Artificial Sequence: Synthetic peptide
  Seed: EWLKTRPILSPLTKG
EWLKIRPFLSPLRKG

SEQ ID NO: 206944 - protein, 15 aa, Artificial Sequence
  Description of Artificial Sequence: Synthetic peptide
  Seed: EWLKTRPILSPLTKG
EWLKIRPFLSPLSKG

SEQ ID NO: 206945 - protein, 15 aa, Artificial Sequence
  Description of Artificial Sequence: Synthetic peptide
  Seed: EWLKTRPILSPLTKG
EWLKIRPFLSPLTKG

SEQ ID NO: 206946 - protein, 15 aa, Artificial Sequence
  Description of Artificial Sequence: Synthetic peptide
  Seed: EWLKTRPILSPLTKG
EWLKIRPFLSPLVKG

SEQ ID NO: 206947 - protein, 15 aa, Artificial Sequence
  Description of Artificial Sequence: Synthetic peptide
  Seed: EWLKTRPILSPLTKG
EWLKIRPFLTPLAKG

SEQ ID NO: 206948 - protein, 15 aa, Artificial Sequence
  Description of Artificial Sequence: Synthetic peptide
  Seed: EWLKTRPILSPLTKG
EWLKIRPFLTPLDKG

SEQ ID NO: 206949 - protein, 15 aa, Artificial Sequence
  Description of Artificial Sequence: Synthetic peptide
  Seed: EWLKTRPILSPLTKG
EWLKIRPFLTPLEKG

SEQ ID NO: 206950 - protein, 15 aa, Artificial Sequence
  Description of Artificial Sequence: Synthetic peptide
  Seed: EWLKTRPILSPLTKG
EWLKIRPFLTPLGKG

SEQ ID NO: 206951 - protein, 15 aa, Artificial Sequence
  Description of Artificial Sequence: Synthetic peptide
  Seed: EWLKTRPILSPLTKG
EWLKIRPFLTPLHKG

SEQ ID NO: 206952 - protein, 15 aa, Artificial Sequence
  Description of Artificial Sequence: Synthetic peptide
  Seed: EWLKTRPILSPLTKG
EWLKIRPFLTPLQKG

SEQ ID NO: 206953 - protein, 15 aa, Artificial Sequence
  Description of Artificial Sequence: Synthetic peptide
  Seed: EWLKTRPILSPLTKG
EWLKIRPFLTPLSKG

SEQ ID NO: 206954 - protein, 15 aa, Artificial Sequence
  Description of Artificial Sequence: Synthetic peptide
  Seed: EWLKTRPILSPLTKG
EWLKIRPFLTPLTKG

SEQ ID NO: 206955 - protein, 15 aa, Artificial Sequence
  Description of Artificial Sequence: Synthetic peptide
  Seed: EWLKTRPILSPLTKG
EWLKIRPFLTPLVKG

SEQ ID NO: 206956 - protein, 15 aa, Artificial Sequence
  Description of Artificial Sequence: Synthetic peptide
  Seed: EWLKTRPILSPLTKG
EWLKIRPFLVPLAKG

SEQ ID NO: 206957 - protein, 15 aa, Artificial Sequence
  Description of Artificial Sequence: Synthetic peptide
  Seed: EWLKTRPILSPLTKG
EWLKIRPFLVPLGKG

SEQ ID NO: 206958 - protein, 15 aa, Artificial Sequence
  Description of Artificial Sequence: Synthetic peptide
  Seed: EWLKTRPILSPLTKG
EWLKIRPFLVPLSKG

SEQ ID NO: 206959 - protein, 15 aa, Artificial Sequence
  Description of Artificial Sequence: Synthetic peptide
  Seed: EWLKTRPILSPLTKG
EWLKIRPILAPLAKG

SEQ ID NO: 206960 - protein, 15 aa, Artificial Sequence
  Description of Artificial Sequence: Synthetic peptide
  Seed: EWLKTRPILSPLTKG
EWLKIRPILAPLGKG

SEQ ID NO: 206961 - protein, 15 aa, Artificial Sequence
  Description of Artificial Sequence: Synthetic peptide
  Seed: EWLKTRPILSPLTKG
EWLKIRPILAPLSKG

SEQ ID NO: 206962 - protein, 15 aa, Artificial Sequence
  Description of Artificial Sequence: Synthetic peptide
  Seed: EWLKTRPILSPLTKG
EWLKIRPILCPLTKG

SEQ ID NO: 206963 - protein, 15 aa, Artificial Sequence
  Description of Artificial Sequence: Synthetic peptide
  Seed: EWLKTRPILSPLTKG
EWLKIRPILDPLAKG

SEQ ID NO: 206964 - protein, 15 aa, Artificial Sequence
  Description of Artificial Sequence: Synthetic peptide
  Seed: EWLKTRPILSPLTKG
EWLKIRPILDPLSKG

SEQ ID NO: 206965 - protein, 15 aa, Artificial Sequence
  Description of Artificial Sequence: Synthetic peptide
  Seed: EWLKTRPILSPLTKG
EWLKIRPILGPLAKG

SEQ ID NO: 206966 - protein, 15 aa, Artificial Sequence
  Description of Artificial Sequence: Synthetic peptide
  Seed: EWLKTRPILSPLTKG
EWLKIRPILGPLSKG

SEQ ID NO: 206967 - protein, 15 aa, Artificial Sequence
  Description of Artificial Sequence: Synthetic peptide
  Seed: EWLKTRPILSPLTKG
EWLKIRPILGPLVKG

SEQ ID NO: 206968 - protein, 15 aa, Artificial Sequence
  Description of Artificial Sequence: Synthetic peptide
  Seed: EWLKTRPILSPLTKG
EWLKIRPILIPLAKG

SEQ ID NO: 206969 - protein, 15 aa, Artificial Sequence
  Description of Artificial Sequence: Synthetic peptide
  Seed: EWLKTRPILSPLTKG
EWLKIRPILIPLSKG

SEQ ID NO: 206970 - protein, 15 aa, Artificial Sequence
  Description of Artificial Sequence: Synthetic peptide
  Seed: EWLKTRPILSPLTKG
EWLKIRPILIPLTKG

SEQ ID NO: 206971 - protein, 15 aa, Artificial Sequence
  Description of Artificial Sequence: Synthetic peptide
  Seed: EWLKTRPILSPLTKG
EWLKIRPILKPLAKG

SEQ ID NO: 206972 - protein, 15 aa, Artificial Sequence
  Description of Artificial Sequence: Synthetic peptide
  Seed: EWLKTRPILSPLTKG
EWLKIRPILKPLIKG

SEQ ID NO: 206973 - protein, 15 aa, Artificial Sequence
  Description of Artificial Sequence: Synthetic peptide
  Seed: EWLKTRPILSPLTKG
EWLKIRPILKPLLKG

SEQ ID NO: 206974 - protein, 15 aa, Artificial Sequence
  Description of Artificial Sequence: Synthetic peptide
  Seed: EWLKTRPILSPLTKG
EWLKIRPILKPLMKG

SEQ ID NO: 206975 - protein, 15 aa, Artificial Sequence
  Description of Artificial Sequence: Synthetic peptide
  Seed: EWLKTRPILSPLTKG
EWLKIRPILKPLSKG

SEQ ID NO: 206976 - protein, 15 aa, Artificial Sequence
  Description of Artificial Sequence: Synthetic peptide
  Seed: EWLKTRPILSPLTKG
EWLKIRPILKPLTKG

SEQ ID NO: 206977 - protein, 15 aa, Artificial Sequence
  Description of Artificial Sequence: Synthetic peptide
  Seed: EWLKTRPILSPLTKG
EWLKIRPILKPLVKG

SEQ ID NO: 206978 - protein, 15 aa, Artificial Sequence
  Description of Artificial Sequence: Synthetic peptide
  Seed: EWLKTRPILSPLTKG
EWLKIRPILLPLTKG

SEQ ID NO: 206979 - protein, 15 aa, Artificial Sequence
  Description of Artificial Sequence: Synthetic peptide
  Seed: EWLKTRPILSPLTKG
EWLKIRPILMPLTKG

SEQ ID NO: 206980 - protein, 15 aa, Artificial Sequence
  Description of Artificial Sequence: Synthetic peptide
  Seed: EWLKTRPILSPLTKG
EWLKIRPILNPLAKG

SEQ ID NO: 206981 - protein, 15 aa, Artificial Sequence
  Description of Artificial Sequence: Synthetic peptide
  Seed: EWLKTRPILSPLTKG
EWLKIRPILNPLDKG

SEQ ID NO: 206982 - protein, 15 aa, Artificial Sequence
  Description of Artificial Sequence: Synthetic peptide
  Seed: EWLKTRPILSPLTKG
EWLKIRPILNPLEKG

SEQ ID NO: 206983 - protein, 15 aa, Artificial Sequence
  Description of Artificial Sequence: Synthetic peptide
  Seed: EWLKTRPILSPLTKG
EWLKIRPILNPLGKG

SEQ ID NO: 206984 - protein, 15 aa, Artificial Sequence
  Description of Artificial Sequence: Synthetic peptide
  Seed: EWLKTRPILSPLTKG
EWLKIRPILNPLHKG

SEQ ID NO: 206985 - protein, 15 aa, Artificial Sequence
  Description of Artificial Sequence: Synthetic peptide
  Seed: EWLKTRPILSPLTKG
EWLKIRPILNPLIKG

SEQ ID NO: 206986 - protein, 15 aa, Artificial Sequence
  Description of Artificial Sequence: Synthetic peptide
  Seed: EWLKTRPILSPLTKG
EWLKIRPILNPLLKG

SEQ ID NO: 206987 - protein, 15 aa, Artificial Sequence
  Description of Artificial Sequence: Synthetic peptide
  Seed: EWLKTRPILSPLTKG
EWLKIRPILNPLMKG

SEQ ID NO: 206988 - protein, 15 aa, Artificial Sequence
  Description of Artificial Sequence: Synthetic peptide
  Seed: EWLKTRPILSPLTKG
EWLKIRPILNPLNKG

SEQ ID NO: 206989 - protein, 15 aa, Artificial Sequence
  Description of Artificial Sequence: Synthetic peptide
  Seed: EWLKTRPILSPLTKG
EWLKIRPILNPLPKG

SEQ ID NO: 206990 - protein, 15 aa, Artificial Sequence
  Description of Artificial Sequence: Synthetic peptide
  Seed: EWLKTRPILSPLTKG
EWLKIRPILNPLQKG

SEQ ID NO: 206991 - protein, 15 aa, Artificial Sequence
  Description of Artificial Sequence: Synthetic peptide
  Seed: EWLKTRPILSPLTKG
EWLKIRPILNPLSKG

SEQ ID NO: 206992 - protein, 15 aa, Artificial Sequence
  Description of Artificial Sequence: Synthetic peptide
  Seed: EWLKTRPILSPLTKG
EWLKIRPILNPLTKG

SEQ ID NO: 206993 - protein, 15 aa, Artificial Sequence
  Description of Artificial Sequence: Synthetic peptide
  Seed: EWLKTRPILSPLTKG
EWLKIRPILNPLVKG

SEQ ID NO: 206994 - protein, 15 aa, Artificial Sequence
  Description of Artificial Sequence: Synthetic peptide
  Seed: EWLKTRPILSPLTKG
EWLKIRPILPPLAKG

SEQ ID NO: 206995 - protein, 15 aa, Artificial Sequence
  Description of Artificial Sequence: Synthetic peptide
  Seed: EWLKTRPILSPLTKG
EWLKIRPILPPLSKG

SEQ ID NO: 206996 - protein, 15 aa, Artificial Sequence
  Description of Artificial Sequence: Synthetic peptide
  Seed: EWLKTRPILSPLTKG
EWLKIRPILRPLAKG

SEQ ID NO: 206997 - protein, 15 aa, Artificial Sequence
  Description of Artificial Sequence: Synthetic peptide
  Seed: EWLKTRPILSPLTKG
EWLKIRPILRPLGKG

SEQ ID NO: 206998 - protein, 15 aa, Artificial Sequence
  Description of Artificial Sequence: Synthetic peptide
  Seed: EWLKTRPILSPLTKG
EWLKIRPILRPLHKG

SEQ ID NO: 206999 - protein, 15 aa, Artificial Sequence
  Description of Artificial Sequence: Synthetic peptide
  Seed: EWLKTRPILSPLTKG
EWLKIRPILRPLIKG

SEQ ID NO: 207000 - protein, 15 aa, Artificial Sequence
  Description of Artificial Sequence: Synthetic peptide
  Seed: EWLKTRPILSPLTKG
EWLKIRPILRPLLKG

SEQ ID NO: 207001 - protein, 15 aa, Artificial Sequence
  Description of Artificial Sequence: Synthetic peptide
  Seed: EWLKTRPILSPLTKG
EWLKIRPILRPLMKG

SEQ ID NO: 207002 - protein, 15 aa, Artificial Sequence
  Description of Artificial Sequence: Synthetic peptide
  Seed: EWLKTRPILSPLTKG
EWLKIRPILRPLRKG

SEQ ID NO: 207003 - protein, 15 aa, Artificial Sequence
  Description of Artificial Sequence: Synthetic peptide
  Seed: EWLKTRPILSPLTKG
EWLKIRPILRPLSKG

SEQ ID NO: 207004 - protein, 15 aa, Artificial Sequence
  Description of Artificial Sequence: Synthetic peptide
  Seed: EWLKTRPILSPLTKG
EWLKIRPILRPLTKG

SEQ ID NO: 207005 - protein, 15 aa, Artificial Sequence
  Description of Artificial Sequence: Synthetic peptide
  Seed: EWLKTRPILSPLTKG
EWLKIRPILRPLVKG

SEQ ID NO: 207006 - protein, 15 aa, Artificial Sequence
  Description of Artificial Sequence: Synthetic peptide
  Seed: EWLKTRPILSPLTKG
EWLKIRPILRPLYKG

SEQ ID NO: 207007 - protein, 15 aa, Artificial Sequence
  Description of Artificial Sequence: Synthetic peptide
  Seed: EWLKTRPILSPLTKG
EWLKIRPILSPLAKG

SEQ ID NO: 207008 - protein, 15 aa, Artificial Sequence
  Description of Artificial Sequence: Synthetic peptide
  Seed: EWLKTRPILSPLTKG
EWLKIRPILSPLDKG

SEQ ID NO: 207009 - protein, 15 aa, Artificial Sequence
  Description of Artificial Sequence: Synthetic peptide
  Seed: EWLKTRPILSPLTKG
EWLKIRPILSPLEKG

SEQ ID NO: 207010 - protein, 15 aa, Artificial Sequence
  Description of Artificial Sequence: Synthetic peptide
  Seed: EWLKTRPILSPLTKG
EWLKIRPILSPLGKG

SEQ ID NO: 207011 - protein, 15 aa, Artificial Sequence
  Description of Artificial Sequence: Synthetic peptide
  Seed: EWLKTRPILSPLTKG
EWLKIRPILSPLHKG

SEQ ID NO: 207012 - protein, 15 aa, Artificial Sequence
  Description of Artificial Sequence: Synthetic peptide
  Seed: EWLKTRPILSPLTKG
EWLKIRPILSPLIKG

SEQ ID NO: 207013 - protein, 15 aa, Artificial Sequence
  Description of Artificial Sequence: Synthetic peptide
  Seed: EWLKTRPILSPLTKG
EWLKIRPILSPLLKG

SEQ ID NO: 207014 - protein, 15 aa, Artificial Sequence
  Description of Artificial Sequence: Synthetic peptide
  Seed: EWLKTRPILSPLTKG
EWLKIRPILSPLMKG

SEQ ID NO: 207015 - protein, 15 aa, Artificial Sequence
  Description of Artificial Sequence: Synthetic peptide
  Seed: EWLKTRPILSPLTKG
EWLKIRPILSPLNKG

SEQ ID NO: 207016 - protein, 15 aa, Artificial Sequence
  Description of Artificial Sequence: Synthetic peptide
  Seed: EWLKTRPILSPLTKG
EWLKIRPILSPLQKG

SEQ ID NO: 207017 - protein, 15 aa, Artificial Sequence
  Description of Artificial Sequence: Synthetic peptide
  Seed: EWLKTRPILSPLTKG
EWLKIRPILSPLSKG

SEQ ID NO: 207018 - protein, 15 aa, Artificial Sequence
  Description of Artificial Sequence: Synthetic peptide
  Seed: EWLKTRPILSPLTKG
EWLKIRPILSPLTKG

SEQ ID NO: 207019 - protein, 15 aa, Artificial Sequence
  Description of Artificial Sequence: Synthetic peptide
  Seed: EWLKTRPILSPLTKG
EWLKIRPILSPLVKG

SEQ ID NO: 207020 - protein, 15 aa, Artificial Sequence
  Description of Artificial Sequence: Synthetic peptide
  Seed: EWLKTRPILSPLTKG
EWLKIRPILTPLAKG

SEQ ID NO: 207021 - protein, 15 aa, Artificial Sequence
  Description of Artificial Sequence: Synthetic peptide
  Seed: EWLKTRPILSPLTKG
EWLKIRPILTPLCKG

SEQ ID NO: 207022 - protein, 15 aa, Artificial Sequence
  Description of Artificial Sequence: Synthetic peptide
  Seed: EWLKTRPILSPLTKG
EWLKIRPILTPLDKG

SEQ ID NO: 207023 - protein, 15 aa, Artificial Sequence
  Description of Artificial Sequence: Synthetic peptide
  Seed: EWLKTRPILSPLTKG
EWLKIRPILTPLEKG

SEQ ID NO: 207024 - protein, 15 aa, Artificial Sequence
  Description of Artificial Sequence: Synthetic peptide
  Seed: EWLKTRPILSPLTKG
EWLKIRPILTPLGKG

SEQ ID NO: 207025 - protein, 15 aa, Artificial Sequence
  Description of Artificial Sequence: Synthetic peptide
  Seed: EWLKTRPILSPLTKG
EWLKIRPILTPLHKG

SEQ ID NO: 207026 - protein, 15 aa, Artificial Sequence
  Description of Artificial Sequence: Synthetic peptide
  Seed: EWLKTRPILSPLTKG
EWLKIRPILTPLIKG

SEQ ID NO: 207027 - protein, 15 aa, Artificial Sequence
  Description of Artificial Sequence: Synthetic peptide
  Seed: EWLKTRPILSPLTKG
EWLKIRPILTPLLKG

SEQ ID NO: 207028 - protein, 15 aa, Artificial Sequence
  Description of Artificial Sequence: Synthetic peptide
  Seed: EWLKTRPILSPLTKG
EWLKIRPILTPLMKG

SEQ ID NO: 207029 - protein, 15 aa, Artificial Sequence
  Description of Artificial Sequence: Synthetic peptide
  Seed: EWLKTRPILSPLTKG
EWLKIRPILTPLNKG

SEQ ID NO: 207030 - protein, 15 aa, Artificial Sequence
  Description of Artificial Sequence: Synthetic peptide
  Seed: EWLKTRPILSPLTKG
EWLKIRPILTPLPKG

SEQ ID NO: 207031 - protein, 15 aa, Artificial Sequence
  Description of Artificial Sequence: Synthetic peptide
  Seed: EWLKTRPILSPLTKG
EWLKIRPILTPLQKG

SEQ ID NO: 207032 - protein, 15 aa, Artificial Sequence
  Description of Artificial Sequence: Synthetic peptide
  Seed: EWLKTRPILSPLTKG
EWLKIRPILTPLSKG

SEQ ID NO: 207033 - protein, 15 aa, Artificial Sequence
  Description of Artificial Sequence: Synthetic peptide
  Seed: EWLKTRPILSPLTKG
EWLKIRPILTPLTKG

SEQ ID NO: 207034 - protein, 15 aa, Artificial Sequence
  Description of Artificial Sequence: Synthetic peptide
  Seed: EWLKTRPILSPLTKG
EWLKIRPILTPLVKG

SEQ ID NO: 207035 - protein, 15 aa, Artificial Sequence
  Description of Artificial Sequence: Synthetic peptide
  Seed: EWLKTRPILSPLTKG
EWLKIRPILVPLAKG

SEQ ID NO: 207036 - protein, 15 aa, Artificial Sequence
  Description of Artificial Sequence: Synthetic peptide
  Seed: EWLKTRPILSPLTKG
EWLKIRPILVPLDKG

SEQ ID NO: 207037 - protein, 15 aa, Artificial Sequence
  Description of Artificial Sequence: Synthetic peptide
  Seed: EWLKTRPILSPLTKG
EWLKIRPILVPLEKG

SEQ ID NO: 207038 - protein, 15 aa, Artificial Sequence
  Description of Artificial Sequence: Synthetic peptide
  Seed: EWLKTRPILSPLTKG
EWLKIRPILVPLGKG

SEQ ID NO: 207039 - protein, 15 aa, Artificial Sequence
  Description of Artificial Sequence: Synthetic peptide
  Seed: EWLKTRPILSPLTKG
EWLKIRPILVPLHKG

SEQ ID NO: 207040 - protein, 15 aa, Artificial Sequence
  Description of Artificial Sequence: Synthetic peptide
  Seed: EWLKTRPILSPLTKG
EWLKIRPILVPLQKG

SEQ ID NO: 207041 - protein, 15 aa, Artificial Sequence
  Description of Artificial Sequence: Synthetic peptide
  Seed: EWLKTRPILSPLTKG
EWLKIRPILVPLSKG

SEQ ID NO: 207042 - protein, 15 aa, Artificial Sequence
  Description of Artificial Sequence: Synthetic peptide
  Seed: EWLKTRPILSPLTKG
EWLKIRPILVPLTKG

SEQ ID NO: 207043 - protein, 15 aa, Artificial Sequence
  Description of Artificial Sequence: Synthetic peptide
  Seed: EWLKTRPILSPLTKG
EWLKIRPLLAPLAKG

SEQ ID NO: 207044 - protein, 15 aa, Artificial Sequence
  Description of Artificial Sequence: Synthetic peptide
  Seed: EWLKTRPILSPLTKG
EWLKIRPLLAPLSKG

SEQ ID NO: 207045 - protein, 15 aa, Artificial Sequence
  Description of Artificial Sequence: Synthetic peptide
  Seed: EWLKTRPILSPLTKG
EWLKIRPLLDPLAKG

SEQ ID NO: 207046 - protein, 15 aa, Artificial Sequence
  Description of Artificial Sequence: Synthetic peptide
  Seed: EWLKTRPILSPLTKG
EWLKIRPLLDPLSKG

SEQ ID NO: 207047 - protein, 15 aa, Artificial Sequence
  Description of Artificial Sequence: Synthetic peptide
  Seed: EWLKTRPILSPLTKG
EWLKIRPLLGPLAKG

SEQ ID NO: 207048 - protein, 15 aa, Artificial Sequence
  Description of Artificial Sequence: Synthetic peptide
  Seed: EWLKTRPILSPLTKG
EWLKIRPLLGPLSKG

SEQ ID NO: 207049 - protein, 15 aa, Artificial Sequence
  Description of Artificial Sequence: Synthetic peptide
  Seed: EWLKTRPILSPLTKG
EWLKIRPLLGPLVKG

SEQ ID NO: 207050 - protein, 15 aa, Artificial Sequence
  Description of Artificial Sequence: Synthetic peptide
  Seed: EWLKTRPILSPLTKG
EWLKIRPLLIPLAKG

SEQ ID NO: 207051 - protein, 15 aa, Artificial Sequence
  Description of Artificial Sequence: Synthetic peptide
  Seed: EWLKTRPILSPLTKG
EWLKIRPLLIPLGKG

SEQ ID NO: 207052 - protein, 15 aa, Artificial Sequence
  Description of Artificial Sequence: Synthetic peptide
  Seed: EWLKTRPILSPLTKG
EWLKIRPLLIPLSKG

SEQ ID NO: 207053 - protein, 15 aa, Artificial Sequence
  Description of Artificial Sequence: Synthetic peptide
  Seed: EWLKTRPILSPLTKG
EWLKIRPLLKPLAKG

SEQ ID NO: 207054 - protein, 15 aa, Artificial Sequence
  Description of Artificial Sequence: Synthetic peptide
  Seed: EWLKTRPILSPLTKG
EWLKIRPLLKPLIKG

SEQ ID NO: 207055 - protein, 15 aa, Artificial Sequence
  Description of Artificial Sequence: Synthetic peptide
  Seed: EWLKTRPILSPLTKG
EWLKIRPLLKPLMKG

SEQ ID NO: 207056 - protein, 15 aa, Artificial Sequence
  Description of Artificial Sequence: Synthetic peptide
  Seed: EWLKTRPILSPLTKG
EWLKIRPLLKPLSKG

SEQ ID NO: 207057 - protein, 15 aa, Artificial Sequence
  Description of Artificial Sequence: Synthetic peptide
  Seed: EWLKTRPILSPLTKG
EWLKIRPLLKPLVKG

SEQ ID NO: 207058 - protein, 15 aa, Artificial Sequence
  Description of Artificial Sequence: Synthetic peptide
  Seed: EWLKTRPILSPLTKG
EWLKIRPLLNPLAKG

SEQ ID NO: 207059 - protein, 15 aa, Artificial Sequence
  Description of Artificial Sequence: Synthetic peptide
  Seed: EWLKTRPILSPLTKG
EWLKIRPLLNPLDKG

SEQ ID NO: 207060 - protein, 15 aa, Artificial Sequence
  Description of Artificial Sequence: Synthetic peptide
  Seed: EWLKTRPILSPLTKG
EWLKIRPLLNPLEKG

SEQ ID NO: 207061 - protein, 15 aa, Artificial Sequence
  Description of Artificial Sequence: Synthetic peptide
  Seed: EWLKTRPILSPLTKG
EWLKIRPLLNPLGKG

SEQ ID NO: 207062 - protein, 15 aa, Artificial Sequence
  Description of Artificial Sequence: Synthetic peptide
  Seed: EWLKTRPILSPLTKG
EWLKIRPLLNPLHKG

SEQ ID NO: 207063 - protein, 15 aa, Artificial Sequence
  Description of Artificial Sequence: Synthetic peptide
  Seed: EWLKTRPILSPLTKG
EWLKIRPLLNPLIKG

SEQ ID NO: 207064 - protein, 15 aa, Artificial Sequence
  Description of Artificial Sequence: Synthetic peptide
  Seed: EWLKTRPILSPLTKG
EWLKIRPLLNPLLKG

SEQ ID NO: 207065 - protein, 15 aa, Artificial Sequence
  Description of Artificial Sequence: Synthetic peptide
  Seed: EWLKTRPILSPLTKG
EWLKIRPLLNPLMKG

SEQ ID NO: 207066 - protein, 15 aa, Artificial Sequence
  Description of Artificial Sequence: Synthetic peptide
  Seed: EWLKTRPILSPLTKG
EWLKIRPLLNPLNKG

SEQ ID NO: 207067 - protein, 15 aa, Artificial Sequence
  Description of Artificial Sequence: Synthetic peptide
  Seed: EWLKTRPILSPLTKG
EWLKIRPLLNPLPKG

SEQ ID NO: 207068 - protein, 15 aa, Artificial Sequence
  Description of Artificial Sequence: Synthetic peptide
  Seed: EWLKTRPILSPLTKG
EWLKIRPLLNPLQKG

SEQ ID NO: 207069 - protein, 15 aa, Artificial Sequence
  Description of Artificial Sequence: Synthetic peptide
  Seed: EWLKTRPILSPLTKG
EWLKIRPLLNPLSKG

SEQ ID NO: 207070 - protein, 15 aa, Artificial Sequence
  Description of Artificial Sequence: Synthetic peptide
  Seed: EWLKTRPILSPLTKG
EWLKIRPLLNPLTKG

SEQ ID NO: 207071 - protein, 15 aa, Artificial Sequence
  Description of Artificial Sequence: Synthetic peptide
  Seed: EWLKTRPILSPLTKG
EWLKIRPLLNPLVKG

SEQ ID NO: 207072 - protein, 15 aa, Artificial Sequence
  Description of Artificial Sequence: Synthetic peptide
  Seed: EWLKTRPILSPLTKG
EWLKIRPLLPPLAKG

SEQ ID NO: 207073 - protein, 15 aa, Artificial Sequence
  Description of Artificial Sequence: Synthetic peptide
  Seed: EWLKTRPILSPLTKG
EWLKIRPLLPPLSKG

SEQ ID NO: 207074 - protein, 15 aa, Artificial Sequence
  Description of Artificial Sequence: Synthetic peptide
  Seed: EWLKTRPILSPLTKG
EWLKIRPLLRPLAKG

SEQ ID NO: 207075 - protein, 15 aa, Artificial Sequence
  Description of Artificial Sequence: Synthetic peptide
  Seed: EWLKTRPILSPLTKG
EWLKIRPLLRPLGKG

SEQ ID NO: 207076 - protein, 15 aa, Artificial Sequence
  Description of Artificial Sequence: Synthetic peptide
  Seed: EWLKTRPILSPLTKG
EWLKIRPLLRPLHKG

SEQ ID NO: 207077 - protein, 15 aa, Artificial Sequence
  Description of Artificial Sequence: Synthetic peptide
  Seed: EWLKTRPILSPLTKG
EWLKIRPLLRPLIKG

SEQ ID NO: 207078 - protein, 15 aa, Artificial Sequence
  Description of Artificial Sequence: Synthetic peptide
  Seed: EWLKTRPILSPLTKG
EWLKIRPLLRPLLKG

SEQ ID NO: 207079 - protein, 15 aa, Artificial Sequence
  Description of Artificial Sequence: Synthetic peptide
  Seed: EWLKTRPILSPLTKG
EWLKIRPLLRPLMKG

SEQ ID NO: 207080 - protein, 15 aa, Artificial Sequence
  Description of Artificial Sequence: Synthetic peptide
  Seed: EWLKTRPILSPLTKG
EWLKIRPLLRPLRKG

SEQ ID NO: 207081 - protein, 15 aa, Artificial Sequence
  Description of Artificial Sequence: Synthetic peptide
  Seed: EWLKTRPILSPLTKG
EWLKIRPLLRPLSKG

SEQ ID NO: 207082 - protein, 15 aa, Artificial Sequence
  Description of Artificial Sequence: Synthetic peptide
  Seed: EWLKTRPILSPLTKG
EWLKIRPLLRPLTKG

SEQ ID NO: 207083 - protein, 15 aa, Artificial Sequence
  Description of Artificial Sequence: Synthetic peptide
  Seed: EWLKTRPILSPLTKG
EWLKIRPLLRPLVKG

SEQ ID NO: 207084 - protein, 15 aa, Artificial Sequence
  Description of Artificial Sequence: Synthetic peptide
  Seed: EWLKTRPILSPLTKG
EWLKIRPLLRPLYKG

SEQ ID NO: 207085 - protein, 15 aa, Artificial Sequence
  Description of Artificial Sequence: Synthetic peptide
  Seed: EWLKTRPILSPLTKG
EWLKIRPLLSPLAKG

SEQ ID NO: 207086 - protein, 15 aa, Artificial Sequence
  Description of Artificial Sequence: Synthetic peptide
  Seed: EWLKTRPILSPLTKG
EWLKIRPLLSPLDKG

SEQ ID NO: 207087 - protein, 15 aa, Artificial Sequence
  Description of Artificial Sequence: Synthetic peptide
  Seed: EWLKTRPILSPLTKG
EWLKIRPLLSPLEKG

SEQ ID NO: 207088 - protein, 15 aa, Artificial Sequence
  Description of Artificial Sequence: Synthetic peptide
  Seed: EWLKTRPILSPLTKG
EWLKIRPLLSPLGKG

SEQ ID NO: 207089 - protein, 15 aa, Artificial Sequence
  Description of Artificial Sequence: Synthetic peptide
  Seed: EWLKTRPILSPLTKG
EWLKIRPLLSPLHKG

SEQ ID NO: 207090 - protein, 15 aa, Artificial Sequence
  Description of Artificial Sequence: Synthetic peptide
  Seed: EWLKTRPILSPLTKG
EWLKIRPLLSPLIKG

SEQ ID NO: 207091 - protein, 15 aa, Artificial Sequence
  Description of Artificial Sequence: Synthetic peptide
  Seed: EWLKTRPILSPLTKG
EWLKIRPLLSPLLKG

SEQ ID NO: 207092 - protein, 15 aa, Artificial Sequence
  Description of Artificial Sequence: Synthetic peptide
  Seed: EWLKTRPILSPLTKG
EWLKIRPLLSPLMKG

SEQ ID NO: 207093 - protein, 15 aa, Artificial Sequence
  Description of Artificial Sequence: Synthetic peptide
  Seed: EWLKTRPILSPLTKG
EWLKIRPLLSPLNKG

SEQ ID NO: 207094 - protein, 15 aa, Artificial Sequence
  Description of Artificial Sequence: Synthetic peptide
  Seed: EWLKTRPILSPLTKG
EWLKIRPLLSPLQKG

SEQ ID NO: 207095 - protein, 15 aa, Artificial Sequence
  Description of Artificial Sequence: Synthetic peptide
  Seed: EWLKTRPILSPLTKG
EWLKIRPLLSPLSKG

SEQ ID NO: 207096 - protein, 15 aa, Artificial Sequence
  Description of Artificial Sequence: Synthetic peptide
  Seed: EWLKTRPILSPLTKG
EWLKIRPLLSPLTKG

SEQ ID NO: 207097 - protein, 15 aa, Artificial Sequence
  Description of Artificial Sequence: Synthetic peptide
  Seed: EWLKTRPILSPLTKG
EWLKIRPLLSPLVKG

SEQ ID NO: 207098 - protein, 15 aa, Artificial Sequence
  Description of Artificial Sequence: Synthetic peptide
  Seed: EWLKTRPILSPLTKG
EWLKIRPLLTPLAKG

SEQ ID NO: 207099 - protein, 15 aa, Artificial Sequence
  Description of Artificial Sequence: Synthetic peptide
  Seed: EWLKTRPILSPLTKG
EWLKIRPLLTPLCKG

SEQ ID NO: 207100 - protein, 15 aa, Artificial Sequence
  Description of Artificial Sequence: Synthetic peptide
  Seed: EWLKTRPILSPLTKG
EWLKIRPLLTPLDKG

SEQ ID NO: 207101 - protein, 15 aa, Artificial Sequence
  Description of Artificial Sequence: Synthetic peptide
  Seed: EWLKTRPILSPLTKG
EWLKIRPLLTPLEKG

SEQ ID NO: 207102 - protein, 15 aa, Artificial Sequence
  Description of Artificial Sequence: Synthetic peptide
  Seed: EWLKTRPILSPLTKG
EWLKIRPLLTPLGKG

SEQ ID NO: 207103 - protein, 15 aa, Artificial Sequence
  Description of Artificial Sequence: Synthetic peptide
  Seed: EWLKTRPILSPLTKG
EWLKIRPLLTPLHKG

SEQ ID NO: 207104 - protein, 15 aa, Artificial Sequence
  Description of Artificial Sequence: Synthetic peptide
  Seed: EWLKTRPILSPLTKG
EWLKIRPLLTPLIKG

SEQ ID NO: 207105 - protein, 15 aa, Artificial Sequence
  Description of Artificial Sequence: Synthetic peptide
  Seed: EWLKTRPILSPLTKG
EWLKIRPLLTPLLKG

SEQ ID NO: 207106 - protein, 15 aa, Artificial Sequence
  Description of Artificial Sequence: Synthetic peptide
  Seed: EWLKTRPILSPLTKG
EWLKIRPLLTPLMKG

SEQ ID NO: 207107 - protein, 15 aa, Artificial Sequence
  Description of Artificial Sequence: Synthetic peptide
  Seed: EWLKTRPILSPLTKG
EWLKIRPLLTPLNKG

SEQ ID NO: 207108 - protein, 15 aa, Artificial Sequence
  Description of Artificial Sequence: Synthetic peptide
  Seed: EWLKTRPILSPLTKG
EWLKIRPLLTPLPKG

SEQ ID NO: 207109 - protein, 15 aa, Artificial Sequence
  Description of Artificial Sequence: Synthetic peptide
  Seed: EWLKTRPILSPLTKG
EWLKIRPLLTPLQKG

SEQ ID NO: 207110 - protein, 15 aa, Artificial Sequence
  Description of Artificial Sequence: Synthetic peptide
  Seed: EWLKTRPILSPLTKG
EWLKIRPLLTPLSKG

SEQ ID NO: 207111 - protein, 15 aa, Artificial Sequence
  Description of Artificial Sequence: Synthetic peptide
  Seed: EWLKTRPILSPLTKG
EWLKIRPLLTPLTKG

SEQ ID NO: 207112 - protein, 15 aa, Artificial Sequence
  Description of Artificial Sequence: Synthetic peptide
  Seed: EWLKTRPILSPLTKG
EWLKIRPLLTPLVKG

SEQ ID NO: 207113 - protein, 15 aa, Artificial Sequence
  Description of Artificial Sequence: Synthetic peptide
  Seed: EWLKTRPILSPLTKG
EWLKIRPLLVPLAKG

SEQ ID NO: 207114 - protein, 15 aa, Artificial Sequence
  Description of Artificial Sequence: Synthetic peptide
  Seed: EWLKTRPILSPLTKG
EWLKIRPLLVPLDKG

SEQ ID NO: 207115 - protein, 15 aa, Artificial Sequence
  Description of Artificial Sequence: Synthetic peptide
  Seed: EWLKTRPILSPLTKG
EWLKIRPLLVPLEKG

SEQ ID NO: 207116 - protein, 15 aa, Artificial Sequence
  Description of Artificial Sequence: Synthetic peptide
  Seed: EWLKTRPILSPLTKG
EWLKIRPLLVPLGKG

SEQ ID NO: 207117 - protein, 15 aa, Artificial Sequence
  Description of Artificial Sequence: Synthetic peptide
  Seed: EWLKTRPILSPLTKG
EWLKIRPLLVPLHKG

SEQ ID NO: 207118 - protein, 15 aa, Artificial Sequence
  Description of Artificial Sequence: Synthetic peptide
  Seed: EWLKTRPILSPLTKG
EWLKIRPLLVPLQKG

SEQ ID NO: 207119 - protein, 15 aa, Artificial Sequence
  Description of Artificial Sequence: Synthetic peptide
  Seed: EWLKTRPILSPLTKG
EWLKIRPLLVPLSKG

SEQ ID NO: 207120 - protein, 15 aa, Artificial Sequence
  Description of Artificial Sequence: Synthetic peptide
  Seed: EWLKTRPILSPLTKG
EWLKIRPLLVPLTKG

SEQ ID NO: 207121 - protein, 15 aa, Artificial Sequence
  Description of Artificial Sequence: Synthetic peptide
  Seed: EWLKTRPILSPLTKG
EWLKIRPMLAPLAKG

SEQ ID NO: 207122 - protein, 15 aa, Artificial Sequence
  Description of Artificial Sequence: Synthetic peptide
  Seed: EWLKTRPILSPLTKG
EWLKIRPMLAPLGKG

SEQ ID NO: 207123 - protein, 15 aa, Artificial Sequence
  Description of Artificial Sequence: Synthetic peptide
  Seed: EWLKTRPILSPLTKG
EWLKIRPMLAPLHKG

SEQ ID NO: 207124 - protein, 15 aa, Artificial Sequence
  Description of Artificial Sequence: Synthetic peptide
  Seed: EWLKTRPILSPLTKG
EWLKIRPMLAPLLKG

SEQ ID NO: 207125 - protein, 15 aa, Artificial Sequence
  Description of Artificial Sequence: Synthetic peptide
  Seed: EWLKTRPILSPLTKG
EWLKIRPMLAPLQKG

SEQ ID NO: 207126 - protein, 15 aa, Artificial Sequence
  Description of Artificial Sequence: Synthetic peptide
  Seed: EWLKTRPILSPLTKG
EWLKIRPMLAPLSKG

SEQ ID NO: 207127 - protein, 15 aa, Artificial Sequence
  Description of Artificial Sequence: Synthetic peptide
  Seed: EWLKTRPILSPLTKG
EWLKIRPMLAPLTKG

SEQ ID NO: 207128 - protein, 15 aa, Artificial Sequence
  Description of Artificial Sequence: Synthetic peptide
  Seed: EWLKTRPILSPLTKG
EWLKIRPMLDPLAKG

SEQ ID NO: 207129 - protein, 15 aa, Artificial Sequence
  Description of Artificial Sequence: Synthetic peptide
  Seed: EWLKTRPILSPLTKG
EWLKIRPMLDPLSKG

SEQ ID NO: 207130 - protein, 15 aa, Artificial Sequence
  Description of Artificial Sequence: Synthetic peptide
  Seed: EWLKTRPILSPLTKG
EWLKIRPMLGPLAKG

SEQ ID NO: 207131 - protein, 15 aa, Artificial Sequence
  Description of Artificial Sequence: Synthetic peptide
  Seed: EWLKTRPILSPLTKG
EWLKIRPMLGPLIKG

SEQ ID NO: 207132 - protein, 15 aa, Artificial Sequence
  Description of Artificial Sequence: Synthetic peptide
  Seed: EWLKTRPILSPLTKG
EWLKIRPMLGPLLKG

SEQ ID NO: 207133 - protein, 15 aa, Artificial Sequence
  Description of Artificial Sequence: Synthetic peptide
  Seed: EWLKTRPILSPLTKG
EWLKIRPMLGPLSKG

SEQ ID NO: 207134 - protein, 15 aa, Artificial Sequence
  Description of Artificial Sequence: Synthetic peptide
  Seed: EWLKTRPILSPLTKG
EWLKIRPMLGPLVKG

SEQ ID NO: 207135 - protein, 15 aa, Artificial Sequence
  Description of Artificial Sequence: Synthetic peptide
  Seed: EWLKTRPILSPLTKG
EWLKIRPMLIPLAKG

SEQ ID NO: 207136 - protein, 15 aa, Artificial Sequence
  Description of Artificial Sequence: Synthetic peptide
  Seed: EWLKTRPILSPLTKG
EWLKIRPMLIPLDKG

SEQ ID NO: 207137 - protein, 15 aa, Artificial Sequence
  Description of Artificial Sequence: Synthetic peptide
  Seed: EWLKTRPILSPLTKG
EWLKIRPMLIPLEKG

SEQ ID NO: 207138 - protein, 15 aa, Artificial Sequence
  Description of Artificial Sequence: Synthetic peptide
  Seed: EWLKTRPILSPLTKG
EWLKIRPMLIPLGKG

SEQ ID NO: 207139 - protein, 15 aa, Artificial Sequence
  Description of Artificial Sequence: Synthetic peptide
  Seed: EWLKTRPILSPLTKG
EWLKIRPMLIPLHKG

SEQ ID NO: 207140 - protein, 15 aa, Artificial Sequence
  Description of Artificial Sequence: Synthetic peptide
  Seed: EWLKTRPILSPLTKG
EWLKIRPMLIPLQKG

SEQ ID NO: 207141 - protein, 15 aa, Artificial Sequence
  Description of Artificial Sequence: Synthetic peptide
  Seed: EWLKTRPILSPLTKG
EWLKIRPMLIPLSKG

SEQ ID NO: 207142 - protein, 15 aa, Artificial Sequence
  Description of Artificial Sequence: Synthetic peptide
  Seed: EWLKTRPILSPLTKG
EWLKIRPMLIPLTKG

SEQ ID NO: 207143 - protein, 15 aa, Artificial Sequence
  Description of Artificial Sequence: Synthetic peptide
  Seed: EWLKTRPILSPLTKG
EWLKIRPMLIPLVKG

SEQ ID NO: 207144 - protein, 15 aa, Artificial Sequence
  Description of Artificial Sequence: Synthetic peptide
  Seed: EWLKTRPILSPLTKG
EWLKIRPMLKPLAKG

SEQ ID NO: 207145 - protein, 15 aa, Artificial Sequence
  Description of Artificial Sequence: Synthetic peptide
  Seed: EWLKTRPILSPLTKG
EWLKIRPMLKPLIKG

SEQ ID NO: 207146 - protein, 15 aa, Artificial Sequence
  Description of Artificial Sequence: Synthetic peptide
  Seed: EWLKTRPILSPLTKG
EWLKIRPMLKPLLKG

SEQ ID NO: 207147 - protein, 15 aa, Artificial Sequence
  Description of Artificial Sequence: Synthetic peptide
  Seed: EWLKTRPILSPLTKG
EWLKIRPMLKPLMKG

SEQ ID NO: 207148 - protein, 15 aa, Artificial Sequence
  Description of Artificial Sequence: Synthetic peptide
  Seed: EWLKTRPILSPLTKG
EWLKIRPMLKPLSKG

SEQ ID NO: 207149 - protein, 15 aa, Artificial Sequence
  Description of Artificial Sequence: Synthetic peptide
  Seed: EWLKTRPILSPLTKG
EWLKIRPMLKPLVKG

SEQ ID NO: 207150 - protein, 15 aa, Artificial Sequence
  Description of Artificial Sequence: Synthetic peptide
  Seed: EWLKTRPILSPLTKG
EWLKIRPMLLPLAKG

SEQ ID NO: 207151 - protein, 15 aa, Artificial Sequence
  Description of Artificial Sequence: Synthetic peptide
  Seed: EWLKTRPILSPLTKG
EWLKIRPMLLPLSKG

SEQ ID NO: 207152 - protein, 15 aa, Artificial Sequence
  Description of Artificial Sequence: Synthetic peptide
  Seed: EWLKTRPILSPLTKG
EWLKIRPMLMPLAKG

SEQ ID NO: 207153 - protein, 15 aa, Artificial Sequence
  Description of Artificial Sequence: Synthetic peptide
  Seed: EWLKTRPILSPLTKG
EWLKIRPMLMPLSKG

SEQ ID NO: 207154 - protein, 15 aa, Artificial Sequence
  Description of Artificial Sequence: Synthetic peptide
  Seed: EWLKTRPILSPLTKG
EWLKIRPMLNPLAKG

SEQ ID NO: 207155 - protein, 15 aa, Artificial Sequence
  Description of Artificial Sequence: Synthetic peptide
  Seed: EWLKTRPILSPLTKG
EWLKIRPMLNPLCKG

SEQ ID NO: 207156 - protein, 15 aa, Artificial Sequence
  Description of Artificial Sequence: Synthetic peptide
  Seed: EWLKTRPILSPLTKG
EWLKIRPMLNPLDKG

SEQ ID NO: 207157 - protein, 15 aa, Artificial Sequence
  Description of Artificial Sequence: Synthetic peptide
  Seed: EWLKTRPILSPLTKG
EWLKIRPMLNPLEKG

SEQ ID NO: 207158 - protein, 15 aa, Artificial Sequence
  Description of Artificial Sequence: Synthetic peptide
  Seed: EWLKTRPILSPLTKG
EWLKIRPMLNPLGKG

SEQ ID NO: 207159 - protein, 15 aa, Artificial Sequence
  Description of Artificial Sequence: Synthetic peptide
  Seed: EWLKTRPILSPLTKG
EWLKIRPMLNPLHKG

SEQ ID NO: 207160 - protein, 15 aa, Artificial Sequence
  Description of Artificial Sequence: Synthetic peptide
  Seed: EWLKTRPILSPLTKG
EWLKIRPMLNPLIKG

SEQ ID NO: 207161 - protein, 15 aa, Artificial Sequence
  Description of Artificial Sequence: Synthetic peptide
  Seed: EWLKTRPILSPLTKG
EWLKIRPMLNPLLKG

SEQ ID NO: 207162 - protein, 15 aa, Artificial Sequence
  Description of Artificial Sequence: Synthetic peptide
  Seed: EWLKTRPILSPLTKG
EWLKIRPMLNPLMKG

SEQ ID NO: 207163 - protein, 15 aa, Artificial Sequence
  Description of Artificial Sequence: Synthetic peptide
  Seed: EWLKTRPILSPLTKG
EWLKIRPMLNPLNKG

SEQ ID NO: 207164 - protein, 15 aa, Artificial Sequence
  Description of Artificial Sequence: Synthetic peptide
  Seed: EWLKTRPILSPLTKG
EWLKIRPMLNPLPKG

SEQ ID NO: 207165 - protein, 15 aa, Artificial Sequence
  Description of Artificial Sequence: Synthetic peptide
  Seed: EWLKTRPILSPLTKG
EWLKIRPMLNPLQKG

SEQ ID NO: 207166 - protein, 15 aa, Artificial Sequence
  Description of Artificial Sequence: Synthetic peptide
  Seed: EWLKTRPILSPLTKG
EWLKIRPMLNPLSKG

SEQ ID NO: 207167 - protein, 15 aa, Artificial Sequence
  Description of Artificial Sequence: Synthetic peptide
  Seed: EWLKTRPILSPLTKG
EWLKIRPMLNPLTKG

SEQ ID NO: 207168 - protein, 15 aa, Artificial Sequence
  Description of Artificial Sequence: Synthetic peptide
  Seed: EWLKTRPILSPLTKG
EWLKIRPMLNPLVKG

SEQ ID NO: 207169 - protein, 15 aa, Artificial Sequence
  Description of Artificial Sequence: Synthetic peptide
  Seed: EWLKTRPILSPLTKG
EWLKIRPMLPPLAKG

SEQ ID NO: 207170 - protein, 15 aa, Artificial Sequence
  Description of Artificial Sequence: Synthetic peptide
  Seed: EWLKTRPILSPLTKG
EWLKIRPMLPPLQKG

SEQ ID NO: 207171 - protein, 15 aa, Artificial Sequence
  Description of Artificial Sequence: Synthetic peptide
  Seed: EWLKTRPILSPLTKG
EWLKIRPMLPPLSKG

SEQ ID NO: 207172 - protein, 15 aa, Artificial Sequence
  Description of Artificial Sequence: Synthetic peptide
  Seed: EWLKTRPILSPLTKG
EWLKIRPMLRPLAKG

SEQ ID NO: 207173 - protein, 15 aa, Artificial Sequence
  Description of Artificial Sequence: Synthetic peptide
  Seed: EWLKTRPILSPLTKG
EWLKIRPMLRPLHKG

SEQ ID NO: 207174 - protein, 15 aa, Artificial Sequence
  Description of Artificial Sequence: Synthetic peptide
  Seed: EWLKTRPILSPLTKG
EWLKIRPMLRPLIKG

SEQ ID NO: 207175 - protein, 15 aa, Artificial Sequence
  Description of Artificial Sequence: Synthetic peptide
  Seed: EWLKTRPILSPLTKG
EWLKIRPMLRPLLKG

SEQ ID NO: 207176 - protein, 15 aa, Artificial Sequence
  Description of Artificial Sequence: Synthetic peptide
  Seed: EWLKTRPILSPLTKG
EWLKIRPMLRPLMKG

SEQ ID NO: 207177 - protein, 15 aa, Artificial Sequence
  Description of Artificial Sequence: Synthetic peptide
  Seed: EWLKTRPILSPLTKG
EWLKIRPMLRPLRKG

SEQ ID NO: 207178 - protein, 15 aa, Artificial Sequence
  Description of Artificial Sequence: Synthetic peptide
  Seed: EWLKTRPILSPLTKG
EWLKIRPMLRPLSKG

SEQ ID NO: 207179 - protein, 15 aa, Artificial Sequence
  Description of Artificial Sequence: Synthetic peptide
  Seed: EWLKTRPILSPLTKG
EWLKIRPMLRPLTKG

SEQ ID NO: 207180 - protein, 15 aa, Artificial Sequence
  Description of Artificial Sequence: Synthetic peptide
  Seed: EWLKTRPILSPLTKG
EWLKIRPMLRPLVKG

SEQ ID NO: 207181 - protein, 15 aa, Artificial Sequence
  Description of Artificial Sequence: Synthetic peptide
  Seed: EWLKTRPILSPLTKG
EWLKIRPMLRPLYKG

SEQ ID NO: 207182 - protein, 15 aa, Artificial Sequence
  Description of Artificial Sequence: Synthetic peptide
  Seed: EWLKTRPILSPLTKG
EWLKIRPMLSPLCKG

SEQ ID NO: 207183 - protein, 15 aa, Artificial Sequence
  Description of Artificial Sequence: Synthetic peptide
  Seed: EWLKTRPILSPLTKG
EWLKIRPMLSPLDKG

SEQ ID NO: 207184 - protein, 15 aa, Artificial Sequence
  Description of Artificial Sequence: Synthetic peptide
  Seed: EWLKTRPILSPLTKG
EWLKIRPMLSPLEKG

SEQ ID NO: 207185 - protein, 15 aa, Artificial Sequence
  Description of Artificial Sequence: Synthetic peptide
  Seed: EWLKTRPILSPLTKG
EWLKIRPMLSPLGKG

SEQ ID NO: 207186 - protein, 15 aa, Artificial Sequence
  Description of Artificial Sequence: Synthetic peptide
  Seed: EWLKTRPILSPLTKG
EWLKIRPMLSPLHKG

SEQ ID NO: 207187 - protein, 15 aa, Artificial Sequence
  Description of Artificial Sequence: Synthetic peptide
  Seed: EWLKTRPILSPLTKG
EWLKIRPMLSPLIKG

SEQ ID NO: 207188 - protein, 15 aa, Artificial Sequence
  Description of Artificial Sequence: Synthetic peptide
  Seed: EWLKTRPILSPLTKG
EWLKIRPMLSPLLKG

SEQ ID NO: 207189 - protein, 15 aa, Artificial Sequence
  Description of Artificial Sequence: Synthetic peptide
  Seed: EWLKTRPILSPLTKG
EWLKIRPMLSPLMKG

SEQ ID NO: 207190 - protein, 15 aa, Artificial Sequence
  Description of Artificial Sequence: Synthetic peptide
  Seed: EWLKTRPILSPLTKG
EWLKIRPMLSPLNKG

SEQ ID NO: 207191 - protein, 15 aa, Artificial Sequence
  Description of Artificial Sequence: Synthetic peptide
  Seed: EWLKTRPILSPLTKG
EWLKIRPMLSPLPKG

SEQ ID NO: 207192 - protein, 15 aa, Artificial Sequence
  Description of Artificial Sequence: Synthetic peptide
  Seed: EWLKTRPILSPLTKG
EWLKIRPMLSPLQKG

SEQ ID NO: 207193 - protein, 15 aa, Artificial Sequence
  Description of Artificial Sequence: Synthetic peptide
  Seed: EWLKTRPILSPLTKG
EWLKIRPMLSPLSKG

SEQ ID NO: 207194 - protein, 15 aa, Artificial Sequence
  Description of Artificial Sequence: Synthetic peptide
  Seed: EWLKTRPILSPLTKG
EWLKIRPMLSPLTKG

SEQ ID NO: 207195 - protein, 15 aa, Artificial Sequence
  Description of Artificial Sequence: Synthetic peptide
  Seed: EWLKTRPILSPLTKG
EWLKIRPMLSPLVKG

SEQ ID NO: 207196 - protein, 15 aa, Artificial Sequence
  Description of Artificial Sequence: Synthetic peptide
  Seed: EWLKTRPILSPLTKG
EWLKIRPMLTPLAKG

SEQ ID NO: 207197 - protein, 15 aa, Artificial Sequence
  Description of Artificial Sequence: Synthetic peptide
  Seed: EWLKTRPILSPLTKG
EWLKIRPMLTPLCKG

SEQ ID NO: 207198 - protein, 15 aa, Artificial Sequence
  Description of Artificial Sequence: Synthetic peptide
  Seed: EWLKTRPILSPLTKG
EWLKIRPMLTPLDKG

SEQ ID NO: 207199 - protein, 15 aa, Artificial Sequence
  Description of Artificial Sequence: Synthetic peptide
  Seed: EWLKTRPILSPLTKG
EWLKIRPMLTPLEKG

SEQ ID NO: 207200 - protein, 15 aa, Artificial Sequence
  Description of Artificial Sequence: Synthetic peptide
  Seed: EWLKTRPILSPLTKG
EWLKIRPMLTPLGKG

SEQ ID NO: 207201 - protein, 15 aa, Artificial Sequence
  Description of Artificial Sequence: Synthetic peptide
  Seed: EWLKTRPILSPLTKG
EWLKIRPMLTPLHKG

SEQ ID NO: 207202 - protein, 15 aa, Artificial Sequence
  Description of Artificial Sequence: Synthetic peptide
  Seed: EWLKTRPILSPLTKG
EWLKIRPMLTPLIKG

SEQ ID NO: 207203 - protein, 15 aa, Artificial Sequence
  Description of Artificial Sequence: Synthetic peptide
  Seed: EWLKTRPILSPLTKG
EWLKIRPMLTPLLKG

SEQ ID NO: 207204 - protein, 15 aa, Artificial Sequence
  Description of Artificial Sequence: Synthetic peptide
  Seed: EWLKTRPILSPLTKG
EWLKIRPMLTPLMKG

SEQ ID NO: 207205 - protein, 15 aa, Artificial Sequence
  Description of Artificial Sequence: Synthetic peptide
  Seed: EWLKTRPILSPLTKG
EWLKIRPMLTPLNKG

SEQ ID NO: 207206 - protein, 15 aa, Artificial Sequence
  Description of Artificial Sequence: Synthetic peptide
  Seed: EWLKTRPILSPLTKG
EWLKIRPMLTPLPKG

SEQ ID NO: 207207 - protein, 15 aa, Artificial Sequence
  Description of Artificial Sequence: Synthetic peptide
  Seed: EWLKTRPILSPLTKG
EWLKIRPMLTPLQKG

SEQ ID NO: 207208 - protein, 15 aa, Artificial Sequence
  Description of Artificial Sequence: Synthetic peptide
  Seed: EWLKTRPILSPLTKG
EWLKIRPMLTPLSKG

SEQ ID NO: 207209 - protein, 15 aa, Artificial Sequence
  Description of Artificial Sequence: Synthetic peptide
  Seed: EWLKTRPILSPLTKG
EWLKIRPMLTPLTKG

SEQ ID NO: 207210 - protein, 15 aa, Artificial Sequence
  Description of Artificial Sequence: Synthetic peptide
  Seed: EWLKTRPILSPLTKG
EWLKIRPMLTPLVKG

SEQ ID NO: 207211 - protein, 15 aa, Artificial Sequence
  Description of Artificial Sequence: Synthetic peptide
  Seed: EWLKTRPILSPLTKG
EWLKIRPMLVPLAKG

SEQ ID NO: 207212 - protein, 15 aa, Artificial Sequence
  Description of Artificial Sequence: Synthetic peptide
  Seed: EWLKTRPILSPLTKG
EWLKIRPMLVPLDKG

SEQ ID NO: 207213 - protein, 15 aa, Artificial Sequence
  Description of Artificial Sequence: Synthetic peptide
  Seed: EWLKTRPILSPLTKG
EWLKIRPMLVPLEKG

SEQ ID NO: 207214 - protein, 15 aa, Artificial Sequence
  Description of Artificial Sequence: Synthetic peptide
  Seed: EWLKTRPILSPLTKG
EWLKIRPMLVPLGKG

SEQ ID NO: 207215 - protein, 15 aa, Artificial Sequence
  Description of Artificial Sequence: Synthetic peptide
  Seed: EWLKTRPILSPLTKG
EWLKIRPMLVPLHKG

SEQ ID NO: 207216 - protein, 15 aa, Artificial Sequence
  Description of Artificial Sequence: Synthetic peptide
  Seed: EWLKTRPILSPLTKG
EWLKIRPMLVPLMKG

SEQ ID NO: 207217 - protein, 15 aa, Artificial Sequence
  Description of Artificial Sequence: Synthetic peptide
  Seed: EWLKTRPILSPLTKG
EWLKIRPMLVPLNKG

SEQ ID NO: 207218 - protein, 15 aa, Artificial Sequence
  Description of Artificial Sequence: Synthetic peptide
  Seed: EWLKTRPILSPLTKG
EWLKIRPMLVPLQKG

SEQ ID NO: 207219 - protein, 15 aa, Artificial Sequence
  Description of Artificial Sequence: Synthetic peptide
  Seed: EWLKTRPILSPLTKG
EWLKIRPMLVPLSKG

SEQ ID NO: 207220 - protein, 15 aa, Artificial Sequence
  Description of Artificial Sequence: Synthetic peptide
  Seed: EWLKTRPILSPLTKG
EWLKIRPMLVPLTKG

SEQ ID NO: 207221 - protein, 15 aa, Artificial Sequence
  Description of Artificial Sequence: Synthetic peptide
  Seed: EWLKTRPILSPLTKG
EWLKIRPMLVPLVKG

SEQ ID NO: 207222 - protein, 15 aa, Artificial Sequence
  Description of Artificial Sequence: Synthetic peptide
  Seed: EWLKTRPILSPLTKG
EWLKIRPQLNPLAKG

SEQ ID NO: 207223 - protein, 15 aa, Artificial Sequence
  Description of Artificial Sequence: Synthetic peptide
  Seed: EWLKTRPILSPLTKG
EWLKIRPQLNPLGKG

SEQ ID NO: 207224 - protein, 15 aa, Artificial Sequence
  Description of Artificial Sequence: Synthetic peptide
  Seed: EWLKTRPILSPLTKG
EWLKIRPQLNPLQKG

SEQ ID NO: 207225 - protein, 15 aa, Artificial Sequence
  Description of Artificial Sequence: Synthetic peptide
  Seed: EWLKTRPILSPLTKG
EWLKIRPQLNPLSKG

SEQ ID NO: 207226 - protein, 15 aa, Artificial Sequence
  Description of Artificial Sequence: Synthetic peptide
  Seed: EWLKTRPILSPLTKG
EWLKIRPQLSPLAKG

SEQ ID NO: 207227 - protein, 15 aa, Artificial Sequence
  Description of Artificial Sequence: Synthetic peptide
  Seed: EWLKTRPILSPLTKG
EWLKIRPQLSPLSKG

SEQ ID NO: 207228 - protein, 15 aa, Artificial Sequence
  Description of Artificial Sequence: Synthetic peptide
  Seed: EWLKTRPILSPLTKG
EWLKIRPQLTPLAKG

SEQ ID NO: 207229 - protein, 15 aa, Artificial Sequence
  Description of Artificial Sequence: Synthetic peptide
  Seed: EWLKTRPILSPLTKG
EWLKIRPQLTPLQKG

SEQ ID NO: 207230 - protein, 15 aa, Artificial Sequence
  Description of Artificial Sequence: Synthetic peptide
  Seed: EWLKTRPILSPLTKG
EWLKIRPQLTPLSKG

SEQ ID NO: 207231 - protein, 15 aa, Artificial Sequence
  Description of Artificial Sequence: Synthetic peptide
  Seed: EWLKTRPILSPLTKG
EWLKIRPQLVPLAKG

SEQ ID NO: 207232 - protein, 15 aa, Artificial Sequence
  Description of Artificial Sequence: Synthetic peptide
  Seed: EWLKTRPILSPLTKG
EWLKIRPQLVPLSKG

SEQ ID NO: 207233 - protein, 15 aa, Artificial Sequence
  Description of Artificial Sequence: Synthetic peptide
  Seed: EWLKTRPILSPLTKG
EWLKIRPSLNPLAKG

SEQ ID NO: 207234 - protein, 15 aa, Artificial Sequence
  Description of Artificial Sequence: Synthetic peptide
  Seed: EWLKTRPILSPLTKG
EWLKIRPSLNPLGKG

SEQ ID NO: 207235 - protein, 15 aa, Artificial Sequence
  Description of Artificial Sequence: Synthetic peptide
  Seed: EWLKTRPILSPLTKG
EWLKIRPSLNPLQKG

SEQ ID NO: 207236 - protein, 15 aa, Artificial Sequence
  Description of Artificial Sequence: Synthetic peptide
  Seed: EWLKTRPILSPLTKG
EWLKIRPSLNPLSKG

SEQ ID NO: 207237 - protein, 15 aa, Artificial Sequence
  Description of Artificial Sequence: Synthetic peptide
  Seed: EWLKTRPILSPLTKG
EWLKIRPSLSPLAKG

SEQ ID NO: 207238 - protein, 15 aa, Artificial Sequence
  Description of Artificial Sequence: Synthetic peptide
  Seed: EWLKTRPILSPLTKG
EWLKIRPSLSPLSKG

SEQ ID NO: 207239 - protein, 15 aa, Artificial Sequence
  Description of Artificial Sequence: Synthetic peptide
  Seed: EWLKTRPILSPLTKG
EWLKIRPSLTPLAKG

SEQ ID NO: 207240 - protein, 15 aa, Artificial Sequence
  Description of Artificial Sequence: Synthetic peptide
  Seed: EWLKTRPILSPLTKG
EWLKIRPSLTPLQKG

SEQ ID NO: 207241 - protein, 15 aa, Artificial Sequence
  Description of Artificial Sequence: Synthetic peptide
  Seed: EWLKTRPILSPLTKG
EWLKIRPSLTPLSKG

SEQ ID NO: 207242 - protein, 15 aa, Artificial Sequence
  Description of Artificial Sequence: Synthetic peptide
  Seed: EWLKTRPILSPLTKG
EWLKIRPTLNPLAKG

SEQ ID NO: 207243 - protein, 15 aa, Artificial Sequence
  Description of Artificial Sequence: Synthetic peptide
  Seed: EWLKTRPILSPLTKG
EWLKIRPTLNPLSKG

SEQ ID NO: 207244 - protein, 15 aa, Artificial Sequence
  Description of Artificial Sequence: Synthetic peptide
  Seed: EWLKTRPILSPLTKG
EWLKIRPTLSPLAKG

SEQ ID NO: 207245 - protein, 15 aa, Artificial Sequence
  Description of Artificial Sequence: Synthetic peptide
  Seed: EWLKTRPILSPLTKG
EWLKIRPTLSPLSKG

SEQ ID NO: 207246 - protein, 15 aa, Artificial Sequence
  Description of Artificial Sequence: Synthetic peptide
  Seed: EWLKTRPILSPLTKG
EWLKIRPTLTPLAKG

SEQ ID NO: 207247 - protein, 15 aa, Artificial Sequence
  Description of Artificial Sequence: Synthetic peptide
  Seed: EWLKTRPILSPLTKG
EWLKIRPTLTPLSKG

SEQ ID NO: 207248 - protein, 15 aa, Artificial Sequence
  Description of Artificial Sequence: Synthetic peptide
  Seed: EWLKTRPILSPLTKG
EWLKIRPVLAPLAKG

SEQ ID NO: 207249 - protein, 15 aa, Artificial Sequence
  Description of Artificial Sequence: Synthetic peptide
  Seed: EWLKTRPILSPLTKG
EWLKIRPVLAPLSKG

SEQ ID NO: 207250 - protein, 15 aa, Artificial Sequence
  Description of Artificial Sequence: Synthetic peptide
  Seed: EWLKTRPILSPLTKG
EWLKIRPVLIPLAKG

SEQ ID NO: 207251 - protein, 15 aa, Artificial Sequence
  Description of Artificial Sequence: Synthetic peptide
  Seed: EWLKTRPILSPLTKG
EWLKIRPVLIPLSKG

SEQ ID NO: 207252 - protein, 15 aa, Artificial Sequence
  Description of Artificial Sequence: Synthetic peptide
  Seed: EWLKTRPILSPLTKG
EWLKIRPVLKPLAKG

SEQ ID NO: 207253 - protein, 15 aa, Artificial Sequence
  Description of Artificial Sequence: Synthetic peptide
  Seed: EWLKTRPILSPLTKG
EWLKIRPVLKPLSKG

SEQ ID NO: 207254 - protein, 15 aa, Artificial Sequence
  Description of Artificial Sequence: Synthetic peptide
  Seed: EWLKTRPILSPLTKG
EWLKIRPVLKPLVKG

SEQ ID NO: 207255 - protein, 15 aa, Artificial Sequence
  Description of Artificial Sequence: Synthetic peptide
  Seed: EWLKTRPILSPLTKG
EWLKIRPVLNPLAKG

SEQ ID NO: 207256 - protein, 15 aa, Artificial Sequence
  Description of Artificial Sequence: Synthetic peptide
  Seed: EWLKTRPILSPLTKG
EWLKIRPVLNPLGKG

SEQ ID NO: 207257 - protein, 15 aa, Artificial Sequence
  Description of Artificial Sequence: Synthetic peptide
  Seed: EWLKTRPILSPLTKG
EWLKIRPVLNPLHKG

SEQ ID NO: 207258 - protein, 15 aa, Artificial Sequence
  Description of Artificial Sequence: Synthetic peptide
  Seed: EWLKTRPILSPLTKG
EWLKIRPVLNPLNKG

SEQ ID NO: 207259 - protein, 15 aa, Artificial Sequence
  Description of Artificial Sequence: Synthetic peptide
  Seed: EWLKTRPILSPLTKG
EWLKIRPVLNPLQKG

SEQ ID NO: 207260 - protein, 15 aa, Artificial Sequence
  Description of Artificial Sequence: Synthetic peptide
  Seed: EWLKTRPILSPLTKG
EWLKIRPVLNPLSKG

SEQ ID NO: 207261 - protein, 15 aa, Artificial Sequence
  Description of Artificial Sequence: Synthetic peptide
  Seed: EWLKTRPILSPLTKG
EWLKIRPVLNPLTKG

SEQ ID NO: 207262 - protein, 15 aa, Artificial Sequence
  Description of Artificial Sequence: Synthetic peptide
  Seed: EWLKTRPILSPLTKG
EWLKIRPVLNPLVKG

SEQ ID NO: 207263 - protein, 15 aa, Artificial Sequence
  Description of Artificial Sequence: Synthetic peptide
  Seed: EWLKTRPILSPLTKG
EWLKIRPVLRPLAKG

SEQ ID NO: 207264 - protein, 15 aa, Artificial Sequence
  Description of Artificial Sequence: Synthetic peptide
  Seed: EWLKTRPILSPLTKG
EWLKIRPVLRPLIKG

SEQ ID NO: 207265 - protein, 15 aa, Artificial Sequence
  Description of Artificial Sequence: Synthetic peptide
  Seed: EWLKTRPILSPLTKG
EWLKIRPVLRPLLKG

SEQ ID NO: 207266 - protein, 15 aa, Artificial Sequence
  Description of Artificial Sequence: Synthetic peptide
  Seed: EWLKTRPILSPLTKG
EWLKIRPVLRPLMKG

SEQ ID NO: 207267 - protein, 15 aa, Artificial Sequence
  Description of Artificial Sequence: Synthetic peptide
  Seed: EWLKTRPILSPLTKG
EWLKIRPVLRPLRKG

SEQ ID NO: 207268 - protein, 15 aa, Artificial Sequence
  Description of Artificial Sequence: Synthetic peptide
  Seed: EWLKTRPILSPLTKG
EWLKIRPVLRPLSKG

SEQ ID NO: 207269 - protein, 15 aa, Artificial Sequence
  Description of Artificial Sequence: Synthetic peptide
  Seed: EWLKTRPILSPLTKG
EWLKIRPVLRPLTKG

SEQ ID NO: 207270 - protein, 15 aa, Artificial Sequence
  Description of Artificial Sequence: Synthetic peptide
  Seed: EWLKTRPILSPLTKG
EWLKIRPVLRPLVKG

SEQ ID NO: 207271 - protein, 15 aa, Artificial Sequence
  Description of Artificial Sequence: Synthetic peptide
  Seed: EWLKTRPILSPLTKG
EWLKIRPVLSPLAKG

SEQ ID NO: 207272 - protein, 15 aa, Artificial Sequence
  Description of Artificial Sequence: Synthetic peptide
  Seed: EWLKTRPILSPLTKG
EWLKIRPVLSPLGKG

SEQ ID NO: 207273 - protein, 15 aa, Artificial Sequence
  Description of Artificial Sequence: Synthetic peptide
  Seed: EWLKTRPILSPLTKG
EWLKIRPVLSPLHKG

SEQ ID NO: 207274 - protein, 15 aa, Artificial Sequence
  Description of Artificial Sequence: Synthetic peptide
  Seed: EWLKTRPILSPLTKG
EWLKIRPVLSPLIKG

SEQ ID NO: 207275 - protein, 15 aa, Artificial Sequence
  Description of Artificial Sequence: Synthetic peptide
  Seed: EWLKTRPILSPLTKG
EWLKIRPVLSPLLKG

SEQ ID NO: 207276 - protein, 15 aa, Artificial Sequence
  Description of Artificial Sequence: Synthetic peptide
  Seed: EWLKTRPILSPLTKG
EWLKIRPVLSPLQKG

SEQ ID NO: 207277 - protein, 15 aa, Artificial Sequence
  Description of Artificial Sequence: Synthetic peptide
  Seed: EWLKTRPILSPLTKG
EWLKIRPVLSPLSKG

SEQ ID NO: 207278 - protein, 15 aa, Artificial Sequence
  Description of Artificial Sequence: Synthetic peptide
  Seed: EWLKTRPILSPLTKG
EWLKIRPVLSPLTKG

SEQ ID NO: 207279 - protein, 15 aa, Artificial Sequence
  Description of Artificial Sequence: Synthetic peptide
  Seed: EWLKTRPILSPLTKG
EWLKIRPVLSPLVKG

SEQ ID NO: 207280 - protein, 15 aa, Artificial Sequence
  Description of Artificial Sequence: Synthetic peptide
  Seed: EWLKTRPILSPLTKG
EWLKIRPVLTPLAKG

SEQ ID NO: 207281 - protein, 15 aa, Artificial Sequence
  Description of Artificial Sequence: Synthetic peptide
  Seed: EWLKTRPILSPLTKG
EWLKIRPVLTPLEKG

SEQ ID NO: 207282 - protein, 15 aa, Artificial Sequence
  Description of Artificial Sequence: Synthetic peptide
  Seed: EWLKTRPILSPLTKG
EWLKIRPVLTPLGKG

SEQ ID NO: 207283 - protein, 15 aa, Artificial Sequence
  Description of Artificial Sequence: Synthetic peptide
  Seed: EWLKTRPILSPLTKG
EWLKIRPVLTPLHKG

SEQ ID NO: 207284 - protein, 15 aa, Artificial Sequence
  Description of Artificial Sequence: Synthetic peptide
  Seed: EWLKTRPILSPLTKG
EWLKIRPVLTPLMKG

SEQ ID NO: 207285 - protein, 15 aa, Artificial Sequence
  Description of Artificial Sequence: Synthetic peptide
  Seed: EWLKTRPILSPLTKG
EWLKIRPVLTPLNKG

SEQ ID NO: 207286 - protein, 15 aa, Artificial Sequence
  Description of Artificial Sequence: Synthetic peptide
  Seed: EWLKTRPILSPLTKG
EWLKIRPVLTPLQKG

SEQ ID NO: 207287 - protein, 15 aa, Artificial Sequence
  Description of Artificial Sequence: Synthetic peptide
  Seed: EWLKTRPILSPLTKG
EWLKIRPVLTPLSKG

SEQ ID NO: 207288 - protein, 15 aa, Artificial Sequence
  Description of Artificial Sequence: Synthetic peptide
  Seed: EWLKTRPILSPLTKG
EWLKIRPVLTPLTKG

SEQ ID NO: 207289 - protein, 15 aa, Artificial Sequence
  Description of Artificial Sequence: Synthetic peptide
  Seed: EWLKTRPILSPLTKG
EWLKIRPVLTPLVKG

SEQ ID NO: 207290 - protein, 15 aa, Artificial Sequence
  Description of Artificial Sequence: Synthetic peptide
  Seed: EWLKTRPILSPLTKG
EWLKIRPVLVPLAKG

SEQ ID NO: 207291 - protein, 15 aa, Artificial Sequence
  Description of Artificial Sequence: Synthetic peptide
  Seed: EWLKTRPILSPLTKG
EWLKIRPVLVPLGKG

SEQ ID NO: 207292 - protein, 15 aa, Artificial Sequence
  Description of Artificial Sequence: Synthetic peptide
  Seed: EWLKTRPILSPLTKG
EWLKIRPVLVPLSKG

SEQ ID NO: 207293 - protein, 15 aa, Artificial Sequence
  Description of Artificial Sequence: Synthetic peptide
  Seed: EWLKTRPILSPLTKG
EWLKIRPWLNPLAKG

SEQ ID NO: 207294 - protein, 15 aa, Artificial Sequence
  Description of Artificial Sequence: Synthetic peptide
  Seed: EWLKTRPILSPLTKG
EWLKIRPWLSPLAKG

SEQ ID NO: 207295 - protein, 15 aa, Artificial Sequence
  Description of Artificial Sequence: Synthetic peptide
  Seed: EWLKTRPILSPLTKG
EWLKIRPWLTPLAKG

SEQ ID NO: 207296 - protein, 15 aa, Artificial Sequence
  Description of Artificial Sequence: Synthetic peptide
  Seed: EWLKTRPILSPLTKG
EWLKIRPYLSPLAKG

SEQ ID NO: 207297 - protein, 15 aa, Artificial Sequence
  Description of Artificial Sequence: Synthetic peptide
  Seed: EWLKTRPILSPLTKG
EWLKIRPYLSPLIKG

SEQ ID NO: 207298 - protein, 15 aa, Artificial Sequence
  Description of Artificial Sequence: Synthetic peptide
  Seed: EWLKTRPILSPLTKG
EWLKIRPYLSPLLKG

SEQ ID NO: 207299 - protein, 15 aa, Artificial Sequence
  Description of Artificial Sequence: Synthetic peptide
  Seed: EWLKTRPILSPLTKG
EWLKIRPYLSPLVKG

SEQ ID NO: 207300 - protein, 15 aa, Artificial Sequence
  Description of Artificial Sequence: Synthetic peptide
  Seed: EWLKTRPILSPLTKG
EWLKLRPALNPLAKG

SEQ ID NO: 207301 - protein, 15 aa, Artificial Sequence
  Description of Artificial Sequence: Synthetic peptide
  Seed: EWLKTRPILSPLTKG
EWLKLRPALNPLGKG

SEQ ID NO: 207302 - protein, 15 aa, Artificial Sequence
  Description of Artificial Sequence: Synthetic peptide
  Seed: EWLKTRPILSPLTKG
EWLKLRPALNPLQKG

SEQ ID NO: 207303 - protein, 15 aa, Artificial Sequence
  Description of Artificial Sequence: Synthetic peptide
  Seed: EWLKTRPILSPLTKG
EWLKLRPALNPLSKG

SEQ ID NO: 207304 - protein, 15 aa, Artificial Sequence
  Description of Artificial Sequence: Synthetic peptide
  Seed: EWLKTRPILSPLTKG
EWLKLRPALSPLAKG

SEQ ID NO: 207305 - protein, 15 aa, Artificial Sequence
  Description of Artificial Sequence: Synthetic peptide
  Seed: EWLKTRPILSPLTKG
EWLKLRPALSPLGKG

SEQ ID NO: 207306 - protein, 15 aa, Artificial Sequence
  Description of Artificial Sequence: Synthetic peptide
  Seed: EWLKTRPILSPLTKG
EWLKLRPALSPLQKG

SEQ ID NO: 207307 - protein, 15 aa, Artificial Sequence
  Description of Artificial Sequence: Synthetic peptide
  Seed: EWLKTRPILSPLTKG
EWLKLRPALSPLSKG

SEQ ID NO: 207308 - protein, 15 aa, Artificial Sequence
  Description of Artificial Sequence: Synthetic peptide
  Seed: EWLKTRPILSPLTKG
EWLKLRPALTPLAKG

SEQ ID NO: 207309 - protein, 15 aa, Artificial Sequence
  Description of Artificial Sequence: Synthetic peptide
  Seed: EWLKTRPILSPLTKG
EWLKLRPALTPLGKG

SEQ ID NO: 207310 - protein, 15 aa, Artificial Sequence
  Description of Artificial Sequence: Synthetic peptide
  Seed: EWLKTRPILSPLTKG
EWLKLRPALTPLQKG

SEQ ID NO: 207311 - protein, 15 aa, Artificial Sequence
  Description of Artificial Sequence: Synthetic peptide
  Seed: EWLKTRPILSPLTKG
EWLKLRPALTPLSKG

SEQ ID NO: 207312 - protein, 15 aa, Artificial Sequence
  Description of Artificial Sequence: Synthetic peptide
  Seed: EWLKTRPILSPLTKG
EWLKLRPFLAPLKKG

SEQ ID NO: 207313 - protein, 15 aa, Artificial Sequence
  Description of Artificial Sequence: Synthetic peptide
  Seed: EWLKTRPILSPLTKG
EWLKLRPFLAPLRKG

SEQ ID NO: 207314 - protein, 15 aa, Artificial Sequence
  Description of Artificial Sequence: Synthetic peptide
  Seed: EWLKTRPILSPLTKG
EWLKLRPFLNPLAKG

SEQ ID NO: 207315 - protein, 15 aa, Artificial Sequence
  Description of Artificial Sequence: Synthetic peptide
  Seed: EWLKTRPILSPLTKG
EWLKLRPFLNPLSKG

SEQ ID NO: 207316 - protein, 15 aa, Artificial Sequence
  Description of Artificial Sequence: Synthetic peptide
  Seed: EWLKTRPILSPLTKG
EWLKLRPFLSPLAKG

SEQ ID NO: 207317 - protein, 15 aa, Artificial Sequence
  Description of Artificial Sequence: Synthetic peptide
  Seed: EWLKTRPILSPLTKG
EWLKLRPFLSPLIKG

SEQ ID NO: 207318 - protein, 15 aa, Artificial Sequence
  Description of Artificial Sequence: Synthetic peptide
  Seed: EWLKTRPILSPLTKG
EWLKLRPFLSPLLKG

SEQ ID NO: 207319 - protein, 15 aa, Artificial Sequence
  Description of Artificial Sequence: Synthetic peptide
  Seed: EWLKTRPILSPLTKG
EWLKLRPFLSPLRKG

SEQ ID NO: 207320 - protein, 15 aa, Artificial Sequence
  Description of Artificial Sequence: Synthetic peptide
  Seed: EWLKTRPILSPLTKG
EWLKLRPFLSPLSKG

SEQ ID NO: 207321 - protein, 15 aa, Artificial Sequence
  Description of Artificial Sequence: Synthetic peptide
  Seed: EWLKTRPILSPLTKG
EWLKLRPFLSPLVKG

SEQ ID NO: 207322 - protein, 15 aa, Artificial Sequence
  Description of Artificial Sequence: Synthetic peptide
  Seed: EWLKTRPILSPLTKG
EWLKLRPFLTPLAKG

SEQ ID NO: 207323 - protein, 15 aa, Artificial Sequence
  Description of Artificial Sequence: Synthetic peptide
  Seed: EWLKTRPILSPLTKG
EWLKLRPFLTPLDKG

SEQ ID NO: 207324 - protein, 15 aa, Artificial Sequence
  Description of Artificial Sequence: Synthetic peptide
  Seed: EWLKTRPILSPLTKG
EWLKLRPFLTPLEKG

SEQ ID NO: 207325 - protein, 15 aa, Artificial Sequence
  Description of Artificial Sequence: Synthetic peptide
  Seed: EWLKTRPILSPLTKG
EWLKLRPFLTPLGKG

SEQ ID NO: 207326 - protein, 15 aa, Artificial Sequence
  Description of Artificial Sequence: Synthetic peptide
  Seed: EWLKTRPILSPLTKG
EWLKLRPFLTPLSKG

SEQ ID NO: 207327 - protein, 15 aa, Artificial Sequence
  Description of Artificial Sequence: Synthetic peptide
  Seed: EWLKTRPILSPLTKG
EWLKLRPILAPLTKG

SEQ ID NO: 207328 - protein, 15 aa, Artificial Sequence
  Description of Artificial Sequence: Synthetic peptide
  Seed: EWLKTRPILSPLTKG
EWLKLRPILCPLTKG

SEQ ID NO: 207329 - protein, 15 aa, Artificial Sequence
  Description of Artificial Sequence: Synthetic peptide
  Seed: EWLKTRPILSPLTKG
EWLKLRPILIPLTKG

SEQ ID NO: 207330 - protein, 15 aa, Artificial Sequence
  Description of Artificial Sequence: Synthetic peptide
  Seed: EWLKTRPILSPLTKG
EWLKLRPILLPLTKG

SEQ ID NO: 207331 - protein, 15 aa, Artificial Sequence
  Description of Artificial Sequence: Synthetic peptide
  Seed: EWLKTRPILSPLTKG
EWLKLRPILMPLTKG

SEQ ID NO: 207332 - protein, 15 aa, Artificial Sequence
  Description of Artificial Sequence: Synthetic peptide
  Seed: EWLKTRPILSPLTKG
EWLKLRPILNPLAKG

SEQ ID NO: 207333 - protein, 15 aa, Artificial Sequence
  Description of Artificial Sequence: Synthetic peptide
  Seed: EWLKTRPILSPLTKG
EWLKLRPILNPLDKG

SEQ ID NO: 207334 - protein, 15 aa, Artificial Sequence
  Description of Artificial Sequence: Synthetic peptide
  Seed: EWLKTRPILSPLTKG
EWLKLRPILNPLEKG

SEQ ID NO: 207335 - protein, 15 aa, Artificial Sequence
  Description of Artificial Sequence: Synthetic peptide
  Seed: EWLKTRPILSPLTKG
EWLKLRPILNPLGKG

SEQ ID NO: 207336 - protein, 15 aa, Artificial Sequence
  Description of Artificial Sequence: Synthetic peptide
  Seed: EWLKTRPILSPLTKG
EWLKLRPILNPLHKG

SEQ ID NO: 207337 - protein, 15 aa, Artificial Sequence
  Description of Artificial Sequence: Synthetic peptide
  Seed: EWLKTRPILSPLTKG
EWLKLRPILNPLQKG

SEQ ID NO: 207338 - protein, 15 aa, Artificial Sequence
  Description of Artificial Sequence: Synthetic peptide
  Seed: EWLKTRPILSPLTKG
EWLKLRPILNPLSKG

SEQ ID NO: 207339 - protein, 15 aa, Artificial Sequence
  Description of Artificial Sequence: Synthetic peptide
  Seed: EWLKTRPILSPLTKG
EWLKLRPILNPLTKG

SEQ ID NO: 207340 - protein, 15 aa, Artificial Sequence
  Description of Artificial Sequence: Synthetic peptide
  Seed: EWLKTRPILSPLTKG
EWLKLRPILNPLVKG

SEQ ID NO: 207341 - protein, 15 aa, Artificial Sequence
  Description of Artificial Sequence: Synthetic peptide
  Seed: EWLKTRPILSPLTKG
EWLKLRPILRPLAKG

SEQ ID NO: 207342 - protein, 15 aa, Artificial Sequence
  Description of Artificial Sequence: Synthetic peptide
  Seed: EWLKTRPILSPLTKG
EWLKLRPILRPLSKG

SEQ ID NO: 207343 - protein, 15 aa, Artificial Sequence
  Description of Artificial Sequence: Synthetic peptide
  Seed: EWLKTRPILSPLTKG
EWLKLRPILRPLVKG

SEQ ID NO: 207344 - protein, 15 aa, Artificial Sequence
  Description of Artificial Sequence: Synthetic peptide
  Seed: EWLKTRPILSPLTKG
EWLKLRPILSPLAKG

SEQ ID NO: 207345 - protein, 15 aa, Artificial Sequence
  Description of Artificial Sequence: Synthetic peptide
  Seed: EWLKTRPILSPLTKG
EWLKLRPILSPLDKG

SEQ ID NO: 207346 - protein, 15 aa, Artificial Sequence
  Description of Artificial Sequence: Synthetic peptide
  Seed: EWLKTRPILSPLTKG
EWLKLRPILSPLEKG

SEQ ID NO: 207347 - protein, 15 aa, Artificial Sequence
  Description of Artificial Sequence: Synthetic peptide
  Seed: EWLKTRPILSPLTKG
EWLKLRPILSPLGKG

SEQ ID NO: 207348 - protein, 15 aa, Artificial Sequence
  Description of Artificial Sequence: Synthetic peptide
  Seed: EWLKTRPILSPLTKG
EWLKLRPILSPLIKG

SEQ ID NO: 207349 - protein, 15 aa, Artificial Sequence
  Description of Artificial Sequence: Synthetic peptide
  Seed: EWLKTRPILSPLTKG
EWLKLRPILSPLLKG

SEQ ID NO: 207350 - protein, 15 aa, Artificial Sequence
  Description of Artificial Sequence: Synthetic peptide
  Seed: EWLKTRPILSPLTKG
EWLKLRPILSPLQKG

SEQ ID NO: 207351 - protein, 15 aa, Artificial Sequence
  Description of Artificial Sequence: Synthetic peptide
  Seed: EWLKTRPILSPLTKG
EWLKLRPILSPLSKG

SEQ ID NO: 207352 - protein, 15 aa, Artificial Sequence
  Description of Artificial Sequence: Synthetic peptide
  Seed: EWLKTRPILSPLTKG
EWLKLRPILSPLTKG

SEQ ID NO: 207353 - protein, 15 aa, Artificial Sequence
  Description of Artificial Sequence: Synthetic peptide
  Seed: EWLKTRPILSPLTKG
EWLKLRPILSPLVKG

SEQ ID NO: 207354 - protein, 15 aa, Artificial Sequence
  Description of Artificial Sequence: Synthetic peptide
  Seed: EWLKTRPILSPLTKG
EWLKLRPILTPLAKG

SEQ ID NO: 207355 - protein, 15 aa, Artificial Sequence
  Description of Artificial Sequence: Synthetic peptide
  Seed: EWLKTRPILSPLTKG
EWLKLRPILTPLDKG

SEQ ID NO: 207356 - protein, 15 aa, Artificial Sequence
  Description of Artificial Sequence: Synthetic peptide
  Seed: EWLKTRPILSPLTKG
EWLKLRPILTPLEKG

SEQ ID NO: 207357 - protein, 15 aa, Artificial Sequence
  Description of Artificial Sequence: Synthetic peptide
  Seed: EWLKTRPILSPLTKG
EWLKLRPILTPLGKG

SEQ ID NO: 207358 - protein, 15 aa, Artificial Sequence
  Description of Artificial Sequence: Synthetic peptide
  Seed: EWLKTRPILSPLTKG
EWLKLRPILTPLHKG

SEQ ID NO: 207359 - protein, 15 aa, Artificial Sequence
  Description of Artificial Sequence: Synthetic peptide
  Seed: EWLKTRPILSPLTKG
EWLKLRPILTPLQKG

SEQ ID NO: 207360 - protein, 15 aa, Artificial Sequence
  Description of Artificial Sequence: Synthetic peptide
  Seed: EWLKTRPILSPLTKG
EWLKLRPILTPLSKG

SEQ ID NO: 207361 - protein, 15 aa, Artificial Sequence
  Description of Artificial Sequence: Synthetic peptide
  Seed: EWLKTRPILSPLTKG
EWLKLRPILTPLTKG

SEQ ID NO: 207362 - protein, 15 aa, Artificial Sequence
  Description of Artificial Sequence: Synthetic peptide
  Seed: EWLKTRPILSPLTKG
EWLKLRPILTPLVKG

SEQ ID NO: 207363 - protein, 15 aa, Artificial Sequence
  Description of Artificial Sequence: Synthetic peptide
  Seed: EWLKTRPILSPLTKG
EWLKLRPILVPLAKG

SEQ ID NO: 207364 - protein, 15 aa, Artificial Sequence
  Description of Artificial Sequence: Synthetic peptide
  Seed: EWLKTRPILSPLTKG
EWLKLRPILVPLSKG

SEQ ID NO: 207365 - protein, 15 aa, Artificial Sequence
  Description of Artificial Sequence: Synthetic peptide
  Seed: EWLKTRPILSPLTKG
EWLKLRPILVPLTKG

SEQ ID NO: 207366 - protein, 15 aa, Artificial Sequence
  Description of Artificial Sequence: Synthetic peptide
  Seed: EWLKTRPILSPLTKG
EWLKLRPLLIPLAKG

SEQ ID NO: 207367 - protein, 15 aa, Artificial Sequence
  Description of Artificial Sequence: Synthetic peptide
  Seed: EWLKTRPILSPLTKG
EWLKLRPLLIPLSKG

SEQ ID NO: 207368 - protein, 15 aa, Artificial Sequence
  Description of Artificial Sequence: Synthetic peptide
  Seed: EWLKTRPILSPLTKG
EWLKLRPLLNPLAKG

SEQ ID NO: 207369 - protein, 15 aa, Artificial Sequence
  Description of Artificial Sequence: Synthetic peptide
  Seed: EWLKTRPILSPLTKG
EWLKLRPLLNPLDKG

SEQ ID NO: 207370 - protein, 15 aa, Artificial Sequence
  Description of Artificial Sequence: Synthetic peptide
  Seed: EWLKTRPILSPLTKG
EWLKLRPLLNPLEKG

SEQ ID NO: 207371 - protein, 15 aa, Artificial Sequence
  Description of Artificial Sequence: Synthetic peptide
  Seed: EWLKTRPILSPLTKG
EWLKLRPLLNPLGKG

SEQ ID NO: 207372 - protein, 15 aa, Artificial Sequence
  Description of Artificial Sequence: Synthetic peptide
  Seed: EWLKTRPILSPLTKG
EWLKLRPLLNPLHKG

SEQ ID NO: 207373 - protein, 15 aa, Artificial Sequence
  Description of Artificial Sequence: Synthetic peptide
  Seed: EWLKTRPILSPLTKG
EWLKLRPLLNPLQKG

SEQ ID NO: 207374 - protein, 15 aa, Artificial Sequence
  Description of Artificial Sequence: Synthetic peptide
  Seed: EWLKTRPILSPLTKG
EWLKLRPLLNPLSKG

SEQ ID NO: 207375 - protein, 15 aa, Artificial Sequence
  Description of Artificial Sequence: Synthetic peptide
  Seed: EWLKTRPILSPLTKG
EWLKLRPLLNPLTKG

SEQ ID NO: 207376 - protein, 15 aa, Artificial Sequence
  Description of Artificial Sequence: Synthetic peptide
  Seed: EWLKTRPILSPLTKG
EWLKLRPLLRPLAKG

SEQ ID NO: 207377 - protein, 15 aa, Artificial Sequence
  Description of Artificial Sequence: Synthetic peptide
  Seed: EWLKTRPILSPLTKG
EWLKLRPLLRPLSKG

SEQ ID NO: 207378 - protein, 15 aa, Artificial Sequence
  Description of Artificial Sequence: Synthetic peptide
  Seed: EWLKTRPILSPLTKG
EWLKLRPLLRPLVKG

SEQ ID NO: 207379 - protein, 15 aa, Artificial Sequence
  Description of Artificial Sequence: Synthetic peptide
  Seed: EWLKTRPILSPLTKG
EWLKLRPLLSPLAKG

SEQ ID NO: 207380 - protein, 15 aa, Artificial Sequence
  Description of Artificial Sequence: Synthetic peptide
  Seed: EWLKTRPILSPLTKG
EWLKLRPLLSPLDKG

SEQ ID NO: 207381 - protein, 15 aa, Artificial Sequence
  Description of Artificial Sequence: Synthetic peptide
  Seed: EWLKTRPILSPLTKG
EWLKLRPLLSPLEKG

SEQ ID NO: 207382 - protein, 15 aa, Artificial Sequence
  Description of Artificial Sequence: Synthetic peptide
  Seed: EWLKTRPILSPLTKG
EWLKLRPLLSPLGKG

SEQ ID NO: 207383 - protein, 15 aa, Artificial Sequence
  Description of Artificial Sequence: Synthetic peptide
  Seed: EWLKTRPILSPLTKG
EWLKLRPLLSPLIKG

SEQ ID NO: 207384 - protein, 15 aa, Artificial Sequence
  Description of Artificial Sequence: Synthetic peptide
  Seed: EWLKTRPILSPLTKG
EWLKLRPLLSPLLKG

SEQ ID NO: 207385 - protein, 15 aa, Artificial Sequence
  Description of Artificial Sequence: Synthetic peptide
  Seed: EWLKTRPILSPLTKG
EWLKLRPLLSPLQKG

SEQ ID NO: 207386 - protein, 15 aa, Artificial Sequence
  Description of Artificial Sequence: Synthetic peptide
  Seed: EWLKTRPILSPLTKG
EWLKLRPLLSPLSKG

SEQ ID NO: 207387 - protein, 15 aa, Artificial Sequence
  Description of Artificial Sequence: Synthetic peptide
  Seed: EWLKTRPILSPLTKG
EWLKLRPLLSPLTKG

SEQ ID NO: 207388 - protein, 15 aa, Artificial Sequence
  Description of Artificial Sequence: Synthetic peptide
  Seed: EWLKTRPILSPLTKG
EWLKLRPLLSPLVKG

SEQ ID NO: 207389 - protein, 15 aa, Artificial Sequence
  Description of Artificial Sequence: Synthetic peptide
  Seed: EWLKTRPILSPLTKG
EWLKLRPLLTPLAKG

SEQ ID NO: 207390 - protein, 15 aa, Artificial Sequence
  Description of Artificial Sequence: Synthetic peptide
  Seed: EWLKTRPILSPLTKG
EWLKLRPLLTPLDKG

SEQ ID NO: 207391 - protein, 15 aa, Artificial Sequence
  Description of Artificial Sequence: Synthetic peptide
  Seed: EWLKTRPILSPLTKG
EWLKLRPLLTPLEKG

SEQ ID NO: 207392 - protein, 15 aa, Artificial Sequence
  Description of Artificial Sequence: Synthetic peptide
  Seed: EWLKTRPILSPLTKG
EWLKLRPLLTPLGKG

SEQ ID NO: 207393 - protein, 15 aa, Artificial Sequence
  Description of Artificial Sequence: Synthetic peptide
  Seed: EWLKTRPILSPLTKG
EWLKLRPLLTPLHKG

SEQ ID NO: 207394 - protein, 15 aa, Artificial Sequence
  Description of Artificial Sequence: Synthetic peptide
  Seed: EWLKTRPILSPLTKG
EWLKLRPLLTPLQKG

SEQ ID NO: 207395 - protein, 15 aa, Artificial Sequence
  Description of Artificial Sequence: Synthetic peptide
  Seed: EWLKTRPILSPLTKG
EWLKLRPLLTPLSKG

SEQ ID NO: 207396 - protein, 15 aa, Artificial Sequence
  Description of Artificial Sequence: Synthetic peptide
  Seed: EWLKTRPILSPLTKG
EWLKLRPLLTPLTKG

SEQ ID NO: 207397 - protein, 15 aa, Artificial Sequence
  Description of Artificial Sequence: Synthetic peptide
  Seed: EWLKTRPILSPLTKG
EWLKLRPLLVPLAKG

SEQ ID NO: 207398 - protein, 15 aa, Artificial Sequence
  Description of Artificial Sequence: Synthetic peptide
  Seed: EWLKTRPILSPLTKG
EWLKLRPLLVPLSKG

SEQ ID NO: 207399 - protein, 15 aa, Artificial Sequence
  Description of Artificial Sequence: Synthetic peptide
  Seed: EWLKTRPILSPLTKG
EWLKLRPMLAPLAKG

SEQ ID NO: 207400 - protein, 15 aa, Artificial Sequence
  Description of Artificial Sequence: Synthetic peptide
  Seed: EWLKTRPILSPLTKG
EWLKLRPMLAPLSKG

SEQ ID NO: 207401 - protein, 15 aa, Artificial Sequence
  Description of Artificial Sequence: Synthetic peptide
  Seed: EWLKTRPILSPLTKG
EWLKLRPMLDPLAKG

SEQ ID NO: 207402 - protein, 15 aa, Artificial Sequence
  Description of Artificial Sequence: Synthetic peptide
  Seed: EWLKTRPILSPLTKG
EWLKLRPMLDPLSKG

SEQ ID NO: 207403 - protein, 15 aa, Artificial Sequence
  Description of Artificial Sequence: Synthetic peptide
  Seed: EWLKTRPILSPLTKG
EWLKLRPMLIPLAKG

SEQ ID NO: 207404 - protein, 15 aa, Artificial Sequence
  Description of Artificial Sequence: Synthetic peptide
  Seed: EWLKTRPILSPLTKG
EWLKLRPMLIPLGKG

SEQ ID NO: 207405 - protein, 15 aa, Artificial Sequence
  Description of Artificial Sequence: Synthetic peptide
  Seed: EWLKTRPILSPLTKG
EWLKLRPMLIPLSKG

SEQ ID NO: 207406 - protein, 15 aa, Artificial Sequence
  Description of Artificial Sequence: Synthetic peptide
  Seed: EWLKTRPILSPLTKG
EWLKLRPMLNPLAKG

SEQ ID NO: 207407 - protein, 15 aa, Artificial Sequence
  Description of Artificial Sequence: Synthetic peptide
  Seed: EWLKTRPILSPLTKG
EWLKLRPMLNPLDKG

SEQ ID NO: 207408 - protein, 15 aa, Artificial Sequence
  Description of Artificial Sequence: Synthetic peptide
  Seed: EWLKTRPILSPLTKG
EWLKLRPMLNPLEKG

SEQ ID NO: 207409 - protein, 15 aa, Artificial Sequence
  Description of Artificial Sequence: Synthetic peptide
  Seed: EWLKTRPILSPLTKG
EWLKLRPMLNPLGKG

SEQ ID NO: 207410 - protein, 15 aa, Artificial Sequence
  Description of Artificial Sequence: Synthetic peptide
  Seed: EWLKTRPILSPLTKG
EWLKLRPMLNPLHKG

SEQ ID NO: 207411 - protein, 15 aa, Artificial Sequence
  Description of Artificial Sequence: Synthetic peptide
  Seed: EWLKTRPILSPLTKG
EWLKLRPMLNPLIKG

SEQ ID NO: 207412 - protein, 15 aa, Artificial Sequence
  Description of Artificial Sequence: Synthetic peptide
  Seed: EWLKTRPILSPLTKG
EWLKLRPMLNPLLKG

SEQ ID NO: 207413 - protein, 15 aa, Artificial Sequence
  Description of Artificial Sequence: Synthetic peptide
  Seed: EWLKTRPILSPLTKG
EWLKLRPMLNPLMKG

SEQ ID NO: 207414 - protein, 15 aa, Artificial Sequence
  Description of Artificial Sequence: Synthetic peptide
  Seed: EWLKTRPILSPLTKG
EWLKLRPMLNPLNKG

SEQ ID NO: 207415 - protein, 15 aa, Artificial Sequence
  Description of Artificial Sequence: Synthetic peptide
  Seed: EWLKTRPILSPLTKG
EWLKLRPMLNPLQKG

SEQ ID NO: 207416 - protein, 15 aa, Artificial Sequence
  Description of Artificial Sequence: Synthetic peptide
  Seed: EWLKTRPILSPLTKG
EWLKLRPMLNPLSKG

SEQ ID NO: 207417 - protein, 15 aa, Artificial Sequence
  Description of Artificial Sequence: Synthetic peptide
  Seed: EWLKTRPILSPLTKG
EWLKLRPMLNPLTKG

SEQ ID NO: 207418 - protein, 15 aa, Artificial Sequence
  Description of Artificial Sequence: Synthetic peptide
  Seed: EWLKTRPILSPLTKG
EWLKLRPMLNPLVKG

SEQ ID NO: 207419 - protein, 15 aa, Artificial Sequence
  Description of Artificial Sequence: Synthetic peptide
  Seed: EWLKTRPILSPLTKG
EWLKLRPMLPPLAKG

SEQ ID NO: 207420 - protein, 15 aa, Artificial Sequence
  Description of Artificial Sequence: Synthetic peptide
  Seed: EWLKTRPILSPLTKG
EWLKLRPMLPPLSKG

SEQ ID NO: 207421 - protein, 15 aa, Artificial Sequence
  Description of Artificial Sequence: Synthetic peptide
  Seed: EWLKTRPILSPLTKG
EWLKLRPMLRPLAKG

SEQ ID NO: 207422 - protein, 15 aa, Artificial Sequence
  Description of Artificial Sequence: Synthetic peptide
  Seed: EWLKTRPILSPLTKG
EWLKLRPMLRPLIKG

SEQ ID NO: 207423 - protein, 15 aa, Artificial Sequence
  Description of Artificial Sequence: Synthetic peptide
  Seed: EWLKTRPILSPLTKG
EWLKLRPMLRPLVKG

SEQ ID NO: 207424 - protein, 15 aa, Artificial Sequence
  Description of Artificial Sequence: Synthetic peptide
  Seed: EWLKTRPILSPLTKG
EWLKLRPMLSPLAKG

SEQ ID NO: 207425 - protein, 15 aa, Artificial Sequence
  Description of Artificial Sequence: Synthetic peptide
  Seed: EWLKTRPILSPLTKG
EWLKLRPMLSPLDKG

SEQ ID NO: 207426 - protein, 15 aa, Artificial Sequence
  Description of Artificial Sequence: Synthetic peptide
  Seed: EWLKTRPILSPLTKG
EWLKLRPMLSPLEKG

SEQ ID NO: 207427 - protein, 15 aa, Artificial Sequence
  Description of Artificial Sequence: Synthetic peptide
  Seed: EWLKTRPILSPLTKG
EWLKLRPMLSPLGKG

SEQ ID NO: 207428 - protein, 15 aa, Artificial Sequence
  Description of Artificial Sequence: Synthetic peptide
  Seed: EWLKTRPILSPLTKG
EWLKLRPMLSPLHKG

SEQ ID NO: 207429 - protein, 15 aa, Artificial Sequence
  Description of Artificial Sequence: Synthetic peptide
  Seed: EWLKTRPILSPLTKG
EWLKLRPMLSPLIKG

SEQ ID NO: 207430 - protein, 15 aa, Artificial Sequence
  Description of Artificial Sequence: Synthetic peptide
  Seed: EWLKTRPILSPLTKG
EWLKLRPMLSPLLKG

SEQ ID NO: 207431 - protein, 15 aa, Artificial Sequence
  Description of Artificial Sequence: Synthetic peptide
  Seed: EWLKTRPILSPLTKG
EWLKLRPMLSPLMKG

SEQ ID NO: 207432 - protein, 15 aa, Artificial Sequence
  Description of Artificial Sequence: Synthetic peptide
  Seed: EWLKTRPILSPLTKG
EWLKLRPMLSPLNKG

SEQ ID NO: 207433 - protein, 15 aa, Artificial Sequence
  Description of Artificial Sequence: Synthetic peptide
  Seed: EWLKTRPILSPLTKG
EWLKLRPMLSPLQKG

SEQ ID NO: 207434 - protein, 15 aa, Artificial Sequence
  Description of Artificial Sequence: Synthetic peptide
  Seed: EWLKTRPILSPLTKG
EWLKLRPMLSPLSKG

SEQ ID NO: 207435 - protein, 15 aa, Artificial Sequence
  Description of Artificial Sequence: Synthetic peptide
  Seed: EWLKTRPILSPLTKG
EWLKLRPMLSPLTKG

SEQ ID NO: 207436 - protein, 15 aa, Artificial Sequence
  Description of Artificial Sequence: Synthetic peptide
  Seed: EWLKTRPILSPLTKG
EWLKLRPMLSPLVKG

SEQ ID NO: 207437 - protein, 15 aa, Artificial Sequence
  Description of Artificial Sequence: Synthetic peptide
  Seed: EWLKTRPILSPLTKG
EWLKLRPMLTPLAKG

SEQ ID NO: 207438 - protein, 15 aa, Artificial Sequence
  Description of Artificial Sequence: Synthetic peptide
  Seed: EWLKTRPILSPLTKG
EWLKLRPMLTPLDKG

SEQ ID NO: 207439 - protein, 15 aa, Artificial Sequence
  Description of Artificial Sequence: Synthetic peptide
  Seed: EWLKTRPILSPLTKG
EWLKLRPMLTPLEKG

SEQ ID NO: 207440 - protein, 15 aa, Artificial Sequence
  Description of Artificial Sequence: Synthetic peptide
  Seed: EWLKTRPILSPLTKG
EWLKLRPMLTPLGKG

SEQ ID NO: 207441 - protein, 15 aa, Artificial Sequence
  Description of Artificial Sequence: Synthetic peptide
  Seed: EWLKTRPILSPLTKG
EWLKLRPMLTPLHKG

SEQ ID NO: 207442 - protein, 15 aa, Artificial Sequence
  Description of Artificial Sequence: Synthetic peptide
  Seed: EWLKTRPILSPLTKG
EWLKLRPMLTPLIKG

SEQ ID NO: 207443 - protein, 15 aa, Artificial Sequence
  Description of Artificial Sequence: Synthetic peptide
  Seed: EWLKTRPILSPLTKG
EWLKLRPMLTPLLKG

SEQ ID NO: 207444 - protein, 15 aa, Artificial Sequence
  Description of Artificial Sequence: Synthetic peptide
  Seed: EWLKTRPILSPLTKG
EWLKLRPMLTPLMKG

SEQ ID NO: 207445 - protein, 15 aa, Artificial Sequence
  Description of Artificial Sequence: Synthetic peptide
  Seed: EWLKTRPILSPLTKG
EWLKLRPMLTPLNKG

SEQ ID NO: 207446 - protein, 15 aa, Artificial Sequence
  Description of Artificial Sequence: Synthetic peptide
  Seed: EWLKTRPILSPLTKG
EWLKLRPMLTPLQKG

SEQ ID NO: 207447 - protein, 15 aa, Artificial Sequence
  Description of Artificial Sequence: Synthetic peptide
  Seed: EWLKTRPILSPLTKG
EWLKLRPMLTPLSKG

SEQ ID NO: 207448 - protein, 15 aa, Artificial Sequence
  Description of Artificial Sequence: Synthetic peptide
  Seed: EWLKTRPILSPLTKG
EWLKLRPMLTPLTKG

SEQ ID NO: 207449 - protein, 15 aa, Artificial Sequence
  Description of Artificial Sequence: Synthetic peptide
  Seed: EWLKTRPILSPLTKG
EWLKLRPMLTPLVKG

SEQ ID NO: 207450 - protein, 15 aa, Artificial Sequence
  Description of Artificial Sequence: Synthetic peptide
  Seed: EWLKTRPILSPLTKG
EWLKLRPMLVPLAKG

SEQ ID NO: 207451 - protein, 15 aa, Artificial Sequence
  Description of Artificial Sequence: Synthetic peptide
  Seed: EWLKTRPILSPLTKG
EWLKLRPMLVPLDKG

SEQ ID NO: 207452 - protein, 15 aa, Artificial Sequence
  Description of Artificial Sequence: Synthetic peptide
  Seed: EWLKTRPILSPLTKG
EWLKLRPMLVPLEKG

SEQ ID NO: 207453 - protein, 15 aa, Artificial Sequence
  Description of Artificial Sequence: Synthetic peptide
  Seed: EWLKTRPILSPLTKG
EWLKLRPMLVPLGKG

SEQ ID NO: 207454 - protein, 15 aa, Artificial Sequence
  Description of Artificial Sequence: Synthetic peptide
  Seed: EWLKTRPILSPLTKG
EWLKLRPMLVPLHKG

SEQ ID NO: 207455 - protein, 15 aa, Artificial Sequence
  Description of Artificial Sequence: Synthetic peptide
  Seed: EWLKTRPILSPLTKG
EWLKLRPMLVPLQKG

SEQ ID NO: 207456 - protein, 15 aa, Artificial Sequence
  Description of Artificial Sequence: Synthetic peptide
  Seed: EWLKTRPILSPLTKG
EWLKLRPMLVPLSKG

SEQ ID NO: 207457 - protein, 15 aa, Artificial Sequence
  Description of Artificial Sequence: Synthetic peptide
  Seed: EWLKTRPILSPLTKG
EWLKLRPMLVPLTKG

SEQ ID NO: 207458 - protein, 15 aa, Artificial Sequence
  Description of Artificial Sequence: Synthetic peptide
  Seed: EWLKTRPILSPLTKG
EWLKLRPQLNPLAKG

SEQ ID NO: 207459 - protein, 15 aa, Artificial Sequence
  Description of Artificial Sequence: Synthetic peptide
  Seed: EWLKTRPILSPLTKG
EWLKLRPQLNPLSKG

SEQ ID NO: 207460 - protein, 15 aa, Artificial Sequence
  Description of Artificial Sequence: Synthetic peptide
  Seed: EWLKTRPILSPLTKG
EWLKLRPQLSPLAKG

SEQ ID NO: 207461 - protein, 15 aa, Artificial Sequence
  Description of Artificial Sequence: Synthetic peptide
  Seed: EWLKTRPILSPLTKG
EWLKLRPQLSPLSKG

SEQ ID NO: 207462 - protein, 15 aa, Artificial Sequence
  Description of Artificial Sequence: Synthetic peptide
  Seed: EWLKTRPILSPLTKG
EWLKLRPQLTPLAKG

SEQ ID NO: 207463 - protein, 15 aa, Artificial Sequence
  Description of Artificial Sequence: Synthetic peptide
  Seed: EWLKTRPILSPLTKG
EWLKLRPQLTPLSKG

SEQ ID NO: 207464 - protein, 15 aa, Artificial Sequence
  Description of Artificial Sequence: Synthetic peptide
  Seed: EWLKTRPILSPLTKG
EWLKLRPSLNPLAKG

SEQ ID NO: 207465 - protein, 15 aa, Artificial Sequence
  Description of Artificial Sequence: Synthetic peptide
  Seed: EWLKTRPILSPLTKG
EWLKLRPSLNPLSKG

SEQ ID NO: 207466 - protein, 15 aa, Artificial Sequence
  Description of Artificial Sequence: Synthetic peptide
  Seed: EWLKTRPILSPLTKG
EWLKLRPSLTPLAKG

SEQ ID NO: 207467 - protein, 15 aa, Artificial Sequence
  Description of Artificial Sequence: Synthetic peptide
  Seed: EWLKTRPILSPLTKG
EWLKLRPSLTPLSKG

SEQ ID NO: 207468 - protein, 15 aa, Artificial Sequence
  Description of Artificial Sequence: Synthetic peptide
  Seed: EWLKTRPILSPLTKG
EWLKLRPVLNPLAKG

SEQ ID NO: 207469 - protein, 15 aa, Artificial Sequence
  Description of Artificial Sequence: Synthetic peptide
  Seed: EWLKTRPILSPLTKG
EWLKLRPVLNPLGKG

SEQ ID NO: 207470 - protein, 15 aa, Artificial Sequence
  Description of Artificial Sequence: Synthetic peptide
  Seed: EWLKTRPILSPLTKG
EWLKLRPVLNPLQKG

SEQ ID NO: 207471 - protein, 15 aa, Artificial Sequence
  Description of Artificial Sequence: Synthetic peptide
  Seed: EWLKTRPILSPLTKG
EWLKLRPVLNPLSKG

SEQ ID NO: 207472 - protein, 15 aa, Artificial Sequence
  Description of Artificial Sequence: Synthetic peptide
  Seed: EWLKTRPILSPLTKG
EWLKLRPVLRPLAKG

SEQ ID NO: 207473 - protein, 15 aa, Artificial Sequence
  Description of Artificial Sequence: Synthetic peptide
  Seed: EWLKTRPILSPLTKG
EWLKLRPVLSPLAKG

SEQ ID NO: 207474 - protein, 15 aa, Artificial Sequence
  Description of Artificial Sequence: Synthetic peptide
  Seed: EWLKTRPILSPLTKG
EWLKLRPVLSPLGKG

SEQ ID NO: 207475 - protein, 15 aa, Artificial Sequence
  Description of Artificial Sequence: Synthetic peptide
  Seed: EWLKTRPILSPLTKG
EWLKLRPVLSPLSKG

SEQ ID NO: 207476 - protein, 15 aa, Artificial Sequence
  Description of Artificial Sequence: Synthetic peptide
  Seed: EWLKTRPILSPLTKG
EWLKLRPVLTPLAKG

SEQ ID NO: 207477 - protein, 15 aa, Artificial Sequence
  Description of Artificial Sequence: Synthetic peptide
  Seed: EWLKTRPILSPLTKG
EWLKLRPVLTPLGKG

SEQ ID NO: 207478 - protein, 15 aa, Artificial Sequence
  Description of Artificial Sequence: Synthetic peptide
  Seed: EWLKTRPILSPLTKG
EWLKLRPVLTPLQKG

SEQ ID NO: 207479 - protein, 15 aa, Artificial Sequence
  Description of Artificial Sequence: Synthetic peptide
  Seed: EWLKTRPILSPLTKG
EWLKLRPVLTPLSKG

SEQ ID NO: 207480 - protein, 15 aa, Artificial Sequence
  Description of Artificial Sequence: Synthetic peptide
  Seed: EWLKTRPILSPLTKG
EWLKMRPALNPLAKG

SEQ ID NO: 207481 - protein, 15 aa, Artificial Sequence
  Description of Artificial Sequence: Synthetic peptide
  Seed: EWLKTRPILSPLTKG
EWLKMRPALNPLSKG

SEQ ID NO: 207482 - protein, 15 aa, Artificial Sequence
  Description of Artificial Sequence: Synthetic peptide
  Seed: EWLKTRPILSPLTKG
EWLKMRPALSPLAKG

SEQ ID NO: 207483 - protein, 15 aa, Artificial Sequence
  Description of Artificial Sequence: Synthetic peptide
  Seed: EWLKTRPILSPLTKG
EWLKMRPALSPLSKG

SEQ ID NO: 207484 - protein, 15 aa, Artificial Sequence
  Description of Artificial Sequence: Synthetic peptide
  Seed: EWLKTRPILSPLTKG
EWLKMRPALTPLAKG

SEQ ID NO: 207485 - protein, 15 aa, Artificial Sequence
  Description of Artificial Sequence: Synthetic peptide
  Seed: EWLKTRPILSPLTKG
EWLKMRPALTPLSKG

SEQ ID NO: 207486 - protein, 15 aa, Artificial Sequence
  Description of Artificial Sequence: Synthetic peptide
  Seed: EWLKTRPILSPLTKG
EWLKMRPFLAPLRKG

SEQ ID NO: 207487 - protein, 15 aa, Artificial Sequence
  Description of Artificial Sequence: Synthetic peptide
  Seed: EWLKTRPILSPLTKG
EWLKMRPFLNPLAKG

SEQ ID NO: 207488 - protein, 15 aa, Artificial Sequence
  Description of Artificial Sequence: Synthetic peptide
  Seed: EWLKTRPILSPLTKG
EWLKMRPFLNPLSKG

SEQ ID NO: 207489 - protein, 15 aa, Artificial Sequence
  Description of Artificial Sequence: Synthetic peptide
  Seed: EWLKTRPILSPLTKG
EWLKMRPFLSPLAKG

SEQ ID NO: 207490 - protein, 15 aa, Artificial Sequence
  Description of Artificial Sequence: Synthetic peptide
  Seed: EWLKTRPILSPLTKG
EWLKMRPFLSPLSKG

SEQ ID NO: 207491 - protein, 15 aa, Artificial Sequence
  Description of Artificial Sequence: Synthetic peptide
  Seed: EWLKTRPILSPLTKG
EWLKMRPFLTPLAKG

SEQ ID NO: 207492 - protein, 15 aa, Artificial Sequence
  Description of Artificial Sequence: Synthetic peptide
  Seed: EWLKTRPILSPLTKG
EWLKMRPFLTPLGKG

SEQ ID NO: 207493 - protein, 15 aa, Artificial Sequence
  Description of Artificial Sequence: Synthetic peptide
  Seed: EWLKTRPILSPLTKG
EWLKMRPFLTPLSKG

SEQ ID NO: 207494 - protein, 15 aa, Artificial Sequence
  Description of Artificial Sequence: Synthetic peptide
  Seed: EWLKTRPILSPLTKG
EWLKMRPILAPLTKG

SEQ ID NO: 207495 - protein, 15 aa, Artificial Sequence
  Description of Artificial Sequence: Synthetic peptide
  Seed: EWLKTRPILSPLTKG
EWLKMRPILCPLTKG

SEQ ID NO: 207496 - protein, 15 aa, Artificial Sequence
  Description of Artificial Sequence: Synthetic peptide
  Seed: EWLKTRPILSPLTKG
EWLKMRPILGPLTKG

SEQ ID NO: 207497 - protein, 15 aa, Artificial Sequence
  Description of Artificial Sequence: Synthetic peptide
  Seed: EWLKTRPILSPLTKG
EWLKMRPILIPLTKG

SEQ ID NO: 207498 - protein, 15 aa, Artificial Sequence
  Description of Artificial Sequence: Synthetic peptide
  Seed: EWLKTRPILSPLTKG
EWLKMRPILLPLTKG

SEQ ID NO: 207499 - protein, 15 aa, Artificial Sequence
  Description of Artificial Sequence: Synthetic peptide
  Seed: EWLKTRPILSPLTKG
EWLKMRPILMPLTKG

SEQ ID NO: 207500 - protein, 15 aa, Artificial Sequence
  Description of Artificial Sequence: Synthetic peptide
  Seed: EWLKTRPILSPLTKG
EWLKMRPILNPLAKG

SEQ ID NO: 207501 - protein, 15 aa, Artificial Sequence
  Description of Artificial Sequence: Synthetic peptide
  Seed: EWLKTRPILSPLTKG
EWLKMRPILNPLGKG

SEQ ID NO: 207502 - protein, 15 aa, Artificial Sequence
  Description of Artificial Sequence: Synthetic peptide
  Seed: EWLKTRPILSPLTKG
EWLKMRPILNPLQKG

SEQ ID NO: 207503 - protein, 15 aa, Artificial Sequence
  Description of Artificial Sequence: Synthetic peptide
  Seed: EWLKTRPILSPLTKG
EWLKMRPILNPLSKG

SEQ ID NO: 207504 - protein, 15 aa, Artificial Sequence
  Description of Artificial Sequence: Synthetic peptide
  Seed: EWLKTRPILSPLTKG
EWLKMRPILNPLTKG

SEQ ID NO: 207505 - protein, 15 aa, Artificial Sequence
  Description of Artificial Sequence: Synthetic peptide
  Seed: EWLKTRPILSPLTKG
EWLKMRPILSPLAKG

SEQ ID NO: 207506 - protein, 15 aa, Artificial Sequence
  Description of Artificial Sequence: Synthetic peptide
  Seed: EWLKTRPILSPLTKG
EWLKMRPILSPLGKG

SEQ ID NO: 207507 - protein, 15 aa, Artificial Sequence
  Description of Artificial Sequence: Synthetic peptide
  Seed: EWLKTRPILSPLTKG
EWLKMRPILSPLQKG

SEQ ID NO: 207508 - protein, 15 aa, Artificial Sequence
  Description of Artificial Sequence: Synthetic peptide
  Seed: EWLKTRPILSPLTKG
EWLKMRPILSPLSKG

SEQ ID NO: 207509 - protein, 15 aa, Artificial Sequence
  Description of Artificial Sequence: Synthetic peptide
  Seed: EWLKTRPILSPLTKG
EWLKMRPILSPLTKG

SEQ ID NO: 207510 - protein, 15 aa, Artificial Sequence
  Description of Artificial Sequence: Synthetic peptide
  Seed: EWLKTRPILSPLTKG
EWLKMRPILTPLAKG

SEQ ID NO: 207511 - protein, 15 aa, Artificial Sequence
  Description of Artificial Sequence: Synthetic peptide
  Seed: EWLKTRPILSPLTKG
EWLKMRPILTPLGKG

SEQ ID NO: 207512 - protein, 15 aa, Artificial Sequence
  Description of Artificial Sequence: Synthetic peptide
  Seed: EWLKTRPILSPLTKG
EWLKMRPILTPLQKG

SEQ ID NO: 207513 - protein, 15 aa, Artificial Sequence
  Description of Artificial Sequence: Synthetic peptide
  Seed: EWLKTRPILSPLTKG
EWLKMRPILTPLSKG

SEQ ID NO: 207514 - protein, 15 aa, Artificial Sequence
  Description of Artificial Sequence: Synthetic peptide
  Seed: EWLKTRPILSPLTKG
EWLKMRPILTPLTKG

SEQ ID NO: 207515 - protein, 15 aa, Artificial Sequence
  Description of Artificial Sequence: Synthetic peptide
  Seed: EWLKTRPILSPLTKG
EWLKMRPILVPLAKG

SEQ ID NO: 207516 - protein, 15 aa, Artificial Sequence
  Description of Artificial Sequence: Synthetic peptide
  Seed: EWLKTRPILSPLTKG
EWLKMRPILVPLSKG

SEQ ID NO: 207517 - protein, 15 aa, Artificial Sequence
  Description of Artificial Sequence: Synthetic peptide
  Seed: EWLKTRPILSPLTKG
EWLKMRPILVPLTKG

SEQ ID NO: 207518 - protein, 15 aa, Artificial Sequence
  Description of Artificial Sequence: Synthetic peptide
  Seed: EWLKTRPILSPLTKG
EWLKMRPLLNPLAKG

SEQ ID NO: 207519 - protein, 15 aa, Artificial Sequence
  Description of Artificial Sequence: Synthetic peptide
  Seed: EWLKTRPILSPLTKG
EWLKMRPLLNPLGKG

SEQ ID NO: 207520 - protein, 15 aa, Artificial Sequence
  Description of Artificial Sequence: Synthetic peptide
  Seed: EWLKTRPILSPLTKG
EWLKMRPLLNPLSKG

SEQ ID NO: 207521 - protein, 15 aa, Artificial Sequence
  Description of Artificial Sequence: Synthetic peptide
  Seed: EWLKTRPILSPLTKG
EWLKMRPLLSPLAKG

SEQ ID NO: 207522 - protein, 15 aa, Artificial Sequence
  Description of Artificial Sequence: Synthetic peptide
  Seed: EWLKTRPILSPLTKG
EWLKMRPLLSPLGKG

SEQ ID NO: 207523 - protein, 15 aa, Artificial Sequence
  Description of Artificial Sequence: Synthetic peptide
  Seed: EWLKTRPILSPLTKG
EWLKMRPLLSPLSKG

SEQ ID NO: 207524 - protein, 15 aa, Artificial Sequence
  Description of Artificial Sequence: Synthetic peptide
  Seed: EWLKTRPILSPLTKG
EWLKMRPLLTPLAKG

SEQ ID NO: 207525 - protein, 15 aa, Artificial Sequence
  Description of Artificial Sequence: Synthetic peptide
  Seed: EWLKTRPILSPLTKG
EWLKMRPLLTPLGKG

SEQ ID NO: 207526 - protein, 15 aa, Artificial Sequence
  Description of Artificial Sequence: Synthetic peptide
  Seed: EWLKTRPILSPLTKG
EWLKMRPLLTPLQKG

SEQ ID NO: 207527 - protein, 15 aa, Artificial Sequence
  Description of Artificial Sequence: Synthetic peptide
  Seed: EWLKTRPILSPLTKG
EWLKMRPLLTPLSKG

SEQ ID NO: 207528 - protein, 15 aa, Artificial Sequence
  Description of Artificial Sequence: Synthetic peptide
  Seed: EWLKTRPILSPLTKG
EWLKMRPLLTPLTKG

SEQ ID NO: 207529 - protein, 15 aa, Artificial Sequence
  Description of Artificial Sequence: Synthetic peptide
  Seed: EWLKTRPILSPLTKG
EWLKMRPLLVPLAKG

SEQ ID NO: 207530 - protein, 15 aa, Artificial Sequence
  Description of Artificial Sequence: Synthetic peptide
  Seed: EWLKTRPILSPLTKG
EWLKMRPLLVPLSKG

SEQ ID NO: 207531 - protein, 15 aa, Artificial Sequence
  Description of Artificial Sequence: Synthetic peptide
  Seed: EWLKTRPILSPLTKG
EWLKMRPMLAPLAKG

SEQ ID NO: 207532 - protein, 15 aa, Artificial Sequence
  Description of Artificial Sequence: Synthetic peptide
  Seed: EWLKTRPILSPLTKG
EWLKMRPMLAPLSKG

SEQ ID NO: 207533 - protein, 15 aa, Artificial Sequence
  Description of Artificial Sequence: Synthetic peptide
  Seed: EWLKTRPILSPLTKG
EWLKMRPMLIPLAKG

SEQ ID NO: 207534 - protein, 15 aa, Artificial Sequence
  Description of Artificial Sequence: Synthetic peptide
  Seed: EWLKTRPILSPLTKG
EWLKMRPMLIPLSKG

SEQ ID NO: 207535 - protein, 15 aa, Artificial Sequence
  Description of Artificial Sequence: Synthetic peptide
  Seed: EWLKTRPILSPLTKG
EWLKMRPMLNPLAKG

SEQ ID NO: 207536 - protein, 15 aa, Artificial Sequence
  Description of Artificial Sequence: Synthetic peptide
  Seed: EWLKTRPILSPLTKG
EWLKMRPMLNPLDKG

SEQ ID NO: 207537 - protein, 15 aa, Artificial Sequence
  Description of Artificial Sequence: Synthetic peptide
  Seed: EWLKTRPILSPLTKG
EWLKMRPMLNPLEKG

SEQ ID NO: 207538 - protein, 15 aa, Artificial Sequence
  Description of Artificial Sequence: Synthetic peptide
  Seed: EWLKTRPILSPLTKG
EWLKMRPMLNPLGKG

SEQ ID NO: 207539 - protein, 15 aa, Artificial Sequence
  Description of Artificial Sequence: Synthetic peptide
  Seed: EWLKTRPILSPLTKG
EWLKMRPMLNPLHKG

SEQ ID NO: 207540 - protein, 15 aa, Artificial Sequence
  Description of Artificial Sequence: Synthetic peptide
  Seed: EWLKTRPILSPLTKG
EWLKMRPMLNPLQKG

SEQ ID NO: 207541 - protein, 15 aa, Artificial Sequence
  Description of Artificial Sequence: Synthetic peptide
  Seed: EWLKTRPILSPLTKG
EWLKMRPMLNPLSKG

SEQ ID NO: 207542 - protein, 15 aa, Artificial Sequence
  Description of Artificial Sequence: Synthetic peptide
  Seed: EWLKTRPILSPLTKG
EWLKMRPMLNPLTKG

SEQ ID NO: 207543 - protein, 15 aa, Artificial Sequence
  Description of Artificial Sequence: Synthetic peptide
  Seed: EWLKTRPILSPLTKG
EWLKMRPMLNPLVKG

SEQ ID NO: 207544 - protein, 15 aa, Artificial Sequence
  Description of Artificial Sequence: Synthetic peptide
  Seed: EWLKTRPILSPLTKG
EWLKMRPMLSPLAKG

SEQ ID NO: 207545 - protein, 15 aa, Artificial Sequence
  Description of Artificial Sequence: Synthetic peptide
  Seed: EWLKTRPILSPLTKG
EWLKMRPMLSPLDKG

SEQ ID NO: 207546 - protein, 15 aa, Artificial Sequence
  Description of Artificial Sequence: Synthetic peptide
  Seed: EWLKTRPILSPLTKG
EWLKMRPMLSPLGKG

SEQ ID NO: 207547 - protein, 15 aa, Artificial Sequence
  Description of Artificial Sequence: Synthetic peptide
  Seed: EWLKTRPILSPLTKG
EWLKMRPMLSPLHKG

SEQ ID NO: 207548 - protein, 15 aa, Artificial Sequence
  Description of Artificial Sequence: Synthetic peptide
  Seed: EWLKTRPILSPLTKG
EWLKMRPMLSPLQKG

SEQ ID NO: 207549 - protein, 15 aa, Artificial Sequence
  Description of Artificial Sequence: Synthetic peptide
  Seed: EWLKTRPILSPLTKG
EWLKMRPMLSPLSKG

SEQ ID NO: 207550 - protein, 15 aa, Artificial Sequence
  Description of Artificial Sequence: Synthetic peptide
  Seed: EWLKTRPILSPLTKG
EWLKMRPMLSPLTKG

SEQ ID NO: 207551 - protein, 15 aa, Artificial Sequence
  Description of Artificial Sequence: Synthetic peptide
  Seed: EWLKTRPILSPLTKG
EWLKMRPMLTPLAKG

SEQ ID NO: 207552 - protein, 15 aa, Artificial Sequence
  Description of Artificial Sequence: Synthetic peptide
  Seed: EWLKTRPILSPLTKG
EWLKMRPMLTPLDKG

SEQ ID NO: 207553 - protein, 15 aa, Artificial Sequence
  Description of Artificial Sequence: Synthetic peptide
  Seed: EWLKTRPILSPLTKG
EWLKMRPMLTPLEKG

SEQ ID NO: 207554 - protein, 15 aa, Artificial Sequence
  Description of Artificial Sequence: Synthetic peptide
  Seed: EWLKTRPILSPLTKG
EWLKMRPMLTPLGKG

SEQ ID NO: 207555 - protein, 15 aa, Artificial Sequence
  Description of Artificial Sequence: Synthetic peptide
  Seed: EWLKTRPILSPLTKG
EWLKMRPMLTPLHKG

SEQ ID NO: 207556 - protein, 15 aa, Artificial Sequence
  Description of Artificial Sequence: Synthetic peptide
  Seed: EWLKTRPILSPLTKG
EWLKMRPMLTPLMKG

SEQ ID NO: 207557 - protein, 15 aa, Artificial Sequence
  Description of Artificial Sequence: Synthetic peptide
  Seed: EWLKTRPILSPLTKG
EWLKMRPMLTPLQKG

SEQ ID NO: 207558 - protein, 15 aa, Artificial Sequence
  Description of Artificial Sequence: Synthetic peptide
  Seed: EWLKTRPILSPLTKG
EWLKMRPMLTPLSKG

SEQ ID NO: 207559 - protein, 15 aa, Artificial Sequence
  Description of Artificial Sequence: Synthetic peptide
  Seed: EWLKTRPILSPLTKG
EWLKMRPMLTPLTKG

SEQ ID NO: 207560 - protein, 15 aa, Artificial Sequence
  Description of Artificial Sequence: Synthetic peptide
  Seed: EWLKTRPILSPLTKG
EWLKMRPMLTPLVKG

SEQ ID NO: 207561 - protein, 15 aa, Artificial Sequence
  Description of Artificial Sequence: Synthetic peptide
  Seed: EWLKTRPILSPLTKG
EWLKMRPMLVPLAKG

SEQ ID NO: 207562 - protein, 15 aa, Artificial Sequence
  Description of Artificial Sequence: Synthetic peptide
  Seed: EWLKTRPILSPLTKG
EWLKMRPMLVPLGKG

SEQ ID NO: 207563 - protein, 15 aa, Artificial Sequence
  Description of Artificial Sequence: Synthetic peptide
  Seed: EWLKTRPILSPLTKG
EWLKMRPMLVPLQKG

SEQ ID NO: 207564 - protein, 15 aa, Artificial Sequence
  Description of Artificial Sequence: Synthetic peptide
  Seed: EWLKTRPILSPLTKG
EWLKMRPMLVPLSKG

SEQ ID NO: 207565 - protein, 15 aa, Artificial Sequence
  Description of Artificial Sequence: Synthetic peptide
  Seed: EWLKTRPILSPLTKG
EWLKMRPQLNPLAKG

SEQ ID NO: 207566 - protein, 15 aa, Artificial Sequence
  Description of Artificial Sequence: Synthetic peptide
  Seed: EWLKTRPILSPLTKG
EWLKMRPVLNPLAKG

SEQ ID NO: 207567 - protein, 15 aa, Artificial Sequence
  Description of Artificial Sequence: Synthetic peptide
  Seed: EWLKTRPILSPLTKG
EWLKMRPVLNPLSKG

SEQ ID NO: 207568 - protein, 15 aa, Artificial Sequence
  Description of Artificial Sequence: Synthetic peptide
  Seed: EWLKTRPILSPLTKG
EWLKMRPVLSPLAKG

SEQ ID NO: 207569 - protein, 15 aa, Artificial Sequence
  Description of Artificial Sequence: Synthetic peptide
  Seed: EWLKTRPILSPLTKG
EWLKMRPVLSPLSKG

SEQ ID NO: 207570 - protein, 15 aa, Artificial Sequence
  Description of Artificial Sequence: Synthetic peptide
  Seed: EWLKTRPILSPLTKG
EWLKMRPVLTPLAKG

SEQ ID NO: 207571 - protein, 15 aa, Artificial Sequence
  Description of Artificial Sequence: Synthetic peptide
  Seed: EWLKTRPILSPLTKG
EWLKMRPVLTPLSKG

SEQ ID NO: 207572 - protein, 15 aa, Artificial Sequence
  Description of Artificial Sequence: Synthetic peptide
  Seed: EWLKTRPILSPLTKG
EWLKQRPILAPLTKG

SEQ ID NO: 207573 - protein, 15 aa, Artificial Sequence
  Description of Artificial Sequence: Synthetic peptide
  Seed: EWLKTRPILSPLTKG
EWLKQRPILIPLTKG

SEQ ID NO: 207574 - protein, 15 aa, Artificial Sequence
  Description of Artificial Sequence: Synthetic peptide
  Seed: EWLKTRPILSPLTKG
EWLKQRPILLPLTKG

SEQ ID NO: 207575 - protein, 15 aa, Artificial Sequence
  Description of Artificial Sequence: Synthetic peptide
  Seed: EWLKTRPILSPLTKG
EWLKQRPILVPLTKG

SEQ ID NO: 207576 - protein, 15 aa, Artificial Sequence
  Description of Artificial Sequence: Synthetic peptide
  Seed: EWLKTRPILSPLTKG
EWLKSRPILAPLTKG

SEQ ID NO: 207577 - protein, 15 aa, Artificial Sequence
  Description of Artificial Sequence: Synthetic peptide
  Seed: EWLKTRPILSPLTKG
EWLKSRPILIPLTKG

SEQ ID NO: 207578 - protein, 15 aa, Artificial Sequence
  Description of Artificial Sequence: Synthetic peptide
  Seed: EWLKTRPILSPLTKG
EWLKSRPILLPLTKG

SEQ ID NO: 207579 - protein, 15 aa, Artificial Sequence
  Description of Artificial Sequence: Synthetic peptide
  Seed: EWLKTRPILSPLTKG
EWLKSRPILVPLTKG

SEQ ID NO: 207580 - protein, 15 aa, Artificial Sequence
  Description of Artificial Sequence: Synthetic peptide
  Seed: EWLKTRPILSPLTKG
EWLKTRPILAPLTKG

SEQ ID NO: 207581 - protein, 15 aa, Artificial Sequence
  Description of Artificial Sequence: Synthetic peptide
  Seed: EWLKTRPILSPLTKG
EWLKTRPILIPLTKG

SEQ ID NO: 207582 - protein, 15 aa, Artificial Sequence
  Description of Artificial Sequence: Synthetic peptide
  Seed: EWLKTRPILSPLTKG
EWLKTRPILLPLTKG

SEQ ID NO: 207583 - protein, 15 aa, Artificial Sequence
  Description of Artificial Sequence: Synthetic peptide
  Seed: EWLKTRPILSPLTKG
EWLKTRPILVPLTKG

SEQ ID NO: 207584 - protein, 15 aa, Artificial Sequence
  Description of Artificial Sequence: Synthetic peptide
  Seed: EWLKTRPILSPLTKG
EWLKVRPALNPLAKG

SEQ ID NO: 207585 - protein, 15 aa, Artificial Sequence
  Description of Artificial Sequence: Synthetic peptide
  Seed: EWLKTRPILSPLTKG
EWLKVRPALNPLSKG

SEQ ID NO: 207586 - protein, 15 aa, Artificial Sequence
  Description of Artificial Sequence: Synthetic peptide
  Seed: EWLKTRPILSPLTKG
EWLKVRPALSPLAKG

SEQ ID NO: 207587 - protein, 15 aa, Artificial Sequence
  Description of Artificial Sequence: Synthetic peptide
  Seed: EWLKTRPILSPLTKG
EWLKVRPALSPLSKG

SEQ ID NO: 207588 - protein, 15 aa, Artificial Sequence
  Description of Artificial Sequence: Synthetic peptide
  Seed: EWLKTRPILSPLTKG
EWLKVRPALTPLAKG

SEQ ID NO: 207589 - protein, 15 aa, Artificial Sequence
  Description of Artificial Sequence: Synthetic peptide
  Seed: EWLKTRPILSPLTKG
EWLKVRPALTPLSKG

SEQ ID NO: 207590 - protein, 15 aa, Artificial Sequence
  Description of Artificial Sequence: Synthetic peptide
  Seed: EWLKTRPILSPLTKG
EWLKVRPFLNPLAKG

SEQ ID NO: 207591 - protein, 15 aa, Artificial Sequence
  Description of Artificial Sequence: Synthetic peptide
  Seed: EWLKTRPILSPLTKG
EWLKVRPFLSPLAKG

SEQ ID NO: 207592 - protein, 15 aa, Artificial Sequence
  Description of Artificial Sequence: Synthetic peptide
  Seed: EWLKTRPILSPLTKG
EWLKVRPFLTPLAKG

SEQ ID NO: 207593 - protein, 15 aa, Artificial Sequence
  Description of Artificial Sequence: Synthetic peptide
  Seed: EWLKTRPILSPLTKG
EWLKVRPFLTPLSKG

SEQ ID NO: 207594 - protein, 15 aa, Artificial Sequence
  Description of Artificial Sequence: Synthetic peptide
  Seed: EWLKTRPILSPLTKG
EWLKVRPILIPLTKG

SEQ ID NO: 207595 - protein, 15 aa, Artificial Sequence
  Description of Artificial Sequence: Synthetic peptide
  Seed: EWLKTRPILSPLTKG
EWLKVRPILLPLTKG

SEQ ID NO: 207596 - protein, 15 aa, Artificial Sequence
  Description of Artificial Sequence: Synthetic peptide
  Seed: EWLKTRPILSPLTKG
EWLKVRPILMPLTKG

SEQ ID NO: 207597 - protein, 15 aa, Artificial Sequence
  Description of Artificial Sequence: Synthetic peptide
  Seed: EWLKTRPILSPLTKG
EWLKVRPILNPLAKG

SEQ ID NO: 207598 - protein, 15 aa, Artificial Sequence
  Description of Artificial Sequence: Synthetic peptide
  Seed: EWLKTRPILSPLTKG
EWLKVRPILNPLGKG

SEQ ID NO: 207599 - protein, 15 aa, Artificial Sequence
  Description of Artificial Sequence: Synthetic peptide
  Seed: EWLKTRPILSPLTKG
EWLKVRPILNPLQKG

SEQ ID NO: 207600 - protein, 15 aa, Artificial Sequence
  Description of Artificial Sequence: Synthetic peptide
  Seed: EWLKTRPILSPLTKG
EWLKVRPILNPLSKG

SEQ ID NO: 207601 - protein, 15 aa, Artificial Sequence
  Description of Artificial Sequence: Synthetic peptide
  Seed: EWLKTRPILSPLTKG
EWLKVRPILNPLTKG

SEQ ID NO: 207602 - protein, 15 aa, Artificial Sequence
  Description of Artificial Sequence: Synthetic peptide
  Seed: EWLKTRPILSPLTKG
EWLKVRPILRPLAKG

SEQ ID NO: 207603 - protein, 15 aa, Artificial Sequence
  Description of Artificial Sequence: Synthetic peptide
  Seed: EWLKTRPILSPLTKG
EWLKVRPILRPLVKG

SEQ ID NO: 207604 - protein, 15 aa, Artificial Sequence
  Description of Artificial Sequence: Synthetic peptide
  Seed: EWLKTRPILSPLTKG
EWLKVRPILSPLAKG

SEQ ID NO: 207605 - protein, 15 aa, Artificial Sequence
  Description of Artificial Sequence: Synthetic peptide
  Seed: EWLKTRPILSPLTKG
EWLKVRPILSPLGKG

SEQ ID NO: 207606 - protein, 15 aa, Artificial Sequence
  Description of Artificial Sequence: Synthetic peptide
  Seed: EWLKTRPILSPLTKG
EWLKVRPILSPLSKG

SEQ ID NO: 207607 - protein, 15 aa, Artificial Sequence
  Description of Artificial Sequence: Synthetic peptide
  Seed: EWLKTRPILSPLTKG
EWLKVRPILTPLAKG

SEQ ID NO: 207608 - protein, 15 aa, Artificial Sequence
  Description of Artificial Sequence: Synthetic peptide
  Seed: EWLKTRPILSPLTKG
EWLKVRPILTPLGKG

SEQ ID NO: 207609 - protein, 15 aa, Artificial Sequence
  Description of Artificial Sequence: Synthetic peptide
  Seed: EWLKTRPILSPLTKG
EWLKVRPILTPLQKG

SEQ ID NO: 207610 - protein, 15 aa, Artificial Sequence
  Description of Artificial Sequence: Synthetic peptide
  Seed: EWLKTRPILSPLTKG
EWLKVRPILTPLSKG

SEQ ID NO: 207611 - protein, 15 aa, Artificial Sequence
  Description of Artificial Sequence: Synthetic peptide
  Seed: EWLKTRPILSPLTKG
EWLKVRPILTPLTKG

SEQ ID NO: 207612 - protein, 15 aa, Artificial Sequence
  Description of Artificial Sequence: Synthetic peptide
  Seed: EWLKTRPILSPLTKG
EWLKVRPILVPLAKG

SEQ ID NO: 207613 - protein, 15 aa, Artificial Sequence
  Description of Artificial Sequence: Synthetic peptide
  Seed: EWLKTRPILSPLTKG
EWLKVRPILVPLSKG

SEQ ID NO: 207614 - protein, 15 aa, Artificial Sequence
  Description of Artificial Sequence: Synthetic peptide
  Seed: EWLKTRPILSPLTKG
EWLKVRPILVPLTKG

SEQ ID NO: 207615 - protein, 15 aa, Artificial Sequence
  Description of Artificial Sequence: Synthetic peptide
  Seed: EWLKTRPILSPLTKG
EWLKVRPLLNPLAKG

SEQ ID NO: 207616 - protein, 15 aa, Artificial Sequence
  Description of Artificial Sequence: Synthetic peptide
  Seed: EWLKTRPILSPLTKG
EWLKVRPLLNPLGKG

SEQ ID NO: 207617 - protein, 15 aa, Artificial Sequence
  Description of Artificial Sequence: Synthetic peptide
  Seed: EWLKTRPILSPLTKG
EWLKVRPLLNPLQKG

SEQ ID NO: 207618 - protein, 15 aa, Artificial Sequence
  Description of Artificial Sequence: Synthetic peptide
  Seed: EWLKTRPILSPLTKG
EWLKVRPLLNPLSKG

SEQ ID NO: 207619 - protein, 15 aa, Artificial Sequence
  Description of Artificial Sequence: Synthetic peptide
  Seed: EWLKTRPILSPLTKG
EWLKVRPLLNPLTKG

SEQ ID NO: 207620 - protein, 15 aa, Artificial Sequence
  Description of Artificial Sequence: Synthetic peptide
  Seed: EWLKTRPILSPLTKG
EWLKVRPLLRPLAKG

SEQ ID NO: 207621 - protein, 15 aa, Artificial Sequence
  Description of Artificial Sequence: Synthetic peptide
  Seed: EWLKTRPILSPLTKG
EWLKVRPLLRPLVKG

SEQ ID NO: 207622 - protein, 15 aa, Artificial Sequence
  Description of Artificial Sequence: Synthetic peptide
  Seed: EWLKTRPILSPLTKG
EWLKVRPLLSPLAKG

SEQ ID NO: 207623 - protein, 15 aa, Artificial Sequence
  Description of Artificial Sequence: Synthetic peptide
  Seed: EWLKTRPILSPLTKG
EWLKVRPLLSPLGKG

SEQ ID NO: 207624 - protein, 15 aa, Artificial Sequence
  Description of Artificial Sequence: Synthetic peptide
  Seed: EWLKTRPILSPLTKG
EWLKVRPLLSPLSKG

SEQ ID NO: 207625 - protein, 15 aa, Artificial Sequence
  Description of Artificial Sequence: Synthetic peptide
  Seed: EWLKTRPILSPLTKG
EWLKVRPLLTPLAKG

SEQ ID NO: 207626 - protein, 15 aa, Artificial Sequence
  Description of Artificial Sequence: Synthetic peptide
  Seed: EWLKTRPILSPLTKG
EWLKVRPLLTPLGKG

SEQ ID NO: 207627 - protein, 15 aa, Artificial Sequence
  Description of Artificial Sequence: Synthetic peptide
  Seed: EWLKTRPILSPLTKG
EWLKVRPLLTPLQKG

SEQ ID NO: 207628 - protein, 15 aa, Artificial Sequence
  Description of Artificial Sequence: Synthetic peptide
  Seed: EWLKTRPILSPLTKG
EWLKVRPLLTPLSKG

SEQ ID NO: 207629 - protein, 15 aa, Artificial Sequence
  Description of Artificial Sequence: Synthetic peptide
  Seed: EWLKTRPILSPLTKG
EWLKVRPLLTPLTKG

SEQ ID NO: 207630 - protein, 15 aa, Artificial Sequence
  Description of Artificial Sequence: Synthetic peptide
  Seed: EWLKTRPILSPLTKG
EWLKVRPLLVPLAKG

SEQ ID NO: 207631 - protein, 15 aa, Artificial Sequence
  Description of Artificial Sequence: Synthetic peptide
  Seed: EWLKTRPILSPLTKG
EWLKVRPLLVPLSKG

SEQ ID NO: 207632 - protein, 15 aa, Artificial Sequence
  Description of Artificial Sequence: Synthetic peptide
  Seed: EWLKTRPILSPLTKG
EWLKVRPMLAPLAKG

SEQ ID NO: 207633 - protein, 15 aa, Artificial Sequence
  Description of Artificial Sequence: Synthetic peptide
  Seed: EWLKTRPILSPLTKG
EWLKVRPMLIPLAKG

SEQ ID NO: 207634 - protein, 15 aa, Artificial Sequence
  Description of Artificial Sequence: Synthetic peptide
  Seed: EWLKTRPILSPLTKG
EWLKVRPMLIPLSKG

SEQ ID NO: 207635 - protein, 15 aa, Artificial Sequence
  Description of Artificial Sequence: Synthetic peptide
  Seed: EWLKTRPILSPLTKG
EWLKVRPMLNPLAKG

SEQ ID NO: 207636 - protein, 15 aa, Artificial Sequence
  Description of Artificial Sequence: Synthetic peptide
  Seed: EWLKTRPILSPLTKG
EWLKVRPMLNPLGKG

SEQ ID NO: 207637 - protein, 15 aa, Artificial Sequence
  Description of Artificial Sequence: Synthetic peptide
  Seed: EWLKTRPILSPLTKG
EWLKVRPMLNPLHKG

SEQ ID NO: 207638 - protein, 15 aa, Artificial Sequence
  Description of Artificial Sequence: Synthetic peptide
  Seed: EWLKTRPILSPLTKG
EWLKVRPMLNPLMKG

SEQ ID NO: 207639 - protein, 15 aa, Artificial Sequence
  Description of Artificial Sequence: Synthetic peptide
  Seed: EWLKTRPILSPLTKG
EWLKVRPMLNPLNKG

SEQ ID NO: 207640 - protein, 15 aa, Artificial Sequence
  Description of Artificial Sequence: Synthetic peptide
  Seed: EWLKTRPILSPLTKG
EWLKVRPMLNPLQKG

SEQ ID NO: 207641 - protein, 15 aa, Artificial Sequence
  Description of Artificial Sequence: Synthetic peptide
  Seed: EWLKTRPILSPLTKG
EWLKVRPMLNPLSKG

SEQ ID NO: 207642 - protein, 15 aa, Artificial Sequence
  Description of Artificial Sequence: Synthetic peptide
  Seed: EWLKTRPILSPLTKG
EWLKVRPMLNPLTKG

SEQ ID NO: 207643 - protein, 15 aa, Artificial Sequence
  Description of Artificial Sequence: Synthetic peptide
  Seed: EWLKTRPILSPLTKG
EWLKVRPMLNPLVKG

SEQ ID NO: 207644 - protein, 15 aa, Artificial Sequence
  Description of Artificial Sequence: Synthetic peptide
  Seed: EWLKTRPILSPLTKG
EWLKVRPMLRPLAKG

SEQ ID NO: 207645 - protein, 15 aa, Artificial Sequence
  Description of Artificial Sequence: Synthetic peptide
  Seed: EWLKTRPILSPLTKG
EWLKVRPMLRPLVKG

SEQ ID NO: 207646 - protein, 15 aa, Artificial Sequence
  Description of Artificial Sequence: Synthetic peptide
  Seed: EWLKTRPILSPLTKG
EWLKVRPMLSPLAKG

SEQ ID NO: 207647 - protein, 15 aa, Artificial Sequence
  Description of Artificial Sequence: Synthetic peptide
  Seed: EWLKTRPILSPLTKG
EWLKVRPMLSPLGKG

SEQ ID NO: 207648 - protein, 15 aa, Artificial Sequence
  Description of Artificial Sequence: Synthetic peptide
  Seed: EWLKTRPILSPLTKG
EWLKVRPMLSPLHKG

SEQ ID NO: 207649 - protein, 15 aa, Artificial Sequence
  Description of Artificial Sequence: Synthetic peptide
  Seed: EWLKTRPILSPLTKG
EWLKVRPMLSPLQKG

SEQ ID NO: 207650 - protein, 15 aa, Artificial Sequence
  Description of Artificial Sequence: Synthetic peptide
  Seed: EWLKTRPILSPLTKG
EWLKVRPMLSPLSKG

SEQ ID NO: 207651 - protein, 15 aa, Artificial Sequence
  Description of Artificial Sequence: Synthetic peptide
  Seed: EWLKTRPILSPLTKG
EWLKVRPMLSPLTKG

SEQ ID NO: 207652 - protein, 15 aa, Artificial Sequence
  Description of Artificial Sequence: Synthetic peptide
  Seed: EWLKTRPILSPLTKG
EWLKVRPMLTPLAKG

SEQ ID NO: 207653 - protein, 15 aa, Artificial Sequence
  Description of Artificial Sequence: Synthetic peptide
  Seed: EWLKTRPILSPLTKG
EWLKVRPMLTPLGKG

SEQ ID NO: 207654 - protein, 15 aa, Artificial Sequence
  Description of Artificial Sequence: Synthetic peptide
  Seed: EWLKTRPILSPLTKG
EWLKVRPMLTPLHKG

SEQ ID NO: 207655 - protein, 15 aa, Artificial Sequence
  Description of Artificial Sequence: Synthetic peptide
  Seed: EWLKTRPILSPLTKG
EWLKVRPMLTPLMKG

SEQ ID NO: 207656 - protein, 15 aa, Artificial Sequence
  Description of Artificial Sequence: Synthetic peptide
  Seed: EWLKTRPILSPLTKG
EWLKVRPMLTPLQKG

SEQ ID NO: 207657 - protein, 15 aa, Artificial Sequence
  Description of Artificial Sequence: Synthetic peptide
  Seed: EWLKTRPILSPLTKG
EWLKVRPMLTPLSKG

SEQ ID NO: 207658 - protein, 15 aa, Artificial Sequence
  Description of Artificial Sequence: Synthetic peptide
  Seed: EWLKTRPILSPLTKG
EWLKVRPMLTPLTKG

SEQ ID NO: 207659 - protein, 15 aa, Artificial Sequence
  Description of Artificial Sequence: Synthetic peptide
  Seed: EWLKTRPILSPLTKG
EWLKVRPMLTPLVKG

SEQ ID NO: 207660 - protein, 15 aa, Artificial Sequence
  Description of Artificial Sequence: Synthetic peptide
  Seed: EWLKTRPILSPLTKG
EWLKVRPMLVPLAKG

SEQ ID NO: 207661 - protein, 15 aa, Artificial Sequence
  Description of Artificial Sequence: Synthetic peptide
  Seed: EWLKTRPILSPLTKG
EWLKVRPMLVPLSKG

SEQ ID NO: 207662 - protein, 15 aa, Artificial Sequence
  Description of Artificial Sequence: Synthetic peptide
  Seed: EWLKTRPILSPLTKG
EWLKVRPQLNPLAKG

SEQ ID NO: 207663 - protein, 15 aa, Artificial Sequence
  Description of Artificial Sequence: Synthetic peptide
  Seed: EWLKTRPILSPLTKG
EWLKVRPVLNPLAKG

SEQ ID NO: 207664 - protein, 15 aa, Artificial Sequence
  Description of Artificial Sequence: Synthetic peptide
  Seed: EWLKTRPILSPLTKG
EWLKVRPVLNPLGKG

SEQ ID NO: 207665 - protein, 15 aa, Artificial Sequence
  Description of Artificial Sequence: Synthetic peptide
  Seed: EWLKTRPILSPLTKG
EWLKVRPVLNPLSKG

SEQ ID NO: 207666 - protein, 15 aa, Artificial Sequence
  Description of Artificial Sequence: Synthetic peptide
  Seed: EWLKTRPILSPLTKG
EWLKVRPVLSPLAKG

SEQ ID NO: 207667 - protein, 15 aa, Artificial Sequence
  Description of Artificial Sequence: Synthetic peptide
  Seed: EWLKTRPILSPLTKG
EWLKVRPVLSPLSKG

SEQ ID NO: 207668 - protein, 15 aa, Artificial Sequence
  Description of Artificial Sequence: Synthetic peptide
  Seed: EWLKTRPILSPLTKG
EWLKVRPVLTPLAKG

SEQ ID NO: 207669 - protein, 15 aa, Artificial Sequence
  Description of Artificial Sequence: Synthetic peptide
  Seed: EWLKTRPILSPLTKG
EWLKVRPVLTPLSKG

SEQ ID NO: 207670 - protein, 15 aa, Artificial Sequence
  Description of Artificial Sequence: Synthetic peptide
  Seed: EWLKTRPILSPLTKG
EWLKWRPALNPLAKG

SEQ ID NO: 207671 - protein, 15 aa, Artificial Sequence
  Description of Artificial Sequence: Synthetic peptide
  Seed: EWLKTRPILSPLTKG
EWLKWRPALNPLSKG

SEQ ID NO: 207672 - protein, 15 aa, Artificial Sequence
  Description of Artificial Sequence: Synthetic peptide
  Seed: EWLKTRPILSPLTKG
EWLKWRPALSPLLKG

SEQ ID NO: 207673 - protein, 15 aa, Artificial Sequence
  Description of Artificial Sequence: Synthetic peptide
  Seed: EWLKTRPILSPLTKG
EWLKWRPALSPLVKG

SEQ ID NO: 207674 - protein, 15 aa, Artificial Sequence
  Description of Artificial Sequence: Synthetic peptide
  Seed: EWLKTRPILSPLTKG
EWLKWRPALTPLAKG

SEQ ID NO: 207675 - protein, 15 aa, Artificial Sequence
  Description of Artificial Sequence: Synthetic peptide
  Seed: EWLKTRPILSPLTKG
EWLKWRPALTPLSKG

SEQ ID NO: 207676 - protein, 15 aa, Artificial Sequence
  Description of Artificial Sequence: Synthetic peptide
  Seed: EWLKTRPILSPLTKG
EWLKWRPFLSPLAKG

SEQ ID NO: 207677 - protein, 15 aa, Artificial Sequence
  Description of Artificial Sequence: Synthetic peptide
  Seed: EWLKTRPILSPLTKG
EWLKWRPFLSPLIKG

SEQ ID NO: 207678 - protein, 15 aa, Artificial Sequence
  Description of Artificial Sequence: Synthetic peptide
  Seed: EWLKTRPILSPLTKG
EWLKWRPFLSPLLKG

SEQ ID NO: 207679 - protein, 15 aa, Artificial Sequence
  Description of Artificial Sequence: Synthetic peptide
  Seed: EWLKTRPILSPLTKG
EWLKWRPFLSPLVKG

SEQ ID NO: 207680 - protein, 15 aa, Artificial Sequence
  Description of Artificial Sequence: Synthetic peptide
  Seed: EWLKTRPILSPLTKG
EWLKWRPILNPLAKG

SEQ ID NO: 207681 - protein, 15 aa, Artificial Sequence
  Description of Artificial Sequence: Synthetic peptide
  Seed: EWLKTRPILSPLTKG
EWLKWRPILNPLSKG

SEQ ID NO: 207682 - protein, 15 aa, Artificial Sequence
  Description of Artificial Sequence: Synthetic peptide
  Seed: EWLKTRPILSPLTKG
EWLKWRPILSPLAKG

SEQ ID NO: 207683 - protein, 15 aa, Artificial Sequence
  Description of Artificial Sequence: Synthetic peptide
  Seed: EWLKTRPILSPLTKG
EWLKWRPILSPLIKG

SEQ ID NO: 207684 - protein, 15 aa, Artificial Sequence
  Description of Artificial Sequence: Synthetic peptide
  Seed: EWLKTRPILSPLTKG
EWLKWRPILSPLLKG

SEQ ID NO: 207685 - protein, 15 aa, Artificial Sequence
  Description of Artificial Sequence: Synthetic peptide
  Seed: EWLKTRPILSPLTKG
EWLKWRPILSPLSKG

SEQ ID NO: 207686 - protein, 15 aa, Artificial Sequence
  Description of Artificial Sequence: Synthetic peptide
  Seed: EWLKTRPILSPLTKG
EWLKWRPILSPLVKG

SEQ ID NO: 207687 - protein, 15 aa, Artificial Sequence
  Description of Artificial Sequence: Synthetic peptide
  Seed: EWLKTRPILSPLTKG
EWLKWRPILTPLAKG

SEQ ID NO: 207688 - protein, 15 aa, Artificial Sequence
  Description of Artificial Sequence: Synthetic peptide
  Seed: EWLKTRPILSPLTKG
EWLKWRPILTPLSKG

SEQ ID NO: 207689 - protein, 15 aa, Artificial Sequence
  Description of Artificial Sequence: Synthetic peptide
  Seed: EWLKTRPILSPLTKG
EWLKWRPLLNPLAKG

SEQ ID NO: 207690 - protein, 15 aa, Artificial Sequence
  Description of Artificial Sequence: Synthetic peptide
  Seed: EWLKTRPILSPLTKG
EWLKWRPLLNPLSKG

SEQ ID NO: 207691 - protein, 15 aa, Artificial Sequence
  Description of Artificial Sequence: Synthetic peptide
  Seed: EWLKTRPILSPLTKG
EWLKWRPLLSPLAKG

SEQ ID NO: 207692 - protein, 15 aa, Artificial Sequence
  Description of Artificial Sequence: Synthetic peptide
  Seed: EWLKTRPILSPLTKG
EWLKWRPLLSPLIKG

SEQ ID NO: 207693 - protein, 15 aa, Artificial Sequence
  Description of Artificial Sequence: Synthetic peptide
  Seed: EWLKTRPILSPLTKG
EWLKWRPLLSPLLKG

SEQ ID NO: 207694 - protein, 15 aa, Artificial Sequence
  Description of Artificial Sequence: Synthetic peptide
  Seed: EWLKTRPILSPLTKG
EWLKWRPLLSPLSKG

SEQ ID NO: 207695 - protein, 15 aa, Artificial Sequence
  Description of Artificial Sequence: Synthetic peptide
  Seed: EWLKTRPILSPLTKG
EWLKWRPLLSPLVKG

SEQ ID NO: 207696 - protein, 15 aa, Artificial Sequence
  Description of Artificial Sequence: Synthetic peptide
  Seed: EWLKTRPILSPLTKG
EWLKWRPLLTPLAKG

SEQ ID NO: 207697 - protein, 15 aa, Artificial Sequence
  Description of Artificial Sequence: Synthetic peptide
  Seed: EWLKTRPILSPLTKG
EWLKWRPLLTPLSKG

SEQ ID NO: 207698 - protein, 15 aa, Artificial Sequence
  Description of Artificial Sequence: Synthetic peptide
  Seed: EWLKTRPILSPLTKG
EWLKWRPMLNPLAKG

SEQ ID NO: 207699 - protein, 15 aa, Artificial Sequence
  Description of Artificial Sequence: Synthetic peptide
  Seed: EWLKTRPILSPLTKG
EWLKWRPMLNPLSKG

SEQ ID NO: 207700 - protein, 15 aa, Artificial Sequence
  Description of Artificial Sequence: Synthetic peptide
  Seed: EWLKTRPILSPLTKG
EWLKWRPMLSPLAKG

SEQ ID NO: 207701 - protein, 15 aa, Artificial Sequence
  Description of Artificial Sequence: Synthetic peptide
  Seed: EWLKTRPILSPLTKG
EWLKWRPMLSPLIKG

SEQ ID NO: 207702 - protein, 15 aa, Artificial Sequence
  Description of Artificial Sequence: Synthetic peptide
  Seed: EWLKTRPILSPLTKG
EWLKWRPMLSPLLKG

SEQ ID NO: 207703 - protein, 15 aa, Artificial Sequence
  Description of Artificial Sequence: Synthetic peptide
  Seed: EWLKTRPILSPLTKG
EWLKWRPMLSPLSKG

SEQ ID NO: 207704 - protein, 15 aa, Artificial Sequence
  Description of Artificial Sequence: Synthetic peptide
  Seed: EWLKTRPILSPLTKG
EWLKWRPMLSPLVKG

SEQ ID NO: 207705 - protein, 15 aa, Artificial Sequence
  Description of Artificial Sequence: Synthetic peptide
  Seed: EWLKTRPILSPLTKG
EWLKWRPMLTPLAKG

SEQ ID NO: 207706 - protein, 15 aa, Artificial Sequence
  Description of Artificial Sequence: Synthetic peptide
  Seed: EWLKTRPILSPLTKG
EWLKWRPMLTPLQKG

SEQ ID NO: 207707 - protein, 15 aa, Artificial Sequence
  Description of Artificial Sequence: Synthetic peptide
  Seed: EWLKTRPILSPLTKG
EWLKWRPMLTPLSKG

SEQ ID NO: 207708 - protein, 15 aa, Artificial Sequence
  Description of Artificial Sequence: Synthetic peptide
  Seed: EWLKTRPILSPLTKG
EWLKWRPMLTPLTKG

SEQ ID NO: 207709 - protein, 15 aa, Artificial Sequence
  Description of Artificial Sequence: Synthetic peptide
  Seed: EWLKTRPILSPLTKG
EWLKWRPVLNPLAKG

SEQ ID NO: 207710 - protein, 15 aa, Artificial Sequence
  Description of Artificial Sequence: Synthetic peptide
  Seed: EWLKTRPILSPLTKG
EWLKWRPVLSPLIKG

SEQ ID NO: 207711 - protein, 15 aa, Artificial Sequence
  Description of Artificial Sequence: Synthetic peptide
  Seed: EWLKTRPILSPLTKG
EWLKWRPVLSPLLKG

SEQ ID NO: 207712 - protein, 15 aa, Artificial Sequence
  Description of Artificial Sequence: Synthetic peptide
  Seed: EWLKTRPILSPLTKG
EWLKWRPVLSPLVKG

SEQ ID NO: 207713 - protein, 15 aa, Artificial Sequence
  Description of Artificial Sequence: Synthetic peptide
  Seed: EWLKTRPILSPLTKG
EWLKWRPVLTPLAKG

SEQ ID NO: 207714 - protein, 15 aa, Artificial Sequence
  Description of Artificial Sequence: Synthetic peptide
  Seed: EWLKTRPILSPLTKG
EWLKWRPVLTPLSKG

SEQ ID NO: 207715 - protein, 15 aa, Artificial Sequence
  Description of Artificial Sequence: Synthetic peptide
  Seed: EWLKTRPILSPLTKG
EWLKYRPALAPLAKG

SEQ ID NO: 207716 - protein, 15 aa, Artificial Sequence
  Description of Artificial Sequence: Synthetic peptide
  Seed: EWLKTRPILSPLTKG
EWLKYRPALAPLIKG

SEQ ID NO: 207717 - protein, 15 aa, Artificial Sequence
  Description of Artificial Sequence: Synthetic peptide
  Seed: EWLKTRPILSPLTKG
EWLKYRPALAPLLKG

SEQ ID NO: 207718 - protein, 15 aa, Artificial Sequence
  Description of Artificial Sequence: Synthetic peptide
  Seed: EWLKTRPILSPLTKG
EWLKYRPALAPLSKG

SEQ ID NO: 207719 - protein, 15 aa, Artificial Sequence
  Description of Artificial Sequence: Synthetic peptide
  Seed: EWLKTRPILSPLTKG
EWLKYRPALAPLVKG

SEQ ID NO: 207720 - protein, 15 aa, Artificial Sequence
  Description of Artificial Sequence: Synthetic peptide
  Seed: EWLKTRPILSPLTKG
EWLKYRPALGPLIKG

SEQ ID NO: 207721 - protein, 15 aa, Artificial Sequence
  Description of Artificial Sequence: Synthetic peptide
  Seed: EWLKTRPILSPLTKG
EWLKYRPALGPLLKG

SEQ ID NO: 207722 - protein, 15 aa, Artificial Sequence
  Description of Artificial Sequence: Synthetic peptide
  Seed: EWLKTRPILSPLTKG
EWLKYRPALGPLVKG

SEQ ID NO: 207723 - protein, 15 aa, Artificial Sequence
  Description of Artificial Sequence: Synthetic peptide
  Seed: EWLKTRPILSPLTKG
EWLKYRPALNPLAKG

SEQ ID NO: 207724 - protein, 15 aa, Artificial Sequence
  Description of Artificial Sequence: Synthetic peptide
  Seed: EWLKTRPILSPLTKG
EWLKYRPALNPLGKG

SEQ ID NO: 207725 - protein, 15 aa, Artificial Sequence
  Description of Artificial Sequence: Synthetic peptide
  Seed: EWLKTRPILSPLTKG
EWLKYRPALNPLIKG

SEQ ID NO: 207726 - protein, 15 aa, Artificial Sequence
  Description of Artificial Sequence: Synthetic peptide
  Seed: EWLKTRPILSPLTKG
EWLKYRPALNPLLKG

SEQ ID NO: 207727 - protein, 15 aa, Artificial Sequence
  Description of Artificial Sequence: Synthetic peptide
  Seed: EWLKTRPILSPLTKG
EWLKYRPALNPLNKG

SEQ ID NO: 207728 - protein, 15 aa, Artificial Sequence
  Description of Artificial Sequence: Synthetic peptide
  Seed: EWLKTRPILSPLTKG
EWLKYRPALNPLQKG

SEQ ID NO: 207729 - protein, 15 aa, Artificial Sequence
  Description of Artificial Sequence: Synthetic peptide
  Seed: EWLKTRPILSPLTKG
EWLKYRPALNPLSKG

SEQ ID NO: 207730 - protein, 15 aa, Artificial Sequence
  Description of Artificial Sequence: Synthetic peptide
  Seed: EWLKTRPILSPLTKG
EWLKYRPALNPLTKG

SEQ ID NO: 207731 - protein, 15 aa, Artificial Sequence
  Description of Artificial Sequence: Synthetic peptide
  Seed: EWLKTRPILSPLTKG
EWLKYRPALNPLVKG

SEQ ID NO: 207732 - protein, 15 aa, Artificial Sequence
  Description of Artificial Sequence: Synthetic peptide
  Seed: EWLKTRPILSPLTKG
EWLKYRPALSPLAKG

SEQ ID NO: 207733 - protein, 15 aa, Artificial Sequence
  Description of Artificial Sequence: Synthetic peptide
  Seed: EWLKTRPILSPLTKG
EWLKYRPALSPLGKG

SEQ ID NO: 207734 - protein, 15 aa, Artificial Sequence
  Description of Artificial Sequence: Synthetic peptide
  Seed: EWLKTRPILSPLTKG
EWLKYRPALSPLIKG

SEQ ID NO: 207735 - protein, 15 aa, Artificial Sequence
  Description of Artificial Sequence: Synthetic peptide
  Seed: EWLKTRPILSPLTKG
EWLKYRPALSPLLKG

SEQ ID NO: 207736 - protein, 15 aa, Artificial Sequence
  Description of Artificial Sequence: Synthetic peptide
  Seed: EWLKTRPILSPLTKG
EWLKYRPALSPLMKG

SEQ ID NO: 207737 - protein, 15 aa, Artificial Sequence
  Description of Artificial Sequence: Synthetic peptide
  Seed: EWLKTRPILSPLTKG
EWLKYRPALSPLQKG

SEQ ID NO: 207738 - protein, 15 aa, Artificial Sequence
  Description of Artificial Sequence: Synthetic peptide
  Seed: EWLKTRPILSPLTKG
EWLKYRPALSPLSKG

SEQ ID NO: 207739 - protein, 15 aa, Artificial Sequence
  Description of Artificial Sequence: Synthetic peptide
  Seed: EWLKTRPILSPLTKG
EWLKYRPALSPLTKG

SEQ ID NO: 207740 - protein, 15 aa, Artificial Sequence
  Description of Artificial Sequence: Synthetic peptide
  Seed: EWLKTRPILSPLTKG
EWLKYRPALSPLVKG

SEQ ID NO: 207741 - protein, 15 aa, Artificial Sequence
  Description of Artificial Sequence: Synthetic peptide
  Seed: EWLKTRPILSPLTKG
EWLKYRPALTPLAKG

SEQ ID NO: 207742 - protein, 15 aa, Artificial Sequence
  Description of Artificial Sequence: Synthetic peptide
  Seed: EWLKTRPILSPLTKG
EWLKYRPALTPLGKG

SEQ ID NO: 207743 - protein, 15 aa, Artificial Sequence
  Description of Artificial Sequence: Synthetic peptide
  Seed: EWLKTRPILSPLTKG
EWLKYRPALTPLHKG

SEQ ID NO: 207744 - protein, 15 aa, Artificial Sequence
  Description of Artificial Sequence: Synthetic peptide
  Seed: EWLKTRPILSPLTKG
EWLKYRPALTPLIKG

SEQ ID NO: 207745 - protein, 15 aa, Artificial Sequence
  Description of Artificial Sequence: Synthetic peptide
  Seed: EWLKTRPILSPLTKG
EWLKYRPALTPLLKG

SEQ ID NO: 207746 - protein, 15 aa, Artificial Sequence
  Description of Artificial Sequence: Synthetic peptide
  Seed: EWLKTRPILSPLTKG
EWLKYRPALTPLMKG

SEQ ID NO: 207747 - protein, 15 aa, Artificial Sequence
  Description of Artificial Sequence: Synthetic peptide
  Seed: EWLKTRPILSPLTKG
EWLKYRPALTPLNKG

SEQ ID NO: 207748 - protein, 15 aa, Artificial Sequence
  Description of Artificial Sequence: Synthetic peptide
  Seed: EWLKTRPILSPLTKG
EWLKYRPALTPLQKG

SEQ ID NO: 207749 - protein, 15 aa, Artificial Sequence
  Description of Artificial Sequence: Synthetic peptide
  Seed: EWLKTRPILSPLTKG
EWLKYRPALTPLSKG

SEQ ID NO: 207750 - protein, 15 aa, Artificial Sequence
  Description of Artificial Sequence: Synthetic peptide
  Seed: EWLKTRPILSPLTKG
EWLKYRPALTPLTKG

SEQ ID NO: 207751 - protein, 15 aa, Artificial Sequence
  Description of Artificial Sequence: Synthetic peptide
  Seed: EWLKTRPILSPLTKG
EWLKYRPALTPLVKG

SEQ ID NO: 207752 - protein, 15 aa, Artificial Sequence
  Description of Artificial Sequence: Synthetic peptide
  Seed: EWLKTRPILSPLTKG
EWLKYRPALVPLAKG

SEQ ID NO: 207753 - protein, 15 aa, Artificial Sequence
  Description of Artificial Sequence: Synthetic peptide
  Seed: EWLKTRPILSPLTKG
EWLKYRPALVPLSKG

SEQ ID NO: 207754 - protein, 15 aa, Artificial Sequence
  Description of Artificial Sequence: Synthetic peptide
  Seed: EWLKTRPILSPLTKG
EWLKYRPELNPLAKG

SEQ ID NO: 207755 - protein, 15 aa, Artificial Sequence
  Description of Artificial Sequence: Synthetic peptide
  Seed: EWLKTRPILSPLTKG
EWLKYRPELNPLSKG

SEQ ID NO: 207756 - protein, 15 aa, Artificial Sequence
  Description of Artificial Sequence: Synthetic peptide
  Seed: EWLKTRPILSPLTKG
EWLKYRPELSPLAKG

SEQ ID NO: 207757 - protein, 15 aa, Artificial Sequence
  Description of Artificial Sequence: Synthetic peptide
  Seed: EWLKTRPILSPLTKG
EWLKYRPELTPLAKG

SEQ ID NO: 207758 - protein, 15 aa, Artificial Sequence
  Description of Artificial Sequence: Synthetic peptide
  Seed: EWLKTRPILSPLTKG
EWLKYRPFLAPLAKG

SEQ ID NO: 207759 - protein, 15 aa, Artificial Sequence
  Description of Artificial Sequence: Synthetic peptide
  Seed: EWLKTRPILSPLTKG
EWLKYRPFLAPLIKG

SEQ ID NO: 207760 - protein, 15 aa, Artificial Sequence
  Description of Artificial Sequence: Synthetic peptide
  Seed: EWLKTRPILSPLTKG
EWLKYRPFLAPLKKG

SEQ ID NO: 207761 - protein, 15 aa, Artificial Sequence
  Description of Artificial Sequence: Synthetic peptide
  Seed: EWLKTRPILSPLTKG
EWLKYRPFLAPLLKG

SEQ ID NO: 207762 - protein, 15 aa, Artificial Sequence
  Description of Artificial Sequence: Synthetic peptide
  Seed: EWLKTRPILSPLTKG
EWLKYRPFLAPLMKG

SEQ ID NO: 207763 - protein, 15 aa, Artificial Sequence
  Description of Artificial Sequence: Synthetic peptide
  Seed: EWLKTRPILSPLTKG
EWLKYRPFLAPLRKG

SEQ ID NO: 207764 - protein, 15 aa, Artificial Sequence
  Description of Artificial Sequence: Synthetic peptide
  Seed: EWLKTRPILSPLTKG
EWLKYRPFLAPLSKG

SEQ ID NO: 207765 - protein, 15 aa, Artificial Sequence
  Description of Artificial Sequence: Synthetic peptide
  Seed: EWLKTRPILSPLTKG
EWLKYRPFLAPLTKG

SEQ ID NO: 207766 - protein, 15 aa, Artificial Sequence
  Description of Artificial Sequence: Synthetic peptide
  Seed: EWLKTRPILSPLTKG
EWLKYRPFLAPLVKG

SEQ ID NO: 207767 - protein, 15 aa, Artificial Sequence
  Description of Artificial Sequence: Synthetic peptide
  Seed: EWLKTRPILSPLTKG
EWLKYRPFLGPLAKG

SEQ ID NO: 207768 - protein, 15 aa, Artificial Sequence
  Description of Artificial Sequence: Synthetic peptide
  Seed: EWLKTRPILSPLTKG
EWLKYRPFLGPLIKG

SEQ ID NO: 207769 - protein, 15 aa, Artificial Sequence
  Description of Artificial Sequence: Synthetic peptide
  Seed: EWLKTRPILSPLTKG
EWLKYRPFLGPLLKG

SEQ ID NO: 207770 - protein, 15 aa, Artificial Sequence
  Description of Artificial Sequence: Synthetic peptide
  Seed: EWLKTRPILSPLTKG
EWLKYRPFLGPLVKG

SEQ ID NO: 207771 - protein, 15 aa, Artificial Sequence
  Description of Artificial Sequence: Synthetic peptide
  Seed: EWLKTRPILSPLTKG
EWLKYRPFLNPLAKG

SEQ ID NO: 207772 - protein, 15 aa, Artificial Sequence
  Description of Artificial Sequence: Synthetic peptide
  Seed: EWLKTRPILSPLTKG
EWLKYRPFLNPLIKG

SEQ ID NO: 207773 - protein, 15 aa, Artificial Sequence
  Description of Artificial Sequence: Synthetic peptide
  Seed: EWLKTRPILSPLTKG
EWLKYRPFLNPLLKG

SEQ ID NO: 207774 - protein, 15 aa, Artificial Sequence
  Description of Artificial Sequence: Synthetic peptide
  Seed: EWLKTRPILSPLTKG
EWLKYRPFLNPLMKG

SEQ ID NO: 207775 - protein, 15 aa, Artificial Sequence
  Description of Artificial Sequence: Synthetic peptide
  Seed: EWLKTRPILSPLTKG
EWLKYRPFLNPLSKG

SEQ ID NO: 207776 - protein, 15 aa, Artificial Sequence
  Description of Artificial Sequence: Synthetic peptide
  Seed: EWLKTRPILSPLTKG
EWLKYRPFLNPLTKG

SEQ ID NO: 207777 - protein, 15 aa, Artificial Sequence
  Description of Artificial Sequence: Synthetic peptide
  Seed: EWLKTRPILSPLTKG
EWLKYRPFLNPLVKG

SEQ ID NO: 207778 - protein, 15 aa, Artificial Sequence
  Description of Artificial Sequence: Synthetic peptide
  Seed: EWLKTRPILSPLTKG
EWLKYRPFLSPLAKG

SEQ ID NO: 207779 - protein, 15 aa, Artificial Sequence
  Description of Artificial Sequence: Synthetic peptide
  Seed: EWLKTRPILSPLTKG
EWLKYRPFLSPLGKG

SEQ ID NO: 207780 - protein, 15 aa, Artificial Sequence
  Description of Artificial Sequence: Synthetic peptide
  Seed: EWLKTRPILSPLTKG
EWLKYRPFLSPLHKG

SEQ ID NO: 207781 - protein, 15 aa, Artificial Sequence
  Description of Artificial Sequence: Synthetic peptide
  Seed: EWLKTRPILSPLTKG
EWLKYRPFLSPLIKG

SEQ ID NO: 207782 - protein, 15 aa, Artificial Sequence
  Description of Artificial Sequence: Synthetic peptide
  Seed: EWLKTRPILSPLTKG
EWLKYRPFLSPLKKG

SEQ ID NO: 207783 - protein, 15 aa, Artificial Sequence
  Description of Artificial Sequence: Synthetic peptide
  Seed: EWLKTRPILSPLTKG
EWLKYRPFLSPLLKG

SEQ ID NO: 207784 - protein, 15 aa, Artificial Sequence
  Description of Artificial Sequence: Synthetic peptide
  Seed: EWLKTRPILSPLTKG
EWLKYRPFLSPLMKG

SEQ ID NO: 207785 - protein, 15 aa, Artificial Sequence
  Description of Artificial Sequence: Synthetic peptide
  Seed: EWLKTRPILSPLTKG
EWLKYRPFLSPLRKG

SEQ ID NO: 207786 - protein, 15 aa, Artificial Sequence
  Description of Artificial Sequence: Synthetic peptide
  Seed: EWLKTRPILSPLTKG
EWLKYRPFLSPLSKG

SEQ ID NO: 207787 - protein, 15 aa, Artificial Sequence
  Description of Artificial Sequence: Synthetic peptide
  Seed: EWLKTRPILSPLTKG
EWLKYRPFLSPLTKG

SEQ ID NO: 207788 - protein, 15 aa, Artificial Sequence
  Description of Artificial Sequence: Synthetic peptide
  Seed: EWLKTRPILSPLTKG
EWLKYRPFLSPLVKG

SEQ ID NO: 207789 - protein, 15 aa, Artificial Sequence
  Description of Artificial Sequence: Synthetic peptide
  Seed: EWLKTRPILSPLTKG
EWLKYRPFLTPLAKG

SEQ ID NO: 207790 - protein, 15 aa, Artificial Sequence
  Description of Artificial Sequence: Synthetic peptide
  Seed: EWLKTRPILSPLTKG
EWLKYRPFLTPLIKG

SEQ ID NO: 207791 - protein, 15 aa, Artificial Sequence
  Description of Artificial Sequence: Synthetic peptide
  Seed: EWLKTRPILSPLTKG
EWLKYRPFLTPLLKG

SEQ ID NO: 207792 - protein, 15 aa, Artificial Sequence
  Description of Artificial Sequence: Synthetic peptide
  Seed: EWLKTRPILSPLTKG
EWLKYRPFLTPLSKG

SEQ ID NO: 207793 - protein, 15 aa, Artificial Sequence
  Description of Artificial Sequence: Synthetic peptide
  Seed: EWLKTRPILSPLTKG
EWLKYRPFLTPLVKG

SEQ ID NO: 207794 - protein, 15 aa, Artificial Sequence
  Description of Artificial Sequence: Synthetic peptide
  Seed: EWLKTRPILSPLTKG
EWLKYRPILAPLAKG

SEQ ID NO: 207795 - protein, 15 aa, Artificial Sequence
  Description of Artificial Sequence: Synthetic peptide
  Seed: EWLKTRPILSPLTKG
EWLKYRPILAPLIKG

SEQ ID NO: 207796 - protein, 15 aa, Artificial Sequence
  Description of Artificial Sequence: Synthetic peptide
  Seed: EWLKTRPILSPLTKG
EWLKYRPILAPLLKG

SEQ ID NO: 207797 - protein, 15 aa, Artificial Sequence
  Description of Artificial Sequence: Synthetic peptide
  Seed: EWLKTRPILSPLTKG
EWLKYRPILAPLMKG

SEQ ID NO: 207798 - protein, 15 aa, Artificial Sequence
  Description of Artificial Sequence: Synthetic peptide
  Seed: EWLKTRPILSPLTKG
EWLKYRPILAPLSKG

SEQ ID NO: 207799 - protein, 15 aa, Artificial Sequence
  Description of Artificial Sequence: Synthetic peptide
  Seed: EWLKTRPILSPLTKG
EWLKYRPILAPLTKG

SEQ ID NO: 207800 - protein, 15 aa, Artificial Sequence
  Description of Artificial Sequence: Synthetic peptide
  Seed: EWLKTRPILSPLTKG
EWLKYRPILAPLVKG

SEQ ID NO: 207801 - protein, 15 aa, Artificial Sequence
  Description of Artificial Sequence: Synthetic peptide
  Seed: EWLKTRPILSPLTKG
EWLKYRPILGPLAKG

SEQ ID NO: 207802 - protein, 15 aa, Artificial Sequence
  Description of Artificial Sequence: Synthetic peptide
  Seed: EWLKTRPILSPLTKG
EWLKYRPILGPLIKG

SEQ ID NO: 207803 - protein, 15 aa, Artificial Sequence
  Description of Artificial Sequence: Synthetic peptide
  Seed: EWLKTRPILSPLTKG
EWLKYRPILGPLLKG

SEQ ID NO: 207804 - protein, 15 aa, Artificial Sequence
  Description of Artificial Sequence: Synthetic peptide
  Seed: EWLKTRPILSPLTKG
EWLKYRPILGPLMKG

SEQ ID NO: 207805 - protein, 15 aa, Artificial Sequence
  Description of Artificial Sequence: Synthetic peptide
  Seed: EWLKTRPILSPLTKG
EWLKYRPILGPLTKG

SEQ ID NO: 207806 - protein, 15 aa, Artificial Sequence
  Description of Artificial Sequence: Synthetic peptide
  Seed: EWLKTRPILSPLTKG
EWLKYRPILGPLVKG

SEQ ID NO: 207807 - protein, 15 aa, Artificial Sequence
  Description of Artificial Sequence: Synthetic peptide
  Seed: EWLKTRPILSPLTKG
EWLKYRPILIPLAKG

SEQ ID NO: 207808 - protein, 15 aa, Artificial Sequence
  Description of Artificial Sequence: Synthetic peptide
  Seed: EWLKTRPILSPLTKG
EWLKYRPILIPLSKG

SEQ ID NO: 207809 - protein, 15 aa, Artificial Sequence
  Description of Artificial Sequence: Synthetic peptide
  Seed: EWLKTRPILSPLTKG
EWLKYRPILNPLAKG

SEQ ID NO: 207810 - protein, 15 aa, Artificial Sequence
  Description of Artificial Sequence: Synthetic peptide
  Seed: EWLKTRPILSPLTKG
EWLKYRPILNPLDKG

SEQ ID NO: 207811 - protein, 15 aa, Artificial Sequence
  Description of Artificial Sequence: Synthetic peptide
  Seed: EWLKTRPILSPLTKG
EWLKYRPILNPLGKG

SEQ ID NO: 207812 - protein, 15 aa, Artificial Sequence
  Description of Artificial Sequence: Synthetic peptide
  Seed: EWLKTRPILSPLTKG
EWLKYRPILNPLHKG

SEQ ID NO: 207813 - protein, 15 aa, Artificial Sequence
  Description of Artificial Sequence: Synthetic peptide
  Seed: EWLKTRPILSPLTKG
EWLKYRPILNPLIKG

SEQ ID NO: 207814 - protein, 15 aa, Artificial Sequence
  Description of Artificial Sequence: Synthetic peptide
  Seed: EWLKTRPILSPLTKG
EWLKYRPILNPLLKG

SEQ ID NO: 207815 - protein, 15 aa, Artificial Sequence
  Description of Artificial Sequence: Synthetic peptide
  Seed: EWLKTRPILSPLTKG
EWLKYRPILNPLMKG

SEQ ID NO: 207816 - protein, 15 aa, Artificial Sequence
  Description of Artificial Sequence: Synthetic peptide
  Seed: EWLKTRPILSPLTKG
EWLKYRPILNPLNKG

SEQ ID NO: 207817 - protein, 15 aa, Artificial Sequence
  Description of Artificial Sequence: Synthetic peptide
  Seed: EWLKTRPILSPLTKG
EWLKYRPILNPLPKG

SEQ ID NO: 207818 - protein, 15 aa, Artificial Sequence
  Description of Artificial Sequence: Synthetic peptide
  Seed: EWLKTRPILSPLTKG
EWLKYRPILNPLQKG

SEQ ID NO: 207819 - protein, 15 aa, Artificial Sequence
  Description of Artificial Sequence: Synthetic peptide
  Seed: EWLKTRPILSPLTKG
EWLKYRPILNPLSKG

SEQ ID NO: 207820 - protein, 15 aa, Artificial Sequence
  Description of Artificial Sequence: Synthetic peptide
  Seed: EWLKTRPILSPLTKG
EWLKYRPILNPLTKG

SEQ ID NO: 207821 - protein, 15 aa, Artificial Sequence
  Description of Artificial Sequence: Synthetic peptide
  Seed: EWLKTRPILSPLTKG
EWLKYRPILNPLVKG

SEQ ID NO: 207822 - protein, 15 aa, Artificial Sequence
  Description of Artificial Sequence: Synthetic peptide
  Seed: EWLKTRPILSPLTKG
EWLKYRPILPPLAKG

SEQ ID NO: 207823 - protein, 15 aa, Artificial Sequence
  Description of Artificial Sequence: Synthetic peptide
  Seed: EWLKTRPILSPLTKG
EWLKYRPILPPLIKG

SEQ ID NO: 207824 - protein, 15 aa, Artificial Sequence
  Description of Artificial Sequence: Synthetic peptide
  Seed: EWLKTRPILSPLTKG
EWLKYRPILPPLLKG

SEQ ID NO: 207825 - protein, 15 aa, Artificial Sequence
  Description of Artificial Sequence: Synthetic peptide
  Seed: EWLKTRPILSPLTKG
EWLKYRPILPPLSKG

SEQ ID NO: 207826 - protein, 15 aa, Artificial Sequence
  Description of Artificial Sequence: Synthetic peptide
  Seed: EWLKTRPILSPLTKG
EWLKYRPILPPLVKG

SEQ ID NO: 207827 - protein, 15 aa, Artificial Sequence
  Description of Artificial Sequence: Synthetic peptide
  Seed: EWLKTRPILSPLTKG
EWLKYRPILSPLAKG

SEQ ID NO: 207828 - protein, 15 aa, Artificial Sequence
  Description of Artificial Sequence: Synthetic peptide
  Seed: EWLKTRPILSPLTKG
EWLKYRPILSPLFKG

SEQ ID NO: 207829 - protein, 15 aa, Artificial Sequence
  Description of Artificial Sequence: Synthetic peptide
  Seed: EWLKTRPILSPLTKG
EWLKYRPILSPLGKG

SEQ ID NO: 207830 - protein, 15 aa, Artificial Sequence
  Description of Artificial Sequence: Synthetic peptide
  Seed: EWLKTRPILSPLTKG
EWLKYRPILSPLHKG

SEQ ID NO: 207831 - protein, 15 aa, Artificial Sequence
  Description of Artificial Sequence: Synthetic peptide
  Seed: EWLKTRPILSPLTKG
EWLKYRPILSPLIKG

SEQ ID NO: 207832 - protein, 15 aa, Artificial Sequence
  Description of Artificial Sequence: Synthetic peptide
  Seed: EWLKTRPILSPLTKG
EWLKYRPILSPLLKG

SEQ ID NO: 207833 - protein, 15 aa, Artificial Sequence
  Description of Artificial Sequence: Synthetic peptide
  Seed: EWLKTRPILSPLTKG
EWLKYRPILSPLMKG

SEQ ID NO: 207834 - protein, 15 aa, Artificial Sequence
  Description of Artificial Sequence: Synthetic peptide
  Seed: EWLKTRPILSPLTKG
EWLKYRPILSPLNKG

SEQ ID NO: 207835 - protein, 15 aa, Artificial Sequence
  Description of Artificial Sequence: Synthetic peptide
  Seed: EWLKTRPILSPLTKG
EWLKYRPILSPLQKG

SEQ ID NO: 207836 - protein, 15 aa, Artificial Sequence
  Description of Artificial Sequence: Synthetic peptide
  Seed: EWLKTRPILSPLTKG
EWLKYRPILSPLRKG

SEQ ID NO: 207837 - protein, 15 aa, Artificial Sequence
  Description of Artificial Sequence: Synthetic peptide
  Seed: EWLKTRPILSPLTKG
EWLKYRPILSPLSKG

SEQ ID NO: 207838 - protein, 15 aa, Artificial Sequence
  Description of Artificial Sequence: Synthetic peptide
  Seed: EWLKTRPILSPLTKG
EWLKYRPILSPLTKG

SEQ ID NO: 207839 - protein, 15 aa, Artificial Sequence
  Description of Artificial Sequence: Synthetic peptide
  Seed: EWLKTRPILSPLTKG
EWLKYRPILSPLVKG

SEQ ID NO: 207840 - protein, 15 aa, Artificial Sequence
  Description of Artificial Sequence: Synthetic peptide
  Seed: EWLKTRPILSPLTKG
EWLKYRPILTPLAKG

SEQ ID NO: 207841 - protein, 15 aa, Artificial Sequence
  Description of Artificial Sequence: Synthetic peptide
  Seed: EWLKTRPILSPLTKG
EWLKYRPILTPLGKG

SEQ ID NO: 207842 - protein, 15 aa, Artificial Sequence
  Description of Artificial Sequence: Synthetic peptide
  Seed: EWLKTRPILSPLTKG
EWLKYRPILTPLHKG

SEQ ID NO: 207843 - protein, 15 aa, Artificial Sequence
  Description of Artificial Sequence: Synthetic peptide
  Seed: EWLKTRPILSPLTKG
EWLKYRPILTPLIKG

SEQ ID NO: 207844 - protein, 15 aa, Artificial Sequence
  Description of Artificial Sequence: Synthetic peptide
  Seed: EWLKTRPILSPLTKG
EWLKYRPILTPLLKG

SEQ ID NO: 207845 - protein, 15 aa, Artificial Sequence
  Description of Artificial Sequence: Synthetic peptide
  Seed: EWLKTRPILSPLTKG
EWLKYRPILTPLMKG

SEQ ID NO: 207846 - protein, 15 aa, Artificial Sequence
  Description of Artificial Sequence: Synthetic peptide
  Seed: EWLKTRPILSPLTKG
EWLKYRPILTPLNKG

SEQ ID NO: 207847 - protein, 15 aa, Artificial Sequence
  Description of Artificial Sequence: Synthetic peptide
  Seed: EWLKTRPILSPLTKG
EWLKYRPILTPLPKG

SEQ ID NO: 207848 - protein, 15 aa, Artificial Sequence
  Description of Artificial Sequence: Synthetic peptide
  Seed: EWLKTRPILSPLTKG
EWLKYRPILTPLQKG

SEQ ID NO: 207849 - protein, 15 aa, Artificial Sequence
  Description of Artificial Sequence: Synthetic peptide
  Seed: EWLKTRPILSPLTKG
EWLKYRPILTPLSKG

SEQ ID NO: 207850 - protein, 15 aa, Artificial Sequence
  Description of Artificial Sequence: Synthetic peptide
  Seed: EWLKTRPILSPLTKG
EWLKYRPILTPLTKG

SEQ ID NO: 207851 - protein, 15 aa, Artificial Sequence
  Description of Artificial Sequence: Synthetic peptide
  Seed: EWLKTRPILSPLTKG
EWLKYRPILTPLVKG

SEQ ID NO: 207852 - protein, 15 aa, Artificial Sequence
  Description of Artificial Sequence: Synthetic peptide
  Seed: EWLKTRPILSPLTKG
EWLKYRPILVPLAKG

SEQ ID NO: 207853 - protein, 15 aa, Artificial Sequence
  Description of Artificial Sequence: Synthetic peptide
  Seed: EWLKTRPILSPLTKG
EWLKYRPILVPLSKG

SEQ ID NO: 207854 - protein, 15 aa, Artificial Sequence
  Description of Artificial Sequence: Synthetic peptide
  Seed: EWLKTRPILSPLTKG
EWLKYRPILVPLTKG

SEQ ID NO: 207855 - protein, 15 aa, Artificial Sequence
  Description of Artificial Sequence: Synthetic peptide
  Seed: EWLKTRPILSPLTKG
EWLKYRPLLAPLAKG

SEQ ID NO: 207856 - protein, 15 aa, Artificial Sequence
  Description of Artificial Sequence: Synthetic peptide
  Seed: EWLKTRPILSPLTKG
EWLKYRPLLAPLIKG

SEQ ID NO: 207857 - protein, 15 aa, Artificial Sequence
  Description of Artificial Sequence: Synthetic peptide
  Seed: EWLKTRPILSPLTKG
EWLKYRPLLAPLLKG

SEQ ID NO: 207858 - protein, 15 aa, Artificial Sequence
  Description of Artificial Sequence: Synthetic peptide
  Seed: EWLKTRPILSPLTKG
EWLKYRPLLAPLSKG

SEQ ID NO: 207859 - protein, 15 aa, Artificial Sequence
  Description of Artificial Sequence: Synthetic peptide
  Seed: EWLKTRPILSPLTKG
EWLKYRPLLAPLVKG

SEQ ID NO: 207860 - protein, 15 aa, Artificial Sequence
  Description of Artificial Sequence: Synthetic peptide
  Seed: EWLKTRPILSPLTKG
EWLKYRPLLGPLAKG

SEQ ID NO: 207861 - protein, 15 aa, Artificial Sequence
  Description of Artificial Sequence: Synthetic peptide
  Seed: EWLKTRPILSPLTKG
EWLKYRPLLGPLIKG

SEQ ID NO: 207862 - protein, 15 aa, Artificial Sequence
  Description of Artificial Sequence: Synthetic peptide
  Seed: EWLKTRPILSPLTKG
EWLKYRPLLGPLLKG

SEQ ID NO: 207863 - protein, 15 aa, Artificial Sequence
  Description of Artificial Sequence: Synthetic peptide
  Seed: EWLKTRPILSPLTKG
EWLKYRPLLGPLVKG

SEQ ID NO: 207864 - protein, 15 aa, Artificial Sequence
  Description of Artificial Sequence: Synthetic peptide
  Seed: EWLKTRPILSPLTKG
EWLKYRPLLIPLAKG

SEQ ID NO: 207865 - protein, 15 aa, Artificial Sequence
  Description of Artificial Sequence: Synthetic peptide
  Seed: EWLKTRPILSPLTKG
EWLKYRPLLIPLSKG

SEQ ID NO: 207866 - protein, 15 aa, Artificial Sequence
  Description of Artificial Sequence: Synthetic peptide
  Seed: EWLKTRPILSPLTKG
EWLKYRPLLNPLAKG

SEQ ID NO: 207867 - protein, 15 aa, Artificial Sequence
  Description of Artificial Sequence: Synthetic peptide
  Seed: EWLKTRPILSPLTKG
EWLKYRPLLNPLGKG

SEQ ID NO: 207868 - protein, 15 aa, Artificial Sequence
  Description of Artificial Sequence: Synthetic peptide
  Seed: EWLKTRPILSPLTKG
EWLKYRPLLNPLHKG

SEQ ID NO: 207869 - protein, 15 aa, Artificial Sequence
  Description of Artificial Sequence: Synthetic peptide
  Seed: EWLKTRPILSPLTKG
EWLKYRPLLNPLIKG

SEQ ID NO: 207870 - protein, 15 aa, Artificial Sequence
  Description of Artificial Sequence: Synthetic peptide
  Seed: EWLKTRPILSPLTKG
EWLKYRPLLNPLLKG

SEQ ID NO: 207871 - protein, 15 aa, Artificial Sequence
  Description of Artificial Sequence: Synthetic peptide
  Seed: EWLKTRPILSPLTKG
EWLKYRPLLNPLNKG

SEQ ID NO: 207872 - protein, 15 aa, Artificial Sequence
  Description of Artificial Sequence: Synthetic peptide
  Seed: EWLKTRPILSPLTKG
EWLKYRPLLNPLQKG

SEQ ID NO: 207873 - protein, 15 aa, Artificial Sequence
  Description of Artificial Sequence: Synthetic peptide
  Seed: EWLKTRPILSPLTKG
EWLKYRPLLNPLSKG

SEQ ID NO: 207874 - protein, 15 aa, Artificial Sequence
  Description of Artificial Sequence: Synthetic peptide
  Seed: EWLKTRPILSPLTKG
EWLKYRPLLNPLTKG

SEQ ID NO: 207875 - protein, 15 aa, Artificial Sequence
  Description of Artificial Sequence: Synthetic peptide
  Seed: EWLKTRPILSPLTKG
EWLKYRPLLNPLVKG

SEQ ID NO: 207876 - protein, 15 aa, Artificial Sequence
  Description of Artificial Sequence: Synthetic peptide
  Seed: EWLKTRPILSPLTKG
EWLKYRPLLPPLIKG

SEQ ID NO: 207877 - protein, 15 aa, Artificial Sequence
  Description of Artificial Sequence: Synthetic peptide
  Seed: EWLKTRPILSPLTKG
EWLKYRPLLPPLLKG

SEQ ID NO: 207878 - protein, 15 aa, Artificial Sequence
  Description of Artificial Sequence: Synthetic peptide
  Seed: EWLKTRPILSPLTKG
EWLKYRPLLPPLVKG

SEQ ID NO: 207879 - protein, 15 aa, Artificial Sequence
  Description of Artificial Sequence: Synthetic peptide
  Seed: EWLKTRPILSPLTKG
EWLKYRPLLSPLAKG

SEQ ID NO: 207880 - protein, 15 aa, Artificial Sequence
  Description of Artificial Sequence: Synthetic peptide
  Seed: EWLKTRPILSPLTKG
EWLKYRPLLSPLFKG

SEQ ID NO: 207881 - protein, 15 aa, Artificial Sequence
  Description of Artificial Sequence: Synthetic peptide
  Seed: EWLKTRPILSPLTKG
EWLKYRPLLSPLGKG

SEQ ID NO: 207882 - protein, 15 aa, Artificial Sequence
  Description of Artificial Sequence: Synthetic peptide
  Seed: EWLKTRPILSPLTKG
EWLKYRPLLSPLHKG

SEQ ID NO: 207883 - protein, 15 aa, Artificial Sequence
  Description of Artificial Sequence: Synthetic peptide
  Seed: EWLKTRPILSPLTKG
EWLKYRPLLSPLIKG

SEQ ID NO: 207884 - protein, 15 aa, Artificial Sequence
  Description of Artificial Sequence: Synthetic peptide
  Seed: EWLKTRPILSPLTKG
EWLKYRPLLSPLKKG

SEQ ID NO: 207885 - protein, 15 aa, Artificial Sequence
  Description of Artificial Sequence: Synthetic peptide
  Seed: EWLKTRPILSPLTKG
EWLKYRPLLSPLLKG

SEQ ID NO: 207886 - protein, 15 aa, Artificial Sequence
  Description of Artificial Sequence: Synthetic peptide
  Seed: EWLKTRPILSPLTKG
EWLKYRPLLSPLMKG

SEQ ID NO: 207887 - protein, 15 aa, Artificial Sequence
  Description of Artificial Sequence: Synthetic peptide
  Seed: EWLKTRPILSPLTKG
EWLKYRPLLSPLNKG

SEQ ID NO: 207888 - protein, 15 aa, Artificial Sequence
  Description of Artificial Sequence: Synthetic peptide
  Seed: EWLKTRPILSPLTKG
EWLKYRPLLSPLQKG

SEQ ID NO: 207889 - protein, 15 aa, Artificial Sequence
  Description of Artificial Sequence: Synthetic peptide
  Seed: EWLKTRPILSPLTKG
EWLKYRPLLSPLRKG

SEQ ID NO: 207890 - protein, 15 aa, Artificial Sequence
  Description of Artificial Sequence: Synthetic peptide
  Seed: EWLKTRPILSPLTKG
EWLKYRPLLSPLSKG

SEQ ID NO: 207891 - protein, 15 aa, Artificial Sequence
  Description of Artificial Sequence: Synthetic peptide
  Seed: EWLKTRPILSPLTKG
EWLKYRPLLSPLTKG

SEQ ID NO: 207892 - protein, 15 aa, Artificial Sequence
  Description of Artificial Sequence: Synthetic peptide
  Seed: EWLKTRPILSPLTKG
EWLKYRPLLSPLVKG

SEQ ID NO: 207893 - protein, 15 aa, Artificial Sequence
  Description of Artificial Sequence: Synthetic peptide
  Seed: EWLKTRPILSPLTKG
EWLKYRPLLTPLAKG

SEQ ID NO: 207894 - protein, 15 aa, Artificial Sequence
  Description of Artificial Sequence: Synthetic peptide
  Seed: EWLKTRPILSPLTKG
EWLKYRPLLTPLGKG

SEQ ID NO: 207895 - protein, 15 aa, Artificial Sequence
  Description of Artificial Sequence: Synthetic peptide
  Seed: EWLKTRPILSPLTKG
EWLKYRPLLTPLHKG

SEQ ID NO: 207896 - protein, 15 aa, Artificial Sequence
  Description of Artificial Sequence: Synthetic peptide
  Seed: EWLKTRPILSPLTKG
EWLKYRPLLTPLIKG

SEQ ID NO: 207897 - protein, 15 aa, Artificial Sequence
  Description of Artificial Sequence: Synthetic peptide
  Seed: EWLKTRPILSPLTKG
EWLKYRPLLTPLLKG

SEQ ID NO: 207898 - protein, 15 aa, Artificial Sequence
  Description of Artificial Sequence: Synthetic peptide
  Seed: EWLKTRPILSPLTKG
EWLKYRPLLTPLMKG

SEQ ID NO: 207899 - protein, 15 aa, Artificial Sequence
  Description of Artificial Sequence: Synthetic peptide
  Seed: EWLKTRPILSPLTKG
EWLKYRPLLTPLNKG

SEQ ID NO: 207900 - protein, 15 aa, Artificial Sequence
  Description of Artificial Sequence: Synthetic peptide
  Seed: EWLKTRPILSPLTKG
EWLKYRPLLTPLPKG

SEQ ID NO: 207901 - protein, 15 aa, Artificial Sequence
  Description of Artificial Sequence: Synthetic peptide
  Seed: EWLKTRPILSPLTKG
EWLKYRPLLTPLQKG

SEQ ID NO: 207902 - protein, 15 aa, Artificial Sequence
  Description of Artificial Sequence: Synthetic peptide
  Seed: EWLKTRPILSPLTKG
EWLKYRPLLTPLSKG

SEQ ID NO: 207903 - protein, 15 aa, Artificial Sequence
  Description of Artificial Sequence: Synthetic peptide
  Seed: EWLKTRPILSPLTKG
EWLKYRPLLTPLTKG

SEQ ID NO: 207904 - protein, 15 aa, Artificial Sequence
  Description of Artificial Sequence: Synthetic peptide
  Seed: EWLKTRPILSPLTKG
EWLKYRPLLTPLVKG

SEQ ID NO: 207905 - protein, 15 aa, Artificial Sequence
  Description of Artificial Sequence: Synthetic peptide
  Seed: EWLKTRPILSPLTKG
EWLKYRPLLVPLAKG

SEQ ID NO: 207906 - protein, 15 aa, Artificial Sequence
  Description of Artificial Sequence: Synthetic peptide
  Seed: EWLKTRPILSPLTKG
EWLKYRPLLVPLSKG

SEQ ID NO: 207907 - protein, 15 aa, Artificial Sequence
  Description of Artificial Sequence: Synthetic peptide
  Seed: EWLKTRPILSPLTKG
EWLKYRPMLAPLAKG

SEQ ID NO: 207908 - protein, 15 aa, Artificial Sequence
  Description of Artificial Sequence: Synthetic peptide
  Seed: EWLKTRPILSPLTKG
EWLKYRPMLAPLIKG

SEQ ID NO: 207909 - protein, 15 aa, Artificial Sequence
  Description of Artificial Sequence: Synthetic peptide
  Seed: EWLKTRPILSPLTKG
EWLKYRPMLAPLLKG

SEQ ID NO: 207910 - protein, 15 aa, Artificial Sequence
  Description of Artificial Sequence: Synthetic peptide
  Seed: EWLKTRPILSPLTKG
EWLKYRPMLAPLMKG

SEQ ID NO: 207911 - protein, 15 aa, Artificial Sequence
  Description of Artificial Sequence: Synthetic peptide
  Seed: EWLKTRPILSPLTKG
EWLKYRPMLAPLSKG

SEQ ID NO: 207912 - protein, 15 aa, Artificial Sequence
  Description of Artificial Sequence: Synthetic peptide
  Seed: EWLKTRPILSPLTKG
EWLKYRPMLAPLVKG

SEQ ID NO: 207913 - protein, 15 aa, Artificial Sequence
  Description of Artificial Sequence: Synthetic peptide
  Seed: EWLKTRPILSPLTKG
EWLKYRPMLDPLAKG

SEQ ID NO: 207914 - protein, 15 aa, Artificial Sequence
  Description of Artificial Sequence: Synthetic peptide
  Seed: EWLKTRPILSPLTKG
EWLKYRPMLGPLAKG

SEQ ID NO: 207915 - protein, 15 aa, Artificial Sequence
  Description of Artificial Sequence: Synthetic peptide
  Seed: EWLKTRPILSPLTKG
EWLKYRPMLGPLIKG

SEQ ID NO: 207916 - protein, 15 aa, Artificial Sequence
  Description of Artificial Sequence: Synthetic peptide
  Seed: EWLKTRPILSPLTKG
EWLKYRPMLGPLLKG

SEQ ID NO: 207917 - protein, 15 aa, Artificial Sequence
  Description of Artificial Sequence: Synthetic peptide
  Seed: EWLKTRPILSPLTKG
EWLKYRPMLGPLVKG

SEQ ID NO: 207918 - protein, 15 aa, Artificial Sequence
  Description of Artificial Sequence: Synthetic peptide
  Seed: EWLKTRPILSPLTKG
EWLKYRPMLIPLAKG

SEQ ID NO: 207919 - protein, 15 aa, Artificial Sequence
  Description of Artificial Sequence: Synthetic peptide
  Seed: EWLKTRPILSPLTKG
EWLKYRPMLIPLSKG

SEQ ID NO: 207920 - protein, 15 aa, Artificial Sequence
  Description of Artificial Sequence: Synthetic peptide
  Seed: EWLKTRPILSPLTKG
EWLKYRPMLNPLAKG

SEQ ID NO: 207921 - protein, 15 aa, Artificial Sequence
  Description of Artificial Sequence: Synthetic peptide
  Seed: EWLKTRPILSPLTKG
EWLKYRPMLNPLDKG

SEQ ID NO: 207922 - protein, 15 aa, Artificial Sequence
  Description of Artificial Sequence: Synthetic peptide
  Seed: EWLKTRPILSPLTKG
EWLKYRPMLNPLEKG

SEQ ID NO: 207923 - protein, 15 aa, Artificial Sequence
  Description of Artificial Sequence: Synthetic peptide
  Seed: EWLKTRPILSPLTKG
EWLKYRPMLNPLGKG

SEQ ID NO: 207924 - protein, 15 aa, Artificial Sequence
  Description of Artificial Sequence: Synthetic peptide
  Seed: EWLKTRPILSPLTKG
EWLKYRPMLNPLHKG

SEQ ID NO: 207925 - protein, 15 aa, Artificial Sequence
  Description of Artificial Sequence: Synthetic peptide
  Seed: EWLKTRPILSPLTKG
EWLKYRPMLNPLIKG

SEQ ID NO: 207926 - protein, 15 aa, Artificial Sequence
  Description of Artificial Sequence: Synthetic peptide
  Seed: EWLKTRPILSPLTKG
EWLKYRPMLNPLLKG

SEQ ID NO: 207927 - protein, 15 aa, Artificial Sequence
  Description of Artificial Sequence: Synthetic peptide
  Seed: EWLKTRPILSPLTKG
EWLKYRPMLNPLMKG

SEQ ID NO: 207928 - protein, 15 aa, Artificial Sequence
  Description of Artificial Sequence: Synthetic peptide
  Seed: EWLKTRPILSPLTKG
EWLKYRPMLNPLNKG

SEQ ID NO: 207929 - protein, 15 aa, Artificial Sequence
  Description of Artificial Sequence: Synthetic peptide
  Seed: EWLKTRPILSPLTKG
EWLKYRPMLNPLPKG

SEQ ID NO: 207930 - protein, 15 aa, Artificial Sequence
  Description of Artificial Sequence: Synthetic peptide
  Seed: EWLKTRPILSPLTKG
EWLKYRPMLNPLQKG

SEQ ID NO: 207931 - protein, 15 aa, Artificial Sequence
  Description of Artificial Sequence: Synthetic peptide
  Seed: EWLKTRPILSPLTKG
EWLKYRPMLNPLSKG

SEQ ID NO: 207932 - protein, 15 aa, Artificial Sequence
  Description of Artificial Sequence: Synthetic peptide
  Seed: EWLKTRPILSPLTKG
EWLKYRPMLNPLTKG

SEQ ID NO: 207933 - protein, 15 aa, Artificial Sequence
  Description of Artificial Sequence: Synthetic peptide
  Seed: EWLKTRPILSPLTKG
EWLKYRPMLNPLVKG

SEQ ID NO: 207934 - protein, 15 aa, Artificial Sequence
  Description of Artificial Sequence: Synthetic peptide
  Seed: EWLKTRPILSPLTKG
EWLKYRPMLPPLAKG

SEQ ID NO: 207935 - protein, 15 aa, Artificial Sequence
  Description of Artificial Sequence: Synthetic peptide
  Seed: EWLKTRPILSPLTKG
EWLKYRPMLPPLIKG

SEQ ID NO: 207936 - protein, 15 aa, Artificial Sequence
  Description of Artificial Sequence: Synthetic peptide
  Seed: EWLKTRPILSPLTKG
EWLKYRPMLPPLLKG

SEQ ID NO: 207937 - protein, 15 aa, Artificial Sequence
  Description of Artificial Sequence: Synthetic peptide
  Seed: EWLKTRPILSPLTKG
EWLKYRPMLPPLSKG

SEQ ID NO: 207938 - protein, 15 aa, Artificial Sequence
  Description of Artificial Sequence: Synthetic peptide
  Seed: EWLKTRPILSPLTKG
EWLKYRPMLPPLVKG

SEQ ID NO: 207939 - protein, 15 aa, Artificial Sequence
  Description of Artificial Sequence: Synthetic peptide
  Seed: EWLKTRPILSPLTKG
EWLKYRPMLSPLAKG

SEQ ID NO: 207940 - protein, 15 aa, Artificial Sequence
  Description of Artificial Sequence: Synthetic peptide
  Seed: EWLKTRPILSPLTKG
EWLKYRPMLSPLDKG

SEQ ID NO: 207941 - protein, 15 aa, Artificial Sequence
  Description of Artificial Sequence: Synthetic peptide
  Seed: EWLKTRPILSPLTKG
EWLKYRPMLSPLFKG

SEQ ID NO: 207942 - protein, 15 aa, Artificial Sequence
  Description of Artificial Sequence: Synthetic peptide
  Seed: EWLKTRPILSPLTKG
EWLKYRPMLSPLGKG

SEQ ID NO: 207943 - protein, 15 aa, Artificial Sequence
  Description of Artificial Sequence: Synthetic peptide
  Seed: EWLKTRPILSPLTKG
EWLKYRPMLSPLHKG

SEQ ID NO: 207944 - protein, 15 aa, Artificial Sequence
  Description of Artificial Sequence: Synthetic peptide
  Seed: EWLKTRPILSPLTKG
EWLKYRPMLSPLIKG

SEQ ID NO: 207945 - protein, 15 aa, Artificial Sequence
  Description of Artificial Sequence: Synthetic peptide
  Seed: EWLKTRPILSPLTKG
EWLKYRPMLSPLLKG

SEQ ID NO: 207946 - protein, 15 aa, Artificial Sequence
  Description of Artificial Sequence: Synthetic peptide
  Seed: EWLKTRPILSPLTKG
EWLKYRPMLSPLMKG

SEQ ID NO: 207947 - protein, 15 aa, Artificial Sequence
  Description of Artificial Sequence: Synthetic peptide
  Seed: EWLKTRPILSPLTKG
EWLKYRPMLSPLNKG

SEQ ID NO: 207948 - protein, 15 aa, Artificial Sequence
  Description of Artificial Sequence: Synthetic peptide
  Seed: EWLKTRPILSPLTKG
EWLKYRPMLSPLPKG

SEQ ID NO: 207949 - protein, 15 aa, Artificial Sequence
  Description of Artificial Sequence: Synthetic peptide
  Seed: EWLKTRPILSPLTKG
EWLKYRPMLSPLQKG

SEQ ID NO: 207950 - protein, 15 aa, Artificial Sequence
  Description of Artificial Sequence: Synthetic peptide
  Seed: EWLKTRPILSPLTKG
EWLKYRPMLSPLRKG

SEQ ID NO: 207951 - protein, 15 aa, Artificial Sequence
  Description of Artificial Sequence: Synthetic peptide
  Seed: EWLKTRPILSPLTKG
EWLKYRPMLSPLSKG

SEQ ID NO: 207952 - protein, 15 aa, Artificial Sequence
  Description of Artificial Sequence: Synthetic peptide
  Seed: EWLKTRPILSPLTKG
EWLKYRPMLSPLTKG

SEQ ID NO: 207953 - protein, 15 aa, Artificial Sequence
  Description of Artificial Sequence: Synthetic peptide
  Seed: EWLKTRPILSPLTKG
EWLKYRPMLSPLVKG

SEQ ID NO: 207954 - protein, 15 aa, Artificial Sequence
  Description of Artificial Sequence: Synthetic peptide
  Seed: EWLKTRPILSPLTKG
EWLKYRPMLTPLAKG

SEQ ID NO: 207955 - protein, 15 aa, Artificial Sequence
  Description of Artificial Sequence: Synthetic peptide
  Seed: EWLKTRPILSPLTKG
EWLKYRPMLTPLDKG

SEQ ID NO: 207956 - protein, 15 aa, Artificial Sequence
  Description of Artificial Sequence: Synthetic peptide
  Seed: EWLKTRPILSPLTKG
EWLKYRPMLTPLEKG

SEQ ID NO: 207957 - protein, 15 aa, Artificial Sequence
  Description of Artificial Sequence: Synthetic peptide
  Seed: EWLKTRPILSPLTKG
EWLKYRPMLTPLGKG

SEQ ID NO: 207958 - protein, 15 aa, Artificial Sequence
  Description of Artificial Sequence: Synthetic peptide
  Seed: EWLKTRPILSPLTKG
EWLKYRPMLTPLHKG

SEQ ID NO: 207959 - protein, 15 aa, Artificial Sequence
  Description of Artificial Sequence: Synthetic peptide
  Seed: EWLKTRPILSPLTKG
EWLKYRPMLTPLIKG

SEQ ID NO: 207960 - protein, 15 aa, Artificial Sequence
  Description of Artificial Sequence: Synthetic peptide
  Seed: EWLKTRPILSPLTKG
EWLKYRPMLTPLLKG

SEQ ID NO: 207961 - protein, 15 aa, Artificial Sequence
  Description of Artificial Sequence: Synthetic peptide
  Seed: EWLKTRPILSPLTKG
EWLKYRPMLTPLMKG

SEQ ID NO: 207962 - protein, 15 aa, Artificial Sequence
  Description of Artificial Sequence: Synthetic peptide
  Seed: EWLKTRPILSPLTKG
EWLKYRPMLTPLNKG

SEQ ID NO: 207963 - protein, 15 aa, Artificial Sequence
  Description of Artificial Sequence: Synthetic peptide
  Seed: EWLKTRPILSPLTKG
EWLKYRPMLTPLPKG

SEQ ID NO: 207964 - protein, 15 aa, Artificial Sequence
  Description of Artificial Sequence: Synthetic peptide
  Seed: EWLKTRPILSPLTKG
EWLKYRPMLTPLQKG

SEQ ID NO: 207965 - protein, 15 aa, Artificial Sequence
  Description of Artificial Sequence: Synthetic peptide
  Seed: EWLKTRPILSPLTKG
EWLKYRPMLTPLSKG

SEQ ID NO: 207966 - protein, 15 aa, Artificial Sequence
  Description of Artificial Sequence: Synthetic peptide
  Seed: EWLKTRPILSPLTKG
EWLKYRPMLTPLTKG

SEQ ID NO: 207967 - protein, 15 aa, Artificial Sequence
  Description of Artificial Sequence: Synthetic peptide
  Seed: EWLKTRPILSPLTKG
EWLKYRPMLTPLVKG

SEQ ID NO: 207968 - protein, 15 aa, Artificial Sequence
  Description of Artificial Sequence: Synthetic peptide
  Seed: EWLKTRPILSPLTKG
EWLKYRPMLVPLAKG

SEQ ID NO: 207969 - protein, 15 aa, Artificial Sequence
  Description of Artificial Sequence: Synthetic peptide
  Seed: EWLKTRPILSPLTKG
EWLKYRPMLVPLGKG

SEQ ID NO: 207970 - protein, 15 aa, Artificial Sequence
  Description of Artificial Sequence: Synthetic peptide
  Seed: EWLKTRPILSPLTKG
EWLKYRPMLVPLHKG

SEQ ID NO: 207971 - protein, 15 aa, Artificial Sequence
  Description of Artificial Sequence: Synthetic peptide
  Seed: EWLKTRPILSPLTKG
EWLKYRPMLVPLNKG

SEQ ID NO: 207972 - protein, 15 aa, Artificial Sequence
  Description of Artificial Sequence: Synthetic peptide
  Seed: EWLKTRPILSPLTKG
EWLKYRPMLVPLQKG

SEQ ID NO: 207973 - protein, 15 aa, Artificial Sequence
  Description of Artificial Sequence: Synthetic peptide
  Seed: EWLKTRPILSPLTKG
EWLKYRPMLVPLSKG

SEQ ID NO: 207974 - protein, 15 aa, Artificial Sequence
  Description of Artificial Sequence: Synthetic peptide
  Seed: EWLKTRPILSPLTKG
EWLKYRPMLVPLTKG

SEQ ID NO: 207975 - protein, 15 aa, Artificial Sequence
  Description of Artificial Sequence: Synthetic peptide
  Seed: EWLKTRPILSPLTKG
EWLKYRPQLNPLAKG

SEQ ID NO: 207976 - protein, 15 aa, Artificial Sequence
  Description of Artificial Sequence: Synthetic peptide
  Seed: EWLKTRPILSPLTKG
EWLKYRPQLNPLSKG

SEQ ID NO: 207977 - protein, 15 aa, Artificial Sequence
  Description of Artificial Sequence: Synthetic peptide
  Seed: EWLKTRPILSPLTKG
EWLKYRPQLSPLAKG

SEQ ID NO: 207978 - protein, 15 aa, Artificial Sequence
  Description of Artificial Sequence: Synthetic peptide
  Seed: EWLKTRPILSPLTKG
EWLKYRPQLSPLIKG

SEQ ID NO: 207979 - protein, 15 aa, Artificial Sequence
  Description of Artificial Sequence: Synthetic peptide
  Seed: EWLKTRPILSPLTKG
EWLKYRPQLSPLLKG

SEQ ID NO: 207980 - protein, 15 aa, Artificial Sequence
  Description of Artificial Sequence: Synthetic peptide
  Seed: EWLKTRPILSPLTKG
EWLKYRPQLSPLSKG

SEQ ID NO: 207981 - protein, 15 aa, Artificial Sequence
  Description of Artificial Sequence: Synthetic peptide
  Seed: EWLKTRPILSPLTKG
EWLKYRPQLSPLVKG

SEQ ID NO: 207982 - protein, 15 aa, Artificial Sequence
  Description of Artificial Sequence: Synthetic peptide
  Seed: EWLKTRPILSPLTKG
EWLKYRPQLTPLAKG

SEQ ID NO: 207983 - protein, 15 aa, Artificial Sequence
  Description of Artificial Sequence: Synthetic peptide
  Seed: EWLKTRPILSPLTKG
EWLKYRPQLTPLSKG

SEQ ID NO: 207984 - protein, 15 aa, Artificial Sequence
  Description of Artificial Sequence: Synthetic peptide
  Seed: EWLKTRPILSPLTKG
EWLKYRPSLAPLIKG

SEQ ID NO: 207985 - protein, 15 aa, Artificial Sequence
  Description of Artificial Sequence: Synthetic peptide
  Seed: EWLKTRPILSPLTKG
EWLKYRPSLAPLLKG

SEQ ID NO: 207986 - protein, 15 aa, Artificial Sequence
  Description of Artificial Sequence: Synthetic peptide
  Seed: EWLKTRPILSPLTKG
EWLKYRPSLAPLVKG

SEQ ID NO: 207987 - protein, 15 aa, Artificial Sequence
  Description of Artificial Sequence: Synthetic peptide
  Seed: EWLKTRPILSPLTKG
EWLKYRPSLGPLLKG

SEQ ID NO: 207988 - protein, 15 aa, Artificial Sequence
  Description of Artificial Sequence: Synthetic peptide
  Seed: EWLKTRPILSPLTKG
EWLKYRPSLNPLAKG

SEQ ID NO: 207989 - protein, 15 aa, Artificial Sequence
  Description of Artificial Sequence: Synthetic peptide
  Seed: EWLKTRPILSPLTKG
EWLKYRPSLNPLSKG

SEQ ID NO: 207990 - protein, 15 aa, Artificial Sequence
  Description of Artificial Sequence: Synthetic peptide
  Seed: EWLKTRPILSPLTKG
EWLKYRPSLSPLAKG

SEQ ID NO: 207991 - protein, 15 aa, Artificial Sequence
  Description of Artificial Sequence: Synthetic peptide
  Seed: EWLKTRPILSPLTKG
EWLKYRPSLSPLIKG

SEQ ID NO: 207992 - protein, 15 aa, Artificial Sequence
  Description of Artificial Sequence: Synthetic peptide
  Seed: EWLKTRPILSPLTKG
EWLKYRPSLSPLLKG

SEQ ID NO: 207993 - protein, 15 aa, Artificial Sequence
  Description of Artificial Sequence: Synthetic peptide
  Seed: EWLKTRPILSPLTKG
EWLKYRPSLSPLSKG

SEQ ID NO: 207994 - protein, 15 aa, Artificial Sequence
  Description of Artificial Sequence: Synthetic peptide
  Seed: EWLKTRPILSPLTKG
EWLKYRPSLSPLVKG

SEQ ID NO: 207995 - protein, 15 aa, Artificial Sequence
  Description of Artificial Sequence: Synthetic peptide
  Seed: EWLKTRPILSPLTKG
EWLKYRPSLTPLAKG

SEQ ID NO: 207996 - protein, 15 aa, Artificial Sequence
  Description of Artificial Sequence: Synthetic peptide
  Seed: EWLKTRPILSPLTKG
EWLKYRPSLTPLSKG

SEQ ID NO: 207997 - protein, 15 aa, Artificial Sequence
  Description of Artificial Sequence: Synthetic peptide
  Seed: EWLKTRPILSPLTKG
EWLKYRPTLAPLIKG

SEQ ID NO: 207998 - protein, 15 aa, Artificial Sequence
  Description of Artificial Sequence: Synthetic peptide
  Seed: EWLKTRPILSPLTKG
EWLKYRPTLAPLLKG

SEQ ID NO: 207999 - protein, 15 aa, Artificial Sequence
  Description of Artificial Sequence: Synthetic peptide
  Seed: EWLKTRPILSPLTKG
EWLKYRPTLAPLVKG

SEQ ID NO: 208000 - protein, 15 aa, Artificial Sequence
  Description of Artificial Sequence: Synthetic peptide
  Seed: EWLKTRPILSPLTKG
EWLKYRPTLGPLIKG

SEQ ID NO: 208001 - protein, 15 aa, Artificial Sequence
  Description of Artificial Sequence: Synthetic peptide
  Seed: EWLKTRPILSPLTKG
EWLKYRPTLGPLLKG

SEQ ID NO: 208002 - protein, 15 aa, Artificial Sequence
  Description of Artificial Sequence: Synthetic peptide
  Seed: EWLKTRPILSPLTKG
EWLKYRPTLGPLVKG

SEQ ID NO: 208003 - protein, 15 aa, Artificial Sequence
  Description of Artificial Sequence: Synthetic peptide
  Seed: EWLKTRPILSPLTKG
EWLKYRPTLNPLAKG

SEQ ID NO: 208004 - protein, 15 aa, Artificial Sequence
  Description of Artificial Sequence: Synthetic peptide
  Seed: EWLKTRPILSPLTKG
EWLKYRPTLNPLSKG

SEQ ID NO: 208005 - protein, 15 aa, Artificial Sequence
  Description of Artificial Sequence: Synthetic peptide
  Seed: EWLKTRPILSPLTKG
EWLKYRPTLSPLAKG

SEQ ID NO: 208006 - protein, 15 aa, Artificial Sequence
  Description of Artificial Sequence: Synthetic peptide
  Seed: EWLKTRPILSPLTKG
EWLKYRPTLSPLIKG

SEQ ID NO: 208007 - protein, 15 aa, Artificial Sequence
  Description of Artificial Sequence: Synthetic peptide
  Seed: EWLKTRPILSPLTKG
EWLKYRPTLSPLLKG

SEQ ID NO: 208008 - protein, 15 aa, Artificial Sequence
  Description of Artificial Sequence: Synthetic peptide
  Seed: EWLKTRPILSPLTKG
EWLKYRPTLSPLSKG

SEQ ID NO: 208009 - protein, 15 aa, Artificial Sequence
  Description of Artificial Sequence: Synthetic peptide
  Seed: EWLKTRPILSPLTKG
EWLKYRPTLSPLVKG

SEQ ID NO: 208010 - protein, 15 aa, Artificial Sequence
  Description of Artificial Sequence: Synthetic peptide
  Seed: EWLKTRPILSPLTKG
EWLKYRPTLTPLAKG

SEQ ID NO: 208011 - protein, 15 aa, Artificial Sequence
  Description of Artificial Sequence: Synthetic peptide
  Seed: EWLKTRPILSPLTKG
EWLKYRPTLTPLSKG

SEQ ID NO: 208012 - protein, 15 aa, Artificial Sequence
  Description of Artificial Sequence: Synthetic peptide
  Seed: EWLKTRPILSPLTKG
EWLKYRPVLAPLAKG

SEQ ID NO: 208013 - protein, 15 aa, Artificial Sequence
  Description of Artificial Sequence: Synthetic peptide
  Seed: EWLKTRPILSPLTKG
EWLKYRPVLAPLIKG

SEQ ID NO: 208014 - protein, 15 aa, Artificial Sequence
  Description of Artificial Sequence: Synthetic peptide
  Seed: EWLKTRPILSPLTKG
EWLKYRPVLAPLLKG

SEQ ID NO: 208015 - protein, 15 aa, Artificial Sequence
  Description of Artificial Sequence: Synthetic peptide
  Seed: EWLKTRPILSPLTKG
EWLKYRPVLAPLSKG

SEQ ID NO: 208016 - protein, 15 aa, Artificial Sequence
  Description of Artificial Sequence: Synthetic peptide
  Seed: EWLKTRPILSPLTKG
EWLKYRPVLAPLVKG

SEQ ID NO: 208017 - protein, 15 aa, Artificial Sequence
  Description of Artificial Sequence: Synthetic peptide
  Seed: EWLKTRPILSPLTKG
EWLKYRPVLGPLAKG

SEQ ID NO: 208018 - protein, 15 aa, Artificial Sequence
  Description of Artificial Sequence: Synthetic peptide
  Seed: EWLKTRPILSPLTKG
EWLKYRPVLGPLIKG

SEQ ID NO: 208019 - protein, 15 aa, Artificial Sequence
  Description of Artificial Sequence: Synthetic peptide
  Seed: EWLKTRPILSPLTKG
EWLKYRPVLGPLLKG

SEQ ID NO: 208020 - protein, 15 aa, Artificial Sequence
  Description of Artificial Sequence: Synthetic peptide
  Seed: EWLKTRPILSPLTKG
EWLKYRPVLGPLVKG

SEQ ID NO: 208021 - protein, 15 aa, Artificial Sequence
  Description of Artificial Sequence: Synthetic peptide
  Seed: EWLKTRPILSPLTKG
EWLKYRPVLNPLAKG

SEQ ID NO: 208022 - protein, 15 aa, Artificial Sequence
  Description of Artificial Sequence: Synthetic peptide
  Seed: EWLKTRPILSPLTKG
EWLKYRPVLNPLGKG

SEQ ID NO: 208023 - protein, 15 aa, Artificial Sequence
  Description of Artificial Sequence: Synthetic peptide
  Seed: EWLKTRPILSPLTKG
EWLKYRPVLNPLIKG

SEQ ID NO: 208024 - protein, 15 aa, Artificial Sequence
  Description of Artificial Sequence: Synthetic peptide
  Seed: EWLKTRPILSPLTKG
EWLKYRPVLNPLLKG

SEQ ID NO: 208025 - protein, 15 aa, Artificial Sequence
  Description of Artificial Sequence: Synthetic peptide
  Seed: EWLKTRPILSPLTKG
EWLKYRPVLNPLNKG

SEQ ID NO: 208026 - protein, 15 aa, Artificial Sequence
  Description of Artificial Sequence: Synthetic peptide
  Seed: EWLKTRPILSPLTKG
EWLKYRPVLNPLQKG

SEQ ID NO: 208027 - protein, 15 aa, Artificial Sequence
  Description of Artificial Sequence: Synthetic peptide
  Seed: EWLKTRPILSPLTKG
EWLKYRPVLNPLSKG

SEQ ID NO: 208028 - protein, 15 aa, Artificial Sequence
  Description of Artificial Sequence: Synthetic peptide
  Seed: EWLKTRPILSPLTKG
EWLKYRPVLNPLTKG

SEQ ID NO: 208029 - protein, 15 aa, Artificial Sequence
  Description of Artificial Sequence: Synthetic peptide
  Seed: EWLKTRPILSPLTKG
EWLKYRPVLNPLVKG

SEQ ID NO: 208030 - protein, 15 aa, Artificial Sequence
  Description of Artificial Sequence: Synthetic peptide
  Seed: EWLKTRPILSPLTKG
EWLKYRPVLSPLAKG

SEQ ID NO: 208031 - protein, 15 aa, Artificial Sequence
  Description of Artificial Sequence: Synthetic peptide
  Seed: EWLKTRPILSPLTKG
EWLKYRPVLSPLGKG

SEQ ID NO: 208032 - protein, 15 aa, Artificial Sequence
  Description of Artificial Sequence: Synthetic peptide
  Seed: EWLKTRPILSPLTKG
EWLKYRPVLSPLIKG

SEQ ID NO: 208033 - protein, 15 aa, Artificial Sequence
  Description of Artificial Sequence: Synthetic peptide
  Seed: EWLKTRPILSPLTKG
EWLKYRPVLSPLLKG

SEQ ID NO: 208034 - protein, 15 aa, Artificial Sequence
  Description of Artificial Sequence: Synthetic peptide
  Seed: EWLKTRPILSPLTKG
EWLKYRPVLSPLMKG

SEQ ID NO: 208035 - protein, 15 aa, Artificial Sequence
  Description of Artificial Sequence: Synthetic peptide
  Seed: EWLKTRPILSPLTKG
EWLKYRPVLSPLQKG

SEQ ID NO: 208036 - protein, 15 aa, Artificial Sequence
  Description of Artificial Sequence: Synthetic peptide
  Seed: EWLKTRPILSPLTKG
EWLKYRPVLSPLSKG

SEQ ID NO: 208037 - protein, 15 aa, Artificial Sequence
  Description of Artificial Sequence: Synthetic peptide
  Seed: EWLKTRPILSPLTKG
EWLKYRPVLSPLTKG

SEQ ID NO: 208038 - protein, 15 aa, Artificial Sequence
  Description of Artificial Sequence: Synthetic peptide
  Seed: EWLKTRPILSPLTKG
EWLKYRPVLSPLVKG

SEQ ID NO: 208039 - protein, 15 aa, Artificial Sequence
  Description of Artificial Sequence: Synthetic peptide
  Seed: EWLKTRPILSPLTKG
EWLKYRPVLTPLAKG

SEQ ID NO: 208040 - protein, 15 aa, Artificial Sequence
  Description of Artificial Sequence: Synthetic peptide
  Seed: EWLKTRPILSPLTKG
EWLKYRPVLTPLGKG

SEQ ID NO: 208041 - protein, 15 aa, Artificial Sequence
  Description of Artificial Sequence: Synthetic peptide
  Seed: EWLKTRPILSPLTKG
EWLKYRPVLTPLIKG

SEQ ID NO: 208042 - protein, 15 aa, Artificial Sequence
  Description of Artificial Sequence: Synthetic peptide
  Seed: EWLKTRPILSPLTKG
EWLKYRPVLTPLLKG

SEQ ID NO: 208043 - protein, 15 aa, Artificial Sequence
  Description of Artificial Sequence: Synthetic peptide
  Seed: EWLKTRPILSPLTKG
EWLKYRPVLTPLNKG

SEQ ID NO: 208044 - protein, 15 aa, Artificial Sequence
  Description of Artificial Sequence: Synthetic peptide
  Seed: EWLKTRPILSPLTKG
EWLKYRPVLTPLQKG

SEQ ID NO: 208045 - protein, 15 aa, Artificial Sequence
  Description of Artificial Sequence: Synthetic peptide
  Seed: EWLKTRPILSPLTKG
EWLKYRPVLTPLSKG

SEQ ID NO: 208046 - protein, 15 aa, Artificial Sequence
  Description of Artificial Sequence: Synthetic peptide
  Seed: EWLKTRPILSPLTKG
EWLKYRPVLTPLTKG

SEQ ID NO: 208047 - protein, 15 aa, Artificial Sequence
  Description of Artificial Sequence: Synthetic peptide
  Seed: EWLKTRPILSPLTKG
EWLKYRPVLTPLVKG

SEQ ID NO: 208048 - protein, 15 aa, Artificial Sequence
  Description of Artificial Sequence: Synthetic peptide
  Seed: EWLKTRPILSPLTKG
EWLKYRPVLVPLAKG

SEQ ID NO: 208049 - protein, 15 aa, Artificial Sequence
  Description of Artificial Sequence: Synthetic peptide
  Seed: EWLKTRPILSPLTKG
EWLKYRPVLVPLSKG

SEQ ID NO: 208050 - protein, 15 aa, Artificial Sequence
  Description of Artificial Sequence: Synthetic peptide
  Seed: EWLKTRPILSPLTKG
EWLKYRPWLSPLAKG

SEQ ID NO: 208051 - protein, 15 aa, Artificial Sequence
  Description of Artificial Sequence: Synthetic peptide
  Seed: EWLKTRPILSPLTKG
EWLKYRPWLSPLIKG

SEQ ID NO: 208052 - protein, 15 aa, Artificial Sequence
  Description of Artificial Sequence: Synthetic peptide
  Seed: EWLKTRPILSPLTKG
EWLKYRPWLSPLLKG

SEQ ID NO: 208053 - protein, 15 aa, Artificial Sequence
  Description of Artificial Sequence: Synthetic peptide
  Seed: EWLKTRPILSPLTKG
EWLKYRPWLSPLVKG

SEQ ID NO: 208054 - protein, 15 aa, Artificial Sequence
  Description of Artificial Sequence: Synthetic peptide
  Seed: EWLKTRPILSPLTKG
EWLKYRPYLAPLLKG

SEQ ID NO: 208055 - protein, 15 aa, Artificial Sequence
  Description of Artificial Sequence: Synthetic peptide
  Seed: EWLKTRPILSPLTKG
EWLKYRPYLAPLVKG

SEQ ID NO: 208056 - protein, 15 aa, Artificial Sequence
  Description of Artificial Sequence: Synthetic peptide
  Seed: EWLKTRPILSPLTKG
EWLKYRPYLNPLLKG

SEQ ID NO: 208057 - protein, 15 aa, Artificial Sequence
  Description of Artificial Sequence: Synthetic peptide
  Seed: EWLKTRPILSPLTKG
EWLKYRPYLNPLVKG

SEQ ID NO: 208058 - protein, 15 aa, Artificial Sequence
  Description of Artificial Sequence: Synthetic peptide
  Seed: EWLKTRPILSPLTKG
EWLKYRPYLSPLAKG

SEQ ID NO: 208059 - protein, 15 aa, Artificial Sequence
  Description of Artificial Sequence: Synthetic peptide
  Seed: EWLKTRPILSPLTKG
EWLKYRPYLSPLIKG

SEQ ID NO: 208060 - protein, 15 aa, Artificial Sequence
  Description of Artificial Sequence: Synthetic peptide
  Seed: EWLKTRPILSPLTKG
EWLKYRPYLSPLLKG

SEQ ID NO: 208061 - protein, 15 aa, Artificial Sequence
  Description of Artificial Sequence: Synthetic peptide
  Seed: EWLKTRPILSPLTKG
EWLKYRPYLSPLVKG

SEQ ID NO: 208062 - protein, 15 aa, Artificial Sequence
  Description of Artificial Sequence: Synthetic peptide
  Seed: EWLKTRPILSPLTKG
ECLKARAILIPLTKG

SEQ ID NO: 208063 - protein, 15 aa, Artificial Sequence
  Description of Artificial Sequence: Synthetic peptide
  Seed: EWLKTRPILSPLTKG
ECLKARAILLPLTKG

SEQ ID NO: 208064 - protein, 15 aa, Artificial Sequence
  Description of Artificial Sequence: Synthetic peptide
  Seed: EWLKTRPILSPLTKG
ECLKARAILVPLTKG

SEQ ID NO: 208065 - protein, 15 aa, Artificial Sequence
  Description of Artificial Sequence: Synthetic peptide
  Seed: EWLKTRPILSPLTKG
ECLKLRAILLPLTKG

SEQ ID NO: 208066 - protein, 15 aa, Artificial Sequence
  Description of Artificial Sequence: Synthetic peptide
  Seed: EWLKTRPILSPLTKG
ECLKLRGILLPLTKG

SEQ ID NO: 208067 - protein, 15 aa, Artificial Sequence
  Description of Artificial Sequence: Synthetic peptide
  Seed: EWLKTRPILSPLTKG
ECLKLRGILMPLTKG

SEQ ID NO: 208068 - protein, 15 aa, Artificial Sequence
  Description of Artificial Sequence: Synthetic peptide
  Seed: EWLKTRPILSPLTKG
ECLKLRPILLPLTKG

SEQ ID NO: 208069 - protein, 15 aa, Artificial Sequence
  Description of Artificial Sequence: Synthetic peptide
  Seed: EWLKTRPILSPLTKG
ECLKMRAILLPLTKG

SEQ ID NO: 208070 - protein, 15 aa, Artificial Sequence
  Description of Artificial Sequence: Synthetic peptide
  Seed: EWLKTRPILSPLTKG
ECLKMRGILIPLTKG

SEQ ID NO: 208071 - protein, 15 aa, Artificial Sequence
  Description of Artificial Sequence: Synthetic peptide
  Seed: EWLKTRPILSPLTKG
ECLKMRGILLPLTKG

SEQ ID NO: 208072 - protein, 15 aa, Artificial Sequence
  Description of Artificial Sequence: Synthetic peptide
  Seed: EWLKTRPILSPLTKG
ECLKMRGILMPLTKG

SEQ ID NO: 208073 - protein, 15 aa, Artificial Sequence
  Description of Artificial Sequence: Synthetic peptide
  Seed: EWLKTRPILSPLTKG
ECLKMRPILLPLTKG

SEQ ID NO: 208074 - protein, 15 aa, Artificial Sequence
  Description of Artificial Sequence: Synthetic peptide
  Seed: EWLKTRPILSPLTKG
ECLKMRSILLPLTKG

SEQ ID NO: 208075 - protein, 15 aa, Artificial Sequence
  Description of Artificial Sequence: Synthetic peptide
  Seed: EWLKTRPILSPLTKG
EFLKARAILAPLTKG

SEQ ID NO: 208076 - protein, 15 aa, Artificial Sequence
  Description of Artificial Sequence: Synthetic peptide
  Seed: EWLKTRPILSPLTKG
EFLKARAILCPLTKG

SEQ ID NO: 208077 - protein, 15 aa, Artificial Sequence
  Description of Artificial Sequence: Synthetic peptide
  Seed: EWLKTRPILSPLTKG
EFLKARAILDPLTKG

SEQ ID NO: 208078 - protein, 15 aa, Artificial Sequence
  Description of Artificial Sequence: Synthetic peptide
  Seed: EWLKTRPILSPLTKG
EFLKARAILEPLTKG

SEQ ID NO: 208079 - protein, 15 aa, Artificial Sequence
  Description of Artificial Sequence: Synthetic peptide
  Seed: EWLKTRPILSPLTKG
EFLKARAILFPLTKG

SEQ ID NO: 208080 - protein, 15 aa, Artificial Sequence
  Description of Artificial Sequence: Synthetic peptide
  Seed: EWLKTRPILSPLTKG
EFLKARAILGPLTKG

SEQ ID NO: 208081 - protein, 15 aa, Artificial Sequence
  Description of Artificial Sequence: Synthetic peptide
  Seed: EWLKTRPILSPLTKG
EFLKARAILHPLTKG

SEQ ID NO: 208082 - protein, 15 aa, Artificial Sequence
  Description of Artificial Sequence: Synthetic peptide
  Seed: EWLKTRPILSPLTKG
EFLKARAILIPLTKG

SEQ ID NO: 208083 - protein, 15 aa, Artificial Sequence
  Description of Artificial Sequence: Synthetic peptide
  Seed: EWLKTRPILSPLTKG
EFLKARAILKPLTKG

SEQ ID NO: 208084 - protein, 15 aa, Artificial Sequence
  Description of Artificial Sequence: Synthetic peptide
  Seed: EWLKTRPILSPLTKG
EFLKARAILLPLTKG

SEQ ID NO: 208085 - protein, 15 aa, Artificial Sequence
  Description of Artificial Sequence: Synthetic peptide
  Seed: EWLKTRPILSPLTKG
EFLKARAILMPLTKG

SEQ ID NO: 208086 - protein, 15 aa, Artificial Sequence
  Description of Artificial Sequence: Synthetic peptide
  Seed: EWLKTRPILSPLTKG
EFLKARAILNPLTKG

SEQ ID NO: 208087 - protein, 15 aa, Artificial Sequence
  Description of Artificial Sequence: Synthetic peptide
  Seed: EWLKTRPILSPLTKG
EFLKARAILPPLTKG

SEQ ID NO: 208088 - protein, 15 aa, Artificial Sequence
  Description of Artificial Sequence: Synthetic peptide
  Seed: EWLKTRPILSPLTKG
EFLKARAILQPLTKG

SEQ ID NO: 208089 - protein, 15 aa, Artificial Sequence
  Description of Artificial Sequence: Synthetic peptide
  Seed: EWLKTRPILSPLTKG
EFLKARAILRPLTKG

SEQ ID NO: 208090 - protein, 15 aa, Artificial Sequence
  Description of Artificial Sequence: Synthetic peptide
  Seed: EWLKTRPILSPLTKG
EFLKARAILSPLTKG

SEQ ID NO: 208091 - protein, 15 aa, Artificial Sequence
  Description of Artificial Sequence: Synthetic peptide
  Seed: EWLKTRPILSPLTKG
EFLKARAILTPLTKG

SEQ ID NO: 208092 - protein, 15 aa, Artificial Sequence
  Description of Artificial Sequence: Synthetic peptide
  Seed: EWLKTRPILSPLTKG
EFLKARAILVPLTKG

SEQ ID NO: 208093 - protein, 15 aa, Artificial Sequence
  Description of Artificial Sequence: Synthetic peptide
  Seed: EWLKTRPILSPLTKG
EFLKARAILWPLTKG

SEQ ID NO: 208094 - protein, 15 aa, Artificial Sequence
  Description of Artificial Sequence: Synthetic peptide
  Seed: EWLKTRPILSPLTKG
EFLKARAILYPLTKG

SEQ ID NO: 208095 - protein, 15 aa, Artificial Sequence
  Description of Artificial Sequence: Synthetic peptide
  Seed: EWLKTRPILSPLTKG
EFLKAREILLPLTKG

SEQ ID NO: 208096 - protein, 15 aa, Artificial Sequence
  Description of Artificial Sequence: Synthetic peptide
  Seed: EWLKTRPILSPLTKG
EFLKAREILVPLTKG

SEQ ID NO: 208097 - protein, 15 aa, Artificial Sequence
  Description of Artificial Sequence: Synthetic peptide
  Seed: EWLKTRPILSPLTKG
EFLKARGILAPLTKG

SEQ ID NO: 208098 - protein, 15 aa, Artificial Sequence
  Description of Artificial Sequence: Synthetic peptide
  Seed: EWLKTRPILSPLTKG
EFLKARGILCPLTKG

SEQ ID NO: 208099 - protein, 15 aa, Artificial Sequence
  Description of Artificial Sequence: Synthetic peptide
  Seed: EWLKTRPILSPLTKG
EFLKARGILFPLTKG

SEQ ID NO: 208100 - protein, 15 aa, Artificial Sequence
  Description of Artificial Sequence: Synthetic peptide
  Seed: EWLKTRPILSPLTKG
EFLKARGILGPLTKG

SEQ ID NO: 208101 - protein, 15 aa, Artificial Sequence
  Description of Artificial Sequence: Synthetic peptide
  Seed: EWLKTRPILSPLTKG
EFLKARGILHPLTKG

SEQ ID NO: 208102 - protein, 15 aa, Artificial Sequence
  Description of Artificial Sequence: Synthetic peptide
  Seed: EWLKTRPILSPLTKG
EFLKARGILIPLTKG

SEQ ID NO: 208103 - protein, 15 aa, Artificial Sequence
  Description of Artificial Sequence: Synthetic peptide
  Seed: EWLKTRPILSPLTKG
EFLKARGILLPLTKG

SEQ ID NO: 208104 - protein, 15 aa, Artificial Sequence
  Description of Artificial Sequence: Synthetic peptide
  Seed: EWLKTRPILSPLTKG
EFLKARGILMPLTKG

SEQ ID NO: 208105 - protein, 15 aa, Artificial Sequence
  Description of Artificial Sequence: Synthetic peptide
  Seed: EWLKTRPILSPLTKG
EFLKARGILNPLTKG

SEQ ID NO: 208106 - protein, 15 aa, Artificial Sequence
  Description of Artificial Sequence: Synthetic peptide
  Seed: EWLKTRPILSPLTKG
EFLKARGILPPLTKG

SEQ ID NO: 208107 - protein, 15 aa, Artificial Sequence
  Description of Artificial Sequence: Synthetic peptide
  Seed: EWLKTRPILSPLTKG
EFLKARGILQPLTKG

SEQ ID NO: 208108 - protein, 15 aa, Artificial Sequence
  Description of Artificial Sequence: Synthetic peptide
  Seed: EWLKTRPILSPLTKG
EFLKARGILSPLTKG

SEQ ID NO: 208109 - protein, 15 aa, Artificial Sequence
  Description of Artificial Sequence: Synthetic peptide
  Seed: EWLKTRPILSPLTKG
EFLKARGILTPLTKG

SEQ ID NO: 208110 - protein, 15 aa, Artificial Sequence
  Description of Artificial Sequence: Synthetic peptide
  Seed: EWLKTRPILSPLTKG
EFLKARGILVPLTKG

SEQ ID NO: 208111 - protein, 15 aa, Artificial Sequence
  Description of Artificial Sequence: Synthetic peptide
  Seed: EWLKTRPILSPLTKG
EFLKARGILYPLTKG

SEQ ID NO: 208112 - protein, 15 aa, Artificial Sequence
  Description of Artificial Sequence: Synthetic peptide
  Seed: EWLKTRPILSPLTKG
EFLKARIILAPLTKG

SEQ ID NO: 208113 - protein, 15 aa, Artificial Sequence
  Description of Artificial Sequence: Synthetic peptide
  Seed: EWLKTRPILSPLTKG
EFLKARIILIPLTKG

SEQ ID NO: 208114 - protein, 15 aa, Artificial Sequence
  Description of Artificial Sequence: Synthetic peptide
  Seed: EWLKTRPILSPLTKG
EFLKARIILLPLTKG

SEQ ID NO: 208115 - protein, 15 aa, Artificial Sequence
  Description of Artificial Sequence: Synthetic peptide
  Seed: EWLKTRPILSPLTKG
EFLKARIILNPLTKG

SEQ ID NO: 208116 - protein, 15 aa, Artificial Sequence
  Description of Artificial Sequence: Synthetic peptide
  Seed: EWLKTRPILSPLTKG
EFLKARIILSPLTKG

SEQ ID NO: 208117 - protein, 15 aa, Artificial Sequence
  Description of Artificial Sequence: Synthetic peptide
  Seed: EWLKTRPILSPLTKG
EFLKARIILTPLTKG

SEQ ID NO: 208118 - protein, 15 aa, Artificial Sequence
  Description of Artificial Sequence: Synthetic peptide
  Seed: EWLKTRPILSPLTKG
EFLKARIILVPLTKG

SEQ ID NO: 208119 - protein, 15 aa, Artificial Sequence
  Description of Artificial Sequence: Synthetic peptide
  Seed: EWLKTRPILSPLTKG
EFLKARKILAPLTKG

SEQ ID NO: 208120 - protein, 15 aa, Artificial Sequence
  Description of Artificial Sequence: Synthetic peptide
  Seed: EWLKTRPILSPLTKG
EFLKARKILGPLTKG

SEQ ID NO: 208121 - protein, 15 aa, Artificial Sequence
  Description of Artificial Sequence: Synthetic peptide
  Seed: EWLKTRPILSPLTKG
EFLKARKILHPLTKG

SEQ ID NO: 208122 - protein, 15 aa, Artificial Sequence
  Description of Artificial Sequence: Synthetic peptide
  Seed: EWLKTRPILSPLTKG
EFLKARKILKPLTKG

SEQ ID NO: 208123 - protein, 15 aa, Artificial Sequence
  Description of Artificial Sequence: Synthetic peptide
  Seed: EWLKTRPILSPLTKG
EFLKARKILNPLTKG

SEQ ID NO: 208124 - protein, 15 aa, Artificial Sequence
  Description of Artificial Sequence: Synthetic peptide
  Seed: EWLKTRPILSPLTKG
EFLKARKILQPLTKG

SEQ ID NO: 208125 - protein, 15 aa, Artificial Sequence
  Description of Artificial Sequence: Synthetic peptide
  Seed: EWLKTRPILSPLTKG
EFLKARKILRPLTKG

SEQ ID NO: 208126 - protein, 15 aa, Artificial Sequence
  Description of Artificial Sequence: Synthetic peptide
  Seed: EWLKTRPILSPLTKG
EFLKARKILSPLTKG

SEQ ID NO: 208127 - protein, 15 aa, Artificial Sequence
  Description of Artificial Sequence: Synthetic peptide
  Seed: EWLKTRPILSPLTKG
EFLKARKILTPLTKG

SEQ ID NO: 208128 - protein, 15 aa, Artificial Sequence
  Description of Artificial Sequence: Synthetic peptide
  Seed: EWLKTRPILSPLTKG
EFLKARMILVPLTKG

SEQ ID NO: 208129 - protein, 15 aa, Artificial Sequence
  Description of Artificial Sequence: Synthetic peptide
  Seed: EWLKTRPILSPLTKG
EFLKARNILAPLTKG

SEQ ID NO: 208130 - protein, 15 aa, Artificial Sequence
  Description of Artificial Sequence: Synthetic peptide
  Seed: EWLKTRPILSPLTKG
EFLKARNILCPLTKG

SEQ ID NO: 208131 - protein, 15 aa, Artificial Sequence
  Description of Artificial Sequence: Synthetic peptide
  Seed: EWLKTRPILSPLTKG
EFLKARNILGPLTKG

SEQ ID NO: 208132 - protein, 15 aa, Artificial Sequence
  Description of Artificial Sequence: Synthetic peptide
  Seed: EWLKTRPILSPLTKG
EFLKARNILIPLTKG

SEQ ID NO: 208133 - protein, 15 aa, Artificial Sequence
  Description of Artificial Sequence: Synthetic peptide
  Seed: EWLKTRPILSPLTKG
EFLKARNILLPLTKG

SEQ ID NO: 208134 - protein, 15 aa, Artificial Sequence
  Description of Artificial Sequence: Synthetic peptide
  Seed: EWLKTRPILSPLTKG
EFLKARNILMPLTKG

SEQ ID NO: 208135 - protein, 15 aa, Artificial Sequence
  Description of Artificial Sequence: Synthetic peptide
  Seed: EWLKTRPILSPLTKG
EFLKARNILNPLTKG

SEQ ID NO: 208136 - protein, 15 aa, Artificial Sequence
  Description of Artificial Sequence: Synthetic peptide
  Seed: EWLKTRPILSPLTKG
EFLKARNILSPLTKG

SEQ ID NO: 208137 - protein, 15 aa, Artificial Sequence
  Description of Artificial Sequence: Synthetic peptide
  Seed: EWLKTRPILSPLTKG
EFLKARNILTPLTKG

SEQ ID NO: 208138 - protein, 15 aa, Artificial Sequence
  Description of Artificial Sequence: Synthetic peptide
  Seed: EWLKTRPILSPLTKG
EFLKARNILVPLTKG

SEQ ID NO: 208139 - protein, 15 aa, Artificial Sequence
  Description of Artificial Sequence: Synthetic peptide
  Seed: EWLKTRPILSPLTKG
EFLKARPILAPLTKG

SEQ ID NO: 208140 - protein, 15 aa, Artificial Sequence
  Description of Artificial Sequence: Synthetic peptide
  Seed: EWLKTRPILSPLTKG
EFLKARPILCPLTKG

SEQ ID NO: 208141 - protein, 15 aa, Artificial Sequence
  Description of Artificial Sequence: Synthetic peptide
  Seed: EWLKTRPILSPLTKG
EFLKARPILDPLTKG

SEQ ID NO: 208142 - protein, 15 aa, Artificial Sequence
  Description of Artificial Sequence: Synthetic peptide
  Seed: EWLKTRPILSPLTKG
EFLKARPILFPLTKG

SEQ ID NO: 208143 - protein, 15 aa, Artificial Sequence
  Description of Artificial Sequence: Synthetic peptide
  Seed: EWLKTRPILSPLTKG
EFLKARPILGPLTKG

SEQ ID NO: 208144 - protein, 15 aa, Artificial Sequence
  Description of Artificial Sequence: Synthetic peptide
  Seed: EWLKTRPILSPLTKG
EFLKARPILHPLTKG

SEQ ID NO: 208145 - protein, 15 aa, Artificial Sequence
  Description of Artificial Sequence: Synthetic peptide
  Seed: EWLKTRPILSPLTKG
EFLKARPILIPLTKG

SEQ ID NO: 208146 - protein, 15 aa, Artificial Sequence
  Description of Artificial Sequence: Synthetic peptide
  Seed: EWLKTRPILSPLTKG
EFLKARPILLPLTKG

SEQ ID NO: 208147 - protein, 15 aa, Artificial Sequence
  Description of Artificial Sequence: Synthetic peptide
  Seed: EWLKTRPILSPLTKG
EFLKARPILMPLTKG

SEQ ID NO: 208148 - protein, 15 aa, Artificial Sequence
  Description of Artificial Sequence: Synthetic peptide
  Seed: EWLKTRPILSPLTKG
EFLKARPILNPLTKG

SEQ ID NO: 208149 - protein, 15 aa, Artificial Sequence
  Description of Artificial Sequence: Synthetic peptide
  Seed: EWLKTRPILSPLTKG
EFLKARPILPPLTKG

SEQ ID NO: 208150 - protein, 15 aa, Artificial Sequence
  Description of Artificial Sequence: Synthetic peptide
  Seed: EWLKTRPILSPLTKG
EFLKARPILQPLTKG

SEQ ID NO: 208151 - protein, 15 aa, Artificial Sequence
  Description of Artificial Sequence: Synthetic peptide
  Seed: EWLKTRPILSPLTKG
EFLKARPILSPLTKG

SEQ ID NO: 208152 - protein, 15 aa, Artificial Sequence
  Description of Artificial Sequence: Synthetic peptide
  Seed: EWLKTRPILSPLTKG
EFLKARPILTPLTKG

SEQ ID NO: 208153 - protein, 15 aa, Artificial Sequence
  Description of Artificial Sequence: Synthetic peptide
  Seed: EWLKTRPILSPLTKG
EFLKARPILVPLTKG

SEQ ID NO: 208154 - protein, 15 aa, Artificial Sequence
  Description of Artificial Sequence: Synthetic peptide
  Seed: EWLKTRPILSPLTKG
EFLKARPILYPLTKG

SEQ ID NO: 208155 - protein, 15 aa, Artificial Sequence
  Description of Artificial Sequence: Synthetic peptide
  Seed: EWLKTRPILSPLTKG
EFLKARQILIPLTKG

SEQ ID NO: 208156 - protein, 15 aa, Artificial Sequence
  Description of Artificial Sequence: Synthetic peptide
  Seed: EWLKTRPILSPLTKG
EFLKARQILLPLTKG

SEQ ID NO: 208157 - protein, 15 aa, Artificial Sequence
  Description of Artificial Sequence: Synthetic peptide
  Seed: EWLKTRPILSPLTKG
EFLKARQILVPLTKG

SEQ ID NO: 208158 - protein, 15 aa, Artificial Sequence
  Description of Artificial Sequence: Synthetic peptide
  Seed: EWLKTRPILSPLTKG
EFLKARRILAPLTKG

SEQ ID NO: 208159 - protein, 15 aa, Artificial Sequence
  Description of Artificial Sequence: Synthetic peptide
  Seed: EWLKTRPILSPLTKG
EFLKARRILGPLTKG

SEQ ID NO: 208160 - protein, 15 aa, Artificial Sequence
  Description of Artificial Sequence: Synthetic peptide
  Seed: EWLKTRPILSPLTKG
EFLKARRILHPLTKG

SEQ ID NO: 208161 - protein, 15 aa, Artificial Sequence
  Description of Artificial Sequence: Synthetic peptide
  Seed: EWLKTRPILSPLTKG
EFLKARRILKPLTKG

SEQ ID NO: 208162 - protein, 15 aa, Artificial Sequence
  Description of Artificial Sequence: Synthetic peptide
  Seed: EWLKTRPILSPLTKG
EFLKARRILNPLTKG

SEQ ID NO: 208163 - protein, 15 aa, Artificial Sequence
  Description of Artificial Sequence: Synthetic peptide
  Seed: EWLKTRPILSPLTKG
EFLKARRILQPLTKG

SEQ ID NO: 208164 - protein, 15 aa, Artificial Sequence
  Description of Artificial Sequence: Synthetic peptide
  Seed: EWLKTRPILSPLTKG
EFLKARRILRPLTKG

SEQ ID NO: 208165 - protein, 15 aa, Artificial Sequence
  Description of Artificial Sequence: Synthetic peptide
  Seed: EWLKTRPILSPLTKG
EFLKARRILSPLTKG

SEQ ID NO: 208166 - protein, 15 aa, Artificial Sequence
  Description of Artificial Sequence: Synthetic peptide
  Seed: EWLKTRPILSPLTKG
EFLKARRILTPLTKG

SEQ ID NO: 208167 - protein, 15 aa, Artificial Sequence
  Description of Artificial Sequence: Synthetic peptide
  Seed: EWLKTRPILSPLTKG
EFLKARRILVPLTKG

SEQ ID NO: 208168 - protein, 15 aa, Artificial Sequence
  Description of Artificial Sequence: Synthetic peptide
  Seed: EWLKTRPILSPLTKG
EFLKARSILCPLTKG

SEQ ID NO: 208169 - protein, 15 aa, Artificial Sequence
  Description of Artificial Sequence: Synthetic peptide
  Seed: EWLKTRPILSPLTKG
EFLKARSILFPLTKG

SEQ ID NO: 208170 - protein, 15 aa, Artificial Sequence
  Description of Artificial Sequence: Synthetic peptide
  Seed: EWLKTRPILSPLTKG
EFLKARSILGPLTKG

SEQ ID NO: 208171 - protein, 15 aa, Artificial Sequence
  Description of Artificial Sequence: Synthetic peptide
  Seed: EWLKTRPILSPLTKG
EFLKARSILHPLTKG

SEQ ID NO: 208172 - protein, 15 aa, Artificial Sequence
  Description of Artificial Sequence: Synthetic peptide
  Seed: EWLKTRPILSPLTKG
EFLKARSILIPLTKG

SEQ ID NO: 208173 - protein, 15 aa, Artificial Sequence
  Description of Artificial Sequence: Synthetic peptide
  Seed: EWLKTRPILSPLTKG
EFLKARSILLPLTKG

SEQ ID NO: 208174 - protein, 15 aa, Artificial Sequence
  Description of Artificial Sequence: Synthetic peptide
  Seed: EWLKTRPILSPLTKG
EFLKARSILMPLTKG

SEQ ID NO: 208175 - protein, 15 aa, Artificial Sequence
  Description of Artificial Sequence: Synthetic peptide
  Seed: EWLKTRPILSPLTKG
EFLKARSILNPLTKG

SEQ ID NO: 208176 - protein, 15 aa, Artificial Sequence
  Description of Artificial Sequence: Synthetic peptide
  Seed: EWLKTRPILSPLTKG
EFLKARSILQPLTKG

SEQ ID NO: 208177 - protein, 15 aa, Artificial Sequence
  Description of Artificial Sequence: Synthetic peptide
  Seed: EWLKTRPILSPLTKG
EFLKARSILSPLTKG

SEQ ID NO: 208178 - protein, 15 aa, Artificial Sequence
  Description of Artificial Sequence: Synthetic peptide
  Seed: EWLKTRPILSPLTKG
EFLKARSILTPLTKG

SEQ ID NO: 208179 - protein, 15 aa, Artificial Sequence
  Description of Artificial Sequence: Synthetic peptide
  Seed: EWLKTRPILSPLTKG
EFLKARSILVPLTKG

SEQ ID NO: 208180 - protein, 15 aa, Artificial Sequence
  Description of Artificial Sequence: Synthetic peptide
  Seed: EWLKTRPILSPLTKG
EFLKARSILYPLTKG

SEQ ID NO: 208181 - protein, 15 aa, Artificial Sequence
  Description of Artificial Sequence: Synthetic peptide
  Seed: EWLKTRPILSPLTKG
EFLKARTILCPLTKG

SEQ ID NO: 208182 - protein, 15 aa, Artificial Sequence
  Description of Artificial Sequence: Synthetic peptide
  Seed: EWLKTRPILSPLTKG
EFLKARTILDPLTKG

SEQ ID NO: 208183 - protein, 15 aa, Artificial Sequence
  Description of Artificial Sequence: Synthetic peptide
  Seed: EWLKTRPILSPLTKG
EFLKARTILGPLTKG

SEQ ID NO: 208184 - protein, 15 aa, Artificial Sequence
  Description of Artificial Sequence: Synthetic peptide
  Seed: EWLKTRPILSPLTKG
EFLKARTILIPLTKG

SEQ ID NO: 208185 - protein, 15 aa, Artificial Sequence
  Description of Artificial Sequence: Synthetic peptide
  Seed: EWLKTRPILSPLTKG
EFLKARTILLPLTKG

SEQ ID NO: 208186 - protein, 15 aa, Artificial Sequence
  Description of Artificial Sequence: Synthetic peptide
  Seed: EWLKTRPILSPLTKG
EFLKARTILMPLTKG

SEQ ID NO: 208187 - protein, 15 aa, Artificial Sequence
  Description of Artificial Sequence: Synthetic peptide
  Seed: EWLKTRPILSPLTKG
EFLKARTILNPLTKG

SEQ ID NO: 208188 - protein, 15 aa, Artificial Sequence
  Description of Artificial Sequence: Synthetic peptide
  Seed: EWLKTRPILSPLTKG
EFLKARTILQPLTKG

SEQ ID NO: 208189 - protein, 15 aa, Artificial Sequence
  Description of Artificial Sequence: Synthetic peptide
  Seed: EWLKTRPILSPLTKG
EFLKARTILSPLTKG

SEQ ID NO: 208190 - protein, 15 aa, Artificial Sequence
  Description of Artificial Sequence: Synthetic peptide
  Seed: EWLKTRPILSPLTKG
EFLKARTILTPLTKG

SEQ ID NO: 208191 - protein, 15 aa, Artificial Sequence
  Description of Artificial Sequence: Synthetic peptide
  Seed: EWLKTRPILSPLTKG
EFLKARTILVPLTKG

SEQ ID NO: 208192 - protein, 15 aa, Artificial Sequence
  Description of Artificial Sequence: Synthetic peptide
  Seed: EWLKTRPILSPLTKG
EFLKARVILAPLTKG

SEQ ID NO: 208193 - protein, 15 aa, Artificial Sequence
  Description of Artificial Sequence: Synthetic peptide
  Seed: EWLKTRPILSPLTKG
EFLKARVILGPLTKG

SEQ ID NO: 208194 - protein, 15 aa, Artificial Sequence
  Description of Artificial Sequence: Synthetic peptide
  Seed: EWLKTRPILSPLTKG
EFLKARVILIPLTKG

SEQ ID NO: 208195 - protein, 15 aa, Artificial Sequence
  Description of Artificial Sequence: Synthetic peptide
  Seed: EWLKTRPILSPLTKG
EFLKARVILLPLTKG

SEQ ID NO: 208196 - protein, 15 aa, Artificial Sequence
  Description of Artificial Sequence: Synthetic peptide
  Seed: EWLKTRPILSPLTKG
EFLKARVILMPLTKG

SEQ ID NO: 208197 - protein, 15 aa, Artificial Sequence
  Description of Artificial Sequence: Synthetic peptide
  Seed: EWLKTRPILSPLTKG
EFLKARVILNPLTKG

SEQ ID NO: 208198 - protein, 15 aa, Artificial Sequence
  Description of Artificial Sequence: Synthetic peptide
  Seed: EWLKTRPILSPLTKG
EFLKARVILSPLTKG

SEQ ID NO: 208199 - protein, 15 aa, Artificial Sequence
  Description of Artificial Sequence: Synthetic peptide
  Seed: EWLKTRPILSPLTKG
EFLKARVILTPLTKG

SEQ ID NO: 208200 - protein, 15 aa, Artificial Sequence
  Description of Artificial Sequence: Synthetic peptide
  Seed: EWLKTRPILSPLTKG
EFLKARVILVPLTKG

SEQ ID NO: 208201 - protein, 15 aa, Artificial Sequence
  Description of Artificial Sequence: Synthetic peptide
  Seed: EWLKTRPILSPLTKG
EFLKCRAILAPLTKG

SEQ ID NO: 208202 - protein, 15 aa, Artificial Sequence
  Description of Artificial Sequence: Synthetic peptide
  Seed: EWLKTRPILSPLTKG
EFLKCRAILGPLTKG

SEQ ID NO: 208203 - protein, 15 aa, Artificial Sequence
  Description of Artificial Sequence: Synthetic peptide
  Seed: EWLKTRPILSPLTKG
EFLKCRAILIPLTKG

SEQ ID NO: 208204 - protein, 15 aa, Artificial Sequence
  Description of Artificial Sequence: Synthetic peptide
  Seed: EWLKTRPILSPLTKG
EFLKCRAILLPLTKG

SEQ ID NO: 208205 - protein, 15 aa, Artificial Sequence
  Description of Artificial Sequence: Synthetic peptide
  Seed: EWLKTRPILSPLTKG
EFLKCRAILMPLTKG

SEQ ID NO: 208206 - protein, 15 aa, Artificial Sequence
  Description of Artificial Sequence: Synthetic peptide
  Seed: EWLKTRPILSPLTKG
EFLKCRAILNPLTKG

SEQ ID NO: 208207 - protein, 15 aa, Artificial Sequence
  Description of Artificial Sequence: Synthetic peptide
  Seed: EWLKTRPILSPLTKG
EFLKCRAILSPLTKG

SEQ ID NO: 208208 - protein, 15 aa, Artificial Sequence
  Description of Artificial Sequence: Synthetic peptide
  Seed: EWLKTRPILSPLTKG
EFLKCRAILTPLTKG

SEQ ID NO: 208209 - protein, 15 aa, Artificial Sequence
  Description of Artificial Sequence: Synthetic peptide
  Seed: EWLKTRPILSPLTKG
EFLKCRAILVPLTKG

SEQ ID NO: 208210 - protein, 15 aa, Artificial Sequence
  Description of Artificial Sequence: Synthetic peptide
  Seed: EWLKTRPILSPLTKG
EFLKCRGILAPLTKG

SEQ ID NO: 208211 - protein, 15 aa, Artificial Sequence
  Description of Artificial Sequence: Synthetic peptide
  Seed: EWLKTRPILSPLTKG
EFLKCRGILIPLTKG

SEQ ID NO: 208212 - protein, 15 aa, Artificial Sequence
  Description of Artificial Sequence: Synthetic peptide
  Seed: EWLKTRPILSPLTKG
EFLKCRGILLPLTKG

SEQ ID NO: 208213 - protein, 15 aa, Artificial Sequence
  Description of Artificial Sequence: Synthetic peptide
  Seed: EWLKTRPILSPLTKG
EFLKCRGILSPLTKG

SEQ ID NO: 208214 - protein, 15 aa, Artificial Sequence
  Description of Artificial Sequence: Synthetic peptide
  Seed: EWLKTRPILSPLTKG
EFLKCRGILVPLTKG

SEQ ID NO: 208215 - protein, 15 aa, Artificial Sequence
  Description of Artificial Sequence: Synthetic peptide
  Seed: EWLKTRPILSPLTKG
EFLKCRNILAPLTKG

SEQ ID NO: 208216 - protein, 15 aa, Artificial Sequence
  Description of Artificial Sequence: Synthetic peptide
  Seed: EWLKTRPILSPLTKG
EFLKCRPILAPLTKG

SEQ ID NO: 208217 - protein, 15 aa, Artificial Sequence
  Description of Artificial Sequence: Synthetic peptide
  Seed: EWLKTRPILSPLTKG
EFLKCRPILIPLTKG

SEQ ID NO: 208218 - protein, 15 aa, Artificial Sequence
  Description of Artificial Sequence: Synthetic peptide
  Seed: EWLKTRPILSPLTKG
EFLKCRPILLPLTKG

SEQ ID NO: 208219 - protein, 15 aa, Artificial Sequence
  Description of Artificial Sequence: Synthetic peptide
  Seed: EWLKTRPILSPLTKG
EFLKCRPILSPLTKG

SEQ ID NO: 208220 - protein, 15 aa, Artificial Sequence
  Description of Artificial Sequence: Synthetic peptide
  Seed: EWLKTRPILSPLTKG
EFLKCRPILVPLTKG

SEQ ID NO: 208221 - protein, 15 aa, Artificial Sequence
  Description of Artificial Sequence: Synthetic peptide
  Seed: EWLKTRPILSPLTKG
EFLKCRSILAPLTKG

SEQ ID NO: 208222 - protein, 15 aa, Artificial Sequence
  Description of Artificial Sequence: Synthetic peptide
  Seed: EWLKTRPILSPLTKG
EFLKCRSILGPLTKG

SEQ ID NO: 208223 - protein, 15 aa, Artificial Sequence
  Description of Artificial Sequence: Synthetic peptide
  Seed: EWLKTRPILSPLTKG
EFLKCRSILIPLTKG

SEQ ID NO: 208224 - protein, 15 aa, Artificial Sequence
  Description of Artificial Sequence: Synthetic peptide
  Seed: EWLKTRPILSPLTKG
EFLKCRSILLPLTKG

SEQ ID NO: 208225 - protein, 15 aa, Artificial Sequence
  Description of Artificial Sequence: Synthetic peptide
  Seed: EWLKTRPILSPLTKG
EFLKCRSILSPLTKG

SEQ ID NO: 208226 - protein, 15 aa, Artificial Sequence
  Description of Artificial Sequence: Synthetic peptide
  Seed: EWLKTRPILSPLTKG
EFLKCRSILTPLTKG

SEQ ID NO: 208227 - protein, 15 aa, Artificial Sequence
  Description of Artificial Sequence: Synthetic peptide
  Seed: EWLKTRPILSPLTKG
EFLKCRSILVPLTKG

SEQ ID NO: 208228 - protein, 15 aa, Artificial Sequence
  Description of Artificial Sequence: Synthetic peptide
  Seed: EWLKTRPILSPLTKG
EFLKCRTILAPLTKG

SEQ ID NO: 208229 - protein, 15 aa, Artificial Sequence
  Description of Artificial Sequence: Synthetic peptide
  Seed: EWLKTRPILSPLTKG
EFLKCRTILSPLTKG

SEQ ID NO: 208230 - protein, 15 aa, Artificial Sequence
  Description of Artificial Sequence: Synthetic peptide
  Seed: EWLKTRPILSPLTKG
EFLKCRVILAPLTKG

SEQ ID NO: 208231 - protein, 15 aa, Artificial Sequence
  Description of Artificial Sequence: Synthetic peptide
  Seed: EWLKTRPILSPLTKG
EFLKDRAILAPLTKG

SEQ ID NO: 208232 - protein, 15 aa, Artificial Sequence
  Description of Artificial Sequence: Synthetic peptide
  Seed: EWLKTRPILSPLTKG
EFLKDRAILIPLTKG

SEQ ID NO: 208233 - protein, 15 aa, Artificial Sequence
  Description of Artificial Sequence: Synthetic peptide
  Seed: EWLKTRPILSPLTKG
EFLKDRAILLPLTKG

SEQ ID NO: 208234 - protein, 15 aa, Artificial Sequence
  Description of Artificial Sequence: Synthetic peptide
  Seed: EWLKTRPILSPLTKG
EFLKDRAILSPLTKG

SEQ ID NO: 208235 - protein, 15 aa, Artificial Sequence
  Description of Artificial Sequence: Synthetic peptide
  Seed: EWLKTRPILSPLTKG
EFLKDRAILVPLTKG

SEQ ID NO: 208236 - protein, 15 aa, Artificial Sequence
  Description of Artificial Sequence: Synthetic peptide
  Seed: EWLKTRPILSPLTKG
EFLKERAILAPLTKG

SEQ ID NO: 208237 - protein, 15 aa, Artificial Sequence
  Description of Artificial Sequence: Synthetic peptide
  Seed: EWLKTRPILSPLTKG
EFLKERAILCPLTKG

SEQ ID NO: 208238 - protein, 15 aa, Artificial Sequence
  Description of Artificial Sequence: Synthetic peptide
  Seed: EWLKTRPILSPLTKG
EFLKERAILGPLTKG

SEQ ID NO: 208239 - protein, 15 aa, Artificial Sequence
  Description of Artificial Sequence: Synthetic peptide
  Seed: EWLKTRPILSPLTKG
EFLKERAILIPLTKG

SEQ ID NO: 208240 - protein, 15 aa, Artificial Sequence
  Description of Artificial Sequence: Synthetic peptide
  Seed: EWLKTRPILSPLTKG
EFLKERAILLPLTKG

SEQ ID NO: 208241 - protein, 15 aa, Artificial Sequence
  Description of Artificial Sequence: Synthetic peptide
  Seed: EWLKTRPILSPLTKG
EFLKERAILMPLTKG

SEQ ID NO: 208242 - protein, 15 aa, Artificial Sequence
  Description of Artificial Sequence: Synthetic peptide
  Seed: EWLKTRPILSPLTKG
EFLKERAILNPLTKG

SEQ ID NO: 208243 - protein, 15 aa, Artificial Sequence
  Description of Artificial Sequence: Synthetic peptide
  Seed: EWLKTRPILSPLTKG
EFLKERAILSPLTKG

SEQ ID NO: 208244 - protein, 15 aa, Artificial Sequence
  Description of Artificial Sequence: Synthetic peptide
  Seed: EWLKTRPILSPLTKG
EFLKERAILTPLTKG

SEQ ID NO: 208245 - protein, 15 aa, Artificial Sequence
  Description of Artificial Sequence: Synthetic peptide
  Seed: EWLKTRPILSPLTKG
EFLKERAILVPLTKG

SEQ ID NO: 208246 - protein, 15 aa, Artificial Sequence
  Description of Artificial Sequence: Synthetic peptide
  Seed: EWLKTRPILSPLTKG
EFLKERGILAPLTKG

SEQ ID NO: 208247 - protein, 15 aa, Artificial Sequence
  Description of Artificial Sequence: Synthetic peptide
  Seed: EWLKTRPILSPLTKG
EFLKERGILGPLTKG

SEQ ID NO: 208248 - protein, 15 aa, Artificial Sequence
  Description of Artificial Sequence: Synthetic peptide
  Seed: EWLKTRPILSPLTKG
EFLKERGILIPLTKG

SEQ ID NO: 208249 - protein, 15 aa, Artificial Sequence
  Description of Artificial Sequence: Synthetic peptide
  Seed: EWLKTRPILSPLTKG
EFLKERGILLPLTKG

SEQ ID NO: 208250 - protein, 15 aa, Artificial Sequence
  Description of Artificial Sequence: Synthetic peptide
  Seed: EWLKTRPILSPLTKG
EFLKERGILMPLTKG

SEQ ID NO: 208251 - protein, 15 aa, Artificial Sequence
  Description of Artificial Sequence: Synthetic peptide
  Seed: EWLKTRPILSPLTKG
EFLKERGILSPLTKG

SEQ ID NO: 208252 - protein, 15 aa, Artificial Sequence
  Description of Artificial Sequence: Synthetic peptide
  Seed: EWLKTRPILSPLTKG
EFLKERGILTPLTKG

SEQ ID NO: 208253 - protein, 15 aa, Artificial Sequence
  Description of Artificial Sequence: Synthetic peptide
  Seed: EWLKTRPILSPLTKG
EFLKERGILVPLTKG

SEQ ID NO: 208254 - protein, 15 aa, Artificial Sequence
  Description of Artificial Sequence: Synthetic peptide
  Seed: EWLKTRPILSPLTKG
EFLKERNILAPLTKG

SEQ ID NO: 208255 - protein, 15 aa, Artificial Sequence
  Description of Artificial Sequence: Synthetic peptide
  Seed: EWLKTRPILSPLTKG
EFLKERNILIPLTKG

SEQ ID NO: 208256 - protein, 15 aa, Artificial Sequence
  Description of Artificial Sequence: Synthetic peptide
  Seed: EWLKTRPILSPLTKG
EFLKERNILLPLTKG

SEQ ID NO: 208257 - protein, 15 aa, Artificial Sequence
  Description of Artificial Sequence: Synthetic peptide
  Seed: EWLKTRPILSPLTKG
EFLKERNILVPLTKG

SEQ ID NO: 208258 - protein, 15 aa, Artificial Sequence
  Description of Artificial Sequence: Synthetic peptide
  Seed: EWLKTRPILSPLTKG
EFLKERPILAPLTKG

SEQ ID NO: 208259 - protein, 15 aa, Artificial Sequence
  Description of Artificial Sequence: Synthetic peptide
  Seed: EWLKTRPILSPLTKG
EFLKERPILGPLTKG

SEQ ID NO: 208260 - protein, 15 aa, Artificial Sequence
  Description of Artificial Sequence: Synthetic peptide
  Seed: EWLKTRPILSPLTKG
EFLKERPILIPLTKG

SEQ ID NO: 208261 - protein, 15 aa, Artificial Sequence
  Description of Artificial Sequence: Synthetic peptide
  Seed: EWLKTRPILSPLTKG
EFLKERPILLPLTKG

SEQ ID NO: 208262 - protein, 15 aa, Artificial Sequence
  Description of Artificial Sequence: Synthetic peptide
  Seed: EWLKTRPILSPLTKG
EFLKERPILMPLTKG

SEQ ID NO: 208263 - protein, 15 aa, Artificial Sequence
  Description of Artificial Sequence: Synthetic peptide
  Seed: EWLKTRPILSPLTKG
EFLKERPILSPLTKG

SEQ ID NO: 208264 - protein, 15 aa, Artificial Sequence
  Description of Artificial Sequence: Synthetic peptide
  Seed: EWLKTRPILSPLTKG
EFLKERPILTPLTKG

SEQ ID NO: 208265 - protein, 15 aa, Artificial Sequence
  Description of Artificial Sequence: Synthetic peptide
  Seed: EWLKTRPILSPLTKG
EFLKERPILVPLTKG

SEQ ID NO: 208266 - protein, 15 aa, Artificial Sequence
  Description of Artificial Sequence: Synthetic peptide
  Seed: EWLKTRPILSPLTKG
EFLKERSILAPLTKG

SEQ ID NO: 208267 - protein, 15 aa, Artificial Sequence
  Description of Artificial Sequence: Synthetic peptide
  Seed: EWLKTRPILSPLTKG
EFLKERSILGPLTKG

SEQ ID NO: 208268 - protein, 15 aa, Artificial Sequence
  Description of Artificial Sequence: Synthetic peptide
  Seed: EWLKTRPILSPLTKG
EFLKERSILIPLTKG

SEQ ID NO: 208269 - protein, 15 aa, Artificial Sequence
  Description of Artificial Sequence: Synthetic peptide
  Seed: EWLKTRPILSPLTKG
EFLKERSILLPLTKG

SEQ ID NO: 208270 - protein, 15 aa, Artificial Sequence
  Description of Artificial Sequence: Synthetic peptide
  Seed: EWLKTRPILSPLTKG
EFLKERSILMPLTKG

SEQ ID NO: 208271 - protein, 15 aa, Artificial Sequence
  Description of Artificial Sequence: Synthetic peptide
  Seed: EWLKTRPILSPLTKG
EFLKERSILSPLTKG

SEQ ID NO: 208272 - protein, 15 aa, Artificial Sequence
  Description of Artificial Sequence: Synthetic peptide
  Seed: EWLKTRPILSPLTKG
EFLKERSILTPLTKG

SEQ ID NO: 208273 - protein, 15 aa, Artificial Sequence
  Description of Artificial Sequence: Synthetic peptide
  Seed: EWLKTRPILSPLTKG
EFLKERSILVPLTKG

SEQ ID NO: 208274 - protein, 15 aa, Artificial Sequence
  Description of Artificial Sequence: Synthetic peptide
  Seed: EWLKTRPILSPLTKG
EFLKERTILAPLTKG

SEQ ID NO: 208275 - protein, 15 aa, Artificial Sequence
  Description of Artificial Sequence: Synthetic peptide
  Seed: EWLKTRPILSPLTKG
EFLKERTILIPLTKG

SEQ ID NO: 208276 - protein, 15 aa, Artificial Sequence
  Description of Artificial Sequence: Synthetic peptide
  Seed: EWLKTRPILSPLTKG
EFLKERTILLPLTKG

SEQ ID NO: 208277 - protein, 15 aa, Artificial Sequence
  Description of Artificial Sequence: Synthetic peptide
  Seed: EWLKTRPILSPLTKG
EFLKERTILSPLTKG

SEQ ID NO: 208278 - protein, 15 aa, Artificial Sequence
  Description of Artificial Sequence: Synthetic peptide
  Seed: EWLKTRPILSPLTKG
EFLKERTILVPLTKG

SEQ ID NO: 208279 - protein, 15 aa, Artificial Sequence
  Description of Artificial Sequence: Synthetic peptide
  Seed: EWLKTRPILSPLTKG
EFLKERVILAPLTKG

SEQ ID NO: 208280 - protein, 15 aa, Artificial Sequence
  Description of Artificial Sequence: Synthetic peptide
  Seed: EWLKTRPILSPLTKG
EFLKFRAILIPLTKG

SEQ ID NO: 208281 - protein, 15 aa, Artificial Sequence
  Description of Artificial Sequence: Synthetic peptide
  Seed: EWLKTRPILSPLTKG
EFLKFRAILLPLTKG

SEQ ID NO: 208282 - protein, 15 aa, Artificial Sequence
  Description of Artificial Sequence: Synthetic peptide
  Seed: EWLKTRPILSPLTKG
EFLKFRAILVPLTKG

SEQ ID NO: 208283 - protein, 15 aa, Artificial Sequence
  Description of Artificial Sequence: Synthetic peptide
  Seed: EWLKTRPILSPLTKG
EFLKFRGILLPLTKG

SEQ ID NO: 208284 - protein, 15 aa, Artificial Sequence
  Description of Artificial Sequence: Synthetic peptide
  Seed: EWLKTRPILSPLTKG
EFLKFRGILMPLTKG

SEQ ID NO: 208285 - protein, 15 aa, Artificial Sequence
  Description of Artificial Sequence: Synthetic peptide
  Seed: EWLKTRPILSPLTKG
EFLKFRKILGPLTKG

SEQ ID NO: 208286 - protein, 15 aa, Artificial Sequence
  Description of Artificial Sequence: Synthetic peptide
  Seed: EWLKTRPILSPLTKG
EFLKFRNILLPLTKG

SEQ ID NO: 208287 - protein, 15 aa, Artificial Sequence
  Description of Artificial Sequence: Synthetic peptide
  Seed: EWLKTRPILSPLTKG
EFLKFRPILIPLTKG

SEQ ID NO: 208288 - protein, 15 aa, Artificial Sequence
  Description of Artificial Sequence: Synthetic peptide
  Seed: EWLKTRPILSPLTKG
EFLKFRPILLPLTKG

SEQ ID NO: 208289 - protein, 15 aa, Artificial Sequence
  Description of Artificial Sequence: Synthetic peptide
  Seed: EWLKTRPILSPLTKG
EFLKFRPILVPLTKG

SEQ ID NO: 208290 - protein, 15 aa, Artificial Sequence
  Description of Artificial Sequence: Synthetic peptide
  Seed: EWLKTRPILSPLTKG
EFLKFRRILGPLTKG

SEQ ID NO: 208291 - protein, 15 aa, Artificial Sequence
  Description of Artificial Sequence: Synthetic peptide
  Seed: EWLKTRPILSPLTKG
EFLKFRSILIPLTKG

SEQ ID NO: 208292 - protein, 15 aa, Artificial Sequence
  Description of Artificial Sequence: Synthetic peptide
  Seed: EWLKTRPILSPLTKG
EFLKFRSILVPLTKG

SEQ ID NO: 208293 - protein, 15 aa, Artificial Sequence
  Description of Artificial Sequence: Synthetic peptide
  Seed: EWLKTRPILSPLTKG
EFLKGRAILAPLTKG

SEQ ID NO: 208294 - protein, 15 aa, Artificial Sequence
  Description of Artificial Sequence: Synthetic peptide
  Seed: EWLKTRPILSPLTKG
EFLKGRAILCPLTKG

SEQ ID NO: 208295 - protein, 15 aa, Artificial Sequence
  Description of Artificial Sequence: Synthetic peptide
  Seed: EWLKTRPILSPLTKG
EFLKGRAILFPLTKG

SEQ ID NO: 208296 - protein, 15 aa, Artificial Sequence
  Description of Artificial Sequence: Synthetic peptide
  Seed: EWLKTRPILSPLTKG
EFLKGRAILGPLTKG

SEQ ID NO: 208297 - protein, 15 aa, Artificial Sequence
  Description of Artificial Sequence: Synthetic peptide
  Seed: EWLKTRPILSPLTKG
EFLKGRAILIPLTKG

SEQ ID NO: 208298 - protein, 15 aa, Artificial Sequence
  Description of Artificial Sequence: Synthetic peptide
  Seed: EWLKTRPILSPLTKG
EFLKGRAILLPLTKG

SEQ ID NO: 208299 - protein, 15 aa, Artificial Sequence
  Description of Artificial Sequence: Synthetic peptide
  Seed: EWLKTRPILSPLTKG
EFLKGRAILMPLTKG

SEQ ID NO: 208300 - protein, 15 aa, Artificial Sequence
  Description of Artificial Sequence: Synthetic peptide
  Seed: EWLKTRPILSPLTKG
EFLKGRAILNPLTKG

SEQ ID NO: 208301 - protein, 15 aa, Artificial Sequence
  Description of Artificial Sequence: Synthetic peptide
  Seed: EWLKTRPILSPLTKG
EFLKGRAILPPLTKG

SEQ ID NO: 208302 - protein, 15 aa, Artificial Sequence
  Description of Artificial Sequence: Synthetic peptide
  Seed: EWLKTRPILSPLTKG
EFLKGRAILSPLTKG

SEQ ID NO: 208303 - protein, 15 aa, Artificial Sequence
  Description of Artificial Sequence: Synthetic peptide
  Seed: EWLKTRPILSPLTKG
EFLKGRAILTPLTKG

SEQ ID NO: 208304 - protein, 15 aa, Artificial Sequence
  Description of Artificial Sequence: Synthetic peptide
  Seed: EWLKTRPILSPLTKG
EFLKGRAILVPLTKG

SEQ ID NO: 208305 - protein, 15 aa, Artificial Sequence
  Description of Artificial Sequence: Synthetic peptide
  Seed: EWLKTRPILSPLTKG
EFLKGRGILAPLTKG

SEQ ID NO: 208306 - protein, 15 aa, Artificial Sequence
  Description of Artificial Sequence: Synthetic peptide
  Seed: EWLKTRPILSPLTKG
EFLKGRGILGPLTKG

SEQ ID NO: 208307 - protein, 15 aa, Artificial Sequence
  Description of Artificial Sequence: Synthetic peptide
  Seed: EWLKTRPILSPLTKG
EFLKGRGILIPLTKG

SEQ ID NO: 208308 - protein, 15 aa, Artificial Sequence
  Description of Artificial Sequence: Synthetic peptide
  Seed: EWLKTRPILSPLTKG
EFLKGRGILLPLTKG

SEQ ID NO: 208309 - protein, 15 aa, Artificial Sequence
  Description of Artificial Sequence: Synthetic peptide
  Seed: EWLKTRPILSPLTKG
EFLKGRGILMPLTKG

SEQ ID NO: 208310 - protein, 15 aa, Artificial Sequence
  Description of Artificial Sequence: Synthetic peptide
  Seed: EWLKTRPILSPLTKG
EFLKGRGILSPLTKG

SEQ ID NO: 208311 - protein, 15 aa, Artificial Sequence
  Description of Artificial Sequence: Synthetic peptide
  Seed: EWLKTRPILSPLTKG
EFLKGRGILTPLTKG

SEQ ID NO: 208312 - protein, 15 aa, Artificial Sequence
  Description of Artificial Sequence: Synthetic peptide
  Seed: EWLKTRPILSPLTKG
EFLKGRGILVPLTKG

SEQ ID NO: 208313 - protein, 15 aa, Artificial Sequence
  Description of Artificial Sequence: Synthetic peptide
  Seed: EWLKTRPILSPLTKG
EFLKGRIILVPLTKG

SEQ ID NO: 208314 - protein, 15 aa, Artificial Sequence
  Description of Artificial Sequence: Synthetic peptide
  Seed: EWLKTRPILSPLTKG
EFLKGRNILAPLTKG

SEQ ID NO: 208315 - protein, 15 aa, Artificial Sequence
  Description of Artificial Sequence: Synthetic peptide
  Seed: EWLKTRPILSPLTKG
EFLKGRNILIPLTKG

SEQ ID NO: 208316 - protein, 15 aa, Artificial Sequence
  Description of Artificial Sequence: Synthetic peptide
  Seed: EWLKTRPILSPLTKG
EFLKGRNILLPLTKG

SEQ ID NO: 208317 - protein, 15 aa, Artificial Sequence
  Description of Artificial Sequence: Synthetic peptide
  Seed: EWLKTRPILSPLTKG
EFLKGRNILMPLTKG

SEQ ID NO: 208318 - protein, 15 aa, Artificial Sequence
  Description of Artificial Sequence: Synthetic peptide
  Seed: EWLKTRPILSPLTKG
EFLKGRNILVPLTKG

SEQ ID NO: 208319 - protein, 15 aa, Artificial Sequence
  Description of Artificial Sequence: Synthetic peptide
  Seed: EWLKTRPILSPLTKG
EFLKGRPILAPLTKG

SEQ ID NO: 208320 - protein, 15 aa, Artificial Sequence
  Description of Artificial Sequence: Synthetic peptide
  Seed: EWLKTRPILSPLTKG
EFLKGRPILGPLTKG

SEQ ID NO: 208321 - protein, 15 aa, Artificial Sequence
  Description of Artificial Sequence: Synthetic peptide
  Seed: EWLKTRPILSPLTKG
EFLKGRPILIPLTKG

SEQ ID NO: 208322 - protein, 15 aa, Artificial Sequence
  Description of Artificial Sequence: Synthetic peptide
  Seed: EWLKTRPILSPLTKG
EFLKGRPILLPLTKG

SEQ ID NO: 208323 - protein, 15 aa, Artificial Sequence
  Description of Artificial Sequence: Synthetic peptide
  Seed: EWLKTRPILSPLTKG
EFLKGRPILMPLTKG

SEQ ID NO: 208324 - protein, 15 aa, Artificial Sequence
  Description of Artificial Sequence: Synthetic peptide
  Seed: EWLKTRPILSPLTKG
EFLKGRPILSPLTKG

SEQ ID NO: 208325 - protein, 15 aa, Artificial Sequence
  Description of Artificial Sequence: Synthetic peptide
  Seed: EWLKTRPILSPLTKG
EFLKGRPILTPLTKG

SEQ ID NO: 208326 - protein, 15 aa, Artificial Sequence
  Description of Artificial Sequence: Synthetic peptide
  Seed: EWLKTRPILSPLTKG
EFLKGRPILVPLTKG

SEQ ID NO: 208327 - protein, 15 aa, Artificial Sequence
  Description of Artificial Sequence: Synthetic peptide
  Seed: EWLKTRPILSPLTKG
EFLKGRSILAPLTKG

SEQ ID NO: 208328 - protein, 15 aa, Artificial Sequence
  Description of Artificial Sequence: Synthetic peptide
  Seed: EWLKTRPILSPLTKG
EFLKGRSILGPLTKG

SEQ ID NO: 208329 - protein, 15 aa, Artificial Sequence
  Description of Artificial Sequence: Synthetic peptide
  Seed: EWLKTRPILSPLTKG
EFLKGRSILIPLTKG

SEQ ID NO: 208330 - protein, 15 aa, Artificial Sequence
  Description of Artificial Sequence: Synthetic peptide
  Seed: EWLKTRPILSPLTKG
EFLKGRSILLPLTKG

SEQ ID NO: 208331 - protein, 15 aa, Artificial Sequence
  Description of Artificial Sequence: Synthetic peptide
  Seed: EWLKTRPILSPLTKG
EFLKGRSILMPLTKG

SEQ ID NO: 208332 - protein, 15 aa, Artificial Sequence
  Description of Artificial Sequence: Synthetic peptide
  Seed: EWLKTRPILSPLTKG
EFLKGRSILNPLTKG

SEQ ID NO: 208333 - protein, 15 aa, Artificial Sequence
  Description of Artificial Sequence: Synthetic peptide
  Seed: EWLKTRPILSPLTKG
EFLKGRSILSPLTKG

SEQ ID NO: 208334 - protein, 15 aa, Artificial Sequence
  Description of Artificial Sequence: Synthetic peptide
  Seed: EWLKTRPILSPLTKG
EFLKGRSILTPLTKG

SEQ ID NO: 208335 - protein, 15 aa, Artificial Sequence
  Description of Artificial Sequence: Synthetic peptide
  Seed: EWLKTRPILSPLTKG
EFLKGRSILVPLTKG

SEQ ID NO: 208336 - protein, 15 aa, Artificial Sequence
  Description of Artificial Sequence: Synthetic peptide
  Seed: EWLKTRPILSPLTKG
EFLKGRTILAPLTKG

SEQ ID NO: 208337 - protein, 15 aa, Artificial Sequence
  Description of Artificial Sequence: Synthetic peptide
  Seed: EWLKTRPILSPLTKG
EFLKGRTILIPLTKG

SEQ ID NO: 208338 - protein, 15 aa, Artificial Sequence
  Description of Artificial Sequence: Synthetic peptide
  Seed: EWLKTRPILSPLTKG
EFLKGRTILLPLTKG

SEQ ID NO: 208339 - protein, 15 aa, Artificial Sequence
  Description of Artificial Sequence: Synthetic peptide
  Seed: EWLKTRPILSPLTKG
EFLKGRTILMPLTKG

SEQ ID NO: 208340 - protein, 15 aa, Artificial Sequence
  Description of Artificial Sequence: Synthetic peptide
  Seed: EWLKTRPILSPLTKG
EFLKGRTILSPLTKG

SEQ ID NO: 208341 - protein, 15 aa, Artificial Sequence
  Description of Artificial Sequence: Synthetic peptide
  Seed: EWLKTRPILSPLTKG
EFLKGRTILTPLTKG

SEQ ID NO: 208342 - protein, 15 aa, Artificial Sequence
  Description of Artificial Sequence: Synthetic peptide
  Seed: EWLKTRPILSPLTKG
EFLKGRTILVPLTKG

SEQ ID NO: 208343 - protein, 15 aa, Artificial Sequence
  Description of Artificial Sequence: Synthetic peptide
  Seed: EWLKTRPILSPLTKG
EFLKGRVILAPLTKG

SEQ ID NO: 208344 - protein, 15 aa, Artificial Sequence
  Description of Artificial Sequence: Synthetic peptide
  Seed: EWLKTRPILSPLTKG
EFLKGRVILIPLTKG

SEQ ID NO: 208345 - protein, 15 aa, Artificial Sequence
  Description of Artificial Sequence: Synthetic peptide
  Seed: EWLKTRPILSPLTKG
EFLKGRVILLPLTKG

SEQ ID NO: 208346 - protein, 15 aa, Artificial Sequence
  Description of Artificial Sequence: Synthetic peptide
  Seed: EWLKTRPILSPLTKG
EFLKGRVILMPLTKG

SEQ ID NO: 208347 - protein, 15 aa, Artificial Sequence
  Description of Artificial Sequence: Synthetic peptide
  Seed: EWLKTRPILSPLTKG
EFLKGRVILSPLTKG

SEQ ID NO: 208348 - protein, 15 aa, Artificial Sequence
  Description of Artificial Sequence: Synthetic peptide
  Seed: EWLKTRPILSPLTKG
EFLKGRVILTPLTKG

SEQ ID NO: 208349 - protein, 15 aa, Artificial Sequence
  Description of Artificial Sequence: Synthetic peptide
  Seed: EWLKTRPILSPLTKG
EFLKGRVILVPLTKG

SEQ ID NO: 208350 - protein, 15 aa, Artificial Sequence
  Description of Artificial Sequence: Synthetic peptide
  Seed: EWLKTRPILSPLTKG
EFLKHRAILAPLTKG

SEQ ID NO: 208351 - protein, 15 aa, Artificial Sequence
  Description of Artificial Sequence: Synthetic peptide
  Seed: EWLKTRPILSPLTKG
EFLKHRAILIPLTKG

SEQ ID NO: 208352 - protein, 15 aa, Artificial Sequence
  Description of Artificial Sequence: Synthetic peptide
  Seed: EWLKTRPILSPLTKG
EFLKHRAILLPLTKG

SEQ ID NO: 208353 - protein, 15 aa, Artificial Sequence
  Description of Artificial Sequence: Synthetic peptide
  Seed: EWLKTRPILSPLTKG
EFLKHRAILMPLTKG

SEQ ID NO: 208354 - protein, 15 aa, Artificial Sequence
  Description of Artificial Sequence: Synthetic peptide
  Seed: EWLKTRPILSPLTKG
EFLKHRAILSPLTKG

SEQ ID NO: 208355 - protein, 15 aa, Artificial Sequence
  Description of Artificial Sequence: Synthetic peptide
  Seed: EWLKTRPILSPLTKG
EFLKHRAILTPLTKG

SEQ ID NO: 208356 - protein, 15 aa, Artificial Sequence
  Description of Artificial Sequence: Synthetic peptide
  Seed: EWLKTRPILSPLTKG
EFLKHRAILVPLTKG

SEQ ID NO: 208357 - protein, 15 aa, Artificial Sequence
  Description of Artificial Sequence: Synthetic peptide
  Seed: EWLKTRPILSPLTKG
EFLKHRGILAPLTKG

SEQ ID NO: 208358 - protein, 15 aa, Artificial Sequence
  Description of Artificial Sequence: Synthetic peptide
  Seed: EWLKTRPILSPLTKG
EFLKHRGILIPLTKG

SEQ ID NO: 208359 - protein, 15 aa, Artificial Sequence
  Description of Artificial Sequence: Synthetic peptide
  Seed: EWLKTRPILSPLTKG
EFLKHRGILLPLTKG

SEQ ID NO: 208360 - protein, 15 aa, Artificial Sequence
  Description of Artificial Sequence: Synthetic peptide
  Seed: EWLKTRPILSPLTKG
EFLKHRGILVPLTKG

SEQ ID NO: 208361 - protein, 15 aa, Artificial Sequence
  Description of Artificial Sequence: Synthetic peptide
  Seed: EWLKTRPILSPLTKG
EFLKHRPILIPLTKG

SEQ ID NO: 208362 - protein, 15 aa, Artificial Sequence
  Description of Artificial Sequence: Synthetic peptide
  Seed: EWLKTRPILSPLTKG
EFLKHRPILLPLTKG

SEQ ID NO: 208363 - protein, 15 aa, Artificial Sequence
  Description of Artificial Sequence: Synthetic peptide
  Seed: EWLKTRPILSPLTKG
EFLKHRPILVPLTKG

SEQ ID NO: 208364 - protein, 15 aa, Artificial Sequence
  Description of Artificial Sequence: Synthetic peptide
  Seed: EWLKTRPILSPLTKG
EFLKHRSILIPLTKG

SEQ ID NO: 208365 - protein, 15 aa, Artificial Sequence
  Description of Artificial Sequence: Synthetic peptide
  Seed: EWLKTRPILSPLTKG
EFLKHRSILLPLTKG

SEQ ID NO: 208366 - protein, 15 aa, Artificial Sequence
  Description of Artificial Sequence: Synthetic peptide
  Seed: EWLKTRPILSPLTKG
EFLKHRSILTPLTKG

SEQ ID NO: 208367 - protein, 15 aa, Artificial Sequence
  Description of Artificial Sequence: Synthetic peptide
  Seed: EWLKTRPILSPLTKG
EFLKHRSILVPLTKG

SEQ ID NO: 208368 - protein, 15 aa, Artificial Sequence
  Description of Artificial Sequence: Synthetic peptide
  Seed: EWLKTRPILSPLTKG
EFLKHRTILVPLTKG

SEQ ID NO: 208369 - protein, 15 aa, Artificial Sequence
  Description of Artificial Sequence: Synthetic peptide
  Seed: EWLKTRPILSPLTKG
EFLKIRAILCPLTKG

SEQ ID NO: 208370 - protein, 15 aa, Artificial Sequence
  Description of Artificial Sequence: Synthetic peptide
  Seed: EWLKTRPILSPLTKG
EFLKIRAILFPLTKG

SEQ ID NO: 208371 - protein, 15 aa, Artificial Sequence
  Description of Artificial Sequence: Synthetic peptide
  Seed: EWLKTRPILSPLTKG
EFLKIRAILIPLTKG

SEQ ID NO: 208372 - protein, 15 aa, Artificial Sequence
  Description of Artificial Sequence: Synthetic peptide
  Seed: EWLKTRPILSPLTKG
EFLKIRAILLPLTKG

SEQ ID NO: 208373 - protein, 15 aa, Artificial Sequence
  Description of Artificial Sequence: Synthetic peptide
  Seed: EWLKTRPILSPLTKG
EFLKIRAILMPLTKG

SEQ ID NO: 208374 - protein, 15 aa, Artificial Sequence
  Description of Artificial Sequence: Synthetic peptide
  Seed: EWLKTRPILSPLTKG
EFLKIRAILQPLTKG

SEQ ID NO: 208375 - protein, 15 aa, Artificial Sequence
  Description of Artificial Sequence: Synthetic peptide
  Seed: EWLKTRPILSPLTKG
EFLKIRAILRPLTKG

SEQ ID NO: 208376 - protein, 15 aa, Artificial Sequence
  Description of Artificial Sequence: Synthetic peptide
  Seed: EWLKTRPILSPLTKG
EFLKIRAILVPLTKG

SEQ ID NO: 208377 - protein, 15 aa, Artificial Sequence
  Description of Artificial Sequence: Synthetic peptide
  Seed: EWLKTRPILSPLTKG
EFLKIRAILYPLTKG

SEQ ID NO: 208378 - protein, 15 aa, Artificial Sequence
  Description of Artificial Sequence: Synthetic peptide
  Seed: EWLKTRPILSPLTKG
EFLKIRDILVPLTKG

SEQ ID NO: 208379 - protein, 15 aa, Artificial Sequence
  Description of Artificial Sequence: Synthetic peptide
  Seed: EWLKTRPILSPLTKG
EFLKIREILIPLTKG

SEQ ID NO: 208380 - protein, 15 aa, Artificial Sequence
  Description of Artificial Sequence: Synthetic peptide
  Seed: EWLKTRPILSPLTKG
EFLKIREILLPLTKG

SEQ ID NO: 208381 - protein, 15 aa, Artificial Sequence
  Description of Artificial Sequence: Synthetic peptide
  Seed: EWLKTRPILSPLTKG
EFLKIREILVPLTKG

SEQ ID NO: 208382 - protein, 15 aa, Artificial Sequence
  Description of Artificial Sequence: Synthetic peptide
  Seed: EWLKTRPILSPLTKG
EFLKIRGILAPLTKG

SEQ ID NO: 208383 - protein, 15 aa, Artificial Sequence
  Description of Artificial Sequence: Synthetic peptide
  Seed: EWLKTRPILSPLTKG
EFLKIRGILCPLTKG

SEQ ID NO: 208384 - protein, 15 aa, Artificial Sequence
  Description of Artificial Sequence: Synthetic peptide
  Seed: EWLKTRPILSPLTKG
EFLKIRGILFPLTKG

SEQ ID NO: 208385 - protein, 15 aa, Artificial Sequence
  Description of Artificial Sequence: Synthetic peptide
  Seed: EWLKTRPILSPLTKG
EFLKIRGILHPLTKG

SEQ ID NO: 208386 - protein, 15 aa, Artificial Sequence
  Description of Artificial Sequence: Synthetic peptide
  Seed: EWLKTRPILSPLTKG
EFLKIRGILIPLTKG

SEQ ID NO: 208387 - protein, 15 aa, Artificial Sequence
  Description of Artificial Sequence: Synthetic peptide
  Seed: EWLKTRPILSPLTKG
EFLKIRGILLPLTKG

SEQ ID NO: 208388 - protein, 15 aa, Artificial Sequence
  Description of Artificial Sequence: Synthetic peptide
  Seed: EWLKTRPILSPLTKG
EFLKIRGILMPLTKG

SEQ ID NO: 208389 - protein, 15 aa, Artificial Sequence
  Description of Artificial Sequence: Synthetic peptide
  Seed: EWLKTRPILSPLTKG
EFLKIRGILQPLTKG

SEQ ID NO: 208390 - protein, 15 aa, Artificial Sequence
  Description of Artificial Sequence: Synthetic peptide
  Seed: EWLKTRPILSPLTKG
EFLKIRGILRPLTKG

SEQ ID NO: 208391 - protein, 15 aa, Artificial Sequence
  Description of Artificial Sequence: Synthetic peptide
  Seed: EWLKTRPILSPLTKG
EFLKIRGILSPLTKG

SEQ ID NO: 208392 - protein, 15 aa, Artificial Sequence
  Description of Artificial Sequence: Synthetic peptide
  Seed: EWLKTRPILSPLTKG
EFLKIRGILTPLTKG

SEQ ID NO: 208393 - protein, 15 aa, Artificial Sequence
  Description of Artificial Sequence: Synthetic peptide
  Seed: EWLKTRPILSPLTKG
EFLKIRGILVPLTKG

SEQ ID NO: 208394 - protein, 15 aa, Artificial Sequence
  Description of Artificial Sequence: Synthetic peptide
  Seed: EWLKTRPILSPLTKG
EFLKIRGILYPLTKG

SEQ ID NO: 208395 - protein, 15 aa, Artificial Sequence
  Description of Artificial Sequence: Synthetic peptide
  Seed: EWLKTRPILSPLTKG
EFLKIRHILAPLTKG

SEQ ID NO: 208396 - protein, 15 aa, Artificial Sequence
  Description of Artificial Sequence: Synthetic peptide
  Seed: EWLKTRPILSPLTKG
EFLKIRHILGPLTKG

SEQ ID NO: 208397 - protein, 15 aa, Artificial Sequence
  Description of Artificial Sequence: Synthetic peptide
  Seed: EWLKTRPILSPLTKG
EFLKIRHILSPLTKG

SEQ ID NO: 208398 - protein, 15 aa, Artificial Sequence
  Description of Artificial Sequence: Synthetic peptide
  Seed: EWLKTRPILSPLTKG
EFLKIRKILAPLTKG

SEQ ID NO: 208399 - protein, 15 aa, Artificial Sequence
  Description of Artificial Sequence: Synthetic peptide
  Seed: EWLKTRPILSPLTKG
EFLKIRKILGPLTKG

SEQ ID NO: 208400 - protein, 15 aa, Artificial Sequence
  Description of Artificial Sequence: Synthetic peptide
  Seed: EWLKTRPILSPLTKG
EFLKIRKILIPLTKG

SEQ ID NO: 208401 - protein, 15 aa, Artificial Sequence
  Description of Artificial Sequence: Synthetic peptide
  Seed: EWLKTRPILSPLTKG
EFLKIRKILMPLTKG

SEQ ID NO: 208402 - protein, 15 aa, Artificial Sequence
  Description of Artificial Sequence: Synthetic peptide
  Seed: EWLKTRPILSPLTKG
EFLKIRKILNPLTKG

SEQ ID NO: 208403 - protein, 15 aa, Artificial Sequence
  Description of Artificial Sequence: Synthetic peptide
  Seed: EWLKTRPILSPLTKG
EFLKIRKILPPLTKG

SEQ ID NO: 208404 - protein, 15 aa, Artificial Sequence
  Description of Artificial Sequence: Synthetic peptide
  Seed: EWLKTRPILSPLTKG
EFLKIRKILQPLTKG

SEQ ID NO: 208405 - protein, 15 aa, Artificial Sequence
  Description of Artificial Sequence: Synthetic peptide
  Seed: EWLKTRPILSPLTKG
EFLKIRKILTPLTKG

SEQ ID NO: 208406 - protein, 15 aa, Artificial Sequence
  Description of Artificial Sequence: Synthetic peptide
  Seed: EWLKTRPILSPLTKG
EFLKIRKILVPLTKG

SEQ ID NO: 208407 - protein, 15 aa, Artificial Sequence
  Description of Artificial Sequence: Synthetic peptide
  Seed: EWLKTRPILSPLTKG
EFLKIRNILCPLTKG

SEQ ID NO: 208408 - protein, 15 aa, Artificial Sequence
  Description of Artificial Sequence: Synthetic peptide
  Seed: EWLKTRPILSPLTKG
EFLKIRNILDPLTKG

SEQ ID NO: 208409 - protein, 15 aa, Artificial Sequence
  Description of Artificial Sequence: Synthetic peptide
  Seed: EWLKTRPILSPLTKG
EFLKIRNILIPLTKG

SEQ ID NO: 208410 - protein, 15 aa, Artificial Sequence
  Description of Artificial Sequence: Synthetic peptide
  Seed: EWLKTRPILSPLTKG
EFLKIRNILLPLTKG

SEQ ID NO: 208411 - protein, 15 aa, Artificial Sequence
  Description of Artificial Sequence: Synthetic peptide
  Seed: EWLKTRPILSPLTKG
EFLKIRNILMPLTKG

SEQ ID NO: 208412 - protein, 15 aa, Artificial Sequence
  Description of Artificial Sequence: Synthetic peptide
  Seed: EWLKTRPILSPLTKG
EFLKIRNILVPLTKG

SEQ ID NO: 208413 - protein, 15 aa, Artificial Sequence
  Description of Artificial Sequence: Synthetic peptide
  Seed: EWLKTRPILSPLTKG
EFLKIRPILCPLTKG

SEQ ID NO: 208414 - protein, 15 aa, Artificial Sequence
  Description of Artificial Sequence: Synthetic peptide
  Seed: EWLKTRPILSPLTKG
EFLKIRPILEPLTKG

SEQ ID NO: 208415 - protein, 15 aa, Artificial Sequence
  Description of Artificial Sequence: Synthetic peptide
  Seed: EWLKTRPILSPLTKG
EFLKIRPILFPLTKG

SEQ ID NO: 208416 - protein, 15 aa, Artificial Sequence
  Description of Artificial Sequence: Synthetic peptide
  Seed: EWLKTRPILSPLTKG
EFLKIRPILIPLTKG

SEQ ID NO: 208417 - protein, 15 aa, Artificial Sequence
  Description of Artificial Sequence: Synthetic peptide
  Seed: EWLKTRPILSPLTKG
EFLKIRPILLPLTKG

SEQ ID NO: 208418 - protein, 15 aa, Artificial Sequence
  Description of Artificial Sequence: Synthetic peptide
  Seed: EWLKTRPILSPLTKG
EFLKIRPILMPLTKG

SEQ ID NO: 208419 - protein, 15 aa, Artificial Sequence
  Description of Artificial Sequence: Synthetic peptide
  Seed: EWLKTRPILSPLTKG
EFLKIRPILQPLTKG

SEQ ID NO: 208420 - protein, 15 aa, Artificial Sequence
  Description of Artificial Sequence: Synthetic peptide
  Seed: EWLKTRPILSPLTKG
EFLKIRPILVPLTKG

SEQ ID NO: 208421 - protein, 15 aa, Artificial Sequence
  Description of Artificial Sequence: Synthetic peptide
  Seed: EWLKTRPILSPLTKG
EFLKIRPILYPLTKG

SEQ ID NO: 208422 - protein, 15 aa, Artificial Sequence
  Description of Artificial Sequence: Synthetic peptide
  Seed: EWLKTRPILSPLTKG
EFLKIRRILAPLTKG

SEQ ID NO: 208423 - protein, 15 aa, Artificial Sequence
  Description of Artificial Sequence: Synthetic peptide
  Seed: EWLKTRPILSPLTKG
EFLKIRRILGPLTKG

SEQ ID NO: 208424 - protein, 15 aa, Artificial Sequence
  Description of Artificial Sequence: Synthetic peptide
  Seed: EWLKTRPILSPLTKG
EFLKIRRILIPLTKG

SEQ ID NO: 208425 - protein, 15 aa, Artificial Sequence
  Description of Artificial Sequence: Synthetic peptide
  Seed: EWLKTRPILSPLTKG
EFLKIRRILLPLTKG

SEQ ID NO: 208426 - protein, 15 aa, Artificial Sequence
  Description of Artificial Sequence: Synthetic peptide
  Seed: EWLKTRPILSPLTKG
EFLKIRRILMPLTKG

SEQ ID NO: 208427 - protein, 15 aa, Artificial Sequence
  Description of Artificial Sequence: Synthetic peptide
  Seed: EWLKTRPILSPLTKG
EFLKIRRILNPLTKG

SEQ ID NO: 208428 - protein, 15 aa, Artificial Sequence
  Description of Artificial Sequence: Synthetic peptide
  Seed: EWLKTRPILSPLTKG
EFLKIRRILPPLTKG

SEQ ID NO: 208429 - protein, 15 aa, Artificial Sequence
  Description of Artificial Sequence: Synthetic peptide
  Seed: EWLKTRPILSPLTKG
EFLKIRRILQPLTKG

SEQ ID NO: 208430 - protein, 15 aa, Artificial Sequence
  Description of Artificial Sequence: Synthetic peptide
  Seed: EWLKTRPILSPLTKG
EFLKIRRILSPLTKG

SEQ ID NO: 208431 - protein, 15 aa, Artificial Sequence
  Description of Artificial Sequence: Synthetic peptide
  Seed: EWLKTRPILSPLTKG
EFLKIRRILTPLTKG

SEQ ID NO: 208432 - protein, 15 aa, Artificial Sequence
  Description of Artificial Sequence: Synthetic peptide
  Seed: EWLKTRPILSPLTKG
EFLKIRRILVPLTKG

SEQ ID NO: 208433 - protein, 15 aa, Artificial Sequence
  Description of Artificial Sequence: Synthetic peptide
  Seed: EWLKTRPILSPLTKG
EFLKIRSILCPLTKG

SEQ ID NO: 208434 - protein, 15 aa, Artificial Sequence
  Description of Artificial Sequence: Synthetic peptide
  Seed: EWLKTRPILSPLTKG
EFLKIRSILFPLTKG

SEQ ID NO: 208435 - protein, 15 aa, Artificial Sequence
  Description of Artificial Sequence: Synthetic peptide
  Seed: EWLKTRPILSPLTKG
EFLKIRSILIPLTKG

SEQ ID NO: 208436 - protein, 15 aa, Artificial Sequence
  Description of Artificial Sequence: Synthetic peptide
  Seed: EWLKTRPILSPLTKG
EFLKIRSILLPLTKG

SEQ ID NO: 208437 - protein, 15 aa, Artificial Sequence
  Description of Artificial Sequence: Synthetic peptide
  Seed: EWLKTRPILSPLTKG
EFLKIRSILMPLTKG

SEQ ID NO: 208438 - protein, 15 aa, Artificial Sequence
  Description of Artificial Sequence: Synthetic peptide
  Seed: EWLKTRPILSPLTKG
EFLKIRSILRPLTKG

SEQ ID NO: 208439 - protein, 15 aa, Artificial Sequence
  Description of Artificial Sequence: Synthetic peptide
  Seed: EWLKTRPILSPLTKG
EFLKIRSILVPLTKG

SEQ ID NO: 208440 - protein, 15 aa, Artificial Sequence
  Description of Artificial Sequence: Synthetic peptide
  Seed: EWLKTRPILSPLTKG
EFLKIRSILYPLTKG

SEQ ID NO: 208441 - protein, 15 aa, Artificial Sequence
  Description of Artificial Sequence: Synthetic peptide
  Seed: EWLKTRPILSPLTKG
EFLKIRTILCPLTKG

SEQ ID NO: 208442 - protein, 15 aa, Artificial Sequence
  Description of Artificial Sequence: Synthetic peptide
  Seed: EWLKTRPILSPLTKG
EFLKIRTILDPLTKG

SEQ ID NO: 208443 - protein, 15 aa, Artificial Sequence
  Description of Artificial Sequence: Synthetic peptide
  Seed: EWLKTRPILSPLTKG
EFLKIRTILIPLTKG

SEQ ID NO: 208444 - protein, 15 aa, Artificial Sequence
  Description of Artificial Sequence: Synthetic peptide
  Seed: EWLKTRPILSPLTKG
EFLKIRTILLPLTKG

SEQ ID NO: 208445 - protein, 15 aa, Artificial Sequence
  Description of Artificial Sequence: Synthetic peptide
  Seed: EWLKTRPILSPLTKG
EFLKIRTILMPLTKG

SEQ ID NO: 208446 - protein, 15 aa, Artificial Sequence
  Description of Artificial Sequence: Synthetic peptide
  Seed: EWLKTRPILSPLTKG
EFLKIRTILQPLTKG

SEQ ID NO: 208447 - protein, 15 aa, Artificial Sequence
  Description of Artificial Sequence: Synthetic peptide
  Seed: EWLKTRPILSPLTKG
EFLKIRTILRPLTKG

SEQ ID NO: 208448 - protein, 15 aa, Artificial Sequence
  Description of Artificial Sequence: Synthetic peptide
  Seed: EWLKTRPILSPLTKG
EFLKIRTILSPLTKG

SEQ ID NO: 208449 - protein, 15 aa, Artificial Sequence
  Description of Artificial Sequence: Synthetic peptide
  Seed: EWLKTRPILSPLTKG
EFLKIRTILVPLTKG

SEQ ID NO: 208450 - protein, 15 aa, Artificial Sequence
  Description of Artificial Sequence: Synthetic peptide
  Seed: EWLKTRPILSPLTKG
EFLKIRVILLPLTKG

SEQ ID NO: 208451 - protein, 15 aa, Artificial Sequence
  Description of Artificial Sequence: Synthetic peptide
  Seed: EWLKTRPILSPLTKG
EFLKIRVILMPLTKG

SEQ ID NO: 208452 - protein, 15 aa, Artificial Sequence
  Description of Artificial Sequence: Synthetic peptide
  Seed: EWLKTRPILSPLTKG
EFLKKRAILAPLTKG

SEQ ID NO: 208453 - protein, 15 aa, Artificial Sequence
  Description of Artificial Sequence: Synthetic peptide
  Seed: EWLKTRPILSPLTKG
EFLKKRAILIPLTKG

SEQ ID NO: 208454 - protein, 15 aa, Artificial Sequence
  Description of Artificial Sequence: Synthetic peptide
  Seed: EWLKTRPILSPLTKG
EFLKKRAILLPLTKG

SEQ ID NO: 208455 - protein, 15 aa, Artificial Sequence
  Description of Artificial Sequence: Synthetic peptide
  Seed: EWLKTRPILSPLTKG
EFLKKRAILMPLTKG

SEQ ID NO: 208456 - protein, 15 aa, Artificial Sequence
  Description of Artificial Sequence: Synthetic peptide
  Seed: EWLKTRPILSPLTKG
EFLKKRAILVPLTKG

SEQ ID NO: 208457 - protein, 15 aa, Artificial Sequence
  Description of Artificial Sequence: Synthetic peptide
  Seed: EWLKTRPILSPLTKG
EFLKKRGILLPLTKG

SEQ ID NO: 208458 - protein, 15 aa, Artificial Sequence
  Description of Artificial Sequence: Synthetic peptide
  Seed: EWLKTRPILSPLTKG
EFLKKRGILVPLTKG

SEQ ID NO: 208459 - protein, 15 aa, Artificial Sequence
  Description of Artificial Sequence: Synthetic peptide
  Seed: EWLKTRPILSPLTKG
EFLKKRSILAPLTKG

SEQ ID NO: 208460 - protein, 15 aa, Artificial Sequence
  Description of Artificial Sequence: Synthetic peptide
  Seed: EWLKTRPILSPLTKG
EFLKKRSILIPLTKG

SEQ ID NO: 208461 - protein, 15 aa, Artificial Sequence
  Description of Artificial Sequence: Synthetic peptide
  Seed: EWLKTRPILSPLTKG
EFLKKRSILLPLTKG

SEQ ID NO: 208462 - protein, 15 aa, Artificial Sequence
  Description of Artificial Sequence: Synthetic peptide
  Seed: EWLKTRPILSPLTKG
EFLKKRSILVPLTKG

SEQ ID NO: 208463 - protein, 15 aa, Artificial Sequence
  Description of Artificial Sequence: Synthetic peptide
  Seed: EWLKTRPILSPLTKG
EFLKLRAILAPLTKG

SEQ ID NO: 208464 - protein, 15 aa, Artificial Sequence
  Description of Artificial Sequence: Synthetic peptide
  Seed: EWLKTRPILSPLTKG
EFLKLRAILCPLTKG

SEQ ID NO: 208465 - protein, 15 aa, Artificial Sequence
  Description of Artificial Sequence: Synthetic peptide
  Seed: EWLKTRPILSPLTKG
EFLKLRAILDPLTKG

SEQ ID NO: 208466 - protein, 15 aa, Artificial Sequence
  Description of Artificial Sequence: Synthetic peptide
  Seed: EWLKTRPILSPLTKG
EFLKLRAILEPLTKG

SEQ ID NO: 208467 - protein, 15 aa, Artificial Sequence
  Description of Artificial Sequence: Synthetic peptide
  Seed: EWLKTRPILSPLTKG
EFLKLRAILFPLTKG

SEQ ID NO: 208468 - protein, 15 aa, Artificial Sequence
  Description of Artificial Sequence: Synthetic peptide
  Seed: EWLKTRPILSPLTKG
EFLKLRAILHPLTKG

SEQ ID NO: 208469 - protein, 15 aa, Artificial Sequence
  Description of Artificial Sequence: Synthetic peptide
  Seed: EWLKTRPILSPLTKG
EFLKLRAILIPLTKG

SEQ ID NO: 208470 - protein, 15 aa, Artificial Sequence
  Description of Artificial Sequence: Synthetic peptide
  Seed: EWLKTRPILSPLTKG
EFLKLRAILKPLTKG

SEQ ID NO: 208471 - protein, 15 aa, Artificial Sequence
  Description of Artificial Sequence: Synthetic peptide
  Seed: EWLKTRPILSPLTKG
EFLKLRAILLPLTKG

SEQ ID NO: 208472 - protein, 15 aa, Artificial Sequence
  Description of Artificial Sequence: Synthetic peptide
  Seed: EWLKTRPILSPLTKG
EFLKLRAILMPLTKG

SEQ ID NO: 208473 - protein, 15 aa, Artificial Sequence
  Description of Artificial Sequence: Synthetic peptide
  Seed: EWLKTRPILSPLTKG
EFLKLRAILNPLTKG

SEQ ID NO: 208474 - protein, 15 aa, Artificial Sequence
  Description of Artificial Sequence: Synthetic peptide
  Seed: EWLKTRPILSPLTKG
EFLKLRAILQPLTKG

SEQ ID NO: 208475 - protein, 15 aa, Artificial Sequence
  Description of Artificial Sequence: Synthetic peptide
  Seed: EWLKTRPILSPLTKG
EFLKLRAILRPLTKG

SEQ ID NO: 208476 - protein, 15 aa, Artificial Sequence
  Description of Artificial Sequence: Synthetic peptide
  Seed: EWLKTRPILSPLTKG
EFLKLRAILSPLTKG

SEQ ID NO: 208477 - protein, 15 aa, Artificial Sequence
  Description of Artificial Sequence: Synthetic peptide
  Seed: EWLKTRPILSPLTKG
EFLKLRAILTPLTKG

SEQ ID NO: 208478 - protein, 15 aa, Artificial Sequence
  Description of Artificial Sequence: Synthetic peptide
  Seed: EWLKTRPILSPLTKG
EFLKLRAILVPLTKG

SEQ ID NO: 208479 - protein, 15 aa, Artificial Sequence
  Description of Artificial Sequence: Synthetic peptide
  Seed: EWLKTRPILSPLTKG
EFLKLRAILWPLTKG

SEQ ID NO: 208480 - protein, 15 aa, Artificial Sequence
  Description of Artificial Sequence: Synthetic peptide
  Seed: EWLKTRPILSPLTKG
EFLKLRAILYPLTKG

SEQ ID NO: 208481 - protein, 15 aa, Artificial Sequence
  Description of Artificial Sequence: Synthetic peptide
  Seed: EWLKTRPILSPLTKG
EFLKLRCILVPLTKG

SEQ ID NO: 208482 - protein, 15 aa, Artificial Sequence
  Description of Artificial Sequence: Synthetic peptide
  Seed: EWLKTRPILSPLTKG
EFLKLRDILIPLTKG

SEQ ID NO: 208483 - protein, 15 aa, Artificial Sequence
  Description of Artificial Sequence: Synthetic peptide
  Seed: EWLKTRPILSPLTKG
EFLKLRDILLPLTKG

SEQ ID NO: 208484 - protein, 15 aa, Artificial Sequence
  Description of Artificial Sequence: Synthetic peptide
  Seed: EWLKTRPILSPLTKG
EFLKLRDILTPLTKG

SEQ ID NO: 208485 - protein, 15 aa, Artificial Sequence
  Description of Artificial Sequence: Synthetic peptide
  Seed: EWLKTRPILSPLTKG
EFLKLRDILVPLTKG

SEQ ID NO: 208486 - protein, 15 aa, Artificial Sequence
  Description of Artificial Sequence: Synthetic peptide
  Seed: EWLKTRPILSPLTKG
EFLKLREILIPLTKG

SEQ ID NO: 208487 - protein, 15 aa, Artificial Sequence
  Description of Artificial Sequence: Synthetic peptide
  Seed: EWLKTRPILSPLTKG
EFLKLREILLPLTKG

SEQ ID NO: 208488 - protein, 15 aa, Artificial Sequence
  Description of Artificial Sequence: Synthetic peptide
  Seed: EWLKTRPILSPLTKG
EFLKLREILVPLTKG

SEQ ID NO: 208489 - protein, 15 aa, Artificial Sequence
  Description of Artificial Sequence: Synthetic peptide
  Seed: EWLKTRPILSPLTKG
EFLKLRGILAPLTKG

SEQ ID NO: 208490 - protein, 15 aa, Artificial Sequence
  Description of Artificial Sequence: Synthetic peptide
  Seed: EWLKTRPILSPLTKG
EFLKLRGILCPLTKG

SEQ ID NO: 208491 - protein, 15 aa, Artificial Sequence
  Description of Artificial Sequence: Synthetic peptide
  Seed: EWLKTRPILSPLTKG
EFLKLRGILDPLTKG

SEQ ID NO: 208492 - protein, 15 aa, Artificial Sequence
  Description of Artificial Sequence: Synthetic peptide
  Seed: EWLKTRPILSPLTKG
EFLKLRGILEPLTKG

SEQ ID NO: 208493 - protein, 15 aa, Artificial Sequence
  Description of Artificial Sequence: Synthetic peptide
  Seed: EWLKTRPILSPLTKG
EFLKLRGILFPLTKG

SEQ ID NO: 208494 - protein, 15 aa, Artificial Sequence
  Description of Artificial Sequence: Synthetic peptide
  Seed: EWLKTRPILSPLTKG
EFLKLRGILGPLTKG

SEQ ID NO: 208495 - protein, 15 aa, Artificial Sequence
  Description of Artificial Sequence: Synthetic peptide
  Seed: EWLKTRPILSPLTKG
EFLKLRGILHPLTKG

SEQ ID NO: 208496 - protein, 15 aa, Artificial Sequence
  Description of Artificial Sequence: Synthetic peptide
  Seed: EWLKTRPILSPLTKG
EFLKLRGILIPLTKG

SEQ ID NO: 208497 - protein, 15 aa, Artificial Sequence
  Description of Artificial Sequence: Synthetic peptide
  Seed: EWLKTRPILSPLTKG
EFLKLRGILKPLTKG

SEQ ID NO: 208498 - protein, 15 aa, Artificial Sequence
  Description of Artificial Sequence: Synthetic peptide
  Seed: EWLKTRPILSPLTKG
EFLKLRGILLPLTKG

SEQ ID NO: 208499 - protein, 15 aa, Artificial Sequence
  Description of Artificial Sequence: Synthetic peptide
  Seed: EWLKTRPILSPLTKG
EFLKLRGILMPLTKG

SEQ ID NO: 208500 - protein, 15 aa, Artificial Sequence
  Description of Artificial Sequence: Synthetic peptide
  Seed: EWLKTRPILSPLTKG
EFLKLRGILNPLTKG

SEQ ID NO: 208501 - protein, 15 aa, Artificial Sequence
  Description of Artificial Sequence: Synthetic peptide
  Seed: EWLKTRPILSPLTKG
EFLKLRGILQPLTKG

SEQ ID NO: 208502 - protein, 15 aa, Artificial Sequence
  Description of Artificial Sequence: Synthetic peptide
  Seed: EWLKTRPILSPLTKG
EFLKLRGILRPLTKG

SEQ ID NO: 208503 - protein, 15 aa, Artificial Sequence
  Description of Artificial Sequence: Synthetic peptide
  Seed: EWLKTRPILSPLTKG
EFLKLRGILSPLTKG

SEQ ID NO: 208504 - protein, 15 aa, Artificial Sequence
  Description of Artificial Sequence: Synthetic peptide
  Seed: EWLKTRPILSPLTKG
EFLKLRGILTPLTKG

SEQ ID NO: 208505 - protein, 15 aa, Artificial Sequence
  Description of Artificial Sequence: Synthetic peptide
  Seed: EWLKTRPILSPLTKG
EFLKLRGILVPLTKG

SEQ ID NO: 208506 - protein, 15 aa, Artificial Sequence
  Description of Artificial Sequence: Synthetic peptide
  Seed: EWLKTRPILSPLTKG
EFLKLRGILYPLTKG

SEQ ID NO: 208507 - protein, 15 aa, Artificial Sequence
  Description of Artificial Sequence: Synthetic peptide
  Seed: EWLKTRPILSPLTKG
EFLKLRHILLPLTKG

SEQ ID NO: 208508 - protein, 15 aa, Artificial Sequence
  Description of Artificial Sequence: Synthetic peptide
  Seed: EWLKTRPILSPLTKG
EFLKLRHILMPLTKG

SEQ ID NO: 208509 - protein, 15 aa, Artificial Sequence
  Description of Artificial Sequence: Synthetic peptide
  Seed: EWLKTRPILSPLTKG
EFLKLRIILLPLTKG

SEQ ID NO: 208510 - protein, 15 aa, Artificial Sequence
  Description of Artificial Sequence: Synthetic peptide
  Seed: EWLKTRPILSPLTKG
EFLKLRIILMPLTKG

SEQ ID NO: 208511 - protein, 15 aa, Artificial Sequence
  Description of Artificial Sequence: Synthetic peptide
  Seed: EWLKTRPILSPLTKG
EFLKLRKILAPLTKG

SEQ ID NO: 208512 - protein, 15 aa, Artificial Sequence
  Description of Artificial Sequence: Synthetic peptide
  Seed: EWLKTRPILSPLTKG
EFLKLRKILGPLTKG

SEQ ID NO: 208513 - protein, 15 aa, Artificial Sequence
  Description of Artificial Sequence: Synthetic peptide
  Seed: EWLKTRPILSPLTKG
EFLKLRKILHPLTKG

SEQ ID NO: 208514 - protein, 15 aa, Artificial Sequence
  Description of Artificial Sequence: Synthetic peptide
  Seed: EWLKTRPILSPLTKG
EFLKLRKILNPLTKG

SEQ ID NO: 208515 - protein, 15 aa, Artificial Sequence
  Description of Artificial Sequence: Synthetic peptide
  Seed: EWLKTRPILSPLTKG
EFLKLRKILQPLTKG

SEQ ID NO: 208516 - protein, 15 aa, Artificial Sequence
  Description of Artificial Sequence: Synthetic peptide
  Seed: EWLKTRPILSPLTKG
EFLKLRKILSPLTKG

SEQ ID NO: 208517 - protein, 15 aa, Artificial Sequence
  Description of Artificial Sequence: Synthetic peptide
  Seed: EWLKTRPILSPLTKG
EFLKLRKILTPLTKG

SEQ ID NO: 208518 - protein, 15 aa, Artificial Sequence
  Description of Artificial Sequence: Synthetic peptide
  Seed: EWLKTRPILSPLTKG
EFLKLRKILVPLTKG

SEQ ID NO: 208519 - protein, 15 aa, Artificial Sequence
  Description of Artificial Sequence: Synthetic peptide
  Seed: EWLKTRPILSPLTKG
EFLKLRNILAPLTKG

SEQ ID NO: 208520 - protein, 15 aa, Artificial Sequence
  Description of Artificial Sequence: Synthetic peptide
  Seed: EWLKTRPILSPLTKG
EFLKLRNILCPLTKG

SEQ ID NO: 208521 - protein, 15 aa, Artificial Sequence
  Description of Artificial Sequence: Synthetic peptide
  Seed: EWLKTRPILSPLTKG
EFLKLRNILDPLTKG

SEQ ID NO: 208522 - protein, 15 aa, Artificial Sequence
  Description of Artificial Sequence: Synthetic peptide
  Seed: EWLKTRPILSPLTKG
EFLKLRNILFPLTKG

SEQ ID NO: 208523 - protein, 15 aa, Artificial Sequence
  Description of Artificial Sequence: Synthetic peptide
  Seed: EWLKTRPILSPLTKG
EFLKLRNILHPLTKG

SEQ ID NO: 208524 - protein, 15 aa, Artificial Sequence
  Description of Artificial Sequence: Synthetic peptide
  Seed: EWLKTRPILSPLTKG
EFLKLRNILIPLTKG

SEQ ID NO: 208525 - protein, 15 aa, Artificial Sequence
  Description of Artificial Sequence: Synthetic peptide
  Seed: EWLKTRPILSPLTKG
EFLKLRNILLPLTKG

SEQ ID NO: 208526 - protein, 15 aa, Artificial Sequence
  Description of Artificial Sequence: Synthetic peptide
  Seed: EWLKTRPILSPLTKG
EFLKLRNILMPLTKG

SEQ ID NO: 208527 - protein, 15 aa, Artificial Sequence
  Description of Artificial Sequence: Synthetic peptide
  Seed: EWLKTRPILSPLTKG
EFLKLRNILNPLTKG

SEQ ID NO: 208528 - protein, 15 aa, Artificial Sequence
  Description of Artificial Sequence: Synthetic peptide
  Seed: EWLKTRPILSPLTKG
EFLKLRNILQPLTKG

SEQ ID NO: 208529 - protein, 15 aa, Artificial Sequence
  Description of Artificial Sequence: Synthetic peptide
  Seed: EWLKTRPILSPLTKG
EFLKLRNILSPLTKG

SEQ ID NO: 208530 - protein, 15 aa, Artificial Sequence
  Description of Artificial Sequence: Synthetic peptide
  Seed: EWLKTRPILSPLTKG
EFLKLRNILTPLTKG

SEQ ID NO: 208531 - protein, 15 aa, Artificial Sequence
  Description of Artificial Sequence: Synthetic peptide
  Seed: EWLKTRPILSPLTKG
EFLKLRNILVPLTKG

SEQ ID NO: 208532 - protein, 15 aa, Artificial Sequence
  Description of Artificial Sequence: Synthetic peptide
  Seed: EWLKTRPILSPLTKG
EFLKLRPILAPLTKG

SEQ ID NO: 208533 - protein, 15 aa, Artificial Sequence
  Description of Artificial Sequence: Synthetic peptide
  Seed: EWLKTRPILSPLTKG
EFLKLRPILCPLTKG

SEQ ID NO: 208534 - protein, 15 aa, Artificial Sequence
  Description of Artificial Sequence: Synthetic peptide
  Seed: EWLKTRPILSPLTKG
EFLKLRPILDPLTKG

SEQ ID NO: 208535 - protein, 15 aa, Artificial Sequence
  Description of Artificial Sequence: Synthetic peptide
  Seed: EWLKTRPILSPLTKG
EFLKLRPILEPLTKG

SEQ ID NO: 208536 - protein, 15 aa, Artificial Sequence
  Description of Artificial Sequence: Synthetic peptide
  Seed: EWLKTRPILSPLTKG
EFLKLRPILFPLTKG

SEQ ID NO: 208537 - protein, 15 aa, Artificial Sequence
  Description of Artificial Sequence: Synthetic peptide
  Seed: EWLKTRPILSPLTKG
EFLKLRPILGPLTKG

SEQ ID NO: 208538 - protein, 15 aa, Artificial Sequence
  Description of Artificial Sequence: Synthetic peptide
  Seed: EWLKTRPILSPLTKG
EFLKLRPILHPLTKG

SEQ ID NO: 208539 - protein, 15 aa, Artificial Sequence
  Description of Artificial Sequence: Synthetic peptide
  Seed: EWLKTRPILSPLTKG
EFLKLRPILIPLTKG

SEQ ID NO: 208540 - protein, 15 aa, Artificial Sequence
  Description of Artificial Sequence: Synthetic peptide
  Seed: EWLKTRPILSPLTKG
EFLKLRPILKPLTKG

SEQ ID NO: 208541 - protein, 15 aa, Artificial Sequence
  Description of Artificial Sequence: Synthetic peptide
  Seed: EWLKTRPILSPLTKG
EFLKLRPILLPLTKG

SEQ ID NO: 208542 - protein, 15 aa, Artificial Sequence
  Description of Artificial Sequence: Synthetic peptide
  Seed: EWLKTRPILSPLTKG
EFLKLRPILMPLTKG

SEQ ID NO: 208543 - protein, 15 aa, Artificial Sequence
  Description of Artificial Sequence: Synthetic peptide
  Seed: EWLKTRPILSPLTKG
EFLKLRPILNPLTKG

SEQ ID NO: 208544 - protein, 15 aa, Artificial Sequence
  Description of Artificial Sequence: Synthetic peptide
  Seed: EWLKTRPILSPLTKG
EFLKLRPILQPLTKG

SEQ ID NO: 208545 - protein, 15 aa, Artificial Sequence
  Description of Artificial Sequence: Synthetic peptide
  Seed: EWLKTRPILSPLTKG
EFLKLRPILRPLTKG

SEQ ID NO: 208546 - protein, 15 aa, Artificial Sequence
  Description of Artificial Sequence: Synthetic peptide
  Seed: EWLKTRPILSPLTKG
EFLKLRPILSPLTKG

SEQ ID NO: 208547 - protein, 15 aa, Artificial Sequence
  Description of Artificial Sequence: Synthetic peptide
  Seed: EWLKTRPILSPLTKG
EFLKLRPILTPLTKG

SEQ ID NO: 208548 - protein, 15 aa, Artificial Sequence
  Description of Artificial Sequence: Synthetic peptide
  Seed: EWLKTRPILSPLTKG
EFLKLRPILVPLTKG

SEQ ID NO: 208549 - protein, 15 aa, Artificial Sequence
  Description of Artificial Sequence: Synthetic peptide
  Seed: EWLKTRPILSPLTKG
EFLKLRPILWPLTKG

SEQ ID NO: 208550 - protein, 15 aa, Artificial Sequence
  Description of Artificial Sequence: Synthetic peptide
  Seed: EWLKTRPILSPLTKG
EFLKLRPILYPLTKG

SEQ ID NO: 208551 - protein, 15 aa, Artificial Sequence
  Description of Artificial Sequence: Synthetic peptide
  Seed: EWLKTRPILSPLTKG
EFLKLRQILIPLTKG

SEQ ID NO: 208552 - protein, 15 aa, Artificial Sequence
  Description of Artificial Sequence: Synthetic peptide
  Seed: EWLKTRPILSPLTKG
EFLKLRQILLPLTKG

SEQ ID NO: 208553 - protein, 15 aa, Artificial Sequence
  Description of Artificial Sequence: Synthetic peptide
  Seed: EWLKTRPILSPLTKG
EFLKLRRILAPLTKG

SEQ ID NO: 208554 - protein, 15 aa, Artificial Sequence
  Description of Artificial Sequence: Synthetic peptide
  Seed: EWLKTRPILSPLTKG
EFLKLRRILGPLTKG

SEQ ID NO: 208555 - protein, 15 aa, Artificial Sequence
  Description of Artificial Sequence: Synthetic peptide
  Seed: EWLKTRPILSPLTKG
EFLKLRRILHPLTKG

SEQ ID NO: 208556 - protein, 15 aa, Artificial Sequence
  Description of Artificial Sequence: Synthetic peptide
  Seed: EWLKTRPILSPLTKG
EFLKLRRILIPLTKG

SEQ ID NO: 208557 - protein, 15 aa, Artificial Sequence
  Description of Artificial Sequence: Synthetic peptide
  Seed: EWLKTRPILSPLTKG
EFLKLRRILMPLTKG

SEQ ID NO: 208558 - protein, 15 aa, Artificial Sequence
  Description of Artificial Sequence: Synthetic peptide
  Seed: EWLKTRPILSPLTKG
EFLKLRRILNPLTKG

SEQ ID NO: 208559 - protein, 15 aa, Artificial Sequence
  Description of Artificial Sequence: Synthetic peptide
  Seed: EWLKTRPILSPLTKG
EFLKLRRILPPLTKG

SEQ ID NO: 208560 - protein, 15 aa, Artificial Sequence
  Description of Artificial Sequence: Synthetic peptide
  Seed: EWLKTRPILSPLTKG
EFLKLRRILQPLTKG

SEQ ID NO: 208561 - protein, 15 aa, Artificial Sequence
  Description of Artificial Sequence: Synthetic peptide
  Seed: EWLKTRPILSPLTKG
EFLKLRRILSPLTKG

SEQ ID NO: 208562 - protein, 15 aa, Artificial Sequence
  Description of Artificial Sequence: Synthetic peptide
  Seed: EWLKTRPILSPLTKG
EFLKLRRILTPLTKG

SEQ ID NO: 208563 - protein, 15 aa, Artificial Sequence
  Description of Artificial Sequence: Synthetic peptide
  Seed: EWLKTRPILSPLTKG
EFLKLRRILVPLTKG

SEQ ID NO: 208564 - protein, 15 aa, Artificial Sequence
  Description of Artificial Sequence: Synthetic peptide
  Seed: EWLKTRPILSPLTKG
EFLKLRSILCPLTKG

SEQ ID NO: 208565 - protein, 15 aa, Artificial Sequence
  Description of Artificial Sequence: Synthetic peptide
  Seed: EWLKTRPILSPLTKG
EFLKLRSILDPLTKG

SEQ ID NO: 208566 - protein, 15 aa, Artificial Sequence
  Description of Artificial Sequence: Synthetic peptide
  Seed: EWLKTRPILSPLTKG
EFLKLRSILEPLTKG

SEQ ID NO: 208567 - protein, 15 aa, Artificial Sequence
  Description of Artificial Sequence: Synthetic peptide
  Seed: EWLKTRPILSPLTKG
EFLKLRSILFPLTKG

SEQ ID NO: 208568 - protein, 15 aa, Artificial Sequence
  Description of Artificial Sequence: Synthetic peptide
  Seed: EWLKTRPILSPLTKG
EFLKLRSILHPLTKG

SEQ ID NO: 208569 - protein, 15 aa, Artificial Sequence
  Description of Artificial Sequence: Synthetic peptide
  Seed: EWLKTRPILSPLTKG
EFLKLRSILIPLTKG

SEQ ID NO: 208570 - protein, 15 aa, Artificial Sequence
  Description of Artificial Sequence: Synthetic peptide
  Seed: EWLKTRPILSPLTKG
EFLKLRSILKPLTKG

SEQ ID NO: 208571 - protein, 15 aa, Artificial Sequence
  Description of Artificial Sequence: Synthetic peptide
  Seed: EWLKTRPILSPLTKG
EFLKLRSILLPLTKG

SEQ ID NO: 208572 - protein, 15 aa, Artificial Sequence
  Description of Artificial Sequence: Synthetic peptide
  Seed: EWLKTRPILSPLTKG
EFLKLRSILMPLTKG

SEQ ID NO: 208573 - protein, 15 aa, Artificial Sequence
  Description of Artificial Sequence: Synthetic peptide
  Seed: EWLKTRPILSPLTKG
EFLKLRSILQPLTKG

SEQ ID NO: 208574 - protein, 15 aa, Artificial Sequence
  Description of Artificial Sequence: Synthetic peptide
  Seed: EWLKTRPILSPLTKG
EFLKLRSILRPLTKG

SEQ ID NO: 208575 - protein, 15 aa, Artificial Sequence
  Description of Artificial Sequence: Synthetic peptide
  Seed: EWLKTRPILSPLTKG
EFLKLRSILSPLTKG

SEQ ID NO: 208576 - protein, 15 aa, Artificial Sequence
  Description of Artificial Sequence: Synthetic peptide
  Seed: EWLKTRPILSPLTKG
EFLKLRSILTPLTKG

SEQ ID NO: 208577 - protein, 15 aa, Artificial Sequence
  Description of Artificial Sequence: Synthetic peptide
  Seed: EWLKTRPILSPLTKG
EFLKLRSILVPLTKG

SEQ ID NO: 208578 - protein, 15 aa, Artificial Sequence
  Description of Artificial Sequence: Synthetic peptide
  Seed: EWLKTRPILSPLTKG
EFLKLRSILWPLTKG

SEQ ID NO: 208579 - protein, 15 aa, Artificial Sequence
  Description of Artificial Sequence: Synthetic peptide
  Seed: EWLKTRPILSPLTKG
EFLKLRSILYPLTKG

SEQ ID NO: 208580 - protein, 15 aa, Artificial Sequence
  Description of Artificial Sequence: Synthetic peptide
  Seed: EWLKTRPILSPLTKG
EFLKLRTILAPLTKG

SEQ ID NO: 208581 - protein, 15 aa, Artificial Sequence
  Description of Artificial Sequence: Synthetic peptide
  Seed: EWLKTRPILSPLTKG
EFLKLRTILCPLTKG

SEQ ID NO: 208582 - protein, 15 aa, Artificial Sequence
  Description of Artificial Sequence: Synthetic peptide
  Seed: EWLKTRPILSPLTKG
EFLKLRTILDPLTKG

SEQ ID NO: 208583 - protein, 15 aa, Artificial Sequence
  Description of Artificial Sequence: Synthetic peptide
  Seed: EWLKTRPILSPLTKG
EFLKLRTILEPLTKG

SEQ ID NO: 208584 - protein, 15 aa, Artificial Sequence
  Description of Artificial Sequence: Synthetic peptide
  Seed: EWLKTRPILSPLTKG
EFLKLRTILFPLTKG

SEQ ID NO: 208585 - protein, 15 aa, Artificial Sequence
  Description of Artificial Sequence: Synthetic peptide
  Seed: EWLKTRPILSPLTKG
EFLKLRTILGPLTKG

SEQ ID NO: 208586 - protein, 15 aa, Artificial Sequence
  Description of Artificial Sequence: Synthetic peptide
  Seed: EWLKTRPILSPLTKG
EFLKLRTILHPLTKG

SEQ ID NO: 208587 - protein, 15 aa, Artificial Sequence
  Description of Artificial Sequence: Synthetic peptide
  Seed: EWLKTRPILSPLTKG
EFLKLRTILIPLTKG

SEQ ID NO: 208588 - protein, 15 aa, Artificial Sequence
  Description of Artificial Sequence: Synthetic peptide
  Seed: EWLKTRPILSPLTKG
EFLKLRTILKPLTKG

SEQ ID NO: 208589 - protein, 15 aa, Artificial Sequence
  Description of Artificial Sequence: Synthetic peptide
  Seed: EWLKTRPILSPLTKG
EFLKLRTILLPLTKG

SEQ ID NO: 208590 - protein, 15 aa, Artificial Sequence
  Description of Artificial Sequence: Synthetic peptide
  Seed: EWLKTRPILSPLTKG
EFLKLRTILMPLTKG

SEQ ID NO: 208591 - protein, 15 aa, Artificial Sequence
  Description of Artificial Sequence: Synthetic peptide
  Seed: EWLKTRPILSPLTKG
EFLKLRTILNPLTKG

SEQ ID NO: 208592 - protein, 15 aa, Artificial Sequence
  Description of Artificial Sequence: Synthetic peptide
  Seed: EWLKTRPILSPLTKG
EFLKLRTILQPLTKG

SEQ ID NO: 208593 - protein, 15 aa, Artificial Sequence
  Description of Artificial Sequence: Synthetic peptide
  Seed: EWLKTRPILSPLTKG
EFLKLRTILRPLTKG

SEQ ID NO: 208594 - protein, 15 aa, Artificial Sequence
  Description of Artificial Sequence: Synthetic peptide
  Seed: EWLKTRPILSPLTKG
EFLKLRTILSPLTKG

SEQ ID NO: 208595 - protein, 15 aa, Artificial Sequence
  Description of Artificial Sequence: Synthetic peptide
  Seed: EWLKTRPILSPLTKG
EFLKLRTILTPLTKG

SEQ ID NO: 208596 - protein, 15 aa, Artificial Sequence
  Description of Artificial Sequence: Synthetic peptide
  Seed: EWLKTRPILSPLTKG
EFLKLRTILVPLTKG

SEQ ID NO: 208597 - protein, 15 aa, Artificial Sequence
  Description of Artificial Sequence: Synthetic peptide
  Seed: EWLKTRPILSPLTKG
EFLKLRTILYPLTKG

SEQ ID NO: 208598 - protein, 15 aa, Artificial Sequence
  Description of Artificial Sequence: Synthetic peptide
  Seed: EWLKTRPILSPLTKG
EFLKLRVILHPLTKG

SEQ ID NO: 208599 - protein, 15 aa, Artificial Sequence
  Description of Artificial Sequence: Synthetic peptide
  Seed: EWLKTRPILSPLTKG
EFLKLRVILIPLTKG

SEQ ID NO: 208600 - protein, 15 aa, Artificial Sequence
  Description of Artificial Sequence: Synthetic peptide
  Seed: EWLKTRPILSPLTKG
EFLKLRVILLPLTKG

SEQ ID NO: 208601 - protein, 15 aa, Artificial Sequence
  Description of Artificial Sequence: Synthetic peptide
  Seed: EWLKTRPILSPLTKG
EFLKLRVILMPLTKG

SEQ ID NO: 208602 - protein, 15 aa, Artificial Sequence
  Description of Artificial Sequence: Synthetic peptide
  Seed: EWLKTRPILSPLTKG
EFLKLRVILQPLTKG

SEQ ID NO: 208603 - protein, 15 aa, Artificial Sequence
  Description of Artificial Sequence: Synthetic peptide
  Seed: EWLKTRPILSPLTKG
EFLKLRVILVPLTKG

SEQ ID NO: 208604 - protein, 15 aa, Artificial Sequence
  Description of Artificial Sequence: Synthetic peptide
  Seed: EWLKTRPILSPLTKG
EFLKMRAILAPLTKG

SEQ ID NO: 208605 - protein, 15 aa, Artificial Sequence
  Description of Artificial Sequence: Synthetic peptide
  Seed: EWLKTRPILSPLTKG
EFLKMRAILCPLTKG

SEQ ID NO: 208606 - protein, 15 aa, Artificial Sequence
  Description of Artificial Sequence: Synthetic peptide
  Seed: EWLKTRPILSPLTKG
EFLKMRAILDPLTKG

SEQ ID NO: 208607 - protein, 15 aa, Artificial Sequence
  Description of Artificial Sequence: Synthetic peptide
  Seed: EWLKTRPILSPLTKG
EFLKMRAILEPLTKG

SEQ ID NO: 208608 - protein, 15 aa, Artificial Sequence
  Description of Artificial Sequence: Synthetic peptide
  Seed: EWLKTRPILSPLTKG
EFLKMRAILFPLTKG

SEQ ID NO: 208609 - protein, 15 aa, Artificial Sequence
  Description of Artificial Sequence: Synthetic peptide
  Seed: EWLKTRPILSPLTKG
EFLKMRAILGPLTKG

SEQ ID NO: 208610 - protein, 15 aa, Artificial Sequence
  Description of Artificial Sequence: Synthetic peptide
  Seed: EWLKTRPILSPLTKG
EFLKMRAILHPLTKG

SEQ ID NO: 208611 - protein, 15 aa, Artificial Sequence
  Description of Artificial Sequence: Synthetic peptide
  Seed: EWLKTRPILSPLTKG
EFLKMRAILIPLTKG

SEQ ID NO: 208612 - protein, 15 aa, Artificial Sequence
  Description of Artificial Sequence: Synthetic peptide
  Seed: EWLKTRPILSPLTKG
EFLKMRAILKPLTKG

SEQ ID NO: 208613 - protein, 15 aa, Artificial Sequence
  Description of Artificial Sequence: Synthetic peptide
  Seed: EWLKTRPILSPLTKG
EFLKMRAILLPLTKG

SEQ ID NO: 208614 - protein, 15 aa, Artificial Sequence
  Description of Artificial Sequence: Synthetic peptide
  Seed: EWLKTRPILSPLTKG
EFLKMRAILMPLTKG

SEQ ID NO: 208615 - protein, 15 aa, Artificial Sequence
  Description of Artificial Sequence: Synthetic peptide
  Seed: EWLKTRPILSPLTKG
EFLKMRAILNPLTKG

SEQ ID NO: 208616 - protein, 15 aa, Artificial Sequence
  Description of Artificial Sequence: Synthetic peptide
  Seed: EWLKTRPILSPLTKG
EFLKMRAILQPLTKG

SEQ ID NO: 208617 - protein, 15 aa, Artificial Sequence
  Description of Artificial Sequence: Synthetic peptide
  Seed: EWLKTRPILSPLTKG
EFLKMRAILRPLTKG

SEQ ID NO: 208618 - protein, 15 aa, Artificial Sequence
  Description of Artificial Sequence: Synthetic peptide
  Seed: EWLKTRPILSPLTKG
EFLKMRAILSPLTKG

SEQ ID NO: 208619 - protein, 15 aa, Artificial Sequence
  Description of Artificial Sequence: Synthetic peptide
  Seed: EWLKTRPILSPLTKG
EFLKMRAILTPLTKG

SEQ ID NO: 208620 - protein, 15 aa, Artificial Sequence
  Description of Artificial Sequence: Synthetic peptide
  Seed: EWLKTRPILSPLTKG
EFLKMRAILVPLTKG

SEQ ID NO: 208621 - protein, 15 aa, Artificial Sequence
  Description of Artificial Sequence: Synthetic peptide
  Seed: EWLKTRPILSPLTKG
EFLKMRAILWPLTKG

SEQ ID NO: 208622 - protein, 15 aa, Artificial Sequence
  Description of Artificial Sequence: Synthetic peptide
  Seed: EWLKTRPILSPLTKG
EFLKMRAILYPLTKG

SEQ ID NO: 208623 - protein, 15 aa, Artificial Sequence
  Description of Artificial Sequence: Synthetic peptide
  Seed: EWLKTRPILSPLTKG
EFLKMRCILIPLTKG

SEQ ID NO: 208624 - protein, 15 aa, Artificial Sequence
  Description of Artificial Sequence: Synthetic peptide
  Seed: EWLKTRPILSPLTKG
EFLKMRCILVPLTKG

SEQ ID NO: 208625 - protein, 15 aa, Artificial Sequence
  Description of Artificial Sequence: Synthetic peptide
  Seed: EWLKTRPILSPLTKG
EFLKMRDILAPLTKG

SEQ ID NO: 208626 - protein, 15 aa, Artificial Sequence
  Description of Artificial Sequence: Synthetic peptide
  Seed: EWLKTRPILSPLTKG
EFLKMRDILIPLTKG

SEQ ID NO: 208627 - protein, 15 aa, Artificial Sequence
  Description of Artificial Sequence: Synthetic peptide
  Seed: EWLKTRPILSPLTKG
EFLKMRDILLPLTKG

SEQ ID NO: 208628 - protein, 15 aa, Artificial Sequence
  Description of Artificial Sequence: Synthetic peptide
  Seed: EWLKTRPILSPLTKG
EFLKMRDILSPLTKG

SEQ ID NO: 208629 - protein, 15 aa, Artificial Sequence
  Description of Artificial Sequence: Synthetic peptide
  Seed: EWLKTRPILSPLTKG
EFLKMRDILVPLTKG

SEQ ID NO: 208630 - protein, 15 aa, Artificial Sequence
  Description of Artificial Sequence: Synthetic peptide
  Seed: EWLKTRPILSPLTKG
EFLKMREILIPLTKG

SEQ ID NO: 208631 - protein, 15 aa, Artificial Sequence
  Description of Artificial Sequence: Synthetic peptide
  Seed: EWLKTRPILSPLTKG
EFLKMREILLPLTKG

SEQ ID NO: 208632 - protein, 15 aa, Artificial Sequence
  Description of Artificial Sequence: Synthetic peptide
  Seed: EWLKTRPILSPLTKG
EFLKMREILMPLTKG

SEQ ID NO: 208633 - protein, 15 aa, Artificial Sequence
  Description of Artificial Sequence: Synthetic peptide
  Seed: EWLKTRPILSPLTKG
EFLKMREILTPLTKG

SEQ ID NO: 208634 - protein, 15 aa, Artificial Sequence
  Description of Artificial Sequence: Synthetic peptide
  Seed: EWLKTRPILSPLTKG
EFLKMREILVPLTKG

SEQ ID NO: 208635 - protein, 15 aa, Artificial Sequence
  Description of Artificial Sequence: Synthetic peptide
  Seed: EWLKTRPILSPLTKG
EFLKMRGILAPLTKG

SEQ ID NO: 208636 - protein, 15 aa, Artificial Sequence
  Description of Artificial Sequence: Synthetic peptide
  Seed: EWLKTRPILSPLTKG
EFLKMRGILCPLTKG

SEQ ID NO: 208637 - protein, 15 aa, Artificial Sequence
  Description of Artificial Sequence: Synthetic peptide
  Seed: EWLKTRPILSPLTKG
EFLKMRGILDPLTKG

SEQ ID NO: 208638 - protein, 15 aa, Artificial Sequence
  Description of Artificial Sequence: Synthetic peptide
  Seed: EWLKTRPILSPLTKG
EFLKMRGILEPLTKG

SEQ ID NO: 208639 - protein, 15 aa, Artificial Sequence
  Description of Artificial Sequence: Synthetic peptide
  Seed: EWLKTRPILSPLTKG
EFLKMRGILFPLTKG

SEQ ID NO: 208640 - protein, 15 aa, Artificial Sequence
  Description of Artificial Sequence: Synthetic peptide
  Seed: EWLKTRPILSPLTKG
EFLKMRGILGPLTKG

SEQ ID NO: 208641 - protein, 15 aa, Artificial Sequence
  Description of Artificial Sequence: Synthetic peptide
  Seed: EWLKTRPILSPLTKG
EFLKMRGILHPLTKG

SEQ ID NO: 208642 - protein, 15 aa, Artificial Sequence
  Description of Artificial Sequence: Synthetic peptide
  Seed: EWLKTRPILSPLTKG
EFLKMRGILIPLTKG

SEQ ID NO: 208643 - protein, 15 aa, Artificial Sequence
  Description of Artificial Sequence: Synthetic peptide
  Seed: EWLKTRPILSPLTKG
EFLKMRGILKPLTKG

SEQ ID NO: 208644 - protein, 15 aa, Artificial Sequence
  Description of Artificial Sequence: Synthetic peptide
  Seed: EWLKTRPILSPLTKG
EFLKMRGILLPLTKG

SEQ ID NO: 208645 - protein, 15 aa, Artificial Sequence
  Description of Artificial Sequence: Synthetic peptide
  Seed: EWLKTRPILSPLTKG
EFLKMRGILMPLTKG

SEQ ID NO: 208646 - protein, 15 aa, Artificial Sequence
  Description of Artificial Sequence: Synthetic peptide
  Seed: EWLKTRPILSPLTKG
EFLKMRGILNPLTKG

SEQ ID NO: 208647 - protein, 15 aa, Artificial Sequence
  Description of Artificial Sequence: Synthetic peptide
  Seed: EWLKTRPILSPLTKG
EFLKMRGILQPLTKG

SEQ ID NO: 208648 - protein, 15 aa, Artificial Sequence
  Description of Artificial Sequence: Synthetic peptide
  Seed: EWLKTRPILSPLTKG
EFLKMRGILRPLTKG

SEQ ID NO: 208649 - protein, 15 aa, Artificial Sequence
  Description of Artificial Sequence: Synthetic peptide
  Seed: EWLKTRPILSPLTKG
EFLKMRGILSPLTKG

SEQ ID NO: 208650 - protein, 15 aa, Artificial Sequence
  Description of Artificial Sequence: Synthetic peptide
  Seed: EWLKTRPILSPLTKG
EFLKMRGILTPLTKG

SEQ ID NO: 208651 - protein, 15 aa, Artificial Sequence
  Description of Artificial Sequence: Synthetic peptide
  Seed: EWLKTRPILSPLTKG
EFLKMRGILVPLTKG

SEQ ID NO: 208652 - protein, 15 aa, Artificial Sequence
  Description of Artificial Sequence: Synthetic peptide
  Seed: EWLKTRPILSPLTKG
EFLKMRGILWPLTKG

SEQ ID NO: 208653 - protein, 15 aa, Artificial Sequence
  Description of Artificial Sequence: Synthetic peptide
  Seed: EWLKTRPILSPLTKG
EFLKMRGILYPLTKG

SEQ ID NO: 208654 - protein, 15 aa, Artificial Sequence
  Description of Artificial Sequence: Synthetic peptide
  Seed: EWLKTRPILSPLTKG
EFLKMRHILIPLTKG

SEQ ID NO: 208655 - protein, 15 aa, Artificial Sequence
  Description of Artificial Sequence: Synthetic peptide
  Seed: EWLKTRPILSPLTKG
EFLKMRHILLPLTKG

SEQ ID NO: 208656 - protein, 15 aa, Artificial Sequence
  Description of Artificial Sequence: Synthetic peptide
  Seed: EWLKTRPILSPLTKG
EFLKMRHILMPLTKG

SEQ ID NO: 208657 - protein, 15 aa, Artificial Sequence
  Description of Artificial Sequence: Synthetic peptide
  Seed: EWLKTRPILSPLTKG
EFLKMRHILSPLTKG

SEQ ID NO: 208658 - protein, 15 aa, Artificial Sequence
  Description of Artificial Sequence: Synthetic peptide
  Seed: EWLKTRPILSPLTKG
EFLKMRHILVPLTKG

SEQ ID NO: 208659 - protein, 15 aa, Artificial Sequence
  Description of Artificial Sequence: Synthetic peptide
  Seed: EWLKTRPILSPLTKG
EFLKMRIILLPLTKG

SEQ ID NO: 208660 - protein, 15 aa, Artificial Sequence
  Description of Artificial Sequence: Synthetic peptide
  Seed: EWLKTRPILSPLTKG
EFLKMRIILMPLTKG

SEQ ID NO: 208661 - protein, 15 aa, Artificial Sequence
  Description of Artificial Sequence: Synthetic peptide
  Seed: EWLKTRPILSPLTKG
EFLKMRKILAPLTKG

SEQ ID NO: 208662 - protein, 15 aa, Artificial Sequence
  Description of Artificial Sequence: Synthetic peptide
  Seed: EWLKTRPILSPLTKG
EFLKMRKILGPLTKG

SEQ ID NO: 208663 - protein, 15 aa, Artificial Sequence
  Description of Artificial Sequence: Synthetic peptide
  Seed: EWLKTRPILSPLTKG
EFLKMRKILHPLTKG

SEQ ID NO: 208664 - protein, 15 aa, Artificial Sequence
  Description of Artificial Sequence: Synthetic peptide
  Seed: EWLKTRPILSPLTKG
EFLKMRKILIPLTKG

SEQ ID NO: 208665 - protein, 15 aa, Artificial Sequence
  Description of Artificial Sequence: Synthetic peptide
  Seed: EWLKTRPILSPLTKG
EFLKMRKILMPLTKG

SEQ ID NO: 208666 - protein, 15 aa, Artificial Sequence
  Description of Artificial Sequence: Synthetic peptide
  Seed: EWLKTRPILSPLTKG
EFLKMRKILNPLTKG

SEQ ID NO: 208667 - protein, 15 aa, Artificial Sequence
  Description of Artificial Sequence: Synthetic peptide
  Seed: EWLKTRPILSPLTKG
EFLKMRKILPPLTKG

SEQ ID NO: 208668 - protein, 15 aa, Artificial Sequence
  Description of Artificial Sequence: Synthetic peptide
  Seed: EWLKTRPILSPLTKG
EFLKMRKILQPLTKG

SEQ ID NO: 208669 - protein, 15 aa, Artificial Sequence
  Description of Artificial Sequence: Synthetic peptide
  Seed: EWLKTRPILSPLTKG
EFLKMRKILSPLTKG

SEQ ID NO: 208670 - protein, 15 aa, Artificial Sequence
  Description of Artificial Sequence: Synthetic peptide
  Seed: EWLKTRPILSPLTKG
EFLKMRKILTPLTKG

SEQ ID NO: 208671 - protein, 15 aa, Artificial Sequence
  Description of Artificial Sequence: Synthetic peptide
  Seed: EWLKTRPILSPLTKG
EFLKMRKILVPLTKG

SEQ ID NO: 208672 - protein, 15 aa, Artificial Sequence
  Description of Artificial Sequence: Synthetic peptide
  Seed: EWLKTRPILSPLTKG
EFLKMRNILAPLTKG

SEQ ID NO: 208673 - protein, 15 aa, Artificial Sequence
  Description of Artificial Sequence: Synthetic peptide
  Seed: EWLKTRPILSPLTKG
EFLKMRNILCPLTKG

SEQ ID NO: 208674 - protein, 15 aa, Artificial Sequence
  Description of Artificial Sequence: Synthetic peptide
  Seed: EWLKTRPILSPLTKG
EFLKMRNILDPLTKG

SEQ ID NO: 208675 - protein, 15 aa, Artificial Sequence
  Description of Artificial Sequence: Synthetic peptide
  Seed: EWLKTRPILSPLTKG
EFLKMRNILFPLTKG

SEQ ID NO: 208676 - protein, 15 aa, Artificial Sequence
  Description of Artificial Sequence: Synthetic peptide
  Seed: EWLKTRPILSPLTKG
EFLKMRNILGPLTKG

SEQ ID NO: 208677 - protein, 15 aa, Artificial Sequence
  Description of Artificial Sequence: Synthetic peptide
  Seed: EWLKTRPILSPLTKG
EFLKMRNILHPLTKG

SEQ ID NO: 208678 - protein, 15 aa, Artificial Sequence
  Description of Artificial Sequence: Synthetic peptide
  Seed: EWLKTRPILSPLTKG
EFLKMRNILIPLTKG

SEQ ID NO: 208679 - protein, 15 aa, Artificial Sequence
  Description of Artificial Sequence: Synthetic peptide
  Seed: EWLKTRPILSPLTKG
EFLKMRNILLPLTKG

SEQ ID NO: 208680 - protein, 15 aa, Artificial Sequence
  Description of Artificial Sequence: Synthetic peptide
  Seed: EWLKTRPILSPLTKG
EFLKMRNILMPLTKG

SEQ ID NO: 208681 - protein, 15 aa, Artificial Sequence
  Description of Artificial Sequence: Synthetic peptide
  Seed: EWLKTRPILSPLTKG
EFLKMRNILNPLTKG

SEQ ID NO: 208682 - protein, 15 aa, Artificial Sequence
  Description of Artificial Sequence: Synthetic peptide
  Seed: EWLKTRPILSPLTKG
EFLKMRNILQPLTKG

SEQ ID NO: 208683 - protein, 15 aa, Artificial Sequence
  Description of Artificial Sequence: Synthetic peptide
  Seed: EWLKTRPILSPLTKG
EFLKMRNILSPLTKG

SEQ ID NO: 208684 - protein, 15 aa, Artificial Sequence
  Description of Artificial Sequence: Synthetic peptide
  Seed: EWLKTRPILSPLTKG
EFLKMRNILTPLTKG

SEQ ID NO: 208685 - protein, 15 aa, Artificial Sequence
  Description of Artificial Sequence: Synthetic peptide
  Seed: EWLKTRPILSPLTKG
EFLKMRNILVPLTKG

SEQ ID NO: 208686 - protein, 15 aa, Artificial Sequence
  Description of Artificial Sequence: Synthetic peptide
  Seed: EWLKTRPILSPLTKG
EFLKMRPILAPLTKG

SEQ ID NO: 208687 - protein, 15 aa, Artificial Sequence
  Description of Artificial Sequence: Synthetic peptide
  Seed: EWLKTRPILSPLTKG
EFLKMRPILCPLTKG

SEQ ID NO: 208688 - protein, 15 aa, Artificial Sequence
  Description of Artificial Sequence: Synthetic peptide
  Seed: EWLKTRPILSPLTKG
EFLKMRPILDPLTKG

SEQ ID NO: 208689 - protein, 15 aa, Artificial Sequence
  Description of Artificial Sequence: Synthetic peptide
  Seed: EWLKTRPILSPLTKG
EFLKMRPILEPLTKG

SEQ ID NO: 208690 - protein, 15 aa, Artificial Sequence
  Description of Artificial Sequence: Synthetic peptide
  Seed: EWLKTRPILSPLTKG
EFLKMRPILFPLTKG

SEQ ID NO: 208691 - protein, 15 aa, Artificial Sequence
  Description of Artificial Sequence: Synthetic peptide
  Seed: EWLKTRPILSPLTKG
EFLKMRPILGPLTKG

SEQ ID NO: 208692 - protein, 15 aa, Artificial Sequence
  Description of Artificial Sequence: Synthetic peptide
  Seed: EWLKTRPILSPLTKG
EFLKMRPILHPLTKG

SEQ ID NO: 208693 - protein, 15 aa, Artificial Sequence
  Description of Artificial Sequence: Synthetic peptide
  Seed: EWLKTRPILSPLTKG
EFLKMRPILIPLTKG

SEQ ID NO: 208694 - protein, 15 aa, Artificial Sequence
  Description of Artificial Sequence: Synthetic peptide
  Seed: EWLKTRPILSPLTKG
EFLKMRPILKPLTKG

SEQ ID NO: 208695 - protein, 15 aa, Artificial Sequence
  Description of Artificial Sequence: Synthetic peptide
  Seed: EWLKTRPILSPLTKG
EFLKMRPILLPLTKG

SEQ ID NO: 208696 - protein, 15 aa, Artificial Sequence
  Description of Artificial Sequence: Synthetic peptide
  Seed: EWLKTRPILSPLTKG
EFLKMRPILMPLTKG

SEQ ID NO: 208697 - protein, 15 aa, Artificial Sequence
  Description of Artificial Sequence: Synthetic peptide
  Seed: EWLKTRPILSPLTKG
EFLKMRPILNPLTKG

SEQ ID NO: 208698 - protein, 15 aa, Artificial Sequence
  Description of Artificial Sequence: Synthetic peptide
  Seed: EWLKTRPILSPLTKG
EFLKMRPILQPLTKG

SEQ ID NO: 208699 - protein, 15 aa, Artificial Sequence
  Description of Artificial Sequence: Synthetic peptide
  Seed: EWLKTRPILSPLTKG
EFLKMRPILRPLTKG

SEQ ID NO: 208700 - protein, 15 aa, Artificial Sequence
  Description of Artificial Sequence: Synthetic peptide
  Seed: EWLKTRPILSPLTKG
EFLKMRPILSPLTKG

SEQ ID NO: 208701 - protein, 15 aa, Artificial Sequence
  Description of Artificial Sequence: Synthetic peptide
  Seed: EWLKTRPILSPLTKG
EFLKMRPILTPLTKG

SEQ ID NO: 208702 - protein, 15 aa, Artificial Sequence
  Description of Artificial Sequence: Synthetic peptide
  Seed: EWLKTRPILSPLTKG
EFLKMRPILVPLTKG

SEQ ID NO: 208703 - protein, 15 aa, Artificial Sequence
  Description of Artificial Sequence: Synthetic peptide
  Seed: EWLKTRPILSPLTKG
EFLKMRPILWPLTKG

SEQ ID NO: 208704 - protein, 15 aa, Artificial Sequence
  Description of Artificial Sequence: Synthetic peptide
  Seed: EWLKTRPILSPLTKG
EFLKMRPILYPLTKG

SEQ ID NO: 208705 - protein, 15 aa, Artificial Sequence
  Description of Artificial Sequence: Synthetic peptide
  Seed: EWLKTRPILSPLTKG
EFLKMRQILIPLTKG

SEQ ID NO: 208706 - protein, 15 aa, Artificial Sequence
  Description of Artificial Sequence: Synthetic peptide
  Seed: EWLKTRPILSPLTKG
EFLKMRQILLPLTKG

SEQ ID NO: 208707 - protein, 15 aa, Artificial Sequence
  Description of Artificial Sequence: Synthetic peptide
  Seed: EWLKTRPILSPLTKG
EFLKMRQILMPLTKG

SEQ ID NO: 208708 - protein, 15 aa, Artificial Sequence
  Description of Artificial Sequence: Synthetic peptide
  Seed: EWLKTRPILSPLTKG
EFLKMRQILVPLTKG

SEQ ID NO: 208709 - protein, 15 aa, Artificial Sequence
  Description of Artificial Sequence: Synthetic peptide
  Seed: EWLKTRPILSPLTKG
EFLKMRRILAPLTKG

SEQ ID NO: 208710 - protein, 15 aa, Artificial Sequence
  Description of Artificial Sequence: Synthetic peptide
  Seed: EWLKTRPILSPLTKG
EFLKMRRILGPLTKG

SEQ ID NO: 208711 - protein, 15 aa, Artificial Sequence
  Description of Artificial Sequence: Synthetic peptide
  Seed: EWLKTRPILSPLTKG
EFLKMRRILHPLTKG

SEQ ID NO: 208712 - protein, 15 aa, Artificial Sequence
  Description of Artificial Sequence: Synthetic peptide
  Seed: EWLKTRPILSPLTKG
EFLKMRRILIPLTKG

SEQ ID NO: 208713 - protein, 15 aa, Artificial Sequence
  Description of Artificial Sequence: Synthetic peptide
  Seed: EWLKTRPILSPLTKG
EFLKMRRILLPLTKG

SEQ ID NO: 208714 - protein, 15 aa, Artificial Sequence
  Description of Artificial Sequence: Synthetic peptide
  Seed: EWLKTRPILSPLTKG
EFLKMRRILMPLTKG

SEQ ID NO: 208715 - protein, 15 aa, Artificial Sequence
  Description of Artificial Sequence: Synthetic peptide
  Seed: EWLKTRPILSPLTKG
EFLKMRRILNPLTKG

SEQ ID NO: 208716 - protein, 15 aa, Artificial Sequence
  Description of Artificial Sequence: Synthetic peptide
  Seed: EWLKTRPILSPLTKG
EFLKMRRILPPLTKG

SEQ ID NO: 208717 - protein, 15 aa, Artificial Sequence
  Description of Artificial Sequence: Synthetic peptide
  Seed: EWLKTRPILSPLTKG
EFLKMRRILQPLTKG

SEQ ID NO: 208718 - protein, 15 aa, Artificial Sequence
  Description of Artificial Sequence: Synthetic peptide
  Seed: EWLKTRPILSPLTKG
EFLKMRRILSPLTKG

SEQ ID NO: 208719 - protein, 15 aa, Artificial Sequence
  Description of Artificial Sequence: Synthetic peptide
  Seed: EWLKTRPILSPLTKG
EFLKMRRILTPLTKG

SEQ ID NO: 208720 - protein, 15 aa, Artificial Sequence
  Description of Artificial Sequence: Synthetic peptide
  Seed: EWLKTRPILSPLTKG
EFLKMRRILVPLTKG

SEQ ID NO: 208721 - protein, 15 aa, Artificial Sequence
  Description of Artificial Sequence: Synthetic peptide
  Seed: EWLKTRPILSPLTKG
EFLKMRSILAPLTKG

SEQ ID NO: 208722 - protein, 15 aa, Artificial Sequence
  Description of Artificial Sequence: Synthetic peptide
  Seed: EWLKTRPILSPLTKG
EFLKMRSILCPLTKG

SEQ ID NO: 208723 - protein, 15 aa, Artificial Sequence
  Description of Artificial Sequence: Synthetic peptide
  Seed: EWLKTRPILSPLTKG
EFLKMRSILDPLTKG

SEQ ID NO: 208724 - protein, 15 aa, Artificial Sequence
  Description of Artificial Sequence: Synthetic peptide
  Seed: EWLKTRPILSPLTKG
EFLKMRSILEPLTKG

SEQ ID NO: 208725 - protein, 15 aa, Artificial Sequence
  Description of Artificial Sequence: Synthetic peptide
  Seed: EWLKTRPILSPLTKG
EFLKMRSILFPLTKG

SEQ ID NO: 208726 - protein, 15 aa, Artificial Sequence
  Description of Artificial Sequence: Synthetic peptide
  Seed: EWLKTRPILSPLTKG
EFLKMRSILGPLTKG

SEQ ID NO: 208727 - protein, 15 aa, Artificial Sequence
  Description of Artificial Sequence: Synthetic peptide
  Seed: EWLKTRPILSPLTKG
EFLKMRSILHPLTKG

SEQ ID NO: 208728 - protein, 15 aa, Artificial Sequence
  Description of Artificial Sequence: Synthetic peptide
  Seed: EWLKTRPILSPLTKG
EFLKMRSILIPLTKG

SEQ ID NO: 208729 - protein, 15 aa, Artificial Sequence
  Description of Artificial Sequence: Synthetic peptide
  Seed: EWLKTRPILSPLTKG
EFLKMRSILKPLTKG

SEQ ID NO: 208730 - protein, 15 aa, Artificial Sequence
  Description of Artificial Sequence: Synthetic peptide
  Seed: EWLKTRPILSPLTKG
EFLKMRSILLPLTKG

SEQ ID NO: 208731 - protein, 15 aa, Artificial Sequence
  Description of Artificial Sequence: Synthetic peptide
  Seed: EWLKTRPILSPLTKG
EFLKMRSILMPLTKG

SEQ ID NO: 208732 - protein, 15 aa, Artificial Sequence
  Description of Artificial Sequence: Synthetic peptide
  Seed: EWLKTRPILSPLTKG
EFLKMRSILNPLTKG

SEQ ID NO: 208733 - protein, 15 aa, Artificial Sequence
  Description of Artificial Sequence: Synthetic peptide
  Seed: EWLKTRPILSPLTKG
EFLKMRSILQPLTKG

SEQ ID NO: 208734 - protein, 15 aa, Artificial Sequence
  Description of Artificial Sequence: Synthetic peptide
  Seed: EWLKTRPILSPLTKG
EFLKMRSILRPLTKG

SEQ ID NO: 208735 - protein, 15 aa, Artificial Sequence
  Description of Artificial Sequence: Synthetic peptide
  Seed: EWLKTRPILSPLTKG
EFLKMRSILSPLTKG

SEQ ID NO: 208736 - protein, 15 aa, Artificial Sequence
  Description of Artificial Sequence: Synthetic peptide
  Seed: EWLKTRPILSPLTKG
EFLKMRSILTPLTKG

SEQ ID NO: 208737 - protein, 15 aa, Artificial Sequence
  Description of Artificial Sequence: Synthetic peptide
  Seed: EWLKTRPILSPLTKG
EFLKMRSILWPLTKG

SEQ ID NO: 208738 - protein, 15 aa, Artificial Sequence
  Description of Artificial Sequence: Synthetic peptide
  Seed: EWLKTRPILSPLTKG
EFLKMRSILYPLTKG

SEQ ID NO: 208739 - protein, 15 aa, Artificial Sequence
  Description of Artificial Sequence: Synthetic peptide
  Seed: EWLKTRPILSPLTKG
EFLKMRTILAPLTKG

SEQ ID NO: 208740 - protein, 15 aa, Artificial Sequence
  Description of Artificial Sequence: Synthetic peptide
  Seed: EWLKTRPILSPLTKG
EFLKMRTILCPLTKG

SEQ ID NO: 208741 - protein, 15 aa, Artificial Sequence
  Description of Artificial Sequence: Synthetic peptide
  Seed: EWLKTRPILSPLTKG
EFLKMRTILDPLTKG

SEQ ID NO: 208742 - protein, 15 aa, Artificial Sequence
  Description of Artificial Sequence: Synthetic peptide
  Seed: EWLKTRPILSPLTKG
EFLKMRTILEPLTKG

SEQ ID NO: 208743 - protein, 15 aa, Artificial Sequence
  Description of Artificial Sequence: Synthetic peptide
  Seed: EWLKTRPILSPLTKG
EFLKMRTILFPLTKG

SEQ ID NO: 208744 - protein, 15 aa, Artificial Sequence
  Description of Artificial Sequence: Synthetic peptide
  Seed: EWLKTRPILSPLTKG
EFLKMRTILHPLTKG

SEQ ID NO: 208745 - protein, 15 aa, Artificial Sequence
  Description of Artificial Sequence: Synthetic peptide
  Seed: EWLKTRPILSPLTKG
EFLKMRTILIPLTKG

SEQ ID NO: 208746 - protein, 15 aa, Artificial Sequence
  Description of Artificial Sequence: Synthetic peptide
  Seed: EWLKTRPILSPLTKG
EFLKMRTILKPLTKG

SEQ ID NO: 208747 - protein, 15 aa, Artificial Sequence
  Description of Artificial Sequence: Synthetic peptide
  Seed: EWLKTRPILSPLTKG
EFLKMRTILLPLTKG

SEQ ID NO: 208748 - protein, 15 aa, Artificial Sequence
  Description of Artificial Sequence: Synthetic peptide
  Seed: EWLKTRPILSPLTKG
EFLKMRTILMPLTKG

SEQ ID NO: 208749 - protein, 15 aa, Artificial Sequence
  Description of Artificial Sequence: Synthetic peptide
  Seed: EWLKTRPILSPLTKG
EFLKMRTILNPLTKG

SEQ ID NO: 208750 - protein, 15 aa, Artificial Sequence
  Description of Artificial Sequence: Synthetic peptide
  Seed: EWLKTRPILSPLTKG
EFLKMRTILRPLTKG

SEQ ID NO: 208751 - protein, 15 aa, Artificial Sequence
  Description of Artificial Sequence: Synthetic peptide
  Seed: EWLKTRPILSPLTKG
EFLKMRTILSPLTKG

SEQ ID NO: 208752 - protein, 15 aa, Artificial Sequence
  Description of Artificial Sequence: Synthetic peptide
  Seed: EWLKTRPILSPLTKG
EFLKMRTILTPLTKG

SEQ ID NO: 208753 - protein, 15 aa, Artificial Sequence
  Description of Artificial Sequence: Synthetic peptide
  Seed: EWLKTRPILSPLTKG
EFLKMRTILYPLTKG

SEQ ID NO: 208754 - protein, 15 aa, Artificial Sequence
  Description of Artificial Sequence: Synthetic peptide
  Seed: EWLKTRPILSPLTKG
EFLKMRVILDPLTKG

SEQ ID NO: 208755 - protein, 15 aa, Artificial Sequence
  Description of Artificial Sequence: Synthetic peptide
  Seed: EWLKTRPILSPLTKG
EFLKMRVILHPLTKG

SEQ ID NO: 208756 - protein, 15 aa, Artificial Sequence
  Description of Artificial Sequence: Synthetic peptide
  Seed: EWLKTRPILSPLTKG
EFLKMRVILIPLTKG

SEQ ID NO: 208757 - protein, 15 aa, Artificial Sequence
  Description of Artificial Sequence: Synthetic peptide
  Seed: EWLKTRPILSPLTKG
EFLKMRVILLPLTKG

SEQ ID NO: 208758 - protein, 15 aa, Artificial Sequence
  Description of Artificial Sequence: Synthetic peptide
  Seed: EWLKTRPILSPLTKG
EFLKMRVILMPLTKG

SEQ ID NO: 208759 - protein, 15 aa, Artificial Sequence
  Description of Artificial Sequence: Synthetic peptide
  Seed: EWLKTRPILSPLTKG
EFLKMRVILNPLTKG

SEQ ID NO: 208760 - protein, 15 aa, Artificial Sequence
  Description of Artificial Sequence: Synthetic peptide
  Seed: EWLKTRPILSPLTKG
EFLKMRVILQPLTKG

SEQ ID NO: 208761 - protein, 15 aa, Artificial Sequence
  Description of Artificial Sequence: Synthetic peptide
  Seed: EWLKTRPILSPLTKG
EFLKMRVILVPLTKG

SEQ ID NO: 208762 - protein, 15 aa, Artificial Sequence
  Description of Artificial Sequence: Synthetic peptide
  Seed: EWLKTRPILSPLTKG
EFLKNRAILAPLTKG

SEQ ID NO: 208763 - protein, 15 aa, Artificial Sequence
  Description of Artificial Sequence: Synthetic peptide
  Seed: EWLKTRPILSPLTKG
EFLKNRAILCPLTKG

SEQ ID NO: 208764 - protein, 15 aa, Artificial Sequence
  Description of Artificial Sequence: Synthetic peptide
  Seed: EWLKTRPILSPLTKG
EFLKNRAILFPLTKG

SEQ ID NO: 208765 - protein, 15 aa, Artificial Sequence
  Description of Artificial Sequence: Synthetic peptide
  Seed: EWLKTRPILSPLTKG
EFLKNRAILGPLTKG

SEQ ID NO: 208766 - protein, 15 aa, Artificial Sequence
  Description of Artificial Sequence: Synthetic peptide
  Seed: EWLKTRPILSPLTKG
EFLKNRAILIPLTKG

SEQ ID NO: 208767 - protein, 15 aa, Artificial Sequence
  Description of Artificial Sequence: Synthetic peptide
  Seed: EWLKTRPILSPLTKG
EFLKNRAILLPLTKG

SEQ ID NO: 208768 - protein, 15 aa, Artificial Sequence
  Description of Artificial Sequence: Synthetic peptide
  Seed: EWLKTRPILSPLTKG
EFLKNRAILMPLTKG

SEQ ID NO: 208769 - protein, 15 aa, Artificial Sequence
  Description of Artificial Sequence: Synthetic peptide
  Seed: EWLKTRPILSPLTKG
EFLKNRAILNPLTKG

SEQ ID NO: 208770 - protein, 15 aa, Artificial Sequence
  Description of Artificial Sequence: Synthetic peptide
  Seed: EWLKTRPILSPLTKG
EFLKNRAILSPLTKG

SEQ ID NO: 208771 - protein, 15 aa, Artificial Sequence
  Description of Artificial Sequence: Synthetic peptide
  Seed: EWLKTRPILSPLTKG
EFLKNRAILTPLTKG

SEQ ID NO: 208772 - protein, 15 aa, Artificial Sequence
  Description of Artificial Sequence: Synthetic peptide
  Seed: EWLKTRPILSPLTKG
EFLKNRAILVPLTKG

SEQ ID NO: 208773 - protein, 15 aa, Artificial Sequence
  Description of Artificial Sequence: Synthetic peptide
  Seed: EWLKTRPILSPLTKG
EFLKNRGILAPLTKG

SEQ ID NO: 208774 - protein, 15 aa, Artificial Sequence
  Description of Artificial Sequence: Synthetic peptide
  Seed: EWLKTRPILSPLTKG
EFLKNRGILIPLTKG

SEQ ID NO: 208775 - protein, 15 aa, Artificial Sequence
  Description of Artificial Sequence: Synthetic peptide
  Seed: EWLKTRPILSPLTKG
EFLKNRGILLPLTKG

SEQ ID NO: 208776 - protein, 15 aa, Artificial Sequence
  Description of Artificial Sequence: Synthetic peptide
  Seed: EWLKTRPILSPLTKG
EFLKNRGILMPLTKG

SEQ ID NO: 208777 - protein, 15 aa, Artificial Sequence
  Description of Artificial Sequence: Synthetic peptide
  Seed: EWLKTRPILSPLTKG
EFLKNRGILSPLTKG

SEQ ID NO: 208778 - protein, 15 aa, Artificial Sequence
  Description of Artificial Sequence: Synthetic peptide
  Seed: EWLKTRPILSPLTKG
EFLKNRGILTPLTKG

SEQ ID NO: 208779 - protein, 15 aa, Artificial Sequence
  Description of Artificial Sequence: Synthetic peptide
  Seed: EWLKTRPILSPLTKG
EFLKNRGILVPLTKG

SEQ ID NO: 208780 - protein, 15 aa, Artificial Sequence
  Description of Artificial Sequence: Synthetic peptide
  Seed: EWLKTRPILSPLTKG
EFLKNRPILAPLTKG

SEQ ID NO: 208781 - protein, 15 aa, Artificial Sequence
  Description of Artificial Sequence: Synthetic peptide
  Seed: EWLKTRPILSPLTKG
EFLKNRPILIPLTKG

SEQ ID NO: 208782 - protein, 15 aa, Artificial Sequence
  Description of Artificial Sequence: Synthetic peptide
  Seed: EWLKTRPILSPLTKG
EFLKNRPILLPLTKG

SEQ ID NO: 208783 - protein, 15 aa, Artificial Sequence
  Description of Artificial Sequence: Synthetic peptide
  Seed: EWLKTRPILSPLTKG
EFLKNRPILMPLTKG

SEQ ID NO: 208784 - protein, 15 aa, Artificial Sequence
  Description of Artificial Sequence: Synthetic peptide
  Seed: EWLKTRPILSPLTKG
EFLKNRPILSPLTKG

SEQ ID NO: 208785 - protein, 15 aa, Artificial Sequence
  Description of Artificial Sequence: Synthetic peptide
  Seed: EWLKTRPILSPLTKG
EFLKNRPILVPLTKG

SEQ ID NO: 208786 - protein, 15 aa, Artificial Sequence
  Description of Artificial Sequence: Synthetic peptide
  Seed: EWLKTRPILSPLTKG
EFLKNRSILAPLTKG

SEQ ID NO: 208787 - protein, 15 aa, Artificial Sequence
  Description of Artificial Sequence: Synthetic peptide
  Seed: EWLKTRPILSPLTKG
EFLKNRSILGPLTKG

SEQ ID NO: 208788 - protein, 15 aa, Artificial Sequence
  Description of Artificial Sequence: Synthetic peptide
  Seed: EWLKTRPILSPLTKG
EFLKNRSILIPLTKG

SEQ ID NO: 208789 - protein, 15 aa, Artificial Sequence
  Description of Artificial Sequence: Synthetic peptide
  Seed: EWLKTRPILSPLTKG
EFLKNRSILLPLTKG

SEQ ID NO: 208790 - protein, 15 aa, Artificial Sequence
  Description of Artificial Sequence: Synthetic peptide
  Seed: EWLKTRPILSPLTKG
EFLKNRSILMPLTKG

SEQ ID NO: 208791 - protein, 15 aa, Artificial Sequence
  Description of Artificial Sequence: Synthetic peptide
  Seed: EWLKTRPILSPLTKG
EFLKNRSILSPLTKG

SEQ ID NO: 208792 - protein, 15 aa, Artificial Sequence
  Description of Artificial Sequence: Synthetic peptide
  Seed: EWLKTRPILSPLTKG
EFLKNRSILTPLTKG

SEQ ID NO: 208793 - protein, 15 aa, Artificial Sequence
  Description of Artificial Sequence: Synthetic peptide
  Seed: EWLKTRPILSPLTKG
EFLKNRSILVPLTKG

SEQ ID NO: 208794 - protein, 15 aa, Artificial Sequence
  Description of Artificial Sequence: Synthetic peptide
  Seed: EWLKTRPILSPLTKG
EFLKNRTILAPLTKG

SEQ ID NO: 208795 - protein, 15 aa, Artificial Sequence
  Description of Artificial Sequence: Synthetic peptide
  Seed: EWLKTRPILSPLTKG
EFLKNRTILLPLTKG

SEQ ID NO: 208796 - protein, 15 aa, Artificial Sequence
  Description of Artificial Sequence: Synthetic peptide
  Seed: EWLKTRPILSPLTKG
EFLKNRTILVPLTKG

SEQ ID NO: 208797 - protein, 15 aa, Artificial Sequence
  Description of Artificial Sequence: Synthetic peptide
  Seed: EWLKTRPILSPLTKG
EFLKNRVILAPLTKG

SEQ ID NO: 208798 - protein, 15 aa, Artificial Sequence
  Description of Artificial Sequence: Synthetic peptide
  Seed: EWLKTRPILSPLTKG
EFLKPRAILIPLTKG

SEQ ID NO: 208799 - protein, 15 aa, Artificial Sequence
  Description of Artificial Sequence: Synthetic peptide
  Seed: EWLKTRPILSPLTKG
EFLKPRAILLPLTKG

SEQ ID NO: 208800 - protein, 15 aa, Artificial Sequence
  Description of Artificial Sequence: Synthetic peptide
  Seed: EWLKTRPILSPLTKG
EFLKPRAILVPLTKG

SEQ ID NO: 208801 - protein, 15 aa, Artificial Sequence
  Description of Artificial Sequence: Synthetic peptide
  Seed: EWLKTRPILSPLTKG
EFLKPRSILVPLTKG

SEQ ID NO: 208802 - protein, 15 aa, Artificial Sequence
  Description of Artificial Sequence: Synthetic peptide
  Seed: EWLKTRPILSPLTKG
EFLKQRAILAPLTKG

SEQ ID NO: 208803 - protein, 15 aa, Artificial Sequence
  Description of Artificial Sequence: Synthetic peptide
  Seed: EWLKTRPILSPLTKG
EFLKQRAILCPLTKG

SEQ ID NO: 208804 - protein, 15 aa, Artificial Sequence
  Description of Artificial Sequence: Synthetic peptide
  Seed: EWLKTRPILSPLTKG
EFLKQRAILFPLTKG

SEQ ID NO: 208805 - protein, 15 aa, Artificial Sequence
  Description of Artificial Sequence: Synthetic peptide
  Seed: EWLKTRPILSPLTKG
EFLKQRAILGPLTKG

SEQ ID NO: 208806 - protein, 15 aa, Artificial Sequence
  Description of Artificial Sequence: Synthetic peptide
  Seed: EWLKTRPILSPLTKG
EFLKQRAILHPLTKG

SEQ ID NO: 208807 - protein, 15 aa, Artificial Sequence
  Description of Artificial Sequence: Synthetic peptide
  Seed: EWLKTRPILSPLTKG
EFLKQRAILIPLTKG

SEQ ID NO: 208808 - protein, 15 aa, Artificial Sequence
  Description of Artificial Sequence: Synthetic peptide
  Seed: EWLKTRPILSPLTKG
EFLKQRAILLPLTKG

SEQ ID NO: 208809 - protein, 15 aa, Artificial Sequence
  Description of Artificial Sequence: Synthetic peptide
  Seed: EWLKTRPILSPLTKG
EFLKQRAILMPLTKG

SEQ ID NO: 208810 - protein, 15 aa, Artificial Sequence
  Description of Artificial Sequence: Synthetic peptide
  Seed: EWLKTRPILSPLTKG
EFLKQRAILNPLTKG

SEQ ID NO: 208811 - protein, 15 aa, Artificial Sequence
  Description of Artificial Sequence: Synthetic peptide
  Seed: EWLKTRPILSPLTKG
EFLKQRAILPPLTKG

SEQ ID NO: 208812 - protein, 15 aa, Artificial Sequence
  Description of Artificial Sequence: Synthetic peptide
  Seed: EWLKTRPILSPLTKG
EFLKQRAILSPLTKG

SEQ ID NO: 208813 - protein, 15 aa, Artificial Sequence
  Description of Artificial Sequence: Synthetic peptide
  Seed: EWLKTRPILSPLTKG
EFLKQRAILTPLTKG

SEQ ID NO: 208814 - protein, 15 aa, Artificial Sequence
  Description of Artificial Sequence: Synthetic peptide
  Seed: EWLKTRPILSPLTKG
EFLKQRAILVPLTKG

SEQ ID NO: 208815 - protein, 15 aa, Artificial Sequence
  Description of Artificial Sequence: Synthetic peptide
  Seed: EWLKTRPILSPLTKG
EFLKQRGILAPLTKG

SEQ ID NO: 208816 - protein, 15 aa, Artificial Sequence
  Description of Artificial Sequence: Synthetic peptide
  Seed: EWLKTRPILSPLTKG
EFLKQRGILCPLTKG

SEQ ID NO: 208817 - protein, 15 aa, Artificial Sequence
  Description of Artificial Sequence: Synthetic peptide
  Seed: EWLKTRPILSPLTKG
EFLKQRGILGPLTKG

SEQ ID NO: 208818 - protein, 15 aa, Artificial Sequence
  Description of Artificial Sequence: Synthetic peptide
  Seed: EWLKTRPILSPLTKG
EFLKQRGILIPLTKG

SEQ ID NO: 208819 - protein, 15 aa, Artificial Sequence
  Description of Artificial Sequence: Synthetic peptide
  Seed: EWLKTRPILSPLTKG
EFLKQRGILLPLTKG

SEQ ID NO: 208820 - protein, 15 aa, Artificial Sequence
  Description of Artificial Sequence: Synthetic peptide
  Seed: EWLKTRPILSPLTKG
EFLKQRGILMPLTKG

SEQ ID NO: 208821 - protein, 15 aa, Artificial Sequence
  Description of Artificial Sequence: Synthetic peptide
  Seed: EWLKTRPILSPLTKG
EFLKQRGILNPLTKG

SEQ ID NO: 208822 - protein, 15 aa, Artificial Sequence
  Description of Artificial Sequence: Synthetic peptide
  Seed: EWLKTRPILSPLTKG
EFLKQRGILSPLTKG

SEQ ID NO: 208823 - protein, 15 aa, Artificial Sequence
  Description of Artificial Sequence: Synthetic peptide
  Seed: EWLKTRPILSPLTKG
EFLKQRGILTPLTKG

SEQ ID NO: 208824 - protein, 15 aa, Artificial Sequence
  Description of Artificial Sequence: Synthetic peptide
  Seed: EWLKTRPILSPLTKG
EFLKQRGILVPLTKG

SEQ ID NO: 208825 - protein, 15 aa, Artificial Sequence
  Description of Artificial Sequence: Synthetic peptide
  Seed: EWLKTRPILSPLTKG
EFLKQRIILSPLTKG

SEQ ID NO: 208826 - protein, 15 aa, Artificial Sequence
  Description of Artificial Sequence: Synthetic peptide
  Seed: EWLKTRPILSPLTKG
EFLKQRNILAPLTKG

SEQ ID NO: 208827 - protein, 15 aa, Artificial Sequence
  Description of Artificial Sequence: Synthetic peptide
  Seed: EWLKTRPILSPLTKG
EFLKQRNILIPLTKG

SEQ ID NO: 208828 - protein, 15 aa, Artificial Sequence
  Description of Artificial Sequence: Synthetic peptide
  Seed: EWLKTRPILSPLTKG
EFLKQRNILLPLTKG

SEQ ID NO: 208829 - protein, 15 aa, Artificial Sequence
  Description of Artificial Sequence: Synthetic peptide
  Seed: EWLKTRPILSPLTKG
EFLKQRNILSPLTKG

SEQ ID NO: 208830 - protein, 15 aa, Artificial Sequence
  Description of Artificial Sequence: Synthetic peptide
  Seed: EWLKTRPILSPLTKG
EFLKQRNILTPLTKG

SEQ ID NO: 208831 - protein, 15 aa, Artificial Sequence
  Description of Artificial Sequence: Synthetic peptide
  Seed: EWLKTRPILSPLTKG
EFLKQRNILVPLTKG

SEQ ID NO: 208832 - protein, 15 aa, Artificial Sequence
  Description of Artificial Sequence: Synthetic peptide
  Seed: EWLKTRPILSPLTKG
EFLKQRPILAPLTKG

SEQ ID NO: 208833 - protein, 15 aa, Artificial Sequence
  Description of Artificial Sequence: Synthetic peptide
  Seed: EWLKTRPILSPLTKG
EFLKQRPILGPLTKG

SEQ ID NO: 208834 - protein, 15 aa, Artificial Sequence
  Description of Artificial Sequence: Synthetic peptide
  Seed: EWLKTRPILSPLTKG
EFLKQRPILIPLTKG

SEQ ID NO: 208835 - protein, 15 aa, Artificial Sequence
  Description of Artificial Sequence: Synthetic peptide
  Seed: EWLKTRPILSPLTKG
EFLKQRPILLPLTKG

SEQ ID NO: 208836 - protein, 15 aa, Artificial Sequence
  Description of Artificial Sequence: Synthetic peptide
  Seed: EWLKTRPILSPLTKG
EFLKQRPILMPLTKG

SEQ ID NO: 208837 - protein, 15 aa, Artificial Sequence
  Description of Artificial Sequence: Synthetic peptide
  Seed: EWLKTRPILSPLTKG
EFLKQRPILNPLTKG

SEQ ID NO: 208838 - protein, 15 aa, Artificial Sequence
  Description of Artificial Sequence: Synthetic peptide
  Seed: EWLKTRPILSPLTKG
EFLKQRPILSPLTKG

SEQ ID NO: 208839 - protein, 15 aa, Artificial Sequence
  Description of Artificial Sequence: Synthetic peptide
  Seed: EWLKTRPILSPLTKG
EFLKQRPILTPLTKG

SEQ ID NO: 208840 - protein, 15 aa, Artificial Sequence
  Description of Artificial Sequence: Synthetic peptide
  Seed: EWLKTRPILSPLTKG
EFLKQRPILVPLTKG

SEQ ID NO: 208841 - protein, 15 aa, Artificial Sequence
  Description of Artificial Sequence: Synthetic peptide
  Seed: EWLKTRPILSPLTKG
EFLKQRSILAPLTKG

SEQ ID NO: 208842 - protein, 15 aa, Artificial Sequence
  Description of Artificial Sequence: Synthetic peptide
  Seed: EWLKTRPILSPLTKG
EFLKQRSILCPLTKG

SEQ ID NO: 208843 - protein, 15 aa, Artificial Sequence
  Description of Artificial Sequence: Synthetic peptide
  Seed: EWLKTRPILSPLTKG
EFLKQRSILGPLTKG

SEQ ID NO: 208844 - protein, 15 aa, Artificial Sequence
  Description of Artificial Sequence: Synthetic peptide
  Seed: EWLKTRPILSPLTKG
EFLKQRSILIPLTKG

SEQ ID NO: 208845 - protein, 15 aa, Artificial Sequence
  Description of Artificial Sequence: Synthetic peptide
  Seed: EWLKTRPILSPLTKG
EFLKQRSILLPLTKG

SEQ ID NO: 208846 - protein, 15 aa, Artificial Sequence
  Description of Artificial Sequence: Synthetic peptide
  Seed: EWLKTRPILSPLTKG
EFLKQRSILMPLTKG

SEQ ID NO: 208847 - protein, 15 aa, Artificial Sequence
  Description of Artificial Sequence: Synthetic peptide
  Seed: EWLKTRPILSPLTKG
EFLKQRSILNPLTKG

SEQ ID NO: 208848 - protein, 15 aa, Artificial Sequence
  Description of Artificial Sequence: Synthetic peptide
  Seed: EWLKTRPILSPLTKG
EFLKQRSILSPLTKG

SEQ ID NO: 208849 - protein, 15 aa, Artificial Sequence
  Description of Artificial Sequence: Synthetic peptide
  Seed: EWLKTRPILSPLTKG
EFLKQRSILTPLTKG

SEQ ID NO: 208850 - protein, 15 aa, Artificial Sequence
  Description of Artificial Sequence: Synthetic peptide
  Seed: EWLKTRPILSPLTKG
EFLKQRSILVPLTKG

SEQ ID NO: 208851 - protein, 15 aa, Artificial Sequence
  Description of Artificial Sequence: Synthetic peptide
  Seed: EWLKTRPILSPLTKG
EFLKQRTILAPLTKG

SEQ ID NO: 208852 - protein, 15 aa, Artificial Sequence
  Description of Artificial Sequence: Synthetic peptide
  Seed: EWLKTRPILSPLTKG
EFLKQRTILGPLTKG

SEQ ID NO: 208853 - protein, 15 aa, Artificial Sequence
  Description of Artificial Sequence: Synthetic peptide
  Seed: EWLKTRPILSPLTKG
EFLKQRTILIPLTKG

SEQ ID NO: 208854 - protein, 15 aa, Artificial Sequence
  Description of Artificial Sequence: Synthetic peptide
  Seed: EWLKTRPILSPLTKG
EFLKQRTILLPLTKG

SEQ ID NO: 208855 - protein, 15 aa, Artificial Sequence
  Description of Artificial Sequence: Synthetic peptide
  Seed: EWLKTRPILSPLTKG
EFLKQRTILMPLTKG

SEQ ID NO: 208856 - protein, 15 aa, Artificial Sequence
  Description of Artificial Sequence: Synthetic peptide
  Seed: EWLKTRPILSPLTKG
EFLKQRTILNPLTKG

SEQ ID NO: 208857 - protein, 15 aa, Artificial Sequence
  Description of Artificial Sequence: Synthetic peptide
  Seed: EWLKTRPILSPLTKG
EFLKQRTILSPLTKG

SEQ ID NO: 208858 - protein, 15 aa, Artificial Sequence
  Description of Artificial Sequence: Synthetic peptide
  Seed: EWLKTRPILSPLTKG
EFLKQRTILTPLTKG

SEQ ID NO: 208859 - protein, 15 aa, Artificial Sequence
  Description of Artificial Sequence: Synthetic peptide
  Seed: EWLKTRPILSPLTKG
EFLKQRTILVPLTKG

SEQ ID NO: 208860 - protein, 15 aa, Artificial Sequence
  Description of Artificial Sequence: Synthetic peptide
  Seed: EWLKTRPILSPLTKG
EFLKQRVILAPLTKG

SEQ ID NO: 208861 - protein, 15 aa, Artificial Sequence
  Description of Artificial Sequence: Synthetic peptide
  Seed: EWLKTRPILSPLTKG
EFLKQRVILIPLTKG

SEQ ID NO: 208862 - protein, 15 aa, Artificial Sequence
  Description of Artificial Sequence: Synthetic peptide
  Seed: EWLKTRPILSPLTKG
EFLKQRVILLPLTKG

SEQ ID NO: 208863 - protein, 15 aa, Artificial Sequence
  Description of Artificial Sequence: Synthetic peptide
  Seed: EWLKTRPILSPLTKG
EFLKQRVILNPLTKG

SEQ ID NO: 208864 - protein, 15 aa, Artificial Sequence
  Description of Artificial Sequence: Synthetic peptide
  Seed: EWLKTRPILSPLTKG
EFLKQRVILSPLTKG

SEQ ID NO: 208865 - protein, 15 aa, Artificial Sequence
  Description of Artificial Sequence: Synthetic peptide
  Seed: EWLKTRPILSPLTKG
EFLKQRVILTPLTKG

SEQ ID NO: 208866 - protein, 15 aa, Artificial Sequence
  Description of Artificial Sequence: Synthetic peptide
  Seed: EWLKTRPILSPLTKG
EFLKQRVILVPLTKG

SEQ ID NO: 208867 - protein, 15 aa, Artificial Sequence
  Description of Artificial Sequence: Synthetic peptide
  Seed: EWLKTRPILSPLTKG
EFLKRRAILAPLTKG

SEQ ID NO: 208868 - protein, 15 aa, Artificial Sequence
  Description of Artificial Sequence: Synthetic peptide
  Seed: EWLKTRPILSPLTKG
EFLKRRAILLPLTKG

SEQ ID NO: 208869 - protein, 15 aa, Artificial Sequence
  Description of Artificial Sequence: Synthetic peptide
  Seed: EWLKTRPILSPLTKG
EFLKRRAILVPLTKG

SEQ ID NO: 208870 - protein, 15 aa, Artificial Sequence
  Description of Artificial Sequence: Synthetic peptide
  Seed: EWLKTRPILSPLTKG
EFLKSRAILAPLTKG

SEQ ID NO: 208871 - protein, 15 aa, Artificial Sequence
  Description of Artificial Sequence: Synthetic peptide
  Seed: EWLKTRPILSPLTKG
EFLKSRAILCPLTKG

SEQ ID NO: 208872 - protein, 15 aa, Artificial Sequence
  Description of Artificial Sequence: Synthetic peptide
  Seed: EWLKTRPILSPLTKG
EFLKSRAILFPLTKG

SEQ ID NO: 208873 - protein, 15 aa, Artificial Sequence
  Description of Artificial Sequence: Synthetic peptide
  Seed: EWLKTRPILSPLTKG
EFLKSRAILGPLTKG

SEQ ID NO: 208874 - protein, 15 aa, Artificial Sequence
  Description of Artificial Sequence: Synthetic peptide
  Seed: EWLKTRPILSPLTKG
EFLKSRAILIPLTKG

SEQ ID NO: 208875 - protein, 15 aa, Artificial Sequence
  Description of Artificial Sequence: Synthetic peptide
  Seed: EWLKTRPILSPLTKG
EFLKSRAILLPLTKG

SEQ ID NO: 208876 - protein, 15 aa, Artificial Sequence
  Description of Artificial Sequence: Synthetic peptide
  Seed: EWLKTRPILSPLTKG
EFLKSRAILMPLTKG

SEQ ID NO: 208877 - protein, 15 aa, Artificial Sequence
  Description of Artificial Sequence: Synthetic peptide
  Seed: EWLKTRPILSPLTKG
EFLKSRAILNPLTKG

SEQ ID NO: 208878 - protein, 15 aa, Artificial Sequence
  Description of Artificial Sequence: Synthetic peptide
  Seed: EWLKTRPILSPLTKG
EFLKSRAILPPLTKG

SEQ ID NO: 208879 - protein, 15 aa, Artificial Sequence
  Description of Artificial Sequence: Synthetic peptide
  Seed: EWLKTRPILSPLTKG
EFLKSRAILSPLTKG

SEQ ID NO: 208880 - protein, 15 aa, Artificial Sequence
  Description of Artificial Sequence: Synthetic peptide
  Seed: EWLKTRPILSPLTKG
EFLKSRAILTPLTKG

SEQ ID NO: 208881 - protein, 15 aa, Artificial Sequence
  Description of Artificial Sequence: Synthetic peptide
  Seed: EWLKTRPILSPLTKG
EFLKSRAILVPLTKG

SEQ ID NO: 208882 - protein, 15 aa, Artificial Sequence
  Description of Artificial Sequence: Synthetic peptide
  Seed: EWLKTRPILSPLTKG
EFLKSRAILYPLTKG

SEQ ID NO: 208883 - protein, 15 aa, Artificial Sequence
  Description of Artificial Sequence: Synthetic peptide
  Seed: EWLKTRPILSPLTKG
EFLKSRGILAPLTKG

SEQ ID NO: 208884 - protein, 15 aa, Artificial Sequence
  Description of Artificial Sequence: Synthetic peptide
  Seed: EWLKTRPILSPLTKG
EFLKSRGILCPLTKG

SEQ ID NO: 208885 - protein, 15 aa, Artificial Sequence
  Description of Artificial Sequence: Synthetic peptide
  Seed: EWLKTRPILSPLTKG
EFLKSRGILFPLTKG

SEQ ID NO: 208886 - protein, 15 aa, Artificial Sequence
  Description of Artificial Sequence: Synthetic peptide
  Seed: EWLKTRPILSPLTKG
EFLKSRGILGPLTKG

SEQ ID NO: 208887 - protein, 15 aa, Artificial Sequence
  Description of Artificial Sequence: Synthetic peptide
  Seed: EWLKTRPILSPLTKG
EFLKSRGILIPLTKG

SEQ ID NO: 208888 - protein, 15 aa, Artificial Sequence
  Description of Artificial Sequence: Synthetic peptide
  Seed: EWLKTRPILSPLTKG
EFLKSRGILLPLTKG

SEQ ID NO: 208889 - protein, 15 aa, Artificial Sequence
  Description of Artificial Sequence: Synthetic peptide
  Seed: EWLKTRPILSPLTKG
EFLKSRGILMPLTKG

SEQ ID NO: 208890 - protein, 15 aa, Artificial Sequence
  Description of Artificial Sequence: Synthetic peptide
  Seed: EWLKTRPILSPLTKG
EFLKSRGILNPLTKG

SEQ ID NO: 208891 - protein, 15 aa, Artificial Sequence
  Description of Artificial Sequence: Synthetic peptide
  Seed: EWLKTRPILSPLTKG
EFLKSRGILSPLTKG

SEQ ID NO: 208892 - protein, 15 aa, Artificial Sequence
  Description of Artificial Sequence: Synthetic peptide
  Seed: EWLKTRPILSPLTKG
EFLKSRGILTPLTKG

SEQ ID NO: 208893 - protein, 15 aa, Artificial Sequence
  Description of Artificial Sequence: Synthetic peptide
  Seed: EWLKTRPILSPLTKG
EFLKSRGILVPLTKG

SEQ ID NO: 208894 - protein, 15 aa, Artificial Sequence
  Description of Artificial Sequence: Synthetic peptide
  Seed: EWLKTRPILSPLTKG
EFLKSRKILAPLTKG

SEQ ID NO: 208895 - protein, 15 aa, Artificial Sequence
  Description of Artificial Sequence: Synthetic peptide
  Seed: EWLKTRPILSPLTKG
EFLKSRKILGPLTKG

SEQ ID NO: 208896 - protein, 15 aa, Artificial Sequence
  Description of Artificial Sequence: Synthetic peptide
  Seed: EWLKTRPILSPLTKG
EFLKSRKILSPLTKG

SEQ ID NO: 208897 - protein, 15 aa, Artificial Sequence
  Description of Artificial Sequence: Synthetic peptide
  Seed: EWLKTRPILSPLTKG
EFLKSRNILAPLTKG

SEQ ID NO: 208898 - protein, 15 aa, Artificial Sequence
  Description of Artificial Sequence: Synthetic peptide
  Seed: EWLKTRPILSPLTKG
EFLKSRNILIPLTKG

SEQ ID NO: 208899 - protein, 15 aa, Artificial Sequence
  Description of Artificial Sequence: Synthetic peptide
  Seed: EWLKTRPILSPLTKG
EFLKSRNILLPLTKG

SEQ ID NO: 208900 - protein, 15 aa, Artificial Sequence
  Description of Artificial Sequence: Synthetic peptide
  Seed: EWLKTRPILSPLTKG
EFLKSRNILVPLTKG

SEQ ID NO: 208901 - protein, 15 aa, Artificial Sequence
  Description of Artificial Sequence: Synthetic peptide
  Seed: EWLKTRPILSPLTKG
EFLKSRPILAPLTKG

SEQ ID NO: 208902 - protein, 15 aa, Artificial Sequence
  Description of Artificial Sequence: Synthetic peptide
  Seed: EWLKTRPILSPLTKG
EFLKSRPILFPLTKG

SEQ ID NO: 208903 - protein, 15 aa, Artificial Sequence
  Description of Artificial Sequence: Synthetic peptide
  Seed: EWLKTRPILSPLTKG
EFLKSRPILGPLTKG

SEQ ID NO: 208904 - protein, 15 aa, Artificial Sequence
  Description of Artificial Sequence: Synthetic peptide
  Seed: EWLKTRPILSPLTKG
EFLKSRPILIPLTKG

SEQ ID NO: 208905 - protein, 15 aa, Artificial Sequence
  Description of Artificial Sequence: Synthetic peptide
  Seed: EWLKTRPILSPLTKG
EFLKSRPILLPLTKG

SEQ ID NO: 208906 - protein, 15 aa, Artificial Sequence
  Description of Artificial Sequence: Synthetic peptide
  Seed: EWLKTRPILSPLTKG
EFLKSRPILMPLTKG

SEQ ID NO: 208907 - protein, 15 aa, Artificial Sequence
  Description of Artificial Sequence: Synthetic peptide
  Seed: EWLKTRPILSPLTKG
EFLKSRPILNPLTKG

SEQ ID NO: 208908 - protein, 15 aa, Artificial Sequence
  Description of Artificial Sequence: Synthetic peptide
  Seed: EWLKTRPILSPLTKG
EFLKSRPILSPLTKG

SEQ ID NO: 208909 - protein, 15 aa, Artificial Sequence
  Description of Artificial Sequence: Synthetic peptide
  Seed: EWLKTRPILSPLTKG
EFLKSRPILTPLTKG

SEQ ID NO: 208910 - protein, 15 aa, Artificial Sequence
  Description of Artificial Sequence: Synthetic peptide
  Seed: EWLKTRPILSPLTKG
EFLKSRPILVPLTKG

SEQ ID NO: 208911 - protein, 15 aa, Artificial Sequence
  Description of Artificial Sequence: Synthetic peptide
  Seed: EWLKTRPILSPLTKG
EFLKSRRILAPLTKG

SEQ ID NO: 208912 - protein, 15 aa, Artificial Sequence
  Description of Artificial Sequence: Synthetic peptide
  Seed: EWLKTRPILSPLTKG
EFLKSRRILGPLTKG

SEQ ID NO: 208913 - protein, 15 aa, Artificial Sequence
  Description of Artificial Sequence: Synthetic peptide
  Seed: EWLKTRPILSPLTKG
EFLKSRRILQPLTKG

SEQ ID NO: 208914 - protein, 15 aa, Artificial Sequence
  Description of Artificial Sequence: Synthetic peptide
  Seed: EWLKTRPILSPLTKG
EFLKSRRILSPLTKG

SEQ ID NO: 208915 - protein, 15 aa, Artificial Sequence
  Description of Artificial Sequence: Synthetic peptide
  Seed: EWLKTRPILSPLTKG
EFLKSRSILAPLTKG

SEQ ID NO: 208916 - protein, 15 aa, Artificial Sequence
  Description of Artificial Sequence: Synthetic peptide
  Seed: EWLKTRPILSPLTKG
EFLKSRSILFPLTKG

SEQ ID NO: 208917 - protein, 15 aa, Artificial Sequence
  Description of Artificial Sequence: Synthetic peptide
  Seed: EWLKTRPILSPLTKG
EFLKSRSILGPLTKG

SEQ ID NO: 208918 - protein, 15 aa, Artificial Sequence
  Description of Artificial Sequence: Synthetic peptide
  Seed: EWLKTRPILSPLTKG
EFLKSRSILIPLTKG

SEQ ID NO: 208919 - protein, 15 aa, Artificial Sequence
  Description of Artificial Sequence: Synthetic peptide
  Seed: EWLKTRPILSPLTKG
EFLKSRSILLPLTKG

SEQ ID NO: 208920 - protein, 15 aa, Artificial Sequence
  Description of Artificial Sequence: Synthetic peptide
  Seed: EWLKTRPILSPLTKG
EFLKSRSILMPLTKG

SEQ ID NO: 208921 - protein, 15 aa, Artificial Sequence
  Description of Artificial Sequence: Synthetic peptide
  Seed: EWLKTRPILSPLTKG
EFLKSRSILNPLTKG

SEQ ID NO: 208922 - protein, 15 aa, Artificial Sequence
  Description of Artificial Sequence: Synthetic peptide
  Seed: EWLKTRPILSPLTKG
EFLKSRSILSPLTKG

SEQ ID NO: 208923 - protein, 15 aa, Artificial Sequence
  Description of Artificial Sequence: Synthetic peptide
  Seed: EWLKTRPILSPLTKG
EFLKSRSILTPLTKG

SEQ ID NO: 208924 - protein, 15 aa, Artificial Sequence
  Description of Artificial Sequence: Synthetic peptide
  Seed: EWLKTRPILSPLTKG
EFLKSRSILVPLTKG

SEQ ID NO: 208925 - protein, 15 aa, Artificial Sequence
  Description of Artificial Sequence: Synthetic peptide
  Seed: EWLKTRPILSPLTKG
EFLKSRSILYPLTKG

SEQ ID NO: 208926 - protein, 15 aa, Artificial Sequence
  Description of Artificial Sequence: Synthetic peptide
  Seed: EWLKTRPILSPLTKG
EFLKSRTILAPLTKG

SEQ ID NO: 208927 - protein, 15 aa, Artificial Sequence
  Description of Artificial Sequence: Synthetic peptide
  Seed: EWLKTRPILSPLTKG
EFLKSRTILFPLTKG

SEQ ID NO: 208928 - protein, 15 aa, Artificial Sequence
  Description of Artificial Sequence: Synthetic peptide
  Seed: EWLKTRPILSPLTKG
EFLKSRTILIPLTKG

SEQ ID NO: 208929 - protein, 15 aa, Artificial Sequence
  Description of Artificial Sequence: Synthetic peptide
  Seed: EWLKTRPILSPLTKG
EFLKSRTILLPLTKG

SEQ ID NO: 208930 - protein, 15 aa, Artificial Sequence
  Description of Artificial Sequence: Synthetic peptide
  Seed: EWLKTRPILSPLTKG
EFLKSRTILMPLTKG

SEQ ID NO: 208931 - protein, 15 aa, Artificial Sequence
  Description of Artificial Sequence: Synthetic peptide
  Seed: EWLKTRPILSPLTKG
EFLKSRTILNPLTKG

SEQ ID NO: 208932 - protein, 15 aa, Artificial Sequence
  Description of Artificial Sequence: Synthetic peptide
  Seed: EWLKTRPILSPLTKG
EFLKSRTILSPLTKG

SEQ ID NO: 208933 - protein, 15 aa, Artificial Sequence
  Description of Artificial Sequence: Synthetic peptide
  Seed: EWLKTRPILSPLTKG
EFLKSRTILVPLTKG

SEQ ID NO: 208934 - protein, 15 aa, Artificial Sequence
  Description of Artificial Sequence: Synthetic peptide
  Seed: EWLKTRPILSPLTKG
EFLKSRVILAPLTKG

SEQ ID NO: 208935 - protein, 15 aa, Artificial Sequence
  Description of Artificial Sequence: Synthetic peptide
  Seed: EWLKTRPILSPLTKG
EFLKSRVILIPLTKG

SEQ ID NO: 208936 - protein, 15 aa, Artificial Sequence
  Description of Artificial Sequence: Synthetic peptide
  Seed: EWLKTRPILSPLTKG
EFLKSRVILLPLTKG

SEQ ID NO: 208937 - protein, 15 aa, Artificial Sequence
  Description of Artificial Sequence: Synthetic peptide
  Seed: EWLKTRPILSPLTKG
EFLKSRVILNPLTKG

SEQ ID NO: 208938 - protein, 15 aa, Artificial Sequence
  Description of Artificial Sequence: Synthetic peptide
  Seed: EWLKTRPILSPLTKG
EFLKSRVILVPLTKG

SEQ ID NO: 208939 - protein, 15 aa, Artificial Sequence
  Description of Artificial Sequence: Synthetic peptide
  Seed: EWLKTRPILSPLTKG
EFLKTRAILAPLTKG

SEQ ID NO: 208940 - protein, 15 aa, Artificial Sequence
  Description of Artificial Sequence: Synthetic peptide
  Seed: EWLKTRPILSPLTKG
EFLKTRAILCPLTKG

SEQ ID NO: 208941 - protein, 15 aa, Artificial Sequence
  Description of Artificial Sequence: Synthetic peptide
  Seed: EWLKTRPILSPLTKG
EFLKTRAILFPLTKG

SEQ ID NO: 208942 - protein, 15 aa, Artificial Sequence
  Description of Artificial Sequence: Synthetic peptide
  Seed: EWLKTRPILSPLTKG
EFLKTRAILGPLTKG

SEQ ID NO: 208943 - protein, 15 aa, Artificial Sequence
  Description of Artificial Sequence: Synthetic peptide
  Seed: EWLKTRPILSPLTKG
EFLKTRAILIPLTKG

SEQ ID NO: 208944 - protein, 15 aa, Artificial Sequence
  Description of Artificial Sequence: Synthetic peptide
  Seed: EWLKTRPILSPLTKG
EFLKTRAILLPLTKG

SEQ ID NO: 208945 - protein, 15 aa, Artificial Sequence
  Description of Artificial Sequence: Synthetic peptide
  Seed: EWLKTRPILSPLTKG
EFLKTRAILMPLTKG

SEQ ID NO: 208946 - protein, 15 aa, Artificial Sequence
  Description of Artificial Sequence: Synthetic peptide
  Seed: EWLKTRPILSPLTKG
EFLKTRAILNPLTKG

SEQ ID NO: 208947 - protein, 15 aa, Artificial Sequence
  Description of Artificial Sequence: Synthetic peptide
  Seed: EWLKTRPILSPLTKG
EFLKTRAILSPLTKG

SEQ ID NO: 208948 - protein, 15 aa, Artificial Sequence
  Description of Artificial Sequence: Synthetic peptide
  Seed: EWLKTRPILSPLTKG
EFLKTRAILTPLTKG

SEQ ID NO: 208949 - protein, 15 aa, Artificial Sequence
  Description of Artificial Sequence: Synthetic peptide
  Seed: EWLKTRPILSPLTKG
EFLKTRAILVPLTKG

SEQ ID NO: 208950 - protein, 15 aa, Artificial Sequence
  Description of Artificial Sequence: Synthetic peptide
  Seed: EWLKTRPILSPLTKG
EFLKTRAILYPLTKG

SEQ ID NO: 208951 - protein, 15 aa, Artificial Sequence
  Description of Artificial Sequence: Synthetic peptide
  Seed: EWLKTRPILSPLTKG
EFLKTRGILAPLTKG

SEQ ID NO: 208952 - protein, 15 aa, Artificial Sequence
  Description of Artificial Sequence: Synthetic peptide
  Seed: EWLKTRPILSPLTKG
EFLKTRGILFPLTKG

SEQ ID NO: 208953 - protein, 15 aa, Artificial Sequence
  Description of Artificial Sequence: Synthetic peptide
  Seed: EWLKTRPILSPLTKG
EFLKTRGILGPLTKG

SEQ ID NO: 208954 - protein, 15 aa, Artificial Sequence
  Description of Artificial Sequence: Synthetic peptide
  Seed: EWLKTRPILSPLTKG
EFLKTRGILIPLTKG

SEQ ID NO: 208955 - protein, 15 aa, Artificial Sequence
  Description of Artificial Sequence: Synthetic peptide
  Seed: EWLKTRPILSPLTKG
EFLKTRGILLPLTKG

SEQ ID NO: 208956 - protein, 15 aa, Artificial Sequence
  Description of Artificial Sequence: Synthetic peptide
  Seed: EWLKTRPILSPLTKG
EFLKTRGILMPLTKG

SEQ ID NO: 208957 - protein, 15 aa, Artificial Sequence
  Description of Artificial Sequence: Synthetic peptide
  Seed: EWLKTRPILSPLTKG
EFLKTRGILSPLTKG

SEQ ID NO: 208958 - protein, 15 aa, Artificial Sequence
  Description of Artificial Sequence: Synthetic peptide
  Seed: EWLKTRPILSPLTKG
EFLKTRGILTPLTKG

SEQ ID NO: 208959 - protein, 15 aa, Artificial Sequence
  Description of Artificial Sequence: Synthetic peptide
  Seed: EWLKTRPILSPLTKG
EFLKTRGILVPLTKG

SEQ ID NO: 208960 - protein, 15 aa, Artificial Sequence
  Description of Artificial Sequence: Synthetic peptide
  Seed: EWLKTRPILSPLTKG
EFLKTRIILIPLTKG

SEQ ID NO: 208961 - protein, 15 aa, Artificial Sequence
  Description of Artificial Sequence: Synthetic peptide
  Seed: EWLKTRPILSPLTKG
EFLKTRKILAPLTKG

SEQ ID NO: 208962 - protein, 15 aa, Artificial Sequence
  Description of Artificial Sequence: Synthetic peptide
  Seed: EWLKTRPILSPLTKG
EFLKTRKILGPLTKG

SEQ ID NO: 208963 - protein, 15 aa, Artificial Sequence
  Description of Artificial Sequence: Synthetic peptide
  Seed: EWLKTRPILSPLTKG
EFLKTRKILSPLTKG

SEQ ID NO: 208964 - protein, 15 aa, Artificial Sequence
  Description of Artificial Sequence: Synthetic peptide
  Seed: EWLKTRPILSPLTKG
EFLKTRNILAPLTKG

SEQ ID NO: 208965 - protein, 15 aa, Artificial Sequence
  Description of Artificial Sequence: Synthetic peptide
  Seed: EWLKTRPILSPLTKG
EFLKTRNILIPLTKG

SEQ ID NO: 208966 - protein, 15 aa, Artificial Sequence
  Description of Artificial Sequence: Synthetic peptide
  Seed: EWLKTRPILSPLTKG
EFLKTRNILLPLTKG

SEQ ID NO: 208967 - protein, 15 aa, Artificial Sequence
  Description of Artificial Sequence: Synthetic peptide
  Seed: EWLKTRPILSPLTKG
EFLKTRNILVPLTKG

SEQ ID NO: 208968 - protein, 15 aa, Artificial Sequence
  Description of Artificial Sequence: Synthetic peptide
  Seed: EWLKTRPILSPLTKG
EFLKTRPILAPLTKG

SEQ ID NO: 208969 - protein, 15 aa, Artificial Sequence
  Description of Artificial Sequence: Synthetic peptide
  Seed: EWLKTRPILSPLTKG
EFLKTRPILFPLTKG

SEQ ID NO: 208970 - protein, 15 aa, Artificial Sequence
  Description of Artificial Sequence: Synthetic peptide
  Seed: EWLKTRPILSPLTKG
EFLKTRPILGPLTKG

SEQ ID NO: 208971 - protein, 15 aa, Artificial Sequence
  Description of Artificial Sequence: Synthetic peptide
  Seed: EWLKTRPILSPLTKG
EFLKTRPILIPLTKG

SEQ ID NO: 208972 - protein, 15 aa, Artificial Sequence
  Description of Artificial Sequence: Synthetic peptide
  Seed: EWLKTRPILSPLTKG
EFLKTRPILLPLTKG

SEQ ID NO: 208973 - protein, 15 aa, Artificial Sequence
  Description of Artificial Sequence: Synthetic peptide
  Seed: EWLKTRPILSPLTKG
EFLKTRPILMPLTKG

SEQ ID NO: 208974 - protein, 15 aa, Artificial Sequence
  Description of Artificial Sequence: Synthetic peptide
  Seed: EWLKTRPILSPLTKG
EFLKTRPILNPLTKG

SEQ ID NO: 208975 - protein, 15 aa, Artificial Sequence
  Description of Artificial Sequence: Synthetic peptide
  Seed: EWLKTRPILSPLTKG
EFLKTRPILSPLTKG

SEQ ID NO: 208976 - protein, 15 aa, Artificial Sequence
  Description of Artificial Sequence: Synthetic peptide
  Seed: EWLKTRPILSPLTKG
EFLKTRPILTPLTKG

SEQ ID NO: 208977 - protein, 15 aa, Artificial Sequence
  Description of Artificial Sequence: Synthetic peptide
  Seed: EWLKTRPILSPLTKG
EFLKTRPILVPLTKG

SEQ ID NO: 208978 - protein, 15 aa, Artificial Sequence
  Description of Artificial Sequence: Synthetic peptide
  Seed: EWLKTRPILSPLTKG
EFLKTRRILAPLTKG

SEQ ID NO: 208979 - protein, 15 aa, Artificial Sequence
  Description of Artificial Sequence: Synthetic peptide
  Seed: EWLKTRPILSPLTKG
EFLKTRRILGPLTKG

SEQ ID NO: 208980 - protein, 15 aa, Artificial Sequence
  Description of Artificial Sequence: Synthetic peptide
  Seed: EWLKTRPILSPLTKG
EFLKTRRILSPLTKG

SEQ ID NO: 208981 - protein, 15 aa, Artificial Sequence
  Description of Artificial Sequence: Synthetic peptide
  Seed: EWLKTRPILSPLTKG
EFLKTRSILAPLTKG

SEQ ID NO: 208982 - protein, 15 aa, Artificial Sequence
  Description of Artificial Sequence: Synthetic peptide
  Seed: EWLKTRPILSPLTKG
EFLKTRSILFPLTKG

SEQ ID NO: 208983 - protein, 15 aa, Artificial Sequence
  Description of Artificial Sequence: Synthetic peptide
  Seed: EWLKTRPILSPLTKG
EFLKTRSILGPLTKG

SEQ ID NO: 208984 - protein, 15 aa, Artificial Sequence
  Description of Artificial Sequence: Synthetic peptide
  Seed: EWLKTRPILSPLTKG
EFLKTRSILIPLTKG

SEQ ID NO: 208985 - protein, 15 aa, Artificial Sequence
  Description of Artificial Sequence: Synthetic peptide
  Seed: EWLKTRPILSPLTKG
EFLKTRSILLPLTKG

SEQ ID NO: 208986 - protein, 15 aa, Artificial Sequence
  Description of Artificial Sequence: Synthetic peptide
  Seed: EWLKTRPILSPLTKG
EFLKTRSILMPLTKG

SEQ ID NO: 208987 - protein, 15 aa, Artificial Sequence
  Description of Artificial Sequence: Synthetic peptide
  Seed: EWLKTRPILSPLTKG
EFLKTRSILNPLTKG

SEQ ID NO: 208988 - protein, 15 aa, Artificial Sequence
  Description of Artificial Sequence: Synthetic peptide
  Seed: EWLKTRPILSPLTKG
EFLKTRSILSPLTKG

SEQ ID NO: 208989 - protein, 15 aa, Artificial Sequence
  Description of Artificial Sequence: Synthetic peptide
  Seed: EWLKTRPILSPLTKG
EFLKTRSILTPLTKG

SEQ ID NO: 208990 - protein, 15 aa, Artificial Sequence
  Description of Artificial Sequence: Synthetic peptide
  Seed: EWLKTRPILSPLTKG
EFLKTRSILVPLTKG

SEQ ID NO: 208991 - protein, 15 aa, Artificial Sequence
  Description of Artificial Sequence: Synthetic peptide
  Seed: EWLKTRPILSPLTKG
EFLKTRSILYPLTKG

SEQ ID NO: 208992 - protein, 15 aa, Artificial Sequence
  Description of Artificial Sequence: Synthetic peptide
  Seed: EWLKTRPILSPLTKG
EFLKTRTILAPLTKG

SEQ ID NO: 208993 - protein, 15 aa, Artificial Sequence
  Description of Artificial Sequence: Synthetic peptide
  Seed: EWLKTRPILSPLTKG
EFLKTRTILFPLTKG

SEQ ID NO: 208994 - protein, 15 aa, Artificial Sequence
  Description of Artificial Sequence: Synthetic peptide
  Seed: EWLKTRPILSPLTKG
EFLKTRTILIPLTKG

SEQ ID NO: 208995 - protein, 15 aa, Artificial Sequence
  Description of Artificial Sequence: Synthetic peptide
  Seed: EWLKTRPILSPLTKG
EFLKTRTILLPLTKG

SEQ ID NO: 208996 - protein, 15 aa, Artificial Sequence
  Description of Artificial Sequence: Synthetic peptide
  Seed: EWLKTRPILSPLTKG
EFLKTRTILMPLTKG

SEQ ID NO: 208997 - protein, 15 aa, Artificial Sequence
  Description of Artificial Sequence: Synthetic peptide
  Seed: EWLKTRPILSPLTKG
EFLKTRTILNPLTKG

SEQ ID NO: 208998 - protein, 15 aa, Artificial Sequence
  Description of Artificial Sequence: Synthetic peptide
  Seed: EWLKTRPILSPLTKG
EFLKTRTILSPLTKG

SEQ ID NO: 208999 - protein, 15 aa, Artificial Sequence
  Description of Artificial Sequence: Synthetic peptide
  Seed: EWLKTRPILSPLTKG
EFLKTRTILVPLTKG

SEQ ID NO: 209000 - protein, 15 aa, Artificial Sequence
  Description of Artificial Sequence: Synthetic peptide
  Seed: EWLKTRPILSPLTKG
EFLKTRVILAPLTKG

SEQ ID NO: 209001 - protein, 15 aa, Artificial Sequence
  Description of Artificial Sequence: Synthetic peptide
  Seed: EWLKTRPILSPLTKG
EFLKTRVILIPLTKG

SEQ ID NO: 209002 - protein, 15 aa, Artificial Sequence
  Description of Artificial Sequence: Synthetic peptide
  Seed: EWLKTRPILSPLTKG
EFLKTRVILLPLTKG

SEQ ID NO: 209003 - protein, 15 aa, Artificial Sequence
  Description of Artificial Sequence: Synthetic peptide
  Seed: EWLKTRPILSPLTKG
EFLKTRVILNPLTKG

SEQ ID NO: 209004 - protein, 15 aa, Artificial Sequence
  Description of Artificial Sequence: Synthetic peptide
  Seed: EWLKTRPILSPLTKG
EFLKTRVILSPLTKG

SEQ ID NO: 209005 - protein, 15 aa, Artificial Sequence
  Description of Artificial Sequence: Synthetic peptide
  Seed: EWLKTRPILSPLTKG
EFLKTRVILVPLTKG

SEQ ID NO: 209006 - protein, 15 aa, Artificial Sequence
  Description of Artificial Sequence: Synthetic peptide
  Seed: EWLKTRPILSPLTKG
EFLKVRAILCPLTKG

SEQ ID NO: 209007 - protein, 15 aa, Artificial Sequence
  Description of Artificial Sequence: Synthetic peptide
  Seed: EWLKTRPILSPLTKG
EFLKVRAILFPLTKG

SEQ ID NO: 209008 - protein, 15 aa, Artificial Sequence
  Description of Artificial Sequence: Synthetic peptide
  Seed: EWLKTRPILSPLTKG
EFLKVRAILIPLTKG

SEQ ID NO: 209009 - protein, 15 aa, Artificial Sequence
  Description of Artificial Sequence: Synthetic peptide
  Seed: EWLKTRPILSPLTKG
EFLKVRAILKPLTKG

SEQ ID NO: 209010 - protein, 15 aa, Artificial Sequence
  Description of Artificial Sequence: Synthetic peptide
  Seed: EWLKTRPILSPLTKG
EFLKVRAILLPLTKG

SEQ ID NO: 209011 - protein, 15 aa, Artificial Sequence
  Description of Artificial Sequence: Synthetic peptide
  Seed: EWLKTRPILSPLTKG
EFLKVRAILMPLTKG

SEQ ID NO: 209012 - protein, 15 aa, Artificial Sequence
  Description of Artificial Sequence: Synthetic peptide
  Seed: EWLKTRPILSPLTKG
EFLKVRAILQPLTKG

SEQ ID NO: 209013 - protein, 15 aa, Artificial Sequence
  Description of Artificial Sequence: Synthetic peptide
  Seed: EWLKTRPILSPLTKG
EFLKVRAILRPLTKG

SEQ ID NO: 209014 - protein, 15 aa, Artificial Sequence
  Description of Artificial Sequence: Synthetic peptide
  Seed: EWLKTRPILSPLTKG
EFLKVRAILTPLTKG

SEQ ID NO: 209015 - protein, 15 aa, Artificial Sequence
  Description of Artificial Sequence: Synthetic peptide
  Seed: EWLKTRPILSPLTKG
EFLKVRAILVPLTKG

SEQ ID NO: 209016 - protein, 15 aa, Artificial Sequence
  Description of Artificial Sequence: Synthetic peptide
  Seed: EWLKTRPILSPLTKG
EFLKVRAILYPLTKG

SEQ ID NO: 209017 - protein, 15 aa, Artificial Sequence
  Description of Artificial Sequence: Synthetic peptide
  Seed: EWLKTRPILSPLTKG
EFLKVRGILAPLTKG

SEQ ID NO: 209018 - protein, 15 aa, Artificial Sequence
  Description of Artificial Sequence: Synthetic peptide
  Seed: EWLKTRPILSPLTKG
EFLKVRGILCPLTKG

SEQ ID NO: 209019 - protein, 15 aa, Artificial Sequence
  Description of Artificial Sequence: Synthetic peptide
  Seed: EWLKTRPILSPLTKG
EFLKVRGILFPLTKG

SEQ ID NO: 209020 - protein, 15 aa, Artificial Sequence
  Description of Artificial Sequence: Synthetic peptide
  Seed: EWLKTRPILSPLTKG
EFLKVRGILGPLTKG

SEQ ID NO: 209021 - protein, 15 aa, Artificial Sequence
  Description of Artificial Sequence: Synthetic peptide
  Seed: EWLKTRPILSPLTKG
EFLKVRGILIPLTKG

SEQ ID NO: 209022 - protein, 15 aa, Artificial Sequence
  Description of Artificial Sequence: Synthetic peptide
  Seed: EWLKTRPILSPLTKG
EFLKVRGILLPLTKG

SEQ ID NO: 209023 - protein, 15 aa, Artificial Sequence
  Description of Artificial Sequence: Synthetic peptide
  Seed: EWLKTRPILSPLTKG
EFLKVRGILMPLTKG

SEQ ID NO: 209024 - protein, 15 aa, Artificial Sequence
  Description of Artificial Sequence: Synthetic peptide
  Seed: EWLKTRPILSPLTKG
EFLKVRGILNPLTKG

SEQ ID NO: 209025 - protein, 15 aa, Artificial Sequence
  Description of Artificial Sequence: Synthetic peptide
  Seed: EWLKTRPILSPLTKG
EFLKVRGILSPLTKG

SEQ ID NO: 209026 - protein, 15 aa, Artificial Sequence
  Description of Artificial Sequence: Synthetic peptide
  Seed: EWLKTRPILSPLTKG
EFLKVRGILTPLTKG

SEQ ID NO: 209027 - protein, 15 aa, Artificial Sequence
  Description of Artificial Sequence: Synthetic peptide
  Seed: EWLKTRPILSPLTKG
EFLKVRGILVPLTKG

SEQ ID NO: 209028 - protein, 15 aa, Artificial Sequence
  Description of Artificial Sequence: Synthetic peptide
  Seed: EWLKTRPILSPLTKG
EFLKVRKILAPLTKG

SEQ ID NO: 209029 - protein, 15 aa, Artificial Sequence
  Description of Artificial Sequence: Synthetic peptide
  Seed: EWLKTRPILSPLTKG
EFLKVRKILGPLTKG

SEQ ID NO: 209030 - protein, 15 aa, Artificial Sequence
  Description of Artificial Sequence: Synthetic peptide
  Seed: EWLKTRPILSPLTKG
EFLKVRKILHPLTKG

SEQ ID NO: 209031 - protein, 15 aa, Artificial Sequence
  Description of Artificial Sequence: Synthetic peptide
  Seed: EWLKTRPILSPLTKG
EFLKVRKILNPLTKG

SEQ ID NO: 209032 - protein, 15 aa, Artificial Sequence
  Description of Artificial Sequence: Synthetic peptide
  Seed: EWLKTRPILSPLTKG
EFLKVRKILQPLTKG

SEQ ID NO: 209033 - protein, 15 aa, Artificial Sequence
  Description of Artificial Sequence: Synthetic peptide
  Seed: EWLKTRPILSPLTKG
EFLKVRKILSPLTKG

SEQ ID NO: 209034 - protein, 15 aa, Artificial Sequence
  Description of Artificial Sequence: Synthetic peptide
  Seed: EWLKTRPILSPLTKG
EFLKVRKILTPLTKG

SEQ ID NO: 209035 - protein, 15 aa, Artificial Sequence
  Description of Artificial Sequence: Synthetic peptide
  Seed: EWLKTRPILSPLTKG
EFLKVRNILDPLTKG

SEQ ID NO: 209036 - protein, 15 aa, Artificial Sequence
  Description of Artificial Sequence: Synthetic peptide
  Seed: EWLKTRPILSPLTKG
EFLKVRNILIPLTKG

SEQ ID NO: 209037 - protein, 15 aa, Artificial Sequence
  Description of Artificial Sequence: Synthetic peptide
  Seed: EWLKTRPILSPLTKG
EFLKVRNILLPLTKG

SEQ ID NO: 209038 - protein, 15 aa, Artificial Sequence
  Description of Artificial Sequence: Synthetic peptide
  Seed: EWLKTRPILSPLTKG
EFLKVRNILMPLTKG

SEQ ID NO: 209039 - protein, 15 aa, Artificial Sequence
  Description of Artificial Sequence: Synthetic peptide
  Seed: EWLKTRPILSPLTKG
EFLKVRNILVPLTKG

SEQ ID NO: 209040 - protein, 15 aa, Artificial Sequence
  Description of Artificial Sequence: Synthetic peptide
  Seed: EWLKTRPILSPLTKG
EFLKVRPILCPLTKG

SEQ ID NO: 209041 - protein, 15 aa, Artificial Sequence
  Description of Artificial Sequence: Synthetic peptide
  Seed: EWLKTRPILSPLTKG
EFLKVRPILGPLTKG

SEQ ID NO: 209042 - protein, 15 aa, Artificial Sequence
  Description of Artificial Sequence: Synthetic peptide
  Seed: EWLKTRPILSPLTKG
EFLKVRPILIPLTKG

SEQ ID NO: 209043 - protein, 15 aa, Artificial Sequence
  Description of Artificial Sequence: Synthetic peptide
  Seed: EWLKTRPILSPLTKG
EFLKVRPILLPLTKG

SEQ ID NO: 209044 - protein, 15 aa, Artificial Sequence
  Description of Artificial Sequence: Synthetic peptide
  Seed: EWLKTRPILSPLTKG
EFLKVRPILMPLTKG

SEQ ID NO: 209045 - protein, 15 aa, Artificial Sequence
  Description of Artificial Sequence: Synthetic peptide
  Seed: EWLKTRPILSPLTKG
EFLKVRPILNPLTKG

SEQ ID NO: 209046 - protein, 15 aa, Artificial Sequence
  Description of Artificial Sequence: Synthetic peptide
  Seed: EWLKTRPILSPLTKG
EFLKVRPILTPLTKG

SEQ ID NO: 209047 - protein, 15 aa, Artificial Sequence
  Description of Artificial Sequence: Synthetic peptide
  Seed: EWLKTRPILSPLTKG
EFLKVRPILVPLTKG

SEQ ID NO: 209048 - protein, 15 aa, Artificial Sequence
  Description of Artificial Sequence: Synthetic peptide
  Seed: EWLKTRPILSPLTKG
EFLKVRRILAPLTKG

SEQ ID NO: 209049 - protein, 15 aa, Artificial Sequence
  Description of Artificial Sequence: Synthetic peptide
  Seed: EWLKTRPILSPLTKG
EFLKVRRILGPLTKG

SEQ ID NO: 209050 - protein, 15 aa, Artificial Sequence
  Description of Artificial Sequence: Synthetic peptide
  Seed: EWLKTRPILSPLTKG
EFLKVRRILHPLTKG

SEQ ID NO: 209051 - protein, 15 aa, Artificial Sequence
  Description of Artificial Sequence: Synthetic peptide
  Seed: EWLKTRPILSPLTKG
EFLKVRRILNPLTKG

SEQ ID NO: 209052 - protein, 15 aa, Artificial Sequence
  Description of Artificial Sequence: Synthetic peptide
  Seed: EWLKTRPILSPLTKG
EFLKVRRILPPLTKG

SEQ ID NO: 209053 - protein, 15 aa, Artificial Sequence
  Description of Artificial Sequence: Synthetic peptide
  Seed: EWLKTRPILSPLTKG
EFLKVRRILQPLTKG

SEQ ID NO: 209054 - protein, 15 aa, Artificial Sequence
  Description of Artificial Sequence: Synthetic peptide
  Seed: EWLKTRPILSPLTKG
EFLKVRRILSPLTKG

SEQ ID NO: 209055 - protein, 15 aa, Artificial Sequence
  Description of Artificial Sequence: Synthetic peptide
  Seed: EWLKTRPILSPLTKG
EFLKVRRILTPLTKG

SEQ ID NO: 209056 - protein, 15 aa, Artificial Sequence
  Description of Artificial Sequence: Synthetic peptide
  Seed: EWLKTRPILSPLTKG
EFLKVRRILVPLTKG

SEQ ID NO: 209057 - protein, 15 aa, Artificial Sequence
  Description of Artificial Sequence: Synthetic peptide
  Seed: EWLKTRPILSPLTKG
EFLKVRSILAPLTKG

SEQ ID NO: 209058 - protein, 15 aa, Artificial Sequence
  Description of Artificial Sequence: Synthetic peptide
  Seed: EWLKTRPILSPLTKG
EFLKVRSILCPLTKG

SEQ ID NO: 209059 - protein, 15 aa, Artificial Sequence
  Description of Artificial Sequence: Synthetic peptide
  Seed: EWLKTRPILSPLTKG
EFLKVRSILFPLTKG

SEQ ID NO: 209060 - protein, 15 aa, Artificial Sequence
  Description of Artificial Sequence: Synthetic peptide
  Seed: EWLKTRPILSPLTKG
EFLKVRSILIPLTKG

SEQ ID NO: 209061 - protein, 15 aa, Artificial Sequence
  Description of Artificial Sequence: Synthetic peptide
  Seed: EWLKTRPILSPLTKG
EFLKVRSILLPLTKG

SEQ ID NO: 209062 - protein, 15 aa, Artificial Sequence
  Description of Artificial Sequence: Synthetic peptide
  Seed: EWLKTRPILSPLTKG
EFLKVRSILMPLTKG

SEQ ID NO: 209063 - protein, 15 aa, Artificial Sequence
  Description of Artificial Sequence: Synthetic peptide
  Seed: EWLKTRPILSPLTKG
EFLKVRSILVPLTKG

SEQ ID NO: 209064 - protein, 15 aa, Artificial Sequence
  Description of Artificial Sequence: Synthetic peptide
  Seed: EWLKTRPILSPLTKG
EFLKVRTILDPLTKG

SEQ ID NO: 209065 - protein, 15 aa, Artificial Sequence
  Description of Artificial Sequence: Synthetic peptide
  Seed: EWLKTRPILSPLTKG
EFLKVRTILHPLTKG

SEQ ID NO: 209066 - protein, 15 aa, Artificial Sequence
  Description of Artificial Sequence: Synthetic peptide
  Seed: EWLKTRPILSPLTKG
EFLKVRTILIPLTKG

SEQ ID NO: 209067 - protein, 15 aa, Artificial Sequence
  Description of Artificial Sequence: Synthetic peptide
  Seed: EWLKTRPILSPLTKG
EFLKVRTILLPLTKG

SEQ ID NO: 209068 - protein, 15 aa, Artificial Sequence
  Description of Artificial Sequence: Synthetic peptide
  Seed: EWLKTRPILSPLTKG
EFLKVRTILMPLTKG

SEQ ID NO: 209069 - protein, 15 aa, Artificial Sequence
  Description of Artificial Sequence: Synthetic peptide
  Seed: EWLKTRPILSPLTKG
EFLKVRTILVPLTKG

SEQ ID NO: 209070 - protein, 15 aa, Artificial Sequence
  Description of Artificial Sequence: Synthetic peptide
  Seed: EWLKTRPILSPLTKG
EFLKWRAILLPLTKG

SEQ ID NO: 209071 - protein, 15 aa, Artificial Sequence
  Description of Artificial Sequence: Synthetic peptide
  Seed: EWLKTRPILSPLTKG
EFLKWRGILLPLTKG

SEQ ID NO: 209072 - protein, 15 aa, Artificial Sequence
  Description of Artificial Sequence: Synthetic peptide
  Seed: EWLKTRPILSPLTKG
EFLKWRGILMPLTKG

SEQ ID NO: 209073 - protein, 15 aa, Artificial Sequence
  Description of Artificial Sequence: Synthetic peptide
  Seed: EWLKTRPILSPLTKG
EFLKWRPILLPLTKG

SEQ ID NO: 209074 - protein, 15 aa, Artificial Sequence
  Description of Artificial Sequence: Synthetic peptide
  Seed: EWLKTRPILSPLTKG
EHLKLRGILLPLTKG

SEQ ID NO: 209075 - protein, 15 aa, Artificial Sequence
  Description of Artificial Sequence: Synthetic peptide
  Seed: EWLKTRPILSPLTKG
EHLKMRGILLPLTKG

SEQ ID NO: 209076 - protein, 15 aa, Artificial Sequence
  Description of Artificial Sequence: Synthetic peptide
  Seed: EWLKTRPILSPLTKG
EILKARAILAPLTKG

SEQ ID NO: 209077 - protein, 15 aa, Artificial Sequence
  Description of Artificial Sequence: Synthetic peptide
  Seed: EWLKTRPILSPLTKG
EILKARAILCPLTKG

SEQ ID NO: 209078 - protein, 15 aa, Artificial Sequence
  Description of Artificial Sequence: Synthetic peptide
  Seed: EWLKTRPILSPLTKG
EILKARAILGPLTKG

SEQ ID NO: 209079 - protein, 15 aa, Artificial Sequence
  Description of Artificial Sequence: Synthetic peptide
  Seed: EWLKTRPILSPLTKG
EILKARAILIPLTKG

SEQ ID NO: 209080 - protein, 15 aa, Artificial Sequence
  Description of Artificial Sequence: Synthetic peptide
  Seed: EWLKTRPILSPLTKG
EILKARAILLPLTKG

SEQ ID NO: 209081 - protein, 15 aa, Artificial Sequence
  Description of Artificial Sequence: Synthetic peptide
  Seed: EWLKTRPILSPLTKG
EILKARAILMPLTKG

SEQ ID NO: 209082 - protein, 15 aa, Artificial Sequence
  Description of Artificial Sequence: Synthetic peptide
  Seed: EWLKTRPILSPLTKG
EILKARAILNPLTKG

SEQ ID NO: 209083 - protein, 15 aa, Artificial Sequence
  Description of Artificial Sequence: Synthetic peptide
  Seed: EWLKTRPILSPLTKG
EILKARAILSPLTKG

SEQ ID NO: 209084 - protein, 15 aa, Artificial Sequence
  Description of Artificial Sequence: Synthetic peptide
  Seed: EWLKTRPILSPLTKG
EILKARAILTPLTKG

SEQ ID NO: 209085 - protein, 15 aa, Artificial Sequence
  Description of Artificial Sequence: Synthetic peptide
  Seed: EWLKTRPILSPLTKG
EILKARGILAPLTKG

SEQ ID NO: 209086 - protein, 15 aa, Artificial Sequence
  Description of Artificial Sequence: Synthetic peptide
  Seed: EWLKTRPILSPLTKG
EILKARGILCPLTKG

SEQ ID NO: 209087 - protein, 15 aa, Artificial Sequence
  Description of Artificial Sequence: Synthetic peptide
  Seed: EWLKTRPILSPLTKG
EILKARGILGPLTKG

SEQ ID NO: 209088 - protein, 15 aa, Artificial Sequence
  Description of Artificial Sequence: Synthetic peptide
  Seed: EWLKTRPILSPLTKG
EILKARGILIPLTKG

SEQ ID NO: 209089 - protein, 15 aa, Artificial Sequence
  Description of Artificial Sequence: Synthetic peptide
  Seed: EWLKTRPILSPLTKG
EILKARGILLPLTKG

SEQ ID NO: 209090 - protein, 15 aa, Artificial Sequence
  Description of Artificial Sequence: Synthetic peptide
  Seed: EWLKTRPILSPLTKG
EILKARGILMPLTKG

SEQ ID NO: 209091 - protein, 15 aa, Artificial Sequence
  Description of Artificial Sequence: Synthetic peptide
  Seed: EWLKTRPILSPLTKG
EILKARGILSPLTKG

SEQ ID NO: 209092 - protein, 15 aa, Artificial Sequence
  Description of Artificial Sequence: Synthetic peptide
  Seed: EWLKTRPILSPLTKG
EILKARGILTPLTKG

SEQ ID NO: 209093 - protein, 15 aa, Artificial Sequence
  Description of Artificial Sequence: Synthetic peptide
  Seed: EWLKTRPILSPLTKG
EILKARGILVPLTKG

SEQ ID NO: 209094 - protein, 15 aa, Artificial Sequence
  Description of Artificial Sequence: Synthetic peptide
  Seed: EWLKTRPILSPLTKG
EILKARNILAPLTKG

SEQ ID NO: 209095 - protein, 15 aa, Artificial Sequence
  Description of Artificial Sequence: Synthetic peptide
  Seed: EWLKTRPILSPLTKG
EILKARNILIPLTKG

SEQ ID NO: 209096 - protein, 15 aa, Artificial Sequence
  Description of Artificial Sequence: Synthetic peptide
  Seed: EWLKTRPILSPLTKG
EILKARNILLPLTKG

SEQ ID NO: 209097 - protein, 15 aa, Artificial Sequence
  Description of Artificial Sequence: Synthetic peptide
  Seed: EWLKTRPILSPLTKG
EILKARNILVPLTKG

SEQ ID NO: 209098 - protein, 15 aa, Artificial Sequence
  Description of Artificial Sequence: Synthetic peptide
  Seed: EWLKTRPILSPLTKG
EILKARPILAPLTKG

SEQ ID NO: 209099 - protein, 15 aa, Artificial Sequence
  Description of Artificial Sequence: Synthetic peptide
  Seed: EWLKTRPILSPLTKG
EILKARPILGPLTKG

SEQ ID NO: 209100 - protein, 15 aa, Artificial Sequence
  Description of Artificial Sequence: Synthetic peptide
  Seed: EWLKTRPILSPLTKG
EILKARPILIPLTKG

SEQ ID NO: 209101 - protein, 15 aa, Artificial Sequence
  Description of Artificial Sequence: Synthetic peptide
  Seed: EWLKTRPILSPLTKG
EILKARPILLPLTKG

SEQ ID NO: 209102 - protein, 15 aa, Artificial Sequence
  Description of Artificial Sequence: Synthetic peptide
  Seed: EWLKTRPILSPLTKG
EILKARPILMPLTKG

SEQ ID NO: 209103 - protein, 15 aa, Artificial Sequence
  Description of Artificial Sequence: Synthetic peptide
  Seed: EWLKTRPILSPLTKG
EILKARPILSPLTKG

SEQ ID NO: 209104 - protein, 15 aa, Artificial Sequence
  Description of Artificial Sequence: Synthetic peptide
  Seed: EWLKTRPILSPLTKG
EILKARPILTPLTKG

SEQ ID NO: 209105 - protein, 15 aa, Artificial Sequence
  Description of Artificial Sequence: Synthetic peptide
  Seed: EWLKTRPILSPLTKG
EILKARPILVPLTKG

SEQ ID NO: 209106 - protein, 15 aa, Artificial Sequence
  Description of Artificial Sequence: Synthetic peptide
  Seed: EWLKTRPILSPLTKG
EILKARRILAPLTKG

SEQ ID NO: 209107 - protein, 15 aa, Artificial Sequence
  Description of Artificial Sequence: Synthetic peptide
  Seed: EWLKTRPILSPLTKG
EILKARRILGPLTKG

SEQ ID NO: 209108 - protein, 15 aa, Artificial Sequence
  Description of Artificial Sequence: Synthetic peptide
  Seed: EWLKTRPILSPLTKG
EILKARRILSPLTKG

SEQ ID NO: 209109 - protein, 15 aa, Artificial Sequence
  Description of Artificial Sequence: Synthetic peptide
  Seed: EWLKTRPILSPLTKG
EILKARSILAPLTKG

SEQ ID NO: 209110 - protein, 15 aa, Artificial Sequence
  Description of Artificial Sequence: Synthetic peptide
  Seed: EWLKTRPILSPLTKG
EILKARSILGPLTKG

SEQ ID NO: 209111 - protein, 15 aa, Artificial Sequence
  Description of Artificial Sequence: Synthetic peptide
  Seed: EWLKTRPILSPLTKG
EILKARSILIPLTKG

SEQ ID NO: 209112 - protein, 15 aa, Artificial Sequence
  Description of Artificial Sequence: Synthetic peptide
  Seed: EWLKTRPILSPLTKG
EILKARSILLPLTKG

SEQ ID NO: 209113 - protein, 15 aa, Artificial Sequence
  Description of Artificial Sequence: Synthetic peptide
  Seed: EWLKTRPILSPLTKG
EILKARSILMPLTKG

SEQ ID NO: 209114 - protein, 15 aa, Artificial Sequence
  Description of Artificial Sequence: Synthetic peptide
  Seed: EWLKTRPILSPLTKG
EILKARSILSPLTKG

SEQ ID NO: 209115 - protein, 15 aa, Artificial Sequence
  Description of Artificial Sequence: Synthetic peptide
  Seed: EWLKTRPILSPLTKG
EILKARSILTPLTKG

SEQ ID NO: 209116 - protein, 15 aa, Artificial Sequence
  Description of Artificial Sequence: Synthetic peptide
  Seed: EWLKTRPILSPLTKG
EILKARSILVPLTKG

SEQ ID NO: 209117 - protein, 15 aa, Artificial Sequence
  Description of Artificial Sequence: Synthetic peptide
  Seed: EWLKTRPILSPLTKG
EILKARTILAPLTKG

SEQ ID NO: 209118 - protein, 15 aa, Artificial Sequence
  Description of Artificial Sequence: Synthetic peptide
  Seed: EWLKTRPILSPLTKG
EILKARTILIPLTKG

SEQ ID NO: 209119 - protein, 15 aa, Artificial Sequence
  Description of Artificial Sequence: Synthetic peptide
  Seed: EWLKTRPILSPLTKG
EILKARTILLPLTKG

SEQ ID NO: 209120 - protein, 15 aa, Artificial Sequence
  Description of Artificial Sequence: Synthetic peptide
  Seed: EWLKTRPILSPLTKG
EILKARTILSPLTKG

SEQ ID NO: 209121 - protein, 15 aa, Artificial Sequence
  Description of Artificial Sequence: Synthetic peptide
  Seed: EWLKTRPILSPLTKG
EILKARTILVPLTKG

SEQ ID NO: 209122 - protein, 15 aa, Artificial Sequence
  Description of Artificial Sequence: Synthetic peptide
  Seed: EWLKTRPILSPLTKG
EILKCRAILAPLTKG

SEQ ID NO: 209123 - protein, 15 aa, Artificial Sequence
  Description of Artificial Sequence: Synthetic peptide
  Seed: EWLKTRPILSPLTKG
EILKCRAILIPLTKG

SEQ ID NO: 209124 - protein, 15 aa, Artificial Sequence
  Description of Artificial Sequence: Synthetic peptide
  Seed: EWLKTRPILSPLTKG
EILKCRAILLPLTKG

SEQ ID NO: 209125 - protein, 15 aa, Artificial Sequence
  Description of Artificial Sequence: Synthetic peptide
  Seed: EWLKTRPILSPLTKG
EILKCRAILSPLTKG

SEQ ID NO: 209126 - protein, 15 aa, Artificial Sequence
  Description of Artificial Sequence: Synthetic peptide
  Seed: EWLKTRPILSPLTKG
EILKCRAILTPLTKG

SEQ ID NO: 209127 - protein, 15 aa, Artificial Sequence
  Description of Artificial Sequence: Synthetic peptide
  Seed: EWLKTRPILSPLTKG
EILKCRAILVPLTKG

SEQ ID NO: 209128 - protein, 15 aa, Artificial Sequence
  Description of Artificial Sequence: Synthetic peptide
  Seed: EWLKTRPILSPLTKG
EILKCRGILAPLTKG

SEQ ID NO: 209129 - protein, 15 aa, Artificial Sequence
  Description of Artificial Sequence: Synthetic peptide
  Seed: EWLKTRPILSPLTKG
EILKCRPILAPLTKG

SEQ ID NO: 209130 - protein, 15 aa, Artificial Sequence
  Description of Artificial Sequence: Synthetic peptide
  Seed: EWLKTRPILSPLTKG
EILKERAILAPLTKG

SEQ ID NO: 209131 - protein, 15 aa, Artificial Sequence
  Description of Artificial Sequence: Synthetic peptide
  Seed: EWLKTRPILSPLTKG
EILKERAILIPLTKG

SEQ ID NO: 209132 - protein, 15 aa, Artificial Sequence
  Description of Artificial Sequence: Synthetic peptide
  Seed: EWLKTRPILSPLTKG
EILKERAILLPLTKG

SEQ ID NO: 209133 - protein, 15 aa, Artificial Sequence
  Description of Artificial Sequence: Synthetic peptide
  Seed: EWLKTRPILSPLTKG
EILKERAILMPLTKG

SEQ ID NO: 209134 - protein, 15 aa, Artificial Sequence
  Description of Artificial Sequence: Synthetic peptide
  Seed: EWLKTRPILSPLTKG
EILKERAILSPLTKG

SEQ ID NO: 209135 - protein, 15 aa, Artificial Sequence
  Description of Artificial Sequence: Synthetic peptide
  Seed: EWLKTRPILSPLTKG
EILKERAILTPLTKG

SEQ ID NO: 209136 - protein, 15 aa, Artificial Sequence
  Description of Artificial Sequence: Synthetic peptide
  Seed: EWLKTRPILSPLTKG
EILKERAILVPLTKG

SEQ ID NO: 209137 - protein, 15 aa, Artificial Sequence
  Description of Artificial Sequence: Synthetic peptide
  Seed: EWLKTRPILSPLTKG
EILKERGILAPLTKG

SEQ ID NO: 209138 - protein, 15 aa, Artificial Sequence
  Description of Artificial Sequence: Synthetic peptide
  Seed: EWLKTRPILSPLTKG
EILKERGILIPLTKG

SEQ ID NO: 209139 - protein, 15 aa, Artificial Sequence
  Description of Artificial Sequence: Synthetic peptide
  Seed: EWLKTRPILSPLTKG
EILKERGILLPLTKG

SEQ ID NO: 209140 - protein, 15 aa, Artificial Sequence
  Description of Artificial Sequence: Synthetic peptide
  Seed: EWLKTRPILSPLTKG
EILKERGILVPLTKG

SEQ ID NO: 209141 - protein, 15 aa, Artificial Sequence
  Description of Artificial Sequence: Synthetic peptide
  Seed: EWLKTRPILSPLTKG
EILKERPILVPLTKG

SEQ ID NO: 209142 - protein, 15 aa, Artificial Sequence
  Description of Artificial Sequence: Synthetic peptide
  Seed: EWLKTRPILSPLTKG
EILKERSILAPLTKG

SEQ ID NO: 209143 - protein, 15 aa, Artificial Sequence
  Description of Artificial Sequence: Synthetic peptide
  Seed: EWLKTRPILSPLTKG
EILKERSILIPLTKG

SEQ ID NO: 209144 - protein, 15 aa, Artificial Sequence
  Description of Artificial Sequence: Synthetic peptide
  Seed: EWLKTRPILSPLTKG
EILKERSILLPLTKG

SEQ ID NO: 209145 - protein, 15 aa, Artificial Sequence
  Description of Artificial Sequence: Synthetic peptide
  Seed: EWLKTRPILSPLTKG
EILKERSILVPLTKG

SEQ ID NO: 209146 - protein, 15 aa, Artificial Sequence
  Description of Artificial Sequence: Synthetic peptide
  Seed: EWLKTRPILSPLTKG
EILKGRAILAPLTKG

SEQ ID NO: 209147 - protein, 15 aa, Artificial Sequence
  Description of Artificial Sequence: Synthetic peptide
  Seed: EWLKTRPILSPLTKG
EILKGRAILGPLTKG

SEQ ID NO: 209148 - protein, 15 aa, Artificial Sequence
  Description of Artificial Sequence: Synthetic peptide
  Seed: EWLKTRPILSPLTKG
EILKGRAILIPLTKG

SEQ ID NO: 209149 - protein, 15 aa, Artificial Sequence
  Description of Artificial Sequence: Synthetic peptide
  Seed: EWLKTRPILSPLTKG
EILKGRAILLPLTKG

SEQ ID NO: 209150 - protein, 15 aa, Artificial Sequence
  Description of Artificial Sequence: Synthetic peptide
  Seed: EWLKTRPILSPLTKG
EILKGRAILMPLTKG

SEQ ID NO: 209151 - protein, 15 aa, Artificial Sequence
  Description of Artificial Sequence: Synthetic peptide
  Seed: EWLKTRPILSPLTKG
EILKGRAILSPLTKG

SEQ ID NO: 209152 - protein, 15 aa, Artificial Sequence
  Description of Artificial Sequence: Synthetic peptide
  Seed: EWLKTRPILSPLTKG
EILKGRAILTPLTKG

SEQ ID NO: 209153 - protein, 15 aa, Artificial Sequence
  Description of Artificial Sequence: Synthetic peptide
  Seed: EWLKTRPILSPLTKG
EILKGRAILVPLTKG

SEQ ID NO: 209154 - protein, 15 aa, Artificial Sequence
  Description of Artificial Sequence: Synthetic peptide
  Seed: EWLKTRPILSPLTKG
EILKGRGILAPLTKG

SEQ ID NO: 209155 - protein, 15 aa, Artificial Sequence
  Description of Artificial Sequence: Synthetic peptide
  Seed: EWLKTRPILSPLTKG
EILKGRGILIPLTKG

SEQ ID NO: 209156 - protein, 15 aa, Artificial Sequence
  Description of Artificial Sequence: Synthetic peptide
  Seed: EWLKTRPILSPLTKG
EILKGRGILLPLTKG

SEQ ID NO: 209157 - protein, 15 aa, Artificial Sequence
  Description of Artificial Sequence: Synthetic peptide
  Seed: EWLKTRPILSPLTKG
EILKGRGILVPLTKG

SEQ ID NO: 209158 - protein, 15 aa, Artificial Sequence
  Description of Artificial Sequence: Synthetic peptide
  Seed: EWLKTRPILSPLTKG
EILKGRPILAPLTKG

SEQ ID NO: 209159 - protein, 15 aa, Artificial Sequence
  Description of Artificial Sequence: Synthetic peptide
  Seed: EWLKTRPILSPLTKG
EILKGRPILIPLTKG

SEQ ID NO: 209160 - protein, 15 aa, Artificial Sequence
  Description of Artificial Sequence: Synthetic peptide
  Seed: EWLKTRPILSPLTKG
EILKGRPILLPLTKG

SEQ ID NO: 209161 - protein, 15 aa, Artificial Sequence
  Description of Artificial Sequence: Synthetic peptide
  Seed: EWLKTRPILSPLTKG
EILKGRPILVPLTKG

SEQ ID NO: 209162 - protein, 15 aa, Artificial Sequence
  Description of Artificial Sequence: Synthetic peptide
  Seed: EWLKTRPILSPLTKG
EILKGRSILAPLTKG

SEQ ID NO: 209163 - protein, 15 aa, Artificial Sequence
  Description of Artificial Sequence: Synthetic peptide
  Seed: EWLKTRPILSPLTKG
EILKGRSILIPLTKG

SEQ ID NO: 209164 - protein, 15 aa, Artificial Sequence
  Description of Artificial Sequence: Synthetic peptide
  Seed: EWLKTRPILSPLTKG
EILKGRSILLPLTKG

SEQ ID NO: 209165 - protein, 15 aa, Artificial Sequence
  Description of Artificial Sequence: Synthetic peptide
  Seed: EWLKTRPILSPLTKG
EILKGRSILVPLTKG

SEQ ID NO: 209166 - protein, 15 aa, Artificial Sequence
  Description of Artificial Sequence: Synthetic peptide
  Seed: EWLKTRPILSPLTKG
EILKHRAILIPLTKG

SEQ ID NO: 209167 - protein, 15 aa, Artificial Sequence
  Description of Artificial Sequence: Synthetic peptide
  Seed: EWLKTRPILSPLTKG
EILKHRAILLPLTKG

SEQ ID NO: 209168 - protein, 15 aa, Artificial Sequence
  Description of Artificial Sequence: Synthetic peptide
  Seed: EWLKTRPILSPLTKG
EILKHRAILVPLTKG

SEQ ID NO: 209169 - protein, 15 aa, Artificial Sequence
  Description of Artificial Sequence: Synthetic peptide
  Seed: EWLKTRPILSPLTKG
EILKIRAILCPLTKG

SEQ ID NO: 209170 - protein, 15 aa, Artificial Sequence
  Description of Artificial Sequence: Synthetic peptide
  Seed: EWLKTRPILSPLTKG
EILKIRAILIPLTKG

SEQ ID NO: 209171 - protein, 15 aa, Artificial Sequence
  Description of Artificial Sequence: Synthetic peptide
  Seed: EWLKTRPILSPLTKG
EILKIRAILLPLTKG

SEQ ID NO: 209172 - protein, 15 aa, Artificial Sequence
  Description of Artificial Sequence: Synthetic peptide
  Seed: EWLKTRPILSPLTKG
EILKIRAILMPLTKG

SEQ ID NO: 209173 - protein, 15 aa, Artificial Sequence
  Description of Artificial Sequence: Synthetic peptide
  Seed: EWLKTRPILSPLTKG
EILKIRAILVPLTKG

SEQ ID NO: 209174 - protein, 15 aa, Artificial Sequence
  Description of Artificial Sequence: Synthetic peptide
  Seed: EWLKTRPILSPLTKG
EILKIRGILCPLTKG

SEQ ID NO: 209175 - protein, 15 aa, Artificial Sequence
  Description of Artificial Sequence: Synthetic peptide
  Seed: EWLKTRPILSPLTKG
EILKIRGILIPLTKG

SEQ ID NO: 209176 - protein, 15 aa, Artificial Sequence
  Description of Artificial Sequence: Synthetic peptide
  Seed: EWLKTRPILSPLTKG
EILKIRGILLPLTKG

SEQ ID NO: 209177 - protein, 15 aa, Artificial Sequence
  Description of Artificial Sequence: Synthetic peptide
  Seed: EWLKTRPILSPLTKG
EILKIRGILMPLTKG

SEQ ID NO: 209178 - protein, 15 aa, Artificial Sequence
  Description of Artificial Sequence: Synthetic peptide
  Seed: EWLKTRPILSPLTKG
EILKIRGILVPLTKG

SEQ ID NO: 209179 - protein, 15 aa, Artificial Sequence
  Description of Artificial Sequence: Synthetic peptide
  Seed: EWLKTRPILSPLTKG
EILKIRKILAPLTKG

SEQ ID NO: 209180 - protein, 15 aa, Artificial Sequence
  Description of Artificial Sequence: Synthetic peptide
  Seed: EWLKTRPILSPLTKG
EILKIRKILGPLTKG

SEQ ID NO: 209181 - protein, 15 aa, Artificial Sequence
  Description of Artificial Sequence: Synthetic peptide
  Seed: EWLKTRPILSPLTKG
EILKIRKILSPLTKG

SEQ ID NO: 209182 - protein, 15 aa, Artificial Sequence
  Description of Artificial Sequence: Synthetic peptide
  Seed: EWLKTRPILSPLTKG
EILKIRNILLPLTKG

SEQ ID NO: 209183 - protein, 15 aa, Artificial Sequence
  Description of Artificial Sequence: Synthetic peptide
  Seed: EWLKTRPILSPLTKG
EILKIRPILIPLTKG

SEQ ID NO: 209184 - protein, 15 aa, Artificial Sequence
  Description of Artificial Sequence: Synthetic peptide
  Seed: EWLKTRPILSPLTKG
EILKIRPILLPLTKG

SEQ ID NO: 209185 - protein, 15 aa, Artificial Sequence
  Description of Artificial Sequence: Synthetic peptide
  Seed: EWLKTRPILSPLTKG
EILKIRPILMPLTKG

SEQ ID NO: 209186 - protein, 15 aa, Artificial Sequence
  Description of Artificial Sequence: Synthetic peptide
  Seed: EWLKTRPILSPLTKG
EILKIRRILAPLTKG

SEQ ID NO: 209187 - protein, 15 aa, Artificial Sequence
  Description of Artificial Sequence: Synthetic peptide
  Seed: EWLKTRPILSPLTKG
EILKIRRILGPLTKG

SEQ ID NO: 209188 - protein, 15 aa, Artificial Sequence
  Description of Artificial Sequence: Synthetic peptide
  Seed: EWLKTRPILSPLTKG
EILKIRRILQPLTKG

SEQ ID NO: 209189 - protein, 15 aa, Artificial Sequence
  Description of Artificial Sequence: Synthetic peptide
  Seed: EWLKTRPILSPLTKG
EILKIRRILSPLTKG

SEQ ID NO: 209190 - protein, 15 aa, Artificial Sequence
  Description of Artificial Sequence: Synthetic peptide
  Seed: EWLKTRPILSPLTKG
EILKIRSILLPLTKG

SEQ ID NO: 209191 - protein, 15 aa, Artificial Sequence
  Description of Artificial Sequence: Synthetic peptide
  Seed: EWLKTRPILSPLTKG
EILKIRSILMPLTKG

SEQ ID NO: 209192 - protein, 15 aa, Artificial Sequence
  Description of Artificial Sequence: Synthetic peptide
  Seed: EWLKTRPILSPLTKG
EILKIRTILLPLTKG

SEQ ID NO: 209193 - protein, 15 aa, Artificial Sequence
  Description of Artificial Sequence: Synthetic peptide
  Seed: EWLKTRPILSPLTKG
EILKLRAILCPLTKG

SEQ ID NO: 209194 - protein, 15 aa, Artificial Sequence
  Description of Artificial Sequence: Synthetic peptide
  Seed: EWLKTRPILSPLTKG
EILKLRAILFPLTKG

SEQ ID NO: 209195 - protein, 15 aa, Artificial Sequence
  Description of Artificial Sequence: Synthetic peptide
  Seed: EWLKTRPILSPLTKG
EILKLRAILIPLTKG

SEQ ID NO: 209196 - protein, 15 aa, Artificial Sequence
  Description of Artificial Sequence: Synthetic peptide
  Seed: EWLKTRPILSPLTKG
EILKLRAILKPLTKG

SEQ ID NO: 209197 - protein, 15 aa, Artificial Sequence
  Description of Artificial Sequence: Synthetic peptide
  Seed: EWLKTRPILSPLTKG
EILKLRAILLPLTKG

SEQ ID NO: 209198 - protein, 15 aa, Artificial Sequence
  Description of Artificial Sequence: Synthetic peptide
  Seed: EWLKTRPILSPLTKG
EILKLRAILMPLTKG

SEQ ID NO: 209199 - protein, 15 aa, Artificial Sequence
  Description of Artificial Sequence: Synthetic peptide
  Seed: EWLKTRPILSPLTKG
EILKLRAILQPLTKG

SEQ ID NO: 209200 - protein, 15 aa, Artificial Sequence
  Description of Artificial Sequence: Synthetic peptide
  Seed: EWLKTRPILSPLTKG
EILKLRAILRPLTKG

SEQ ID NO: 209201 - protein, 15 aa, Artificial Sequence
  Description of Artificial Sequence: Synthetic peptide
  Seed: EWLKTRPILSPLTKG
EILKLRAILTPLTKG

SEQ ID NO: 209202 - protein, 15 aa, Artificial Sequence
  Description of Artificial Sequence: Synthetic peptide
  Seed: EWLKTRPILSPLTKG
EILKLRAILVPLTKG

SEQ ID NO: 209203 - protein, 15 aa, Artificial Sequence
  Description of Artificial Sequence: Synthetic peptide
  Seed: EWLKTRPILSPLTKG
EILKLRGILAPLTKG

SEQ ID NO: 209204 - protein, 15 aa, Artificial Sequence
  Description of Artificial Sequence: Synthetic peptide
  Seed: EWLKTRPILSPLTKG
EILKLRGILCPLTKG

SEQ ID NO: 209205 - protein, 15 aa, Artificial Sequence
  Description of Artificial Sequence: Synthetic peptide
  Seed: EWLKTRPILSPLTKG
EILKLRGILGPLTKG

SEQ ID NO: 209206 - protein, 15 aa, Artificial Sequence
  Description of Artificial Sequence: Synthetic peptide
  Seed: EWLKTRPILSPLTKG
EILKLRGILHPLTKG

SEQ ID NO: 209207 - protein, 15 aa, Artificial Sequence
  Description of Artificial Sequence: Synthetic peptide
  Seed: EWLKTRPILSPLTKG
EILKLRGILIPLTKG

SEQ ID NO: 209208 - protein, 15 aa, Artificial Sequence
  Description of Artificial Sequence: Synthetic peptide
  Seed: EWLKTRPILSPLTKG
EILKLRGILLPLTKG

SEQ ID NO: 209209 - protein, 15 aa, Artificial Sequence
  Description of Artificial Sequence: Synthetic peptide
  Seed: EWLKTRPILSPLTKG
EILKLRGILMPLTKG

SEQ ID NO: 209210 - protein, 15 aa, Artificial Sequence
  Description of Artificial Sequence: Synthetic peptide
  Seed: EWLKTRPILSPLTKG
EILKLRGILNPLTKG

SEQ ID NO: 209211 - protein, 15 aa, Artificial Sequence
  Description of Artificial Sequence: Synthetic peptide
  Seed: EWLKTRPILSPLTKG
EILKLRGILSPLTKG

SEQ ID NO: 209212 - protein, 15 aa, Artificial Sequence
  Description of Artificial Sequence: Synthetic peptide
  Seed: EWLKTRPILSPLTKG
EILKLRGILTPLTKG

SEQ ID NO: 209213 - protein, 15 aa, Artificial Sequence
  Description of Artificial Sequence: Synthetic peptide
  Seed: EWLKTRPILSPLTKG
EILKLRGILVPLTKG

SEQ ID NO: 209214 - protein, 15 aa, Artificial Sequence
  Description of Artificial Sequence: Synthetic peptide
  Seed: EWLKTRPILSPLTKG
EILKLRKILAPLTKG

SEQ ID NO: 209215 - protein, 15 aa, Artificial Sequence
  Description of Artificial Sequence: Synthetic peptide
  Seed: EWLKTRPILSPLTKG
EILKLRKILGPLTKG

SEQ ID NO: 209216 - protein, 15 aa, Artificial Sequence
  Description of Artificial Sequence: Synthetic peptide
  Seed: EWLKTRPILSPLTKG
EILKLRKILSPLTKG

SEQ ID NO: 209217 - protein, 15 aa, Artificial Sequence
  Description of Artificial Sequence: Synthetic peptide
  Seed: EWLKTRPILSPLTKG
EILKLRNILIPLTKG

SEQ ID NO: 209218 - protein, 15 aa, Artificial Sequence
  Description of Artificial Sequence: Synthetic peptide
  Seed: EWLKTRPILSPLTKG
EILKLRNILLPLTKG

SEQ ID NO: 209219 - protein, 15 aa, Artificial Sequence
  Description of Artificial Sequence: Synthetic peptide
  Seed: EWLKTRPILSPLTKG
EILKLRNILMPLTKG

SEQ ID NO: 209220 - protein, 15 aa, Artificial Sequence
  Description of Artificial Sequence: Synthetic peptide
  Seed: EWLKTRPILSPLTKG
EILKLRNILVPLTKG

SEQ ID NO: 209221 - protein, 15 aa, Artificial Sequence
  Description of Artificial Sequence: Synthetic peptide
  Seed: EWLKTRPILSPLTKG
EILKLRPILCPLTKG

SEQ ID NO: 209222 - protein, 15 aa, Artificial Sequence
  Description of Artificial Sequence: Synthetic peptide
  Seed: EWLKTRPILSPLTKG
EILKLRPILIPLTKG

SEQ ID NO: 209223 - protein, 15 aa, Artificial Sequence
  Description of Artificial Sequence: Synthetic peptide
  Seed: EWLKTRPILSPLTKG
EILKLRPILLPLTKG

SEQ ID NO: 209224 - protein, 15 aa, Artificial Sequence
  Description of Artificial Sequence: Synthetic peptide
  Seed: EWLKTRPILSPLTKG
EILKLRPILMPLTKG

SEQ ID NO: 209225 - protein, 15 aa, Artificial Sequence
  Description of Artificial Sequence: Synthetic peptide
  Seed: EWLKTRPILSPLTKG
EILKLRPILTPLTKG

SEQ ID NO: 209226 - protein, 15 aa, Artificial Sequence
  Description of Artificial Sequence: Synthetic peptide
  Seed: EWLKTRPILSPLTKG
EILKLRPILVPLTKG

SEQ ID NO: 209227 - protein, 15 aa, Artificial Sequence
  Description of Artificial Sequence: Synthetic peptide
  Seed: EWLKTRPILSPLTKG
EILKLRRILAPLTKG

SEQ ID NO: 209228 - protein, 15 aa, Artificial Sequence
  Description of Artificial Sequence: Synthetic peptide
  Seed: EWLKTRPILSPLTKG
EILKLRRILGPLTKG

SEQ ID NO: 209229 - protein, 15 aa, Artificial Sequence
  Description of Artificial Sequence: Synthetic peptide
  Seed: EWLKTRPILSPLTKG
EILKLRRILQPLTKG

SEQ ID NO: 209230 - protein, 15 aa, Artificial Sequence
  Description of Artificial Sequence: Synthetic peptide
  Seed: EWLKTRPILSPLTKG
EILKLRRILSPLTKG

SEQ ID NO: 209231 - protein, 15 aa, Artificial Sequence
  Description of Artificial Sequence: Synthetic peptide
  Seed: EWLKTRPILSPLTKG
EILKLRSILCPLTKG

SEQ ID NO: 209232 - protein, 15 aa, Artificial Sequence
  Description of Artificial Sequence: Synthetic peptide
  Seed: EWLKTRPILSPLTKG
EILKLRSILIPLTKG

SEQ ID NO: 209233 - protein, 15 aa, Artificial Sequence
  Description of Artificial Sequence: Synthetic peptide
  Seed: EWLKTRPILSPLTKG
EILKLRSILLPLTKG

SEQ ID NO: 209234 - protein, 15 aa, Artificial Sequence
  Description of Artificial Sequence: Synthetic peptide
  Seed: EWLKTRPILSPLTKG
EILKLRSILMPLTKG

SEQ ID NO: 209235 - protein, 15 aa, Artificial Sequence
  Description of Artificial Sequence: Synthetic peptide
  Seed: EWLKTRPILSPLTKG
EILKLRSILVPLTKG

SEQ ID NO: 209236 - protein, 15 aa, Artificial Sequence
  Description of Artificial Sequence: Synthetic peptide
  Seed: EWLKTRPILSPLTKG
EILKLRTILIPLTKG

SEQ ID NO: 209237 - protein, 15 aa, Artificial Sequence
  Description of Artificial Sequence: Synthetic peptide
  Seed: EWLKTRPILSPLTKG
EILKLRTILLPLTKG

SEQ ID NO: 209238 - protein, 15 aa, Artificial Sequence
  Description of Artificial Sequence: Synthetic peptide
  Seed: EWLKTRPILSPLTKG
EILKLRTILMPLTKG

SEQ ID NO: 209239 - protein, 15 aa, Artificial Sequence
  Description of Artificial Sequence: Synthetic peptide
  Seed: EWLKTRPILSPLTKG
EILKLRTILVPLTKG

SEQ ID NO: 209240 - protein, 15 aa, Artificial Sequence
  Description of Artificial Sequence: Synthetic peptide
  Seed: EWLKTRPILSPLTKG
EILKMRAILCPLTKG

SEQ ID NO: 209241 - protein, 15 aa, Artificial Sequence
  Description of Artificial Sequence: Synthetic peptide
  Seed: EWLKTRPILSPLTKG
EILKMRAILFPLTKG

SEQ ID NO: 209242 - protein, 15 aa, Artificial Sequence
  Description of Artificial Sequence: Synthetic peptide
  Seed: EWLKTRPILSPLTKG
EILKMRAILHPLTKG

SEQ ID NO: 209243 - protein, 15 aa, Artificial Sequence
  Description of Artificial Sequence: Synthetic peptide
  Seed: EWLKTRPILSPLTKG
EILKMRAILIPLTKG

SEQ ID NO: 209244 - protein, 15 aa, Artificial Sequence
  Description of Artificial Sequence: Synthetic peptide
  Seed: EWLKTRPILSPLTKG
EILKMRAILKPLTKG

SEQ ID NO: 209245 - protein, 15 aa, Artificial Sequence
  Description of Artificial Sequence: Synthetic peptide
  Seed: EWLKTRPILSPLTKG
EILKMRAILLPLTKG

SEQ ID NO: 209246 - protein, 15 aa, Artificial Sequence
  Description of Artificial Sequence: Synthetic peptide
  Seed: EWLKTRPILSPLTKG
EILKMRAILMPLTKG

SEQ ID NO: 209247 - protein, 15 aa, Artificial Sequence
  Description of Artificial Sequence: Synthetic peptide
  Seed: EWLKTRPILSPLTKG
EILKMRAILQPLTKG

SEQ ID NO: 209248 - protein, 15 aa, Artificial Sequence
  Description of Artificial Sequence: Synthetic peptide
  Seed: EWLKTRPILSPLTKG
EILKMRAILRPLTKG

SEQ ID NO: 209249 - protein, 15 aa, Artificial Sequence
  Description of Artificial Sequence: Synthetic peptide
  Seed: EWLKTRPILSPLTKG
EILKMRAILTPLTKG

SEQ ID NO: 209250 - protein, 15 aa, Artificial Sequence
  Description of Artificial Sequence: Synthetic peptide
  Seed: EWLKTRPILSPLTKG
EILKMRAILVPLTKG

SEQ ID NO: 209251 - protein, 15 aa, Artificial Sequence
  Description of Artificial Sequence: Synthetic peptide
  Seed: EWLKTRPILSPLTKG
EILKMRAILYPLTKG

SEQ ID NO: 209252 - protein, 15 aa, Artificial Sequence
  Description of Artificial Sequence: Synthetic peptide
  Seed: EWLKTRPILSPLTKG
EILKMRGILAPLTKG

SEQ ID NO: 209253 - protein, 15 aa, Artificial Sequence
  Description of Artificial Sequence: Synthetic peptide
  Seed: EWLKTRPILSPLTKG
EILKMRGILCPLTKG

SEQ ID NO: 209254 - protein, 15 aa, Artificial Sequence
  Description of Artificial Sequence: Synthetic peptide
  Seed: EWLKTRPILSPLTKG
EILKMRGILFPLTKG

SEQ ID NO: 209255 - protein, 15 aa, Artificial Sequence
  Description of Artificial Sequence: Synthetic peptide
  Seed: EWLKTRPILSPLTKG
EILKMRGILGPLTKG

SEQ ID NO: 209256 - protein, 15 aa, Artificial Sequence
  Description of Artificial Sequence: Synthetic peptide
  Seed: EWLKTRPILSPLTKG
EILKMRGILHPLTKG

SEQ ID NO: 209257 - protein, 15 aa, Artificial Sequence
  Description of Artificial Sequence: Synthetic peptide
  Seed: EWLKTRPILSPLTKG
EILKMRGILIPLTKG

SEQ ID NO: 209258 - protein, 15 aa, Artificial Sequence
  Description of Artificial Sequence: Synthetic peptide
  Seed: EWLKTRPILSPLTKG
EILKMRGILLPLTKG

SEQ ID NO: 209259 - protein, 15 aa, Artificial Sequence
  Description of Artificial Sequence: Synthetic peptide
  Seed: EWLKTRPILSPLTKG
EILKMRGILMPLTKG

SEQ ID NO: 209260 - protein, 15 aa, Artificial Sequence
  Description of Artificial Sequence: Synthetic peptide
  Seed: EWLKTRPILSPLTKG
EILKMRGILNPLTKG

SEQ ID NO: 209261 - protein, 15 aa, Artificial Sequence
  Description of Artificial Sequence: Synthetic peptide
  Seed: EWLKTRPILSPLTKG
EILKMRGILQPLTKG

SEQ ID NO: 209262 - protein, 15 aa, Artificial Sequence
  Description of Artificial Sequence: Synthetic peptide
  Seed: EWLKTRPILSPLTKG
EILKMRGILSPLTKG

SEQ ID NO: 209263 - protein, 15 aa, Artificial Sequence
  Description of Artificial Sequence: Synthetic peptide
  Seed: EWLKTRPILSPLTKG
EILKMRGILTPLTKG

SEQ ID NO: 209264 - protein, 15 aa, Artificial Sequence
  Description of Artificial Sequence: Synthetic peptide
  Seed: EWLKTRPILSPLTKG
EILKMRGILVPLTKG

SEQ ID NO: 209265 - protein, 15 aa, Artificial Sequence
  Description of Artificial Sequence: Synthetic peptide
  Seed: EWLKTRPILSPLTKG
EILKMRKILAPLTKG

SEQ ID NO: 209266 - protein, 15 aa, Artificial Sequence
  Description of Artificial Sequence: Synthetic peptide
  Seed: EWLKTRPILSPLTKG
EILKMRKILGPLTKG

SEQ ID NO: 209267 - protein, 15 aa, Artificial Sequence
  Description of Artificial Sequence: Synthetic peptide
  Seed: EWLKTRPILSPLTKG
EILKMRKILQPLTKG

SEQ ID NO: 209268 - protein, 15 aa, Artificial Sequence
  Description of Artificial Sequence: Synthetic peptide
  Seed: EWLKTRPILSPLTKG
EILKMRKILSPLTKG

SEQ ID NO: 209269 - protein, 15 aa, Artificial Sequence
  Description of Artificial Sequence: Synthetic peptide
  Seed: EWLKTRPILSPLTKG
EILKMRKILTPLTKG

SEQ ID NO: 209270 - protein, 15 aa, Artificial Sequence
  Description of Artificial Sequence: Synthetic peptide
  Seed: EWLKTRPILSPLTKG
EILKMRNILIPLTKG

SEQ ID NO: 209271 - protein, 15 aa, Artificial Sequence
  Description of Artificial Sequence: Synthetic peptide
  Seed: EWLKTRPILSPLTKG
EILKMRNILLPLTKG

SEQ ID NO: 209272 - protein, 15 aa, Artificial Sequence
  Description of Artificial Sequence: Synthetic peptide
  Seed: EWLKTRPILSPLTKG
EILKMRNILMPLTKG

SEQ ID NO: 209273 - protein, 15 aa, Artificial Sequence
  Description of Artificial Sequence: Synthetic peptide
  Seed: EWLKTRPILSPLTKG
EILKMRNILVPLTKG

SEQ ID NO: 209274 - protein, 15 aa, Artificial Sequence
  Description of Artificial Sequence: Synthetic peptide
  Seed: EWLKTRPILSPLTKG
EILKMRPILCPLTKG

SEQ ID NO: 209275 - protein, 15 aa, Artificial Sequence
  Description of Artificial Sequence: Synthetic peptide
  Seed: EWLKTRPILSPLTKG
EILKMRPILHPLTKG

SEQ ID NO: 209276 - protein, 15 aa, Artificial Sequence
  Description of Artificial Sequence: Synthetic peptide
  Seed: EWLKTRPILSPLTKG
EILKMRPILIPLTKG

SEQ ID NO: 209277 - protein, 15 aa, Artificial Sequence
  Description of Artificial Sequence: Synthetic peptide
  Seed: EWLKTRPILSPLTKG
EILKMRPILLPLTKG

SEQ ID NO: 209278 - protein, 15 aa, Artificial Sequence
  Description of Artificial Sequence: Synthetic peptide
  Seed: EWLKTRPILSPLTKG
EILKMRPILMPLTKG

SEQ ID NO: 209279 - protein, 15 aa, Artificial Sequence
  Description of Artificial Sequence: Synthetic peptide
  Seed: EWLKTRPILSPLTKG
EILKMRPILTPLTKG

SEQ ID NO: 209280 - protein, 15 aa, Artificial Sequence
  Description of Artificial Sequence: Synthetic peptide
  Seed: EWLKTRPILSPLTKG
EILKMRPILVPLTKG

SEQ ID NO: 209281 - protein, 15 aa, Artificial Sequence
  Description of Artificial Sequence: Synthetic peptide
  Seed: EWLKTRPILSPLTKG
EILKMRRILAPLTKG

SEQ ID NO: 209282 - protein, 15 aa, Artificial Sequence
  Description of Artificial Sequence: Synthetic peptide
  Seed: EWLKTRPILSPLTKG
EILKMRRILGPLTKG

SEQ ID NO: 209283 - protein, 15 aa, Artificial Sequence
  Description of Artificial Sequence: Synthetic peptide
  Seed: EWLKTRPILSPLTKG
EILKMRRILNPLTKG

SEQ ID NO: 209284 - protein, 15 aa, Artificial Sequence
  Description of Artificial Sequence: Synthetic peptide
  Seed: EWLKTRPILSPLTKG
EILKMRRILQPLTKG

SEQ ID NO: 209285 - protein, 15 aa, Artificial Sequence
  Description of Artificial Sequence: Synthetic peptide
  Seed: EWLKTRPILSPLTKG
EILKMRRILSPLTKG

SEQ ID NO: 209286 - protein, 15 aa, Artificial Sequence
  Description of Artificial Sequence: Synthetic peptide
  Seed: EWLKTRPILSPLTKG
EILKMRRILTPLTKG

SEQ ID NO: 209287 - protein, 15 aa, Artificial Sequence
  Description of Artificial Sequence: Synthetic peptide
  Seed: EWLKTRPILSPLTKG
EILKMRRILVPLTKG

SEQ ID NO: 209288 - protein, 15 aa, Artificial Sequence
  Description of Artificial Sequence: Synthetic peptide
  Seed: EWLKTRPILSPLTKG
EILKMRSILCPLTKG

SEQ ID NO: 209289 - protein, 15 aa, Artificial Sequence
  Description of Artificial Sequence: Synthetic peptide
  Seed: EWLKTRPILSPLTKG
EILKMRSILIPLTKG

SEQ ID NO: 209290 - protein, 15 aa, Artificial Sequence
  Description of Artificial Sequence: Synthetic peptide
  Seed: EWLKTRPILSPLTKG
EILKMRSILLPLTKG

SEQ ID NO: 209291 - protein, 15 aa, Artificial Sequence
  Description of Artificial Sequence: Synthetic peptide
  Seed: EWLKTRPILSPLTKG
EILKMRSILMPLTKG

SEQ ID NO: 209292 - protein, 15 aa, Artificial Sequence
  Description of Artificial Sequence: Synthetic peptide
  Seed: EWLKTRPILSPLTKG
EILKMRSILTPLTKG

SEQ ID NO: 209293 - protein, 15 aa, Artificial Sequence
  Description of Artificial Sequence: Synthetic peptide
  Seed: EWLKTRPILSPLTKG
EILKMRSILVPLTKG

SEQ ID NO: 209294 - protein, 15 aa, Artificial Sequence
  Description of Artificial Sequence: Synthetic peptide
  Seed: EWLKTRPILSPLTKG
EILKMRTILIPLTKG

SEQ ID NO: 209295 - protein, 15 aa, Artificial Sequence
  Description of Artificial Sequence: Synthetic peptide
  Seed: EWLKTRPILSPLTKG
EILKMRTILLPLTKG

SEQ ID NO: 209296 - protein, 15 aa, Artificial Sequence
  Description of Artificial Sequence: Synthetic peptide
  Seed: EWLKTRPILSPLTKG
EILKMRTILMPLTKG

SEQ ID NO: 209297 - protein, 15 aa, Artificial Sequence
  Description of Artificial Sequence: Synthetic peptide
  Seed: EWLKTRPILSPLTKG
EILKMRTILVPLTKG

SEQ ID NO: 209298 - protein, 15 aa, Artificial Sequence
  Description of Artificial Sequence: Synthetic peptide
  Seed: EWLKTRPILSPLTKG
EILKMRVILLPLTKG

SEQ ID NO: 209299 - protein, 15 aa, Artificial Sequence
  Description of Artificial Sequence: Synthetic peptide
  Seed: EWLKTRPILSPLTKG
EILKMRVILMPLTKG

SEQ ID NO: 209300 - protein, 15 aa, Artificial Sequence
  Description of Artificial Sequence: Synthetic peptide
  Seed: EWLKTRPILSPLTKG
EILKNRAILAPLTKG

SEQ ID NO: 209301 - protein, 15 aa, Artificial Sequence
  Description of Artificial Sequence: Synthetic peptide
  Seed: EWLKTRPILSPLTKG
EILKNRAILIPLTKG

SEQ ID NO: 209302 - protein, 15 aa, Artificial Sequence
  Description of Artificial Sequence: Synthetic peptide
  Seed: EWLKTRPILSPLTKG
EILKNRAILLPLTKG

SEQ ID NO: 209303 - protein, 15 aa, Artificial Sequence
  Description of Artificial Sequence: Synthetic peptide
  Seed: EWLKTRPILSPLTKG
EILKNRAILVPLTKG

SEQ ID NO: 209304 - protein, 15 aa, Artificial Sequence
  Description of Artificial Sequence: Synthetic peptide
  Seed: EWLKTRPILSPLTKG
EILKQRAILAPLTKG

SEQ ID NO: 209305 - protein, 15 aa, Artificial Sequence
  Description of Artificial Sequence: Synthetic peptide
  Seed: EWLKTRPILSPLTKG
EILKQRAILGPLTKG

SEQ ID NO: 209306 - protein, 15 aa, Artificial Sequence
  Description of Artificial Sequence: Synthetic peptide
  Seed: EWLKTRPILSPLTKG
EILKQRAILIPLTKG

SEQ ID NO: 209307 - protein, 15 aa, Artificial Sequence
  Description of Artificial Sequence: Synthetic peptide
  Seed: EWLKTRPILSPLTKG
EILKQRAILLPLTKG

SEQ ID NO: 209308 - protein, 15 aa, Artificial Sequence
  Description of Artificial Sequence: Synthetic peptide
  Seed: EWLKTRPILSPLTKG
EILKQRAILMPLTKG

SEQ ID NO: 209309 - protein, 15 aa, Artificial Sequence
  Description of Artificial Sequence: Synthetic peptide
  Seed: EWLKTRPILSPLTKG
EILKQRAILSPLTKG

SEQ ID NO: 209310 - protein, 15 aa, Artificial Sequence
  Description of Artificial Sequence: Synthetic peptide
  Seed: EWLKTRPILSPLTKG
EILKQRAILTPLTKG

SEQ ID NO: 209311 - protein, 15 aa, Artificial Sequence
  Description of Artificial Sequence: Synthetic peptide
  Seed: EWLKTRPILSPLTKG
EILKQRAILVPLTKG

SEQ ID NO: 209312 - protein, 15 aa, Artificial Sequence
  Description of Artificial Sequence: Synthetic peptide
  Seed: EWLKTRPILSPLTKG
EILKQRGILAPLTKG

SEQ ID NO: 209313 - protein, 15 aa, Artificial Sequence
  Description of Artificial Sequence: Synthetic peptide
  Seed: EWLKTRPILSPLTKG
EILKQRGILIPLTKG

SEQ ID NO: 209314 - protein, 15 aa, Artificial Sequence
  Description of Artificial Sequence: Synthetic peptide
  Seed: EWLKTRPILSPLTKG
EILKQRGILLPLTKG

SEQ ID NO: 209315 - protein, 15 aa, Artificial Sequence
  Description of Artificial Sequence: Synthetic peptide
  Seed: EWLKTRPILSPLTKG
EILKQRGILMPLTKG

SEQ ID NO: 209316 - protein, 15 aa, Artificial Sequence
  Description of Artificial Sequence: Synthetic peptide
  Seed: EWLKTRPILSPLTKG
EILKQRGILSPLTKG

SEQ ID NO: 209317 - protein, 15 aa, Artificial Sequence
  Description of Artificial Sequence: Synthetic peptide
  Seed: EWLKTRPILSPLTKG
EILKQRGILTPLTKG

SEQ ID NO: 209318 - protein, 15 aa, Artificial Sequence
  Description of Artificial Sequence: Synthetic peptide
  Seed: EWLKTRPILSPLTKG
EILKQRGILVPLTKG

SEQ ID NO: 209319 - protein, 15 aa, Artificial Sequence
  Description of Artificial Sequence: Synthetic peptide
  Seed: EWLKTRPILSPLTKG
EILKQRNILAPLTKG

SEQ ID NO: 209320 - protein, 15 aa, Artificial Sequence
  Description of Artificial Sequence: Synthetic peptide
  Seed: EWLKTRPILSPLTKG
EILKQRPILAPLTKG

SEQ ID NO: 209321 - protein, 15 aa, Artificial Sequence
  Description of Artificial Sequence: Synthetic peptide
  Seed: EWLKTRPILSPLTKG
EILKQRPILIPLTKG

SEQ ID NO: 209322 - protein, 15 aa, Artificial Sequence
  Description of Artificial Sequence: Synthetic peptide
  Seed: EWLKTRPILSPLTKG
EILKQRPILLPLTKG

SEQ ID NO: 209323 - protein, 15 aa, Artificial Sequence
  Description of Artificial Sequence: Synthetic peptide
  Seed: EWLKTRPILSPLTKG
EILKQRPILVPLTKG

SEQ ID NO: 209324 - protein, 15 aa, Artificial Sequence
  Description of Artificial Sequence: Synthetic peptide
  Seed: EWLKTRPILSPLTKG
EILKQRSILAPLTKG

SEQ ID NO: 209325 - protein, 15 aa, Artificial Sequence
  Description of Artificial Sequence: Synthetic peptide
  Seed: EWLKTRPILSPLTKG
EILKQRSILIPLTKG

SEQ ID NO: 209326 - protein, 15 aa, Artificial Sequence
  Description of Artificial Sequence: Synthetic peptide
  Seed: EWLKTRPILSPLTKG
EILKQRSILLPLTKG

SEQ ID NO: 209327 - protein, 15 aa, Artificial Sequence
  Description of Artificial Sequence: Synthetic peptide
  Seed: EWLKTRPILSPLTKG
EILKQRSILSPLTKG

SEQ ID NO: 209328 - protein, 15 aa, Artificial Sequence
  Description of Artificial Sequence: Synthetic peptide
  Seed: EWLKTRPILSPLTKG
EILKQRSILTPLTKG

SEQ ID NO: 209329 - protein, 15 aa, Artificial Sequence
  Description of Artificial Sequence: Synthetic peptide
  Seed: EWLKTRPILSPLTKG
EILKQRSILVPLTKG

SEQ ID NO: 209330 - protein, 15 aa, Artificial Sequence
  Description of Artificial Sequence: Synthetic peptide
  Seed: EWLKTRPILSPLTKG
EILKQRTILAPLTKG

SEQ ID NO: 209331 - protein, 15 aa, Artificial Sequence
  Description of Artificial Sequence: Synthetic peptide
  Seed: EWLKTRPILSPLTKG
EILKQRTILVPLTKG

SEQ ID NO: 209332 - protein, 15 aa, Artificial Sequence
  Description of Artificial Sequence: Synthetic peptide
  Seed: EWLKTRPILSPLTKG
EILKSRAILAPLTKG

SEQ ID NO: 209333 - protein, 15 aa, Artificial Sequence
  Description of Artificial Sequence: Synthetic peptide
  Seed: EWLKTRPILSPLTKG
EILKSRAILFPLTKG

SEQ ID NO: 209334 - protein, 15 aa, Artificial Sequence
  Description of Artificial Sequence: Synthetic peptide
  Seed: EWLKTRPILSPLTKG
EILKSRAILGPLTKG

SEQ ID NO: 209335 - protein, 15 aa, Artificial Sequence
  Description of Artificial Sequence: Synthetic peptide
  Seed: EWLKTRPILSPLTKG
EILKSRAILIPLTKG

SEQ ID NO: 209336 - protein, 15 aa, Artificial Sequence
  Description of Artificial Sequence: Synthetic peptide
  Seed: EWLKTRPILSPLTKG
EILKSRAILLPLTKG

SEQ ID NO: 209337 - protein, 15 aa, Artificial Sequence
  Description of Artificial Sequence: Synthetic peptide
  Seed: EWLKTRPILSPLTKG
EILKSRAILMPLTKG

SEQ ID NO: 209338 - protein, 15 aa, Artificial Sequence
  Description of Artificial Sequence: Synthetic peptide
  Seed: EWLKTRPILSPLTKG
EILKSRAILSPLTKG

SEQ ID NO: 209339 - protein, 15 aa, Artificial Sequence
  Description of Artificial Sequence: Synthetic peptide
  Seed: EWLKTRPILSPLTKG
EILKSRAILTPLTKG

SEQ ID NO: 209340 - protein, 15 aa, Artificial Sequence
  Description of Artificial Sequence: Synthetic peptide
  Seed: EWLKTRPILSPLTKG
EILKSRAILVPLTKG

SEQ ID NO: 209341 - protein, 15 aa, Artificial Sequence
  Description of Artificial Sequence: Synthetic peptide
  Seed: EWLKTRPILSPLTKG
EILKSRGILAPLTKG

SEQ ID NO: 209342 - protein, 15 aa, Artificial Sequence
  Description of Artificial Sequence: Synthetic peptide
  Seed: EWLKTRPILSPLTKG
EILKSRGILIPLTKG

SEQ ID NO: 209343 - protein, 15 aa, Artificial Sequence
  Description of Artificial Sequence: Synthetic peptide
  Seed: EWLKTRPILSPLTKG
EILKSRGILLPLTKG

SEQ ID NO: 209344 - protein, 15 aa, Artificial Sequence
  Description of Artificial Sequence: Synthetic peptide
  Seed: EWLKTRPILSPLTKG
EILKSRGILVPLTKG

SEQ ID NO: 209345 - protein, 15 aa, Artificial Sequence
  Description of Artificial Sequence: Synthetic peptide
  Seed: EWLKTRPILSPLTKG
EILKSRPILAPLTKG

SEQ ID NO: 209346 - protein, 15 aa, Artificial Sequence
  Description of Artificial Sequence: Synthetic peptide
  Seed: EWLKTRPILSPLTKG
EILKSRPILIPLTKG

SEQ ID NO: 209347 - protein, 15 aa, Artificial Sequence
  Description of Artificial Sequence: Synthetic peptide
  Seed: EWLKTRPILSPLTKG
EILKSRPILLPLTKG

SEQ ID NO: 209348 - protein, 15 aa, Artificial Sequence
  Description of Artificial Sequence: Synthetic peptide
  Seed: EWLKTRPILSPLTKG
EILKSRPILVPLTKG

SEQ ID NO: 209349 - protein, 15 aa, Artificial Sequence
  Description of Artificial Sequence: Synthetic peptide
  Seed: EWLKTRPILSPLTKG
EILKSRSILAPLTKG

SEQ ID NO: 209350 - protein, 15 aa, Artificial Sequence
  Description of Artificial Sequence: Synthetic peptide
  Seed: EWLKTRPILSPLTKG
EILKSRSILFPLTKG

SEQ ID NO: 209351 - protein, 15 aa, Artificial Sequence
  Description of Artificial Sequence: Synthetic peptide
  Seed: EWLKTRPILSPLTKG
EILKSRSILIPLTKG

SEQ ID NO: 209352 - protein, 15 aa, Artificial Sequence
  Description of Artificial Sequence: Synthetic peptide
  Seed: EWLKTRPILSPLTKG
EILKSRSILLPLTKG

SEQ ID NO: 209353 - protein, 15 aa, Artificial Sequence
  Description of Artificial Sequence: Synthetic peptide
  Seed: EWLKTRPILSPLTKG
EILKSRSILMPLTKG

SEQ ID NO: 209354 - protein, 15 aa, Artificial Sequence
  Description of Artificial Sequence: Synthetic peptide
  Seed: EWLKTRPILSPLTKG
EILKSRSILVPLTKG

SEQ ID NO: 209355 - protein, 15 aa, Artificial Sequence
  Description of Artificial Sequence: Synthetic peptide
  Seed: EWLKTRPILSPLTKG
EILKSRTILIPLTKG

SEQ ID NO: 209356 - protein, 15 aa, Artificial Sequence
  Description of Artificial Sequence: Synthetic peptide
  Seed: EWLKTRPILSPLTKG
EILKTRAILAPLTKG

SEQ ID NO: 209357 - protein, 15 aa, Artificial Sequence
  Description of Artificial Sequence: Synthetic peptide
  Seed: EWLKTRPILSPLTKG
EILKTRAILFPLTKG

SEQ ID NO: 209358 - protein, 15 aa, Artificial Sequence
  Description of Artificial Sequence: Synthetic peptide
  Seed: EWLKTRPILSPLTKG
EILKTRAILIPLTKG

SEQ ID NO: 209359 - protein, 15 aa, Artificial Sequence
  Description of Artificial Sequence: Synthetic peptide
  Seed: EWLKTRPILSPLTKG
EILKTRAILLPLTKG

SEQ ID NO: 209360 - protein, 15 aa, Artificial Sequence
  Description of Artificial Sequence: Synthetic peptide
  Seed: EWLKTRPILSPLTKG
EILKTRAILMPLTKG

SEQ ID NO: 209361 - protein, 15 aa, Artificial Sequence
  Description of Artificial Sequence: Synthetic peptide
  Seed: EWLKTRPILSPLTKG
EILKTRAILSPLTKG

SEQ ID NO: 209362 - protein, 15 aa, Artificial Sequence
  Description of Artificial Sequence: Synthetic peptide
  Seed: EWLKTRPILSPLTKG
EILKTRAILTPLTKG

SEQ ID NO: 209363 - protein, 15 aa, Artificial Sequence
  Description of Artificial Sequence: Synthetic peptide
  Seed: EWLKTRPILSPLTKG
EILKTRAILVPLTKG

SEQ ID NO: 209364 - protein, 15 aa, Artificial Sequence
  Description of Artificial Sequence: Synthetic peptide
  Seed: EWLKTRPILSPLTKG
EILKTRGILAPLTKG

SEQ ID NO: 209365 - protein, 15 aa, Artificial Sequence
  Description of Artificial Sequence: Synthetic peptide
  Seed: EWLKTRPILSPLTKG
EILKTRGILIPLTKG

SEQ ID NO: 209366 - protein, 15 aa, Artificial Sequence
  Description of Artificial Sequence: Synthetic peptide
  Seed: EWLKTRPILSPLTKG
EILKTRGILLPLTKG

SEQ ID NO: 209367 - protein, 15 aa, Artificial Sequence
  Description of Artificial Sequence: Synthetic peptide
  Seed: EWLKTRPILSPLTKG
EILKTRGILVPLTKG

SEQ ID NO: 209368 - protein, 15 aa, Artificial Sequence
  Description of Artificial Sequence: Synthetic peptide
  Seed: EWLKTRPILSPLTKG
EILKTRPILIPLTKG

SEQ ID NO: 209369 - protein, 15 aa, Artificial Sequence
  Description of Artificial Sequence: Synthetic peptide
  Seed: EWLKTRPILSPLTKG
EILKTRPILLPLTKG

SEQ ID NO: 209370 - protein, 15 aa, Artificial Sequence
  Description of Artificial Sequence: Synthetic peptide
  Seed: EWLKTRPILSPLTKG
EILKTRPILVPLTKG

SEQ ID NO: 209371 - protein, 15 aa, Artificial Sequence
  Description of Artificial Sequence: Synthetic peptide
  Seed: EWLKTRPILSPLTKG
EILKTRSILFPLTKG

SEQ ID NO: 209372 - protein, 15 aa, Artificial Sequence
  Description of Artificial Sequence: Synthetic peptide
  Seed: EWLKTRPILSPLTKG
EILKTRSILIPLTKG

SEQ ID NO: 209373 - protein, 15 aa, Artificial Sequence
  Description of Artificial Sequence: Synthetic peptide
  Seed: EWLKTRPILSPLTKG
EILKTRSILLPLTKG

SEQ ID NO: 209374 - protein, 15 aa, Artificial Sequence
  Description of Artificial Sequence: Synthetic peptide
  Seed: EWLKTRPILSPLTKG
EILKTRSILMPLTKG

SEQ ID NO: 209375 - protein, 15 aa, Artificial Sequence
  Description of Artificial Sequence: Synthetic peptide
  Seed: EWLKTRPILSPLTKG
EILKTRSILVPLTKG

SEQ ID NO: 209376 - protein, 15 aa, Artificial Sequence
  Description of Artificial Sequence: Synthetic peptide
  Seed: EWLKTRPILSPLTKG
EILKTRTILIPLTKG

SEQ ID NO: 209377 - protein, 15 aa, Artificial Sequence
  Description of Artificial Sequence: Synthetic peptide
  Seed: EWLKTRPILSPLTKG
EILKTRTILLPLTKG

SEQ ID NO: 209378 - protein, 15 aa, Artificial Sequence
  Description of Artificial Sequence: Synthetic peptide
  Seed: EWLKTRPILSPLTKG
EILKTRTILVPLTKG

SEQ ID NO: 209379 - protein, 15 aa, Artificial Sequence
  Description of Artificial Sequence: Synthetic peptide
  Seed: EWLKTRPILSPLTKG
EILKVRAILIPLTKG

SEQ ID NO: 209380 - protein, 15 aa, Artificial Sequence
  Description of Artificial Sequence: Synthetic peptide
  Seed: EWLKTRPILSPLTKG
EILKVRAILLPLTKG

SEQ ID NO: 209381 - protein, 15 aa, Artificial Sequence
  Description of Artificial Sequence: Synthetic peptide
  Seed: EWLKTRPILSPLTKG
EILKVRAILMPLTKG

SEQ ID NO: 209382 - protein, 15 aa, Artificial Sequence
  Description of Artificial Sequence: Synthetic peptide
  Seed: EWLKTRPILSPLTKG
EILKVRAILVPLTKG

SEQ ID NO: 209383 - protein, 15 aa, Artificial Sequence
  Description of Artificial Sequence: Synthetic peptide
  Seed: EWLKTRPILSPLTKG
EILKVRGILIPLTKG

SEQ ID NO: 209384 - protein, 15 aa, Artificial Sequence
  Description of Artificial Sequence: Synthetic peptide
  Seed: EWLKTRPILSPLTKG
EILKVRGILLPLTKG

SEQ ID NO: 209385 - protein, 15 aa, Artificial Sequence
  Description of Artificial Sequence: Synthetic peptide
  Seed: EWLKTRPILSPLTKG
EILKVRGILMPLTKG

SEQ ID NO: 209386 - protein, 15 aa, Artificial Sequence
  Description of Artificial Sequence: Synthetic peptide
  Seed: EWLKTRPILSPLTKG
EILKVRGILVPLTKG

SEQ ID NO: 209387 - protein, 15 aa, Artificial Sequence
  Description of Artificial Sequence: Synthetic peptide
  Seed: EWLKTRPILSPLTKG
EILKVRKILAPLTKG

SEQ ID NO: 209388 - protein, 15 aa, Artificial Sequence
  Description of Artificial Sequence: Synthetic peptide
  Seed: EWLKTRPILSPLTKG
EILKVRKILSPLTKG

SEQ ID NO: 209389 - protein, 15 aa, Artificial Sequence
  Description of Artificial Sequence: Synthetic peptide
  Seed: EWLKTRPILSPLTKG
EILKVRPILIPLTKG

SEQ ID NO: 209390 - protein, 15 aa, Artificial Sequence
  Description of Artificial Sequence: Synthetic peptide
  Seed: EWLKTRPILSPLTKG
EILKVRPILLPLTKG

SEQ ID NO: 209391 - protein, 15 aa, Artificial Sequence
  Description of Artificial Sequence: Synthetic peptide
  Seed: EWLKTRPILSPLTKG
EILKVRPILVPLTKG

SEQ ID NO: 209392 - protein, 15 aa, Artificial Sequence
  Description of Artificial Sequence: Synthetic peptide
  Seed: EWLKTRPILSPLTKG
EILKVRRILAPLTKG

SEQ ID NO: 209393 - protein, 15 aa, Artificial Sequence
  Description of Artificial Sequence: Synthetic peptide
  Seed: EWLKTRPILSPLTKG
EILKVRRILGPLTKG

SEQ ID NO: 209394 - protein, 15 aa, Artificial Sequence
  Description of Artificial Sequence: Synthetic peptide
  Seed: EWLKTRPILSPLTKG
EILKVRRILSPLTKG

SEQ ID NO: 209395 - protein, 15 aa, Artificial Sequence
  Description of Artificial Sequence: Synthetic peptide
  Seed: EWLKTRPILSPLTKG
EILKVRSILIPLTKG

SEQ ID NO: 209396 - protein, 15 aa, Artificial Sequence
  Description of Artificial Sequence: Synthetic peptide
  Seed: EWLKTRPILSPLTKG
EILKVRSILLPLTKG

SEQ ID NO: 209397 - protein, 15 aa, Artificial Sequence
  Description of Artificial Sequence: Synthetic peptide
  Seed: EWLKTRPILSPLTKG
EILKVRSILMPLTKG

SEQ ID NO: 209398 - protein, 15 aa, Artificial Sequence
  Description of Artificial Sequence: Synthetic peptide
  Seed: EWLKTRPILSPLTKG
EILKVRSILVPLTKG

SEQ ID NO: 209399 - protein, 15 aa, Artificial Sequence
  Description of Artificial Sequence: Synthetic peptide
  Seed: EWLKTRPILSPLTKG
ELLKARAILAPLTKG

SEQ ID NO: 209400 - protein, 15 aa, Artificial Sequence
  Description of Artificial Sequence: Synthetic peptide
  Seed: EWLKTRPILSPLTKG
ELLKARAILCPLTKG

SEQ ID NO: 209401 - protein, 15 aa, Artificial Sequence
  Description of Artificial Sequence: Synthetic peptide
  Seed: EWLKTRPILSPLTKG
ELLKARAILGPLTKG

SEQ ID NO: 209402 - protein, 15 aa, Artificial Sequence
  Description of Artificial Sequence: Synthetic peptide
  Seed: EWLKTRPILSPLTKG
ELLKARAILIPLTKG

SEQ ID NO: 209403 - protein, 15 aa, Artificial Sequence
  Description of Artificial Sequence: Synthetic peptide
  Seed: EWLKTRPILSPLTKG
ELLKARAILLPLTKG

SEQ ID NO: 209404 - protein, 15 aa, Artificial Sequence
  Description of Artificial Sequence: Synthetic peptide
  Seed: EWLKTRPILSPLTKG
ELLKARAILMPLTKG

SEQ ID NO: 209405 - protein, 15 aa, Artificial Sequence
  Description of Artificial Sequence: Synthetic peptide
  Seed: EWLKTRPILSPLTKG
ELLKARAILSPLTKG

SEQ ID NO: 209406 - protein, 15 aa, Artificial Sequence
  Description of Artificial Sequence: Synthetic peptide
  Seed: EWLKTRPILSPLTKG
ELLKARAILTPLTKG

SEQ ID NO: 209407 - protein, 15 aa, Artificial Sequence
  Description of Artificial Sequence: Synthetic peptide
  Seed: EWLKTRPILSPLTKG
ELLKARAILVPLTKG

SEQ ID NO: 209408 - protein, 15 aa, Artificial Sequence
  Description of Artificial Sequence: Synthetic peptide
  Seed: EWLKTRPILSPLTKG
ELLKARGILAPLTKG

SEQ ID NO: 209409 - protein, 15 aa, Artificial Sequence
  Description of Artificial Sequence: Synthetic peptide
  Seed: EWLKTRPILSPLTKG
ELLKARGILGPLTKG

SEQ ID NO: 209410 - protein, 15 aa, Artificial Sequence
  Description of Artificial Sequence: Synthetic peptide
  Seed: EWLKTRPILSPLTKG
ELLKARGILIPLTKG

SEQ ID NO: 209411 - protein, 15 aa, Artificial Sequence
  Description of Artificial Sequence: Synthetic peptide
  Seed: EWLKTRPILSPLTKG
ELLKARGILLPLTKG

SEQ ID NO: 209412 - protein, 15 aa, Artificial Sequence
  Description of Artificial Sequence: Synthetic peptide
  Seed: EWLKTRPILSPLTKG
ELLKARGILMPLTKG

SEQ ID NO: 209413 - protein, 15 aa, Artificial Sequence
  Description of Artificial Sequence: Synthetic peptide
  Seed: EWLKTRPILSPLTKG
ELLKARGILSPLTKG

SEQ ID NO: 209414 - protein, 15 aa, Artificial Sequence
  Description of Artificial Sequence: Synthetic peptide
  Seed: EWLKTRPILSPLTKG
ELLKARGILTPLTKG

SEQ ID NO: 209415 - protein, 15 aa, Artificial Sequence
  Description of Artificial Sequence: Synthetic peptide
  Seed: EWLKTRPILSPLTKG
ELLKARGILVPLTKG

SEQ ID NO: 209416 - protein, 15 aa, Artificial Sequence
  Description of Artificial Sequence: Synthetic peptide
  Seed: EWLKTRPILSPLTKG
ELLKARNILAPLTKG

SEQ ID NO: 209417 - protein, 15 aa, Artificial Sequence
  Description of Artificial Sequence: Synthetic peptide
  Seed: EWLKTRPILSPLTKG
ELLKARNILVPLTKG

SEQ ID NO: 209418 - protein, 15 aa, Artificial Sequence
  Description of Artificial Sequence: Synthetic peptide
  Seed: EWLKTRPILSPLTKG
ELLKARPILAPLTKG

SEQ ID NO: 209419 - protein, 15 aa, Artificial Sequence
  Description of Artificial Sequence: Synthetic peptide
  Seed: EWLKTRPILSPLTKG
ELLKARPILIPLTKG

SEQ ID NO: 209420 - protein, 15 aa, Artificial Sequence
  Description of Artificial Sequence: Synthetic peptide
  Seed: EWLKTRPILSPLTKG
ELLKARPILLPLTKG

SEQ ID NO: 209421 - protein, 15 aa, Artificial Sequence
  Description of Artificial Sequence: Synthetic peptide
  Seed: EWLKTRPILSPLTKG
ELLKARPILMPLTKG

SEQ ID NO: 209422 - protein, 15 aa, Artificial Sequence
  Description of Artificial Sequence: Synthetic peptide
  Seed: EWLKTRPILSPLTKG
ELLKARPILSPLTKG

SEQ ID NO: 209423 - protein, 15 aa, Artificial Sequence
  Description of Artificial Sequence: Synthetic peptide
  Seed: EWLKTRPILSPLTKG
ELLKARPILTPLTKG

SEQ ID NO: 209424 - protein, 15 aa, Artificial Sequence
  Description of Artificial Sequence: Synthetic peptide
  Seed: EWLKTRPILSPLTKG
ELLKARPILVPLTKG

SEQ ID NO: 209425 - protein, 15 aa, Artificial Sequence
  Description of Artificial Sequence: Synthetic peptide
  Seed: EWLKTRPILSPLTKG
ELLKARSILAPLTKG

SEQ ID NO: 209426 - protein, 15 aa, Artificial Sequence
  Description of Artificial Sequence: Synthetic peptide
  Seed: EWLKTRPILSPLTKG
ELLKARSILIPLTKG

SEQ ID NO: 209427 - protein, 15 aa, Artificial Sequence
  Description of Artificial Sequence: Synthetic peptide
  Seed: EWLKTRPILSPLTKG
ELLKARSILLPLTKG

SEQ ID NO: 209428 - protein, 15 aa, Artificial Sequence
  Description of Artificial Sequence: Synthetic peptide
  Seed: EWLKTRPILSPLTKG
ELLKARSILMPLTKG

SEQ ID NO: 209429 - protein, 15 aa, Artificial Sequence
  Description of Artificial Sequence: Synthetic peptide
  Seed: EWLKTRPILSPLTKG
ELLKARSILSPLTKG

SEQ ID NO: 209430 - protein, 15 aa, Artificial Sequence
  Description of Artificial Sequence: Synthetic peptide
  Seed: EWLKTRPILSPLTKG
ELLKARSILTPLTKG

SEQ ID NO: 209431 - protein, 15 aa, Artificial Sequence
  Description of Artificial Sequence: Synthetic peptide
  Seed: EWLKTRPILSPLTKG
ELLKARSILVPLTKG

SEQ ID NO: 209432 - protein, 15 aa, Artificial Sequence
  Description of Artificial Sequence: Synthetic peptide
  Seed: EWLKTRPILSPLTKG
ELLKARTILAPLTKG

SEQ ID NO: 209433 - protein, 15 aa, Artificial Sequence
  Description of Artificial Sequence: Synthetic peptide
  Seed: EWLKTRPILSPLTKG
ELLKARTILIPLTKG

SEQ ID NO: 209434 - protein, 15 aa, Artificial Sequence
  Description of Artificial Sequence: Synthetic peptide
  Seed: EWLKTRPILSPLTKG
ELLKARTILLPLTKG

SEQ ID NO: 209435 - protein, 15 aa, Artificial Sequence
  Description of Artificial Sequence: Synthetic peptide
  Seed: EWLKTRPILSPLTKG
ELLKARTILVPLTKG

SEQ ID NO: 209436 - protein, 15 aa, Artificial Sequence
  Description of Artificial Sequence: Synthetic peptide
  Seed: EWLKTRPILSPLTKG
ELLKCRAILSPLTKG

SEQ ID NO: 209437 - protein, 15 aa, Artificial Sequence
  Description of Artificial Sequence: Synthetic peptide
  Seed: EWLKTRPILSPLTKG
ELLKCRAILVPLTKG

SEQ ID NO: 209438 - protein, 15 aa, Artificial Sequence
  Description of Artificial Sequence: Synthetic peptide
  Seed: EWLKTRPILSPLTKG
ELLKCRGILAPLTKG

SEQ ID NO: 209439 - protein, 15 aa, Artificial Sequence
  Description of Artificial Sequence: Synthetic peptide
  Seed: EWLKTRPILSPLTKG
ELLKERAILAPLTKG

SEQ ID NO: 209440 - protein, 15 aa, Artificial Sequence
  Description of Artificial Sequence: Synthetic peptide
  Seed: EWLKTRPILSPLTKG
ELLKERAILIPLTKG

SEQ ID NO: 209441 - protein, 15 aa, Artificial Sequence
  Description of Artificial Sequence: Synthetic peptide
  Seed: EWLKTRPILSPLTKG
ELLKERAILLPLTKG

SEQ ID NO: 209442 - protein, 15 aa, Artificial Sequence
  Description of Artificial Sequence: Synthetic peptide
  Seed: EWLKTRPILSPLTKG
ELLKERAILVPLTKG

SEQ ID NO: 209443 - protein, 15 aa, Artificial Sequence
  Description of Artificial Sequence: Synthetic peptide
  Seed: EWLKTRPILSPLTKG
ELLKERGILAPLTKG

SEQ ID NO: 209444 - protein, 15 aa, Artificial Sequence
  Description of Artificial Sequence: Synthetic peptide
  Seed: EWLKTRPILSPLTKG
ELLKERGILVPLTKG

SEQ ID NO: 209445 - protein, 15 aa, Artificial Sequence
  Description of Artificial Sequence: Synthetic peptide
  Seed: EWLKTRPILSPLTKG
ELLKERSILAPLTKG

SEQ ID NO: 209446 - protein, 15 aa, Artificial Sequence
  Description of Artificial Sequence: Synthetic peptide
  Seed: EWLKTRPILSPLTKG
ELLKGRAILAPLTKG

SEQ ID NO: 209447 - protein, 15 aa, Artificial Sequence
  Description of Artificial Sequence: Synthetic peptide
  Seed: EWLKTRPILSPLTKG
ELLKGRAILIPLTKG

SEQ ID NO: 209448 - protein, 15 aa, Artificial Sequence
  Description of Artificial Sequence: Synthetic peptide
  Seed: EWLKTRPILSPLTKG
ELLKGRAILLPLTKG

SEQ ID NO: 209449 - protein, 15 aa, Artificial Sequence
  Description of Artificial Sequence: Synthetic peptide
  Seed: EWLKTRPILSPLTKG
ELLKGRAILMPLTKG

SEQ ID NO: 209450 - protein, 15 aa, Artificial Sequence
  Description of Artificial Sequence: Synthetic peptide
  Seed: EWLKTRPILSPLTKG
ELLKGRAILSPLTKG

SEQ ID NO: 209451 - protein, 15 aa, Artificial Sequence
  Description of Artificial Sequence: Synthetic peptide
  Seed: EWLKTRPILSPLTKG
ELLKGRAILTPLTKG

SEQ ID NO: 209452 - protein, 15 aa, Artificial Sequence
  Description of Artificial Sequence: Synthetic peptide
  Seed: EWLKTRPILSPLTKG
ELLKGRAILVPLTKG

SEQ ID NO: 209453 - protein, 15 aa, Artificial Sequence
  Description of Artificial Sequence: Synthetic peptide
  Seed: EWLKTRPILSPLTKG
ELLKGRGILAPLTKG

SEQ ID NO: 209454 - protein, 15 aa, Artificial Sequence
  Description of Artificial Sequence: Synthetic peptide
  Seed: EWLKTRPILSPLTKG
ELLKGRGILIPLTKG

SEQ ID NO: 209455 - protein, 15 aa, Artificial Sequence
  Description of Artificial Sequence: Synthetic peptide
  Seed: EWLKTRPILSPLTKG
ELLKGRGILLPLTKG

SEQ ID NO: 209456 - protein, 15 aa, Artificial Sequence
  Description of Artificial Sequence: Synthetic peptide
  Seed: EWLKTRPILSPLTKG
ELLKGRGILVPLTKG

SEQ ID NO: 209457 - protein, 15 aa, Artificial Sequence
  Description of Artificial Sequence: Synthetic peptide
  Seed: EWLKTRPILSPLTKG
ELLKGRPILVPLTKG

SEQ ID NO: 209458 - protein, 15 aa, Artificial Sequence
  Description of Artificial Sequence: Synthetic peptide
  Seed: EWLKTRPILSPLTKG
ELLKGRSILAPLTKG

SEQ ID NO: 209459 - protein, 15 aa, Artificial Sequence
  Description of Artificial Sequence: Synthetic peptide
  Seed: EWLKTRPILSPLTKG
ELLKGRSILIPLTKG

SEQ ID NO: 209460 - protein, 15 aa, Artificial Sequence
  Description of Artificial Sequence: Synthetic peptide
  Seed: EWLKTRPILSPLTKG
ELLKGRSILLPLTKG

SEQ ID NO: 209461 - protein, 15 aa, Artificial Sequence
  Description of Artificial Sequence: Synthetic peptide
  Seed: EWLKTRPILSPLTKG
ELLKGRSILVPLTKG

SEQ ID NO: 209462 - protein, 15 aa, Artificial Sequence
  Description of Artificial Sequence: Synthetic peptide
  Seed: EWLKTRPILSPLTKG
ELLKIRAILIPLTKG

SEQ ID NO: 209463 - protein, 15 aa, Artificial Sequence
  Description of Artificial Sequence: Synthetic peptide
  Seed: EWLKTRPILSPLTKG
ELLKIRAILLPLTKG

SEQ ID NO: 209464 - protein, 15 aa, Artificial Sequence
  Description of Artificial Sequence: Synthetic peptide
  Seed: EWLKTRPILSPLTKG
ELLKIRAILMPLTKG

SEQ ID NO: 209465 - protein, 15 aa, Artificial Sequence
  Description of Artificial Sequence: Synthetic peptide
  Seed: EWLKTRPILSPLTKG
ELLKIRGILIPLTKG

SEQ ID NO: 209466 - protein, 15 aa, Artificial Sequence
  Description of Artificial Sequence: Synthetic peptide
  Seed: EWLKTRPILSPLTKG
ELLKIRGILLPLTKG

SEQ ID NO: 209467 - protein, 15 aa, Artificial Sequence
  Description of Artificial Sequence: Synthetic peptide
  Seed: EWLKTRPILSPLTKG
ELLKIRGILMPLTKG

SEQ ID NO: 209468 - protein, 15 aa, Artificial Sequence
  Description of Artificial Sequence: Synthetic peptide
  Seed: EWLKTRPILSPLTKG
ELLKIRGILVPLTKG

SEQ ID NO: 209469 - protein, 15 aa, Artificial Sequence
  Description of Artificial Sequence: Synthetic peptide
  Seed: EWLKTRPILSPLTKG
ELLKIRKILAPLTKG

SEQ ID NO: 209470 - protein, 15 aa, Artificial Sequence
  Description of Artificial Sequence: Synthetic peptide
  Seed: EWLKTRPILSPLTKG
ELLKIRKILGPLTKG

SEQ ID NO: 209471 - protein, 15 aa, Artificial Sequence
  Description of Artificial Sequence: Synthetic peptide
  Seed: EWLKTRPILSPLTKG
ELLKIRKILSPLTKG

SEQ ID NO: 209472 - protein, 15 aa, Artificial Sequence
  Description of Artificial Sequence: Synthetic peptide
  Seed: EWLKTRPILSPLTKG
ELLKIRNILLPLTKG

SEQ ID NO: 209473 - protein, 15 aa, Artificial Sequence
  Description of Artificial Sequence: Synthetic peptide
  Seed: EWLKTRPILSPLTKG
ELLKIRPILIPLTKG

SEQ ID NO: 209474 - protein, 15 aa, Artificial Sequence
  Description of Artificial Sequence: Synthetic peptide
  Seed: EWLKTRPILSPLTKG
ELLKIRPILLPLTKG

SEQ ID NO: 209475 - protein, 15 aa, Artificial Sequence
  Description of Artificial Sequence: Synthetic peptide
  Seed: EWLKTRPILSPLTKG
ELLKIRPILMPLTKG

SEQ ID NO: 209476 - protein, 15 aa, Artificial Sequence
  Description of Artificial Sequence: Synthetic peptide
  Seed: EWLKTRPILSPLTKG
ELLKIRRILAPLTKG

SEQ ID NO: 209477 - protein, 15 aa, Artificial Sequence
  Description of Artificial Sequence: Synthetic peptide
  Seed: EWLKTRPILSPLTKG
ELLKIRRILGPLTKG

SEQ ID NO: 209478 - protein, 15 aa, Artificial Sequence
  Description of Artificial Sequence: Synthetic peptide
  Seed: EWLKTRPILSPLTKG
ELLKIRRILQPLTKG

SEQ ID NO: 209479 - protein, 15 aa, Artificial Sequence
  Description of Artificial Sequence: Synthetic peptide
  Seed: EWLKTRPILSPLTKG
ELLKIRRILSPLTKG

SEQ ID NO: 209480 - protein, 15 aa, Artificial Sequence
  Description of Artificial Sequence: Synthetic peptide
  Seed: EWLKTRPILSPLTKG
ELLKIRSILLPLTKG

SEQ ID NO: 209481 - protein, 15 aa, Artificial Sequence
  Description of Artificial Sequence: Synthetic peptide
  Seed: EWLKTRPILSPLTKG
ELLKLRAILCPLTKG

SEQ ID NO: 209482 - protein, 15 aa, Artificial Sequence
  Description of Artificial Sequence: Synthetic peptide
  Seed: EWLKTRPILSPLTKG
ELLKLRAILIPLTKG

SEQ ID NO: 209483 - protein, 15 aa, Artificial Sequence
  Description of Artificial Sequence: Synthetic peptide
  Seed: EWLKTRPILSPLTKG
ELLKLRAILLPLTKG

SEQ ID NO: 209484 - protein, 15 aa, Artificial Sequence
  Description of Artificial Sequence: Synthetic peptide
  Seed: EWLKTRPILSPLTKG
ELLKLRAILMPLTKG

SEQ ID NO: 209485 - protein, 15 aa, Artificial Sequence
  Description of Artificial Sequence: Synthetic peptide
  Seed: EWLKTRPILSPLTKG
ELLKLRAILVPLTKG

SEQ ID NO: 209486 - protein, 15 aa, Artificial Sequence
  Description of Artificial Sequence: Synthetic peptide
  Seed: EWLKTRPILSPLTKG
ELLKLRGILAPLTKG

SEQ ID NO: 209487 - protein, 15 aa, Artificial Sequence
  Description of Artificial Sequence: Synthetic peptide
  Seed: EWLKTRPILSPLTKG
ELLKLRGILCPLTKG

SEQ ID NO: 209488 - protein, 15 aa, Artificial Sequence
  Description of Artificial Sequence: Synthetic peptide
  Seed: EWLKTRPILSPLTKG
ELLKLRGILIPLTKG

SEQ ID NO: 209489 - protein, 15 aa, Artificial Sequence
  Description of Artificial Sequence: Synthetic peptide
  Seed: EWLKTRPILSPLTKG
ELLKLRGILLPLTKG

SEQ ID NO: 209490 - protein, 15 aa, Artificial Sequence
  Description of Artificial Sequence: Synthetic peptide
  Seed: EWLKTRPILSPLTKG
ELLKLRGILMPLTKG

SEQ ID NO: 209491 - protein, 15 aa, Artificial Sequence
  Description of Artificial Sequence: Synthetic peptide
  Seed: EWLKTRPILSPLTKG
ELLKLRGILSPLTKG

SEQ ID NO: 209492 - protein, 15 aa, Artificial Sequence
  Description of Artificial Sequence: Synthetic peptide
  Seed: EWLKTRPILSPLTKG
ELLKLRGILTPLTKG

SEQ ID NO: 209493 - protein, 15 aa, Artificial Sequence
  Description of Artificial Sequence: Synthetic peptide
  Seed: EWLKTRPILSPLTKG
ELLKLRGILVPLTKG

SEQ ID NO: 209494 - protein, 15 aa, Artificial Sequence
  Description of Artificial Sequence: Synthetic peptide
  Seed: EWLKTRPILSPLTKG
ELLKLRKILAPLTKG

SEQ ID NO: 209495 - protein, 15 aa, Artificial Sequence
  Description of Artificial Sequence: Synthetic peptide
  Seed: EWLKTRPILSPLTKG
ELLKLRKILSPLTKG

SEQ ID NO: 209496 - protein, 15 aa, Artificial Sequence
  Description of Artificial Sequence: Synthetic peptide
  Seed: EWLKTRPILSPLTKG
ELLKLRNILIPLTKG

SEQ ID NO: 209497 - protein, 15 aa, Artificial Sequence
  Description of Artificial Sequence: Synthetic peptide
  Seed: EWLKTRPILSPLTKG
ELLKLRNILLPLTKG

SEQ ID NO: 209498 - protein, 15 aa, Artificial Sequence
  Description of Artificial Sequence: Synthetic peptide
  Seed: EWLKTRPILSPLTKG
ELLKLRNILMPLTKG

SEQ ID NO: 209499 - protein, 15 aa, Artificial Sequence
  Description of Artificial Sequence: Synthetic peptide
  Seed: EWLKTRPILSPLTKG
ELLKLRNILVPLTKG

SEQ ID NO: 209500 - protein, 15 aa, Artificial Sequence
  Description of Artificial Sequence: Synthetic peptide
  Seed: EWLKTRPILSPLTKG
ELLKLRPILCPLTKG

SEQ ID NO: 209501 - protein, 15 aa, Artificial Sequence
  Description of Artificial Sequence: Synthetic peptide
  Seed: EWLKTRPILSPLTKG
ELLKLRPILIPLTKG

SEQ ID NO: 209502 - protein, 15 aa, Artificial Sequence
  Description of Artificial Sequence: Synthetic peptide
  Seed: EWLKTRPILSPLTKG
ELLKLRPILLPLTKG

SEQ ID NO: 209503 - protein, 15 aa, Artificial Sequence
  Description of Artificial Sequence: Synthetic peptide
  Seed: EWLKTRPILSPLTKG
ELLKLRPILMPLTKG

SEQ ID NO: 209504 - protein, 15 aa, Artificial Sequence
  Description of Artificial Sequence: Synthetic peptide
  Seed: EWLKTRPILSPLTKG
ELLKLRPILVPLTKG

SEQ ID NO: 209505 - protein, 15 aa, Artificial Sequence
  Description of Artificial Sequence: Synthetic peptide
  Seed: EWLKTRPILSPLTKG
ELLKLRRILAPLTKG

SEQ ID NO: 209506 - protein, 15 aa, Artificial Sequence
  Description of Artificial Sequence: Synthetic peptide
  Seed: EWLKTRPILSPLTKG
ELLKLRRILGPLTKG

SEQ ID NO: 209507 - protein, 15 aa, Artificial Sequence
  Description of Artificial Sequence: Synthetic peptide
  Seed: EWLKTRPILSPLTKG
ELLKLRRILSPLTKG

SEQ ID NO: 209508 - protein, 15 aa, Artificial Sequence
  Description of Artificial Sequence: Synthetic peptide
  Seed: EWLKTRPILSPLTKG
ELLKLRSILCPLTKG

SEQ ID NO: 209509 - protein, 15 aa, Artificial Sequence
  Description of Artificial Sequence: Synthetic peptide
  Seed: EWLKTRPILSPLTKG
ELLKLRSILIPLTKG

SEQ ID NO: 209510 - protein, 15 aa, Artificial Sequence
  Description of Artificial Sequence: Synthetic peptide
  Seed: EWLKTRPILSPLTKG
ELLKLRSILLPLTKG

SEQ ID NO: 209511 - protein, 15 aa, Artificial Sequence
  Description of Artificial Sequence: Synthetic peptide
  Seed: EWLKTRPILSPLTKG
ELLKLRSILMPLTKG

SEQ ID NO: 209512 - protein, 15 aa, Artificial Sequence
  Description of Artificial Sequence: Synthetic peptide
  Seed: EWLKTRPILSPLTKG
ELLKLRSILVPLTKG

SEQ ID NO: 209513 - protein, 15 aa, Artificial Sequence
  Description of Artificial Sequence: Synthetic peptide
  Seed: EWLKTRPILSPLTKG
ELLKLRTILIPLTKG

SEQ ID NO: 209514 - protein, 15 aa, Artificial Sequence
  Description of Artificial Sequence: Synthetic peptide
  Seed: EWLKTRPILSPLTKG
ELLKLRTILLPLTKG

SEQ ID NO: 209515 - protein, 15 aa, Artificial Sequence
  Description of Artificial Sequence: Synthetic peptide
  Seed: EWLKTRPILSPLTKG
ELLKLRTILMPLTKG

SEQ ID NO: 209516 - protein, 15 aa, Artificial Sequence
  Description of Artificial Sequence: Synthetic peptide
  Seed: EWLKTRPILSPLTKG
ELLKLRTILVPLTKG

SEQ ID NO: 209517 - protein, 15 aa, Artificial Sequence
  Description of Artificial Sequence: Synthetic peptide
  Seed: EWLKTRPILSPLTKG
ELLKMRAILCPLTKG

SEQ ID NO: 209518 - protein, 15 aa, Artificial Sequence
  Description of Artificial Sequence: Synthetic peptide
  Seed: EWLKTRPILSPLTKG
ELLKMRAILFPLTKG

SEQ ID NO: 209519 - protein, 15 aa, Artificial Sequence
  Description of Artificial Sequence: Synthetic peptide
  Seed: EWLKTRPILSPLTKG
ELLKMRAILIPLTKG

SEQ ID NO: 209520 - protein, 15 aa, Artificial Sequence
  Description of Artificial Sequence: Synthetic peptide
  Seed: EWLKTRPILSPLTKG
ELLKMRAILLPLTKG

SEQ ID NO: 209521 - protein, 15 aa, Artificial Sequence
  Description of Artificial Sequence: Synthetic peptide
  Seed: EWLKTRPILSPLTKG
ELLKMRAILMPLTKG

SEQ ID NO: 209522 - protein, 15 aa, Artificial Sequence
  Description of Artificial Sequence: Synthetic peptide
  Seed: EWLKTRPILSPLTKG
ELLKMRAILRPLTKG

SEQ ID NO: 209523 - protein, 15 aa, Artificial Sequence
  Description of Artificial Sequence: Synthetic peptide
  Seed: EWLKTRPILSPLTKG
ELLKMRAILTPLTKG

SEQ ID NO: 209524 - protein, 15 aa, Artificial Sequence
  Description of Artificial Sequence: Synthetic peptide
  Seed: EWLKTRPILSPLTKG
ELLKMRAILVPLTKG

SEQ ID NO: 209525 - protein, 15 aa, Artificial Sequence
  Description of Artificial Sequence: Synthetic peptide
  Seed: EWLKTRPILSPLTKG
ELLKMRGILAPLTKG

SEQ ID NO: 209526 - protein, 15 aa, Artificial Sequence
  Description of Artificial Sequence: Synthetic peptide
  Seed: EWLKTRPILSPLTKG
ELLKMRGILCPLTKG

SEQ ID NO: 209527 - protein, 15 aa, Artificial Sequence
  Description of Artificial Sequence: Synthetic peptide
  Seed: EWLKTRPILSPLTKG
ELLKMRGILGPLTKG

SEQ ID NO: 209528 - protein, 15 aa, Artificial Sequence
  Description of Artificial Sequence: Synthetic peptide
  Seed: EWLKTRPILSPLTKG
ELLKMRGILIPLTKG

SEQ ID NO: 209529 - protein, 15 aa, Artificial Sequence
  Description of Artificial Sequence: Synthetic peptide
  Seed: EWLKTRPILSPLTKG
ELLKMRGILLPLTKG

SEQ ID NO: 209530 - protein, 15 aa, Artificial Sequence
  Description of Artificial Sequence: Synthetic peptide
  Seed: EWLKTRPILSPLTKG
ELLKMRGILMPLTKG

SEQ ID NO: 209531 - protein, 15 aa, Artificial Sequence
  Description of Artificial Sequence: Synthetic peptide
  Seed: EWLKTRPILSPLTKG
ELLKMRGILNPLTKG

SEQ ID NO: 209532 - protein, 15 aa, Artificial Sequence
  Description of Artificial Sequence: Synthetic peptide
  Seed: EWLKTRPILSPLTKG
ELLKMRGILSPLTKG

SEQ ID NO: 209533 - protein, 15 aa, Artificial Sequence
  Description of Artificial Sequence: Synthetic peptide
  Seed: EWLKTRPILSPLTKG
ELLKMRGILTPLTKG

SEQ ID NO: 209534 - protein, 15 aa, Artificial Sequence
  Description of Artificial Sequence: Synthetic peptide
  Seed: EWLKTRPILSPLTKG
ELLKMRGILVPLTKG

SEQ ID NO: 209535 - protein, 15 aa, Artificial Sequence
  Description of Artificial Sequence: Synthetic peptide
  Seed: EWLKTRPILSPLTKG
ELLKMRKILAPLTKG

SEQ ID NO: 209536 - protein, 15 aa, Artificial Sequence
  Description of Artificial Sequence: Synthetic peptide
  Seed: EWLKTRPILSPLTKG
ELLKMRKILGPLTKG

SEQ ID NO: 209537 - protein, 15 aa, Artificial Sequence
  Description of Artificial Sequence: Synthetic peptide
  Seed: EWLKTRPILSPLTKG
ELLKMRKILSPLTKG

SEQ ID NO: 209538 - protein, 15 aa, Artificial Sequence
  Description of Artificial Sequence: Synthetic peptide
  Seed: EWLKTRPILSPLTKG
ELLKMRNILIPLTKG

SEQ ID NO: 209539 - protein, 15 aa, Artificial Sequence
  Description of Artificial Sequence: Synthetic peptide
  Seed: EWLKTRPILSPLTKG
ELLKMRNILLPLTKG

SEQ ID NO: 209540 - protein, 15 aa, Artificial Sequence
  Description of Artificial Sequence: Synthetic peptide
  Seed: EWLKTRPILSPLTKG
ELLKMRNILMPLTKG

SEQ ID NO: 209541 - protein, 15 aa, Artificial Sequence
  Description of Artificial Sequence: Synthetic peptide
  Seed: EWLKTRPILSPLTKG
ELLKMRNILVPLTKG

SEQ ID NO: 209542 - protein, 15 aa, Artificial Sequence
  Description of Artificial Sequence: Synthetic peptide
  Seed: EWLKTRPILSPLTKG
ELLKMRPILCPLTKG

SEQ ID NO: 209543 - protein, 15 aa, Artificial Sequence
  Description of Artificial Sequence: Synthetic peptide
  Seed: EWLKTRPILSPLTKG
ELLKMRPILIPLTKG

SEQ ID NO: 209544 - protein, 15 aa, Artificial Sequence
  Description of Artificial Sequence: Synthetic peptide
  Seed: EWLKTRPILSPLTKG
ELLKMRPILLPLTKG

SEQ ID NO: 209545 - protein, 15 aa, Artificial Sequence
  Description of Artificial Sequence: Synthetic peptide
  Seed: EWLKTRPILSPLTKG
ELLKMRPILMPLTKG

SEQ ID NO: 209546 - protein, 15 aa, Artificial Sequence
  Description of Artificial Sequence: Synthetic peptide
  Seed: EWLKTRPILSPLTKG
ELLKMRPILTPLTKG

SEQ ID NO: 209547 - protein, 15 aa, Artificial Sequence
  Description of Artificial Sequence: Synthetic peptide
  Seed: EWLKTRPILSPLTKG
ELLKMRPILVPLTKG

SEQ ID NO: 209548 - protein, 15 aa, Artificial Sequence
  Description of Artificial Sequence: Synthetic peptide
  Seed: EWLKTRPILSPLTKG
ELLKMRRILAPLTKG

SEQ ID NO: 209549 - protein, 15 aa, Artificial Sequence
  Description of Artificial Sequence: Synthetic peptide
  Seed: EWLKTRPILSPLTKG
ELLKMRRILGPLTKG

SEQ ID NO: 209550 - protein, 15 aa, Artificial Sequence
  Description of Artificial Sequence: Synthetic peptide
  Seed: EWLKTRPILSPLTKG
ELLKMRRILQPLTKG

SEQ ID NO: 209551 - protein, 15 aa, Artificial Sequence
  Description of Artificial Sequence: Synthetic peptide
  Seed: EWLKTRPILSPLTKG
ELLKMRRILSPLTKG

SEQ ID NO: 209552 - protein, 15 aa, Artificial Sequence
  Description of Artificial Sequence: Synthetic peptide
  Seed: EWLKTRPILSPLTKG
ELLKMRSILCPLTKG

SEQ ID NO: 209553 - protein, 15 aa, Artificial Sequence
  Description of Artificial Sequence: Synthetic peptide
  Seed: EWLKTRPILSPLTKG
ELLKMRSILIPLTKG

SEQ ID NO: 209554 - protein, 15 aa, Artificial Sequence
  Description of Artificial Sequence: Synthetic peptide
  Seed: EWLKTRPILSPLTKG
ELLKMRSILLPLTKG

SEQ ID NO: 209555 - protein, 15 aa, Artificial Sequence
  Description of Artificial Sequence: Synthetic peptide
  Seed: EWLKTRPILSPLTKG
ELLKMRSILMPLTKG

SEQ ID NO: 209556 - protein, 15 aa, Artificial Sequence
  Description of Artificial Sequence: Synthetic peptide
  Seed: EWLKTRPILSPLTKG
ELLKMRSILVPLTKG

SEQ ID NO: 209557 - protein, 15 aa, Artificial Sequence
  Description of Artificial Sequence: Synthetic peptide
  Seed: EWLKTRPILSPLTKG
ELLKMRTILIPLTKG

SEQ ID NO: 209558 - protein, 15 aa, Artificial Sequence
  Description of Artificial Sequence: Synthetic peptide
  Seed: EWLKTRPILSPLTKG
ELLKMRTILLPLTKG

SEQ ID NO: 209559 - protein, 15 aa, Artificial Sequence
  Description of Artificial Sequence: Synthetic peptide
  Seed: EWLKTRPILSPLTKG
ELLKMRTILMPLTKG

SEQ ID NO: 209560 - protein, 15 aa, Artificial Sequence
  Description of Artificial Sequence: Synthetic peptide
  Seed: EWLKTRPILSPLTKG
ELLKMRTILVPLTKG

SEQ ID NO: 209561 - protein, 15 aa, Artificial Sequence
  Description of Artificial Sequence: Synthetic peptide
  Seed: EWLKTRPILSPLTKG
ELLKNRAILAPLTKG

SEQ ID NO: 209562 - protein, 15 aa, Artificial Sequence
  Description of Artificial Sequence: Synthetic peptide
  Seed: EWLKTRPILSPLTKG
ELLKQRAILAPLTKG

SEQ ID NO: 209563 - protein, 15 aa, Artificial Sequence
  Description of Artificial Sequence: Synthetic peptide
  Seed: EWLKTRPILSPLTKG
ELLKQRAILGPLTKG

SEQ ID NO: 209564 - protein, 15 aa, Artificial Sequence
  Description of Artificial Sequence: Synthetic peptide
  Seed: EWLKTRPILSPLTKG
ELLKQRAILIPLTKG

SEQ ID NO: 209565 - protein, 15 aa, Artificial Sequence
  Description of Artificial Sequence: Synthetic peptide
  Seed: EWLKTRPILSPLTKG
ELLKQRAILLPLTKG

SEQ ID NO: 209566 - protein, 15 aa, Artificial Sequence
  Description of Artificial Sequence: Synthetic peptide
  Seed: EWLKTRPILSPLTKG
ELLKQRAILMPLTKG

SEQ ID NO: 209567 - protein, 15 aa, Artificial Sequence
  Description of Artificial Sequence: Synthetic peptide
  Seed: EWLKTRPILSPLTKG
ELLKQRAILSPLTKG

SEQ ID NO: 209568 - protein, 15 aa, Artificial Sequence
  Description of Artificial Sequence: Synthetic peptide
  Seed: EWLKTRPILSPLTKG
ELLKQRAILTPLTKG

SEQ ID NO: 209569 - protein, 15 aa, Artificial Sequence
  Description of Artificial Sequence: Synthetic peptide
  Seed: EWLKTRPILSPLTKG
ELLKQRAILVPLTKG

SEQ ID NO: 209570 - protein, 15 aa, Artificial Sequence
  Description of Artificial Sequence: Synthetic peptide
  Seed: EWLKTRPILSPLTKG
ELLKQRGILAPLTKG

SEQ ID NO: 209571 - protein, 15 aa, Artificial Sequence
  Description of Artificial Sequence: Synthetic peptide
  Seed: EWLKTRPILSPLTKG
ELLKQRGILIPLTKG

SEQ ID NO: 209572 - protein, 15 aa, Artificial Sequence
  Description of Artificial Sequence: Synthetic peptide
  Seed: EWLKTRPILSPLTKG
ELLKQRGILLPLTKG

SEQ ID NO: 209573 - protein, 15 aa, Artificial Sequence
  Description of Artificial Sequence: Synthetic peptide
  Seed: EWLKTRPILSPLTKG
ELLKQRGILVPLTKG

SEQ ID NO: 209574 - protein, 15 aa, Artificial Sequence
  Description of Artificial Sequence: Synthetic peptide
  Seed: EWLKTRPILSPLTKG
ELLKQRPILAPLTKG

SEQ ID NO: 209575 - protein, 15 aa, Artificial Sequence
  Description of Artificial Sequence: Synthetic peptide
  Seed: EWLKTRPILSPLTKG
ELLKQRPILVPLTKG

SEQ ID NO: 209576 - protein, 15 aa, Artificial Sequence
  Description of Artificial Sequence: Synthetic peptide
  Seed: EWLKTRPILSPLTKG
ELLKQRSILAPLTKG

SEQ ID NO: 209577 - protein, 15 aa, Artificial Sequence
  Description of Artificial Sequence: Synthetic peptide
  Seed: EWLKTRPILSPLTKG
ELLKQRSILIPLTKG

SEQ ID NO: 209578 - protein, 15 aa, Artificial Sequence
  Description of Artificial Sequence: Synthetic peptide
  Seed: EWLKTRPILSPLTKG
ELLKQRSILLPLTKG

SEQ ID NO: 209579 - protein, 15 aa, Artificial Sequence
  Description of Artificial Sequence: Synthetic peptide
  Seed: EWLKTRPILSPLTKG
ELLKQRSILVPLTKG

SEQ ID NO: 209580 - protein, 15 aa, Artificial Sequence
  Description of Artificial Sequence: Synthetic peptide
  Seed: EWLKTRPILSPLTKG
ELLKSRAILAPLTKG

SEQ ID NO: 209581 - protein, 15 aa, Artificial Sequence
  Description of Artificial Sequence: Synthetic peptide
  Seed: EWLKTRPILSPLTKG
ELLKSRAILIPLTKG

SEQ ID NO: 209582 - protein, 15 aa, Artificial Sequence
  Description of Artificial Sequence: Synthetic peptide
  Seed: EWLKTRPILSPLTKG
ELLKSRAILLPLTKG

SEQ ID NO: 209583 - protein, 15 aa, Artificial Sequence
  Description of Artificial Sequence: Synthetic peptide
  Seed: EWLKTRPILSPLTKG
ELLKSRAILMPLTKG

SEQ ID NO: 209584 - protein, 15 aa, Artificial Sequence
  Description of Artificial Sequence: Synthetic peptide
  Seed: EWLKTRPILSPLTKG
ELLKSRAILSPLTKG

SEQ ID NO: 209585 - protein, 15 aa, Artificial Sequence
  Description of Artificial Sequence: Synthetic peptide
  Seed: EWLKTRPILSPLTKG
ELLKSRAILTPLTKG

SEQ ID NO: 209586 - protein, 15 aa, Artificial Sequence
  Description of Artificial Sequence: Synthetic peptide
  Seed: EWLKTRPILSPLTKG
ELLKSRAILVPLTKG

SEQ ID NO: 209587 - protein, 15 aa, Artificial Sequence
  Description of Artificial Sequence: Synthetic peptide
  Seed: EWLKTRPILSPLTKG
ELLKSRGILAPLTKG

SEQ ID NO: 209588 - protein, 15 aa, Artificial Sequence
  Description of Artificial Sequence: Synthetic peptide
  Seed: EWLKTRPILSPLTKG
ELLKSRGILIPLTKG

SEQ ID NO: 209589 - protein, 15 aa, Artificial Sequence
  Description of Artificial Sequence: Synthetic peptide
  Seed: EWLKTRPILSPLTKG
ELLKSRGILLPLTKG

SEQ ID NO: 209590 - protein, 15 aa, Artificial Sequence
  Description of Artificial Sequence: Synthetic peptide
  Seed: EWLKTRPILSPLTKG
ELLKSRGILVPLTKG

SEQ ID NO: 209591 - protein, 15 aa, Artificial Sequence
  Description of Artificial Sequence: Synthetic peptide
  Seed: EWLKTRPILSPLTKG
ELLKSRPILIPLTKG

SEQ ID NO: 209592 - protein, 15 aa, Artificial Sequence
  Description of Artificial Sequence: Synthetic peptide
  Seed: EWLKTRPILSPLTKG
ELLKSRPILVPLTKG

SEQ ID NO: 209593 - protein, 15 aa, Artificial Sequence
  Description of Artificial Sequence: Synthetic peptide
  Seed: EWLKTRPILSPLTKG
ELLKSRSILIPLTKG

SEQ ID NO: 209594 - protein, 15 aa, Artificial Sequence
  Description of Artificial Sequence: Synthetic peptide
  Seed: EWLKTRPILSPLTKG
ELLKSRSILLPLTKG

SEQ ID NO: 209595 - protein, 15 aa, Artificial Sequence
  Description of Artificial Sequence: Synthetic peptide
  Seed: EWLKTRPILSPLTKG
ELLKSRSILVPLTKG

SEQ ID NO: 209596 - protein, 15 aa, Artificial Sequence
  Description of Artificial Sequence: Synthetic peptide
  Seed: EWLKTRPILSPLTKG
ELLKTRAILAPLTKG

SEQ ID NO: 209597 - protein, 15 aa, Artificial Sequence
  Description of Artificial Sequence: Synthetic peptide
  Seed: EWLKTRPILSPLTKG
ELLKTRAILIPLTKG

SEQ ID NO: 209598 - protein, 15 aa, Artificial Sequence
  Description of Artificial Sequence: Synthetic peptide
  Seed: EWLKTRPILSPLTKG
ELLKTRAILLPLTKG

SEQ ID NO: 209599 - protein, 15 aa, Artificial Sequence
  Description of Artificial Sequence: Synthetic peptide
  Seed: EWLKTRPILSPLTKG
ELLKTRAILVPLTKG

SEQ ID NO: 209600 - protein, 15 aa, Artificial Sequence
  Description of Artificial Sequence: Synthetic peptide
  Seed: EWLKTRPILSPLTKG
ELLKTRGILAPLTKG

SEQ ID NO: 209601 - protein, 15 aa, Artificial Sequence
  Description of Artificial Sequence: Synthetic peptide
  Seed: EWLKTRPILSPLTKG
ELLKTRGILIPLTKG

SEQ ID NO: 209602 - protein, 15 aa, Artificial Sequence
  Description of Artificial Sequence: Synthetic peptide
  Seed: EWLKTRPILSPLTKG
ELLKTRGILVPLTKG

SEQ ID NO: 209603 - protein, 15 aa, Artificial Sequence
  Description of Artificial Sequence: Synthetic peptide
  Seed: EWLKTRPILSPLTKG
ELLKTRPILIPLTKG

SEQ ID NO: 209604 - protein, 15 aa, Artificial Sequence
  Description of Artificial Sequence: Synthetic peptide
  Seed: EWLKTRPILSPLTKG
ELLKTRPILLPLTKG

SEQ ID NO: 209605 - protein, 15 aa, Artificial Sequence
  Description of Artificial Sequence: Synthetic peptide
  Seed: EWLKTRPILSPLTKG
ELLKTRPILVPLTKG

SEQ ID NO: 209606 - protein, 15 aa, Artificial Sequence
  Description of Artificial Sequence: Synthetic peptide
  Seed: EWLKTRPILSPLTKG
ELLKTRSILIPLTKG

SEQ ID NO: 209607 - protein, 15 aa, Artificial Sequence
  Description of Artificial Sequence: Synthetic peptide
  Seed: EWLKTRPILSPLTKG
ELLKTRSILLPLTKG

SEQ ID NO: 209608 - protein, 15 aa, Artificial Sequence
  Description of Artificial Sequence: Synthetic peptide
  Seed: EWLKTRPILSPLTKG
ELLKTRSILMPLTKG

SEQ ID NO: 209609 - protein, 15 aa, Artificial Sequence
  Description of Artificial Sequence: Synthetic peptide
  Seed: EWLKTRPILSPLTKG
ELLKTRSILVPLTKG

SEQ ID NO: 209610 - protein, 15 aa, Artificial Sequence
  Description of Artificial Sequence: Synthetic peptide
  Seed: EWLKTRPILSPLTKG
ELLKTRTILIPLTKG

SEQ ID NO: 209611 - protein, 15 aa, Artificial Sequence
  Description of Artificial Sequence: Synthetic peptide
  Seed: EWLKTRPILSPLTKG
ELLKVRAILIPLTKG

SEQ ID NO: 209612 - protein, 15 aa, Artificial Sequence
  Description of Artificial Sequence: Synthetic peptide
  Seed: EWLKTRPILSPLTKG
ELLKVRAILLPLTKG

SEQ ID NO: 209613 - protein, 15 aa, Artificial Sequence
  Description of Artificial Sequence: Synthetic peptide
  Seed: EWLKTRPILSPLTKG
ELLKVRAILMPLTKG

SEQ ID NO: 209614 - protein, 15 aa, Artificial Sequence
  Description of Artificial Sequence: Synthetic peptide
  Seed: EWLKTRPILSPLTKG
ELLKVRAILVPLTKG

SEQ ID NO: 209615 - protein, 15 aa, Artificial Sequence
  Description of Artificial Sequence: Synthetic peptide
  Seed: EWLKTRPILSPLTKG
ELLKVRGILIPLTKG

SEQ ID NO: 209616 - protein, 15 aa, Artificial Sequence
  Description of Artificial Sequence: Synthetic peptide
  Seed: EWLKTRPILSPLTKG
ELLKVRGILLPLTKG

SEQ ID NO: 209617 - protein, 15 aa, Artificial Sequence
  Description of Artificial Sequence: Synthetic peptide
  Seed: EWLKTRPILSPLTKG
ELLKVRGILMPLTKG

SEQ ID NO: 209618 - protein, 15 aa, Artificial Sequence
  Description of Artificial Sequence: Synthetic peptide
  Seed: EWLKTRPILSPLTKG
ELLKVRGILVPLTKG

SEQ ID NO: 209619 - protein, 15 aa, Artificial Sequence
  Description of Artificial Sequence: Synthetic peptide
  Seed: EWLKTRPILSPLTKG
ELLKVRPILIPLTKG

SEQ ID NO: 209620 - protein, 15 aa, Artificial Sequence
  Description of Artificial Sequence: Synthetic peptide
  Seed: EWLKTRPILSPLTKG
ELLKVRPILLPLTKG

SEQ ID NO: 209621 - protein, 15 aa, Artificial Sequence
  Description of Artificial Sequence: Synthetic peptide
  Seed: EWLKTRPILSPLTKG
ELLKVRPILVPLTKG

SEQ ID NO: 209622 - protein, 15 aa, Artificial Sequence
  Description of Artificial Sequence: Synthetic peptide
  Seed: EWLKTRPILSPLTKG
ELLKVRRILAPLTKG

SEQ ID NO: 209623 - protein, 15 aa, Artificial Sequence
  Description of Artificial Sequence: Synthetic peptide
  Seed: EWLKTRPILSPLTKG
ELLKVRRILGPLTKG

SEQ ID NO: 209624 - protein, 15 aa, Artificial Sequence
  Description of Artificial Sequence: Synthetic peptide
  Seed: EWLKTRPILSPLTKG
ELLKVRRILSPLTKG

SEQ ID NO: 209625 - protein, 15 aa, Artificial Sequence
  Description of Artificial Sequence: Synthetic peptide
  Seed: EWLKTRPILSPLTKG
ELLKVRSILLPLTKG

SEQ ID NO: 209626 - protein, 15 aa, Artificial Sequence
  Description of Artificial Sequence: Synthetic peptide
  Seed: EWLKTRPILSPLTKG
EMLKARAILAPLTKG

SEQ ID NO: 209627 - protein, 15 aa, Artificial Sequence
  Description of Artificial Sequence: Synthetic peptide
  Seed: EWLKTRPILSPLTKG
EMLKARAILIPLTKG

SEQ ID NO: 209628 - protein, 15 aa, Artificial Sequence
  Description of Artificial Sequence: Synthetic peptide
  Seed: EWLKTRPILSPLTKG
EMLKARAILLPLTKG

SEQ ID NO: 209629 - protein, 15 aa, Artificial Sequence
  Description of Artificial Sequence: Synthetic peptide
  Seed: EWLKTRPILSPLTKG
EMLKARAILMPLTKG

SEQ ID NO: 209630 - protein, 15 aa, Artificial Sequence
  Description of Artificial Sequence: Synthetic peptide
  Seed: EWLKTRPILSPLTKG
EMLKARAILSPLTKG

SEQ ID NO: 209631 - protein, 15 aa, Artificial Sequence
  Description of Artificial Sequence: Synthetic peptide
  Seed: EWLKTRPILSPLTKG
EMLKARAILTPLTKG

SEQ ID NO: 209632 - protein, 15 aa, Artificial Sequence
  Description of Artificial Sequence: Synthetic peptide
  Seed: EWLKTRPILSPLTKG
EMLKARAILVPLTKG

SEQ ID NO: 209633 - protein, 15 aa, Artificial Sequence
  Description of Artificial Sequence: Synthetic peptide
  Seed: EWLKTRPILSPLTKG
EMLKARGILAPLTKG

SEQ ID NO: 209634 - protein, 15 aa, Artificial Sequence
  Description of Artificial Sequence: Synthetic peptide
  Seed: EWLKTRPILSPLTKG
EMLKARGILIPLTKG

SEQ ID NO: 209635 - protein, 15 aa, Artificial Sequence
  Description of Artificial Sequence: Synthetic peptide
  Seed: EWLKTRPILSPLTKG
EMLKARGILLPLTKG

SEQ ID NO: 209636 - protein, 15 aa, Artificial Sequence
  Description of Artificial Sequence: Synthetic peptide
  Seed: EWLKTRPILSPLTKG
EMLKARGILMPLTKG

SEQ ID NO: 209637 - protein, 15 aa, Artificial Sequence
  Description of Artificial Sequence: Synthetic peptide
  Seed: EWLKTRPILSPLTKG
EMLKARGILTPLTKG

SEQ ID NO: 209638 - protein, 15 aa, Artificial Sequence
  Description of Artificial Sequence: Synthetic peptide
  Seed: EWLKTRPILSPLTKG
EMLKARGILVPLTKG

SEQ ID NO: 209639 - protein, 15 aa, Artificial Sequence
  Description of Artificial Sequence: Synthetic peptide
  Seed: EWLKTRPILSPLTKG
EMLKARPILAPLTKG

SEQ ID NO: 209640 - protein, 15 aa, Artificial Sequence
  Description of Artificial Sequence: Synthetic peptide
  Seed: EWLKTRPILSPLTKG
EMLKARPILIPLTKG

SEQ ID NO: 209641 - protein, 15 aa, Artificial Sequence
  Description of Artificial Sequence: Synthetic peptide
  Seed: EWLKTRPILSPLTKG
EMLKARPILLPLTKG

SEQ ID NO: 209642 - protein, 15 aa, Artificial Sequence
  Description of Artificial Sequence: Synthetic peptide
  Seed: EWLKTRPILSPLTKG
EMLKARPILVPLTKG

SEQ ID NO: 209643 - protein, 15 aa, Artificial Sequence
  Description of Artificial Sequence: Synthetic peptide
  Seed: EWLKTRPILSPLTKG
EMLKARSILAPLTKG

SEQ ID NO: 209644 - protein, 15 aa, Artificial Sequence
  Description of Artificial Sequence: Synthetic peptide
  Seed: EWLKTRPILSPLTKG
EMLKARSILIPLTKG

SEQ ID NO: 209645 - protein, 15 aa, Artificial Sequence
  Description of Artificial Sequence: Synthetic peptide
  Seed: EWLKTRPILSPLTKG
EMLKARSILLPLTKG

SEQ ID NO: 209646 - protein, 15 aa, Artificial Sequence
  Description of Artificial Sequence: Synthetic peptide
  Seed: EWLKTRPILSPLTKG
EMLKARSILVPLTKG

SEQ ID NO: 209647 - protein, 15 aa, Artificial Sequence
  Description of Artificial Sequence: Synthetic peptide
  Seed: EWLKTRPILSPLTKG
EMLKERAILAPLTKG

SEQ ID NO: 209648 - protein, 15 aa, Artificial Sequence
  Description of Artificial Sequence: Synthetic peptide
  Seed: EWLKTRPILSPLTKG
EMLKERAILVPLTKG

SEQ ID NO: 209649 - protein, 15 aa, Artificial Sequence
  Description of Artificial Sequence: Synthetic peptide
  Seed: EWLKTRPILSPLTKG
EMLKGRAILAPLTKG

SEQ ID NO: 209650 - protein, 15 aa, Artificial Sequence
  Description of Artificial Sequence: Synthetic peptide
  Seed: EWLKTRPILSPLTKG
EMLKGRAILIPLTKG

SEQ ID NO: 209651 - protein, 15 aa, Artificial Sequence
  Description of Artificial Sequence: Synthetic peptide
  Seed: EWLKTRPILSPLTKG
EMLKGRAILLPLTKG

SEQ ID NO: 209652 - protein, 15 aa, Artificial Sequence
  Description of Artificial Sequence: Synthetic peptide
  Seed: EWLKTRPILSPLTKG
EMLKGRAILVPLTKG

SEQ ID NO: 209653 - protein, 15 aa, Artificial Sequence
  Description of Artificial Sequence: Synthetic peptide
  Seed: EWLKTRPILSPLTKG
EMLKIRAILLPLTKG

SEQ ID NO: 209654 - protein, 15 aa, Artificial Sequence
  Description of Artificial Sequence: Synthetic peptide
  Seed: EWLKTRPILSPLTKG
EMLKIRGILIPLTKG

SEQ ID NO: 209655 - protein, 15 aa, Artificial Sequence
  Description of Artificial Sequence: Synthetic peptide
  Seed: EWLKTRPILSPLTKG
EMLKIRGILLPLTKG

SEQ ID NO: 209656 - protein, 15 aa, Artificial Sequence
  Description of Artificial Sequence: Synthetic peptide
  Seed: EWLKTRPILSPLTKG
EMLKIRGILMPLTKG

SEQ ID NO: 209657 - protein, 15 aa, Artificial Sequence
  Description of Artificial Sequence: Synthetic peptide
  Seed: EWLKTRPILSPLTKG
EMLKIRKILAPLTKG

SEQ ID NO: 209658 - protein, 15 aa, Artificial Sequence
  Description of Artificial Sequence: Synthetic peptide
  Seed: EWLKTRPILSPLTKG
EMLKIRKILSPLTKG

SEQ ID NO: 209659 - protein, 15 aa, Artificial Sequence
  Description of Artificial Sequence: Synthetic peptide
  Seed: EWLKTRPILSPLTKG
EMLKIRPILLPLTKG

SEQ ID NO: 209660 - protein, 15 aa, Artificial Sequence
  Description of Artificial Sequence: Synthetic peptide
  Seed: EWLKTRPILSPLTKG
EMLKIRPILMPLTKG

SEQ ID NO: 209661 - protein, 15 aa, Artificial Sequence
  Description of Artificial Sequence: Synthetic peptide
  Seed: EWLKTRPILSPLTKG
EMLKIRRILGPLTKG

SEQ ID NO: 209662 - protein, 15 aa, Artificial Sequence
  Description of Artificial Sequence: Synthetic peptide
  Seed: EWLKTRPILSPLTKG
EMLKLRAILCPLTKG

SEQ ID NO: 209663 - protein, 15 aa, Artificial Sequence
  Description of Artificial Sequence: Synthetic peptide
  Seed: EWLKTRPILSPLTKG
EMLKLRAILIPLTKG

SEQ ID NO: 209664 - protein, 15 aa, Artificial Sequence
  Description of Artificial Sequence: Synthetic peptide
  Seed: EWLKTRPILSPLTKG
EMLKLRAILLPLTKG

SEQ ID NO: 209665 - protein, 15 aa, Artificial Sequence
  Description of Artificial Sequence: Synthetic peptide
  Seed: EWLKTRPILSPLTKG
EMLKLRAILMPLTKG

SEQ ID NO: 209666 - protein, 15 aa, Artificial Sequence
  Description of Artificial Sequence: Synthetic peptide
  Seed: EWLKTRPILSPLTKG
EMLKLRAILVPLTKG

SEQ ID NO: 209667 - protein, 15 aa, Artificial Sequence
  Description of Artificial Sequence: Synthetic peptide
  Seed: EWLKTRPILSPLTKG
EMLKLRGILIPLTKG

SEQ ID NO: 209668 - protein, 15 aa, Artificial Sequence
  Description of Artificial Sequence: Synthetic peptide
  Seed: EWLKTRPILSPLTKG
EMLKLRGILLPLTKG

SEQ ID NO: 209669 - protein, 15 aa, Artificial Sequence
  Description of Artificial Sequence: Synthetic peptide
  Seed: EWLKTRPILSPLTKG
EMLKLRGILMPLTKG

SEQ ID NO: 209670 - protein, 15 aa, Artificial Sequence
  Description of Artificial Sequence: Synthetic peptide
  Seed: EWLKTRPILSPLTKG
EMLKLRGILTPLTKG

SEQ ID NO: 209671 - protein, 15 aa, Artificial Sequence
  Description of Artificial Sequence: Synthetic peptide
  Seed: EWLKTRPILSPLTKG
EMLKLRGILVPLTKG

SEQ ID NO: 209672 - protein, 15 aa, Artificial Sequence
  Description of Artificial Sequence: Synthetic peptide
  Seed: EWLKTRPILSPLTKG
EMLKLRKILSPLTKG

SEQ ID NO: 209673 - protein, 15 aa, Artificial Sequence
  Description of Artificial Sequence: Synthetic peptide
  Seed: EWLKTRPILSPLTKG
EMLKLRNILIPLTKG

SEQ ID NO: 209674 - protein, 15 aa, Artificial Sequence
  Description of Artificial Sequence: Synthetic peptide
  Seed: EWLKTRPILSPLTKG
EMLKLRNILLPLTKG

SEQ ID NO: 209675 - protein, 15 aa, Artificial Sequence
  Description of Artificial Sequence: Synthetic peptide
  Seed: EWLKTRPILSPLTKG
EMLKLRPILIPLTKG

SEQ ID NO: 209676 - protein, 15 aa, Artificial Sequence
  Description of Artificial Sequence: Synthetic peptide
  Seed: EWLKTRPILSPLTKG
EMLKLRPILLPLTKG

SEQ ID NO: 209677 - protein, 15 aa, Artificial Sequence
  Description of Artificial Sequence: Synthetic peptide
  Seed: EWLKTRPILSPLTKG
EMLKLRPILMPLTKG

SEQ ID NO: 209678 - protein, 15 aa, Artificial Sequence
  Description of Artificial Sequence: Synthetic peptide
  Seed: EWLKTRPILSPLTKG
EMLKLRPILVPLTKG

SEQ ID NO: 209679 - protein, 15 aa, Artificial Sequence
  Description of Artificial Sequence: Synthetic peptide
  Seed: EWLKTRPILSPLTKG
EMLKLRRILAPLTKG

SEQ ID NO: 209680 - protein, 15 aa, Artificial Sequence
  Description of Artificial Sequence: Synthetic peptide
  Seed: EWLKTRPILSPLTKG
EMLKLRRILGPLTKG

SEQ ID NO: 209681 - protein, 15 aa, Artificial Sequence
  Description of Artificial Sequence: Synthetic peptide
  Seed: EWLKTRPILSPLTKG
EMLKLRRILSPLTKG

SEQ ID NO: 209682 - protein, 15 aa, Artificial Sequence
  Description of Artificial Sequence: Synthetic peptide
  Seed: EWLKTRPILSPLTKG
EMLKLRSILIPLTKG

SEQ ID NO: 209683 - protein, 15 aa, Artificial Sequence
  Description of Artificial Sequence: Synthetic peptide
  Seed: EWLKTRPILSPLTKG
EMLKLRSILLPLTKG

SEQ ID NO: 209684 - protein, 15 aa, Artificial Sequence
  Description of Artificial Sequence: Synthetic peptide
  Seed: EWLKTRPILSPLTKG
EMLKLRSILMPLTKG

SEQ ID NO: 209685 - protein, 15 aa, Artificial Sequence
  Description of Artificial Sequence: Synthetic peptide
  Seed: EWLKTRPILSPLTKG
EMLKLRSILVPLTKG

SEQ ID NO: 209686 - protein, 15 aa, Artificial Sequence
  Description of Artificial Sequence: Synthetic peptide
  Seed: EWLKTRPILSPLTKG
EMLKLRTILIPLTKG

SEQ ID NO: 209687 - protein, 15 aa, Artificial Sequence
  Description of Artificial Sequence: Synthetic peptide
  Seed: EWLKTRPILSPLTKG
EMLKLRTILLPLTKG

SEQ ID NO: 209688 - protein, 15 aa, Artificial Sequence
  Description of Artificial Sequence: Synthetic peptide
  Seed: EWLKTRPILSPLTKG
EMLKLRTILMPLTKG

SEQ ID NO: 209689 - protein, 15 aa, Artificial Sequence
  Description of Artificial Sequence: Synthetic peptide
  Seed: EWLKTRPILSPLTKG
EMLKMRAILCPLTKG

SEQ ID NO: 209690 - protein, 15 aa, Artificial Sequence
  Description of Artificial Sequence: Synthetic peptide
  Seed: EWLKTRPILSPLTKG
EMLKMRAILIPLTKG

SEQ ID NO: 209691 - protein, 15 aa, Artificial Sequence
  Description of Artificial Sequence: Synthetic peptide
  Seed: EWLKTRPILSPLTKG
EMLKMRAILLPLTKG

SEQ ID NO: 209692 - protein, 15 aa, Artificial Sequence
  Description of Artificial Sequence: Synthetic peptide
  Seed: EWLKTRPILSPLTKG
EMLKMRAILMPLTKG

SEQ ID NO: 209693 - protein, 15 aa, Artificial Sequence
  Description of Artificial Sequence: Synthetic peptide
  Seed: EWLKTRPILSPLTKG
EMLKMRAILRPLTKG

SEQ ID NO: 209694 - protein, 15 aa, Artificial Sequence
  Description of Artificial Sequence: Synthetic peptide
  Seed: EWLKTRPILSPLTKG
EMLKMRAILVPLTKG

SEQ ID NO: 209695 - protein, 15 aa, Artificial Sequence
  Description of Artificial Sequence: Synthetic peptide
  Seed: EWLKTRPILSPLTKG
EMLKMRGILCPLTKG

SEQ ID NO: 209696 - protein, 15 aa, Artificial Sequence
  Description of Artificial Sequence: Synthetic peptide
  Seed: EWLKTRPILSPLTKG
EMLKMRGILIPLTKG

SEQ ID NO: 209697 - protein, 15 aa, Artificial Sequence
  Description of Artificial Sequence: Synthetic peptide
  Seed: EWLKTRPILSPLTKG
EMLKMRGILLPLTKG

SEQ ID NO: 209698 - protein, 15 aa, Artificial Sequence
  Description of Artificial Sequence: Synthetic peptide
  Seed: EWLKTRPILSPLTKG
EMLKMRGILMPLTKG

SEQ ID NO: 209699 - protein, 15 aa, Artificial Sequence
  Description of Artificial Sequence: Synthetic peptide
  Seed: EWLKTRPILSPLTKG
EMLKMRGILTPLTKG

SEQ ID NO: 209700 - protein, 15 aa, Artificial Sequence
  Description of Artificial Sequence: Synthetic peptide
  Seed: EWLKTRPILSPLTKG
EMLKMRGILVPLTKG

SEQ ID NO: 209701 - protein, 15 aa, Artificial Sequence
  Description of Artificial Sequence: Synthetic peptide
  Seed: EWLKTRPILSPLTKG
EMLKMRKILAPLTKG

SEQ ID NO: 209702 - protein, 15 aa, Artificial Sequence
  Description of Artificial Sequence: Synthetic peptide
  Seed: EWLKTRPILSPLTKG
EMLKMRKILSPLTKG

SEQ ID NO: 209703 - protein, 15 aa, Artificial Sequence
  Description of Artificial Sequence: Synthetic peptide
  Seed: EWLKTRPILSPLTKG
EMLKMRNILIPLTKG

SEQ ID NO: 209704 - protein, 15 aa, Artificial Sequence
  Description of Artificial Sequence: Synthetic peptide
  Seed: EWLKTRPILSPLTKG
EMLKMRNILLPLTKG

SEQ ID NO: 209705 - protein, 15 aa, Artificial Sequence
  Description of Artificial Sequence: Synthetic peptide
  Seed: EWLKTRPILSPLTKG
EMLKMRNILVPLTKG

SEQ ID NO: 209706 - protein, 15 aa, Artificial Sequence
  Description of Artificial Sequence: Synthetic peptide
  Seed: EWLKTRPILSPLTKG
EMLKMRPILIPLTKG

SEQ ID NO: 209707 - protein, 15 aa, Artificial Sequence
  Description of Artificial Sequence: Synthetic peptide
  Seed: EWLKTRPILSPLTKG
EMLKMRPILLPLTKG

SEQ ID NO: 209708 - protein, 15 aa, Artificial Sequence
  Description of Artificial Sequence: Synthetic peptide
  Seed: EWLKTRPILSPLTKG
EMLKMRPILMPLTKG

SEQ ID NO: 209709 - protein, 15 aa, Artificial Sequence
  Description of Artificial Sequence: Synthetic peptide
  Seed: EWLKTRPILSPLTKG
EMLKMRPILVPLTKG

SEQ ID NO: 209710 - protein, 15 aa, Artificial Sequence
  Description of Artificial Sequence: Synthetic peptide
  Seed: EWLKTRPILSPLTKG
EMLKMRRILAPLTKG

SEQ ID NO: 209711 - protein, 15 aa, Artificial Sequence
  Description of Artificial Sequence: Synthetic peptide
  Seed: EWLKTRPILSPLTKG
EMLKMRRILGPLTKG

SEQ ID NO: 209712 - protein, 15 aa, Artificial Sequence
  Description of Artificial Sequence: Synthetic peptide
  Seed: EWLKTRPILSPLTKG
EMLKMRRILQPLTKG

SEQ ID NO: 209713 - protein, 15 aa, Artificial Sequence
  Description of Artificial Sequence: Synthetic peptide
  Seed: EWLKTRPILSPLTKG
EMLKMRRILSPLTKG

SEQ ID NO: 209714 - protein, 15 aa, Artificial Sequence
  Description of Artificial Sequence: Synthetic peptide
  Seed: EWLKTRPILSPLTKG
EMLKMRSILCPLTKG

SEQ ID NO: 209715 - protein, 15 aa, Artificial Sequence
  Description of Artificial Sequence: Synthetic peptide
  Seed: EWLKTRPILSPLTKG
EMLKMRSILIPLTKG

SEQ ID NO: 209716 - protein, 15 aa, Artificial Sequence
  Description of Artificial Sequence: Synthetic peptide
  Seed: EWLKTRPILSPLTKG
EMLKMRSILLPLTKG

SEQ ID NO: 209717 - protein, 15 aa, Artificial Sequence
  Description of Artificial Sequence: Synthetic peptide
  Seed: EWLKTRPILSPLTKG
EMLKMRSILMPLTKG

SEQ ID NO: 209718 - protein, 15 aa, Artificial Sequence
  Description of Artificial Sequence: Synthetic peptide
  Seed: EWLKTRPILSPLTKG
EMLKMRSILVPLTKG

SEQ ID NO: 209719 - protein, 15 aa, Artificial Sequence
  Description of Artificial Sequence: Synthetic peptide
  Seed: EWLKTRPILSPLTKG
EMLKMRTILIPLTKG

SEQ ID NO: 209720 - protein, 15 aa, Artificial Sequence
  Description of Artificial Sequence: Synthetic peptide
  Seed: EWLKTRPILSPLTKG
EMLKMRTILLPLTKG

SEQ ID NO: 209721 - protein, 15 aa, Artificial Sequence
  Description of Artificial Sequence: Synthetic peptide
  Seed: EWLKTRPILSPLTKG
EMLKMRTILMPLTKG

SEQ ID NO: 209722 - protein, 15 aa, Artificial Sequence
  Description of Artificial Sequence: Synthetic peptide
  Seed: EWLKTRPILSPLTKG
EMLKQRAILAPLTKG

SEQ ID NO: 209723 - protein, 15 aa, Artificial Sequence
  Description of Artificial Sequence: Synthetic peptide
  Seed: EWLKTRPILSPLTKG
EMLKQRAILIPLTKG

SEQ ID NO: 209724 - protein, 15 aa, Artificial Sequence
  Description of Artificial Sequence: Synthetic peptide
  Seed: EWLKTRPILSPLTKG
EMLKQRAILLPLTKG

SEQ ID NO: 209725 - protein, 15 aa, Artificial Sequence
  Description of Artificial Sequence: Synthetic peptide
  Seed: EWLKTRPILSPLTKG
EMLKQRAILSPLTKG

SEQ ID NO: 209726 - protein, 15 aa, Artificial Sequence
  Description of Artificial Sequence: Synthetic peptide
  Seed: EWLKTRPILSPLTKG
EMLKQRAILVPLTKG

SEQ ID NO: 209727 - protein, 15 aa, Artificial Sequence
  Description of Artificial Sequence: Synthetic peptide
  Seed: EWLKTRPILSPLTKG
EMLKQRGILAPLTKG

SEQ ID NO: 209728 - protein, 15 aa, Artificial Sequence
  Description of Artificial Sequence: Synthetic peptide
  Seed: EWLKTRPILSPLTKG
EMLKQRGILIPLTKG

SEQ ID NO: 209729 - protein, 15 aa, Artificial Sequence
  Description of Artificial Sequence: Synthetic peptide
  Seed: EWLKTRPILSPLTKG
EMLKQRGILLPLTKG

SEQ ID NO: 209730 - protein, 15 aa, Artificial Sequence
  Description of Artificial Sequence: Synthetic peptide
  Seed: EWLKTRPILSPLTKG
EMLKQRGILVPLTKG

SEQ ID NO: 209731 - protein, 15 aa, Artificial Sequence
  Description of Artificial Sequence: Synthetic peptide
  Seed: EWLKTRPILSPLTKG
EMLKQRSILVPLTKG

SEQ ID NO: 209732 - protein, 15 aa, Artificial Sequence
  Description of Artificial Sequence: Synthetic peptide
  Seed: EWLKTRPILSPLTKG
EMLKSRAILAPLTKG

SEQ ID NO: 209733 - protein, 15 aa, Artificial Sequence
  Description of Artificial Sequence: Synthetic peptide
  Seed: EWLKTRPILSPLTKG
EMLKSRAILIPLTKG

SEQ ID NO: 209734 - protein, 15 aa, Artificial Sequence
  Description of Artificial Sequence: Synthetic peptide
  Seed: EWLKTRPILSPLTKG
EMLKSRAILLPLTKG

SEQ ID NO: 209735 - protein, 15 aa, Artificial Sequence
  Description of Artificial Sequence: Synthetic peptide
  Seed: EWLKTRPILSPLTKG
EMLKSRAILVPLTKG

SEQ ID NO: 209736 - protein, 15 aa, Artificial Sequence
  Description of Artificial Sequence: Synthetic peptide
  Seed: EWLKTRPILSPLTKG
EMLKSRGILIPLTKG

SEQ ID NO: 209737 - protein, 15 aa, Artificial Sequence
  Description of Artificial Sequence: Synthetic peptide
  Seed: EWLKTRPILSPLTKG
EMLKSRGILVPLTKG

SEQ ID NO: 209738 - protein, 15 aa, Artificial Sequence
  Description of Artificial Sequence: Synthetic peptide
  Seed: EWLKTRPILSPLTKG
EMLKSRSILIPLTKG

SEQ ID NO: 209739 - protein, 15 aa, Artificial Sequence
  Description of Artificial Sequence: Synthetic peptide
  Seed: EWLKTRPILSPLTKG
EMLKSRSILLPLTKG

SEQ ID NO: 209740 - protein, 15 aa, Artificial Sequence
  Description of Artificial Sequence: Synthetic peptide
  Seed: EWLKTRPILSPLTKG
EMLKSRSILVPLTKG

SEQ ID NO: 209741 - protein, 15 aa, Artificial Sequence
  Description of Artificial Sequence: Synthetic peptide
  Seed: EWLKTRPILSPLTKG
EMLKTRAILIPLTKG

SEQ ID NO: 209742 - protein, 15 aa, Artificial Sequence
  Description of Artificial Sequence: Synthetic peptide
  Seed: EWLKTRPILSPLTKG
EMLKTRAILLPLTKG

SEQ ID NO: 209743 - protein, 15 aa, Artificial Sequence
  Description of Artificial Sequence: Synthetic peptide
  Seed: EWLKTRPILSPLTKG
EMLKTRAILVPLTKG

SEQ ID NO: 209744 - protein, 15 aa, Artificial Sequence
  Description of Artificial Sequence: Synthetic peptide
  Seed: EWLKTRPILSPLTKG
EMLKTRGILIPLTKG

SEQ ID NO: 209745 - protein, 15 aa, Artificial Sequence
  Description of Artificial Sequence: Synthetic peptide
  Seed: EWLKTRPILSPLTKG
EMLKTRGILVPLTKG

SEQ ID NO: 209746 - protein, 15 aa, Artificial Sequence
  Description of Artificial Sequence: Synthetic peptide
  Seed: EWLKTRPILSPLTKG
EMLKTRPILIPLTKG

SEQ ID NO: 209747 - protein, 15 aa, Artificial Sequence
  Description of Artificial Sequence: Synthetic peptide
  Seed: EWLKTRPILSPLTKG
EMLKTRSILIPLTKG

SEQ ID NO: 209748 - protein, 15 aa, Artificial Sequence
  Description of Artificial Sequence: Synthetic peptide
  Seed: EWLKTRPILSPLTKG
EMLKTRSILLPLTKG

SEQ ID NO: 209749 - protein, 15 aa, Artificial Sequence
  Description of Artificial Sequence: Synthetic peptide
  Seed: EWLKTRPILSPLTKG
EMLKTRSILVPLTKG

SEQ ID NO: 209750 - protein, 15 aa, Artificial Sequence
  Description of Artificial Sequence: Synthetic peptide
  Seed: EWLKTRPILSPLTKG
EMLKVRAILIPLTKG

SEQ ID NO: 209751 - protein, 15 aa, Artificial Sequence
  Description of Artificial Sequence: Synthetic peptide
  Seed: EWLKTRPILSPLTKG
EMLKVRAILLPLTKG

SEQ ID NO: 209752 - protein, 15 aa, Artificial Sequence
  Description of Artificial Sequence: Synthetic peptide
  Seed: EWLKTRPILSPLTKG
EMLKVRAILMPLTKG

SEQ ID NO: 209753 - protein, 15 aa, Artificial Sequence
  Description of Artificial Sequence: Synthetic peptide
  Seed: EWLKTRPILSPLTKG
EMLKVRGILIPLTKG

SEQ ID NO: 209754 - protein, 15 aa, Artificial Sequence
  Description of Artificial Sequence: Synthetic peptide
  Seed: EWLKTRPILSPLTKG
EMLKVRGILLPLTKG

SEQ ID NO: 209755 - protein, 15 aa, Artificial Sequence
  Description of Artificial Sequence: Synthetic peptide
  Seed: EWLKTRPILSPLTKG
EMLKVRGILVPLTKG

SEQ ID NO: 209756 - protein, 15 aa, Artificial Sequence
  Description of Artificial Sequence: Synthetic peptide
  Seed: EWLKTRPILSPLTKG
EMLKVRPILIPLTKG

SEQ ID NO: 209757 - protein, 15 aa, Artificial Sequence
  Description of Artificial Sequence: Synthetic peptide
  Seed: EWLKTRPILSPLTKG
EMLKVRRILAPLTKG

SEQ ID NO: 209758 - protein, 15 aa, Artificial Sequence
  Description of Artificial Sequence: Synthetic peptide
  Seed: EWLKTRPILSPLTKG
EMLKVRRILSPLTKG

SEQ ID NO: 209759 - protein, 15 aa, Artificial Sequence
  Description of Artificial Sequence: Synthetic peptide
  Seed: EWLKTRPILSPLTKG
EPLKMRAILLPLTKG

SEQ ID NO: 209760 - protein, 15 aa, Artificial Sequence
  Description of Artificial Sequence: Synthetic peptide
  Seed: EWLKTRPILSPLTKG
EQLKMRGILLPLTKG

SEQ ID NO: 209761 - protein, 15 aa, Artificial Sequence
  Description of Artificial Sequence: Synthetic peptide
  Seed: EWLKTRPILSPLTKG
EVLKARAILAPLTKG

SEQ ID NO: 209762 - protein, 15 aa, Artificial Sequence
  Description of Artificial Sequence: Synthetic peptide
  Seed: EWLKTRPILSPLTKG
EVLKARAILGPLTKG

SEQ ID NO: 209763 - protein, 15 aa, Artificial Sequence
  Description of Artificial Sequence: Synthetic peptide
  Seed: EWLKTRPILSPLTKG
EVLKARAILIPLTKG

SEQ ID NO: 209764 - protein, 15 aa, Artificial Sequence
  Description of Artificial Sequence: Synthetic peptide
  Seed: EWLKTRPILSPLTKG
EVLKARAILLPLTKG

SEQ ID NO: 209765 - protein, 15 aa, Artificial Sequence
  Description of Artificial Sequence: Synthetic peptide
  Seed: EWLKTRPILSPLTKG
EVLKARAILMPLTKG

SEQ ID NO: 209766 - protein, 15 aa, Artificial Sequence
  Description of Artificial Sequence: Synthetic peptide
  Seed: EWLKTRPILSPLTKG
EVLKARAILSPLTKG

SEQ ID NO: 209767 - protein, 15 aa, Artificial Sequence
  Description of Artificial Sequence: Synthetic peptide
  Seed: EWLKTRPILSPLTKG
EVLKARAILTPLTKG

SEQ ID NO: 209768 - protein, 15 aa, Artificial Sequence
  Description of Artificial Sequence: Synthetic peptide
  Seed: EWLKTRPILSPLTKG
EVLKARAILVPLTKG

SEQ ID NO: 209769 - protein, 15 aa, Artificial Sequence
  Description of Artificial Sequence: Synthetic peptide
  Seed: EWLKTRPILSPLTKG
EVLKARGILAPLTKG

SEQ ID NO: 209770 - protein, 15 aa, Artificial Sequence
  Description of Artificial Sequence: Synthetic peptide
  Seed: EWLKTRPILSPLTKG
EVLKARGILIPLTKG

SEQ ID NO: 209771 - protein, 15 aa, Artificial Sequence
  Description of Artificial Sequence: Synthetic peptide
  Seed: EWLKTRPILSPLTKG
EVLKARGILLPLTKG

SEQ ID NO: 209772 - protein, 15 aa, Artificial Sequence
  Description of Artificial Sequence: Synthetic peptide
  Seed: EWLKTRPILSPLTKG
EVLKARGILMPLTKG

SEQ ID NO: 209773 - protein, 15 aa, Artificial Sequence
  Description of Artificial Sequence: Synthetic peptide
  Seed: EWLKTRPILSPLTKG
EVLKARGILSPLTKG

SEQ ID NO: 209774 - protein, 15 aa, Artificial Sequence
  Description of Artificial Sequence: Synthetic peptide
  Seed: EWLKTRPILSPLTKG
EVLKARGILTPLTKG

SEQ ID NO: 209775 - protein, 15 aa, Artificial Sequence
  Description of Artificial Sequence: Synthetic peptide
  Seed: EWLKTRPILSPLTKG
EVLKARGILVPLTKG

SEQ ID NO: 209776 - protein, 15 aa, Artificial Sequence
  Description of Artificial Sequence: Synthetic peptide
  Seed: EWLKTRPILSPLTKG
EVLKARPILAPLTKG

SEQ ID NO: 209777 - protein, 15 aa, Artificial Sequence
  Description of Artificial Sequence: Synthetic peptide
  Seed: EWLKTRPILSPLTKG
EVLKARPILIPLTKG

SEQ ID NO: 209778 - protein, 15 aa, Artificial Sequence
  Description of Artificial Sequence: Synthetic peptide
  Seed: EWLKTRPILSPLTKG
EVLKARPILLPLTKG

SEQ ID NO: 209779 - protein, 15 aa, Artificial Sequence
  Description of Artificial Sequence: Synthetic peptide
  Seed: EWLKTRPILSPLTKG
EVLKARPILVPLTKG

SEQ ID NO: 209780 - protein, 15 aa, Artificial Sequence
  Description of Artificial Sequence: Synthetic peptide
  Seed: EWLKTRPILSPLTKG
EVLKARSILAPLTKG

SEQ ID NO: 209781 - protein, 15 aa, Artificial Sequence
  Description of Artificial Sequence: Synthetic peptide
  Seed: EWLKTRPILSPLTKG
EVLKARSILIPLTKG

SEQ ID NO: 209782 - protein, 15 aa, Artificial Sequence
  Description of Artificial Sequence: Synthetic peptide
  Seed: EWLKTRPILSPLTKG
EVLKARSILLPLTKG

SEQ ID NO: 209783 - protein, 15 aa, Artificial Sequence
  Description of Artificial Sequence: Synthetic peptide
  Seed: EWLKTRPILSPLTKG
EVLKARSILVPLTKG

SEQ ID NO: 209784 - protein, 15 aa, Artificial Sequence
  Description of Artificial Sequence: Synthetic peptide
  Seed: EWLKTRPILSPLTKG
EVLKERAILAPLTKG

SEQ ID NO: 209785 - protein, 15 aa, Artificial Sequence
  Description of Artificial Sequence: Synthetic peptide
  Seed: EWLKTRPILSPLTKG
EVLKERAILLPLTKG

SEQ ID NO: 209786 - protein, 15 aa, Artificial Sequence
  Description of Artificial Sequence: Synthetic peptide
  Seed: EWLKTRPILSPLTKG
EVLKERAILVPLTKG

SEQ ID NO: 209787 - protein, 15 aa, Artificial Sequence
  Description of Artificial Sequence: Synthetic peptide
  Seed: EWLKTRPILSPLTKG
EVLKGRAILAPLTKG

SEQ ID NO: 209788 - protein, 15 aa, Artificial Sequence
  Description of Artificial Sequence: Synthetic peptide
  Seed: EWLKTRPILSPLTKG
EVLKGRAILIPLTKG

SEQ ID NO: 209789 - protein, 15 aa, Artificial Sequence
  Description of Artificial Sequence: Synthetic peptide
  Seed: EWLKTRPILSPLTKG
EVLKGRAILLPLTKG

SEQ ID NO: 209790 - protein, 15 aa, Artificial Sequence
  Description of Artificial Sequence: Synthetic peptide
  Seed: EWLKTRPILSPLTKG
EVLKGRAILVPLTKG

SEQ ID NO: 209791 - protein, 15 aa, Artificial Sequence
  Description of Artificial Sequence: Synthetic peptide
  Seed: EWLKTRPILSPLTKG
EVLKIRAILLPLTKG

SEQ ID NO: 209792 - protein, 15 aa, Artificial Sequence
  Description of Artificial Sequence: Synthetic peptide
  Seed: EWLKTRPILSPLTKG
EVLKIRGILIPLTKG

SEQ ID NO: 209793 - protein, 15 aa, Artificial Sequence
  Description of Artificial Sequence: Synthetic peptide
  Seed: EWLKTRPILSPLTKG
EVLKIRGILLPLTKG

SEQ ID NO: 209794 - protein, 15 aa, Artificial Sequence
  Description of Artificial Sequence: Synthetic peptide
  Seed: EWLKTRPILSPLTKG
EVLKIRGILMPLTKG

SEQ ID NO: 209795 - protein, 15 aa, Artificial Sequence
  Description of Artificial Sequence: Synthetic peptide
  Seed: EWLKTRPILSPLTKG
EVLKIRGILVPLTKG

SEQ ID NO: 209796 - protein, 15 aa, Artificial Sequence
  Description of Artificial Sequence: Synthetic peptide
  Seed: EWLKTRPILSPLTKG
EVLKIRPILLPLTKG

SEQ ID NO: 209797 - protein, 15 aa, Artificial Sequence
  Description of Artificial Sequence: Synthetic peptide
  Seed: EWLKTRPILSPLTKG
EVLKIRRILGPLTKG

SEQ ID NO: 209798 - protein, 15 aa, Artificial Sequence
  Description of Artificial Sequence: Synthetic peptide
  Seed: EWLKTRPILSPLTKG
EVLKIRSILLPLTKG

SEQ ID NO: 209799 - protein, 15 aa, Artificial Sequence
  Description of Artificial Sequence: Synthetic peptide
  Seed: EWLKTRPILSPLTKG
EVLKLRAILCPLTKG

SEQ ID NO: 209800 - protein, 15 aa, Artificial Sequence
  Description of Artificial Sequence: Synthetic peptide
  Seed: EWLKTRPILSPLTKG
EVLKLRAILIPLTKG

SEQ ID NO: 209801 - protein, 15 aa, Artificial Sequence
  Description of Artificial Sequence: Synthetic peptide
  Seed: EWLKTRPILSPLTKG
EVLKLRAILLPLTKG

SEQ ID NO: 209802 - protein, 15 aa, Artificial Sequence
  Description of Artificial Sequence: Synthetic peptide
  Seed: EWLKTRPILSPLTKG
EVLKLRAILMPLTKG

SEQ ID NO: 209803 - protein, 15 aa, Artificial Sequence
  Description of Artificial Sequence: Synthetic peptide
  Seed: EWLKTRPILSPLTKG
EVLKLRAILVPLTKG

SEQ ID NO: 209804 - protein, 15 aa, Artificial Sequence
  Description of Artificial Sequence: Synthetic peptide
  Seed: EWLKTRPILSPLTKG
EVLKLRGILIPLTKG

SEQ ID NO: 209805 - protein, 15 aa, Artificial Sequence
  Description of Artificial Sequence: Synthetic peptide
  Seed: EWLKTRPILSPLTKG
EVLKLRGILLPLTKG

SEQ ID NO: 209806 - protein, 15 aa, Artificial Sequence
  Description of Artificial Sequence: Synthetic peptide
  Seed: EWLKTRPILSPLTKG
EVLKLRGILMPLTKG

SEQ ID NO: 209807 - protein, 15 aa, Artificial Sequence
  Description of Artificial Sequence: Synthetic peptide
  Seed: EWLKTRPILSPLTKG
EVLKLRGILTPLTKG

SEQ ID NO: 209808 - protein, 15 aa, Artificial Sequence
  Description of Artificial Sequence: Synthetic peptide
  Seed: EWLKTRPILSPLTKG
EVLKLRGILVPLTKG

SEQ ID NO: 209809 - protein, 15 aa, Artificial Sequence
  Description of Artificial Sequence: Synthetic peptide
  Seed: EWLKTRPILSPLTKG
EVLKLRNILIPLTKG

SEQ ID NO: 209810 - protein, 15 aa, Artificial Sequence
  Description of Artificial Sequence: Synthetic peptide
  Seed: EWLKTRPILSPLTKG
EVLKLRNILLPLTKG

SEQ ID NO: 209811 - protein, 15 aa, Artificial Sequence
  Description of Artificial Sequence: Synthetic peptide
  Seed: EWLKTRPILSPLTKG
EVLKLRNILVPLTKG

SEQ ID NO: 209812 - protein, 15 aa, Artificial Sequence
  Description of Artificial Sequence: Synthetic peptide
  Seed: EWLKTRPILSPLTKG
EVLKLRPILIPLTKG

SEQ ID NO: 209813 - protein, 15 aa, Artificial Sequence
  Description of Artificial Sequence: Synthetic peptide
  Seed: EWLKTRPILSPLTKG
EVLKLRPILLPLTKG

SEQ ID NO: 209814 - protein, 15 aa, Artificial Sequence
  Description of Artificial Sequence: Synthetic peptide
  Seed: EWLKTRPILSPLTKG
EVLKLRPILMPLTKG

SEQ ID NO: 209815 - protein, 15 aa, Artificial Sequence
  Description of Artificial Sequence: Synthetic peptide
  Seed: EWLKTRPILSPLTKG
EVLKLRPILVPLTKG

SEQ ID NO: 209816 - protein, 15 aa, Artificial Sequence
  Description of Artificial Sequence: Synthetic peptide
  Seed: EWLKTRPILSPLTKG
EVLKLRRILAPLTKG

SEQ ID NO: 209817 - protein, 15 aa, Artificial Sequence
  Description of Artificial Sequence: Synthetic peptide
  Seed: EWLKTRPILSPLTKG
EVLKLRRILSPLTKG

SEQ ID NO: 209818 - protein, 15 aa, Artificial Sequence
  Description of Artificial Sequence: Synthetic peptide
  Seed: EWLKTRPILSPLTKG
EVLKLRSILIPLTKG

SEQ ID NO: 209819 - protein, 15 aa, Artificial Sequence
  Description of Artificial Sequence: Synthetic peptide
  Seed: EWLKTRPILSPLTKG
EVLKLRSILLPLTKG

SEQ ID NO: 209820 - protein, 15 aa, Artificial Sequence
  Description of Artificial Sequence: Synthetic peptide
  Seed: EWLKTRPILSPLTKG
EVLKLRSILMPLTKG

SEQ ID NO: 209821 - protein, 15 aa, Artificial Sequence
  Description of Artificial Sequence: Synthetic peptide
  Seed: EWLKTRPILSPLTKG
EVLKLRSILVPLTKG

SEQ ID NO: 209822 - protein, 15 aa, Artificial Sequence
  Description of Artificial Sequence: Synthetic peptide
  Seed: EWLKTRPILSPLTKG
EVLKLRTILIPLTKG

SEQ ID NO: 209823 - protein, 15 aa, Artificial Sequence
  Description of Artificial Sequence: Synthetic peptide
  Seed: EWLKTRPILSPLTKG
EVLKLRTILLPLTKG

SEQ ID NO: 209824 - protein, 15 aa, Artificial Sequence
  Description of Artificial Sequence: Synthetic peptide
  Seed: EWLKTRPILSPLTKG
EVLKLRTILMPLTKG

SEQ ID NO: 209825 - protein, 15 aa, Artificial Sequence
  Description of Artificial Sequence: Synthetic peptide
  Seed: EWLKTRPILSPLTKG
EVLKMRAILCPLTKG

SEQ ID NO: 209826 - protein, 15 aa, Artificial Sequence
  Description of Artificial Sequence: Synthetic peptide
  Seed: EWLKTRPILSPLTKG
EVLKMRAILIPLTKG

SEQ ID NO: 209827 - protein, 15 aa, Artificial Sequence
  Description of Artificial Sequence: Synthetic peptide
  Seed: EWLKTRPILSPLTKG
EVLKMRAILLPLTKG

SEQ ID NO: 209828 - protein, 15 aa, Artificial Sequence
  Description of Artificial Sequence: Synthetic peptide
  Seed: EWLKTRPILSPLTKG
EVLKMRAILMPLTKG

SEQ ID NO: 209829 - protein, 15 aa, Artificial Sequence
  Description of Artificial Sequence: Synthetic peptide
  Seed: EWLKTRPILSPLTKG
EVLKMRAILVPLTKG

SEQ ID NO: 209830 - protein, 15 aa, Artificial Sequence
  Description of Artificial Sequence: Synthetic peptide
  Seed: EWLKTRPILSPLTKG
EVLKMRGILAPLTKG

SEQ ID NO: 209831 - protein, 15 aa, Artificial Sequence
  Description of Artificial Sequence: Synthetic peptide
  Seed: EWLKTRPILSPLTKG
EVLKMRGILCPLTKG

SEQ ID NO: 209832 - protein, 15 aa, Artificial Sequence
  Description of Artificial Sequence: Synthetic peptide
  Seed: EWLKTRPILSPLTKG
EVLKMRGILIPLTKG

SEQ ID NO: 209833 - protein, 15 aa, Artificial Sequence
  Description of Artificial Sequence: Synthetic peptide
  Seed: EWLKTRPILSPLTKG
EVLKMRGILLPLTKG

SEQ ID NO: 209834 - protein, 15 aa, Artificial Sequence
  Description of Artificial Sequence: Synthetic peptide
  Seed: EWLKTRPILSPLTKG
EVLKMRGILMPLTKG

SEQ ID NO: 209835 - protein, 15 aa, Artificial Sequence
  Description of Artificial Sequence: Synthetic peptide
  Seed: EWLKTRPILSPLTKG
EVLKMRGILTPLTKG

SEQ ID NO: 209836 - protein, 15 aa, Artificial Sequence
  Description of Artificial Sequence: Synthetic peptide
  Seed: EWLKTRPILSPLTKG
EVLKMRGILVPLTKG

SEQ ID NO: 209837 - protein, 15 aa, Artificial Sequence
  Description of Artificial Sequence: Synthetic peptide
  Seed: EWLKTRPILSPLTKG
EVLKMRKILSPLTKG

SEQ ID NO: 209838 - protein, 15 aa, Artificial Sequence
  Description of Artificial Sequence: Synthetic peptide
  Seed: EWLKTRPILSPLTKG
EVLKMRNILIPLTKG

SEQ ID NO: 209839 - protein, 15 aa, Artificial Sequence
  Description of Artificial Sequence: Synthetic peptide
  Seed: EWLKTRPILSPLTKG
EVLKMRNILLPLTKG

SEQ ID NO: 209840 - protein, 15 aa, Artificial Sequence
  Description of Artificial Sequence: Synthetic peptide
  Seed: EWLKTRPILSPLTKG
EVLKMRNILMPLTKG

SEQ ID NO: 209841 - protein, 15 aa, Artificial Sequence
  Description of Artificial Sequence: Synthetic peptide
  Seed: EWLKTRPILSPLTKG
EVLKMRNILVPLTKG

SEQ ID NO: 209842 - protein, 15 aa, Artificial Sequence
  Description of Artificial Sequence: Synthetic peptide
  Seed: EWLKTRPILSPLTKG
EVLKMRPILIPLTKG

SEQ ID NO: 209843 - protein, 15 aa, Artificial Sequence
  Description of Artificial Sequence: Synthetic peptide
  Seed: EWLKTRPILSPLTKG
EVLKMRPILLPLTKG

SEQ ID NO: 209844 - protein, 15 aa, Artificial Sequence
  Description of Artificial Sequence: Synthetic peptide
  Seed: EWLKTRPILSPLTKG
EVLKMRPILMPLTKG

SEQ ID NO: 209845 - protein, 15 aa, Artificial Sequence
  Description of Artificial Sequence: Synthetic peptide
  Seed: EWLKTRPILSPLTKG
EVLKMRPILVPLTKG

SEQ ID NO: 209846 - protein, 15 aa, Artificial Sequence
  Description of Artificial Sequence: Synthetic peptide
  Seed: EWLKTRPILSPLTKG
EVLKMRRILAPLTKG

SEQ ID NO: 209847 - protein, 15 aa, Artificial Sequence
  Description of Artificial Sequence: Synthetic peptide
  Seed: EWLKTRPILSPLTKG
EVLKMRRILGPLTKG

SEQ ID NO: 209848 - protein, 15 aa, Artificial Sequence
  Description of Artificial Sequence: Synthetic peptide
  Seed: EWLKTRPILSPLTKG
EVLKMRRILSPLTKG

SEQ ID NO: 209849 - protein, 15 aa, Artificial Sequence
  Description of Artificial Sequence: Synthetic peptide
  Seed: EWLKTRPILSPLTKG
EVLKMRSILCPLTKG

SEQ ID NO: 209850 - protein, 15 aa, Artificial Sequence
  Description of Artificial Sequence: Synthetic peptide
  Seed: EWLKTRPILSPLTKG
EVLKMRSILIPLTKG

SEQ ID NO: 209851 - protein, 15 aa, Artificial Sequence
  Description of Artificial Sequence: Synthetic peptide
  Seed: EWLKTRPILSPLTKG
EVLKMRSILLPLTKG

SEQ ID NO: 209852 - protein, 15 aa, Artificial Sequence
  Description of Artificial Sequence: Synthetic peptide
  Seed: EWLKTRPILSPLTKG
EVLKMRSILMPLTKG

SEQ ID NO: 209853 - protein, 15 aa, Artificial Sequence
  Description of Artificial Sequence: Synthetic peptide
  Seed: EWLKTRPILSPLTKG
EVLKMRSILVPLTKG

SEQ ID NO: 209854 - protein, 15 aa, Artificial Sequence
  Description of Artificial Sequence: Synthetic peptide
  Seed: EWLKTRPILSPLTKG
EVLKMRTILIPLTKG

SEQ ID NO: 209855 - protein, 15 aa, Artificial Sequence
  Description of Artificial Sequence: Synthetic peptide
  Seed: EWLKTRPILSPLTKG
EVLKMRTILLPLTKG

SEQ ID NO: 209856 - protein, 15 aa, Artificial Sequence
  Description of Artificial Sequence: Synthetic peptide
  Seed: EWLKTRPILSPLTKG
EVLKMRTILMPLTKG

SEQ ID NO: 209857 - protein, 15 aa, Artificial Sequence
  Description of Artificial Sequence: Synthetic peptide
  Seed: EWLKTRPILSPLTKG
EVLKMRTILVPLTKG

SEQ ID NO: 209858 - protein, 15 aa, Artificial Sequence
  Description of Artificial Sequence: Synthetic peptide
  Seed: EWLKTRPILSPLTKG
EVLKQRAILAPLTKG

SEQ ID NO: 209859 - protein, 15 aa, Artificial Sequence
  Description of Artificial Sequence: Synthetic peptide
  Seed: EWLKTRPILSPLTKG
EVLKQRAILIPLTKG

SEQ ID NO: 209860 - protein, 15 aa, Artificial Sequence
  Description of Artificial Sequence: Synthetic peptide
  Seed: EWLKTRPILSPLTKG
EVLKQRAILLPLTKG

SEQ ID NO: 209861 - protein, 15 aa, Artificial Sequence
  Description of Artificial Sequence: Synthetic peptide
  Seed: EWLKTRPILSPLTKG
EVLKQRAILSPLTKG

SEQ ID NO: 209862 - protein, 15 aa, Artificial Sequence
  Description of Artificial Sequence: Synthetic peptide
  Seed: EWLKTRPILSPLTKG
EVLKQRAILTPLTKG

SEQ ID NO: 209863 - protein, 15 aa, Artificial Sequence
  Description of Artificial Sequence: Synthetic peptide
  Seed: EWLKTRPILSPLTKG
EVLKQRAILVPLTKG

SEQ ID NO: 209864 - protein, 15 aa, Artificial Sequence
  Description of Artificial Sequence: Synthetic peptide
  Seed: EWLKTRPILSPLTKG
EVLKQRGILAPLTKG

SEQ ID NO: 209865 - protein, 15 aa, Artificial Sequence
  Description of Artificial Sequence: Synthetic peptide
  Seed: EWLKTRPILSPLTKG
EVLKQRGILIPLTKG

SEQ ID NO: 209866 - protein, 15 aa, Artificial Sequence
  Description of Artificial Sequence: Synthetic peptide
  Seed: EWLKTRPILSPLTKG
EVLKQRGILLPLTKG

SEQ ID NO: 209867 - protein, 15 aa, Artificial Sequence
  Description of Artificial Sequence: Synthetic peptide
  Seed: EWLKTRPILSPLTKG
EVLKQRGILVPLTKG

SEQ ID NO: 209868 - protein, 15 aa, Artificial Sequence
  Description of Artificial Sequence: Synthetic peptide
  Seed: EWLKTRPILSPLTKG
EVLKQRSILIPLTKG

SEQ ID NO: 209869 - protein, 15 aa, Artificial Sequence
  Description of Artificial Sequence: Synthetic peptide
  Seed: EWLKTRPILSPLTKG
EVLKQRSILLPLTKG

SEQ ID NO: 209870 - protein, 15 aa, Artificial Sequence
  Description of Artificial Sequence: Synthetic peptide
  Seed: EWLKTRPILSPLTKG
EVLKQRSILVPLTKG

SEQ ID NO: 209871 - protein, 15 aa, Artificial Sequence
  Description of Artificial Sequence: Synthetic peptide
  Seed: EWLKTRPILSPLTKG
EVLKSRAILAPLTKG

SEQ ID NO: 209872 - protein, 15 aa, Artificial Sequence
  Description of Artificial Sequence: Synthetic peptide
  Seed: EWLKTRPILSPLTKG
EVLKSRAILIPLTKG

SEQ ID NO: 209873 - protein, 15 aa, Artificial Sequence
  Description of Artificial Sequence: Synthetic peptide
  Seed: EWLKTRPILSPLTKG
EVLKSRAILLPLTKG

SEQ ID NO: 209874 - protein, 15 aa, Artificial Sequence
  Description of Artificial Sequence: Synthetic peptide
  Seed: EWLKTRPILSPLTKG
EVLKSRAILVPLTKG

SEQ ID NO: 209875 - protein, 15 aa, Artificial Sequence
  Description of Artificial Sequence: Synthetic peptide
  Seed: EWLKTRPILSPLTKG
EVLKSRGILIPLTKG

SEQ ID NO: 209876 - protein, 15 aa, Artificial Sequence
  Description of Artificial Sequence: Synthetic peptide
  Seed: EWLKTRPILSPLTKG
EVLKSRGILVPLTKG

SEQ ID NO: 209877 - protein, 15 aa, Artificial Sequence
  Description of Artificial Sequence: Synthetic peptide
  Seed: EWLKTRPILSPLTKG
EVLKSRSILIPLTKG

SEQ ID NO: 209878 - protein, 15 aa, Artificial Sequence
  Description of Artificial Sequence: Synthetic peptide
  Seed: EWLKTRPILSPLTKG
EVLKSRSILLPLTKG

SEQ ID NO: 209879 - protein, 15 aa, Artificial Sequence
  Description of Artificial Sequence: Synthetic peptide
  Seed: EWLKTRPILSPLTKG
EVLKSRSILVPLTKG

SEQ ID NO: 209880 - protein, 15 aa, Artificial Sequence
  Description of Artificial Sequence: Synthetic peptide
  Seed: EWLKTRPILSPLTKG
EVLKTRAILIPLTKG

SEQ ID NO: 209881 - protein, 15 aa, Artificial Sequence
  Description of Artificial Sequence: Synthetic peptide
  Seed: EWLKTRPILSPLTKG
EVLKTRAILLPLTKG

SEQ ID NO: 209882 - protein, 15 aa, Artificial Sequence
  Description of Artificial Sequence: Synthetic peptide
  Seed: EWLKTRPILSPLTKG
EVLKTRAILVPLTKG

SEQ ID NO: 209883 - protein, 15 aa, Artificial Sequence
  Description of Artificial Sequence: Synthetic peptide
  Seed: EWLKTRPILSPLTKG
EVLKTRGILIPLTKG

SEQ ID NO: 209884 - protein, 15 aa, Artificial Sequence
  Description of Artificial Sequence: Synthetic peptide
  Seed: EWLKTRPILSPLTKG
EVLKTRGILVPLTKG

SEQ ID NO: 209885 - protein, 15 aa, Artificial Sequence
  Description of Artificial Sequence: Synthetic peptide
  Seed: EWLKTRPILSPLTKG
EVLKTRPILIPLTKG

SEQ ID NO: 209886 - protein, 15 aa, Artificial Sequence
  Description of Artificial Sequence: Synthetic peptide
  Seed: EWLKTRPILSPLTKG
EVLKTRPILVPLTKG

SEQ ID NO: 209887 - protein, 15 aa, Artificial Sequence
  Description of Artificial Sequence: Synthetic peptide
  Seed: EWLKTRPILSPLTKG
EVLKTRSILIPLTKG

SEQ ID NO: 209888 - protein, 15 aa, Artificial Sequence
  Description of Artificial Sequence: Synthetic peptide
  Seed: EWLKTRPILSPLTKG
EVLKTRSILLPLTKG

SEQ ID NO: 209889 - protein, 15 aa, Artificial Sequence
  Description of Artificial Sequence: Synthetic peptide
  Seed: EWLKTRPILSPLTKG
EVLKTRSILMPLTKG

SEQ ID NO: 209890 - protein, 15 aa, Artificial Sequence
  Description of Artificial Sequence: Synthetic peptide
  Seed: EWLKTRPILSPLTKG
EVLKTRSILVPLTKG

SEQ ID NO: 209891 - protein, 15 aa, Artificial Sequence
  Description of Artificial Sequence: Synthetic peptide
  Seed: EWLKTRPILSPLTKG
EVLKTRTILIPLTKG

SEQ ID NO: 209892 - protein, 15 aa, Artificial Sequence
  Description of Artificial Sequence: Synthetic peptide
  Seed: EWLKTRPILSPLTKG
EVLKVRAILIPLTKG

SEQ ID NO: 209893 - protein, 15 aa, Artificial Sequence
  Description of Artificial Sequence: Synthetic peptide
  Seed: EWLKTRPILSPLTKG
EVLKVRAILLPLTKG

SEQ ID NO: 209894 - protein, 15 aa, Artificial Sequence
  Description of Artificial Sequence: Synthetic peptide
  Seed: EWLKTRPILSPLTKG
EVLKVRAILMPLTKG

SEQ ID NO: 209895 - protein, 15 aa, Artificial Sequence
  Description of Artificial Sequence: Synthetic peptide
  Seed: EWLKTRPILSPLTKG
EVLKVRGILIPLTKG

SEQ ID NO: 209896 - protein, 15 aa, Artificial Sequence
  Description of Artificial Sequence: Synthetic peptide
  Seed: EWLKTRPILSPLTKG
EVLKVRGILLPLTKG

SEQ ID NO: 209897 - protein, 15 aa, Artificial Sequence
  Description of Artificial Sequence: Synthetic peptide
  Seed: EWLKTRPILSPLTKG
EVLKVRGILMPLTKG

SEQ ID NO: 209898 - protein, 15 aa, Artificial Sequence
  Description of Artificial Sequence: Synthetic peptide
  Seed: EWLKTRPILSPLTKG
EVLKVRGILVPLTKG

SEQ ID NO: 209899 - protein, 15 aa, Artificial Sequence
  Description of Artificial Sequence: Synthetic peptide
  Seed: EWLKTRPILSPLTKG
EVLKVRSILLPLTKG

SEQ ID NO: 209900 - protein, 15 aa, Artificial Sequence
  Description of Artificial Sequence: Synthetic peptide
  Seed: EWLKTRPILSPLTKG
EWLKARAILAPLTKG

SEQ ID NO: 209901 - protein, 15 aa, Artificial Sequence
  Description of Artificial Sequence: Synthetic peptide
  Seed: EWLKTRPILSPLTKG
EWLKARAILCPLTKG

SEQ ID NO: 209902 - protein, 15 aa, Artificial Sequence
  Description of Artificial Sequence: Synthetic peptide
  Seed: EWLKTRPILSPLTKG
EWLKARAILGPLTKG

SEQ ID NO: 209903 - protein, 15 aa, Artificial Sequence
  Description of Artificial Sequence: Synthetic peptide
  Seed: EWLKTRPILSPLTKG
EWLKARAILIPLTKG

SEQ ID NO: 209904 - protein, 15 aa, Artificial Sequence
  Description of Artificial Sequence: Synthetic peptide
  Seed: EWLKTRPILSPLTKG
EWLKARAILLPLTKG

SEQ ID NO: 209905 - protein, 15 aa, Artificial Sequence
  Description of Artificial Sequence: Synthetic peptide
  Seed: EWLKTRPILSPLTKG
EWLKARAILMPLTKG

SEQ ID NO: 209906 - protein, 15 aa, Artificial Sequence
  Description of Artificial Sequence: Synthetic peptide
  Seed: EWLKTRPILSPLTKG
EWLKARAILNPLTKG

SEQ ID NO: 209907 - protein, 15 aa, Artificial Sequence
  Description of Artificial Sequence: Synthetic peptide
  Seed: EWLKTRPILSPLTKG
EWLKARAILSPLTKG

SEQ ID NO: 209908 - protein, 15 aa, Artificial Sequence
  Description of Artificial Sequence: Synthetic peptide
  Seed: EWLKTRPILSPLTKG
EWLKARAILTPLTKG

SEQ ID NO: 209909 - protein, 15 aa, Artificial Sequence
  Description of Artificial Sequence: Synthetic peptide
  Seed: EWLKTRPILSPLTKG
EWLKARAILVPLTKG

SEQ ID NO: 209910 - protein, 15 aa, Artificial Sequence
  Description of Artificial Sequence: Synthetic peptide
  Seed: EWLKTRPILSPLTKG
EWLKARGILAPLTKG

SEQ ID NO: 209911 - protein, 15 aa, Artificial Sequence
  Description of Artificial Sequence: Synthetic peptide
  Seed: EWLKTRPILSPLTKG
EWLKARGILGPLTKG

SEQ ID NO: 209912 - protein, 15 aa, Artificial Sequence
  Description of Artificial Sequence: Synthetic peptide
  Seed: EWLKTRPILSPLTKG
EWLKARGILIPLTKG

SEQ ID NO: 209913 - protein, 15 aa, Artificial Sequence
  Description of Artificial Sequence: Synthetic peptide
  Seed: EWLKTRPILSPLTKG
EWLKARGILLPLTKG

SEQ ID NO: 209914 - protein, 15 aa, Artificial Sequence
  Description of Artificial Sequence: Synthetic peptide
  Seed: EWLKTRPILSPLTKG
EWLKARGILMPLTKG

SEQ ID NO: 209915 - protein, 15 aa, Artificial Sequence
  Description of Artificial Sequence: Synthetic peptide
  Seed: EWLKTRPILSPLTKG
EWLKARGILNPLTKG

SEQ ID NO: 209916 - protein, 15 aa, Artificial Sequence
  Description of Artificial Sequence: Synthetic peptide
  Seed: EWLKTRPILSPLTKG
EWLKARGILSPLTKG

SEQ ID NO: 209917 - protein, 15 aa, Artificial Sequence
  Description of Artificial Sequence: Synthetic peptide
  Seed: EWLKTRPILSPLTKG
EWLKARGILTPLTKG

SEQ ID NO: 209918 - protein, 15 aa, Artificial Sequence
  Description of Artificial Sequence: Synthetic peptide
  Seed: EWLKTRPILSPLTKG
EWLKARGILVPLTKG

SEQ ID NO: 209919 - protein, 15 aa, Artificial Sequence
  Description of Artificial Sequence: Synthetic peptide
  Seed: EWLKTRPILSPLTKG
EWLKARNILAPLTKG

SEQ ID NO: 209920 - protein, 15 aa, Artificial Sequence
  Description of Artificial Sequence: Synthetic peptide
  Seed: EWLKTRPILSPLTKG
EWLKARNILIPLTKG

SEQ ID NO: 209921 - protein, 15 aa, Artificial Sequence
  Description of Artificial Sequence: Synthetic peptide
  Seed: EWLKTRPILSPLTKG
EWLKARNILLPLTKG

SEQ ID NO: 209922 - protein, 15 aa, Artificial Sequence
  Description of Artificial Sequence: Synthetic peptide
  Seed: EWLKTRPILSPLTKG
EWLKARNILVPLTKG

SEQ ID NO: 209923 - protein, 15 aa, Artificial Sequence
  Description of Artificial Sequence: Synthetic peptide
  Seed: EWLKTRPILSPLTKG
EWLKARRILAPLTKG

SEQ ID NO: 209924 - protein, 15 aa, Artificial Sequence
  Description of Artificial Sequence: Synthetic peptide
  Seed: EWLKTRPILSPLTKG
EWLKARRILSPLTKG

SEQ ID NO: 209925 - protein, 15 aa, Artificial Sequence
  Description of Artificial Sequence: Synthetic peptide
  Seed: EWLKTRPILSPLTKG
EWLKARSILAPLTKG

SEQ ID NO: 209926 - protein, 15 aa, Artificial Sequence
  Description of Artificial Sequence: Synthetic peptide
  Seed: EWLKTRPILSPLTKG
EWLKARSILGPLTKG

SEQ ID NO: 209927 - protein, 15 aa, Artificial Sequence
  Description of Artificial Sequence: Synthetic peptide
  Seed: EWLKTRPILSPLTKG
EWLKARSILIPLTKG

SEQ ID NO: 209928 - protein, 15 aa, Artificial Sequence
  Description of Artificial Sequence: Synthetic peptide
  Seed: EWLKTRPILSPLTKG
EWLKARSILLPLTKG

SEQ ID NO: 209929 - protein, 15 aa, Artificial Sequence
  Description of Artificial Sequence: Synthetic peptide
  Seed: EWLKTRPILSPLTKG
EWLKARSILMPLTKG

SEQ ID NO: 209930 - protein, 15 aa, Artificial Sequence
  Description of Artificial Sequence: Synthetic peptide
  Seed: EWLKTRPILSPLTKG
EWLKARSILSPLTKG

SEQ ID NO: 209931 - protein, 15 aa, Artificial Sequence
  Description of Artificial Sequence: Synthetic peptide
  Seed: EWLKTRPILSPLTKG
EWLKARSILTPLTKG

SEQ ID NO: 209932 - protein, 15 aa, Artificial Sequence
  Description of Artificial Sequence: Synthetic peptide
  Seed: EWLKTRPILSPLTKG
EWLKARSILVPLTKG

SEQ ID NO: 209933 - protein, 15 aa, Artificial Sequence
  Description of Artificial Sequence: Synthetic peptide
  Seed: EWLKTRPILSPLTKG
EWLKARTILAPLTKG

SEQ ID NO: 209934 - protein, 15 aa, Artificial Sequence
  Description of Artificial Sequence: Synthetic peptide
  Seed: EWLKTRPILSPLTKG
EWLKARTILIPLTKG

SEQ ID NO: 209935 - protein, 15 aa, Artificial Sequence
  Description of Artificial Sequence: Synthetic peptide
  Seed: EWLKTRPILSPLTKG
EWLKARTILLPLTKG

SEQ ID NO: 209936 - protein, 15 aa, Artificial Sequence
  Description of Artificial Sequence: Synthetic peptide
  Seed: EWLKTRPILSPLTKG
EWLKARTILMPLTKG

SEQ ID NO: 209937 - protein, 15 aa, Artificial Sequence
  Description of Artificial Sequence: Synthetic peptide
  Seed: EWLKTRPILSPLTKG
EWLKARTILNPLTKG

SEQ ID NO: 209938 - protein, 15 aa, Artificial Sequence
  Description of Artificial Sequence: Synthetic peptide
  Seed: EWLKTRPILSPLTKG
EWLKARTILSPLTKG

SEQ ID NO: 209939 - protein, 15 aa, Artificial Sequence
  Description of Artificial Sequence: Synthetic peptide
  Seed: EWLKTRPILSPLTKG
EWLKARTILTPLTKG

SEQ ID NO: 209940 - protein, 15 aa, Artificial Sequence
  Description of Artificial Sequence: Synthetic peptide
  Seed: EWLKTRPILSPLTKG
EWLKARTILVPLTKG

SEQ ID NO: 209941 - protein, 15 aa, Artificial Sequence
  Description of Artificial Sequence: Synthetic peptide
  Seed: EWLKTRPILSPLTKG
EWLKARVILAPLTKG

SEQ ID NO: 209942 - protein, 15 aa, Artificial Sequence
  Description of Artificial Sequence: Synthetic peptide
  Seed: EWLKTRPILSPLTKG
EWLKCRAILAPLTKG

SEQ ID NO: 209943 - protein, 15 aa, Artificial Sequence
  Description of Artificial Sequence: Synthetic peptide
  Seed: EWLKTRPILSPLTKG
EWLKCRAILGPLTKG

SEQ ID NO: 209944 - protein, 15 aa, Artificial Sequence
  Description of Artificial Sequence: Synthetic peptide
  Seed: EWLKTRPILSPLTKG
EWLKCRAILSPLTKG

SEQ ID NO: 209945 - protein, 15 aa, Artificial Sequence
  Description of Artificial Sequence: Synthetic peptide
  Seed: EWLKTRPILSPLTKG
EWLKCRAILTPLTKG

SEQ ID NO: 209946 - protein, 15 aa, Artificial Sequence
  Description of Artificial Sequence: Synthetic peptide
  Seed: EWLKTRPILSPLTKG
EWLKCRAILVPLTKG

SEQ ID NO: 209947 - protein, 15 aa, Artificial Sequence
  Description of Artificial Sequence: Synthetic peptide
  Seed: EWLKTRPILSPLTKG
EWLKCRGILAPLTKG

SEQ ID NO: 209948 - protein, 15 aa, Artificial Sequence
  Description of Artificial Sequence: Synthetic peptide
  Seed: EWLKTRPILSPLTKG
EWLKCRSILAPLTKG

SEQ ID NO: 209949 - protein, 15 aa, Artificial Sequence
  Description of Artificial Sequence: Synthetic peptide
  Seed: EWLKTRPILSPLTKG
EWLKCRSILGPLTKG

SEQ ID NO: 209950 - protein, 15 aa, Artificial Sequence
  Description of Artificial Sequence: Synthetic peptide
  Seed: EWLKTRPILSPLTKG
EWLKCRSILSPLTKG

SEQ ID NO: 209951 - protein, 15 aa, Artificial Sequence
  Description of Artificial Sequence: Synthetic peptide
  Seed: EWLKTRPILSPLTKG
EWLKERAILAPLTKG

SEQ ID NO: 209952 - protein, 15 aa, Artificial Sequence
  Description of Artificial Sequence: Synthetic peptide
  Seed: EWLKTRPILSPLTKG
EWLKERAILIPLTKG

SEQ ID NO: 209953 - protein, 15 aa, Artificial Sequence
  Description of Artificial Sequence: Synthetic peptide
  Seed: EWLKTRPILSPLTKG
EWLKERAILLPLTKG

SEQ ID NO: 209954 - protein, 15 aa, Artificial Sequence
  Description of Artificial Sequence: Synthetic peptide
  Seed: EWLKTRPILSPLTKG
EWLKERAILSPLTKG

SEQ ID NO: 209955 - protein, 15 aa, Artificial Sequence
  Description of Artificial Sequence: Synthetic peptide
  Seed: EWLKTRPILSPLTKG
EWLKERAILTPLTKG

SEQ ID NO: 209956 - protein, 15 aa, Artificial Sequence
  Description of Artificial Sequence: Synthetic peptide
  Seed: EWLKTRPILSPLTKG
EWLKERAILVPLTKG

SEQ ID NO: 209957 - protein, 15 aa, Artificial Sequence
  Description of Artificial Sequence: Synthetic peptide
  Seed: EWLKTRPILSPLTKG
EWLKERGILAPLTKG

SEQ ID NO: 209958 - protein, 15 aa, Artificial Sequence
  Description of Artificial Sequence: Synthetic peptide
  Seed: EWLKTRPILSPLTKG
EWLKERGILIPLTKG

SEQ ID NO: 209959 - protein, 15 aa, Artificial Sequence
  Description of Artificial Sequence: Synthetic peptide
  Seed: EWLKTRPILSPLTKG
EWLKERGILLPLTKG

SEQ ID NO: 209960 - protein, 15 aa, Artificial Sequence
  Description of Artificial Sequence: Synthetic peptide
  Seed: EWLKTRPILSPLTKG
EWLKERGILVPLTKG

SEQ ID NO: 209961 - protein, 15 aa, Artificial Sequence
  Description of Artificial Sequence: Synthetic peptide
  Seed: EWLKTRPILSPLTKG
EWLKERSILAPLTKG

SEQ ID NO: 209962 - protein, 15 aa, Artificial Sequence
  Description of Artificial Sequence: Synthetic peptide
  Seed: EWLKTRPILSPLTKG
EWLKERSILVPLTKG

SEQ ID NO: 209963 - protein, 15 aa, Artificial Sequence
  Description of Artificial Sequence: Synthetic peptide
  Seed: EWLKTRPILSPLTKG
EWLKFRAILLPLTKG

SEQ ID NO: 209964 - protein, 15 aa, Artificial Sequence
  Description of Artificial Sequence: Synthetic peptide
  Seed: EWLKTRPILSPLTKG
EWLKFRGILLPLTKG

SEQ ID NO: 209965 - protein, 15 aa, Artificial Sequence
  Description of Artificial Sequence: Synthetic peptide
  Seed: EWLKTRPILSPLTKG
EWLKFRKILGPLTKG

SEQ ID NO: 209966 - protein, 15 aa, Artificial Sequence
  Description of Artificial Sequence: Synthetic peptide
  Seed: EWLKTRPILSPLTKG
EWLKFRSILVPLTKG

SEQ ID NO: 209967 - protein, 15 aa, Artificial Sequence
  Description of Artificial Sequence: Synthetic peptide
  Seed: EWLKTRPILSPLTKG
EWLKGRAILAPLTKG

SEQ ID NO: 209968 - protein, 15 aa, Artificial Sequence
  Description of Artificial Sequence: Synthetic peptide
  Seed: EWLKTRPILSPLTKG
EWLKGRAILGPLTKG

SEQ ID NO: 209969 - protein, 15 aa, Artificial Sequence
  Description of Artificial Sequence: Synthetic peptide
  Seed: EWLKTRPILSPLTKG
EWLKGRAILIPLTKG

SEQ ID NO: 209970 - protein, 15 aa, Artificial Sequence
  Description of Artificial Sequence: Synthetic peptide
  Seed: EWLKTRPILSPLTKG
EWLKGRAILLPLTKG

SEQ ID NO: 209971 - protein, 15 aa, Artificial Sequence
  Description of Artificial Sequence: Synthetic peptide
  Seed: EWLKTRPILSPLTKG
EWLKGRAILMPLTKG

SEQ ID NO: 209972 - protein, 15 aa, Artificial Sequence
  Description of Artificial Sequence: Synthetic peptide
  Seed: EWLKTRPILSPLTKG
EWLKGRAILSPLTKG

SEQ ID NO: 209973 - protein, 15 aa, Artificial Sequence
  Description of Artificial Sequence: Synthetic peptide
  Seed: EWLKTRPILSPLTKG
EWLKGRAILTPLTKG

SEQ ID NO: 209974 - protein, 15 aa, Artificial Sequence
  Description of Artificial Sequence: Synthetic peptide
  Seed: EWLKTRPILSPLTKG
EWLKGRAILVPLTKG

SEQ ID NO: 209975 - protein, 15 aa, Artificial Sequence
  Description of Artificial Sequence: Synthetic peptide
  Seed: EWLKTRPILSPLTKG
EWLKGRGILAPLTKG

SEQ ID NO: 209976 - protein, 15 aa, Artificial Sequence
  Description of Artificial Sequence: Synthetic peptide
  Seed: EWLKTRPILSPLTKG
EWLKGRGILIPLTKG

SEQ ID NO: 209977 - protein, 15 aa, Artificial Sequence
  Description of Artificial Sequence: Synthetic peptide
  Seed: EWLKTRPILSPLTKG
EWLKGRGILLPLTKG

SEQ ID NO: 209978 - protein, 15 aa, Artificial Sequence
  Description of Artificial Sequence: Synthetic peptide
  Seed: EWLKTRPILSPLTKG
EWLKGRGILVPLTKG

SEQ ID NO: 209979 - protein, 15 aa, Artificial Sequence
  Description of Artificial Sequence: Synthetic peptide
  Seed: EWLKTRPILSPLTKG
EWLKGRSILAPLTKG

SEQ ID NO: 209980 - protein, 15 aa, Artificial Sequence
  Description of Artificial Sequence: Synthetic peptide
  Seed: EWLKTRPILSPLTKG
EWLKGRSILIPLTKG

SEQ ID NO: 209981 - protein, 15 aa, Artificial Sequence
  Description of Artificial Sequence: Synthetic peptide
  Seed: EWLKTRPILSPLTKG
EWLKGRSILLPLTKG

SEQ ID NO: 209982 - protein, 15 aa, Artificial Sequence
  Description of Artificial Sequence: Synthetic peptide
  Seed: EWLKTRPILSPLTKG
EWLKGRSILVPLTKG

SEQ ID NO: 209983 - protein, 15 aa, Artificial Sequence
  Description of Artificial Sequence: Synthetic peptide
  Seed: EWLKTRPILSPLTKG
EWLKHRAILAPLTKG

SEQ ID NO: 209984 - protein, 15 aa, Artificial Sequence
  Description of Artificial Sequence: Synthetic peptide
  Seed: EWLKTRPILSPLTKG
EWLKHRAILLPLTKG

SEQ ID NO: 209985 - protein, 15 aa, Artificial Sequence
  Description of Artificial Sequence: Synthetic peptide
  Seed: EWLKTRPILSPLTKG
EWLKHRAILVPLTKG

SEQ ID NO: 209986 - protein, 15 aa, Artificial Sequence
  Description of Artificial Sequence: Synthetic peptide
  Seed: EWLKTRPILSPLTKG
EWLKIRAILCPLTKG

SEQ ID NO: 209987 - protein, 15 aa, Artificial Sequence
  Description of Artificial Sequence: Synthetic peptide
  Seed: EWLKTRPILSPLTKG
EWLKIRAILIPLTKG

SEQ ID NO: 209988 - protein, 15 aa, Artificial Sequence
  Description of Artificial Sequence: Synthetic peptide
  Seed: EWLKTRPILSPLTKG
EWLKIRAILLPLTKG

SEQ ID NO: 209989 - protein, 15 aa, Artificial Sequence
  Description of Artificial Sequence: Synthetic peptide
  Seed: EWLKTRPILSPLTKG
EWLKIRAILMPLTKG

SEQ ID NO: 209990 - protein, 15 aa, Artificial Sequence
  Description of Artificial Sequence: Synthetic peptide
  Seed: EWLKTRPILSPLTKG
EWLKIRAILRPLTKG

SEQ ID NO: 209991 - protein, 15 aa, Artificial Sequence
  Description of Artificial Sequence: Synthetic peptide
  Seed: EWLKTRPILSPLTKG
EWLKIRAILVPLTKG

SEQ ID NO: 209992 - protein, 15 aa, Artificial Sequence
  Description of Artificial Sequence: Synthetic peptide
  Seed: EWLKTRPILSPLTKG
EWLKIRGILCPLTKG

SEQ ID NO: 209993 - protein, 15 aa, Artificial Sequence
  Description of Artificial Sequence: Synthetic peptide
  Seed: EWLKTRPILSPLTKG
EWLKIRGILIPLTKG

SEQ ID NO: 209994 - protein, 15 aa, Artificial Sequence
  Description of Artificial Sequence: Synthetic peptide
  Seed: EWLKTRPILSPLTKG
EWLKIRGILLPLTKG

SEQ ID NO: 209995 - protein, 15 aa, Artificial Sequence
  Description of Artificial Sequence: Synthetic peptide
  Seed: EWLKTRPILSPLTKG
EWLKIRGILMPLTKG

SEQ ID NO: 209996 - protein, 15 aa, Artificial Sequence
  Description of Artificial Sequence: Synthetic peptide
  Seed: EWLKTRPILSPLTKG
EWLKIRGILTPLTKG

SEQ ID NO: 209997 - protein, 15 aa, Artificial Sequence
  Description of Artificial Sequence: Synthetic peptide
  Seed: EWLKTRPILSPLTKG
EWLKIRGILVPLTKG

SEQ ID NO: 209998 - protein, 15 aa, Artificial Sequence
  Description of Artificial Sequence: Synthetic peptide
  Seed: EWLKTRPILSPLTKG
EWLKIRKILAPLTKG

SEQ ID NO: 209999 - protein, 15 aa, Artificial Sequence
  Description of Artificial Sequence: Synthetic peptide
  Seed: EWLKTRPILSPLTKG
EWLKIRKILGPLTKG

SEQ ID NO: 210000 - protein, 15 aa, Artificial Sequence
  Description of Artificial Sequence: Synthetic peptide
  Seed: EWLKTRPILSPLTKG
EWLKIRKILSPLTKG

SEQ ID NO: 210001 - protein, 15 aa, Artificial Sequence
  Description of Artificial Sequence: Synthetic peptide
  Seed: EWLKTRPILSPLTKG
EWLKIRNILIPLTKG

SEQ ID NO: 210002 - protein, 15 aa, Artificial Sequence
  Description of Artificial Sequence: Synthetic peptide
  Seed: EWLKTRPILSPLTKG
EWLKIRNILLPLTKG

SEQ ID NO: 210003 - protein, 15 aa, Artificial Sequence
  Description of Artificial Sequence: Synthetic peptide
  Seed: EWLKTRPILSPLTKG
EWLKIRNILMPLTKG

SEQ ID NO: 210004 - protein, 15 aa, Artificial Sequence
  Description of Artificial Sequence: Synthetic peptide
  Seed: EWLKTRPILSPLTKG
EWLKIRNILVPLTKG

SEQ ID NO: 210005 - protein, 15 aa, Artificial Sequence
  Description of Artificial Sequence: Synthetic peptide
  Seed: EWLKTRPILSPLTKG
EWLKIRRILAPLTKG

SEQ ID NO: 210006 - protein, 15 aa, Artificial Sequence
  Description of Artificial Sequence: Synthetic peptide
  Seed: EWLKTRPILSPLTKG
EWLKIRRILGPLTKG

SEQ ID NO: 210007 - protein, 15 aa, Artificial Sequence
  Description of Artificial Sequence: Synthetic peptide
  Seed: EWLKTRPILSPLTKG
EWLKIRRILNPLTKG

SEQ ID NO: 210008 - protein, 15 aa, Artificial Sequence
  Description of Artificial Sequence: Synthetic peptide
  Seed: EWLKTRPILSPLTKG
EWLKIRRILQPLTKG

SEQ ID NO: 210009 - protein, 15 aa, Artificial Sequence
  Description of Artificial Sequence: Synthetic peptide
  Seed: EWLKTRPILSPLTKG
EWLKIRRILSPLTKG

SEQ ID NO: 210010 - protein, 15 aa, Artificial Sequence
  Description of Artificial Sequence: Synthetic peptide
  Seed: EWLKTRPILSPLTKG
EWLKIRSILCPLTKG

SEQ ID NO: 210011 - protein, 15 aa, Artificial Sequence
  Description of Artificial Sequence: Synthetic peptide
  Seed: EWLKTRPILSPLTKG
EWLKIRSILIPLTKG

SEQ ID NO: 210012 - protein, 15 aa, Artificial Sequence
  Description of Artificial Sequence: Synthetic peptide
  Seed: EWLKTRPILSPLTKG
EWLKIRSILLPLTKG

SEQ ID NO: 210013 - protein, 15 aa, Artificial Sequence
  Description of Artificial Sequence: Synthetic peptide
  Seed: EWLKTRPILSPLTKG
EWLKIRSILMPLTKG

SEQ ID NO: 210014 - protein, 15 aa, Artificial Sequence
  Description of Artificial Sequence: Synthetic peptide
  Seed: EWLKTRPILSPLTKG
EWLKIRSILVPLTKG

SEQ ID NO: 210015 - protein, 15 aa, Artificial Sequence
  Description of Artificial Sequence: Synthetic peptide
  Seed: EWLKTRPILSPLTKG
EWLKIRTILIPLTKG

SEQ ID NO: 210016 - protein, 15 aa, Artificial Sequence
  Description of Artificial Sequence: Synthetic peptide
  Seed: EWLKTRPILSPLTKG
EWLKIRTILLPLTKG

SEQ ID NO: 210017 - protein, 15 aa, Artificial Sequence
  Description of Artificial Sequence: Synthetic peptide
  Seed: EWLKTRPILSPLTKG
EWLKIRTILMPLTKG

SEQ ID NO: 210018 - protein, 15 aa, Artificial Sequence
  Description of Artificial Sequence: Synthetic peptide
  Seed: EWLKTRPILSPLTKG
EWLKIRTILVPLTKG

SEQ ID NO: 210019 - protein, 15 aa, Artificial Sequence
  Description of Artificial Sequence: Synthetic peptide
  Seed: EWLKTRPILSPLTKG
EWLKLRAILAPLTKG

SEQ ID NO: 210020 - protein, 15 aa, Artificial Sequence
  Description of Artificial Sequence: Synthetic peptide
  Seed: EWLKTRPILSPLTKG
EWLKLRAILCPLTKG

SEQ ID NO: 210021 - protein, 15 aa, Artificial Sequence
  Description of Artificial Sequence: Synthetic peptide
  Seed: EWLKTRPILSPLTKG
EWLKLRAILFPLTKG

SEQ ID NO: 210022 - protein, 15 aa, Artificial Sequence
  Description of Artificial Sequence: Synthetic peptide
  Seed: EWLKTRPILSPLTKG
EWLKLRAILHPLTKG

SEQ ID NO: 210023 - protein, 15 aa, Artificial Sequence
  Description of Artificial Sequence: Synthetic peptide
  Seed: EWLKTRPILSPLTKG
EWLKLRAILIPLTKG

SEQ ID NO: 210024 - protein, 15 aa, Artificial Sequence
  Description of Artificial Sequence: Synthetic peptide
  Seed: EWLKTRPILSPLTKG
EWLKLRAILKPLTKG

SEQ ID NO: 210025 - protein, 15 aa, Artificial Sequence
  Description of Artificial Sequence: Synthetic peptide
  Seed: EWLKTRPILSPLTKG
EWLKLRAILLPLTKG

SEQ ID NO: 210026 - protein, 15 aa, Artificial Sequence
  Description of Artificial Sequence: Synthetic peptide
  Seed: EWLKTRPILSPLTKG
EWLKLRAILMPLTKG

SEQ ID NO: 210027 - protein, 15 aa, Artificial Sequence
  Description of Artificial Sequence: Synthetic peptide
  Seed: EWLKTRPILSPLTKG
EWLKLRAILQPLTKG

SEQ ID NO: 210028 - protein, 15 aa, Artificial Sequence
  Description of Artificial Sequence: Synthetic peptide
  Seed: EWLKTRPILSPLTKG
EWLKLRAILRPLTKG

SEQ ID NO: 210029 - protein, 15 aa, Artificial Sequence
  Description of Artificial Sequence: Synthetic peptide
  Seed: EWLKTRPILSPLTKG
EWLKLRAILTPLTKG

SEQ ID NO: 210030 - protein, 15 aa, Artificial Sequence
  Description of Artificial Sequence: Synthetic peptide
  Seed: EWLKTRPILSPLTKG
EWLKLRAILVPLTKG

SEQ ID NO: 210031 - protein, 15 aa, Artificial Sequence
  Description of Artificial Sequence: Synthetic peptide
  Seed: EWLKTRPILSPLTKG
EWLKLRAILYPLTKG

SEQ ID NO: 210032 - protein, 15 aa, Artificial Sequence
  Description of Artificial Sequence: Synthetic peptide
  Seed: EWLKTRPILSPLTKG
EWLKLRGILAPLTKG

SEQ ID NO: 210033 - protein, 15 aa, Artificial Sequence
  Description of Artificial Sequence: Synthetic peptide
  Seed: EWLKTRPILSPLTKG
EWLKLRGILCPLTKG

SEQ ID NO: 210034 - protein, 15 aa, Artificial Sequence
  Description of Artificial Sequence: Synthetic peptide
  Seed: EWLKTRPILSPLTKG
EWLKLRGILGPLTKG

SEQ ID NO: 210035 - protein, 15 aa, Artificial Sequence
  Description of Artificial Sequence: Synthetic peptide
  Seed: EWLKTRPILSPLTKG
EWLKLRGILHPLTKG

SEQ ID NO: 210036 - protein, 15 aa, Artificial Sequence
  Description of Artificial Sequence: Synthetic peptide
  Seed: EWLKTRPILSPLTKG
EWLKLRGILIPLTKG

SEQ ID NO: 210037 - protein, 15 aa, Artificial Sequence
  Description of Artificial Sequence: Synthetic peptide
  Seed: EWLKTRPILSPLTKG
EWLKLRGILLPLTKG

SEQ ID NO: 210038 - protein, 15 aa, Artificial Sequence
  Description of Artificial Sequence: Synthetic peptide
  Seed: EWLKTRPILSPLTKG
EWLKLRGILMPLTKG

SEQ ID NO: 210039 - protein, 15 aa, Artificial Sequence
  Description of Artificial Sequence: Synthetic peptide
  Seed: EWLKTRPILSPLTKG
EWLKLRGILNPLTKG

SEQ ID NO: 210040 - protein, 15 aa, Artificial Sequence
  Description of Artificial Sequence: Synthetic peptide
  Seed: EWLKTRPILSPLTKG
EWLKLRGILSPLTKG

SEQ ID NO: 210041 - protein, 15 aa, Artificial Sequence
  Description of Artificial Sequence: Synthetic peptide
  Seed: EWLKTRPILSPLTKG
EWLKLRGILTPLTKG

SEQ ID NO: 210042 - protein, 15 aa, Artificial Sequence
  Description of Artificial Sequence: Synthetic peptide
  Seed: EWLKTRPILSPLTKG
EWLKLRGILVPLTKG

SEQ ID NO: 210043 - protein, 15 aa, Artificial Sequence
  Description of Artificial Sequence: Synthetic peptide
  Seed: EWLKTRPILSPLTKG
EWLKLRKILAPLTKG

SEQ ID NO: 210044 - protein, 15 aa, Artificial Sequence
  Description of Artificial Sequence: Synthetic peptide
  Seed: EWLKTRPILSPLTKG
EWLKLRKILSPLTKG

SEQ ID NO: 210045 - protein, 15 aa, Artificial Sequence
  Description of Artificial Sequence: Synthetic peptide
  Seed: EWLKTRPILSPLTKG
EWLKLRNILIPLTKG

SEQ ID NO: 210046 - protein, 15 aa, Artificial Sequence
  Description of Artificial Sequence: Synthetic peptide
  Seed: EWLKTRPILSPLTKG
EWLKLRNILLPLTKG

SEQ ID NO: 210047 - protein, 15 aa, Artificial Sequence
  Description of Artificial Sequence: Synthetic peptide
  Seed: EWLKTRPILSPLTKG
EWLKLRNILMPLTKG

SEQ ID NO: 210048 - protein, 15 aa, Artificial Sequence
  Description of Artificial Sequence: Synthetic peptide
  Seed: EWLKTRPILSPLTKG
EWLKLRNILTPLTKG

SEQ ID NO: 210049 - protein, 15 aa, Artificial Sequence
  Description of Artificial Sequence: Synthetic peptide
  Seed: EWLKTRPILSPLTKG
EWLKLRNILVPLTKG

SEQ ID NO: 210050 - protein, 15 aa, Artificial Sequence
  Description of Artificial Sequence: Synthetic peptide
  Seed: EWLKTRPILSPLTKG
EWLKLRRILAPLTKG

SEQ ID NO: 210051 - protein, 15 aa, Artificial Sequence
  Description of Artificial Sequence: Synthetic peptide
  Seed: EWLKTRPILSPLTKG
EWLKLRRILGPLTKG

SEQ ID NO: 210052 - protein, 15 aa, Artificial Sequence
  Description of Artificial Sequence: Synthetic peptide
  Seed: EWLKTRPILSPLTKG
EWLKLRRILSPLTKG

SEQ ID NO: 210053 - protein, 15 aa, Artificial Sequence
  Description of Artificial Sequence: Synthetic peptide
  Seed: EWLKTRPILSPLTKG
EWLKLRSILCPLTKG

SEQ ID NO: 210054 - protein, 15 aa, Artificial Sequence
  Description of Artificial Sequence: Synthetic peptide
  Seed: EWLKTRPILSPLTKG
EWLKLRSILHPLTKG

SEQ ID NO: 210055 - protein, 15 aa, Artificial Sequence
  Description of Artificial Sequence: Synthetic peptide
  Seed: EWLKTRPILSPLTKG
EWLKLRSILIPLTKG

SEQ ID NO: 210056 - protein, 15 aa, Artificial Sequence
  Description of Artificial Sequence: Synthetic peptide
  Seed: EWLKTRPILSPLTKG
EWLKLRSILLPLTKG

SEQ ID NO: 210057 - protein, 15 aa, Artificial Sequence
  Description of Artificial Sequence: Synthetic peptide
  Seed: EWLKTRPILSPLTKG
EWLKLRSILMPLTKG

SEQ ID NO: 210058 - protein, 15 aa, Artificial Sequence
  Description of Artificial Sequence: Synthetic peptide
  Seed: EWLKTRPILSPLTKG
EWLKLRSILQPLTKG

SEQ ID NO: 210059 - protein, 15 aa, Artificial Sequence
  Description of Artificial Sequence: Synthetic peptide
  Seed: EWLKTRPILSPLTKG
EWLKLRSILRPLTKG

SEQ ID NO: 210060 - protein, 15 aa, Artificial Sequence
  Description of Artificial Sequence: Synthetic peptide
  Seed: EWLKTRPILSPLTKG
EWLKLRSILTPLTKG

SEQ ID NO: 210061 - protein, 15 aa, Artificial Sequence
  Description of Artificial Sequence: Synthetic peptide
  Seed: EWLKTRPILSPLTKG
EWLKLRSILVPLTKG

SEQ ID NO: 210062 - protein, 15 aa, Artificial Sequence
  Description of Artificial Sequence: Synthetic peptide
  Seed: EWLKTRPILSPLTKG
EWLKLRTILIPLTKG

SEQ ID NO: 210063 - protein, 15 aa, Artificial Sequence
  Description of Artificial Sequence: Synthetic peptide
  Seed: EWLKTRPILSPLTKG
EWLKLRTILLPLTKG

SEQ ID NO: 210064 - protein, 15 aa, Artificial Sequence
  Description of Artificial Sequence: Synthetic peptide
  Seed: EWLKTRPILSPLTKG
EWLKLRTILMPLTKG

SEQ ID NO: 210065 - protein, 15 aa, Artificial Sequence
  Description of Artificial Sequence: Synthetic peptide
  Seed: EWLKTRPILSPLTKG
EWLKLRTILTPLTKG

SEQ ID NO: 210066 - protein, 15 aa, Artificial Sequence
  Description of Artificial Sequence: Synthetic peptide
  Seed: EWLKTRPILSPLTKG
EWLKLRTILVPLTKG

SEQ ID NO: 210067 - protein, 15 aa, Artificial Sequence
  Description of Artificial Sequence: Synthetic peptide
  Seed: EWLKTRPILSPLTKG
EWLKMRAILAPLTKG

SEQ ID NO: 210068 - protein, 15 aa, Artificial Sequence
  Description of Artificial Sequence: Synthetic peptide
  Seed: EWLKTRPILSPLTKG
EWLKMRAILCPLTKG

SEQ ID NO: 210069 - protein, 15 aa, Artificial Sequence
  Description of Artificial Sequence: Synthetic peptide
  Seed: EWLKTRPILSPLTKG
EWLKMRAILFPLTKG

SEQ ID NO: 210070 - protein, 15 aa, Artificial Sequence
  Description of Artificial Sequence: Synthetic peptide
  Seed: EWLKTRPILSPLTKG
EWLKMRAILHPLTKG

SEQ ID NO: 210071 - protein, 15 aa, Artificial Sequence
  Description of Artificial Sequence: Synthetic peptide
  Seed: EWLKTRPILSPLTKG
EWLKMRAILIPLTKG

SEQ ID NO: 210072 - protein, 15 aa, Artificial Sequence
  Description of Artificial Sequence: Synthetic peptide
  Seed: EWLKTRPILSPLTKG
EWLKMRAILKPLTKG

SEQ ID NO: 210073 - protein, 15 aa, Artificial Sequence
  Description of Artificial Sequence: Synthetic peptide
  Seed: EWLKTRPILSPLTKG
EWLKMRAILLPLTKG

SEQ ID NO: 210074 - protein, 15 aa, Artificial Sequence
  Description of Artificial Sequence: Synthetic peptide
  Seed: EWLKTRPILSPLTKG
EWLKMRAILMPLTKG

SEQ ID NO: 210075 - protein, 15 aa, Artificial Sequence
  Description of Artificial Sequence: Synthetic peptide
  Seed: EWLKTRPILSPLTKG
EWLKMRAILNPLTKG

SEQ ID NO: 210076 - protein, 15 aa, Artificial Sequence
  Description of Artificial Sequence: Synthetic peptide
  Seed: EWLKTRPILSPLTKG
EWLKMRAILQPLTKG

SEQ ID NO: 210077 - protein, 15 aa, Artificial Sequence
  Description of Artificial Sequence: Synthetic peptide
  Seed: EWLKTRPILSPLTKG
EWLKMRAILRPLTKG

SEQ ID NO: 210078 - protein, 15 aa, Artificial Sequence
  Description of Artificial Sequence: Synthetic peptide
  Seed: EWLKTRPILSPLTKG
EWLKMRAILSPLTKG

SEQ ID NO: 210079 - protein, 15 aa, Artificial Sequence
  Description of Artificial Sequence: Synthetic peptide
  Seed: EWLKTRPILSPLTKG
EWLKMRAILTPLTKG

SEQ ID NO: 210080 - protein, 15 aa, Artificial Sequence
  Description of Artificial Sequence: Synthetic peptide
  Seed: EWLKTRPILSPLTKG
EWLKMRAILVPLTKG

SEQ ID NO: 210081 - protein, 15 aa, Artificial Sequence
  Description of Artificial Sequence: Synthetic peptide
  Seed: EWLKTRPILSPLTKG
EWLKMRAILYPLTKG

SEQ ID NO: 210082 - protein, 15 aa, Artificial Sequence
  Description of Artificial Sequence: Synthetic peptide
  Seed: EWLKTRPILSPLTKG
EWLKMRGILAPLTKG

SEQ ID NO: 210083 - protein, 15 aa, Artificial Sequence
  Description of Artificial Sequence: Synthetic peptide
  Seed: EWLKTRPILSPLTKG
EWLKMRGILCPLTKG

SEQ ID NO: 210084 - protein, 15 aa, Artificial Sequence
  Description of Artificial Sequence: Synthetic peptide
  Seed: EWLKTRPILSPLTKG
EWLKMRGILFPLTKG

SEQ ID NO: 210085 - protein, 15 aa, Artificial Sequence
  Description of Artificial Sequence: Synthetic peptide
  Seed: EWLKTRPILSPLTKG
EWLKMRGILGPLTKG

SEQ ID NO: 210086 - protein, 15 aa, Artificial Sequence
  Description of Artificial Sequence: Synthetic peptide
  Seed: EWLKTRPILSPLTKG
EWLKMRGILHPLTKG

SEQ ID NO: 210087 - protein, 15 aa, Artificial Sequence
  Description of Artificial Sequence: Synthetic peptide
  Seed: EWLKTRPILSPLTKG
EWLKMRGILIPLTKG

SEQ ID NO: 210088 - protein, 15 aa, Artificial Sequence
  Description of Artificial Sequence: Synthetic peptide
  Seed: EWLKTRPILSPLTKG
EWLKMRGILLPLTKG

SEQ ID NO: 210089 - protein, 15 aa, Artificial Sequence
  Description of Artificial Sequence: Synthetic peptide
  Seed: EWLKTRPILSPLTKG
EWLKMRGILMPLTKG

SEQ ID NO: 210090 - protein, 15 aa, Artificial Sequence
  Description of Artificial Sequence: Synthetic peptide
  Seed: EWLKTRPILSPLTKG
EWLKMRGILNPLTKG

SEQ ID NO: 210091 - protein, 15 aa, Artificial Sequence
  Description of Artificial Sequence: Synthetic peptide
  Seed: EWLKTRPILSPLTKG
EWLKMRGILQPLTKG

SEQ ID NO: 210092 - protein, 15 aa, Artificial Sequence
  Description of Artificial Sequence: Synthetic peptide
  Seed: EWLKTRPILSPLTKG
EWLKMRGILSPLTKG

SEQ ID NO: 210093 - protein, 15 aa, Artificial Sequence
  Description of Artificial Sequence: Synthetic peptide
  Seed: EWLKTRPILSPLTKG
EWLKMRGILTPLTKG

SEQ ID NO: 210094 - protein, 15 aa, Artificial Sequence
  Description of Artificial Sequence: Synthetic peptide
  Seed: EWLKTRPILSPLTKG
EWLKMRGILVPLTKG

SEQ ID NO: 210095 - protein, 15 aa, Artificial Sequence
  Description of Artificial Sequence: Synthetic peptide
  Seed: EWLKTRPILSPLTKG
EWLKMRHILIPLTKG

SEQ ID NO: 210096 - protein, 15 aa, Artificial Sequence
  Description of Artificial Sequence: Synthetic peptide
  Seed: EWLKTRPILSPLTKG
EWLKMRHILLPLTKG

SEQ ID NO: 210097 - protein, 15 aa, Artificial Sequence
  Description of Artificial Sequence: Synthetic peptide
  Seed: EWLKTRPILSPLTKG
EWLKMRKILAPLTKG

SEQ ID NO: 210098 - protein, 15 aa, Artificial Sequence
  Description of Artificial Sequence: Synthetic peptide
  Seed: EWLKTRPILSPLTKG
EWLKMRKILGPLTKG

SEQ ID NO: 210099 - protein, 15 aa, Artificial Sequence
  Description of Artificial Sequence: Synthetic peptide
  Seed: EWLKTRPILSPLTKG
EWLKMRKILSPLTKG

SEQ ID NO: 210100 - protein, 15 aa, Artificial Sequence
  Description of Artificial Sequence: Synthetic peptide
  Seed: EWLKTRPILSPLTKG
EWLKMRNILAPLTKG

SEQ ID NO: 210101 - protein, 15 aa, Artificial Sequence
  Description of Artificial Sequence: Synthetic peptide
  Seed: EWLKTRPILSPLTKG
EWLKMRNILIPLTKG

SEQ ID NO: 210102 - protein, 15 aa, Artificial Sequence
  Description of Artificial Sequence: Synthetic peptide
  Seed: EWLKTRPILSPLTKG
EWLKMRNILLPLTKG

SEQ ID NO: 210103 - protein, 15 aa, Artificial Sequence
  Description of Artificial Sequence: Synthetic peptide
  Seed: EWLKTRPILSPLTKG
EWLKMRNILMPLTKG

SEQ ID NO: 210104 - protein, 15 aa, Artificial Sequence
  Description of Artificial Sequence: Synthetic peptide
  Seed: EWLKTRPILSPLTKG
EWLKMRNILSPLTKG

SEQ ID NO: 210105 - protein, 15 aa, Artificial Sequence
  Description of Artificial Sequence: Synthetic peptide
  Seed: EWLKTRPILSPLTKG
EWLKMRNILTPLTKG

SEQ ID NO: 210106 - protein, 15 aa, Artificial Sequence
  Description of Artificial Sequence: Synthetic peptide
  Seed: EWLKTRPILSPLTKG
EWLKMRNILVPLTKG

SEQ ID NO: 210107 - protein, 15 aa, Artificial Sequence
  Description of Artificial Sequence: Synthetic peptide
  Seed: EWLKTRPILSPLTKG
EWLKMRQILVPLTKG

SEQ ID NO: 210108 - protein, 15 aa, Artificial Sequence
  Description of Artificial Sequence: Synthetic peptide
  Seed: EWLKTRPILSPLTKG
EWLKMRRILAPLTKG

SEQ ID NO: 210109 - protein, 15 aa, Artificial Sequence
  Description of Artificial Sequence: Synthetic peptide
  Seed: EWLKTRPILSPLTKG
EWLKMRRILGPLTKG

SEQ ID NO: 210110 - protein, 15 aa, Artificial Sequence
  Description of Artificial Sequence: Synthetic peptide
  Seed: EWLKTRPILSPLTKG
EWLKMRRILHPLTKG

SEQ ID NO: 210111 - protein, 15 aa, Artificial Sequence
  Description of Artificial Sequence: Synthetic peptide
  Seed: EWLKTRPILSPLTKG
EWLKMRRILQPLTKG

SEQ ID NO: 210112 - protein, 15 aa, Artificial Sequence
  Description of Artificial Sequence: Synthetic peptide
  Seed: EWLKTRPILSPLTKG
EWLKMRRILSPLTKG

SEQ ID NO: 210113 - protein, 15 aa, Artificial Sequence
  Description of Artificial Sequence: Synthetic peptide
  Seed: EWLKTRPILSPLTKG
EWLKMRRILTPLTKG

SEQ ID NO: 210114 - protein, 15 aa, Artificial Sequence
  Description of Artificial Sequence: Synthetic peptide
  Seed: EWLKTRPILSPLTKG
EWLKMRSILAPLTKG

SEQ ID NO: 210115 - protein, 15 aa, Artificial Sequence
  Description of Artificial Sequence: Synthetic peptide
  Seed: EWLKTRPILSPLTKG
EWLKMRSILCPLTKG

SEQ ID NO: 210116 - protein, 15 aa, Artificial Sequence
  Description of Artificial Sequence: Synthetic peptide
  Seed: EWLKTRPILSPLTKG
EWLKMRSILFPLTKG

SEQ ID NO: 210117 - protein, 15 aa, Artificial Sequence
  Description of Artificial Sequence: Synthetic peptide
  Seed: EWLKTRPILSPLTKG
EWLKMRSILHPLTKG

SEQ ID NO: 210118 - protein, 15 aa, Artificial Sequence
  Description of Artificial Sequence: Synthetic peptide
  Seed: EWLKTRPILSPLTKG
EWLKMRSILIPLTKG

SEQ ID NO: 210119 - protein, 15 aa, Artificial Sequence
  Description of Artificial Sequence: Synthetic peptide
  Seed: EWLKTRPILSPLTKG
EWLKMRSILLPLTKG

SEQ ID NO: 210120 - protein, 15 aa, Artificial Sequence
  Description of Artificial Sequence: Synthetic peptide
  Seed: EWLKTRPILSPLTKG
EWLKMRSILMPLTKG

SEQ ID NO: 210121 - protein, 15 aa, Artificial Sequence
  Description of Artificial Sequence: Synthetic peptide
  Seed: EWLKTRPILSPLTKG
EWLKMRSILQPLTKG

SEQ ID NO: 210122 - protein, 15 aa, Artificial Sequence
  Description of Artificial Sequence: Synthetic peptide
  Seed: EWLKTRPILSPLTKG
EWLKMRSILRPLTKG

SEQ ID NO: 210123 - protein, 15 aa, Artificial Sequence
  Description of Artificial Sequence: Synthetic peptide
  Seed: EWLKTRPILSPLTKG
EWLKMRSILSPLTKG

SEQ ID NO: 210124 - protein, 15 aa, Artificial Sequence
  Description of Artificial Sequence: Synthetic peptide
  Seed: EWLKTRPILSPLTKG
EWLKMRSILTPLTKG

SEQ ID NO: 210125 - protein, 15 aa, Artificial Sequence
  Description of Artificial Sequence: Synthetic peptide
  Seed: EWLKTRPILSPLTKG
EWLKMRSILVPLTKG

SEQ ID NO: 210126 - protein, 15 aa, Artificial Sequence
  Description of Artificial Sequence: Synthetic peptide
  Seed: EWLKTRPILSPLTKG
EWLKMRTILGPLTKG

SEQ ID NO: 210127 - protein, 15 aa, Artificial Sequence
  Description of Artificial Sequence: Synthetic peptide
  Seed: EWLKTRPILSPLTKG
EWLKMRTILIPLTKG

SEQ ID NO: 210128 - protein, 15 aa, Artificial Sequence
  Description of Artificial Sequence: Synthetic peptide
  Seed: EWLKTRPILSPLTKG
EWLKMRTILLPLTKG

SEQ ID NO: 210129 - protein, 15 aa, Artificial Sequence
  Description of Artificial Sequence: Synthetic peptide
  Seed: EWLKTRPILSPLTKG
EWLKMRTILMPLTKG

SEQ ID NO: 210130 - protein, 15 aa, Artificial Sequence
  Description of Artificial Sequence: Synthetic peptide
  Seed: EWLKTRPILSPLTKG
EWLKMRTILNPLTKG

SEQ ID NO: 210131 - protein, 15 aa, Artificial Sequence
  Description of Artificial Sequence: Synthetic peptide
  Seed: EWLKTRPILSPLTKG
EWLKMRTILSPLTKG

SEQ ID NO: 210132 - protein, 15 aa, Artificial Sequence
  Description of Artificial Sequence: Synthetic peptide
  Seed: EWLKTRPILSPLTKG
EWLKMRTILTPLTKG

SEQ ID NO: 210133 - protein, 15 aa, Artificial Sequence
  Description of Artificial Sequence: Synthetic peptide
  Seed: EWLKTRPILSPLTKG
EWLKMRTILVPLTKG

SEQ ID NO: 210134 - protein, 15 aa, Artificial Sequence
  Description of Artificial Sequence: Synthetic peptide
  Seed: EWLKTRPILSPLTKG
EWLKMRVILIPLTKG

SEQ ID NO: 210135 - protein, 15 aa, Artificial Sequence
  Description of Artificial Sequence: Synthetic peptide
  Seed: EWLKTRPILSPLTKG
EWLKMRVILLPLTKG

SEQ ID NO: 210136 - protein, 15 aa, Artificial Sequence
  Description of Artificial Sequence: Synthetic peptide
  Seed: EWLKTRPILSPLTKG
EWLKMRVILMPLTKG

SEQ ID NO: 210137 - protein, 15 aa, Artificial Sequence
  Description of Artificial Sequence: Synthetic peptide
  Seed: EWLKTRPILSPLTKG
EWLKMRVILVPLTKG

SEQ ID NO: 210138 - protein, 15 aa, Artificial Sequence
  Description of Artificial Sequence: Synthetic peptide
  Seed: EWLKTRPILSPLTKG
EWLKNRAILAPLTKG

SEQ ID NO: 210139 - protein, 15 aa, Artificial Sequence
  Description of Artificial Sequence: Synthetic peptide
  Seed: EWLKTRPILSPLTKG
EWLKNRAILIPLTKG

SEQ ID NO: 210140 - protein, 15 aa, Artificial Sequence
  Description of Artificial Sequence: Synthetic peptide
  Seed: EWLKTRPILSPLTKG
EWLKNRAILLPLTKG

SEQ ID NO: 210141 - protein, 15 aa, Artificial Sequence
  Description of Artificial Sequence: Synthetic peptide
  Seed: EWLKTRPILSPLTKG
EWLKNRAILSPLTKG

SEQ ID NO: 210142 - protein, 15 aa, Artificial Sequence
  Description of Artificial Sequence: Synthetic peptide
  Seed: EWLKTRPILSPLTKG
EWLKNRAILVPLTKG

SEQ ID NO: 210143 - protein, 15 aa, Artificial Sequence
  Description of Artificial Sequence: Synthetic peptide
  Seed: EWLKTRPILSPLTKG
EWLKNRGILAPLTKG

SEQ ID NO: 210144 - protein, 15 aa, Artificial Sequence
  Description of Artificial Sequence: Synthetic peptide
  Seed: EWLKTRPILSPLTKG
EWLKNRGILVPLTKG

SEQ ID NO: 210145 - protein, 15 aa, Artificial Sequence
  Description of Artificial Sequence: Synthetic peptide
  Seed: EWLKTRPILSPLTKG
EWLKNRSILAPLTKG

SEQ ID NO: 210146 - protein, 15 aa, Artificial Sequence
  Description of Artificial Sequence: Synthetic peptide
  Seed: EWLKTRPILSPLTKG
EWLKNRSILVPLTKG

SEQ ID NO: 210147 - protein, 15 aa, Artificial Sequence
  Description of Artificial Sequence: Synthetic peptide
  Seed: EWLKTRPILSPLTKG
EWLKQRAILAPLTKG

SEQ ID NO: 210148 - protein, 15 aa, Artificial Sequence
  Description of Artificial Sequence: Synthetic peptide
  Seed: EWLKTRPILSPLTKG
EWLKQRAILGPLTKG

SEQ ID NO: 210149 - protein, 15 aa, Artificial Sequence
  Description of Artificial Sequence: Synthetic peptide
  Seed: EWLKTRPILSPLTKG
EWLKQRAILIPLTKG

SEQ ID NO: 210150 - protein, 15 aa, Artificial Sequence
  Description of Artificial Sequence: Synthetic peptide
  Seed: EWLKTRPILSPLTKG
EWLKQRAILLPLTKG

SEQ ID NO: 210151 - protein, 15 aa, Artificial Sequence
  Description of Artificial Sequence: Synthetic peptide
  Seed: EWLKTRPILSPLTKG
EWLKQRAILMPLTKG

SEQ ID NO: 210152 - protein, 15 aa, Artificial Sequence
  Description of Artificial Sequence: Synthetic peptide
  Seed: EWLKTRPILSPLTKG
EWLKQRAILSPLTKG

SEQ ID NO: 210153 - protein, 15 aa, Artificial Sequence
  Description of Artificial Sequence: Synthetic peptide
  Seed: EWLKTRPILSPLTKG
EWLKQRAILTPLTKG

SEQ ID NO: 210154 - protein, 15 aa, Artificial Sequence
  Description of Artificial Sequence: Synthetic peptide
  Seed: EWLKTRPILSPLTKG
EWLKQRAILVPLTKG

SEQ ID NO: 210155 - protein, 15 aa, Artificial Sequence
  Description of Artificial Sequence: Synthetic peptide
  Seed: EWLKTRPILSPLTKG
EWLKQRGILAPLTKG

SEQ ID NO: 210156 - protein, 15 aa, Artificial Sequence
  Description of Artificial Sequence: Synthetic peptide
  Seed: EWLKTRPILSPLTKG
EWLKQRGILIPLTKG

SEQ ID NO: 210157 - protein, 15 aa, Artificial Sequence
  Description of Artificial Sequence: Synthetic peptide
  Seed: EWLKTRPILSPLTKG
EWLKQRGILLPLTKG

SEQ ID NO: 210158 - protein, 15 aa, Artificial Sequence
  Description of Artificial Sequence: Synthetic peptide
  Seed: EWLKTRPILSPLTKG
EWLKQRGILMPLTKG

SEQ ID NO: 210159 - protein, 15 aa, Artificial Sequence
  Description of Artificial Sequence: Synthetic peptide
  Seed: EWLKTRPILSPLTKG
EWLKQRGILSPLTKG

SEQ ID NO: 210160 - protein, 15 aa, Artificial Sequence
  Description of Artificial Sequence: Synthetic peptide
  Seed: EWLKTRPILSPLTKG
EWLKQRGILVPLTKG

SEQ ID NO: 210161 - protein, 15 aa, Artificial Sequence
  Description of Artificial Sequence: Synthetic peptide
  Seed: EWLKTRPILSPLTKG
EWLKQRSILAPLTKG

SEQ ID NO: 210162 - protein, 15 aa, Artificial Sequence
  Description of Artificial Sequence: Synthetic peptide
  Seed: EWLKTRPILSPLTKG
EWLKQRSILIPLTKG

SEQ ID NO: 210163 - protein, 15 aa, Artificial Sequence
  Description of Artificial Sequence: Synthetic peptide
  Seed: EWLKTRPILSPLTKG
EWLKQRSILLPLTKG

SEQ ID NO: 210164 - protein, 15 aa, Artificial Sequence
  Description of Artificial Sequence: Synthetic peptide
  Seed: EWLKTRPILSPLTKG
EWLKQRSILSPLTKG

SEQ ID NO: 210165 - protein, 15 aa, Artificial Sequence
  Description of Artificial Sequence: Synthetic peptide
  Seed: EWLKTRPILSPLTKG
EWLKQRSILVPLTKG

SEQ ID NO: 210166 - protein, 15 aa, Artificial Sequence
  Description of Artificial Sequence: Synthetic peptide
  Seed: EWLKTRPILSPLTKG
EWLKQRTILAPLTKG

SEQ ID NO: 210167 - protein, 15 aa, Artificial Sequence
  Description of Artificial Sequence: Synthetic peptide
  Seed: EWLKTRPILSPLTKG
EWLKQRTILVPLTKG

SEQ ID NO: 210168 - protein, 15 aa, Artificial Sequence
  Description of Artificial Sequence: Synthetic peptide
  Seed: EWLKTRPILSPLTKG
EWLKSRAILAPLTKG

SEQ ID NO: 210169 - protein, 15 aa, Artificial Sequence
  Description of Artificial Sequence: Synthetic peptide
  Seed: EWLKTRPILSPLTKG
EWLKSRAILGPLTKG

SEQ ID NO: 210170 - protein, 15 aa, Artificial Sequence
  Description of Artificial Sequence: Synthetic peptide
  Seed: EWLKTRPILSPLTKG
EWLKSRAILIPLTKG

SEQ ID NO: 210171 - protein, 15 aa, Artificial Sequence
  Description of Artificial Sequence: Synthetic peptide
  Seed: EWLKTRPILSPLTKG
EWLKSRAILLPLTKG

SEQ ID NO: 210172 - protein, 15 aa, Artificial Sequence
  Description of Artificial Sequence: Synthetic peptide
  Seed: EWLKTRPILSPLTKG
EWLKSRAILMPLTKG

SEQ ID NO: 210173 - protein, 15 aa, Artificial Sequence
  Description of Artificial Sequence: Synthetic peptide
  Seed: EWLKTRPILSPLTKG
EWLKSRAILSPLTKG

SEQ ID NO: 210174 - protein, 15 aa, Artificial Sequence
  Description of Artificial Sequence: Synthetic peptide
  Seed: EWLKTRPILSPLTKG
EWLKSRAILTPLTKG

SEQ ID NO: 210175 - protein, 15 aa, Artificial Sequence
  Description of Artificial Sequence: Synthetic peptide
  Seed: EWLKTRPILSPLTKG
EWLKSRAILVPLTKG

SEQ ID NO: 210176 - protein, 15 aa, Artificial Sequence
  Description of Artificial Sequence: Synthetic peptide
  Seed: EWLKTRPILSPLTKG
EWLKSRGILAPLTKG

SEQ ID NO: 210177 - protein, 15 aa, Artificial Sequence
  Description of Artificial Sequence: Synthetic peptide
  Seed: EWLKTRPILSPLTKG
EWLKSRGILIPLTKG

SEQ ID NO: 210178 - protein, 15 aa, Artificial Sequence
  Description of Artificial Sequence: Synthetic peptide
  Seed: EWLKTRPILSPLTKG
EWLKSRGILLPLTKG

SEQ ID NO: 210179 - protein, 15 aa, Artificial Sequence
  Description of Artificial Sequence: Synthetic peptide
  Seed: EWLKTRPILSPLTKG
EWLKSRGILMPLTKG

SEQ ID NO: 210180 - protein, 15 aa, Artificial Sequence
  Description of Artificial Sequence: Synthetic peptide
  Seed: EWLKTRPILSPLTKG
EWLKSRGILVPLTKG

SEQ ID NO: 210181 - protein, 15 aa, Artificial Sequence
  Description of Artificial Sequence: Synthetic peptide
  Seed: EWLKTRPILSPLTKG
EWLKSRSILAPLTKG

SEQ ID NO: 210182 - protein, 15 aa, Artificial Sequence
  Description of Artificial Sequence: Synthetic peptide
  Seed: EWLKTRPILSPLTKG
EWLKSRSILIPLTKG

SEQ ID NO: 210183 - protein, 15 aa, Artificial Sequence
  Description of Artificial Sequence: Synthetic peptide
  Seed: EWLKTRPILSPLTKG
EWLKSRSILLPLTKG

SEQ ID NO: 210184 - protein, 15 aa, Artificial Sequence
  Description of Artificial Sequence: Synthetic peptide
  Seed: EWLKTRPILSPLTKG
EWLKSRSILVPLTKG

SEQ ID NO: 210185 - protein, 15 aa, Artificial Sequence
  Description of Artificial Sequence: Synthetic peptide
  Seed: EWLKTRPILSPLTKG
EWLKSRTILIPLTKG

SEQ ID NO: 210186 - protein, 15 aa, Artificial Sequence
  Description of Artificial Sequence: Synthetic peptide
  Seed: EWLKTRPILSPLTKG
EWLKTRAILAPLTKG

SEQ ID NO: 210187 - protein, 15 aa, Artificial Sequence
  Description of Artificial Sequence: Synthetic peptide
  Seed: EWLKTRPILSPLTKG
EWLKTRAILFPLTKG

SEQ ID NO: 210188 - protein, 15 aa, Artificial Sequence
  Description of Artificial Sequence: Synthetic peptide
  Seed: EWLKTRPILSPLTKG
EWLKTRAILGPLTKG

SEQ ID NO: 210189 - protein, 15 aa, Artificial Sequence
  Description of Artificial Sequence: Synthetic peptide
  Seed: EWLKTRPILSPLTKG
EWLKTRAILIPLTKG

SEQ ID NO: 210190 - protein, 15 aa, Artificial Sequence
  Description of Artificial Sequence: Synthetic peptide
  Seed: EWLKTRPILSPLTKG
EWLKTRAILLPLTKG

SEQ ID NO: 210191 - protein, 15 aa, Artificial Sequence
  Description of Artificial Sequence: Synthetic peptide
  Seed: EWLKTRPILSPLTKG
EWLKTRAILMPLTKG

SEQ ID NO: 210192 - protein, 15 aa, Artificial Sequence
  Description of Artificial Sequence: Synthetic peptide
  Seed: EWLKTRPILSPLTKG
EWLKTRAILSPLTKG

SEQ ID NO: 210193 - protein, 15 aa, Artificial Sequence
  Description of Artificial Sequence: Synthetic peptide
  Seed: EWLKTRPILSPLTKG
EWLKTRAILTPLTKG

SEQ ID NO: 210194 - protein, 15 aa, Artificial Sequence
  Description of Artificial Sequence: Synthetic peptide
  Seed: EWLKTRPILSPLTKG
EWLKTRAILVPLTKG

SEQ ID NO: 210195 - protein, 15 aa, Artificial Sequence
  Description of Artificial Sequence: Synthetic peptide
  Seed: EWLKTRPILSPLTKG
EWLKTRGILAPLTKG

SEQ ID NO: 210196 - protein, 15 aa, Artificial Sequence
  Description of Artificial Sequence: Synthetic peptide
  Seed: EWLKTRPILSPLTKG
EWLKTRGILIPLTKG

SEQ ID NO: 210197 - protein, 15 aa, Artificial Sequence
  Description of Artificial Sequence: Synthetic peptide
  Seed: EWLKTRPILSPLTKG
EWLKTRGILLPLTKG

SEQ ID NO: 210198 - protein, 15 aa, Artificial Sequence
  Description of Artificial Sequence: Synthetic peptide
  Seed: EWLKTRPILSPLTKG
EWLKTRGILVPLTKG

SEQ ID NO: 210199 - protein, 15 aa, Artificial Sequence
  Description of Artificial Sequence: Synthetic peptide
  Seed: EWLKTRPILSPLTKG
EWLKTRSILAPLTKG

SEQ ID NO: 210200 - protein, 15 aa, Artificial Sequence
  Description of Artificial Sequence: Synthetic peptide
  Seed: EWLKTRPILSPLTKG
EWLKTRSILFPLTKG

SEQ ID NO: 210201 - protein, 15 aa, Artificial Sequence
  Description of Artificial Sequence: Synthetic peptide
  Seed: EWLKTRPILSPLTKG
EWLKTRSILIPLTKG

SEQ ID NO: 210202 - protein, 15 aa, Artificial Sequence
  Description of Artificial Sequence: Synthetic peptide
  Seed: EWLKTRPILSPLTKG
EWLKTRSILLPLTKG

SEQ ID NO: 210203 - protein, 15 aa, Artificial Sequence
  Description of Artificial Sequence: Synthetic peptide
  Seed: EWLKTRPILSPLTKG
EWLKTRSILMPLTKG

SEQ ID NO: 210204 - protein, 15 aa, Artificial Sequence
  Description of Artificial Sequence: Synthetic peptide
  Seed: EWLKTRPILSPLTKG
EWLKTRSILVPLTKG

SEQ ID NO: 210205 - protein, 15 aa, Artificial Sequence
  Description of Artificial Sequence: Synthetic peptide
  Seed: EWLKTRPILSPLTKG
EWLKTRTILIPLTKG

SEQ ID NO: 210206 - protein, 15 aa, Artificial Sequence
  Description of Artificial Sequence: Synthetic peptide
  Seed: EWLKTRPILSPLTKG
EWLKTRTILLPLTKG

SEQ ID NO: 210207 - protein, 15 aa, Artificial Sequence
  Description of Artificial Sequence: Synthetic peptide
  Seed: EWLKTRPILSPLTKG
EWLKTRTILVPLTKG

SEQ ID NO: 210208 - protein, 15 aa, Artificial Sequence
  Description of Artificial Sequence: Synthetic peptide
  Seed: EWLKTRPILSPLTKG
EWLKVRAILIPLTKG

SEQ ID NO: 210209 - protein, 15 aa, Artificial Sequence
  Description of Artificial Sequence: Synthetic peptide
  Seed: EWLKTRPILSPLTKG
EWLKVRAILLPLTKG

SEQ ID NO: 210210 - protein, 15 aa, Artificial Sequence
  Description of Artificial Sequence: Synthetic peptide
  Seed: EWLKTRPILSPLTKG
EWLKVRAILMPLTKG

SEQ ID NO: 210211 - protein, 15 aa, Artificial Sequence
  Description of Artificial Sequence: Synthetic peptide
  Seed: EWLKTRPILSPLTKG
EWLKVRAILVPLTKG

SEQ ID NO: 210212 - protein, 15 aa, Artificial Sequence
  Description of Artificial Sequence: Synthetic peptide
  Seed: EWLKTRPILSPLTKG
EWLKVRGILAPLTKG

SEQ ID NO: 210213 - protein, 15 aa, Artificial Sequence
  Description of Artificial Sequence: Synthetic peptide
  Seed: EWLKTRPILSPLTKG
EWLKVRGILIPLTKG

SEQ ID NO: 210214 - protein, 15 aa, Artificial Sequence
  Description of Artificial Sequence: Synthetic peptide
  Seed: EWLKTRPILSPLTKG
EWLKVRGILLPLTKG

SEQ ID NO: 210215 - protein, 15 aa, Artificial Sequence
  Description of Artificial Sequence: Synthetic peptide
  Seed: EWLKTRPILSPLTKG
EWLKVRGILMPLTKG

SEQ ID NO: 210216 - protein, 15 aa, Artificial Sequence
  Description of Artificial Sequence: Synthetic peptide
  Seed: EWLKTRPILSPLTKG
EWLKVRGILSPLTKG

SEQ ID NO: 210217 - protein, 15 aa, Artificial Sequence
  Description of Artificial Sequence: Synthetic peptide
  Seed: EWLKTRPILSPLTKG
EWLKVRGILTPLTKG

SEQ ID NO: 210218 - protein, 15 aa, Artificial Sequence
  Description of Artificial Sequence: Synthetic peptide
  Seed: EWLKTRPILSPLTKG
EWLKVRGILVPLTKG

SEQ ID NO: 210219 - protein, 15 aa, Artificial Sequence
  Description of Artificial Sequence: Synthetic peptide
  Seed: EWLKTRPILSPLTKG
EWLKVRKILSPLTKG

SEQ ID NO: 210220 - protein, 15 aa, Artificial Sequence
  Description of Artificial Sequence: Synthetic peptide
  Seed: EWLKTRPILSPLTKG
EWLKVRNILIPLTKG

SEQ ID NO: 210221 - protein, 15 aa, Artificial Sequence
  Description of Artificial Sequence: Synthetic peptide
  Seed: EWLKTRPILSPLTKG
EWLKVRNILLPLTKG

SEQ ID NO: 210222 - protein, 15 aa, Artificial Sequence
  Description of Artificial Sequence: Synthetic peptide
  Seed: EWLKTRPILSPLTKG
EWLKVRNILVPLTKG

SEQ ID NO: 210223 - protein, 15 aa, Artificial Sequence
  Description of Artificial Sequence: Synthetic peptide
  Seed: EWLKTRPILSPLTKG
EWLKVRRILAPLTKG

SEQ ID NO: 210224 - protein, 15 aa, Artificial Sequence
  Description of Artificial Sequence: Synthetic peptide
  Seed: EWLKTRPILSPLTKG
EWLKVRRILGPLTKG

SEQ ID NO: 210225 - protein, 15 aa, Artificial Sequence
  Description of Artificial Sequence: Synthetic peptide
  Seed: EWLKTRPILSPLTKG
EWLKVRRILSPLTKG

SEQ ID NO: 210226 - protein, 15 aa, Artificial Sequence
  Description of Artificial Sequence: Synthetic peptide
  Seed: EWLKTRPILSPLTKG
EWLKVRSILIPLTKG

SEQ ID NO: 210227 - protein, 15 aa, Artificial Sequence
  Description of Artificial Sequence: Synthetic peptide
  Seed: EWLKTRPILSPLTKG
EWLKVRSILLPLTKG

SEQ ID NO: 210228 - protein, 15 aa, Artificial Sequence
  Description of Artificial Sequence: Synthetic peptide
  Seed: EWLKTRPILSPLTKG
EWLKVRSILMPLTKG

SEQ ID NO: 210229 - protein, 15 aa, Artificial Sequence
  Description of Artificial Sequence: Synthetic peptide
  Seed: EWLKTRPILSPLTKG
EWLKVRSILVPLTKG

SEQ ID NO: 210230 - protein, 15 aa, Artificial Sequence
  Description of Artificial Sequence: Synthetic peptide
  Seed: EWLKTRPILSPLTKG
EWLKVRTILIPLTKG

SEQ ID NO: 210231 - protein, 15 aa, Artificial Sequence
  Description of Artificial Sequence: Synthetic peptide
  Seed: EWLKTRPILSPLTKG
EWLKVRTILLPLTKG

SEQ ID NO: 210232 - protein, 15 aa, Artificial Sequence
  Description of Artificial Sequence: Synthetic peptide
  Seed: EWLKTRPILSPLTKG
EWLKVRTILVPLTKG

SEQ ID NO: 210233 - protein, 15 aa, Artificial Sequence
  Description of Artificial Sequence: Synthetic peptide
  Seed: EWLKTRPILSPLTKG
EWLKWRAILLPLTKG

SEQ ID NO: 210234 - protein, 15 aa, Artificial Sequence
  Description of Artificial Sequence: Synthetic peptide
  Seed: EWLKTRPILSPLTKG
EYLKARAILAPLTKG

SEQ ID NO: 210235 - protein, 15 aa, Artificial Sequence
  Description of Artificial Sequence: Synthetic peptide
  Seed: EWLKTRPILSPLTKG
EYLKARAILCPLTKG

SEQ ID NO: 210236 - protein, 15 aa, Artificial Sequence
  Description of Artificial Sequence: Synthetic peptide
  Seed: EWLKTRPILSPLTKG
EYLKARAILDPLTKG

SEQ ID NO: 210237 - protein, 15 aa, Artificial Sequence
  Description of Artificial Sequence: Synthetic peptide
  Seed: EWLKTRPILSPLTKG
EYLKARAILEPLTKG

SEQ ID NO: 210238 - protein, 15 aa, Artificial Sequence
  Description of Artificial Sequence: Synthetic peptide
  Seed: EWLKTRPILSPLTKG
EYLKARAILFPLTKG

SEQ ID NO: 210239 - protein, 15 aa, Artificial Sequence
  Description of Artificial Sequence: Synthetic peptide
  Seed: EWLKTRPILSPLTKG
EYLKARAILGPLTKG

SEQ ID NO: 210240 - protein, 15 aa, Artificial Sequence
  Description of Artificial Sequence: Synthetic peptide
  Seed: EWLKTRPILSPLTKG
EYLKARAILHPLTKG

SEQ ID NO: 210241 - protein, 15 aa, Artificial Sequence
  Description of Artificial Sequence: Synthetic peptide
  Seed: EWLKTRPILSPLTKG
EYLKARAILIPLTKG

SEQ ID NO: 210242 - protein, 15 aa, Artificial Sequence
  Description of Artificial Sequence: Synthetic peptide
  Seed: EWLKTRPILSPLTKG
EYLKARAILKPLTKG

SEQ ID NO: 210243 - protein, 15 aa, Artificial Sequence
  Description of Artificial Sequence: Synthetic peptide
  Seed: EWLKTRPILSPLTKG
EYLKARAILLPLTKG

SEQ ID NO: 210244 - protein, 15 aa, Artificial Sequence
  Description of Artificial Sequence: Synthetic peptide
  Seed: EWLKTRPILSPLTKG
EYLKARAILMPLTKG

SEQ ID NO: 210245 - protein, 15 aa, Artificial Sequence
  Description of Artificial Sequence: Synthetic peptide
  Seed: EWLKTRPILSPLTKG
EYLKARAILNPLTKG

SEQ ID NO: 210246 - protein, 15 aa, Artificial Sequence
  Description of Artificial Sequence: Synthetic peptide
  Seed: EWLKTRPILSPLTKG
EYLKARAILPPLTKG

SEQ ID NO: 210247 - protein, 15 aa, Artificial Sequence
  Description of Artificial Sequence: Synthetic peptide
  Seed: EWLKTRPILSPLTKG
EYLKARAILQPLTKG

SEQ ID NO: 210248 - protein, 15 aa, Artificial Sequence
  Description of Artificial Sequence: Synthetic peptide
  Seed: EWLKTRPILSPLTKG
EYLKARAILRPLTKG

SEQ ID NO: 210249 - protein, 15 aa, Artificial Sequence
  Description of Artificial Sequence: Synthetic peptide
  Seed: EWLKTRPILSPLTKG
EYLKARAILTPLTKG

SEQ ID NO: 210250 - protein, 15 aa, Artificial Sequence
  Description of Artificial Sequence: Synthetic peptide
  Seed: EWLKTRPILSPLTKG
EYLKARAILVPLTKG

SEQ ID NO: 210251 - protein, 15 aa, Artificial Sequence
  Description of Artificial Sequence: Synthetic peptide
  Seed: EWLKTRPILSPLTKG
EYLKARAILWPLTKG

SEQ ID NO: 210252 - protein, 15 aa, Artificial Sequence
  Description of Artificial Sequence: Synthetic peptide
  Seed: EWLKTRPILSPLTKG
EYLKARAILYPLTKG

SEQ ID NO: 210253 - protein, 15 aa, Artificial Sequence
  Description of Artificial Sequence: Synthetic peptide
  Seed: EWLKTRPILSPLTKG
EYLKAREILVPLTKG

SEQ ID NO: 210254 - protein, 15 aa, Artificial Sequence
  Description of Artificial Sequence: Synthetic peptide
  Seed: EWLKTRPILSPLTKG
EYLKARGILAPLTKG

SEQ ID NO: 210255 - protein, 15 aa, Artificial Sequence
  Description of Artificial Sequence: Synthetic peptide
  Seed: EWLKTRPILSPLTKG
EYLKARGILCPLTKG

SEQ ID NO: 210256 - protein, 15 aa, Artificial Sequence
  Description of Artificial Sequence: Synthetic peptide
  Seed: EWLKTRPILSPLTKG
EYLKARGILFPLTKG

SEQ ID NO: 210257 - protein, 15 aa, Artificial Sequence
  Description of Artificial Sequence: Synthetic peptide
  Seed: EWLKTRPILSPLTKG
EYLKARGILGPLTKG

SEQ ID NO: 210258 - protein, 15 aa, Artificial Sequence
  Description of Artificial Sequence: Synthetic peptide
  Seed: EWLKTRPILSPLTKG
EYLKARGILHPLTKG

SEQ ID NO: 210259 - protein, 15 aa, Artificial Sequence
  Description of Artificial Sequence: Synthetic peptide
  Seed: EWLKTRPILSPLTKG
EYLKARGILIPLTKG

SEQ ID NO: 210260 - protein, 15 aa, Artificial Sequence
  Description of Artificial Sequence: Synthetic peptide
  Seed: EWLKTRPILSPLTKG
EYLKARGILLPLTKG

SEQ ID NO: 210261 - protein, 15 aa, Artificial Sequence
  Description of Artificial Sequence: Synthetic peptide
  Seed: EWLKTRPILSPLTKG
EYLKARGILMPLTKG

SEQ ID NO: 210262 - protein, 15 aa, Artificial Sequence
  Description of Artificial Sequence: Synthetic peptide
  Seed: EWLKTRPILSPLTKG
EYLKARGILNPLTKG

SEQ ID NO: 210263 - protein, 15 aa, Artificial Sequence
  Description of Artificial Sequence: Synthetic peptide
  Seed: EWLKTRPILSPLTKG
EYLKARGILPPLTKG

SEQ ID NO: 210264 - protein, 15 aa, Artificial Sequence
  Description of Artificial Sequence: Synthetic peptide
  Seed: EWLKTRPILSPLTKG
EYLKARGILQPLTKG

SEQ ID NO: 210265 - protein, 15 aa, Artificial Sequence
  Description of Artificial Sequence: Synthetic peptide
  Seed: EWLKTRPILSPLTKG
EYLKARGILSPLTKG

SEQ ID NO: 210266 - protein, 15 aa, Artificial Sequence
  Description of Artificial Sequence: Synthetic peptide
  Seed: EWLKTRPILSPLTKG
EYLKARGILTPLTKG

SEQ ID NO: 210267 - protein, 15 aa, Artificial Sequence
  Description of Artificial Sequence: Synthetic peptide
  Seed: EWLKTRPILSPLTKG
EYLKARGILVPLTKG

SEQ ID NO: 210268 - protein, 15 aa, Artificial Sequence
  Description of Artificial Sequence: Synthetic peptide
  Seed: EWLKTRPILSPLTKG
EYLKARGILYPLTKG

SEQ ID NO: 210269 - protein, 15 aa, Artificial Sequence
  Description of Artificial Sequence: Synthetic peptide
  Seed: EWLKTRPILSPLTKG
EYLKARHILVPLTKG

SEQ ID NO: 210270 - protein, 15 aa, Artificial Sequence
  Description of Artificial Sequence: Synthetic peptide
  Seed: EWLKTRPILSPLTKG
EYLKARIILAPLTKG

SEQ ID NO: 210271 - protein, 15 aa, Artificial Sequence
  Description of Artificial Sequence: Synthetic peptide
  Seed: EWLKTRPILSPLTKG
EYLKARIILIPLTKG

SEQ ID NO: 210272 - protein, 15 aa, Artificial Sequence
  Description of Artificial Sequence: Synthetic peptide
  Seed: EWLKTRPILSPLTKG
EYLKARIILLPLTKG

SEQ ID NO: 210273 - protein, 15 aa, Artificial Sequence
  Description of Artificial Sequence: Synthetic peptide
  Seed: EWLKTRPILSPLTKG
EYLKARIILMPLTKG

SEQ ID NO: 210274 - protein, 15 aa, Artificial Sequence
  Description of Artificial Sequence: Synthetic peptide
  Seed: EWLKTRPILSPLTKG
EYLKARIILNPLTKG

SEQ ID NO: 210275 - protein, 15 aa, Artificial Sequence
  Description of Artificial Sequence: Synthetic peptide
  Seed: EWLKTRPILSPLTKG
EYLKARIILSPLTKG

SEQ ID NO: 210276 - protein, 15 aa, Artificial Sequence
  Description of Artificial Sequence: Synthetic peptide
  Seed: EWLKTRPILSPLTKG
EYLKARIILTPLTKG

SEQ ID NO: 210277 - protein, 15 aa, Artificial Sequence
  Description of Artificial Sequence: Synthetic peptide
  Seed: EWLKTRPILSPLTKG
EYLKARIILVPLTKG

SEQ ID NO: 210278 - protein, 15 aa, Artificial Sequence
  Description of Artificial Sequence: Synthetic peptide
  Seed: EWLKTRPILSPLTKG
EYLKARKILAPLTKG

SEQ ID NO: 210279 - protein, 15 aa, Artificial Sequence
  Description of Artificial Sequence: Synthetic peptide
  Seed: EWLKTRPILSPLTKG
EYLKARKILGPLTKG

SEQ ID NO: 210280 - protein, 15 aa, Artificial Sequence
  Description of Artificial Sequence: Synthetic peptide
  Seed: EWLKTRPILSPLTKG
EYLKARKILHPLTKG

SEQ ID NO: 210281 - protein, 15 aa, Artificial Sequence
  Description of Artificial Sequence: Synthetic peptide
  Seed: EWLKTRPILSPLTKG
EYLKARKILNPLTKG

SEQ ID NO: 210282 - protein, 15 aa, Artificial Sequence
  Description of Artificial Sequence: Synthetic peptide
  Seed: EWLKTRPILSPLTKG
EYLKARKILQPLTKG

SEQ ID NO: 210283 - protein, 15 aa, Artificial Sequence
  Description of Artificial Sequence: Synthetic peptide
  Seed: EWLKTRPILSPLTKG
EYLKARKILSPLTKG

SEQ ID NO: 210284 - protein, 15 aa, Artificial Sequence
  Description of Artificial Sequence: Synthetic peptide
  Seed: EWLKTRPILSPLTKG
EYLKARKILTPLTKG

SEQ ID NO: 210285 - protein, 15 aa, Artificial Sequence
  Description of Artificial Sequence: Synthetic peptide
  Seed: EWLKTRPILSPLTKG
EYLKARMILIPLTKG

SEQ ID NO: 210286 - protein, 15 aa, Artificial Sequence
  Description of Artificial Sequence: Synthetic peptide
  Seed: EWLKTRPILSPLTKG
EYLKARMILLPLTKG

SEQ ID NO: 210287 - protein, 15 aa, Artificial Sequence
  Description of Artificial Sequence: Synthetic peptide
  Seed: EWLKTRPILSPLTKG
EYLKARMILVPLTKG

SEQ ID NO: 210288 - protein, 15 aa, Artificial Sequence
  Description of Artificial Sequence: Synthetic peptide
  Seed: EWLKTRPILSPLTKG
EYLKARNILAPLTKG

SEQ ID NO: 210289 - protein, 15 aa, Artificial Sequence
  Description of Artificial Sequence: Synthetic peptide
  Seed: EWLKTRPILSPLTKG
EYLKARNILGPLTKG

SEQ ID NO: 210290 - protein, 15 aa, Artificial Sequence
  Description of Artificial Sequence: Synthetic peptide
  Seed: EWLKTRPILSPLTKG
EYLKARNILIPLTKG

SEQ ID NO: 210291 - protein, 15 aa, Artificial Sequence
  Description of Artificial Sequence: Synthetic peptide
  Seed: EWLKTRPILSPLTKG
EYLKARNILLPLTKG

SEQ ID NO: 210292 - protein, 15 aa, Artificial Sequence
  Description of Artificial Sequence: Synthetic peptide
  Seed: EWLKTRPILSPLTKG
EYLKARNILMPLTKG

SEQ ID NO: 210293 - protein, 15 aa, Artificial Sequence
  Description of Artificial Sequence: Synthetic peptide
  Seed: EWLKTRPILSPLTKG
EYLKARNILNPLTKG

SEQ ID NO: 210294 - protein, 15 aa, Artificial Sequence
  Description of Artificial Sequence: Synthetic peptide
  Seed: EWLKTRPILSPLTKG
EYLKARNILSPLTKG

SEQ ID NO: 210295 - protein, 15 aa, Artificial Sequence
  Description of Artificial Sequence: Synthetic peptide
  Seed: EWLKTRPILSPLTKG
EYLKARNILTPLTKG

SEQ ID NO: 210296 - protein, 15 aa, Artificial Sequence
  Description of Artificial Sequence: Synthetic peptide
  Seed: EWLKTRPILSPLTKG
EYLKARNILVPLTKG

SEQ ID NO: 210297 - protein, 15 aa, Artificial Sequence
  Description of Artificial Sequence: Synthetic peptide
  Seed: EWLKTRPILSPLTKG
EYLKARPILAPLTKG

SEQ ID NO: 210298 - protein, 15 aa, Artificial Sequence
  Description of Artificial Sequence: Synthetic peptide
  Seed: EWLKTRPILSPLTKG
EYLKARPILCPLTKG

SEQ ID NO: 210299 - protein, 15 aa, Artificial Sequence
  Description of Artificial Sequence: Synthetic peptide
  Seed: EWLKTRPILSPLTKG
EYLKARPILDPLTKG

SEQ ID NO: 210300 - protein, 15 aa, Artificial Sequence
  Description of Artificial Sequence: Synthetic peptide
  Seed: EWLKTRPILSPLTKG
EYLKARPILFPLTKG

SEQ ID NO: 210301 - protein, 15 aa, Artificial Sequence
  Description of Artificial Sequence: Synthetic peptide
  Seed: EWLKTRPILSPLTKG
EYLKARPILGPLTKG

SEQ ID NO: 210302 - protein, 15 aa, Artificial Sequence
  Description of Artificial Sequence: Synthetic peptide
  Seed: EWLKTRPILSPLTKG
EYLKARPILIPLTKG

SEQ ID NO: 210303 - protein, 15 aa, Artificial Sequence
  Description of Artificial Sequence: Synthetic peptide
  Seed: EWLKTRPILSPLTKG
EYLKARPILLPLTKG

SEQ ID NO: 210304 - protein, 15 aa, Artificial Sequence
  Description of Artificial Sequence: Synthetic peptide
  Seed: EWLKTRPILSPLTKG
EYLKARPILMPLTKG

SEQ ID NO: 210305 - protein, 15 aa, Artificial Sequence
  Description of Artificial Sequence: Synthetic peptide
  Seed: EWLKTRPILSPLTKG
EYLKARPILNPLTKG

SEQ ID NO: 210306 - protein, 15 aa, Artificial Sequence
  Description of Artificial Sequence: Synthetic peptide
  Seed: EWLKTRPILSPLTKG
EYLKARPILPPLTKG

SEQ ID NO: 210307 - protein, 15 aa, Artificial Sequence
  Description of Artificial Sequence: Synthetic peptide
  Seed: EWLKTRPILSPLTKG
EYLKARPILQPLTKG

SEQ ID NO: 210308 - protein, 15 aa, Artificial Sequence
  Description of Artificial Sequence: Synthetic peptide
  Seed: EWLKTRPILSPLTKG
EYLKARPILSPLTKG

SEQ ID NO: 210309 - protein, 15 aa, Artificial Sequence
  Description of Artificial Sequence: Synthetic peptide
  Seed: EWLKTRPILSPLTKG
EYLKARPILTPLTKG

SEQ ID NO: 210310 - protein, 15 aa, Artificial Sequence
  Description of Artificial Sequence: Synthetic peptide
  Seed: EWLKTRPILSPLTKG
EYLKARPILVPLTKG

SEQ ID NO: 210311 - protein, 15 aa, Artificial Sequence
  Description of Artificial Sequence: Synthetic peptide
  Seed: EWLKTRPILSPLTKG
EYLKARPILYPLTKG

SEQ ID NO: 210312 - protein, 15 aa, Artificial Sequence
  Description of Artificial Sequence: Synthetic peptide
  Seed: EWLKTRPILSPLTKG
EYLKARQILIPLTKG

SEQ ID NO: 210313 - protein, 15 aa, Artificial Sequence
  Description of Artificial Sequence: Synthetic peptide
  Seed: EWLKTRPILSPLTKG
EYLKARQILLPLTKG

SEQ ID NO: 210314 - protein, 15 aa, Artificial Sequence
  Description of Artificial Sequence: Synthetic peptide
  Seed: EWLKTRPILSPLTKG
EYLKARQILVPLTKG

SEQ ID NO: 210315 - protein, 15 aa, Artificial Sequence
  Description of Artificial Sequence: Synthetic peptide
  Seed: EWLKTRPILSPLTKG
EYLKARRILAPLTKG

SEQ ID NO: 210316 - protein, 15 aa, Artificial Sequence
  Description of Artificial Sequence: Synthetic peptide
  Seed: EWLKTRPILSPLTKG
EYLKARRILGPLTKG

SEQ ID NO: 210317 - protein, 15 aa, Artificial Sequence
  Description of Artificial Sequence: Synthetic peptide
  Seed: EWLKTRPILSPLTKG
EYLKARRILHPLTKG

SEQ ID NO: 210318 - protein, 15 aa, Artificial Sequence
  Description of Artificial Sequence: Synthetic peptide
  Seed: EWLKTRPILSPLTKG
EYLKARRILKPLTKG

SEQ ID NO: 210319 - protein, 15 aa, Artificial Sequence
  Description of Artificial Sequence: Synthetic peptide
  Seed: EWLKTRPILSPLTKG
EYLKARRILNPLTKG

SEQ ID NO: 210320 - protein, 15 aa, Artificial Sequence
  Description of Artificial Sequence: Synthetic peptide
  Seed: EWLKTRPILSPLTKG
EYLKARRILQPLTKG

SEQ ID NO: 210321 - protein, 15 aa, Artificial Sequence
  Description of Artificial Sequence: Synthetic peptide
  Seed: EWLKTRPILSPLTKG
EYLKARRILRPLTKG

SEQ ID NO: 210322 - protein, 15 aa, Artificial Sequence
  Description of Artificial Sequence: Synthetic peptide
  Seed: EWLKTRPILSPLTKG
EYLKARRILSPLTKG

SEQ ID NO: 210323 - protein, 15 aa, Artificial Sequence
  Description of Artificial Sequence: Synthetic peptide
  Seed: EWLKTRPILSPLTKG
EYLKARRILTPLTKG

SEQ ID NO: 210324 - protein, 15 aa, Artificial Sequence
  Description of Artificial Sequence: Synthetic peptide
  Seed: EWLKTRPILSPLTKG
EYLKARRILVPLTKG

SEQ ID NO: 210325 - protein, 15 aa, Artificial Sequence
  Description of Artificial Sequence: Synthetic peptide
  Seed: EWLKTRPILSPLTKG
EYLKARSILAPLTKG

SEQ ID NO: 210326 - protein, 15 aa, Artificial Sequence
  Description of Artificial Sequence: Synthetic peptide
  Seed: EWLKTRPILSPLTKG
EYLKARSILCPLTKG

SEQ ID NO: 210327 - protein, 15 aa, Artificial Sequence
  Description of Artificial Sequence: Synthetic peptide
  Seed: EWLKTRPILSPLTKG
EYLKARSILFPLTKG

SEQ ID NO: 210328 - protein, 15 aa, Artificial Sequence
  Description of Artificial Sequence: Synthetic peptide
  Seed: EWLKTRPILSPLTKG
EYLKARSILGPLTKG

SEQ ID NO: 210329 - protein, 15 aa, Artificial Sequence
  Description of Artificial Sequence: Synthetic peptide
  Seed: EWLKTRPILSPLTKG
EYLKARSILIPLTKG

SEQ ID NO: 210330 - protein, 15 aa, Artificial Sequence
  Description of Artificial Sequence: Synthetic peptide
  Seed: EWLKTRPILSPLTKG
EYLKARSILLPLTKG

SEQ ID NO: 210331 - protein, 15 aa, Artificial Sequence
  Description of Artificial Sequence: Synthetic peptide
  Seed: EWLKTRPILSPLTKG
EYLKARSILMPLTKG

SEQ ID NO: 210332 - protein, 15 aa, Artificial Sequence
  Description of Artificial Sequence: Synthetic peptide
  Seed: EWLKTRPILSPLTKG
EYLKARSILNPLTKG

SEQ ID NO: 210333 - protein, 15 aa, Artificial Sequence
  Description of Artificial Sequence: Synthetic peptide
  Seed: EWLKTRPILSPLTKG
EYLKARSILPPLTKG

SEQ ID NO: 210334 - protein, 15 aa, Artificial Sequence
  Description of Artificial Sequence: Synthetic peptide
  Seed: EWLKTRPILSPLTKG
EYLKARSILQPLTKG

SEQ ID NO: 210335 - protein, 15 aa, Artificial Sequence
  Description of Artificial Sequence: Synthetic peptide
  Seed: EWLKTRPILSPLTKG
EYLKARSILTPLTKG

SEQ ID NO: 210336 - protein, 15 aa, Artificial Sequence
  Description of Artificial Sequence: Synthetic peptide
  Seed: EWLKTRPILSPLTKG
EYLKARSILVPLTKG

SEQ ID NO: 210337 - protein, 15 aa, Artificial Sequence
  Description of Artificial Sequence: Synthetic peptide
  Seed: EWLKTRPILSPLTKG
EYLKARSILYPLTKG

SEQ ID NO: 210338 - protein, 15 aa, Artificial Sequence
  Description of Artificial Sequence: Synthetic peptide
  Seed: EWLKTRPILSPLTKG
EYLKARTILAPLTKG

SEQ ID NO: 210339 - protein, 15 aa, Artificial Sequence
  Description of Artificial Sequence: Synthetic peptide
  Seed: EWLKTRPILSPLTKG
EYLKARTILCPLTKG

SEQ ID NO: 210340 - protein, 15 aa, Artificial Sequence
  Description of Artificial Sequence: Synthetic peptide
  Seed: EWLKTRPILSPLTKG
EYLKARTILGPLTKG

SEQ ID NO: 210341 - protein, 15 aa, Artificial Sequence
  Description of Artificial Sequence: Synthetic peptide
  Seed: EWLKTRPILSPLTKG
EYLKARTILIPLTKG

SEQ ID NO: 210342 - protein, 15 aa, Artificial Sequence
  Description of Artificial Sequence: Synthetic peptide
  Seed: EWLKTRPILSPLTKG
EYLKARTILLPLTKG

SEQ ID NO: 210343 - protein, 15 aa, Artificial Sequence
  Description of Artificial Sequence: Synthetic peptide
  Seed: EWLKTRPILSPLTKG
EYLKARTILMPLTKG

SEQ ID NO: 210344 - protein, 15 aa, Artificial Sequence
  Description of Artificial Sequence: Synthetic peptide
  Seed: EWLKTRPILSPLTKG
EYLKARTILNPLTKG

SEQ ID NO: 210345 - protein, 15 aa, Artificial Sequence
  Description of Artificial Sequence: Synthetic peptide
  Seed: EWLKTRPILSPLTKG
EYLKARTILQPLTKG

SEQ ID NO: 210346 - protein, 15 aa, Artificial Sequence
  Description of Artificial Sequence: Synthetic peptide
  Seed: EWLKTRPILSPLTKG
EYLKARTILSPLTKG

SEQ ID NO: 210347 - protein, 15 aa, Artificial Sequence
  Description of Artificial Sequence: Synthetic peptide
  Seed: EWLKTRPILSPLTKG
EYLKARTILTPLTKG

SEQ ID NO: 210348 - protein, 15 aa, Artificial Sequence
  Description of Artificial Sequence: Synthetic peptide
  Seed: EWLKTRPILSPLTKG
EYLKARTILVPLTKG

SEQ ID NO: 210349 - protein, 15 aa, Artificial Sequence
  Description of Artificial Sequence: Synthetic peptide
  Seed: EWLKTRPILSPLTKG
EYLKARVILAPLTKG

SEQ ID NO: 210350 - protein, 15 aa, Artificial Sequence
  Description of Artificial Sequence: Synthetic peptide
  Seed: EWLKTRPILSPLTKG
EYLKARVILGPLTKG

SEQ ID NO: 210351 - protein, 15 aa, Artificial Sequence
  Description of Artificial Sequence: Synthetic peptide
  Seed: EWLKTRPILSPLTKG
EYLKARVILIPLTKG

SEQ ID NO: 210352 - protein, 15 aa, Artificial Sequence
  Description of Artificial Sequence: Synthetic peptide
  Seed: EWLKTRPILSPLTKG
EYLKARVILLPLTKG

SEQ ID NO: 210353 - protein, 15 aa, Artificial Sequence
  Description of Artificial Sequence: Synthetic peptide
  Seed: EWLKTRPILSPLTKG
EYLKARVILMPLTKG

SEQ ID NO: 210354 - protein, 15 aa, Artificial Sequence
  Description of Artificial Sequence: Synthetic peptide
  Seed: EWLKTRPILSPLTKG
EYLKARVILNPLTKG

SEQ ID NO: 210355 - protein, 15 aa, Artificial Sequence
  Description of Artificial Sequence: Synthetic peptide
  Seed: EWLKTRPILSPLTKG
EYLKARVILSPLTKG

SEQ ID NO: 210356 - protein, 15 aa, Artificial Sequence
  Description of Artificial Sequence: Synthetic peptide
  Seed: EWLKTRPILSPLTKG
EYLKARVILTPLTKG

SEQ ID NO: 210357 - protein, 15 aa, Artificial Sequence
  Description of Artificial Sequence: Synthetic peptide
  Seed: EWLKTRPILSPLTKG
EYLKARVILVPLTKG

SEQ ID NO: 210358 - protein, 15 aa, Artificial Sequence
  Description of Artificial Sequence: Synthetic peptide
  Seed: EWLKTRPILSPLTKG
EYLKCRAILAPLTKG

SEQ ID NO: 210359 - protein, 15 aa, Artificial Sequence
  Description of Artificial Sequence: Synthetic peptide
  Seed: EWLKTRPILSPLTKG
EYLKCRAILGPLTKG

SEQ ID NO: 210360 - protein, 15 aa, Artificial Sequence
  Description of Artificial Sequence: Synthetic peptide
  Seed: EWLKTRPILSPLTKG
EYLKCRAILIPLTKG

SEQ ID NO: 210361 - protein, 15 aa, Artificial Sequence
  Description of Artificial Sequence: Synthetic peptide
  Seed: EWLKTRPILSPLTKG
EYLKCRAILLPLTKG

SEQ ID NO: 210362 - protein, 15 aa, Artificial Sequence
  Description of Artificial Sequence: Synthetic peptide
  Seed: EWLKTRPILSPLTKG
EYLKCRAILMPLTKG

SEQ ID NO: 210363 - protein, 15 aa, Artificial Sequence
  Description of Artificial Sequence: Synthetic peptide
  Seed: EWLKTRPILSPLTKG
EYLKCRAILNPLTKG

SEQ ID NO: 210364 - protein, 15 aa, Artificial Sequence
  Description of Artificial Sequence: Synthetic peptide
  Seed: EWLKTRPILSPLTKG
EYLKCRAILSPLTKG

SEQ ID NO: 210365 - protein, 15 aa, Artificial Sequence
  Description of Artificial Sequence: Synthetic peptide
  Seed: EWLKTRPILSPLTKG
EYLKCRAILTPLTKG

SEQ ID NO: 210366 - protein, 15 aa, Artificial Sequence
  Description of Artificial Sequence: Synthetic peptide
  Seed: EWLKTRPILSPLTKG
EYLKCRAILVPLTKG

SEQ ID NO: 210367 - protein, 15 aa, Artificial Sequence
  Description of Artificial Sequence: Synthetic peptide
  Seed: EWLKTRPILSPLTKG
EYLKCRGILAPLTKG

SEQ ID NO: 210368 - protein, 15 aa, Artificial Sequence
  Description of Artificial Sequence: Synthetic peptide
  Seed: EWLKTRPILSPLTKG
EYLKCRGILIPLTKG

SEQ ID NO: 210369 - protein, 15 aa, Artificial Sequence
  Description of Artificial Sequence: Synthetic peptide
  Seed: EWLKTRPILSPLTKG
EYLKCRGILLPLTKG

SEQ ID NO: 210370 - protein, 15 aa, Artificial Sequence
  Description of Artificial Sequence: Synthetic peptide
  Seed: EWLKTRPILSPLTKG
EYLKCRGILSPLTKG

SEQ ID NO: 210371 - protein, 15 aa, Artificial Sequence
  Description of Artificial Sequence: Synthetic peptide
  Seed: EWLKTRPILSPLTKG
EYLKCRGILVPLTKG

SEQ ID NO: 210372 - protein, 15 aa, Artificial Sequence
  Description of Artificial Sequence: Synthetic peptide
  Seed: EWLKTRPILSPLTKG
EYLKCRIILAPLTKG

SEQ ID NO: 210373 - protein, 15 aa, Artificial Sequence
  Description of Artificial Sequence: Synthetic peptide
  Seed: EWLKTRPILSPLTKG
EYLKCRNILAPLTKG

SEQ ID NO: 210374 - protein, 15 aa, Artificial Sequence
  Description of Artificial Sequence: Synthetic peptide
  Seed: EWLKTRPILSPLTKG
EYLKCRPILAPLTKG

SEQ ID NO: 210375 - protein, 15 aa, Artificial Sequence
  Description of Artificial Sequence: Synthetic peptide
  Seed: EWLKTRPILSPLTKG
EYLKCRPILIPLTKG

SEQ ID NO: 210376 - protein, 15 aa, Artificial Sequence
  Description of Artificial Sequence: Synthetic peptide
  Seed: EWLKTRPILSPLTKG
EYLKCRPILSPLTKG

SEQ ID NO: 210377 - protein, 15 aa, Artificial Sequence
  Description of Artificial Sequence: Synthetic peptide
  Seed: EWLKTRPILSPLTKG
EYLKCRPILVPLTKG

SEQ ID NO: 210378 - protein, 15 aa, Artificial Sequence
  Description of Artificial Sequence: Synthetic peptide
  Seed: EWLKTRPILSPLTKG
EYLKCRSILAPLTKG

SEQ ID NO: 210379 - protein, 15 aa, Artificial Sequence
  Description of Artificial Sequence: Synthetic peptide
  Seed: EWLKTRPILSPLTKG
EYLKCRSILGPLTKG

SEQ ID NO: 210380 - protein, 15 aa, Artificial Sequence
  Description of Artificial Sequence: Synthetic peptide
  Seed: EWLKTRPILSPLTKG
EYLKCRSILIPLTKG

SEQ ID NO: 210381 - protein, 15 aa, Artificial Sequence
  Description of Artificial Sequence: Synthetic peptide
  Seed: EWLKTRPILSPLTKG
EYLKCRSILLPLTKG

SEQ ID NO: 210382 - protein, 15 aa, Artificial Sequence
  Description of Artificial Sequence: Synthetic peptide
  Seed: EWLKTRPILSPLTKG
EYLKCRSILSPLTKG

SEQ ID NO: 210383 - protein, 15 aa, Artificial Sequence
  Description of Artificial Sequence: Synthetic peptide
  Seed: EWLKTRPILSPLTKG
EYLKCRSILTPLTKG

SEQ ID NO: 210384 - protein, 15 aa, Artificial Sequence
  Description of Artificial Sequence: Synthetic peptide
  Seed: EWLKTRPILSPLTKG
EYLKCRSILVPLTKG

SEQ ID NO: 210385 - protein, 15 aa, Artificial Sequence
  Description of Artificial Sequence: Synthetic peptide
  Seed: EWLKTRPILSPLTKG
EYLKCRTILAPLTKG

SEQ ID NO: 210386 - protein, 15 aa, Artificial Sequence
  Description of Artificial Sequence: Synthetic peptide
  Seed: EWLKTRPILSPLTKG
EYLKCRTILSPLTKG

SEQ ID NO: 210387 - protein, 15 aa, Artificial Sequence
  Description of Artificial Sequence: Synthetic peptide
  Seed: EWLKTRPILSPLTKG
EYLKCRVILAPLTKG

SEQ ID NO: 210388 - protein, 15 aa, Artificial Sequence
  Description of Artificial Sequence: Synthetic peptide
  Seed: EWLKTRPILSPLTKG
EYLKDRAILAPLTKG

SEQ ID NO: 210389 - protein, 15 aa, Artificial Sequence
  Description of Artificial Sequence: Synthetic peptide
  Seed: EWLKTRPILSPLTKG
EYLKDRAILIPLTKG

SEQ ID NO: 210390 - protein, 15 aa, Artificial Sequence
  Description of Artificial Sequence: Synthetic peptide
  Seed: EWLKTRPILSPLTKG
EYLKDRAILLPLTKG

SEQ ID NO: 210391 - protein, 15 aa, Artificial Sequence
  Description of Artificial Sequence: Synthetic peptide
  Seed: EWLKTRPILSPLTKG
EYLKDRAILVPLTKG

SEQ ID NO: 210392 - protein, 15 aa, Artificial Sequence
  Description of Artificial Sequence: Synthetic peptide
  Seed: EWLKTRPILSPLTKG
EYLKERAILAPLTKG

SEQ ID NO: 210393 - protein, 15 aa, Artificial Sequence
  Description of Artificial Sequence: Synthetic peptide
  Seed: EWLKTRPILSPLTKG
EYLKERAILGPLTKG

SEQ ID NO: 210394 - protein, 15 aa, Artificial Sequence
  Description of Artificial Sequence: Synthetic peptide
  Seed: EWLKTRPILSPLTKG
EYLKERAILIPLTKG

SEQ ID NO: 210395 - protein, 15 aa, Artificial Sequence
  Description of Artificial Sequence: Synthetic peptide
  Seed: EWLKTRPILSPLTKG
EYLKERAILLPLTKG

SEQ ID NO: 210396 - protein, 15 aa, Artificial Sequence
  Description of Artificial Sequence: Synthetic peptide
  Seed: EWLKTRPILSPLTKG
EYLKERAILMPLTKG

SEQ ID NO: 210397 - protein, 15 aa, Artificial Sequence
  Description of Artificial Sequence: Synthetic peptide
  Seed: EWLKTRPILSPLTKG
EYLKERAILNPLTKG

SEQ ID NO: 210398 - protein, 15 aa, Artificial Sequence
  Description of Artificial Sequence: Synthetic peptide
  Seed: EWLKTRPILSPLTKG
EYLKERAILSPLTKG

SEQ ID NO: 210399 - protein, 15 aa, Artificial Sequence
  Description of Artificial Sequence: Synthetic peptide
  Seed: EWLKTRPILSPLTKG
EYLKERAILTPLTKG

SEQ ID NO: 210400 - protein, 15 aa, Artificial Sequence
  Description of Artificial Sequence: Synthetic peptide
  Seed: EWLKTRPILSPLTKG
EYLKERAILVPLTKG

SEQ ID NO: 210401 - protein, 15 aa, Artificial Sequence
  Description of Artificial Sequence: Synthetic peptide
  Seed: EWLKTRPILSPLTKG
EYLKERGILAPLTKG

SEQ ID NO: 210402 - protein, 15 aa, Artificial Sequence
  Description of Artificial Sequence: Synthetic peptide
  Seed: EWLKTRPILSPLTKG
EYLKERGILGPLTKG

SEQ ID NO: 210403 - protein, 15 aa, Artificial Sequence
  Description of Artificial Sequence: Synthetic peptide
  Seed: EWLKTRPILSPLTKG
EYLKERGILIPLTKG

SEQ ID NO: 210404 - protein, 15 aa, Artificial Sequence
  Description of Artificial Sequence: Synthetic peptide
  Seed: EWLKTRPILSPLTKG
EYLKERGILLPLTKG

SEQ ID NO: 210405 - protein, 15 aa, Artificial Sequence
  Description of Artificial Sequence: Synthetic peptide
  Seed: EWLKTRPILSPLTKG
EYLKERGILMPLTKG

SEQ ID NO: 210406 - protein, 15 aa, Artificial Sequence
  Description of Artificial Sequence: Synthetic peptide
  Seed: EWLKTRPILSPLTKG
EYLKERGILSPLTKG

SEQ ID NO: 210407 - protein, 15 aa, Artificial Sequence
  Description of Artificial Sequence: Synthetic peptide
  Seed: EWLKTRPILSPLTKG
EYLKERGILTPLTKG

SEQ ID NO: 210408 - protein, 15 aa, Artificial Sequence
  Description of Artificial Sequence: Synthetic peptide
  Seed: EWLKTRPILSPLTKG
EYLKERGILVPLTKG

SEQ ID NO: 210409 - protein, 15 aa, Artificial Sequence
  Description of Artificial Sequence: Synthetic peptide
  Seed: EWLKTRPILSPLTKG
EYLKERNILAPLTKG

SEQ ID NO: 210410 - protein, 15 aa, Artificial Sequence
  Description of Artificial Sequence: Synthetic peptide
  Seed: EWLKTRPILSPLTKG
EYLKERNILIPLTKG

SEQ ID NO: 210411 - protein, 15 aa, Artificial Sequence
  Description of Artificial Sequence: Synthetic peptide
  Seed: EWLKTRPILSPLTKG
EYLKERNILLPLTKG

SEQ ID NO: 210412 - protein, 15 aa, Artificial Sequence
  Description of Artificial Sequence: Synthetic peptide
  Seed: EWLKTRPILSPLTKG
EYLKERNILVPLTKG

SEQ ID NO: 210413 - protein, 15 aa, Artificial Sequence
  Description of Artificial Sequence: Synthetic peptide
  Seed: EWLKTRPILSPLTKG
EYLKERPILAPLTKG

SEQ ID NO: 210414 - protein, 15 aa, Artificial Sequence
  Description of Artificial Sequence: Synthetic peptide
  Seed: EWLKTRPILSPLTKG
EYLKERPILIPLTKG

SEQ ID NO: 210415 - protein, 15 aa, Artificial Sequence
  Description of Artificial Sequence: Synthetic peptide
  Seed: EWLKTRPILSPLTKG
EYLKERPILLPLTKG

SEQ ID NO: 210416 - protein, 15 aa, Artificial Sequence
  Description of Artificial Sequence: Synthetic peptide
  Seed: EWLKTRPILSPLTKG
EYLKERPILMPLTKG

SEQ ID NO: 210417 - protein, 15 aa, Artificial Sequence
  Description of Artificial Sequence: Synthetic peptide
  Seed: EWLKTRPILSPLTKG
EYLKERPILSPLTKG

SEQ ID NO: 210418 - protein, 15 aa, Artificial Sequence
  Description of Artificial Sequence: Synthetic peptide
  Seed: EWLKTRPILSPLTKG
EYLKERPILTPLTKG

SEQ ID NO: 210419 - protein, 15 aa, Artificial Sequence
  Description of Artificial Sequence: Synthetic peptide
  Seed: EWLKTRPILSPLTKG
EYLKERPILVPLTKG

SEQ ID NO: 210420 - protein, 15 aa, Artificial Sequence
  Description of Artificial Sequence: Synthetic peptide
  Seed: EWLKTRPILSPLTKG
EYLKERSILAPLTKG

SEQ ID NO: 210421 - protein, 15 aa, Artificial Sequence
  Description of Artificial Sequence: Synthetic peptide
  Seed: EWLKTRPILSPLTKG
EYLKERSILGPLTKG

SEQ ID NO: 210422 - protein, 15 aa, Artificial Sequence
  Description of Artificial Sequence: Synthetic peptide
  Seed: EWLKTRPILSPLTKG
EYLKERSILIPLTKG

SEQ ID NO: 210423 - protein, 15 aa, Artificial Sequence
  Description of Artificial Sequence: Synthetic peptide
  Seed: EWLKTRPILSPLTKG
EYLKERSILLPLTKG

SEQ ID NO: 210424 - protein, 15 aa, Artificial Sequence
  Description of Artificial Sequence: Synthetic peptide
  Seed: EWLKTRPILSPLTKG
EYLKERSILMPLTKG

SEQ ID NO: 210425 - protein, 15 aa, Artificial Sequence
  Description of Artificial Sequence: Synthetic peptide
  Seed: EWLKTRPILSPLTKG
EYLKERSILSPLTKG

SEQ ID NO: 210426 - protein, 15 aa, Artificial Sequence
  Description of Artificial Sequence: Synthetic peptide
  Seed: EWLKTRPILSPLTKG
EYLKERSILTPLTKG

SEQ ID NO: 210427 - protein, 15 aa, Artificial Sequence
  Description of Artificial Sequence: Synthetic peptide
  Seed: EWLKTRPILSPLTKG
EYLKERSILVPLTKG

SEQ ID NO: 210428 - protein, 15 aa, Artificial Sequence
  Description of Artificial Sequence: Synthetic peptide
  Seed: EWLKTRPILSPLTKG
EYLKERTILAPLTKG

SEQ ID NO: 210429 - protein, 15 aa, Artificial Sequence
  Description of Artificial Sequence: Synthetic peptide
  Seed: EWLKTRPILSPLTKG
EYLKERTILIPLTKG

SEQ ID NO: 210430 - protein, 15 aa, Artificial Sequence
  Description of Artificial Sequence: Synthetic peptide
  Seed: EWLKTRPILSPLTKG
EYLKERTILLPLTKG

SEQ ID NO: 210431 - protein, 15 aa, Artificial Sequence
  Description of Artificial Sequence: Synthetic peptide
  Seed: EWLKTRPILSPLTKG
EYLKERTILVPLTKG

SEQ ID NO: 210432 - protein, 15 aa, Artificial Sequence
  Description of Artificial Sequence: Synthetic peptide
  Seed: EWLKTRPILSPLTKG
EYLKERVILAPLTKG

SEQ ID NO: 210433 - protein, 15 aa, Artificial Sequence
  Description of Artificial Sequence: Synthetic peptide
  Seed: EWLKTRPILSPLTKG
EYLKFRAILIPLTKG

SEQ ID NO: 210434 - protein, 15 aa, Artificial Sequence
  Description of Artificial Sequence: Synthetic peptide
  Seed: EWLKTRPILSPLTKG
EYLKFRAILLPLTKG

SEQ ID NO: 210435 - protein, 15 aa, Artificial Sequence
  Description of Artificial Sequence: Synthetic peptide
  Seed: EWLKTRPILSPLTKG
EYLKFRAILVPLTKG

SEQ ID NO: 210436 - protein, 15 aa, Artificial Sequence
  Description of Artificial Sequence: Synthetic peptide
  Seed: EWLKTRPILSPLTKG
EYLKFRGILIPLTKG

SEQ ID NO: 210437 - protein, 15 aa, Artificial Sequence
  Description of Artificial Sequence: Synthetic peptide
  Seed: EWLKTRPILSPLTKG
EYLKFRGILLPLTKG

SEQ ID NO: 210438 - protein, 15 aa, Artificial Sequence
  Description of Artificial Sequence: Synthetic peptide
  Seed: EWLKTRPILSPLTKG
EYLKFRGILMPLTKG

SEQ ID NO: 210439 - protein, 15 aa, Artificial Sequence
  Description of Artificial Sequence: Synthetic peptide
  Seed: EWLKTRPILSPLTKG
EYLKFRKILGPLTKG

SEQ ID NO: 210440 - protein, 15 aa, Artificial Sequence
  Description of Artificial Sequence: Synthetic peptide
  Seed: EWLKTRPILSPLTKG
EYLKFRPILIPLTKG

SEQ ID NO: 210441 - protein, 15 aa, Artificial Sequence
  Description of Artificial Sequence: Synthetic peptide
  Seed: EWLKTRPILSPLTKG
EYLKFRPILLPLTKG

SEQ ID NO: 210442 - protein, 15 aa, Artificial Sequence
  Description of Artificial Sequence: Synthetic peptide
  Seed: EWLKTRPILSPLTKG
EYLKFRRILGPLTKG

SEQ ID NO: 210443 - protein, 15 aa, Artificial Sequence
  Description of Artificial Sequence: Synthetic peptide
  Seed: EWLKTRPILSPLTKG
EYLKFRSILIPLTKG

SEQ ID NO: 210444 - protein, 15 aa, Artificial Sequence
  Description of Artificial Sequence: Synthetic peptide
  Seed: EWLKTRPILSPLTKG
EYLKFRSILVPLTKG

SEQ ID NO: 210445 - protein, 15 aa, Artificial Sequence
  Description of Artificial Sequence: Synthetic peptide
  Seed: EWLKTRPILSPLTKG
EYLKGRAILAPLTKG

SEQ ID NO: 210446 - protein, 15 aa, Artificial Sequence
  Description of Artificial Sequence: Synthetic peptide
  Seed: EWLKTRPILSPLTKG
EYLKGRAILCPLTKG

SEQ ID NO: 210447 - protein, 15 aa, Artificial Sequence
  Description of Artificial Sequence: Synthetic peptide
  Seed: EWLKTRPILSPLTKG
EYLKGRAILFPLTKG

SEQ ID NO: 210448 - protein, 15 aa, Artificial Sequence
  Description of Artificial Sequence: Synthetic peptide
  Seed: EWLKTRPILSPLTKG
EYLKGRAILGPLTKG

SEQ ID NO: 210449 - protein, 15 aa, Artificial Sequence
  Description of Artificial Sequence: Synthetic peptide
  Seed: EWLKTRPILSPLTKG
EYLKGRAILIPLTKG

SEQ ID NO: 210450 - protein, 15 aa, Artificial Sequence
  Description of Artificial Sequence: Synthetic peptide
  Seed: EWLKTRPILSPLTKG
EYLKGRAILLPLTKG

SEQ ID NO: 210451 - protein, 15 aa, Artificial Sequence
  Description of Artificial Sequence: Synthetic peptide
  Seed: EWLKTRPILSPLTKG
EYLKGRAILMPLTKG

SEQ ID NO: 210452 - protein, 15 aa, Artificial Sequence
  Description of Artificial Sequence: Synthetic peptide
  Seed: EWLKTRPILSPLTKG
EYLKGRAILNPLTKG

SEQ ID NO: 210453 - protein, 15 aa, Artificial Sequence
  Description of Artificial Sequence: Synthetic peptide
  Seed: EWLKTRPILSPLTKG
EYLKGRAILPPLTKG

SEQ ID NO: 210454 - protein, 15 aa, Artificial Sequence
  Description of Artificial Sequence: Synthetic peptide
  Seed: EWLKTRPILSPLTKG
EYLKGRAILSPLTKG

SEQ ID NO: 210455 - protein, 15 aa, Artificial Sequence
  Description of Artificial Sequence: Synthetic peptide
  Seed: EWLKTRPILSPLTKG
EYLKGRAILTPLTKG

SEQ ID NO: 210456 - protein, 15 aa, Artificial Sequence
  Description of Artificial Sequence: Synthetic peptide
  Seed: EWLKTRPILSPLTKG
EYLKGRAILVPLTKG

SEQ ID NO: 210457 - protein, 15 aa, Artificial Sequence
  Description of Artificial Sequence: Synthetic peptide
  Seed: EWLKTRPILSPLTKG
EYLKGRGILAPLTKG

SEQ ID NO: 210458 - protein, 15 aa, Artificial Sequence
  Description of Artificial Sequence: Synthetic peptide
  Seed: EWLKTRPILSPLTKG
EYLKGRGILGPLTKG

SEQ ID NO: 210459 - protein, 15 aa, Artificial Sequence
  Description of Artificial Sequence: Synthetic peptide
  Seed: EWLKTRPILSPLTKG
EYLKGRGILIPLTKG

SEQ ID NO: 210460 - protein, 15 aa, Artificial Sequence
  Description of Artificial Sequence: Synthetic peptide
  Seed: EWLKTRPILSPLTKG
EYLKGRGILLPLTKG

SEQ ID NO: 210461 - protein, 15 aa, Artificial Sequence
  Description of Artificial Sequence: Synthetic peptide
  Seed: EWLKTRPILSPLTKG
EYLKGRGILMPLTKG

SEQ ID NO: 210462 - protein, 15 aa, Artificial Sequence
  Description of Artificial Sequence: Synthetic peptide
  Seed: EWLKTRPILSPLTKG
EYLKGRGILSPLTKG

SEQ ID NO: 210463 - protein, 15 aa, Artificial Sequence
  Description of Artificial Sequence: Synthetic peptide
  Seed: EWLKTRPILSPLTKG
EYLKGRGILTPLTKG

SEQ ID NO: 210464 - protein, 15 aa, Artificial Sequence
  Description of Artificial Sequence: Synthetic peptide
  Seed: EWLKTRPILSPLTKG
EYLKGRGILVPLTKG

SEQ ID NO: 210465 - protein, 15 aa, Artificial Sequence
  Description of Artificial Sequence: Synthetic peptide
  Seed: EWLKTRPILSPLTKG
EYLKGRIILAPLTKG

SEQ ID NO: 210466 - protein, 15 aa, Artificial Sequence
  Description of Artificial Sequence: Synthetic peptide
  Seed: EWLKTRPILSPLTKG
EYLKGRIILIPLTKG

SEQ ID NO: 210467 - protein, 15 aa, Artificial Sequence
  Description of Artificial Sequence: Synthetic peptide
  Seed: EWLKTRPILSPLTKG
EYLKGRIILLPLTKG

SEQ ID NO: 210468 - protein, 15 aa, Artificial Sequence
  Description of Artificial Sequence: Synthetic peptide
  Seed: EWLKTRPILSPLTKG
EYLKGRIILVPLTKG

SEQ ID NO: 210469 - protein, 15 aa, Artificial Sequence
  Description of Artificial Sequence: Synthetic peptide
  Seed: EWLKTRPILSPLTKG
EYLKGRNILAPLTKG

SEQ ID NO: 210470 - protein, 15 aa, Artificial Sequence
  Description of Artificial Sequence: Synthetic peptide
  Seed: EWLKTRPILSPLTKG
EYLKGRNILIPLTKG

SEQ ID NO: 210471 - protein, 15 aa, Artificial Sequence
  Description of Artificial Sequence: Synthetic peptide
  Seed: EWLKTRPILSPLTKG
EYLKGRNILLPLTKG

SEQ ID NO: 210472 - protein, 15 aa, Artificial Sequence
  Description of Artificial Sequence: Synthetic peptide
  Seed: EWLKTRPILSPLTKG
EYLKGRNILVPLTKG

SEQ ID NO: 210473 - protein, 15 aa, Artificial Sequence
  Description of Artificial Sequence: Synthetic peptide
  Seed: EWLKTRPILSPLTKG
EYLKGRPILAPLTKG

SEQ ID NO: 210474 - protein, 15 aa, Artificial Sequence
  Description of Artificial Sequence: Synthetic peptide
  Seed: EWLKTRPILSPLTKG
EYLKGRPILIPLTKG

SEQ ID NO: 210475 - protein, 15 aa, Artificial Sequence
  Description of Artificial Sequence: Synthetic peptide
  Seed: EWLKTRPILSPLTKG
EYLKGRPILLPLTKG

SEQ ID NO: 210476 - protein, 15 aa, Artificial Sequence
  Description of Artificial Sequence: Synthetic peptide
  Seed: EWLKTRPILSPLTKG
EYLKGRPILMPLTKG

SEQ ID NO: 210477 - protein, 15 aa, Artificial Sequence
  Description of Artificial Sequence: Synthetic peptide
  Seed: EWLKTRPILSPLTKG
EYLKGRPILSPLTKG

SEQ ID NO: 210478 - protein, 15 aa, Artificial Sequence
  Description of Artificial Sequence: Synthetic peptide
  Seed: EWLKTRPILSPLTKG
EYLKGRPILTPLTKG

SEQ ID NO: 210479 - protein, 15 aa, Artificial Sequence
  Description of Artificial Sequence: Synthetic peptide
  Seed: EWLKTRPILSPLTKG
EYLKGRPILVPLTKG

SEQ ID NO: 210480 - protein, 15 aa, Artificial Sequence
  Description of Artificial Sequence: Synthetic peptide
  Seed: EWLKTRPILSPLTKG
EYLKGRSILAPLTKG

SEQ ID NO: 210481 - protein, 15 aa, Artificial Sequence
  Description of Artificial Sequence: Synthetic peptide
  Seed: EWLKTRPILSPLTKG
EYLKGRSILGPLTKG

SEQ ID NO: 210482 - protein, 15 aa, Artificial Sequence
  Description of Artificial Sequence: Synthetic peptide
  Seed: EWLKTRPILSPLTKG
EYLKGRSILIPLTKG

SEQ ID NO: 210483 - protein, 15 aa, Artificial Sequence
  Description of Artificial Sequence: Synthetic peptide
  Seed: EWLKTRPILSPLTKG
EYLKGRSILLPLTKG

SEQ ID NO: 210484 - protein, 15 aa, Artificial Sequence
  Description of Artificial Sequence: Synthetic peptide
  Seed: EWLKTRPILSPLTKG
EYLKGRSILMPLTKG

SEQ ID NO: 210485 - protein, 15 aa, Artificial Sequence
  Description of Artificial Sequence: Synthetic peptide
  Seed: EWLKTRPILSPLTKG
EYLKGRSILSPLTKG

SEQ ID NO: 210486 - protein, 15 aa, Artificial Sequence
  Description of Artificial Sequence: Synthetic peptide
  Seed: EWLKTRPILSPLTKG
EYLKGRSILTPLTKG

SEQ ID NO: 210487 - protein, 15 aa, Artificial Sequence
  Description of Artificial Sequence: Synthetic peptide
  Seed: EWLKTRPILSPLTKG
EYLKGRSILVPLTKG

SEQ ID NO: 210488 - protein, 15 aa, Artificial Sequence
  Description of Artificial Sequence: Synthetic peptide
  Seed: EWLKTRPILSPLTKG
EYLKGRTILAPLTKG

SEQ ID NO: 210489 - protein, 15 aa, Artificial Sequence
  Description of Artificial Sequence: Synthetic peptide
  Seed: EWLKTRPILSPLTKG
EYLKGRTILIPLTKG

SEQ ID NO: 210490 - protein, 15 aa, Artificial Sequence
  Description of Artificial Sequence: Synthetic peptide
  Seed: EWLKTRPILSPLTKG
EYLKGRTILLPLTKG

SEQ ID NO: 210491 - protein, 15 aa, Artificial Sequence
  Description of Artificial Sequence: Synthetic peptide
  Seed: EWLKTRPILSPLTKG
EYLKGRTILMPLTKG

SEQ ID NO: 210492 - protein, 15 aa, Artificial Sequence
  Description of Artificial Sequence: Synthetic peptide
  Seed: EWLKTRPILSPLTKG
EYLKGRTILSPLTKG

SEQ ID NO: 210493 - protein, 15 aa, Artificial Sequence
  Description of Artificial Sequence: Synthetic peptide
  Seed: EWLKTRPILSPLTKG
EYLKGRTILTPLTKG

SEQ ID NO: 210494 - protein, 15 aa, Artificial Sequence
  Description of Artificial Sequence: Synthetic peptide
  Seed: EWLKTRPILSPLTKG
EYLKGRTILVPLTKG

SEQ ID NO: 210495 - protein, 15 aa, Artificial Sequence
  Description of Artificial Sequence: Synthetic peptide
  Seed: EWLKTRPILSPLTKG
EYLKGRVILAPLTKG

SEQ ID NO: 210496 - protein, 15 aa, Artificial Sequence
  Description of Artificial Sequence: Synthetic peptide
  Seed: EWLKTRPILSPLTKG
EYLKGRVILIPLTKG

SEQ ID NO: 210497 - protein, 15 aa, Artificial Sequence
  Description of Artificial Sequence: Synthetic peptide
  Seed: EWLKTRPILSPLTKG
EYLKGRVILLPLTKG

SEQ ID NO: 210498 - protein, 15 aa, Artificial Sequence
  Description of Artificial Sequence: Synthetic peptide
  Seed: EWLKTRPILSPLTKG
EYLKGRVILMPLTKG

SEQ ID NO: 210499 - protein, 15 aa, Artificial Sequence
  Description of Artificial Sequence: Synthetic peptide
  Seed: EWLKTRPILSPLTKG
EYLKGRVILSPLTKG

SEQ ID NO: 210500 - protein, 15 aa, Artificial Sequence
  Description of Artificial Sequence: Synthetic peptide
  Seed: EWLKTRPILSPLTKG
EYLKGRVILTPLTKG

SEQ ID NO: 210501 - protein, 15 aa, Artificial Sequence
  Description of Artificial Sequence: Synthetic peptide
  Seed: EWLKTRPILSPLTKG
EYLKGRVILVPLTKG

SEQ ID NO: 210502 - protein, 15 aa, Artificial Sequence
  Description of Artificial Sequence: Synthetic peptide
  Seed: EWLKTRPILSPLTKG
EYLKHRAILAPLTKG

SEQ ID NO: 210503 - protein, 15 aa, Artificial Sequence
  Description of Artificial Sequence: Synthetic peptide
  Seed: EWLKTRPILSPLTKG
EYLKHRAILIPLTKG

SEQ ID NO: 210504 - protein, 15 aa, Artificial Sequence
  Description of Artificial Sequence: Synthetic peptide
  Seed: EWLKTRPILSPLTKG
EYLKHRAILLPLTKG

SEQ ID NO: 210505 - protein, 15 aa, Artificial Sequence
  Description of Artificial Sequence: Synthetic peptide
  Seed: EWLKTRPILSPLTKG
EYLKHRAILMPLTKG

SEQ ID NO: 210506 - protein, 15 aa, Artificial Sequence
  Description of Artificial Sequence: Synthetic peptide
  Seed: EWLKTRPILSPLTKG
EYLKHRAILSPLTKG

SEQ ID NO: 210507 - protein, 15 aa, Artificial Sequence
  Description of Artificial Sequence: Synthetic peptide
  Seed: EWLKTRPILSPLTKG
EYLKHRAILTPLTKG

SEQ ID NO: 210508 - protein, 15 aa, Artificial Sequence
  Description of Artificial Sequence: Synthetic peptide
  Seed: EWLKTRPILSPLTKG
EYLKHRAILVPLTKG

SEQ ID NO: 210509 - protein, 15 aa, Artificial Sequence
  Description of Artificial Sequence: Synthetic peptide
  Seed: EWLKTRPILSPLTKG
EYLKHRGILAPLTKG

SEQ ID NO: 210510 - protein, 15 aa, Artificial Sequence
  Description of Artificial Sequence: Synthetic peptide
  Seed: EWLKTRPILSPLTKG
EYLKHRGILIPLTKG

SEQ ID NO: 210511 - protein, 15 aa, Artificial Sequence
  Description of Artificial Sequence: Synthetic peptide
  Seed: EWLKTRPILSPLTKG
EYLKHRGILLPLTKG

SEQ ID NO: 210512 - protein, 15 aa, Artificial Sequence
  Description of Artificial Sequence: Synthetic peptide
  Seed: EWLKTRPILSPLTKG
EYLKHRGILVPLTKG

SEQ ID NO: 210513 - protein, 15 aa, Artificial Sequence
  Description of Artificial Sequence: Synthetic peptide
  Seed: EWLKTRPILSPLTKG
EYLKHRPILAPLTKG

SEQ ID NO: 210514 - protein, 15 aa, Artificial Sequence
  Description of Artificial Sequence: Synthetic peptide
  Seed: EWLKTRPILSPLTKG
EYLKHRPILIPLTKG

SEQ ID NO: 210515 - protein, 15 aa, Artificial Sequence
  Description of Artificial Sequence: Synthetic peptide
  Seed: EWLKTRPILSPLTKG
EYLKHRPILLPLTKG

SEQ ID NO: 210516 - protein, 15 aa, Artificial Sequence
  Description of Artificial Sequence: Synthetic peptide
  Seed: EWLKTRPILSPLTKG
EYLKHRPILVPLTKG

SEQ ID NO: 210517 - protein, 15 aa, Artificial Sequence
  Description of Artificial Sequence: Synthetic peptide
  Seed: EWLKTRPILSPLTKG
EYLKHRSILIPLTKG

SEQ ID NO: 210518 - protein, 15 aa, Artificial Sequence
  Description of Artificial Sequence: Synthetic peptide
  Seed: EWLKTRPILSPLTKG
EYLKHRSILLPLTKG

SEQ ID NO: 210519 - protein, 15 aa, Artificial Sequence
  Description of Artificial Sequence: Synthetic peptide
  Seed: EWLKTRPILSPLTKG
EYLKHRSILVPLTKG

SEQ ID NO: 210520 - protein, 15 aa, Artificial Sequence
  Description of Artificial Sequence: Synthetic peptide
  Seed: EWLKTRPILSPLTKG
EYLKIRAILCPLTKG

SEQ ID NO: 210521 - protein, 15 aa, Artificial Sequence
  Description of Artificial Sequence: Synthetic peptide
  Seed: EWLKTRPILSPLTKG
EYLKIRAILFPLTKG

SEQ ID NO: 210522 - protein, 15 aa, Artificial Sequence
  Description of Artificial Sequence: Synthetic peptide
  Seed: EWLKTRPILSPLTKG
EYLKIRAILIPLTKG

SEQ ID NO: 210523 - protein, 15 aa, Artificial Sequence
  Description of Artificial Sequence: Synthetic peptide
  Seed: EWLKTRPILSPLTKG
EYLKIRAILLPLTKG

SEQ ID NO: 210524 - protein, 15 aa, Artificial Sequence
  Description of Artificial Sequence: Synthetic peptide
  Seed: EWLKTRPILSPLTKG
EYLKIRAILMPLTKG

SEQ ID NO: 210525 - protein, 15 aa, Artificial Sequence
  Description of Artificial Sequence: Synthetic peptide
  Seed: EWLKTRPILSPLTKG
EYLKIRAILQPLTKG

SEQ ID NO: 210526 - protein, 15 aa, Artificial Sequence
  Description of Artificial Sequence: Synthetic peptide
  Seed: EWLKTRPILSPLTKG
EYLKIRAILRPLTKG

SEQ ID NO: 210527 - protein, 15 aa, Artificial Sequence
  Description of Artificial Sequence: Synthetic peptide
  Seed: EWLKTRPILSPLTKG
EYLKIRAILVPLTKG

SEQ ID NO: 210528 - protein, 15 aa, Artificial Sequence
  Description of Artificial Sequence: Synthetic peptide
  Seed: EWLKTRPILSPLTKG
EYLKIRAILYPLTKG

SEQ ID NO: 210529 - protein, 15 aa, Artificial Sequence
  Description of Artificial Sequence: Synthetic peptide
  Seed: EWLKTRPILSPLTKG
EYLKIREILIPLTKG

SEQ ID NO: 210530 - protein, 15 aa, Artificial Sequence
  Description of Artificial Sequence: Synthetic peptide
  Seed: EWLKTRPILSPLTKG
EYLKIREILLPLTKG

SEQ ID NO: 210531 - protein, 15 aa, Artificial Sequence
  Description of Artificial Sequence: Synthetic peptide
  Seed: EWLKTRPILSPLTKG
EYLKIREILVPLTKG

SEQ ID NO: 210532 - protein, 15 aa, Artificial Sequence
  Description of Artificial Sequence: Synthetic peptide
  Seed: EWLKTRPILSPLTKG
EYLKIRGILAPLTKG

SEQ ID NO: 210533 - protein, 15 aa, Artificial Sequence
  Description of Artificial Sequence: Synthetic peptide
  Seed: EWLKTRPILSPLTKG
EYLKIRGILCPLTKG

SEQ ID NO: 210534 - protein, 15 aa, Artificial Sequence
  Description of Artificial Sequence: Synthetic peptide
  Seed: EWLKTRPILSPLTKG
EYLKIRGILFPLTKG

SEQ ID NO: 210535 - protein, 15 aa, Artificial Sequence
  Description of Artificial Sequence: Synthetic peptide
  Seed: EWLKTRPILSPLTKG
EYLKIRGILHPLTKG

SEQ ID NO: 210536 - protein, 15 aa, Artificial Sequence
  Description of Artificial Sequence: Synthetic peptide
  Seed: EWLKTRPILSPLTKG
EYLKIRGILIPLTKG

SEQ ID NO: 210537 - protein, 15 aa, Artificial Sequence
  Description of Artificial Sequence: Synthetic peptide
  Seed: EWLKTRPILSPLTKG
EYLKIRGILLPLTKG

SEQ ID NO: 210538 - protein, 15 aa, Artificial Sequence
  Description of Artificial Sequence: Synthetic peptide
  Seed: EWLKTRPILSPLTKG
EYLKIRGILMPLTKG

SEQ ID NO: 210539 - protein, 15 aa, Artificial Sequence
  Description of Artificial Sequence: Synthetic peptide
  Seed: EWLKTRPILSPLTKG
EYLKIRGILQPLTKG

SEQ ID NO: 210540 - protein, 15 aa, Artificial Sequence
  Description of Artificial Sequence: Synthetic peptide
  Seed: EWLKTRPILSPLTKG
EYLKIRGILRPLTKG

SEQ ID NO: 210541 - protein, 15 aa, Artificial Sequence
  Description of Artificial Sequence: Synthetic peptide
  Seed: EWLKTRPILSPLTKG
EYLKIRGILSPLTKG

SEQ ID NO: 210542 - protein, 15 aa, Artificial Sequence
  Description of Artificial Sequence: Synthetic peptide
  Seed: EWLKTRPILSPLTKG
EYLKIRGILTPLTKG

SEQ ID NO: 210543 - protein, 15 aa, Artificial Sequence
  Description of Artificial Sequence: Synthetic peptide
  Seed: EWLKTRPILSPLTKG
EYLKIRGILVPLTKG

SEQ ID NO: 210544 - protein, 15 aa, Artificial Sequence
  Description of Artificial Sequence: Synthetic peptide
  Seed: EWLKTRPILSPLTKG
EYLKIRGILYPLTKG

SEQ ID NO: 210545 - protein, 15 aa, Artificial Sequence
  Description of Artificial Sequence: Synthetic peptide
  Seed: EWLKTRPILSPLTKG
EYLKIRHILAPLTKG

SEQ ID NO: 210546 - protein, 15 aa, Artificial Sequence
  Description of Artificial Sequence: Synthetic peptide
  Seed: EWLKTRPILSPLTKG
EYLKIRHILLPLTKG

SEQ ID NO: 210547 - protein, 15 aa, Artificial Sequence
  Description of Artificial Sequence: Synthetic peptide
  Seed: EWLKTRPILSPLTKG
EYLKIRHILSPLTKG

SEQ ID NO: 210548 - protein, 15 aa, Artificial Sequence
  Description of Artificial Sequence: Synthetic peptide
  Seed: EWLKTRPILSPLTKG
EYLKIRKILAPLTKG

SEQ ID NO: 210549 - protein, 15 aa, Artificial Sequence
  Description of Artificial Sequence: Synthetic peptide
  Seed: EWLKTRPILSPLTKG
EYLKIRKILGPLTKG

SEQ ID NO: 210550 - protein, 15 aa, Artificial Sequence
  Description of Artificial Sequence: Synthetic peptide
  Seed: EWLKTRPILSPLTKG
EYLKIRKILNPLTKG

SEQ ID NO: 210551 - protein, 15 aa, Artificial Sequence
  Description of Artificial Sequence: Synthetic peptide
  Seed: EWLKTRPILSPLTKG
EYLKIRKILPPLTKG

SEQ ID NO: 210552 - protein, 15 aa, Artificial Sequence
  Description of Artificial Sequence: Synthetic peptide
  Seed: EWLKTRPILSPLTKG
EYLKIRKILQPLTKG

SEQ ID NO: 210553 - protein, 15 aa, Artificial Sequence
  Description of Artificial Sequence: Synthetic peptide
  Seed: EWLKTRPILSPLTKG
EYLKIRKILSPLTKG

SEQ ID NO: 210554 - protein, 15 aa, Artificial Sequence
  Description of Artificial Sequence: Synthetic peptide
  Seed: EWLKTRPILSPLTKG
EYLKIRKILTPLTKG

SEQ ID NO: 210555 - protein, 15 aa, Artificial Sequence
  Description of Artificial Sequence: Synthetic peptide
  Seed: EWLKTRPILSPLTKG
EYLKIRKILVPLTKG

SEQ ID NO: 210556 - protein, 15 aa, Artificial Sequence
  Description of Artificial Sequence: Synthetic peptide
  Seed: EWLKTRPILSPLTKG
EYLKIRNILCPLTKG

SEQ ID NO: 210557 - protein, 15 aa, Artificial Sequence
  Description of Artificial Sequence: Synthetic peptide
  Seed: EWLKTRPILSPLTKG
EYLKIRNILDPLTKG

SEQ ID NO: 210558 - protein, 15 aa, Artificial Sequence
  Description of Artificial Sequence: Synthetic peptide
  Seed: EWLKTRPILSPLTKG
EYLKIRNILIPLTKG

SEQ ID NO: 210559 - protein, 15 aa, Artificial Sequence
  Description of Artificial Sequence: Synthetic peptide
  Seed: EWLKTRPILSPLTKG
EYLKIRNILLPLTKG

SEQ ID NO: 210560 - protein, 15 aa, Artificial Sequence
  Description of Artificial Sequence: Synthetic peptide
  Seed: EWLKTRPILSPLTKG
EYLKIRNILMPLTKG

SEQ ID NO: 210561 - protein, 15 aa, Artificial Sequence
  Description of Artificial Sequence: Synthetic peptide
  Seed: EWLKTRPILSPLTKG
EYLKIRNILVPLTKG

SEQ ID NO: 210562 - protein, 15 aa, Artificial Sequence
  Description of Artificial Sequence: Synthetic peptide
  Seed: EWLKTRPILSPLTKG
EYLKIRPILCPLTKG

SEQ ID NO: 210563 - protein, 15 aa, Artificial Sequence
  Description of Artificial Sequence: Synthetic peptide
  Seed: EWLKTRPILSPLTKG
EYLKIRPILDPLTKG

SEQ ID NO: 210564 - protein, 15 aa, Artificial Sequence
  Description of Artificial Sequence: Synthetic peptide
  Seed: EWLKTRPILSPLTKG
EYLKIRPILEPLTKG

SEQ ID NO: 210565 - protein, 15 aa, Artificial Sequence
  Description of Artificial Sequence: Synthetic peptide
  Seed: EWLKTRPILSPLTKG
EYLKIRPILFPLTKG

SEQ ID NO: 210566 - protein, 15 aa, Artificial Sequence
  Description of Artificial Sequence: Synthetic peptide
  Seed: EWLKTRPILSPLTKG
EYLKIRPILGPLTKG

SEQ ID NO: 210567 - protein, 15 aa, Artificial Sequence
  Description of Artificial Sequence: Synthetic peptide
  Seed: EWLKTRPILSPLTKG
EYLKIRPILIPLTKG

SEQ ID NO: 210568 - protein, 15 aa, Artificial Sequence
  Description of Artificial Sequence: Synthetic peptide
  Seed: EWLKTRPILSPLTKG
EYLKIRPILLPLTKG

SEQ ID NO: 210569 - protein, 15 aa, Artificial Sequence
  Description of Artificial Sequence: Synthetic peptide
  Seed: EWLKTRPILSPLTKG
EYLKIRPILMPLTKG

SEQ ID NO: 210570 - protein, 15 aa, Artificial Sequence
  Description of Artificial Sequence: Synthetic peptide
  Seed: EWLKTRPILSPLTKG
EYLKIRPILQPLTKG

SEQ ID NO: 210571 - protein, 15 aa, Artificial Sequence
  Description of Artificial Sequence: Synthetic peptide
  Seed: EWLKTRPILSPLTKG
EYLKIRPILVPLTKG

SEQ ID NO: 210572 - protein, 15 aa, Artificial Sequence
  Description of Artificial Sequence: Synthetic peptide
  Seed: EWLKTRPILSPLTKG
EYLKIRPILYPLTKG

SEQ ID NO: 210573 - protein, 15 aa, Artificial Sequence
  Description of Artificial Sequence: Synthetic peptide
  Seed: EWLKTRPILSPLTKG
EYLKIRQILLPLTKG

SEQ ID NO: 210574 - protein, 15 aa, Artificial Sequence
  Description of Artificial Sequence: Synthetic peptide
  Seed: EWLKTRPILSPLTKG
EYLKIRRILAPLTKG

SEQ ID NO: 210575 - protein, 15 aa, Artificial Sequence
  Description of Artificial Sequence: Synthetic peptide
  Seed: EWLKTRPILSPLTKG
EYLKIRRILGPLTKG

SEQ ID NO: 210576 - protein, 15 aa, Artificial Sequence
  Description of Artificial Sequence: Synthetic peptide
  Seed: EWLKTRPILSPLTKG
EYLKIRRILIPLTKG

SEQ ID NO: 210577 - protein, 15 aa, Artificial Sequence
  Description of Artificial Sequence: Synthetic peptide
  Seed: EWLKTRPILSPLTKG
EYLKIRRILMPLTKG

SEQ ID NO: 210578 - protein, 15 aa, Artificial Sequence
  Description of Artificial Sequence: Synthetic peptide
  Seed: EWLKTRPILSPLTKG
EYLKIRRILNPLTKG

SEQ ID NO: 210579 - protein, 15 aa, Artificial Sequence
  Description of Artificial Sequence: Synthetic peptide
  Seed: EWLKTRPILSPLTKG
EYLKIRRILPPLTKG

SEQ ID NO: 210580 - protein, 15 aa, Artificial Sequence
  Description of Artificial Sequence: Synthetic peptide
  Seed: EWLKTRPILSPLTKG
EYLKIRRILQPLTKG

SEQ ID NO: 210581 - protein, 15 aa, Artificial Sequence
  Description of Artificial Sequence: Synthetic peptide
  Seed: EWLKTRPILSPLTKG
EYLKIRRILSPLTKG

SEQ ID NO: 210582 - protein, 15 aa, Artificial Sequence
  Description of Artificial Sequence: Synthetic peptide
  Seed: EWLKTRPILSPLTKG
EYLKIRRILTPLTKG

SEQ ID NO: 210583 - protein, 15 aa, Artificial Sequence
  Description of Artificial Sequence: Synthetic peptide
  Seed: EWLKTRPILSPLTKG
EYLKIRRILVPLTKG

SEQ ID NO: 210584 - protein, 15 aa, Artificial Sequence
  Description of Artificial Sequence: Synthetic peptide
  Seed: EWLKTRPILSPLTKG
EYLKIRSILCPLTKG

SEQ ID NO: 210585 - protein, 15 aa, Artificial Sequence
  Description of Artificial Sequence: Synthetic peptide
  Seed: EWLKTRPILSPLTKG
EYLKIRSILFPLTKG

SEQ ID NO: 210586 - protein, 15 aa, Artificial Sequence
  Description of Artificial Sequence: Synthetic peptide
  Seed: EWLKTRPILSPLTKG
EYLKIRSILIPLTKG

SEQ ID NO: 210587 - protein, 15 aa, Artificial Sequence
  Description of Artificial Sequence: Synthetic peptide
  Seed: EWLKTRPILSPLTKG
EYLKIRSILLPLTKG

SEQ ID NO: 210588 - protein, 15 aa, Artificial Sequence
  Description of Artificial Sequence: Synthetic peptide
  Seed: EWLKTRPILSPLTKG
EYLKIRSILMPLTKG

SEQ ID NO: 210589 - protein, 15 aa, Artificial Sequence
  Description of Artificial Sequence: Synthetic peptide
  Seed: EWLKTRPILSPLTKG
EYLKIRSILRPLTKG

SEQ ID NO: 210590 - protein, 15 aa, Artificial Sequence
  Description of Artificial Sequence: Synthetic peptide
  Seed: EWLKTRPILSPLTKG
EYLKIRSILVPLTKG

SEQ ID NO: 210591 - protein, 15 aa, Artificial Sequence
  Description of Artificial Sequence: Synthetic peptide
  Seed: EWLKTRPILSPLTKG
EYLKIRSILYPLTKG

SEQ ID NO: 210592 - protein, 15 aa, Artificial Sequence
  Description of Artificial Sequence: Synthetic peptide
  Seed: EWLKTRPILSPLTKG
EYLKIRTILCPLTKG

SEQ ID NO: 210593 - protein, 15 aa, Artificial Sequence
  Description of Artificial Sequence: Synthetic peptide
  Seed: EWLKTRPILSPLTKG
EYLKIRTILDPLTKG

SEQ ID NO: 210594 - protein, 15 aa, Artificial Sequence
  Description of Artificial Sequence: Synthetic peptide
  Seed: EWLKTRPILSPLTKG
EYLKIRTILIPLTKG

SEQ ID NO: 210595 - protein, 15 aa, Artificial Sequence
  Description of Artificial Sequence: Synthetic peptide
  Seed: EWLKTRPILSPLTKG
EYLKIRTILLPLTKG

SEQ ID NO: 210596 - protein, 15 aa, Artificial Sequence
  Description of Artificial Sequence: Synthetic peptide
  Seed: EWLKTRPILSPLTKG
EYLKIRTILMPLTKG

SEQ ID NO: 210597 - protein, 15 aa, Artificial Sequence
  Description of Artificial Sequence: Synthetic peptide
  Seed: EWLKTRPILSPLTKG
EYLKIRTILQPLTKG

SEQ ID NO: 210598 - protein, 15 aa, Artificial Sequence
  Description of Artificial Sequence: Synthetic peptide
  Seed: EWLKTRPILSPLTKG
EYLKIRTILVPLTKG

SEQ ID NO: 210599 - protein, 15 aa, Artificial Sequence
  Description of Artificial Sequence: Synthetic peptide
  Seed: EWLKTRPILSPLTKG
EYLKIRVILLPLTKG

SEQ ID NO: 210600 - protein, 15 aa, Artificial Sequence
  Description of Artificial Sequence: Synthetic peptide
  Seed: EWLKTRPILSPLTKG
EYLKIRVILMPLTKG

SEQ ID NO: 210601 - protein, 15 aa, Artificial Sequence
  Description of Artificial Sequence: Synthetic peptide
  Seed: EWLKTRPILSPLTKG
EYLKIRVILQPLTKG

SEQ ID NO: 210602 - protein, 15 aa, Artificial Sequence
  Description of Artificial Sequence: Synthetic peptide
  Seed: EWLKTRPILSPLTKG
EYLKKRAILAPLTKG

SEQ ID NO: 210603 - protein, 15 aa, Artificial Sequence
  Description of Artificial Sequence: Synthetic peptide
  Seed: EWLKTRPILSPLTKG
EYLKKRAILIPLTKG

SEQ ID NO: 210604 - protein, 15 aa, Artificial Sequence
  Description of Artificial Sequence: Synthetic peptide
  Seed: EWLKTRPILSPLTKG
EYLKKRAILLPLTKG

SEQ ID NO: 210605 - protein, 15 aa, Artificial Sequence
  Description of Artificial Sequence: Synthetic peptide
  Seed: EWLKTRPILSPLTKG
EYLKKRAILVPLTKG

SEQ ID NO: 210606 - protein, 15 aa, Artificial Sequence
  Description of Artificial Sequence: Synthetic peptide
  Seed: EWLKTRPILSPLTKG
EYLKKRGILLPLTKG

SEQ ID NO: 210607 - protein, 15 aa, Artificial Sequence
  Description of Artificial Sequence: Synthetic peptide
  Seed: EWLKTRPILSPLTKG
EYLKKRGILVPLTKG

SEQ ID NO: 210608 - protein, 15 aa, Artificial Sequence
  Description of Artificial Sequence: Synthetic peptide
  Seed: EWLKTRPILSPLTKG
EYLKKRSILAPLTKG

SEQ ID NO: 210609 - protein, 15 aa, Artificial Sequence
  Description of Artificial Sequence: Synthetic peptide
  Seed: EWLKTRPILSPLTKG
EYLKKRSILLPLTKG

SEQ ID NO: 210610 - protein, 15 aa, Artificial Sequence
  Description of Artificial Sequence: Synthetic peptide
  Seed: EWLKTRPILSPLTKG
EYLKKRSILVPLTKG

SEQ ID NO: 210611 - protein, 15 aa, Artificial Sequence
  Description of Artificial Sequence: Synthetic peptide
  Seed: EWLKTRPILSPLTKG
EYLKLRAILAPLTKG

SEQ ID NO: 210612 - protein, 15 aa, Artificial Sequence
  Description of Artificial Sequence: Synthetic peptide
  Seed: EWLKTRPILSPLTKG
EYLKLRAILCPLTKG

SEQ ID NO: 210613 - protein, 15 aa, Artificial Sequence
  Description of Artificial Sequence: Synthetic peptide
  Seed: EWLKTRPILSPLTKG
EYLKLRAILDPLTKG

SEQ ID NO: 210614 - protein, 15 aa, Artificial Sequence
  Description of Artificial Sequence: Synthetic peptide
  Seed: EWLKTRPILSPLTKG
EYLKLRAILEPLTKG

SEQ ID NO: 210615 - protein, 15 aa, Artificial Sequence
  Description of Artificial Sequence: Synthetic peptide
  Seed: EWLKTRPILSPLTKG
EYLKLRAILFPLTKG

SEQ ID NO: 210616 - protein, 15 aa, Artificial Sequence
  Description of Artificial Sequence: Synthetic peptide
  Seed: EWLKTRPILSPLTKG
EYLKLRAILHPLTKG

SEQ ID NO: 210617 - protein, 15 aa, Artificial Sequence
  Description of Artificial Sequence: Synthetic peptide
  Seed: EWLKTRPILSPLTKG
EYLKLRAILIPLTKG

SEQ ID NO: 210618 - protein, 15 aa, Artificial Sequence
  Description of Artificial Sequence: Synthetic peptide
  Seed: EWLKTRPILSPLTKG
EYLKLRAILKPLTKG

SEQ ID NO: 210619 - protein, 15 aa, Artificial Sequence
  Description of Artificial Sequence: Synthetic peptide
  Seed: EWLKTRPILSPLTKG
EYLKLRAILLPLTKG

SEQ ID NO: 210620 - protein, 15 aa, Artificial Sequence
  Description of Artificial Sequence: Synthetic peptide
  Seed: EWLKTRPILSPLTKG
EYLKLRAILMPLTKG

SEQ ID NO: 210621 - protein, 15 aa, Artificial Sequence
  Description of Artificial Sequence: Synthetic peptide
  Seed: EWLKTRPILSPLTKG
EYLKLRAILQPLTKG

SEQ ID NO: 210622 - protein, 15 aa, Artificial Sequence
  Description of Artificial Sequence: Synthetic peptide
  Seed: EWLKTRPILSPLTKG
EYLKLRAILRPLTKG

SEQ ID NO: 210623 - protein, 15 aa, Artificial Sequence
  Description of Artificial Sequence: Synthetic peptide
  Seed: EWLKTRPILSPLTKG
EYLKLRAILSPLTKG

SEQ ID NO: 210624 - protein, 15 aa, Artificial Sequence
  Description of Artificial Sequence: Synthetic peptide
  Seed: EWLKTRPILSPLTKG
EYLKLRAILTPLTKG

SEQ ID NO: 210625 - protein, 15 aa, Artificial Sequence
  Description of Artificial Sequence: Synthetic peptide
  Seed: EWLKTRPILSPLTKG
EYLKLRAILVPLTKG

SEQ ID NO: 210626 - protein, 15 aa, Artificial Sequence
  Description of Artificial Sequence: Synthetic peptide
  Seed: EWLKTRPILSPLTKG
EYLKLRAILWPLTKG

SEQ ID NO: 210627 - protein, 15 aa, Artificial Sequence
  Description of Artificial Sequence: Synthetic peptide
  Seed: EWLKTRPILSPLTKG
EYLKLRAILYPLTKG

SEQ ID NO: 210628 - protein, 15 aa, Artificial Sequence
  Description of Artificial Sequence: Synthetic peptide
  Seed: EWLKTRPILSPLTKG
EYLKLRCILIPLTKG

SEQ ID NO: 210629 - protein, 15 aa, Artificial Sequence
  Description of Artificial Sequence: Synthetic peptide
  Seed: EWLKTRPILSPLTKG
EYLKLRCILVPLTKG

SEQ ID NO: 210630 - protein, 15 aa, Artificial Sequence
  Description of Artificial Sequence: Synthetic peptide
  Seed: EWLKTRPILSPLTKG
EYLKLRDILIPLTKG

SEQ ID NO: 210631 - protein, 15 aa, Artificial Sequence
  Description of Artificial Sequence: Synthetic peptide
  Seed: EWLKTRPILSPLTKG
EYLKLRDILLPLTKG

SEQ ID NO: 210632 - protein, 15 aa, Artificial Sequence
  Description of Artificial Sequence: Synthetic peptide
  Seed: EWLKTRPILSPLTKG
EYLKLRDILVPLTKG

SEQ ID NO: 210633 - protein, 15 aa, Artificial Sequence
  Description of Artificial Sequence: Synthetic peptide
  Seed: EWLKTRPILSPLTKG
EYLKLREILIPLTKG

SEQ ID NO: 210634 - protein, 15 aa, Artificial Sequence
  Description of Artificial Sequence: Synthetic peptide
  Seed: EWLKTRPILSPLTKG
EYLKLREILLPLTKG

SEQ ID NO: 210635 - protein, 15 aa, Artificial Sequence
  Description of Artificial Sequence: Synthetic peptide
  Seed: EWLKTRPILSPLTKG
EYLKLREILTPLTKG

SEQ ID NO: 210636 - protein, 15 aa, Artificial Sequence
  Description of Artificial Sequence: Synthetic peptide
  Seed: EWLKTRPILSPLTKG
EYLKLREILVPLTKG

SEQ ID NO: 210637 - protein, 15 aa, Artificial Sequence
  Description of Artificial Sequence: Synthetic peptide
  Seed: EWLKTRPILSPLTKG
EYLKLRGILAPLTKG

SEQ ID NO: 210638 - protein, 15 aa, Artificial Sequence
  Description of Artificial Sequence: Synthetic peptide
  Seed: EWLKTRPILSPLTKG
EYLKLRGILCPLTKG

SEQ ID NO: 210639 - protein, 15 aa, Artificial Sequence
  Description of Artificial Sequence: Synthetic peptide
  Seed: EWLKTRPILSPLTKG
EYLKLRGILDPLTKG

SEQ ID NO: 210640 - protein, 15 aa, Artificial Sequence
  Description of Artificial Sequence: Synthetic peptide
  Seed: EWLKTRPILSPLTKG
EYLKLRGILEPLTKG

SEQ ID NO: 210641 - protein, 15 aa, Artificial Sequence
  Description of Artificial Sequence: Synthetic peptide
  Seed: EWLKTRPILSPLTKG
EYLKLRGILFPLTKG

SEQ ID NO: 210642 - protein, 15 aa, Artificial Sequence
  Description of Artificial Sequence: Synthetic peptide
  Seed: EWLKTRPILSPLTKG
EYLKLRGILGPLTKG

SEQ ID NO: 210643 - protein, 15 aa, Artificial Sequence
  Description of Artificial Sequence: Synthetic peptide
  Seed: EWLKTRPILSPLTKG
EYLKLRGILHPLTKG

SEQ ID NO: 210644 - protein, 15 aa, Artificial Sequence
  Description of Artificial Sequence: Synthetic peptide
  Seed: EWLKTRPILSPLTKG
EYLKLRGILIPLTKG

SEQ ID NO: 210645 - protein, 15 aa, Artificial Sequence
  Description of Artificial Sequence: Synthetic peptide
  Seed: EWLKTRPILSPLTKG
EYLKLRGILKPLTKG

SEQ ID NO: 210646 - protein, 15 aa, Artificial Sequence
  Description of Artificial Sequence: Synthetic peptide
  Seed: EWLKTRPILSPLTKG
EYLKLRGILLPLTKG

SEQ ID NO: 210647 - protein, 15 aa, Artificial Sequence
  Description of Artificial Sequence: Synthetic peptide
  Seed: EWLKTRPILSPLTKG
EYLKLRGILMPLTKG

SEQ ID NO: 210648 - protein, 15 aa, Artificial Sequence
  Description of Artificial Sequence: Synthetic peptide
  Seed: EWLKTRPILSPLTKG
EYLKLRGILNPLTKG

SEQ ID NO: 210649 - protein, 15 aa, Artificial Sequence
  Description of Artificial Sequence: Synthetic peptide
  Seed: EWLKTRPILSPLTKG
EYLKLRGILQPLTKG

SEQ ID NO: 210650 - protein, 15 aa, Artificial Sequence
  Description of Artificial Sequence: Synthetic peptide
  Seed: EWLKTRPILSPLTKG
EYLKLRGILRPLTKG

SEQ ID NO: 210651 - protein, 15 aa, Artificial Sequence
  Description of Artificial Sequence: Synthetic peptide
  Seed: EWLKTRPILSPLTKG
EYLKLRGILSPLTKG

SEQ ID NO: 210652 - protein, 15 aa, Artificial Sequence
  Description of Artificial Sequence: Synthetic peptide
  Seed: EWLKTRPILSPLTKG
EYLKLRGILTPLTKG

SEQ ID NO: 210653 - protein, 15 aa, Artificial Sequence
  Description of Artificial Sequence: Synthetic peptide
  Seed: EWLKTRPILSPLTKG
EYLKLRGILVPLTKG

SEQ ID NO: 210654 - protein, 15 aa, Artificial Sequence
  Description of Artificial Sequence: Synthetic peptide
  Seed: EWLKTRPILSPLTKG
EYLKLRGILYPLTKG

SEQ ID NO: 210655 - protein, 15 aa, Artificial Sequence
  Description of Artificial Sequence: Synthetic peptide
  Seed: EWLKTRPILSPLTKG
EYLKLRHILIPLTKG

SEQ ID NO: 210656 - protein, 15 aa, Artificial Sequence
  Description of Artificial Sequence: Synthetic peptide
  Seed: EWLKTRPILSPLTKG
EYLKLRHILLPLTKG

SEQ ID NO: 210657 - protein, 15 aa, Artificial Sequence
  Description of Artificial Sequence: Synthetic peptide
  Seed: EWLKTRPILSPLTKG
EYLKLRHILMPLTKG

SEQ ID NO: 210658 - protein, 15 aa, Artificial Sequence
  Description of Artificial Sequence: Synthetic peptide
  Seed: EWLKTRPILSPLTKG
EYLKLRIILLPLTKG

SEQ ID NO: 210659 - protein, 15 aa, Artificial Sequence
  Description of Artificial Sequence: Synthetic peptide
  Seed: EWLKTRPILSPLTKG
EYLKLRIILMPLTKG

SEQ ID NO: 210660 - protein, 15 aa, Artificial Sequence
  Description of Artificial Sequence: Synthetic peptide
  Seed: EWLKTRPILSPLTKG
EYLKLRKILAPLTKG

SEQ ID NO: 210661 - protein, 15 aa, Artificial Sequence
  Description of Artificial Sequence: Synthetic peptide
  Seed: EWLKTRPILSPLTKG
EYLKLRKILGPLTKG

SEQ ID NO: 210662 - protein, 15 aa, Artificial Sequence
  Description of Artificial Sequence: Synthetic peptide
  Seed: EWLKTRPILSPLTKG
EYLKLRKILHPLTKG

SEQ ID NO: 210663 - protein, 15 aa, Artificial Sequence
  Description of Artificial Sequence: Synthetic peptide
  Seed: EWLKTRPILSPLTKG
EYLKLRKILNPLTKG

SEQ ID NO: 210664 - protein, 15 aa, Artificial Sequence
  Description of Artificial Sequence: Synthetic peptide
  Seed: EWLKTRPILSPLTKG
EYLKLRKILQPLTKG

SEQ ID NO: 210665 - protein, 15 aa, Artificial Sequence
  Description of Artificial Sequence: Synthetic peptide
  Seed: EWLKTRPILSPLTKG
EYLKLRKILSPLTKG

SEQ ID NO: 210666 - protein, 15 aa, Artificial Sequence
  Description of Artificial Sequence: Synthetic peptide
  Seed: EWLKTRPILSPLTKG
EYLKLRKILTPLTKG

SEQ ID NO: 210667 - protein, 15 aa, Artificial Sequence
  Description of Artificial Sequence: Synthetic peptide
  Seed: EWLKTRPILSPLTKG
EYLKLRKILVPLTKG

SEQ ID NO: 210668 - protein, 15 aa, Artificial Sequence
  Description of Artificial Sequence: Synthetic peptide
  Seed: EWLKTRPILSPLTKG
EYLKLRNILAPLTKG

SEQ ID NO: 210669 - protein, 15 aa, Artificial Sequence
  Description of Artificial Sequence: Synthetic peptide
  Seed: EWLKTRPILSPLTKG
EYLKLRNILCPLTKG

SEQ ID NO: 210670 - protein, 15 aa, Artificial Sequence
  Description of Artificial Sequence: Synthetic peptide
  Seed: EWLKTRPILSPLTKG
EYLKLRNILDPLTKG

SEQ ID NO: 210671 - protein, 15 aa, Artificial Sequence
  Description of Artificial Sequence: Synthetic peptide
  Seed: EWLKTRPILSPLTKG
EYLKLRNILFPLTKG

SEQ ID NO: 210672 - protein, 15 aa, Artificial Sequence
  Description of Artificial Sequence: Synthetic peptide
  Seed: EWLKTRPILSPLTKG
EYLKLRNILHPLTKG

SEQ ID NO: 210673 - protein, 15 aa, Artificial Sequence
  Description of Artificial Sequence: Synthetic peptide
  Seed: EWLKTRPILSPLTKG
EYLKLRNILIPLTKG

SEQ ID NO: 210674 - protein, 15 aa, Artificial Sequence
  Description of Artificial Sequence: Synthetic peptide
  Seed: EWLKTRPILSPLTKG
EYLKLRNILLPLTKG

SEQ ID NO: 210675 - protein, 15 aa, Artificial Sequence
  Description of Artificial Sequence: Synthetic peptide
  Seed: EWLKTRPILSPLTKG
EYLKLRNILMPLTKG

SEQ ID NO: 210676 - protein, 15 aa, Artificial Sequence
  Description of Artificial Sequence: Synthetic peptide
  Seed: EWLKTRPILSPLTKG
EYLKLRNILNPLTKG

SEQ ID NO: 210677 - protein, 15 aa, Artificial Sequence
  Description of Artificial Sequence: Synthetic peptide
  Seed: EWLKTRPILSPLTKG
EYLKLRNILSPLTKG

SEQ ID NO: 210678 - protein, 15 aa, Artificial Sequence
  Description of Artificial Sequence: Synthetic peptide
  Seed: EWLKTRPILSPLTKG
EYLKLRNILTPLTKG

SEQ ID NO: 210679 - protein, 15 aa, Artificial Sequence
  Description of Artificial Sequence: Synthetic peptide
  Seed: EWLKTRPILSPLTKG
EYLKLRNILVPLTKG

SEQ ID NO: 210680 - protein, 15 aa, Artificial Sequence
  Description of Artificial Sequence: Synthetic peptide
  Seed: EWLKTRPILSPLTKG
EYLKLRPILAPLTKG

SEQ ID NO: 210681 - protein, 15 aa, Artificial Sequence
  Description of Artificial Sequence: Synthetic peptide
  Seed: EWLKTRPILSPLTKG
EYLKLRPILCPLTKG

SEQ ID NO: 210682 - protein, 15 aa, Artificial Sequence
  Description of Artificial Sequence: Synthetic peptide
  Seed: EWLKTRPILSPLTKG
EYLKLRPILDPLTKG

SEQ ID NO: 210683 - protein, 15 aa, Artificial Sequence
  Description of Artificial Sequence: Synthetic peptide
  Seed: EWLKTRPILSPLTKG
EYLKLRPILEPLTKG

SEQ ID NO: 210684 - protein, 15 aa, Artificial Sequence
  Description of Artificial Sequence: Synthetic peptide
  Seed: EWLKTRPILSPLTKG
EYLKLRPILFPLTKG

SEQ ID NO: 210685 - protein, 15 aa, Artificial Sequence
  Description of Artificial Sequence: Synthetic peptide
  Seed: EWLKTRPILSPLTKG
EYLKLRPILGPLTKG

SEQ ID NO: 210686 - protein, 15 aa, Artificial Sequence
  Description of Artificial Sequence: Synthetic peptide
  Seed: EWLKTRPILSPLTKG
EYLKLRPILHPLTKG

SEQ ID NO: 210687 - protein, 15 aa, Artificial Sequence
  Description of Artificial Sequence: Synthetic peptide
  Seed: EWLKTRPILSPLTKG
EYLKLRPILIPLTKG

SEQ ID NO: 210688 - protein, 15 aa, Artificial Sequence
  Description of Artificial Sequence: Synthetic peptide
  Seed: EWLKTRPILSPLTKG
EYLKLRPILLPLTKG

SEQ ID NO: 210689 - protein, 15 aa, Artificial Sequence
  Description of Artificial Sequence: Synthetic peptide
  Seed: EWLKTRPILSPLTKG
EYLKLRPILMPLTKG

SEQ ID NO: 210690 - protein, 15 aa, Artificial Sequence
  Description of Artificial Sequence: Synthetic peptide
  Seed: EWLKTRPILSPLTKG
EYLKLRPILNPLTKG

SEQ ID NO: 210691 - protein, 15 aa, Artificial Sequence
  Description of Artificial Sequence: Synthetic peptide
  Seed: EWLKTRPILSPLTKG
EYLKLRPILQPLTKG

SEQ ID NO: 210692 - protein, 15 aa, Artificial Sequence
  Description of Artificial Sequence: Synthetic peptide
  Seed: EWLKTRPILSPLTKG
EYLKLRPILRPLTKG

SEQ ID NO: 210693 - protein, 15 aa, Artificial Sequence
  Description of Artificial Sequence: Synthetic peptide
  Seed: EWLKTRPILSPLTKG
EYLKLRPILSPLTKG

SEQ ID NO: 210694 - protein, 15 aa, Artificial Sequence
  Description of Artificial Sequence: Synthetic peptide
  Seed: EWLKTRPILSPLTKG
EYLKLRPILTPLTKG

SEQ ID NO: 210695 - protein, 15 aa, Artificial Sequence
  Description of Artificial Sequence: Synthetic peptide
  Seed: EWLKTRPILSPLTKG
EYLKLRPILVPLTKG

SEQ ID NO: 210696 - protein, 15 aa, Artificial Sequence
  Description of Artificial Sequence: Synthetic peptide
  Seed: EWLKTRPILSPLTKG
EYLKLRPILWPLTKG

SEQ ID NO: 210697 - protein, 15 aa, Artificial Sequence
  Description of Artificial Sequence: Synthetic peptide
  Seed: EWLKTRPILSPLTKG
EYLKLRPILYPLTKG

SEQ ID NO: 210698 - protein, 15 aa, Artificial Sequence
  Description of Artificial Sequence: Synthetic peptide
  Seed: EWLKTRPILSPLTKG
EYLKLRQILIPLTKG

SEQ ID NO: 210699 - protein, 15 aa, Artificial Sequence
  Description of Artificial Sequence: Synthetic peptide
  Seed: EWLKTRPILSPLTKG
EYLKLRQILLPLTKG

SEQ ID NO: 210700 - protein, 15 aa, Artificial Sequence
  Description of Artificial Sequence: Synthetic peptide
  Seed: EWLKTRPILSPLTKG
EYLKLRQILMPLTKG

SEQ ID NO: 210701 - protein, 15 aa, Artificial Sequence
  Description of Artificial Sequence: Synthetic peptide
  Seed: EWLKTRPILSPLTKG
EYLKLRQILVPLTKG

SEQ ID NO: 210702 - protein, 15 aa, Artificial Sequence
  Description of Artificial Sequence: Synthetic peptide
  Seed: EWLKTRPILSPLTKG
EYLKLRRILAPLTKG

SEQ ID NO: 210703 - protein, 15 aa, Artificial Sequence
  Description of Artificial Sequence: Synthetic peptide
  Seed: EWLKTRPILSPLTKG
EYLKLRRILGPLTKG

SEQ ID NO: 210704 - protein, 15 aa, Artificial Sequence
  Description of Artificial Sequence: Synthetic peptide
  Seed: EWLKTRPILSPLTKG
EYLKLRRILHPLTKG

SEQ ID NO: 210705 - protein, 15 aa, Artificial Sequence
  Description of Artificial Sequence: Synthetic peptide
  Seed: EWLKTRPILSPLTKG
EYLKLRRILIPLTKG

SEQ ID NO: 210706 - protein, 15 aa, Artificial Sequence
  Description of Artificial Sequence: Synthetic peptide
  Seed: EWLKTRPILSPLTKG
EYLKLRRILNPLTKG

SEQ ID NO: 210707 - protein, 15 aa, Artificial Sequence
  Description of Artificial Sequence: Synthetic peptide
  Seed: EWLKTRPILSPLTKG
EYLKLRRILPPLTKG

SEQ ID NO: 210708 - protein, 15 aa, Artificial Sequence
  Description of Artificial Sequence: Synthetic peptide
  Seed: EWLKTRPILSPLTKG
EYLKLRRILQPLTKG

SEQ ID NO: 210709 - protein, 15 aa, Artificial Sequence
  Description of Artificial Sequence: Synthetic peptide
  Seed: EWLKTRPILSPLTKG
EYLKLRRILSPLTKG

SEQ ID NO: 210710 - protein, 15 aa, Artificial Sequence
  Description of Artificial Sequence: Synthetic peptide
  Seed: EWLKTRPILSPLTKG
EYLKLRRILTPLTKG

SEQ ID NO: 210711 - protein, 15 aa, Artificial Sequence
  Description of Artificial Sequence: Synthetic peptide
  Seed: EWLKTRPILSPLTKG
EYLKLRRILVPLTKG

SEQ ID NO: 210712 - protein, 15 aa, Artificial Sequence
  Description of Artificial Sequence: Synthetic peptide
  Seed: EWLKTRPILSPLTKG
EYLKLRSILAPLTKG

SEQ ID NO: 210713 - protein, 15 aa, Artificial Sequence
  Description of Artificial Sequence: Synthetic peptide
  Seed: EWLKTRPILSPLTKG
EYLKLRSILCPLTKG

SEQ ID NO: 210714 - protein, 15 aa, Artificial Sequence
  Description of Artificial Sequence: Synthetic peptide
  Seed: EWLKTRPILSPLTKG
EYLKLRSILDPLTKG

SEQ ID NO: 210715 - protein, 15 aa, Artificial Sequence
  Description of Artificial Sequence: Synthetic peptide
  Seed: EWLKTRPILSPLTKG
EYLKLRSILEPLTKG

SEQ ID NO: 210716 - protein, 15 aa, Artificial Sequence
  Description of Artificial Sequence: Synthetic peptide
  Seed: EWLKTRPILSPLTKG
EYLKLRSILFPLTKG

SEQ ID NO: 210717 - protein, 15 aa, Artificial Sequence
  Description of Artificial Sequence: Synthetic peptide
  Seed: EWLKTRPILSPLTKG
EYLKLRSILHPLTKG

SEQ ID NO: 210718 - protein, 15 aa, Artificial Sequence
  Description of Artificial Sequence: Synthetic peptide
  Seed: EWLKTRPILSPLTKG
EYLKLRSILIPLTKG

SEQ ID NO: 210719 - protein, 15 aa, Artificial Sequence
  Description of Artificial Sequence: Synthetic peptide
  Seed: EWLKTRPILSPLTKG
EYLKLRSILKPLTKG

SEQ ID NO: 210720 - protein, 15 aa, Artificial Sequence
  Description of Artificial Sequence: Synthetic peptide
  Seed: EWLKTRPILSPLTKG
EYLKLRSILLPLTKG

SEQ ID NO: 210721 - protein, 15 aa, Artificial Sequence
  Description of Artificial Sequence: Synthetic peptide
  Seed: EWLKTRPILSPLTKG
EYLKLRSILMPLTKG

SEQ ID NO: 210722 - protein, 15 aa, Artificial Sequence
  Description of Artificial Sequence: Synthetic peptide
  Seed: EWLKTRPILSPLTKG
EYLKLRSILQPLTKG

SEQ ID NO: 210723 - protein, 15 aa, Artificial Sequence
  Description of Artificial Sequence: Synthetic peptide
  Seed: EWLKTRPILSPLTKG
EYLKLRSILRPLTKG

SEQ ID NO: 210724 - protein, 15 aa, Artificial Sequence
  Description of Artificial Sequence: Synthetic peptide
  Seed: EWLKTRPILSPLTKG
EYLKLRSILSPLTKG

SEQ ID NO: 210725 - protein, 15 aa, Artificial Sequence
  Description of Artificial Sequence: Synthetic peptide
  Seed: EWLKTRPILSPLTKG
EYLKLRSILTPLTKG

SEQ ID NO: 210726 - protein, 15 aa, Artificial Sequence
  Description of Artificial Sequence: Synthetic peptide
  Seed: EWLKTRPILSPLTKG
EYLKLRSILVPLTKG

SEQ ID NO: 210727 - protein, 15 aa, Artificial Sequence
  Description of Artificial Sequence: Synthetic peptide
  Seed: EWLKTRPILSPLTKG
EYLKLRSILWPLTKG

SEQ ID NO: 210728 - protein, 15 aa, Artificial Sequence
  Description of Artificial Sequence: Synthetic peptide
  Seed: EWLKTRPILSPLTKG
EYLKLRSILYPLTKG

SEQ ID NO: 210729 - protein, 15 aa, Artificial Sequence
  Description of Artificial Sequence: Synthetic peptide
  Seed: EWLKTRPILSPLTKG
EYLKLRTILAPLTKG

SEQ ID NO: 210730 - protein, 15 aa, Artificial Sequence
  Description of Artificial Sequence: Synthetic peptide
  Seed: EWLKTRPILSPLTKG
EYLKLRTILCPLTKG

SEQ ID NO: 210731 - protein, 15 aa, Artificial Sequence
  Description of Artificial Sequence: Synthetic peptide
  Seed: EWLKTRPILSPLTKG
EYLKLRTILDPLTKG

SEQ ID NO: 210732 - protein, 15 aa, Artificial Sequence
  Description of Artificial Sequence: Synthetic peptide
  Seed: EWLKTRPILSPLTKG
EYLKLRTILEPLTKG

SEQ ID NO: 210733 - protein, 15 aa, Artificial Sequence
  Description of Artificial Sequence: Synthetic peptide
  Seed: EWLKTRPILSPLTKG
EYLKLRTILFPLTKG

SEQ ID NO: 210734 - protein, 15 aa, Artificial Sequence
  Description of Artificial Sequence: Synthetic peptide
  Seed: EWLKTRPILSPLTKG
EYLKLRTILGPLTKG

SEQ ID NO: 210735 - protein, 15 aa, Artificial Sequence
  Description of Artificial Sequence: Synthetic peptide
  Seed: EWLKTRPILSPLTKG
EYLKLRTILHPLTKG

SEQ ID NO: 210736 - protein, 15 aa, Artificial Sequence
  Description of Artificial Sequence: Synthetic peptide
  Seed: EWLKTRPILSPLTKG
EYLKLRTILIPLTKG

SEQ ID NO: 210737 - protein, 15 aa, Artificial Sequence
  Description of Artificial Sequence: Synthetic peptide
  Seed: EWLKTRPILSPLTKG
EYLKLRTILLPLTKG

SEQ ID NO: 210738 - protein, 15 aa, Artificial Sequence
  Description of Artificial Sequence: Synthetic peptide
  Seed: EWLKTRPILSPLTKG
EYLKLRTILMPLTKG

SEQ ID NO: 210739 - protein, 15 aa, Artificial Sequence
  Description of Artificial Sequence: Synthetic peptide
  Seed: EWLKTRPILSPLTKG
EYLKLRTILNPLTKG

SEQ ID NO: 210740 - protein, 15 aa, Artificial Sequence
  Description of Artificial Sequence: Synthetic peptide
  Seed: EWLKTRPILSPLTKG
EYLKLRTILQPLTKG

SEQ ID NO: 210741 - protein, 15 aa, Artificial Sequence
  Description of Artificial Sequence: Synthetic peptide
  Seed: EWLKTRPILSPLTKG
EYLKLRTILRPLTKG

SEQ ID NO: 210742 - protein, 15 aa, Artificial Sequence
  Description of Artificial Sequence: Synthetic peptide
  Seed: EWLKTRPILSPLTKG
EYLKLRTILSPLTKG

SEQ ID NO: 210743 - protein, 15 aa, Artificial Sequence
  Description of Artificial Sequence: Synthetic peptide
  Seed: EWLKTRPILSPLTKG
EYLKLRTILTPLTKG

SEQ ID NO: 210744 - protein, 15 aa, Artificial Sequence
  Description of Artificial Sequence: Synthetic peptide
  Seed: EWLKTRPILSPLTKG
EYLKLRTILVPLTKG

SEQ ID NO: 210745 - protein, 15 aa, Artificial Sequence
  Description of Artificial Sequence: Synthetic peptide
  Seed: EWLKTRPILSPLTKG
EYLKLRTILYPLTKG

SEQ ID NO: 210746 - protein, 15 aa, Artificial Sequence
  Description of Artificial Sequence: Synthetic peptide
  Seed: EWLKTRPILSPLTKG
EYLKLRVILHPLTKG

SEQ ID NO: 210747 - protein, 15 aa, Artificial Sequence
  Description of Artificial Sequence: Synthetic peptide
  Seed: EWLKTRPILSPLTKG
EYLKLRVILIPLTKG

SEQ ID NO: 210748 - protein, 15 aa, Artificial Sequence
  Description of Artificial Sequence: Synthetic peptide
  Seed: EWLKTRPILSPLTKG
EYLKLRVILLPLTKG

SEQ ID NO: 210749 - protein, 15 aa, Artificial Sequence
  Description of Artificial Sequence: Synthetic peptide
  Seed: EWLKTRPILSPLTKG
EYLKLRVILMPLTKG

SEQ ID NO: 210750 - protein, 15 aa, Artificial Sequence
  Description of Artificial Sequence: Synthetic peptide
  Seed: EWLKTRPILSPLTKG
EYLKLRVILQPLTKG

SEQ ID NO: 210751 - protein, 15 aa, Artificial Sequence
  Description of Artificial Sequence: Synthetic peptide
  Seed: EWLKTRPILSPLTKG
EYLKLRVILVPLTKG

SEQ ID NO: 210752 - protein, 15 aa, Artificial Sequence
  Description of Artificial Sequence: Synthetic peptide
  Seed: EWLKTRPILSPLTKG
EYLKMRAILAPLTKG

SEQ ID NO: 210753 - protein, 15 aa, Artificial Sequence
  Description of Artificial Sequence: Synthetic peptide
  Seed: EWLKTRPILSPLTKG
EYLKMRAILCPLTKG

SEQ ID NO: 210754 - protein, 15 aa, Artificial Sequence
  Description of Artificial Sequence: Synthetic peptide
  Seed: EWLKTRPILSPLTKG
EYLKMRAILDPLTKG

SEQ ID NO: 210755 - protein, 15 aa, Artificial Sequence
  Description of Artificial Sequence: Synthetic peptide
  Seed: EWLKTRPILSPLTKG
EYLKMRAILEPLTKG

SEQ ID NO: 210756 - protein, 15 aa, Artificial Sequence
  Description of Artificial Sequence: Synthetic peptide
  Seed: EWLKTRPILSPLTKG
EYLKMRAILFPLTKG

SEQ ID NO: 210757 - protein, 15 aa, Artificial Sequence
  Description of Artificial Sequence: Synthetic peptide
  Seed: EWLKTRPILSPLTKG
EYLKMRAILGPLTKG

SEQ ID NO: 210758 - protein, 15 aa, Artificial Sequence
  Description of Artificial Sequence: Synthetic peptide
  Seed: EWLKTRPILSPLTKG
EYLKMRAILHPLTKG

SEQ ID NO: 210759 - protein, 15 aa, Artificial Sequence
  Description of Artificial Sequence: Synthetic peptide
  Seed: EWLKTRPILSPLTKG
EYLKMRAILIPLTKG

SEQ ID NO: 210760 - protein, 15 aa, Artificial Sequence
  Description of Artificial Sequence: Synthetic peptide
  Seed: EWLKTRPILSPLTKG
EYLKMRAILKPLTKG

SEQ ID NO: 210761 - protein, 15 aa, Artificial Sequence
  Description of Artificial Sequence: Synthetic peptide
  Seed: EWLKTRPILSPLTKG
EYLKMRAILLPLTKG

SEQ ID NO: 210762 - protein, 15 aa, Artificial Sequence
  Description of Artificial Sequence: Synthetic peptide
  Seed: EWLKTRPILSPLTKG
EYLKMRAILMPLTKG

SEQ ID NO: 210763 - protein, 15 aa, Artificial Sequence
  Description of Artificial Sequence: Synthetic peptide
  Seed: EWLKTRPILSPLTKG
EYLKMRAILNPLTKG

SEQ ID NO: 210764 - protein, 15 aa, Artificial Sequence
  Description of Artificial Sequence: Synthetic peptide
  Seed: EWLKTRPILSPLTKG
EYLKMRAILQPLTKG

SEQ ID NO: 210765 - protein, 15 aa, Artificial Sequence
  Description of Artificial Sequence: Synthetic peptide
  Seed: EWLKTRPILSPLTKG
EYLKMRAILRPLTKG

SEQ ID NO: 210766 - protein, 15 aa, Artificial Sequence
  Description of Artificial Sequence: Synthetic peptide
  Seed: EWLKTRPILSPLTKG
EYLKMRAILSPLTKG

SEQ ID NO: 210767 - protein, 15 aa, Artificial Sequence
  Description of Artificial Sequence: Synthetic peptide
  Seed: EWLKTRPILSPLTKG
EYLKMRAILTPLTKG

SEQ ID NO: 210768 - protein, 15 aa, Artificial Sequence
  Description of Artificial Sequence: Synthetic peptide
  Seed: EWLKTRPILSPLTKG
EYLKMRAILVPLTKG

SEQ ID NO: 210769 - protein, 15 aa, Artificial Sequence
  Description of Artificial Sequence: Synthetic peptide
  Seed: EWLKTRPILSPLTKG
EYLKMRAILWPLTKG

SEQ ID NO: 210770 - protein, 15 aa, Artificial Sequence
  Description of Artificial Sequence: Synthetic peptide
  Seed: EWLKTRPILSPLTKG
EYLKMRAILYPLTKG

SEQ ID NO: 210771 - protein, 15 aa, Artificial Sequence
  Description of Artificial Sequence: Synthetic peptide
  Seed: EWLKTRPILSPLTKG
EYLKMRCILIPLTKG

SEQ ID NO: 210772 - protein, 15 aa, Artificial Sequence
  Description of Artificial Sequence: Synthetic peptide
  Seed: EWLKTRPILSPLTKG
EYLKMRCILVPLTKG

SEQ ID NO: 210773 - protein, 15 aa, Artificial Sequence
  Description of Artificial Sequence: Synthetic peptide
  Seed: EWLKTRPILSPLTKG
EYLKMRDILAPLTKG

SEQ ID NO: 210774 - protein, 15 aa, Artificial Sequence
  Description of Artificial Sequence: Synthetic peptide
  Seed: EWLKTRPILSPLTKG
EYLKMRDILIPLTKG

SEQ ID NO: 210775 - protein, 15 aa, Artificial Sequence
  Description of Artificial Sequence: Synthetic peptide
  Seed: EWLKTRPILSPLTKG
EYLKMRDILLPLTKG

SEQ ID NO: 210776 - protein, 15 aa, Artificial Sequence
  Description of Artificial Sequence: Synthetic peptide
  Seed: EWLKTRPILSPLTKG
EYLKMRDILVPLTKG

SEQ ID NO: 210777 - protein, 15 aa, Artificial Sequence
  Description of Artificial Sequence: Synthetic peptide
  Seed: EWLKTRPILSPLTKG
EYLKMREILIPLTKG

SEQ ID NO: 210778 - protein, 15 aa, Artificial Sequence
  Description of Artificial Sequence: Synthetic peptide
  Seed: EWLKTRPILSPLTKG
EYLKMREILLPLTKG

SEQ ID NO: 210779 - protein, 15 aa, Artificial Sequence
  Description of Artificial Sequence: Synthetic peptide
  Seed: EWLKTRPILSPLTKG
EYLKMREILTPLTKG

SEQ ID NO: 210780 - protein, 15 aa, Artificial Sequence
  Description of Artificial Sequence: Synthetic peptide
  Seed: EWLKTRPILSPLTKG
EYLKMREILVPLTKG

SEQ ID NO: 210781 - protein, 15 aa, Artificial Sequence
  Description of Artificial Sequence: Synthetic peptide
  Seed: EWLKTRPILSPLTKG
EYLKMRGILAPLTKG

SEQ ID NO: 210782 - protein, 15 aa, Artificial Sequence
  Description of Artificial Sequence: Synthetic peptide
  Seed: EWLKTRPILSPLTKG
EYLKMRGILCPLTKG

SEQ ID NO: 210783 - protein, 15 aa, Artificial Sequence
  Description of Artificial Sequence: Synthetic peptide
  Seed: EWLKTRPILSPLTKG
EYLKMRGILDPLTKG

SEQ ID NO: 210784 - protein, 15 aa, Artificial Sequence
  Description of Artificial Sequence: Synthetic peptide
  Seed: EWLKTRPILSPLTKG
EYLKMRGILEPLTKG

SEQ ID NO: 210785 - protein, 15 aa, Artificial Sequence
  Description of Artificial Sequence: Synthetic peptide
  Seed: EWLKTRPILSPLTKG
EYLKMRGILFPLTKG

SEQ ID NO: 210786 - protein, 15 aa, Artificial Sequence
  Description of Artificial Sequence: Synthetic peptide
  Seed: EWLKTRPILSPLTKG
EYLKMRGILGPLTKG

SEQ ID NO: 210787 - protein, 15 aa, Artificial Sequence
  Description of Artificial Sequence: Synthetic peptide
  Seed: EWLKTRPILSPLTKG
EYLKMRGILHPLTKG

SEQ ID NO: 210788 - protein, 15 aa, Artificial Sequence
  Description of Artificial Sequence: Synthetic peptide
  Seed: EWLKTRPILSPLTKG
EYLKMRGILIPLTKG

SEQ ID NO: 210789 - protein, 15 aa, Artificial Sequence
  Description of Artificial Sequence: Synthetic peptide
  Seed: EWLKTRPILSPLTKG
EYLKMRGILKPLTKG

SEQ ID NO: 210790 - protein, 15 aa, Artificial Sequence
  Description of Artificial Sequence: Synthetic peptide
  Seed: EWLKTRPILSPLTKG
EYLKMRGILLPLTKG

SEQ ID NO: 210791 - protein, 15 aa, Artificial Sequence
  Description of Artificial Sequence: Synthetic peptide
  Seed: EWLKTRPILSPLTKG
EYLKMRGILMPLTKG

SEQ ID NO: 210792 - protein, 15 aa, Artificial Sequence
  Description of Artificial Sequence: Synthetic peptide
  Seed: EWLKTRPILSPLTKG
EYLKMRGILNPLTKG

SEQ ID NO: 210793 - protein, 15 aa, Artificial Sequence
  Description of Artificial Sequence: Synthetic peptide
  Seed: EWLKTRPILSPLTKG
EYLKMRGILQPLTKG

SEQ ID NO: 210794 - protein, 15 aa, Artificial Sequence
  Description of Artificial Sequence: Synthetic peptide
  Seed: EWLKTRPILSPLTKG
EYLKMRGILRPLTKG

SEQ ID NO: 210795 - protein, 15 aa, Artificial Sequence
  Description of Artificial Sequence: Synthetic peptide
  Seed: EWLKTRPILSPLTKG
EYLKMRGILSPLTKG

SEQ ID NO: 210796 - protein, 15 aa, Artificial Sequence
  Description of Artificial Sequence: Synthetic peptide
  Seed: EWLKTRPILSPLTKG
EYLKMRGILTPLTKG

SEQ ID NO: 210797 - protein, 15 aa, Artificial Sequence
  Description of Artificial Sequence: Synthetic peptide
  Seed: EWLKTRPILSPLTKG
EYLKMRGILVPLTKG

SEQ ID NO: 210798 - protein, 15 aa, Artificial Sequence
  Description of Artificial Sequence: Synthetic peptide
  Seed: EWLKTRPILSPLTKG
EYLKMRGILWPLTKG

SEQ ID NO: 210799 - protein, 15 aa, Artificial Sequence
  Description of Artificial Sequence: Synthetic peptide
  Seed: EWLKTRPILSPLTKG
EYLKMRGILYPLTKG

SEQ ID NO: 210800 - protein, 15 aa, Artificial Sequence
  Description of Artificial Sequence: Synthetic peptide
  Seed: EWLKTRPILSPLTKG
EYLKMRHILIPLTKG

SEQ ID NO: 210801 - protein, 15 aa, Artificial Sequence
  Description of Artificial Sequence: Synthetic peptide
  Seed: EWLKTRPILSPLTKG
EYLKMRHILLPLTKG

SEQ ID NO: 210802 - protein, 15 aa, Artificial Sequence
  Description of Artificial Sequence: Synthetic peptide
  Seed: EWLKTRPILSPLTKG
EYLKMRHILMPLTKG

SEQ ID NO: 210803 - protein, 15 aa, Artificial Sequence
  Description of Artificial Sequence: Synthetic peptide
  Seed: EWLKTRPILSPLTKG
EYLKMRHILVPLTKG

SEQ ID NO: 210804 - protein, 15 aa, Artificial Sequence
  Description of Artificial Sequence: Synthetic peptide
  Seed: EWLKTRPILSPLTKG
EYLKMRIILIPLTKG

SEQ ID NO: 210805 - protein, 15 aa, Artificial Sequence
  Description of Artificial Sequence: Synthetic peptide
  Seed: EWLKTRPILSPLTKG
EYLKMRIILLPLTKG

SEQ ID NO: 210806 - protein, 15 aa, Artificial Sequence
  Description of Artificial Sequence: Synthetic peptide
  Seed: EWLKTRPILSPLTKG
EYLKMRIILMPLTKG

SEQ ID NO: 210807 - protein, 15 aa, Artificial Sequence
  Description of Artificial Sequence: Synthetic peptide
  Seed: EWLKTRPILSPLTKG
EYLKMRKILAPLTKG

SEQ ID NO: 210808 - protein, 15 aa, Artificial Sequence
  Description of Artificial Sequence: Synthetic peptide
  Seed: EWLKTRPILSPLTKG
EYLKMRKILGPLTKG

SEQ ID NO: 210809 - protein, 15 aa, Artificial Sequence
  Description of Artificial Sequence: Synthetic peptide
  Seed: EWLKTRPILSPLTKG
EYLKMRKILHPLTKG

SEQ ID NO: 210810 - protein, 15 aa, Artificial Sequence
  Description of Artificial Sequence: Synthetic peptide
  Seed: EWLKTRPILSPLTKG
EYLKMRKILIPLTKG

SEQ ID NO: 210811 - protein, 15 aa, Artificial Sequence
  Description of Artificial Sequence: Synthetic peptide
  Seed: EWLKTRPILSPLTKG
EYLKMRKILMPLTKG

SEQ ID NO: 210812 - protein, 15 aa, Artificial Sequence
  Description of Artificial Sequence: Synthetic peptide
  Seed: EWLKTRPILSPLTKG
EYLKMRKILNPLTKG

SEQ ID NO: 210813 - protein, 15 aa, Artificial Sequence
  Description of Artificial Sequence: Synthetic peptide
  Seed: EWLKTRPILSPLTKG
EYLKMRKILPPLTKG

SEQ ID NO: 210814 - protein, 15 aa, Artificial Sequence
  Description of Artificial Sequence: Synthetic peptide
  Seed: EWLKTRPILSPLTKG
EYLKMRKILQPLTKG

SEQ ID NO: 210815 - protein, 15 aa, Artificial Sequence
  Description of Artificial Sequence: Synthetic peptide
  Seed: EWLKTRPILSPLTKG
EYLKMRKILSPLTKG

SEQ ID NO: 210816 - protein, 15 aa, Artificial Sequence
  Description of Artificial Sequence: Synthetic peptide
  Seed: EWLKTRPILSPLTKG
EYLKMRKILTPLTKG

SEQ ID NO: 210817 - protein, 15 aa, Artificial Sequence
  Description of Artificial Sequence: Synthetic peptide
  Seed: EWLKTRPILSPLTKG
EYLKMRKILVPLTKG

SEQ ID NO: 210818 - protein, 15 aa, Artificial Sequence
  Description of Artificial Sequence: Synthetic peptide
  Seed: EWLKTRPILSPLTKG
EYLKMRNILAPLTKG

SEQ ID NO: 210819 - protein, 15 aa, Artificial Sequence
  Description of Artificial Sequence: Synthetic peptide
  Seed: EWLKTRPILSPLTKG
EYLKMRNILCPLTKG

SEQ ID NO: 210820 - protein, 15 aa, Artificial Sequence
  Description of Artificial Sequence: Synthetic peptide
  Seed: EWLKTRPILSPLTKG
EYLKMRNILDPLTKG

SEQ ID NO: 210821 - protein, 15 aa, Artificial Sequence
  Description of Artificial Sequence: Synthetic peptide
  Seed: EWLKTRPILSPLTKG
EYLKMRNILFPLTKG

SEQ ID NO: 210822 - protein, 15 aa, Artificial Sequence
  Description of Artificial Sequence: Synthetic peptide
  Seed: EWLKTRPILSPLTKG
EYLKMRNILGPLTKG

SEQ ID NO: 210823 - protein, 15 aa, Artificial Sequence
  Description of Artificial Sequence: Synthetic peptide
  Seed: EWLKTRPILSPLTKG
EYLKMRNILIPLTKG

SEQ ID NO: 210824 - protein, 15 aa, Artificial Sequence
  Description of Artificial Sequence: Synthetic peptide
  Seed: EWLKTRPILSPLTKG
EYLKMRNILLPLTKG

SEQ ID NO: 210825 - protein, 15 aa, Artificial Sequence
  Description of Artificial Sequence: Synthetic peptide
  Seed: EWLKTRPILSPLTKG
EYLKMRNILMPLTKG

SEQ ID NO: 210826 - protein, 15 aa, Artificial Sequence
  Description of Artificial Sequence: Synthetic peptide
  Seed: EWLKTRPILSPLTKG
EYLKMRNILNPLTKG

SEQ ID NO: 210827 - protein, 15 aa, Artificial Sequence
  Description of Artificial Sequence: Synthetic peptide
  Seed: EWLKTRPILSPLTKG
EYLKMRNILSPLTKG

SEQ ID NO: 210828 - protein, 15 aa, Artificial Sequence
  Description of Artificial Sequence: Synthetic peptide
  Seed: EWLKTRPILSPLTKG
EYLKMRNILTPLTKG

SEQ ID NO: 210829 - protein, 15 aa, Artificial Sequence
  Description of Artificial Sequence: Synthetic peptide
  Seed: EWLKTRPILSPLTKG
EYLKMRNILVPLTKG

SEQ ID NO: 210830 - protein, 15 aa, Artificial Sequence
  Description of Artificial Sequence: Synthetic peptide
  Seed: EWLKTRPILSPLTKG
EYLKMRPILAPLTKG

SEQ ID NO: 210831 - protein, 15 aa, Artificial Sequence
  Description of Artificial Sequence: Synthetic peptide
  Seed: EWLKTRPILSPLTKG
EYLKMRPILCPLTKG

SEQ ID NO: 210832 - protein, 15 aa, Artificial Sequence
  Description of Artificial Sequence: Synthetic peptide
  Seed: EWLKTRPILSPLTKG
EYLKMRPILDPLTKG

SEQ ID NO: 210833 - protein, 15 aa, Artificial Sequence
  Description of Artificial Sequence: Synthetic peptide
  Seed: EWLKTRPILSPLTKG
EYLKMRPILEPLTKG

SEQ ID NO: 210834 - protein, 15 aa, Artificial Sequence
  Description of Artificial Sequence: Synthetic peptide
  Seed: EWLKTRPILSPLTKG
EYLKMRPILFPLTKG

SEQ ID NO: 210835 - protein, 15 aa, Artificial Sequence
  Description of Artificial Sequence: Synthetic peptide
  Seed: EWLKTRPILSPLTKG
EYLKMRPILGPLTKG

SEQ ID NO: 210836 - protein, 15 aa, Artificial Sequence
  Description of Artificial Sequence: Synthetic peptide
  Seed: EWLKTRPILSPLTKG
EYLKMRPILHPLTKG

SEQ ID NO: 210837 - protein, 15 aa, Artificial Sequence
  Description of Artificial Sequence: Synthetic peptide
  Seed: EWLKTRPILSPLTKG
EYLKMRPILIPLTKG

SEQ ID NO: 210838 - protein, 15 aa, Artificial Sequence
  Description of Artificial Sequence: Synthetic peptide
  Seed: EWLKTRPILSPLTKG
EYLKMRPILKPLTKG

SEQ ID NO: 210839 - protein, 15 aa, Artificial Sequence
  Description of Artificial Sequence: Synthetic peptide
  Seed: EWLKTRPILSPLTKG
EYLKMRPILLPLTKG

SEQ ID NO: 210840 - protein, 15 aa, Artificial Sequence
  Description of Artificial Sequence: Synthetic peptide
  Seed: EWLKTRPILSPLTKG
EYLKMRPILMPLTKG

SEQ ID NO: 210841 - protein, 15 aa, Artificial Sequence
  Description of Artificial Sequence: Synthetic peptide
  Seed: EWLKTRPILSPLTKG
EYLKMRPILNPLTKG

SEQ ID NO: 210842 - protein, 15 aa, Artificial Sequence
  Description of Artificial Sequence: Synthetic peptide
  Seed: EWLKTRPILSPLTKG
EYLKMRPILQPLTKG

SEQ ID NO: 210843 - protein, 15 aa, Artificial Sequence
  Description of Artificial Sequence: Synthetic peptide
  Seed: EWLKTRPILSPLTKG
EYLKMRPILRPLTKG

SEQ ID NO: 210844 - protein, 15 aa, Artificial Sequence
  Description of Artificial Sequence: Synthetic peptide
  Seed: EWLKTRPILSPLTKG
EYLKMRPILSPLTKG

SEQ ID NO: 210845 - protein, 15 aa, Artificial Sequence
  Description of Artificial Sequence: Synthetic peptide
  Seed: EWLKTRPILSPLTKG
EYLKMRPILTPLTKG

SEQ ID NO: 210846 - protein, 15 aa, Artificial Sequence
  Description of Artificial Sequence: Synthetic peptide
  Seed: EWLKTRPILSPLTKG
EYLKMRPILVPLTKG

SEQ ID NO: 210847 - protein, 15 aa, Artificial Sequence
  Description of Artificial Sequence: Synthetic peptide
  Seed: EWLKTRPILSPLTKG
EYLKMRPILWPLTKG

SEQ ID NO: 210848 - protein, 15 aa, Artificial Sequence
  Description of Artificial Sequence: Synthetic peptide
  Seed: EWLKTRPILSPLTKG
EYLKMRPILYPLTKG

SEQ ID NO: 210849 - protein, 15 aa, Artificial Sequence
  Description of Artificial Sequence: Synthetic peptide
  Seed: EWLKTRPILSPLTKG
EYLKMRQILIPLTKG

SEQ ID NO: 210850 - protein, 15 aa, Artificial Sequence
  Description of Artificial Sequence: Synthetic peptide
  Seed: EWLKTRPILSPLTKG
EYLKMRQILLPLTKG

SEQ ID NO: 210851 - protein, 15 aa, Artificial Sequence
  Description of Artificial Sequence: Synthetic peptide
  Seed: EWLKTRPILSPLTKG
EYLKMRQILMPLTKG

SEQ ID NO: 210852 - protein, 15 aa, Artificial Sequence
  Description of Artificial Sequence: Synthetic peptide
  Seed: EWLKTRPILSPLTKG
EYLKMRQILVPLTKG

SEQ ID NO: 210853 - protein, 15 aa, Artificial Sequence
  Description of Artificial Sequence: Synthetic peptide
  Seed: EWLKTRPILSPLTKG
EYLKMRRILAPLTKG

SEQ ID NO: 210854 - protein, 15 aa, Artificial Sequence
  Description of Artificial Sequence: Synthetic peptide
  Seed: EWLKTRPILSPLTKG
EYLKMRRILGPLTKG

SEQ ID NO: 210855 - protein, 15 aa, Artificial Sequence
  Description of Artificial Sequence: Synthetic peptide
  Seed: EWLKTRPILSPLTKG
EYLKMRRILHPLTKG

SEQ ID NO: 210856 - protein, 15 aa, Artificial Sequence
  Description of Artificial Sequence: Synthetic peptide
  Seed: EWLKTRPILSPLTKG
EYLKMRRILIPLTKG

SEQ ID NO: 210857 - protein, 15 aa, Artificial Sequence
  Description of Artificial Sequence: Synthetic peptide
  Seed: EWLKTRPILSPLTKG
EYLKMRRILLPLTKG

SEQ ID NO: 210858 - protein, 15 aa, Artificial Sequence
  Description of Artificial Sequence: Synthetic peptide
  Seed: EWLKTRPILSPLTKG
EYLKMRRILMPLTKG

SEQ ID NO: 210859 - protein, 15 aa, Artificial Sequence
  Description of Artificial Sequence: Synthetic peptide
  Seed: EWLKTRPILSPLTKG
EYLKMRRILNPLTKG

SEQ ID NO: 210860 - protein, 15 aa, Artificial Sequence
  Description of Artificial Sequence: Synthetic peptide
  Seed: EWLKTRPILSPLTKG
EYLKMRRILPPLTKG

SEQ ID NO: 210861 - protein, 15 aa, Artificial Sequence
  Description of Artificial Sequence: Synthetic peptide
  Seed: EWLKTRPILSPLTKG
EYLKMRRILQPLTKG

SEQ ID NO: 210862 - protein, 15 aa, Artificial Sequence
  Description of Artificial Sequence: Synthetic peptide
  Seed: EWLKTRPILSPLTKG
EYLKMRRILSPLTKG

SEQ ID NO: 210863 - protein, 15 aa, Artificial Sequence
  Description of Artificial Sequence: Synthetic peptide
  Seed: EWLKTRPILSPLTKG
EYLKMRRILTPLTKG

SEQ ID NO: 210864 - protein, 15 aa, Artificial Sequence
  Description of Artificial Sequence: Synthetic peptide
  Seed: EWLKTRPILSPLTKG
EYLKMRRILVPLTKG

SEQ ID NO: 210865 - protein, 15 aa, Artificial Sequence
  Description of Artificial Sequence: Synthetic peptide
  Seed: EWLKTRPILSPLTKG
EYLKMRSILAPLTKG

SEQ ID NO: 210866 - protein, 15 aa, Artificial Sequence
  Description of Artificial Sequence: Synthetic peptide
  Seed: EWLKTRPILSPLTKG
EYLKMRSILCPLTKG

SEQ ID NO: 210867 - protein, 15 aa, Artificial Sequence
  Description of Artificial Sequence: Synthetic peptide
  Seed: EWLKTRPILSPLTKG
EYLKMRSILDPLTKG

SEQ ID NO: 210868 - protein, 15 aa, Artificial Sequence
  Description of Artificial Sequence: Synthetic peptide
  Seed: EWLKTRPILSPLTKG
EYLKMRSILEPLTKG

SEQ ID NO: 210869 - protein, 15 aa, Artificial Sequence
  Description of Artificial Sequence: Synthetic peptide
  Seed: EWLKTRPILSPLTKG
EYLKMRSILFPLTKG

SEQ ID NO: 210870 - protein, 15 aa, Artificial Sequence
  Description of Artificial Sequence: Synthetic peptide
  Seed: EWLKTRPILSPLTKG
EYLKMRSILGPLTKG

SEQ ID NO: 210871 - protein, 15 aa, Artificial Sequence
  Description of Artificial Sequence: Synthetic peptide
  Seed: EWLKTRPILSPLTKG
EYLKMRSILHPLTKG

SEQ ID NO: 210872 - protein, 15 aa, Artificial Sequence
  Description of Artificial Sequence: Synthetic peptide
  Seed: EWLKTRPILSPLTKG
EYLKMRSILIPLTKG

SEQ ID NO: 210873 - protein, 15 aa, Artificial Sequence
  Description of Artificial Sequence: Synthetic peptide
  Seed: EWLKTRPILSPLTKG
EYLKMRSILKPLTKG

SEQ ID NO: 210874 - protein, 15 aa, Artificial Sequence
  Description of Artificial Sequence: Synthetic peptide
  Seed: EWLKTRPILSPLTKG
EYLKMRSILLPLTKG

SEQ ID NO: 210875 - protein, 15 aa, Artificial Sequence
  Description of Artificial Sequence: Synthetic peptide
  Seed: EWLKTRPILSPLTKG
EYLKMRSILMPLTKG

SEQ ID NO: 210876 - protein, 15 aa, Artificial Sequence
  Description of Artificial Sequence: Synthetic peptide
  Seed: EWLKTRPILSPLTKG
EYLKMRSILNPLTKG

SEQ ID NO: 210877 - protein, 15 aa, Artificial Sequence
  Description of Artificial Sequence: Synthetic peptide
  Seed: EWLKTRPILSPLTKG
EYLKMRSILQPLTKG

SEQ ID NO: 210878 - protein, 15 aa, Artificial Sequence
  Description of Artificial Sequence: Synthetic peptide
  Seed: EWLKTRPILSPLTKG
EYLKMRSILRPLTKG

SEQ ID NO: 210879 - protein, 15 aa, Artificial Sequence
  Description of Artificial Sequence: Synthetic peptide
  Seed: EWLKTRPILSPLTKG
EYLKMRSILSPLTKG

SEQ ID NO: 210880 - protein, 15 aa, Artificial Sequence
  Description of Artificial Sequence: Synthetic peptide
  Seed: EWLKTRPILSPLTKG
EYLKMRSILTPLTKG

SEQ ID NO: 210881 - protein, 15 aa, Artificial Sequence
  Description of Artificial Sequence: Synthetic peptide
  Seed: EWLKTRPILSPLTKG
EYLKMRSILVPLTKG

SEQ ID NO: 210882 - protein, 15 aa, Artificial Sequence
  Description of Artificial Sequence: Synthetic peptide
  Seed: EWLKTRPILSPLTKG
EYLKMRSILWPLTKG

SEQ ID NO: 210883 - protein, 15 aa, Artificial Sequence
  Description of Artificial Sequence: Synthetic peptide
  Seed: EWLKTRPILSPLTKG
EYLKMRSILYPLTKG

SEQ ID NO: 210884 - protein, 15 aa, Artificial Sequence
  Description of Artificial Sequence: Synthetic peptide
  Seed: EWLKTRPILSPLTKG
EYLKMRTILAPLTKG

SEQ ID NO: 210885 - protein, 15 aa, Artificial Sequence
  Description of Artificial Sequence: Synthetic peptide
  Seed: EWLKTRPILSPLTKG
EYLKMRTILCPLTKG

SEQ ID NO: 210886 - protein, 15 aa, Artificial Sequence
  Description of Artificial Sequence: Synthetic peptide
  Seed: EWLKTRPILSPLTKG
EYLKMRTILDPLTKG

SEQ ID NO: 210887 - protein, 15 aa, Artificial Sequence
  Description of Artificial Sequence: Synthetic peptide
  Seed: EWLKTRPILSPLTKG
EYLKMRTILEPLTKG

SEQ ID NO: 210888 - protein, 15 aa, Artificial Sequence
  Description of Artificial Sequence: Synthetic peptide
  Seed: EWLKTRPILSPLTKG
EYLKMRTILFPLTKG

SEQ ID NO: 210889 - protein, 15 aa, Artificial Sequence
  Description of Artificial Sequence: Synthetic peptide
  Seed: EWLKTRPILSPLTKG
EYLKMRTILGPLTKG

SEQ ID NO: 210890 - protein, 15 aa, Artificial Sequence
  Description of Artificial Sequence: Synthetic peptide
  Seed: EWLKTRPILSPLTKG
EYLKMRTILHPLTKG

SEQ ID NO: 210891 - protein, 15 aa, Artificial Sequence
  Description of Artificial Sequence: Synthetic peptide
  Seed: EWLKTRPILSPLTKG
EYLKMRTILIPLTKG

SEQ ID NO: 210892 - protein, 15 aa, Artificial Sequence
  Description of Artificial Sequence: Synthetic peptide
  Seed: EWLKTRPILSPLTKG
EYLKMRTILLPLTKG

SEQ ID NO: 210893 - protein, 15 aa, Artificial Sequence
  Description of Artificial Sequence: Synthetic peptide
  Seed: EWLKTRPILSPLTKG
EYLKMRTILMPLTKG

SEQ ID NO: 210894 - protein, 15 aa, Artificial Sequence
  Description of Artificial Sequence: Synthetic peptide
  Seed: EWLKTRPILSPLTKG
EYLKMRTILNPLTKG

SEQ ID NO: 210895 - protein, 15 aa, Artificial Sequence
  Description of Artificial Sequence: Synthetic peptide
  Seed: EWLKTRPILSPLTKG
EYLKMRTILQPLTKG

SEQ ID NO: 210896 - protein, 15 aa, Artificial Sequence
  Description of Artificial Sequence: Synthetic peptide
  Seed: EWLKTRPILSPLTKG
EYLKMRTILRPLTKG

SEQ ID NO: 210897 - protein, 15 aa, Artificial Sequence
  Description of Artificial Sequence: Synthetic peptide
  Seed: EWLKTRPILSPLTKG
EYLKMRTILSPLTKG

SEQ ID NO: 210898 - protein, 15 aa, Artificial Sequence
  Description of Artificial Sequence: Synthetic peptide
  Seed: EWLKTRPILSPLTKG
EYLKMRTILTPLTKG

SEQ ID NO: 210899 - protein, 15 aa, Artificial Sequence
  Description of Artificial Sequence: Synthetic peptide
  Seed: EWLKTRPILSPLTKG
EYLKMRTILVPLTKG

SEQ ID NO: 210900 - protein, 15 aa, Artificial Sequence
  Description of Artificial Sequence: Synthetic peptide
  Seed: EWLKTRPILSPLTKG
EYLKMRTILYPLTKG

SEQ ID NO: 210901 - protein, 15 aa, Artificial Sequence
  Description of Artificial Sequence: Synthetic peptide
  Seed: EWLKTRPILSPLTKG
EYLKMRVILDPLTKG

SEQ ID NO: 210902 - protein, 15 aa, Artificial Sequence
  Description of Artificial Sequence: Synthetic peptide
  Seed: EWLKTRPILSPLTKG
EYLKMRVILHPLTKG

SEQ ID NO: 210903 - protein, 15 aa, Artificial Sequence
  Description of Artificial Sequence: Synthetic peptide
  Seed: EWLKTRPILSPLTKG
EYLKMRVILIPLTKG

SEQ ID NO: 210904 - protein, 15 aa, Artificial Sequence
  Description of Artificial Sequence: Synthetic peptide
  Seed: EWLKTRPILSPLTKG
EYLKMRVILLPLTKG

SEQ ID NO: 210905 - protein, 15 aa, Artificial Sequence
  Description of Artificial Sequence: Synthetic peptide
  Seed: EWLKTRPILSPLTKG
EYLKMRVILMPLTKG

SEQ ID NO: 210906 - protein, 15 aa, Artificial Sequence
  Description of Artificial Sequence: Synthetic peptide
  Seed: EWLKTRPILSPLTKG
EYLKMRVILNPLTKG

SEQ ID NO: 210907 - protein, 15 aa, Artificial Sequence
  Description of Artificial Sequence: Synthetic peptide
  Seed: EWLKTRPILSPLTKG
EYLKMRVILQPLTKG

SEQ ID NO: 210908 - protein, 15 aa, Artificial Sequence
  Description of Artificial Sequence: Synthetic peptide
  Seed: EWLKTRPILSPLTKG
EYLKMRVILRPLTKG

SEQ ID NO: 210909 - protein, 15 aa, Artificial Sequence
  Description of Artificial Sequence: Synthetic peptide
  Seed: EWLKTRPILSPLTKG
EYLKMRVILVPLTKG

SEQ ID NO: 210910 - protein, 15 aa, Artificial Sequence
  Description of Artificial Sequence: Synthetic peptide
  Seed: EWLKTRPILSPLTKG
EYLKNRAILAPLTKG

SEQ ID NO: 210911 - protein, 15 aa, Artificial Sequence
  Description of Artificial Sequence: Synthetic peptide
  Seed: EWLKTRPILSPLTKG
EYLKNRAILFPLTKG

SEQ ID NO: 210912 - protein, 15 aa, Artificial Sequence
  Description of Artificial Sequence: Synthetic peptide
  Seed: EWLKTRPILSPLTKG
EYLKNRAILGPLTKG

SEQ ID NO: 210913 - protein, 15 aa, Artificial Sequence
  Description of Artificial Sequence: Synthetic peptide
  Seed: EWLKTRPILSPLTKG
EYLKNRAILIPLTKG

SEQ ID NO: 210914 - protein, 15 aa, Artificial Sequence
  Description of Artificial Sequence: Synthetic peptide
  Seed: EWLKTRPILSPLTKG
EYLKNRAILLPLTKG

SEQ ID NO: 210915 - protein, 15 aa, Artificial Sequence
  Description of Artificial Sequence: Synthetic peptide
  Seed: EWLKTRPILSPLTKG
EYLKNRAILMPLTKG

SEQ ID NO: 210916 - protein, 15 aa, Artificial Sequence
  Description of Artificial Sequence: Synthetic peptide
  Seed: EWLKTRPILSPLTKG
EYLKNRAILNPLTKG

SEQ ID NO: 210917 - protein, 15 aa, Artificial Sequence
  Description of Artificial Sequence: Synthetic peptide
  Seed: EWLKTRPILSPLTKG
EYLKNRAILSPLTKG

SEQ ID NO: 210918 - protein, 15 aa, Artificial Sequence
  Description of Artificial Sequence: Synthetic peptide
  Seed: EWLKTRPILSPLTKG
EYLKNRAILTPLTKG

SEQ ID NO: 210919 - protein, 15 aa, Artificial Sequence
  Description of Artificial Sequence: Synthetic peptide
  Seed: EWLKTRPILSPLTKG
EYLKNRAILVPLTKG

SEQ ID NO: 210920 - protein, 15 aa, Artificial Sequence
  Description of Artificial Sequence: Synthetic peptide
  Seed: EWLKTRPILSPLTKG
EYLKNRGILAPLTKG

SEQ ID NO: 210921 - protein, 15 aa, Artificial Sequence
  Description of Artificial Sequence: Synthetic peptide
  Seed: EWLKTRPILSPLTKG
EYLKNRGILIPLTKG

SEQ ID NO: 210922 - protein, 15 aa, Artificial Sequence
  Description of Artificial Sequence: Synthetic peptide
  Seed: EWLKTRPILSPLTKG
EYLKNRGILLPLTKG

SEQ ID NO: 210923 - protein, 15 aa, Artificial Sequence
  Description of Artificial Sequence: Synthetic peptide
  Seed: EWLKTRPILSPLTKG
EYLKNRGILMPLTKG

SEQ ID NO: 210924 - protein, 15 aa, Artificial Sequence
  Description of Artificial Sequence: Synthetic peptide
  Seed: EWLKTRPILSPLTKG
EYLKNRGILVPLTKG

SEQ ID NO: 210925 - protein, 15 aa, Artificial Sequence
  Description of Artificial Sequence: Synthetic peptide
  Seed: EWLKTRPILSPLTKG
EYLKNRPILAPLTKG

SEQ ID NO: 210926 - protein, 15 aa, Artificial Sequence
  Description of Artificial Sequence: Synthetic peptide
  Seed: EWLKTRPILSPLTKG
EYLKNRPILIPLTKG

SEQ ID NO: 210927 - protein, 15 aa, Artificial Sequence
  Description of Artificial Sequence: Synthetic peptide
  Seed: EWLKTRPILSPLTKG
EYLKNRPILLPLTKG

SEQ ID NO: 210928 - protein, 15 aa, Artificial Sequence
  Description of Artificial Sequence: Synthetic peptide
  Seed: EWLKTRPILSPLTKG
EYLKNRPILVPLTKG

SEQ ID NO: 210929 - protein, 15 aa, Artificial Sequence
  Description of Artificial Sequence: Synthetic peptide
  Seed: EWLKTRPILSPLTKG
EYLKNRSILAPLTKG

SEQ ID NO: 210930 - protein, 15 aa, Artificial Sequence
  Description of Artificial Sequence: Synthetic peptide
  Seed: EWLKTRPILSPLTKG
EYLKNRSILIPLTKG

SEQ ID NO: 210931 - protein, 15 aa, Artificial Sequence
  Description of Artificial Sequence: Synthetic peptide
  Seed: EWLKTRPILSPLTKG
EYLKNRSILLPLTKG

SEQ ID NO: 210932 - protein, 15 aa, Artificial Sequence
  Description of Artificial Sequence: Synthetic peptide
  Seed: EWLKTRPILSPLTKG
EYLKNRSILMPLTKG

SEQ ID NO: 210933 - protein, 15 aa, Artificial Sequence
  Description of Artificial Sequence: Synthetic peptide
  Seed: EWLKTRPILSPLTKG
EYLKNRSILSPLTKG

SEQ ID NO: 210934 - protein, 15 aa, Artificial Sequence
  Description of Artificial Sequence: Synthetic peptide
  Seed: EWLKTRPILSPLTKG
EYLKNRSILVPLTKG

SEQ ID NO: 210935 - protein, 15 aa, Artificial Sequence
  Description of Artificial Sequence: Synthetic peptide
  Seed: EWLKTRPILSPLTKG
EYLKNRTILAPLTKG

SEQ ID NO: 210936 - protein, 15 aa, Artificial Sequence
  Description of Artificial Sequence: Synthetic peptide
  Seed: EWLKTRPILSPLTKG
EYLKNRTILVPLTKG

SEQ ID NO: 210937 - protein, 15 aa, Artificial Sequence
  Description of Artificial Sequence: Synthetic peptide
  Seed: EWLKTRPILSPLTKG
EYLKNRVILAPLTKG

SEQ ID NO: 210938 - protein, 15 aa, Artificial Sequence
  Description of Artificial Sequence: Synthetic peptide
  Seed: EWLKTRPILSPLTKG
EYLKPRAILIPLTKG

SEQ ID NO: 210939 - protein, 15 aa, Artificial Sequence
  Description of Artificial Sequence: Synthetic peptide
  Seed: EWLKTRPILSPLTKG
EYLKPRAILLPLTKG

SEQ ID NO: 210940 - protein, 15 aa, Artificial Sequence
  Description of Artificial Sequence: Synthetic peptide
  Seed: EWLKTRPILSPLTKG
EYLKPRAILVPLTKG

SEQ ID NO: 210941 - protein, 15 aa, Artificial Sequence
  Description of Artificial Sequence: Synthetic peptide
  Seed: EWLKTRPILSPLTKG
EYLKQRAILAPLTKG

SEQ ID NO: 210942 - protein, 15 aa, Artificial Sequence
  Description of Artificial Sequence: Synthetic peptide
  Seed: EWLKTRPILSPLTKG
EYLKQRAILCPLTKG

SEQ ID NO: 210943 - protein, 15 aa, Artificial Sequence
  Description of Artificial Sequence: Synthetic peptide
  Seed: EWLKTRPILSPLTKG
EYLKQRAILFPLTKG

SEQ ID NO: 210944 - protein, 15 aa, Artificial Sequence
  Description of Artificial Sequence: Synthetic peptide
  Seed: EWLKTRPILSPLTKG
EYLKQRAILGPLTKG

SEQ ID NO: 210945 - protein, 15 aa, Artificial Sequence
  Description of Artificial Sequence: Synthetic peptide
  Seed: EWLKTRPILSPLTKG
EYLKQRAILIPLTKG

SEQ ID NO: 210946 - protein, 15 aa, Artificial Sequence
  Description of Artificial Sequence: Synthetic peptide
  Seed: EWLKTRPILSPLTKG
EYLKQRAILLPLTKG

SEQ ID NO: 210947 - protein, 15 aa, Artificial Sequence
  Description of Artificial Sequence: Synthetic peptide
  Seed: EWLKTRPILSPLTKG
EYLKQRAILMPLTKG

SEQ ID NO: 210948 - protein, 15 aa, Artificial Sequence
  Description of Artificial Sequence: Synthetic peptide
  Seed: EWLKTRPILSPLTKG
EYLKQRAILNPLTKG

SEQ ID NO: 210949 - protein, 15 aa, Artificial Sequence
  Description of Artificial Sequence: Synthetic peptide
  Seed: EWLKTRPILSPLTKG
EYLKQRAILPPLTKG

SEQ ID NO: 210950 - protein, 15 aa, Artificial Sequence
  Description of Artificial Sequence: Synthetic peptide
  Seed: EWLKTRPILSPLTKG
EYLKQRAILSPLTKG

SEQ ID NO: 210951 - protein, 15 aa, Artificial Sequence
  Description of Artificial Sequence: Synthetic peptide
  Seed: EWLKTRPILSPLTKG
EYLKQRAILTPLTKG

SEQ ID NO: 210952 - protein, 15 aa, Artificial Sequence
  Description of Artificial Sequence: Synthetic peptide
  Seed: EWLKTRPILSPLTKG
EYLKQRAILVPLTKG

SEQ ID NO: 210953 - protein, 15 aa, Artificial Sequence
  Description of Artificial Sequence: Synthetic peptide
  Seed: EWLKTRPILSPLTKG
EYLKQRGILAPLTKG

SEQ ID NO: 210954 - protein, 15 aa, Artificial Sequence
  Description of Artificial Sequence: Synthetic peptide
  Seed: EWLKTRPILSPLTKG
EYLKQRGILCPLTKG

SEQ ID NO: 210955 - protein, 15 aa, Artificial Sequence
  Description of Artificial Sequence: Synthetic peptide
  Seed: EWLKTRPILSPLTKG
EYLKQRGILGPLTKG

SEQ ID NO: 210956 - protein, 15 aa, Artificial Sequence
  Description of Artificial Sequence: Synthetic peptide
  Seed: EWLKTRPILSPLTKG
EYLKQRGILIPLTKG

SEQ ID NO: 210957 - protein, 15 aa, Artificial Sequence
  Description of Artificial Sequence: Synthetic peptide
  Seed: EWLKTRPILSPLTKG
EYLKQRGILLPLTKG

SEQ ID NO: 210958 - protein, 15 aa, Artificial Sequence
  Description of Artificial Sequence: Synthetic peptide
  Seed: EWLKTRPILSPLTKG
EYLKQRGILMPLTKG

SEQ ID NO: 210959 - protein, 15 aa, Artificial Sequence
  Description of Artificial Sequence: Synthetic peptide
  Seed: EWLKTRPILSPLTKG
EYLKQRGILNPLTKG

SEQ ID NO: 210960 - protein, 15 aa, Artificial Sequence
  Description of Artificial Sequence: Synthetic peptide
  Seed: EWLKTRPILSPLTKG
EYLKQRGILSPLTKG

SEQ ID NO: 210961 - protein, 15 aa, Artificial Sequence
  Description of Artificial Sequence: Synthetic peptide
  Seed: EWLKTRPILSPLTKG
EYLKQRGILTPLTKG

SEQ ID NO: 210962 - protein, 15 aa, Artificial Sequence
  Description of Artificial Sequence: Synthetic peptide
  Seed: EWLKTRPILSPLTKG
EYLKQRGILVPLTKG

SEQ ID NO: 210963 - protein, 15 aa, Artificial Sequence
  Description of Artificial Sequence: Synthetic peptide
  Seed: EWLKTRPILSPLTKG
EYLKQRNILAPLTKG

SEQ ID NO: 210964 - protein, 15 aa, Artificial Sequence
  Description of Artificial Sequence: Synthetic peptide
  Seed: EWLKTRPILSPLTKG
EYLKQRNILIPLTKG

SEQ ID NO: 210965 - protein, 15 aa, Artificial Sequence
  Description of Artificial Sequence: Synthetic peptide
  Seed: EWLKTRPILSPLTKG
EYLKQRNILLPLTKG

SEQ ID NO: 210966 - protein, 15 aa, Artificial Sequence
  Description of Artificial Sequence: Synthetic peptide
  Seed: EWLKTRPILSPLTKG
EYLKQRNILSPLTKG

SEQ ID NO: 210967 - protein, 15 aa, Artificial Sequence
  Description of Artificial Sequence: Synthetic peptide
  Seed: EWLKTRPILSPLTKG
EYLKQRNILVPLTKG

SEQ ID NO: 210968 - protein, 15 aa, Artificial Sequence
  Description of Artificial Sequence: Synthetic peptide
  Seed: EWLKTRPILSPLTKG
EYLKQRPILAPLTKG

SEQ ID NO: 210969 - protein, 15 aa, Artificial Sequence
  Description of Artificial Sequence: Synthetic peptide
  Seed: EWLKTRPILSPLTKG
EYLKQRPILGPLTKG

SEQ ID NO: 210970 - protein, 15 aa, Artificial Sequence
  Description of Artificial Sequence: Synthetic peptide
  Seed: EWLKTRPILSPLTKG
EYLKQRPILIPLTKG

SEQ ID NO: 210971 - protein, 15 aa, Artificial Sequence
  Description of Artificial Sequence: Synthetic peptide
  Seed: EWLKTRPILSPLTKG
EYLKQRPILLPLTKG

SEQ ID NO: 210972 - protein, 15 aa, Artificial Sequence
  Description of Artificial Sequence: Synthetic peptide
  Seed: EWLKTRPILSPLTKG
EYLKQRPILMPLTKG

SEQ ID NO: 210973 - protein, 15 aa, Artificial Sequence
  Description of Artificial Sequence: Synthetic peptide
  Seed: EWLKTRPILSPLTKG
EYLKQRPILNPLTKG

SEQ ID NO: 210974 - protein, 15 aa, Artificial Sequence
  Description of Artificial Sequence: Synthetic peptide
  Seed: EWLKTRPILSPLTKG
EYLKQRPILSPLTKG

SEQ ID NO: 210975 - protein, 15 aa, Artificial Sequence
  Description of Artificial Sequence: Synthetic peptide
  Seed: EWLKTRPILSPLTKG
EYLKQRPILTPLTKG

SEQ ID NO: 210976 - protein, 15 aa, Artificial Sequence
  Description of Artificial Sequence: Synthetic peptide
  Seed: EWLKTRPILSPLTKG
EYLKQRPILVPLTKG

SEQ ID NO: 210977 - protein, 15 aa, Artificial Sequence
  Description of Artificial Sequence: Synthetic peptide
  Seed: EWLKTRPILSPLTKG
EYLKQRSILAPLTKG

SEQ ID NO: 210978 - protein, 15 aa, Artificial Sequence
  Description of Artificial Sequence: Synthetic peptide
  Seed: EWLKTRPILSPLTKG
EYLKQRSILCPLTKG

SEQ ID NO: 210979 - protein, 15 aa, Artificial Sequence
  Description of Artificial Sequence: Synthetic peptide
  Seed: EWLKTRPILSPLTKG
EYLKQRSILGPLTKG

SEQ ID NO: 210980 - protein, 15 aa, Artificial Sequence
  Description of Artificial Sequence: Synthetic peptide
  Seed: EWLKTRPILSPLTKG
EYLKQRSILIPLTKG

SEQ ID NO: 210981 - protein, 15 aa, Artificial Sequence
  Description of Artificial Sequence: Synthetic peptide
  Seed: EWLKTRPILSPLTKG
EYLKQRSILLPLTKG

SEQ ID NO: 210982 - protein, 15 aa, Artificial Sequence
  Description of Artificial Sequence: Synthetic peptide
  Seed: EWLKTRPILSPLTKG
EYLKQRSILMPLTKG

SEQ ID NO: 210983 - protein, 15 aa, Artificial Sequence
  Description of Artificial Sequence: Synthetic peptide
  Seed: EWLKTRPILSPLTKG
EYLKQRSILNPLTKG

SEQ ID NO: 210984 - protein, 15 aa, Artificial Sequence
  Description of Artificial Sequence: Synthetic peptide
  Seed: EWLKTRPILSPLTKG
EYLKQRSILSPLTKG

SEQ ID NO: 210985 - protein, 15 aa, Artificial Sequence
  Description of Artificial Sequence: Synthetic peptide
  Seed: EWLKTRPILSPLTKG
EYLKQRSILTPLTKG

SEQ ID NO: 210986 - protein, 15 aa, Artificial Sequence
  Description of Artificial Sequence: Synthetic peptide
  Seed: EWLKTRPILSPLTKG
EYLKQRSILVPLTKG

SEQ ID NO: 210987 - protein, 15 aa, Artificial Sequence
  Description of Artificial Sequence: Synthetic peptide
  Seed: EWLKTRPILSPLTKG
EYLKQRTILAPLTKG

SEQ ID NO: 210988 - protein, 15 aa, Artificial Sequence
  Description of Artificial Sequence: Synthetic peptide
  Seed: EWLKTRPILSPLTKG
EYLKQRTILGPLTKG

SEQ ID NO: 210989 - protein, 15 aa, Artificial Sequence
  Description of Artificial Sequence: Synthetic peptide
  Seed: EWLKTRPILSPLTKG
EYLKQRTILIPLTKG

SEQ ID NO: 210990 - protein, 15 aa, Artificial Sequence
  Description of Artificial Sequence: Synthetic peptide
  Seed: EWLKTRPILSPLTKG
EYLKQRTILLPLTKG

SEQ ID NO: 210991 - protein, 15 aa, Artificial Sequence
  Description of Artificial Sequence: Synthetic peptide
  Seed: EWLKTRPILSPLTKG
EYLKQRTILMPLTKG

SEQ ID NO: 210992 - protein, 15 aa, Artificial Sequence
  Description of Artificial Sequence: Synthetic peptide
  Seed: EWLKTRPILSPLTKG
EYLKQRTILNPLTKG

SEQ ID NO: 210993 - protein, 15 aa, Artificial Sequence
  Description of Artificial Sequence: Synthetic peptide
  Seed: EWLKTRPILSPLTKG
EYLKQRTILSPLTKG

SEQ ID NO: 210994 - protein, 15 aa, Artificial Sequence
  Description of Artificial Sequence: Synthetic peptide
  Seed: EWLKTRPILSPLTKG
EYLKQRTILTPLTKG

SEQ ID NO: 210995 - protein, 15 aa, Artificial Sequence
  Description of Artificial Sequence: Synthetic peptide
  Seed: EWLKTRPILSPLTKG
EYLKQRTILVPLTKG

SEQ ID NO: 210996 - protein, 15 aa, Artificial Sequence
  Description of Artificial Sequence: Synthetic peptide
  Seed: EWLKTRPILSPLTKG
EYLKQRVILAPLTKG

SEQ ID NO: 210997 - protein, 15 aa, Artificial Sequence
  Description of Artificial Sequence: Synthetic peptide
  Seed: EWLKTRPILSPLTKG
EYLKQRVILIPLTKG

SEQ ID NO: 210998 - protein, 15 aa, Artificial Sequence
  Description of Artificial Sequence: Synthetic peptide
  Seed: EWLKTRPILSPLTKG
EYLKQRVILLPLTKG

SEQ ID NO: 210999 - protein, 15 aa, Artificial Sequence
  Description of Artificial Sequence: Synthetic peptide
  Seed: EWLKTRPILSPLTKG
EYLKQRVILNPLTKG

SEQ ID NO: 211000 - protein, 15 aa, Artificial Sequence
  Description of Artificial Sequence: Synthetic peptide
  Seed: EWLKTRPILSPLTKG
EYLKQRVILSPLTKG

SEQ ID NO: 211001 - protein, 15 aa, Artificial Sequence
  Description of Artificial Sequence: Synthetic peptide
  Seed: EWLKTRPILSPLTKG
EYLKQRVILVPLTKG

SEQ ID NO: 211002 - protein, 15 aa, Artificial Sequence
  Description of Artificial Sequence: Synthetic peptide
  Seed: EWLKTRPILSPLTKG
EYLKRRAILLPLTKG

SEQ ID NO: 211003 - protein, 15 aa, Artificial Sequence
  Description of Artificial Sequence: Synthetic peptide
  Seed: EWLKTRPILSPLTKG
EYLKRRAILVPLTKG

SEQ ID NO: 211004 - protein, 15 aa, Artificial Sequence
  Description of Artificial Sequence: Synthetic peptide
  Seed: EWLKTRPILSPLTKG
EYLKSRAILAPLTKG

SEQ ID NO: 211005 - protein, 15 aa, Artificial Sequence
  Description of Artificial Sequence: Synthetic peptide
  Seed: EWLKTRPILSPLTKG
EYLKSRAILCPLTKG

SEQ ID NO: 211006 - protein, 15 aa, Artificial Sequence
  Description of Artificial Sequence: Synthetic peptide
  Seed: EWLKTRPILSPLTKG
EYLKSRAILFPLTKG

SEQ ID NO: 211007 - protein, 15 aa, Artificial Sequence
  Description of Artificial Sequence: Synthetic peptide
  Seed: EWLKTRPILSPLTKG
EYLKSRAILGPLTKG

SEQ ID NO: 211008 - protein, 15 aa, Artificial Sequence
  Description of Artificial Sequence: Synthetic peptide
  Seed: EWLKTRPILSPLTKG
EYLKSRAILIPLTKG

SEQ ID NO: 211009 - protein, 15 aa, Artificial Sequence
  Description of Artificial Sequence: Synthetic peptide
  Seed: EWLKTRPILSPLTKG
EYLKSRAILLPLTKG

SEQ ID NO: 211010 - protein, 15 aa, Artificial Sequence
  Description of Artificial Sequence: Synthetic peptide
  Seed: EWLKTRPILSPLTKG
EYLKSRAILMPLTKG

SEQ ID NO: 211011 - protein, 15 aa, Artificial Sequence
  Description of Artificial Sequence: Synthetic peptide
  Seed: EWLKTRPILSPLTKG
EYLKSRAILNPLTKG

SEQ ID NO: 211012 - protein, 15 aa, Artificial Sequence
  Description of Artificial Sequence: Synthetic peptide
  Seed: EWLKTRPILSPLTKG
EYLKSRAILPPLTKG

SEQ ID NO: 211013 - protein, 15 aa, Artificial Sequence
  Description of Artificial Sequence: Synthetic peptide
  Seed: EWLKTRPILSPLTKG
EYLKSRAILSPLTKG

SEQ ID NO: 211014 - protein, 15 aa, Artificial Sequence
  Description of Artificial Sequence: Synthetic peptide
  Seed: EWLKTRPILSPLTKG
EYLKSRAILTPLTKG

SEQ ID NO: 211015 - protein, 15 aa, Artificial Sequence
  Description of Artificial Sequence: Synthetic peptide
  Seed: EWLKTRPILSPLTKG
EYLKSRAILVPLTKG

SEQ ID NO: 211016 - protein, 15 aa, Artificial Sequence
  Description of Artificial Sequence: Synthetic peptide
  Seed: EWLKTRPILSPLTKG
EYLKSRAILYPLTKG

SEQ ID NO: 211017 - protein, 15 aa, Artificial Sequence
  Description of Artificial Sequence: Synthetic peptide
  Seed: EWLKTRPILSPLTKG
EYLKSRGILAPLTKG

SEQ ID NO: 211018 - protein, 15 aa, Artificial Sequence
  Description of Artificial Sequence: Synthetic peptide
  Seed: EWLKTRPILSPLTKG
EYLKSRGILFPLTKG

SEQ ID NO: 211019 - protein, 15 aa, Artificial Sequence
  Description of Artificial Sequence: Synthetic peptide
  Seed: EWLKTRPILSPLTKG
EYLKSRGILGPLTKG

SEQ ID NO: 211020 - protein, 15 aa, Artificial Sequence
  Description of Artificial Sequence: Synthetic peptide
  Seed: EWLKTRPILSPLTKG
EYLKSRGILIPLTKG

SEQ ID NO: 211021 - protein, 15 aa, Artificial Sequence
  Description of Artificial Sequence: Synthetic peptide
  Seed: EWLKTRPILSPLTKG
EYLKSRGILLPLTKG

SEQ ID NO: 211022 - protein, 15 aa, Artificial Sequence
  Description of Artificial Sequence: Synthetic peptide
  Seed: EWLKTRPILSPLTKG
EYLKSRGILMPLTKG

SEQ ID NO: 211023 - protein, 15 aa, Artificial Sequence
  Description of Artificial Sequence: Synthetic peptide
  Seed: EWLKTRPILSPLTKG
EYLKSRGILNPLTKG

SEQ ID NO: 211024 - protein, 15 aa, Artificial Sequence
  Description of Artificial Sequence: Synthetic peptide
  Seed: EWLKTRPILSPLTKG
EYLKSRGILSPLTKG

SEQ ID NO: 211025 - protein, 15 aa, Artificial Sequence
  Description of Artificial Sequence: Synthetic peptide
  Seed: EWLKTRPILSPLTKG
EYLKSRGILTPLTKG

SEQ ID NO: 211026 - protein, 15 aa, Artificial Sequence
  Description of Artificial Sequence: Synthetic peptide
  Seed: EWLKTRPILSPLTKG
EYLKSRGILVPLTKG

SEQ ID NO: 211027 - protein, 15 aa, Artificial Sequence
  Description of Artificial Sequence: Synthetic peptide
  Seed: EWLKTRPILSPLTKG
EYLKSRKILAPLTKG

SEQ ID NO: 211028 - protein, 15 aa, Artificial Sequence
  Description of Artificial Sequence: Synthetic peptide
  Seed: EWLKTRPILSPLTKG
EYLKSRKILGPLTKG

SEQ ID NO: 211029 - protein, 15 aa, Artificial Sequence
  Description of Artificial Sequence: Synthetic peptide
  Seed: EWLKTRPILSPLTKG
EYLKSRKILSPLTKG

SEQ ID NO: 211030 - protein, 15 aa, Artificial Sequence
  Description of Artificial Sequence: Synthetic peptide
  Seed: EWLKTRPILSPLTKG
EYLKSRNILAPLTKG

SEQ ID NO: 211031 - protein, 15 aa, Artificial Sequence
  Description of Artificial Sequence: Synthetic peptide
  Seed: EWLKTRPILSPLTKG
EYLKSRNILIPLTKG

SEQ ID NO: 211032 - protein, 15 aa, Artificial Sequence
  Description of Artificial Sequence: Synthetic peptide
  Seed: EWLKTRPILSPLTKG
EYLKSRNILLPLTKG

SEQ ID NO: 211033 - protein, 15 aa, Artificial Sequence
  Description of Artificial Sequence: Synthetic peptide
  Seed: EWLKTRPILSPLTKG
EYLKSRNILVPLTKG

SEQ ID NO: 211034 - protein, 15 aa, Artificial Sequence
  Description of Artificial Sequence: Synthetic peptide
  Seed: EWLKTRPILSPLTKG
EYLKSRPILAPLTKG

SEQ ID NO: 211035 - protein, 15 aa, Artificial Sequence
  Description of Artificial Sequence: Synthetic peptide
  Seed: EWLKTRPILSPLTKG
EYLKSRPILFPLTKG

SEQ ID NO: 211036 - protein, 15 aa, Artificial Sequence
  Description of Artificial Sequence: Synthetic peptide
  Seed: EWLKTRPILSPLTKG
EYLKSRPILGPLTKG

SEQ ID NO: 211037 - protein, 15 aa, Artificial Sequence
  Description of Artificial Sequence: Synthetic peptide
  Seed: EWLKTRPILSPLTKG
EYLKSRPILIPLTKG

SEQ ID NO: 211038 - protein, 15 aa, Artificial Sequence
  Description of Artificial Sequence: Synthetic peptide
  Seed: EWLKTRPILSPLTKG
EYLKSRPILLPLTKG

SEQ ID NO: 211039 - protein, 15 aa, Artificial Sequence
  Description of Artificial Sequence: Synthetic peptide
  Seed: EWLKTRPILSPLTKG
EYLKSRPILMPLTKG

SEQ ID NO: 211040 - protein, 15 aa, Artificial Sequence
  Description of Artificial Sequence: Synthetic peptide
  Seed: EWLKTRPILSPLTKG
EYLKSRPILNPLTKG

SEQ ID NO: 211041 - protein, 15 aa, Artificial Sequence
  Description of Artificial Sequence: Synthetic peptide
  Seed: EWLKTRPILSPLTKG
EYLKSRPILSPLTKG

SEQ ID NO: 211042 - protein, 15 aa, Artificial Sequence
  Description of Artificial Sequence: Synthetic peptide
  Seed: EWLKTRPILSPLTKG
EYLKSRPILTPLTKG

SEQ ID NO: 211043 - protein, 15 aa, Artificial Sequence
  Description of Artificial Sequence: Synthetic peptide
  Seed: EWLKTRPILSPLTKG
EYLKSRPILVPLTKG

SEQ ID NO: 211044 - protein, 15 aa, Artificial Sequence
  Description of Artificial Sequence: Synthetic peptide
  Seed: EWLKTRPILSPLTKG
EYLKSRRILAPLTKG

SEQ ID NO: 211045 - protein, 15 aa, Artificial Sequence
  Description of Artificial Sequence: Synthetic peptide
  Seed: EWLKTRPILSPLTKG
EYLKSRRILGPLTKG

SEQ ID NO: 211046 - protein, 15 aa, Artificial Sequence
  Description of Artificial Sequence: Synthetic peptide
  Seed: EWLKTRPILSPLTKG
EYLKSRRILSPLTKG

SEQ ID NO: 211047 - protein, 15 aa, Artificial Sequence
  Description of Artificial Sequence: Synthetic peptide
  Seed: EWLKTRPILSPLTKG
EYLKSRSILAPLTKG

SEQ ID NO: 211048 - protein, 15 aa, Artificial Sequence
  Description of Artificial Sequence: Synthetic peptide
  Seed: EWLKTRPILSPLTKG
EYLKSRSILFPLTKG

SEQ ID NO: 211049 - protein, 15 aa, Artificial Sequence
  Description of Artificial Sequence: Synthetic peptide
  Seed: EWLKTRPILSPLTKG
EYLKSRSILGPLTKG

SEQ ID NO: 211050 - protein, 15 aa, Artificial Sequence
  Description of Artificial Sequence: Synthetic peptide
  Seed: EWLKTRPILSPLTKG
EYLKSRSILIPLTKG

SEQ ID NO: 211051 - protein, 15 aa, Artificial Sequence
  Description of Artificial Sequence: Synthetic peptide
  Seed: EWLKTRPILSPLTKG
EYLKSRSILLPLTKG

SEQ ID NO: 211052 - protein, 15 aa, Artificial Sequence
  Description of Artificial Sequence: Synthetic peptide
  Seed: EWLKTRPILSPLTKG
EYLKSRSILMPLTKG

SEQ ID NO: 211053 - protein, 15 aa, Artificial Sequence
  Description of Artificial Sequence: Synthetic peptide
  Seed: EWLKTRPILSPLTKG
EYLKSRSILNPLTKG

SEQ ID NO: 211054 - protein, 15 aa, Artificial Sequence
  Description of Artificial Sequence: Synthetic peptide
  Seed: EWLKTRPILSPLTKG
EYLKSRSILSPLTKG

SEQ ID NO: 211055 - protein, 15 aa, Artificial Sequence
  Description of Artificial Sequence: Synthetic peptide
  Seed: EWLKTRPILSPLTKG
EYLKSRSILTPLTKG

SEQ ID NO: 211056 - protein, 15 aa, Artificial Sequence
  Description of Artificial Sequence: Synthetic peptide
  Seed: EWLKTRPILSPLTKG
EYLKSRSILVPLTKG

SEQ ID NO: 211057 - protein, 15 aa, Artificial Sequence
  Description of Artificial Sequence: Synthetic peptide
  Seed: EWLKTRPILSPLTKG
EYLKSRTILAPLTKG

SEQ ID NO: 211058 - protein, 15 aa, Artificial Sequence
  Description of Artificial Sequence: Synthetic peptide
  Seed: EWLKTRPILSPLTKG
EYLKSRTILIPLTKG

SEQ ID NO: 211059 - protein, 15 aa, Artificial Sequence
  Description of Artificial Sequence: Synthetic peptide
  Seed: EWLKTRPILSPLTKG
EYLKSRTILLPLTKG

SEQ ID NO: 211060 - protein, 15 aa, Artificial Sequence
  Description of Artificial Sequence: Synthetic peptide
  Seed: EWLKTRPILSPLTKG
EYLKSRTILMPLTKG

SEQ ID NO: 211061 - protein, 15 aa, Artificial Sequence
  Description of Artificial Sequence: Synthetic peptide
  Seed: EWLKTRPILSPLTKG
EYLKSRTILNPLTKG

SEQ ID NO: 211062 - protein, 15 aa, Artificial Sequence
  Description of Artificial Sequence: Synthetic peptide
  Seed: EWLKTRPILSPLTKG
EYLKSRTILSPLTKG

SEQ ID NO: 211063 - protein, 15 aa, Artificial Sequence
  Description of Artificial Sequence: Synthetic peptide
  Seed: EWLKTRPILSPLTKG
EYLKSRTILTPLTKG

SEQ ID NO: 211064 - protein, 15 aa, Artificial Sequence
  Description of Artificial Sequence: Synthetic peptide
  Seed: EWLKTRPILSPLTKG
EYLKSRTILVPLTKG

SEQ ID NO: 211065 - protein, 15 aa, Artificial Sequence
  Description of Artificial Sequence: Synthetic peptide
  Seed: EWLKTRPILSPLTKG
EYLKSRVILAPLTKG

SEQ ID NO: 211066 - protein, 15 aa, Artificial Sequence
  Description of Artificial Sequence: Synthetic peptide
  Seed: EWLKTRPILSPLTKG
EYLKSRVILIPLTKG

SEQ ID NO: 211067 - protein, 15 aa, Artificial Sequence
  Description of Artificial Sequence: Synthetic peptide
  Seed: EWLKTRPILSPLTKG
EYLKSRVILLPLTKG

SEQ ID NO: 211068 - protein, 15 aa, Artificial Sequence
  Description of Artificial Sequence: Synthetic peptide
  Seed: EWLKTRPILSPLTKG
EYLKSRVILNPLTKG

SEQ ID NO: 211069 - protein, 15 aa, Artificial Sequence
  Description of Artificial Sequence: Synthetic peptide
  Seed: EWLKTRPILSPLTKG
EYLKSRVILSPLTKG

SEQ ID NO: 211070 - protein, 15 aa, Artificial Sequence
  Description of Artificial Sequence: Synthetic peptide
  Seed: EWLKTRPILSPLTKG
EYLKSRVILVPLTKG

SEQ ID NO: 211071 - protein, 15 aa, Artificial Sequence
  Description of Artificial Sequence: Synthetic peptide
  Seed: EWLKTRPILSPLTKG
EYLKTRAILAPLTKG

SEQ ID NO: 211072 - protein, 15 aa, Artificial Sequence
  Description of Artificial Sequence: Synthetic peptide
  Seed: EWLKTRPILSPLTKG
EYLKTRAILCPLTKG

SEQ ID NO: 211073 - protein, 15 aa, Artificial Sequence
  Description of Artificial Sequence: Synthetic peptide
  Seed: EWLKTRPILSPLTKG
EYLKTRAILFPLTKG

SEQ ID NO: 211074 - protein, 15 aa, Artificial Sequence
  Description of Artificial Sequence: Synthetic peptide
  Seed: EWLKTRPILSPLTKG
EYLKTRAILGPLTKG

SEQ ID NO: 211075 - protein, 15 aa, Artificial Sequence
  Description of Artificial Sequence: Synthetic peptide
  Seed: EWLKTRPILSPLTKG
EYLKTRAILIPLTKG

SEQ ID NO: 211076 - protein, 15 aa, Artificial Sequence
  Description of Artificial Sequence: Synthetic peptide
  Seed: EWLKTRPILSPLTKG
EYLKTRAILLPLTKG

SEQ ID NO: 211077 - protein, 15 aa, Artificial Sequence
  Description of Artificial Sequence: Synthetic peptide
  Seed: EWLKTRPILSPLTKG
EYLKTRAILMPLTKG

SEQ ID NO: 211078 - protein, 15 aa, Artificial Sequence
  Description of Artificial Sequence: Synthetic peptide
  Seed: EWLKTRPILSPLTKG
EYLKTRAILNPLTKG

SEQ ID NO: 211079 - protein, 15 aa, Artificial Sequence
  Description of Artificial Sequence: Synthetic peptide
  Seed: EWLKTRPILSPLTKG
EYLKTRAILSPLTKG

SEQ ID NO: 211080 - protein, 15 aa, Artificial Sequence
  Description of Artificial Sequence: Synthetic peptide
  Seed: EWLKTRPILSPLTKG
EYLKTRAILTPLTKG

SEQ ID NO: 211081 - protein, 15 aa, Artificial Sequence
  Description of Artificial Sequence: Synthetic peptide
  Seed: EWLKTRPILSPLTKG
EYLKTRAILVPLTKG

SEQ ID NO: 211082 - protein, 15 aa, Artificial Sequence
  Description of Artificial Sequence: Synthetic peptide
  Seed: EWLKTRPILSPLTKG
EYLKTRAILYPLTKG

SEQ ID NO: 211083 - protein, 15 aa, Artificial Sequence
  Description of Artificial Sequence: Synthetic peptide
  Seed: EWLKTRPILSPLTKG
EYLKTRGILAPLTKG

SEQ ID NO: 211084 - protein, 15 aa, Artificial Sequence
  Description of Artificial Sequence: Synthetic peptide
  Seed: EWLKTRPILSPLTKG
EYLKTRGILFPLTKG

SEQ ID NO: 211085 - protein, 15 aa, Artificial Sequence
  Description of Artificial Sequence: Synthetic peptide
  Seed: EWLKTRPILSPLTKG
EYLKTRGILGPLTKG

SEQ ID NO: 211086 - protein, 15 aa, Artificial Sequence
  Description of Artificial Sequence: Synthetic peptide
  Seed: EWLKTRPILSPLTKG
EYLKTRGILIPLTKG

SEQ ID NO: 211087 - protein, 15 aa, Artificial Sequence
  Description of Artificial Sequence: Synthetic peptide
  Seed: EWLKTRPILSPLTKG
EYLKTRGILLPLTKG

SEQ ID NO: 211088 - protein, 15 aa, Artificial Sequence
  Description of Artificial Sequence: Synthetic peptide
  Seed: EWLKTRPILSPLTKG
EYLKTRGILMPLTKG

SEQ ID NO: 211089 - protein, 15 aa, Artificial Sequence
  Description of Artificial Sequence: Synthetic peptide
  Seed: EWLKTRPILSPLTKG
EYLKTRGILSPLTKG

SEQ ID NO: 211090 - protein, 15 aa, Artificial Sequence
  Description of Artificial Sequence: Synthetic peptide
  Seed: EWLKTRPILSPLTKG
EYLKTRGILTPLTKG

SEQ ID NO: 211091 - protein, 15 aa, Artificial Sequence
  Description of Artificial Sequence: Synthetic peptide
  Seed: EWLKTRPILSPLTKG
EYLKTRGILVPLTKG

SEQ ID NO: 211092 - protein, 15 aa, Artificial Sequence
  Description of Artificial Sequence: Synthetic peptide
  Seed: EWLKTRPILSPLTKG
EYLKTRKILAPLTKG

SEQ ID NO: 211093 - protein, 15 aa, Artificial Sequence
  Description of Artificial Sequence: Synthetic peptide
  Seed: EWLKTRPILSPLTKG
EYLKTRKILGPLTKG

SEQ ID NO: 211094 - protein, 15 aa, Artificial Sequence
  Description of Artificial Sequence: Synthetic peptide
  Seed: EWLKTRPILSPLTKG
EYLKTRKILSPLTKG

SEQ ID NO: 211095 - protein, 15 aa, Artificial Sequence
  Description of Artificial Sequence: Synthetic peptide
  Seed: EWLKTRPILSPLTKG
EYLKTRNILAPLTKG

SEQ ID NO: 211096 - protein, 15 aa, Artificial Sequence
  Description of Artificial Sequence: Synthetic peptide
  Seed: EWLKTRPILSPLTKG
EYLKTRNILIPLTKG

SEQ ID NO: 211097 - protein, 15 aa, Artificial Sequence
  Description of Artificial Sequence: Synthetic peptide
  Seed: EWLKTRPILSPLTKG
EYLKTRNILLPLTKG

SEQ ID NO: 211098 - protein, 15 aa, Artificial Sequence
  Description of Artificial Sequence: Synthetic peptide
  Seed: EWLKTRPILSPLTKG
EYLKTRNILVPLTKG

SEQ ID NO: 211099 - protein, 15 aa, Artificial Sequence
  Description of Artificial Sequence: Synthetic peptide
  Seed: EWLKTRPILSPLTKG
EYLKTRPILAPLTKG

SEQ ID NO: 211100 - protein, 15 aa, Artificial Sequence
  Description of Artificial Sequence: Synthetic peptide
  Seed: EWLKTRPILSPLTKG
EYLKTRPILFPLTKG

SEQ ID NO: 211101 - protein, 15 aa, Artificial Sequence
  Description of Artificial Sequence: Synthetic peptide
  Seed: EWLKTRPILSPLTKG
EYLKTRPILGPLTKG

SEQ ID NO: 211102 - protein, 15 aa, Artificial Sequence
  Description of Artificial Sequence: Synthetic peptide
  Seed: EWLKTRPILSPLTKG
EYLKTRPILIPLTKG

SEQ ID NO: 211103 - protein, 15 aa, Artificial Sequence
  Description of Artificial Sequence: Synthetic peptide
  Seed: EWLKTRPILSPLTKG
EYLKTRPILLPLTKG

SEQ ID NO: 211104 - protein, 15 aa, Artificial Sequence
  Description of Artificial Sequence: Synthetic peptide
  Seed: EWLKTRPILSPLTKG
EYLKTRPILMPLTKG

SEQ ID NO: 211105 - protein, 15 aa, Artificial Sequence
  Description of Artificial Sequence: Synthetic peptide
  Seed: EWLKTRPILSPLTKG
EYLKTRPILNPLTKG

SEQ ID NO: 211106 - protein, 15 aa, Artificial Sequence
  Description of Artificial Sequence: Synthetic peptide
  Seed: EWLKTRPILSPLTKG
EYLKTRPILSPLTKG

SEQ ID NO: 211107 - protein, 15 aa, Artificial Sequence
  Description of Artificial Sequence: Synthetic peptide
  Seed: EWLKTRPILSPLTKG
EYLKTRPILTPLTKG

SEQ ID NO: 211108 - protein, 15 aa, Artificial Sequence
  Description of Artificial Sequence: Synthetic peptide
  Seed: EWLKTRPILSPLTKG
EYLKTRPILVPLTKG

SEQ ID NO: 211109 - protein, 15 aa, Artificial Sequence
  Description of Artificial Sequence: Synthetic peptide
  Seed: EWLKTRPILSPLTKG
EYLKTRRILAPLTKG

SEQ ID NO: 211110 - protein, 15 aa, Artificial Sequence
  Description of Artificial Sequence: Synthetic peptide
  Seed: EWLKTRPILSPLTKG
EYLKTRRILGPLTKG

SEQ ID NO: 211111 - protein, 15 aa, Artificial Sequence
  Description of Artificial Sequence: Synthetic peptide
  Seed: EWLKTRPILSPLTKG
EYLKTRRILSPLTKG

SEQ ID NO: 211112 - protein, 15 aa, Artificial Sequence
  Description of Artificial Sequence: Synthetic peptide
  Seed: EWLKTRPILSPLTKG
EYLKTRSILAPLTKG

SEQ ID NO: 211113 - protein, 15 aa, Artificial Sequence
  Description of Artificial Sequence: Synthetic peptide
  Seed: EWLKTRPILSPLTKG
EYLKTRSILFPLTKG

SEQ ID NO: 211114 - protein, 15 aa, Artificial Sequence
  Description of Artificial Sequence: Synthetic peptide
  Seed: EWLKTRPILSPLTKG
EYLKTRSILGPLTKG

SEQ ID NO: 211115 - protein, 15 aa, Artificial Sequence
  Description of Artificial Sequence: Synthetic peptide
  Seed: EWLKTRPILSPLTKG
EYLKTRSILIPLTKG

SEQ ID NO: 211116 - protein, 15 aa, Artificial Sequence
  Description of Artificial Sequence: Synthetic peptide
  Seed: EWLKTRPILSPLTKG
EYLKTRSILLPLTKG

SEQ ID NO: 211117 - protein, 15 aa, Artificial Sequence
  Description of Artificial Sequence: Synthetic peptide
  Seed: EWLKTRPILSPLTKG
EYLKTRSILMPLTKG

SEQ ID NO: 211118 - protein, 15 aa, Artificial Sequence
  Description of Artificial Sequence: Synthetic peptide
  Seed: EWLKTRPILSPLTKG
EYLKTRSILSPLTKG

SEQ ID NO: 211119 - protein, 15 aa, Artificial Sequence
  Description of Artificial Sequence: Synthetic peptide
  Seed: EWLKTRPILSPLTKG
EYLKTRSILTPLTKG

SEQ ID NO: 211120 - protein, 15 aa, Artificial Sequence
  Description of Artificial Sequence: Synthetic peptide
  Seed: EWLKTRPILSPLTKG
EYLKTRSILVPLTKG

SEQ ID NO: 211121 - protein, 15 aa, Artificial Sequence
  Description of Artificial Sequence: Synthetic peptide
  Seed: EWLKTRPILSPLTKG
EYLKTRSILYPLTKG

SEQ ID NO: 211122 - protein, 15 aa, Artificial Sequence
  Description of Artificial Sequence: Synthetic peptide
  Seed: EWLKTRPILSPLTKG
EYLKTRTILAPLTKG

SEQ ID NO: 211123 - protein, 15 aa, Artificial Sequence
  Description of Artificial Sequence: Synthetic peptide
  Seed: EWLKTRPILSPLTKG
EYLKTRTILFPLTKG

SEQ ID NO: 211124 - protein, 15 aa, Artificial Sequence
  Description of Artificial Sequence: Synthetic peptide
  Seed: EWLKTRPILSPLTKG
EYLKTRTILIPLTKG

SEQ ID NO: 211125 - protein, 15 aa, Artificial Sequence
  Description of Artificial Sequence: Synthetic peptide
  Seed: EWLKTRPILSPLTKG
EYLKTRTILLPLTKG

SEQ ID NO: 211126 - protein, 15 aa, Artificial Sequence
  Description of Artificial Sequence: Synthetic peptide
  Seed: EWLKTRPILSPLTKG
EYLKTRTILMPLTKG

SEQ ID NO: 211127 - protein, 15 aa, Artificial Sequence
  Description of Artificial Sequence: Synthetic peptide
  Seed: EWLKTRPILSPLTKG
EYLKTRTILNPLTKG

SEQ ID NO: 211128 - protein, 15 aa, Artificial Sequence
  Description of Artificial Sequence: Synthetic peptide
  Seed: EWLKTRPILSPLTKG
EYLKTRTILSPLTKG

SEQ ID NO: 211129 - protein, 15 aa, Artificial Sequence
  Description of Artificial Sequence: Synthetic peptide
  Seed: EWLKTRPILSPLTKG
EYLKTRTILVPLTKG

SEQ ID NO: 211130 - protein, 15 aa, Artificial Sequence
  Description of Artificial Sequence: Synthetic peptide
  Seed: EWLKTRPILSPLTKG
EYLKTRVILAPLTKG

SEQ ID NO: 211131 - protein, 15 aa, Artificial Sequence
  Description of Artificial Sequence: Synthetic peptide
  Seed: EWLKTRPILSPLTKG
EYLKTRVILIPLTKG

SEQ ID NO: 211132 - protein, 15 aa, Artificial Sequence
  Description of Artificial Sequence: Synthetic peptide
  Seed: EWLKTRPILSPLTKG
EYLKTRVILLPLTKG

SEQ ID NO: 211133 - protein, 15 aa, Artificial Sequence
  Description of Artificial Sequence: Synthetic peptide
  Seed: EWLKTRPILSPLTKG
EYLKTRVILNPLTKG

SEQ ID NO: 211134 - protein, 15 aa, Artificial Sequence
  Description of Artificial Sequence: Synthetic peptide
  Seed: EWLKTRPILSPLTKG
EYLKTRVILSPLTKG

SEQ ID NO: 211135 - protein, 15 aa, Artificial Sequence
  Description of Artificial Sequence: Synthetic peptide
  Seed: EWLKTRPILSPLTKG
EYLKTRVILVPLTKG

SEQ ID NO: 211136 - protein, 15 aa, Artificial Sequence
  Description of Artificial Sequence: Synthetic peptide
  Seed: EWLKTRPILSPLTKG
EYLKVRAILCPLTKG

SEQ ID NO: 211137 - protein, 15 aa, Artificial Sequence
  Description of Artificial Sequence: Synthetic peptide
  Seed: EWLKTRPILSPLTKG
EYLKVRAILFPLTKG

SEQ ID NO: 211138 - protein, 15 aa, Artificial Sequence
  Description of Artificial Sequence: Synthetic peptide
  Seed: EWLKTRPILSPLTKG
EYLKVRAILIPLTKG

SEQ ID NO: 211139 - protein, 15 aa, Artificial Sequence
  Description of Artificial Sequence: Synthetic peptide
  Seed: EWLKTRPILSPLTKG
EYLKVRAILLPLTKG

SEQ ID NO: 211140 - protein, 15 aa, Artificial Sequence
  Description of Artificial Sequence: Synthetic peptide
  Seed: EWLKTRPILSPLTKG
EYLKVRAILMPLTKG

SEQ ID NO: 211141 - protein, 15 aa, Artificial Sequence
  Description of Artificial Sequence: Synthetic peptide
  Seed: EWLKTRPILSPLTKG
EYLKVRAILQPLTKG

SEQ ID NO: 211142 - protein, 15 aa, Artificial Sequence
  Description of Artificial Sequence: Synthetic peptide
  Seed: EWLKTRPILSPLTKG
EYLKVRAILRPLTKG

SEQ ID NO: 211143 - protein, 15 aa, Artificial Sequence
  Description of Artificial Sequence: Synthetic peptide
  Seed: EWLKTRPILSPLTKG
EYLKVRAILTPLTKG

SEQ ID NO: 211144 - protein, 15 aa, Artificial Sequence
  Description of Artificial Sequence: Synthetic peptide
  Seed: EWLKTRPILSPLTKG
EYLKVRAILVPLTKG

SEQ ID NO: 211145 - protein, 15 aa, Artificial Sequence
  Description of Artificial Sequence: Synthetic peptide
  Seed: EWLKTRPILSPLTKG
EYLKVRAILYPLTKG

SEQ ID NO: 211146 - protein, 15 aa, Artificial Sequence
  Description of Artificial Sequence: Synthetic peptide
  Seed: EWLKTRPILSPLTKG
EYLKVRGILAPLTKG

SEQ ID NO: 211147 - protein, 15 aa, Artificial Sequence
  Description of Artificial Sequence: Synthetic peptide
  Seed: EWLKTRPILSPLTKG
EYLKVRGILCPLTKG

SEQ ID NO: 211148 - protein, 15 aa, Artificial Sequence
  Description of Artificial Sequence: Synthetic peptide
  Seed: EWLKTRPILSPLTKG
EYLKVRGILFPLTKG

SEQ ID NO: 211149 - protein, 15 aa, Artificial Sequence
  Description of Artificial Sequence: Synthetic peptide
  Seed: EWLKTRPILSPLTKG
EYLKVRGILGPLTKG

SEQ ID NO: 211150 - protein, 15 aa, Artificial Sequence
  Description of Artificial Sequence: Synthetic peptide
  Seed: EWLKTRPILSPLTKG
EYLKVRGILIPLTKG

SEQ ID NO: 211151 - protein, 15 aa, Artificial Sequence
  Description of Artificial Sequence: Synthetic peptide
  Seed: EWLKTRPILSPLTKG
EYLKVRGILLPLTKG

SEQ ID NO: 211152 - protein, 15 aa, Artificial Sequence
  Description of Artificial Sequence: Synthetic peptide
  Seed: EWLKTRPILSPLTKG
EYLKVRGILMPLTKG

SEQ ID NO: 211153 - protein, 15 aa, Artificial Sequence
  Description of Artificial Sequence: Synthetic peptide
  Seed: EWLKTRPILSPLTKG
EYLKVRGILNPLTKG

SEQ ID NO: 211154 - protein, 15 aa, Artificial Sequence
  Description of Artificial Sequence: Synthetic peptide
  Seed: EWLKTRPILSPLTKG
EYLKVRGILSPLTKG

SEQ ID NO: 211155 - protein, 15 aa, Artificial Sequence
  Description of Artificial Sequence: Synthetic peptide
  Seed: EWLKTRPILSPLTKG
EYLKVRGILTPLTKG

SEQ ID NO: 211156 - protein, 15 aa, Artificial Sequence
  Description of Artificial Sequence: Synthetic peptide
  Seed: EWLKTRPILSPLTKG
EYLKVRGILVPLTKG

SEQ ID NO: 211157 - protein, 15 aa, Artificial Sequence
  Description of Artificial Sequence: Synthetic peptide
  Seed: EWLKTRPILSPLTKG
EYLKVRHILLPLTKG

SEQ ID NO: 211158 - protein, 15 aa, Artificial Sequence
  Description of Artificial Sequence: Synthetic peptide
  Seed: EWLKTRPILSPLTKG
EYLKVRKILAPLTKG

SEQ ID NO: 211159 - protein, 15 aa, Artificial Sequence
  Description of Artificial Sequence: Synthetic peptide
  Seed: EWLKTRPILSPLTKG
EYLKVRKILGPLTKG

SEQ ID NO: 211160 - protein, 15 aa, Artificial Sequence
  Description of Artificial Sequence: Synthetic peptide
  Seed: EWLKTRPILSPLTKG
EYLKVRKILHPLTKG

SEQ ID NO: 211161 - protein, 15 aa, Artificial Sequence
  Description of Artificial Sequence: Synthetic peptide
  Seed: EWLKTRPILSPLTKG
EYLKVRKILNPLTKG

SEQ ID NO: 211162 - protein, 15 aa, Artificial Sequence
  Description of Artificial Sequence: Synthetic peptide
  Seed: EWLKTRPILSPLTKG
EYLKVRKILQPLTKG

SEQ ID NO: 211163 - protein, 15 aa, Artificial Sequence
  Description of Artificial Sequence: Synthetic peptide
  Seed: EWLKTRPILSPLTKG
EYLKVRKILSPLTKG

SEQ ID NO: 211164 - protein, 15 aa, Artificial Sequence
  Description of Artificial Sequence: Synthetic peptide
  Seed: EWLKTRPILSPLTKG
EYLKVRKILTPLTKG

SEQ ID NO: 211165 - protein, 15 aa, Artificial Sequence
  Description of Artificial Sequence: Synthetic peptide
  Seed: EWLKTRPILSPLTKG
EYLKVRNILIPLTKG

SEQ ID NO: 211166 - protein, 15 aa, Artificial Sequence
  Description of Artificial Sequence: Synthetic peptide
  Seed: EWLKTRPILSPLTKG
EYLKVRNILLPLTKG

SEQ ID NO: 211167 - protein, 15 aa, Artificial Sequence
  Description of Artificial Sequence: Synthetic peptide
  Seed: EWLKTRPILSPLTKG
EYLKVRNILMPLTKG

SEQ ID NO: 211168 - protein, 15 aa, Artificial Sequence
  Description of Artificial Sequence: Synthetic peptide
  Seed: EWLKTRPILSPLTKG
EYLKVRNILVPLTKG

SEQ ID NO: 211169 - protein, 15 aa, Artificial Sequence
  Description of Artificial Sequence: Synthetic peptide
  Seed: EWLKTRPILSPLTKG
EYLKVRPILCPLTKG

SEQ ID NO: 211170 - protein, 15 aa, Artificial Sequence
  Description of Artificial Sequence: Synthetic peptide
  Seed: EWLKTRPILSPLTKG
EYLKVRPILGPLTKG

SEQ ID NO: 211171 - protein, 15 aa, Artificial Sequence
  Description of Artificial Sequence: Synthetic peptide
  Seed: EWLKTRPILSPLTKG
EYLKVRPILIPLTKG

SEQ ID NO: 211172 - protein, 15 aa, Artificial Sequence
  Description of Artificial Sequence: Synthetic peptide
  Seed: EWLKTRPILSPLTKG
EYLKVRPILLPLTKG

SEQ ID NO: 211173 - protein, 15 aa, Artificial Sequence
  Description of Artificial Sequence: Synthetic peptide
  Seed: EWLKTRPILSPLTKG
EYLKVRPILMPLTKG

SEQ ID NO: 211174 - protein, 15 aa, Artificial Sequence
  Description of Artificial Sequence: Synthetic peptide
  Seed: EWLKTRPILSPLTKG
EYLKVRPILNPLTKG

SEQ ID NO: 211175 - protein, 15 aa, Artificial Sequence
  Description of Artificial Sequence: Synthetic peptide
  Seed: EWLKTRPILSPLTKG
EYLKVRPILTPLTKG

SEQ ID NO: 211176 - protein, 15 aa, Artificial Sequence
  Description of Artificial Sequence: Synthetic peptide
  Seed: EWLKTRPILSPLTKG
EYLKVRPILVPLTKG

SEQ ID NO: 211177 - protein, 15 aa, Artificial Sequence
  Description of Artificial Sequence: Synthetic peptide
  Seed: EWLKTRPILSPLTKG
EYLKVRRILAPLTKG

SEQ ID NO: 211178 - protein, 15 aa, Artificial Sequence
  Description of Artificial Sequence: Synthetic peptide
  Seed: EWLKTRPILSPLTKG
EYLKVRRILGPLTKG

SEQ ID NO: 211179 - protein, 15 aa, Artificial Sequence
  Description of Artificial Sequence: Synthetic peptide
  Seed: EWLKTRPILSPLTKG
EYLKVRRILHPLTKG

SEQ ID NO: 211180 - protein, 15 aa, Artificial Sequence
  Description of Artificial Sequence: Synthetic peptide
  Seed: EWLKTRPILSPLTKG
EYLKVRRILNPLTKG

SEQ ID NO: 211181 - protein, 15 aa, Artificial Sequence
  Description of Artificial Sequence: Synthetic peptide
  Seed: EWLKTRPILSPLTKG
EYLKVRRILQPLTKG

SEQ ID NO: 211182 - protein, 15 aa, Artificial Sequence
  Description of Artificial Sequence: Synthetic peptide
  Seed: EWLKTRPILSPLTKG
EYLKVRRILSPLTKG

SEQ ID NO: 211183 - protein, 15 aa, Artificial Sequence
  Description of Artificial Sequence: Synthetic peptide
  Seed: EWLKTRPILSPLTKG
EYLKVRRILTPLTKG

SEQ ID NO: 211184 - protein, 15 aa, Artificial Sequence
  Description of Artificial Sequence: Synthetic peptide
  Seed: EWLKTRPILSPLTKG
EYLKVRRILVPLTKG

SEQ ID NO: 211185 - protein, 15 aa, Artificial Sequence
  Description of Artificial Sequence: Synthetic peptide
  Seed: EWLKTRPILSPLTKG
EYLKVRSILCPLTKG

SEQ ID NO: 211186 - protein, 15 aa, Artificial Sequence
  Description of Artificial Sequence: Synthetic peptide
  Seed: EWLKTRPILSPLTKG
EYLKVRSILFPLTKG

SEQ ID NO: 211187 - protein, 15 aa, Artificial Sequence
  Description of Artificial Sequence: Synthetic peptide
  Seed: EWLKTRPILSPLTKG
EYLKVRSILIPLTKG

SEQ ID NO: 211188 - protein, 15 aa, Artificial Sequence
  Description of Artificial Sequence: Synthetic peptide
  Seed: EWLKTRPILSPLTKG
EYLKVRSILLPLTKG

SEQ ID NO: 211189 - protein, 15 aa, Artificial Sequence
  Description of Artificial Sequence: Synthetic peptide
  Seed: EWLKTRPILSPLTKG
EYLKVRSILMPLTKG

SEQ ID NO: 211190 - protein, 15 aa, Artificial Sequence
  Description of Artificial Sequence: Synthetic peptide
  Seed: EWLKTRPILSPLTKG
EYLKVRSILTPLTKG

SEQ ID NO: 211191 - protein, 15 aa, Artificial Sequence
  Description of Artificial Sequence: Synthetic peptide
  Seed: EWLKTRPILSPLTKG
EYLKVRSILVPLTKG

SEQ ID NO: 211192 - protein, 15 aa, Artificial Sequence
  Description of Artificial Sequence: Synthetic peptide
  Seed: EWLKTRPILSPLTKG
EYLKVRTILDPLTKG

SEQ ID NO: 211193 - protein, 15 aa, Artificial Sequence
  Description of Artificial Sequence: Synthetic peptide
  Seed: EWLKTRPILSPLTKG
EYLKVRTILIPLTKG

SEQ ID NO: 211194 - protein, 15 aa, Artificial Sequence
  Description of Artificial Sequence: Synthetic peptide
  Seed: EWLKTRPILSPLTKG
EYLKVRTILLPLTKG

SEQ ID NO: 211195 - protein, 15 aa, Artificial Sequence
  Description of Artificial Sequence: Synthetic peptide
  Seed: EWLKTRPILSPLTKG
EYLKVRTILMPLTKG

SEQ ID NO: 211196 - protein, 15 aa, Artificial Sequence
  Description of Artificial Sequence: Synthetic peptide
  Seed: EWLKTRPILSPLTKG
EYLKVRTILNPLTKG

SEQ ID NO: 211197 - protein, 15 aa, Artificial Sequence
  Description of Artificial Sequence: Synthetic peptide
  Seed: EWLKTRPILSPLTKG
EYLKVRTILVPLTKG

SEQ ID NO: 211198 - protein, 15 aa, Artificial Sequence
  Description of Artificial Sequence: Synthetic peptide
  Seed: EWLKTRPILSPLTKG
EYLKVRVILIPLTKG

SEQ ID NO: 211199 - protein, 15 aa, Artificial Sequence
  Description of Artificial Sequence: Synthetic peptide
  Seed: EWLKTRPILSPLTKG
EYLKVRVILLPLTKG

SEQ ID NO: 211200 - protein, 15 aa, Artificial Sequence
  Description of Artificial Sequence: Synthetic peptide
  Seed: EWLKTRPILSPLTKG
EYLKWRAILLPLTKG

SEQ ID NO: 211201 - protein, 15 aa, Artificial Sequence
  Description of Artificial Sequence: Synthetic peptide
  Seed: EWLKTRPILSPLTKG
EYLKWRAILMPLTKG

SEQ ID NO: 211202 - protein, 15 aa, Artificial Sequence
  Description of Artificial Sequence: Synthetic peptide
  Seed: EWLKTRPILSPLTKG
EYLKWRGILLPLTKG

SEQ ID NO: 211203 - protein, 15 aa, Artificial Sequence
  Description of Artificial Sequence: Synthetic peptide
  Seed: EWLKTRPILSPLTKG
EYLKWRGILMPLTKG

SEQ ID NO: 211204 - protein, 15 aa, Artificial Sequence
  Description of Artificial Sequence: Synthetic peptide
  Seed: EWLKTRPILSPLTKG
EYLKWRPILLPLTKG

SEQ ID NO: 211205 - protein, 15 aa, Artificial Sequence
  Description of Artificial Sequence: Synthetic peptide
  Seed: EWLKTRPILSPLTKG
EFLKFRTILEPLTKG

SEQ ID NO: 211206 - protein, 15 aa, Artificial Sequence
  Description of Artificial Sequence: Synthetic peptide
  Seed: EWLKTRPILSPLTKG
EFLKIRTILAPLTKG

SEQ ID NO: 211207 - protein, 15 aa, Artificial Sequence
  Description of Artificial Sequence: Synthetic peptide
  Seed: EWLKTRPILSPLTKG
EWRKTIPFLSFLTKG

SEQ ID NO: 211208 - protein, 15 aa, Artificial Sequence
  Description of Artificial Sequence: Synthetic peptide
  Seed: EWLKTRPILSPLTKG
EFLKFRAILMPLTKG

SEQ ID NO: 211209 - protein, 15 aa, Artificial Sequence
  Description of Artificial Sequence: Synthetic peptide
  Seed: EWLKTRPILSPLTKG
EFLKIRNILAPLTKG

SEQ ID NO: 211210 - protein, 15 aa, Artificial Sequence
  Description of Artificial Sequence: Synthetic peptide
  Seed: EWLKTRPILSPLTKG
EFLKVRSILSPLTKG

SEQ ID NO: 211211 - protein, 15 aa, Artificial Sequence
  Description of Artificial Sequence: Synthetic peptide
  Seed: EWLKTRPILSPLTKG
EWQKTFPFLSFLTKG

SEQ ID NO: 211212 - protein, 15 aa, Artificial Sequence
  Description of Artificial Sequence: Synthetic peptide
  Seed: EWLKTRPILSPLTKG
EYLKVRSILAPLTKG

SEQ ID NO: 211213 - protein, 15 aa, Artificial Sequence
  Description of Artificial Sequence: Synthetic peptide
  Seed: EWLKTRPILSPLTKG
EWCKTIPLLSLLTKG

SEQ ID NO: 211214 - protein, 15 aa, Artificial Sequence
  Description of Artificial Sequence: Synthetic peptide
  Seed: EWLKTRPILSPLTKG
EWRKTLPFLSMLTKG

SEQ ID NO: 211215 - protein, 15 aa, Artificial Sequence
  Description of Artificial Sequence: Synthetic peptide
  Seed: EWLKTRPILSPLTKG
EYLKIRSILGPLTKG

SEQ ID NO: 211216 - protein, 15 aa, Artificial Sequence
  Description of Artificial Sequence: Synthetic peptide
  Seed: EWLKTRPILSPLTKG
EWIKTIPLLSRLTKG

SEQ ID NO: 211217 - protein, 15 aa, Artificial Sequence
  Description of Artificial Sequence: Synthetic peptide
  Seed: EWLKTRPILSPLTKG
EWRKTIPLLSLLTKG

SEQ ID NO: 211218 - protein, 15 aa, Artificial Sequence
  Description of Artificial Sequence: Synthetic peptide
  Seed: EWLKTRPILSPLTKG
EWFKTIPLLSRLTKG

SEQ ID NO: 211219 - protein, 15 aa, Artificial Sequence
  Description of Artificial Sequence: Synthetic peptide
  Seed: EWLKTRPILSPLTKG
EWIKTFPLLSRLTKG

SEQ ID NO: 211220 - protein, 15 aa, Artificial Sequence
  Description of Artificial Sequence: Synthetic peptide
  Seed: EWLKTRPILSPLTKG
EWIKTFPALSVLTKG

SEQ ID NO: 211221 - protein, 15 aa, Artificial Sequence
  Description of Artificial Sequence: Synthetic peptide
  Seed: EWLKTRPILSPLTKG
EWFKTIPILSRLTKG

SEQ ID NO: 211222 - protein, 15 aa, Artificial Sequence
  Description of Artificial Sequence: Synthetic peptide
  Seed: EWLKTRPILSPLTKG
EWFKTIPMLSRLTKG

SEQ ID NO: 211223 - protein, 15 aa, Artificial Sequence
  Description of Artificial Sequence: Synthetic peptide
  Seed: EWLKTRPILSPLTKG
EWIKTIPILSRLTKG

SEQ ID NO: 211224 - protein, 15 aa, Artificial Sequence
  Description of Artificial Sequence: Synthetic peptide
  Seed: EWLKTRPILSPLTKG
EWFKTFPILSRLTKG

SEQ ID NO: 211225 - protein, 15 aa, Artificial Sequence
  Description of Artificial Sequence: Synthetic peptide
  Seed: EWLKTRPILSPLTKG
EWIKTLPLLSRLTKG

SEQ ID NO: 211226 - protein, 15 aa, Artificial Sequence
  Description of Artificial Sequence: Synthetic peptide
  Seed: EWLKTRPILSPLTKG
EFLKVRNILAPLTKG

SEQ ID NO: 211227 - protein, 15 aa, Artificial Sequence
  Description of Artificial Sequence: Synthetic peptide
  Seed: EWLKTRPILSPLTKG
EWIKTMPFLSRLTKG

SEQ ID NO: 211228 - protein, 15 aa, Artificial Sequence
  Description of Artificial Sequence: Synthetic peptide
  Seed: EWLKTRPILSPLTKG
EWIKTIPALSLLTKG

SEQ ID NO: 211229 - protein, 15 aa, Artificial Sequence
  Description of Artificial Sequence: Synthetic peptide
  Seed: EWLKTRPILSPLTKG
EWIKTIPMLSRLTKG

SEQ ID NO: 211230 - protein, 15 aa, Artificial Sequence
  Description of Artificial Sequence: Synthetic peptide
  Seed: EWLKTRPILSPLTKG
EWIKTVPLLSRLTKG

SEQ ID NO: 211231 - protein, 15 aa, Artificial Sequence
  Description of Artificial Sequence: Synthetic peptide
  Seed: EWLKTRPILSPLTKG
EWFKTLPILSRLTKG

SEQ ID NO: 211232 - protein, 15 aa, Artificial Sequence
  Description of Artificial Sequence: Synthetic peptide
  Seed: EWLKTRPILSPLTKG
EWLKTFPLLSRLTKG

SEQ ID NO: 211233 - protein, 15 aa, Artificial Sequence
  Description of Artificial Sequence: Synthetic peptide
  Seed: EWLKTRPILSPLTKG
EWFKTFPVLSRLTKG

SEQ ID NO: 211234 - protein, 15 aa, Artificial Sequence
  Description of Artificial Sequence: Synthetic peptide
  Seed: EWLKTRPILSPLTKG
EWIKTMPALSVLTKG

SEQ ID NO: 211235 - protein, 15 aa, Artificial Sequence
  Description of Artificial Sequence: Synthetic peptide
  Seed: EWLKTRPILSPLTKG
EWFKTFPRLSVLTKG

SEQ ID NO: 211236 - protein, 15 aa, Artificial Sequence
  Description of Artificial Sequence: Synthetic peptide
  Seed: EWLKTRPILSPLTKG
EWFKTIPKLSLLTKG

SEQ ID NO: 211237 - protein, 15 aa, Artificial Sequence
  Description of Artificial Sequence: Synthetic peptide
  Seed: EWLKTRPILSPLTKG
EWLKTLPLLSRLTKG

SEQ ID NO: 211238 - protein, 15 aa, Artificial Sequence
  Description of Artificial Sequence: Synthetic peptide
  Seed: EWLKTRPILSPLTKG
EWLKTFPMLSRLTKG

SEQ ID NO: 211239 - protein, 15 aa, Artificial Sequence
  Description of Artificial Sequence: Synthetic peptide
  Seed: EWLKTRPILSPLTKG
EWLKFRPALMPLAKG

SEQ ID NO: 211240 - protein, 15 aa, Artificial Sequence
  Description of Artificial Sequence: Synthetic peptide
  Seed: EWLKTRPILSPLTKG
EWLKFRPALVPLHKG

SEQ ID NO: 211241 - protein, 15 aa, Artificial Sequence
  Description of Artificial Sequence: Synthetic peptide
  Seed: EWLKTRPILSPLTKG
EWLKTLPILSRLTKG

SEQ ID NO: 211242 - protein, 15 aa, Artificial Sequence
  Description of Artificial Sequence: Synthetic peptide
  Seed: EWLKTRPILSPLTKG
EWLKIRPALSPLVKG

SEQ ID NO: 211243 - protein, 15 aa, Artificial Sequence
  Description of Artificial Sequence: Synthetic peptide
  Seed: EWLKTRPILSPLTKG
EWLKFRPFLVPLVKG

SEQ ID NO: 211244 - protein, 15 aa, Artificial Sequence
  Description of Artificial Sequence: Synthetic peptide
  Seed: EWLKTRPILSPLTKG
EWIKTYPLLSRLTKG

SEQ ID NO: 211245 - protein, 15 aa, Artificial Sequence
  Description of Artificial Sequence: Synthetic peptide
  Seed: EWLKTRPILSPLTKG
EWLKIRPLLAPLIKG

SEQ ID NO: 211246 - protein, 15 aa, Artificial Sequence
  Description of Artificial Sequence: Synthetic peptide
  Seed: EWLKTRPILSPLTKG
EWFKTIPALSYLTKG

SEQ ID NO: 211247 - protein, 15 aa, Artificial Sequence
  Description of Artificial Sequence: Synthetic peptide
  Seed: EWLKTRPILSPLTKG
EWIKTMPWLSRLTKG

SEQ ID NO: 211248 - protein, 15 aa, Artificial Sequence
  Description of Artificial Sequence: Synthetic peptide
  Seed: EWLKTRPILSPLTKG
EWIKTVPMLSRLTKG

SEQ ID NO: 211249 - protein, 15 aa, Artificial Sequence
  Description of Artificial Sequence: Synthetic peptide
  Seed: EWLKTRPILSPLTKG
EWLKFRPFLIPLSKG

SEQ ID NO: 211250 - protein, 15 aa, Artificial Sequence
  Description of Artificial Sequence: Synthetic peptide
  Seed: EWLKTRPILSPLTKG
EWIKTLPILSYLTKG

SEQ ID NO: 211251 - protein, 15 aa, Artificial Sequence
  Description of Artificial Sequence: Synthetic peptide
  Seed: EWLKTRPILSPLTKG
EWFKTFPRLSFLTKG

SEQ ID NO: 211252 - protein, 15 aa, Artificial Sequence
  Description of Artificial Sequence: Synthetic peptide
  Seed: EWLKTRPILSPLTKG
EWIKTFPSLSFLTKG

SEQ ID NO: 211253 - protein, 15 aa, Artificial Sequence
  Description of Artificial Sequence: Synthetic peptide
  Seed: EWLKTRPILSPLTKG
EWIKTMPLLSALTKG

SEQ ID NO: 211254 - protein, 15 aa, Artificial Sequence
  Description of Artificial Sequence: Synthetic peptide
  Seed: EWLKTRPILSPLTKG
EWLKTMPMLSRLTKG

SEQ ID NO: 211255 - protein, 15 aa, Artificial Sequence
  Description of Artificial Sequence: Synthetic peptide
  Seed: EWLKTRPILSPLTKG
EWLKIRPFLIPLSKG

SEQ ID NO: 211256 - protein, 15 aa, Artificial Sequence
  Description of Artificial Sequence: Synthetic peptide
  Seed: EWLKTRPILSPLTKG
EWLKLRPALVPLAKG

SEQ ID NO: 211257 - protein, 15 aa, Artificial Sequence
  Description of Artificial Sequence: Synthetic peptide
  Seed: EWLKTRPILSPLTKG
EWFKTVPKLSVLTKG

SEQ ID NO: 211258 - protein, 15 aa, Artificial Sequence
  Description of Artificial Sequence: Synthetic peptide
  Seed: EWLKTRPILSPLTKG
EWLKTIPALSLLTKG

SEQ ID NO: 211259 - protein, 15 aa, Artificial Sequence
  Description of Artificial Sequence: Synthetic peptide
  Seed: EWLKTRPILSPLTKG
EWLKFRPALVPLRKG

SEQ ID NO: 211260 - protein, 15 aa, Artificial Sequence
  Description of Artificial Sequence: Synthetic peptide
  Seed: EWLKTRPILSPLTKG
EWIKTIPALSALTKG

SEQ ID NO: 211261 - protein, 15 aa, Artificial Sequence
  Description of Artificial Sequence: Synthetic peptide
  Seed: EWLKTRPILSPLTKG
EWLKIRPALAPLVKG

SEQ ID NO: 211262 - protein, 15 aa, Artificial Sequence
  Description of Artificial Sequence: Synthetic peptide
  Seed: EWLKTRPILSPLTKG
EWFKTFPALSYLTKG

SEQ ID NO: 211263 - protein, 15 aa, Artificial Sequence
  Description of Artificial Sequence: Synthetic peptide
  Seed: EWLKTRPILSPLTKG
EWLKFRPALMPLVKG

SEQ ID NO: 211264 - protein, 15 aa, Artificial Sequence
  Description of Artificial Sequence: Synthetic peptide
  Seed: EWLKTRPILSPLTKG
EWLKIRPALVPLVKG

SEQ ID NO: 211265 - protein, 15 aa, Artificial Sequence
  Description of Artificial Sequence: Synthetic peptide
  Seed: EWLKTRPILSPLTKG
EWIKTIPYLSRLTKG

SEQ ID NO: 211266 - protein, 15 aa, Artificial Sequence
  Description of Artificial Sequence: Synthetic peptide
  Seed: EWLKTRPILSPLTKG
EWLKIRPALLPLAKG

SEQ ID NO: 211267 - protein, 15 aa, Artificial Sequence
  Description of Artificial Sequence: Synthetic peptide
  Seed: EWLKTRPILSPLTKG
EWLKFRPILIPLNKG

SEQ ID NO: 211268 - protein, 15 aa, Artificial Sequence
  Description of Artificial Sequence: Synthetic peptide
  Seed: EWLKTRPILSPLTKG
EWIKTLPALSALTKG

SEQ ID NO: 211269 - protein, 15 aa, Artificial Sequence
  Description of Artificial Sequence: Synthetic peptide
  Seed: EWLKTRPILSPLTKG
EWLKIRPALIPLVKG

SEQ ID NO: 211270 - protein, 15 aa, Artificial Sequence
  Description of Artificial Sequence: Synthetic peptide
  Seed: EWLKTRPILSPLTKG
EWLKIRPALSPLMKG

SEQ ID NO: 211271 - protein, 15 aa, Artificial Sequence
  Description of Artificial Sequence: Synthetic peptide
  Seed: EWLKTRPILSPLTKG
EWLKIRPWLVPLAKG

SEQ ID NO: 211272 - protein, 15 aa, Artificial Sequence
  Description of Artificial Sequence: Synthetic peptide
  Seed: EWLKTRPILSPLTKG
EWLKFRPWLIPLAKG

SEQ ID NO: 211273 - protein, 15 aa, Artificial Sequence
  Description of Artificial Sequence: Synthetic peptide
  Seed: EWLKTRPILSPLTKG
EWLKFRPILIPLMKG

SEQ ID NO: 211274 - protein, 15 aa, Artificial Sequence
  Description of Artificial Sequence: Synthetic peptide
  Seed: EWLKTRPILSPLTKG
EWLKFRPALIPLRKG

SEQ ID NO: 211275 - protein, 15 aa, Artificial Sequence
  Description of Artificial Sequence: Synthetic peptide
  Seed: EWLKTRPILSPLTKG
EWLKFRPLLIPLTKG

SEQ ID NO: 211276 - protein, 15 aa, Artificial Sequence
  Description of Artificial Sequence: Synthetic peptide
  Seed: EWLKTRPILSPLTKG
EWLKFRPFLIPLHKG

SEQ ID NO: 211277 - protein, 15 aa, Artificial Sequence
  Description of Artificial Sequence: Synthetic peptide
  Seed: EWLKTRPILSPLTKG
EWIKTFPTLSALTKG

SEQ ID NO: 211278 - protein, 15 aa, Artificial Sequence
  Description of Artificial Sequence: Synthetic peptide
  Seed: EWLKTRPILSPLTKG
EWLKIRPFLIPLVKG

SEQ ID NO: 211279 - protein, 15 aa, Artificial Sequence
  Description of Artificial Sequence: Synthetic peptide
  Seed: EWLKTRPILSPLTKG
EWLKFRPWLVPLSKG

SEQ ID NO: 211280 - protein, 15 aa, Artificial Sequence
  Description of Artificial Sequence: Synthetic peptide
  Seed: EWLKTRPILSPLTKG
EWLKIRPWLAPLAKG

SEQ ID NO: 211281 - protein, 15 aa, Artificial Sequence
  Description of Artificial Sequence: Synthetic peptide
  Seed: EWLKTRPILSPLTKG
EWYKTIPRLSVLTKG

SEQ ID NO: 211282 - protein, 15 aa, Artificial Sequence
  Description of Artificial Sequence: Synthetic peptide
  Seed: EWLKTRPILSPLTKG
EWLKMRPMLAPLVKG

SEQ ID NO: 211283 - protein, 15 aa, Artificial Sequence
  Description of Artificial Sequence: Synthetic peptide
  Seed: EWLKTRPILSPLTKG
EWLKVRPFLAPLAKG

SEQ ID NO: 211284 - protein, 15 aa, Artificial Sequence
  Description of Artificial Sequence: Synthetic peptide
  Seed: EWLKTRPILSPLTKG
EWLKIRPWLIPLAKG

SEQ ID NO: 211285 - protein, 15 aa, Artificial Sequence
  Description of Artificial Sequence: Synthetic peptide
  Seed: EWLKTRPILSPLTKG
EWLKFRPALFPLVKG

SEQ ID NO: 211286 - protein, 15 aa, Artificial Sequence
  Description of Artificial Sequence: Synthetic peptide
  Seed: EWLKTRPILSPLTKG
EWIKTRPLLSRLTKG

SEQ ID NO: 211287 - protein, 15 aa, Artificial Sequence
  Description of Artificial Sequence: Synthetic peptide
  Seed: EWLKTRPILSPLTKG
EWLKFRPWLIPLSKG

SEQ ID NO: 211288 - protein, 15 aa, Artificial Sequence
  Description of Artificial Sequence: Synthetic peptide
  Seed: EWLKTRPILSPLTKG
EWLKFRPALFPLIKG

SEQ ID NO: 211289 - protein, 15 aa, Artificial Sequence
  Description of Artificial Sequence: Synthetic peptide
  Seed: EWLKTRPILSPLTKG
EWLKIRPILIPLLKG

SEQ ID NO: 211290 - protein, 15 aa, Artificial Sequence
  Description of Artificial Sequence: Synthetic peptide
  Seed: EWLKTRPILSPLTKG
EWLKIRPSLSPLVKG

SEQ ID NO: 211291 - protein, 15 aa, Artificial Sequence
  Description of Artificial Sequence: Synthetic peptide
  Seed: EWLKTRPILSPLTKG
EWIKTIPRLSELTKG

SEQ ID NO: 211292 - protein, 15 aa, Artificial Sequence
  Description of Artificial Sequence: Synthetic peptide
  Seed: EWLKTRPILSPLTKG
EWMKTFPALSFLTKG

SEQ ID NO: 211293 - protein, 15 aa, Artificial Sequence
  Description of Artificial Sequence: Synthetic peptide
  Seed: EWLKTRPILSPLTKG
EWLKFRPALFPLNKG

SEQ ID NO: 211294 - protein, 15 aa, Artificial Sequence
  Description of Artificial Sequence: Synthetic peptide
  Seed: EWLKTRPILSPLTKG
EWLKWRPALVPLAKG

SEQ ID NO: 211295 - protein, 15 aa, Artificial Sequence
  Description of Artificial Sequence: Synthetic peptide
  Seed: EWLKTRPILSPLTKG
EWLKIRPLLSPLFKG

SEQ ID NO: 211296 - protein, 15 aa, Artificial Sequence
  Description of Artificial Sequence: Synthetic peptide
  Seed: EWLKTRPILSPLTKG
EWLKIRPLLTPLRKG

SEQ ID NO: 211297 - protein, 15 aa, Artificial Sequence
  Description of Artificial Sequence: Synthetic peptide
  Seed: EWLKTRPILSPLTKG
EWLKWRPALAPLVKG

SEQ ID NO: 211298 - protein, 15 aa, Artificial Sequence
  Description of Artificial Sequence: Synthetic peptide
  Seed: EWLKTRPILSPLTKG
EWLKIRPMLSPLKKG

SEQ ID NO: 211299 - protein, 15 aa, Artificial Sequence
  Description of Artificial Sequence: Synthetic peptide
  Seed: EWLKTRPILSPLTKG
EWLKTLPRLSELTKG

SEQ ID NO: 211300 - protein, 15 aa, Artificial Sequence
  Description of Artificial Sequence: Synthetic peptide
  Seed: EWLKTRPILSPLTKG
EILKCRAILGPLTKG

SEQ ID NO: 211301 - protein, 15 aa, Artificial Sequence
  Description of Artificial Sequence: Synthetic peptide
  Seed: EWLKTRPILSPLTKG
EWFKTVPRLSELTKG

SEQ ID NO: 211302 - protein, 15 aa, Artificial Sequence
  Description of Artificial Sequence: Synthetic peptide
  Seed: EWLKTRPILSPLTKG
EWLKTIPRLSDLTKG

SEQ ID NO: 211303 - protein, 15 aa, Artificial Sequence
  Description of Artificial Sequence: Synthetic peptide
  Seed: EWLKTRPILSPLTKG
EFLKDRTILAPLTKG

SEQ ID NO: 211304 - protein, 15 aa, Artificial Sequence
  Description of Artificial Sequence: Synthetic peptide
  Seed: ANQRLNPMHQLLRHF
ANQRCNPIHALLIHF

SEQ ID NO: 211305 - protein, 15 aa, Artificial Sequence
  Description of Artificial Sequence: Synthetic peptide
  Seed: ANQRLNPMHQLLRHF
ANQRCNPIHALLLHF

SEQ ID NO: 211306 - protein, 15 aa, Artificial Sequence
  Description of Artificial Sequence: Synthetic peptide
  Seed: ANQRLNPMHQLLRHF
ANQRCNPIHALLVHF

SEQ ID NO: 211307 - protein, 15 aa, Artificial Sequence
  Description of Artificial Sequence: Synthetic peptide
  Seed: ANQRLNPMHQLLRHF
ANQRCNPLHALLAHF

SEQ ID NO: 211308 - protein, 15 aa, Artificial Sequence
  Description of Artificial Sequence: Synthetic peptide
  Seed: ANQRLNPMHQLLRHF
ANQRCNPLHALLIHF

SEQ ID NO: 211309 - protein, 15 aa, Artificial Sequence
  Description of Artificial Sequence: Synthetic peptide
  Seed: ANQRLNPMHQLLRHF
ANQRCNPLHALLLHF

SEQ ID NO: 211310 - protein, 15 aa, Artificial Sequence
  Description of Artificial Sequence: Synthetic peptide
  Seed: ANQRLNPMHQLLRHF
ANQRCNPLHALLMHF

SEQ ID NO: 211311 - protein, 15 aa, Artificial Sequence
  Description of Artificial Sequence: Synthetic peptide
  Seed: ANQRLNPMHQLLRHF
ANQRCNPLHALLTHF

SEQ ID NO: 211312 - protein, 15 aa, Artificial Sequence
  Description of Artificial Sequence: Synthetic peptide
  Seed: ANQRLNPMHQLLRHF
ANQRCNPLHALLVHF

SEQ ID NO: 211313 - protein, 15 aa, Artificial Sequence
  Description of Artificial Sequence: Synthetic peptide
  Seed: ANQRLNPMHQLLRHF
ANQRCNPLHGLLAHF

SEQ ID NO: 211314 - protein, 15 aa, Artificial Sequence
  Description of Artificial Sequence: Synthetic peptide
  Seed: ANQRLNPMHQLLRHF
ANQRCNPLHGLLIHF

SEQ ID NO: 211315 - protein, 15 aa, Artificial Sequence
  Description of Artificial Sequence: Synthetic peptide
  Seed: ANQRLNPMHQLLRHF
ANQRCNPLHGLLLHF

SEQ ID NO: 211316 - protein, 15 aa, Artificial Sequence
  Description of Artificial Sequence: Synthetic peptide
  Seed: ANQRLNPMHQLLRHF
ANQRCNPLHGLLVHF

SEQ ID NO: 211317 - protein, 15 aa, Artificial Sequence
  Description of Artificial Sequence: Synthetic peptide
  Seed: ANQRLNPMHQLLRHF
ANQRCNPLHPLLIHF

SEQ ID NO: 211318 - protein, 15 aa, Artificial Sequence
  Description of Artificial Sequence: Synthetic peptide
  Seed: ANQRLNPMHQLLRHF
ANQRCNPLHPLLVHF

SEQ ID NO: 211319 - protein, 15 aa, Artificial Sequence
  Description of Artificial Sequence: Synthetic peptide
  Seed: ANQRLNPMHQLLRHF
ANQRCNPLHSLLAHF

SEQ ID NO: 211320 - protein, 15 aa, Artificial Sequence
  Description of Artificial Sequence: Synthetic peptide
  Seed: ANQRLNPMHQLLRHF
ANQRCNPLHSLLIHF

SEQ ID NO: 211321 - protein, 15 aa, Artificial Sequence
  Description of Artificial Sequence: Synthetic peptide
  Seed: ANQRLNPMHQLLRHF
ANQRCNPLHSLLLHF

SEQ ID NO: 211322 - protein, 15 aa, Artificial Sequence
  Description of Artificial Sequence: Synthetic peptide
  Seed: ANQRLNPMHQLLRHF
ANQRCNPLHSLLVHF

SEQ ID NO: 211323 - protein, 15 aa, Artificial Sequence
  Description of Artificial Sequence: Synthetic peptide
  Seed: ANQRLNPMHQLLRHF
ANQRCNPLHTLLVHF

SEQ ID NO: 211324 - protein, 15 aa, Artificial Sequence
  Description of Artificial Sequence: Synthetic peptide
  Seed: ANQRLNPMHQLLRHF
ANQRCNPMHALLAHF

SEQ ID NO: 211325 - protein, 15 aa, Artificial Sequence
  Description of Artificial Sequence: Synthetic peptide
  Seed: ANQRLNPMHQLLRHF
ANQRCNPMHALLIHF

SEQ ID NO: 211326 - protein, 15 aa, Artificial Sequence
  Description of Artificial Sequence: Synthetic peptide
  Seed: ANQRLNPMHQLLRHF
ANQRCNPMHALLLHF

SEQ ID NO: 211327 - protein, 15 aa, Artificial Sequence
  Description of Artificial Sequence: Synthetic peptide
  Seed: ANQRLNPMHQLLRHF
ANQRCNPMHALLMHF

SEQ ID NO: 211328 - protein, 15 aa, Artificial Sequence
  Description of Artificial Sequence: Synthetic peptide
  Seed: ANQRLNPMHQLLRHF
ANQRCNPMHALLTHF

SEQ ID NO: 211329 - protein, 15 aa, Artificial Sequence
  Description of Artificial Sequence: Synthetic peptide
  Seed: ANQRLNPMHQLLRHF
ANQRCNPMHALLVHF

SEQ ID NO: 211330 - protein, 15 aa, Artificial Sequence
  Description of Artificial Sequence: Synthetic peptide
  Seed: ANQRLNPMHQLLRHF
ANQRCNPMHGLLAHF

SEQ ID NO: 211331 - protein, 15 aa, Artificial Sequence
  Description of Artificial Sequence: Synthetic peptide
  Seed: ANQRLNPMHQLLRHF
ANQRCNPMHGLLIHF

SEQ ID NO: 211332 - protein, 15 aa, Artificial Sequence
  Description of Artificial Sequence: Synthetic peptide
  Seed: ANQRLNPMHQLLRHF
ANQRCNPMHGLLLHF

SEQ ID NO: 211333 - protein, 15 aa, Artificial Sequence
  Description of Artificial Sequence: Synthetic peptide
  Seed: ANQRLNPMHQLLRHF
ANQRCNPMHGLLVHF

SEQ ID NO: 211334 - protein, 15 aa, Artificial Sequence
  Description of Artificial Sequence: Synthetic peptide
  Seed: ANQRLNPMHQLLRHF
ANQRCNPMHPLLIHF

SEQ ID NO: 211335 - protein, 15 aa, Artificial Sequence
  Description of Artificial Sequence: Synthetic peptide
  Seed: ANQRLNPMHQLLRHF
ANQRCNPMHPLLVHF

SEQ ID NO: 211336 - protein, 15 aa, Artificial Sequence
  Description of Artificial Sequence: Synthetic peptide
  Seed: ANQRLNPMHQLLRHF
ANQRCNPMHSLLAHF

SEQ ID NO: 211337 - protein, 15 aa, Artificial Sequence
  Description of Artificial Sequence: Synthetic peptide
  Seed: ANQRLNPMHQLLRHF
ANQRCNPMHSLLIHF

SEQ ID NO: 211338 - protein, 15 aa, Artificial Sequence
  Description of Artificial Sequence: Synthetic peptide
  Seed: ANQRLNPMHQLLRHF
ANQRCNPMHSLLLHF

SEQ ID NO: 211339 - protein, 15 aa, Artificial Sequence
  Description of Artificial Sequence: Synthetic peptide
  Seed: ANQRLNPMHQLLRHF
ANQRCNPMHSLLVHF

SEQ ID NO: 211340 - protein, 15 aa, Artificial Sequence
  Description of Artificial Sequence: Synthetic peptide
  Seed: ANQRLNPMHQLLRHF
ANQRFNPAHALLAHF

SEQ ID NO: 211341 - protein, 15 aa, Artificial Sequence
  Description of Artificial Sequence: Synthetic peptide
  Seed: ANQRLNPMHQLLRHF
ANQRFNPAHALLCHF

SEQ ID NO: 211342 - protein, 15 aa, Artificial Sequence
  Description of Artificial Sequence: Synthetic peptide
  Seed: ANQRLNPMHQLLRHF
ANQRFNPAHALLDHF

SEQ ID NO: 211343 - protein, 15 aa, Artificial Sequence
  Description of Artificial Sequence: Synthetic peptide
  Seed: ANQRLNPMHQLLRHF
ANQRFNPAHALLEHF

SEQ ID NO: 211344 - protein, 15 aa, Artificial Sequence
  Description of Artificial Sequence: Synthetic peptide
  Seed: ANQRLNPMHQLLRHF
ANQRFNPAHALLFHF

SEQ ID NO: 211345 - protein, 15 aa, Artificial Sequence
  Description of Artificial Sequence: Synthetic peptide
  Seed: ANQRLNPMHQLLRHF
ANQRFNPAHALLGHF

SEQ ID NO: 211346 - protein, 15 aa, Artificial Sequence
  Description of Artificial Sequence: Synthetic peptide
  Seed: ANQRLNPMHQLLRHF
ANQRFNPAHALLHHF

SEQ ID NO: 211347 - protein, 15 aa, Artificial Sequence
  Description of Artificial Sequence: Synthetic peptide
  Seed: ANQRLNPMHQLLRHF
ANQRFNPAHALLIHF

SEQ ID NO: 211348 - protein, 15 aa, Artificial Sequence
  Description of Artificial Sequence: Synthetic peptide
  Seed: ANQRLNPMHQLLRHF
ANQRFNPAHALLKHF

SEQ ID NO: 211349 - protein, 15 aa, Artificial Sequence
  Description of Artificial Sequence: Synthetic peptide
  Seed: ANQRLNPMHQLLRHF
ANQRFNPAHALLLHF

SEQ ID NO: 211350 - protein, 15 aa, Artificial Sequence
  Description of Artificial Sequence: Synthetic peptide
  Seed: ANQRLNPMHQLLRHF
ANQRFNPAHALLMHF

SEQ ID NO: 211351 - protein, 15 aa, Artificial Sequence
  Description of Artificial Sequence: Synthetic peptide
  Seed: ANQRLNPMHQLLRHF
ANQRFNPAHALLNHF

SEQ ID NO: 211352 - protein, 15 aa, Artificial Sequence
  Description of Artificial Sequence: Synthetic peptide
  Seed: ANQRLNPMHQLLRHF
ANQRFNPAHALLPHF

SEQ ID NO: 211353 - protein, 15 aa, Artificial Sequence
  Description of Artificial Sequence: Synthetic peptide
  Seed: ANQRLNPMHQLLRHF
ANQRFNPAHALLQHF

SEQ ID NO: 211354 - protein, 15 aa, Artificial Sequence
  Description of Artificial Sequence: Synthetic peptide
  Seed: ANQRLNPMHQLLRHF
ANQRFNPAHALLRHF

SEQ ID NO: 211355 - protein, 15 aa, Artificial Sequence
  Description of Artificial Sequence: Synthetic peptide
  Seed: ANQRLNPMHQLLRHF
ANQRFNPAHALLSHF

SEQ ID NO: 211356 - protein, 15 aa, Artificial Sequence
  Description of Artificial Sequence: Synthetic peptide
  Seed: ANQRLNPMHQLLRHF
ANQRFNPAHALLTHF

SEQ ID NO: 211357 - protein, 15 aa, Artificial Sequence
  Description of Artificial Sequence: Synthetic peptide
  Seed: ANQRLNPMHQLLRHF
ANQRFNPAHALLVHF

SEQ ID NO: 211358 - protein, 15 aa, Artificial Sequence
  Description of Artificial Sequence: Synthetic peptide
  Seed: ANQRLNPMHQLLRHF
ANQRFNPAHALLWHF

SEQ ID NO: 211359 - protein, 15 aa, Artificial Sequence
  Description of Artificial Sequence: Synthetic peptide
  Seed: ANQRLNPMHQLLRHF
ANQRFNPAHALLYHF

SEQ ID NO: 211360 - protein, 15 aa, Artificial Sequence
  Description of Artificial Sequence: Synthetic peptide
  Seed: ANQRLNPMHQLLRHF
ANQRFNPAHCLLIHF

SEQ ID NO: 211361 - protein, 15 aa, Artificial Sequence
  Description of Artificial Sequence: Synthetic peptide
  Seed: ANQRLNPMHQLLRHF
ANQRFNPAHCLLLHF

SEQ ID NO: 211362 - protein, 15 aa, Artificial Sequence
  Description of Artificial Sequence: Synthetic peptide
  Seed: ANQRLNPMHQLLRHF
ANQRFNPAHCLLVHF

SEQ ID NO: 211363 - protein, 15 aa, Artificial Sequence
  Description of Artificial Sequence: Synthetic peptide
  Seed: ANQRLNPMHQLLRHF
ANQRFNPAHFLLAHF

SEQ ID NO: 211364 - protein, 15 aa, Artificial Sequence
  Description of Artificial Sequence: Synthetic peptide
  Seed: ANQRLNPMHQLLRHF
ANQRFNPAHFLLDHF

SEQ ID NO: 211365 - protein, 15 aa, Artificial Sequence
  Description of Artificial Sequence: Synthetic peptide
  Seed: ANQRLNPMHQLLRHF
ANQRFNPAHFLLEHF

SEQ ID NO: 211366 - protein, 15 aa, Artificial Sequence
  Description of Artificial Sequence: Synthetic peptide
  Seed: ANQRLNPMHQLLRHF
ANQRFNPAHFLLFHF

SEQ ID NO: 211367 - protein, 15 aa, Artificial Sequence
  Description of Artificial Sequence: Synthetic peptide
  Seed: ANQRLNPMHQLLRHF
ANQRFNPAHFLLIHF

SEQ ID NO: 211368 - protein, 15 aa, Artificial Sequence
  Description of Artificial Sequence: Synthetic peptide
  Seed: ANQRLNPMHQLLRHF
ANQRFNPAHFLLLHF

SEQ ID NO: 211369 - protein, 15 aa, Artificial Sequence
  Description of Artificial Sequence: Synthetic peptide
  Seed: ANQRLNPMHQLLRHF
ANQRFNPAHFLLMHF

SEQ ID NO: 211370 - protein, 15 aa, Artificial Sequence
  Description of Artificial Sequence: Synthetic peptide
  Seed: ANQRLNPMHQLLRHF
ANQRFNPAHFLLNHF

SEQ ID NO: 211371 - protein, 15 aa, Artificial Sequence
  Description of Artificial Sequence: Synthetic peptide
  Seed: ANQRLNPMHQLLRHF
ANQRFNPAHFLLSHF

SEQ ID NO: 211372 - protein, 15 aa, Artificial Sequence
  Description of Artificial Sequence: Synthetic peptide
  Seed: ANQRLNPMHQLLRHF
ANQRFNPAHFLLTHF

SEQ ID NO: 211373 - protein, 15 aa, Artificial Sequence
  Description of Artificial Sequence: Synthetic peptide
  Seed: ANQRLNPMHQLLRHF
ANQRFNPAHFLLVHF

SEQ ID NO: 211374 - protein, 15 aa, Artificial Sequence
  Description of Artificial Sequence: Synthetic peptide
  Seed: ANQRLNPMHQLLRHF
ANQRFNPAHFLLWHF

SEQ ID NO: 211375 - protein, 15 aa, Artificial Sequence
  Description of Artificial Sequence: Synthetic peptide
  Seed: ANQRLNPMHQLLRHF
ANQRFNPAHFLLYHF

SEQ ID NO: 211376 - protein, 15 aa, Artificial Sequence
  Description of Artificial Sequence: Synthetic peptide
  Seed: ANQRLNPMHQLLRHF
ANQRFNPAHGLLAHF

SEQ ID NO: 211377 - protein, 15 aa, Artificial Sequence
  Description of Artificial Sequence: Synthetic peptide
  Seed: ANQRLNPMHQLLRHF
ANQRFNPAHGLLCHF

SEQ ID NO: 211378 - protein, 15 aa, Artificial Sequence
  Description of Artificial Sequence: Synthetic peptide
  Seed: ANQRLNPMHQLLRHF
ANQRFNPAHGLLFHF

SEQ ID NO: 211379 - protein, 15 aa, Artificial Sequence
  Description of Artificial Sequence: Synthetic peptide
  Seed: ANQRLNPMHQLLRHF
ANQRFNPAHGLLGHF

SEQ ID NO: 211380 - protein, 15 aa, Artificial Sequence
  Description of Artificial Sequence: Synthetic peptide
  Seed: ANQRLNPMHQLLRHF
ANQRFNPAHGLLHHF

SEQ ID NO: 211381 - protein, 15 aa, Artificial Sequence
  Description of Artificial Sequence: Synthetic peptide
  Seed: ANQRLNPMHQLLRHF
ANQRFNPAHGLLIHF

SEQ ID NO: 211382 - protein, 15 aa, Artificial Sequence
  Description of Artificial Sequence: Synthetic peptide
  Seed: ANQRLNPMHQLLRHF
ANQRFNPAHGLLLHF

SEQ ID NO: 211383 - protein, 15 aa, Artificial Sequence
  Description of Artificial Sequence: Synthetic peptide
  Seed: ANQRLNPMHQLLRHF
ANQRFNPAHGLLMHF

SEQ ID NO: 211384 - protein, 15 aa, Artificial Sequence
  Description of Artificial Sequence: Synthetic peptide
  Seed: ANQRLNPMHQLLRHF
ANQRFNPAHGLLNHF

SEQ ID NO: 211385 - protein, 15 aa, Artificial Sequence
  Description of Artificial Sequence: Synthetic peptide
  Seed: ANQRLNPMHQLLRHF
ANQRFNPAHGLLPHF

SEQ ID NO: 211386 - protein, 15 aa, Artificial Sequence
  Description of Artificial Sequence: Synthetic peptide
  Seed: ANQRLNPMHQLLRHF
ANQRFNPAHGLLQHF

SEQ ID NO: 211387 - protein, 15 aa, Artificial Sequence
  Description of Artificial Sequence: Synthetic peptide
  Seed: ANQRLNPMHQLLRHF
ANQRFNPAHGLLRHF

SEQ ID NO: 211388 - protein, 15 aa, Artificial Sequence
  Description of Artificial Sequence: Synthetic peptide
  Seed: ANQRLNPMHQLLRHF
ANQRFNPAHGLLSHF

SEQ ID NO: 211389 - protein, 15 aa, Artificial Sequence
  Description of Artificial Sequence: Synthetic peptide
  Seed: ANQRLNPMHQLLRHF
ANQRFNPAHGLLTHF

SEQ ID NO: 211390 - protein, 15 aa, Artificial Sequence
  Description of Artificial Sequence: Synthetic peptide
  Seed: ANQRLNPMHQLLRHF
ANQRFNPAHGLLVHF

SEQ ID NO: 211391 - protein, 15 aa, Artificial Sequence
  Description of Artificial Sequence: Synthetic peptide
  Seed: ANQRLNPMHQLLRHF
ANQRFNPAHGLLYHF

SEQ ID NO: 211392 - protein, 15 aa, Artificial Sequence
  Description of Artificial Sequence: Synthetic peptide
  Seed: ANQRLNPMHQLLRHF
ANQRFNPAHHLLAHF

SEQ ID NO: 211393 - protein, 15 aa, Artificial Sequence
  Description of Artificial Sequence: Synthetic peptide
  Seed: ANQRLNPMHQLLRHF
ANQRFNPAHHLLIHF

SEQ ID NO: 211394 - protein, 15 aa, Artificial Sequence
  Description of Artificial Sequence: Synthetic peptide
  Seed: ANQRLNPMHQLLRHF
ANQRFNPAHHLLLHF

SEQ ID NO: 211395 - protein, 15 aa, Artificial Sequence
  Description of Artificial Sequence: Synthetic peptide
  Seed: ANQRLNPMHQLLRHF
ANQRFNPAHHLLVHF

SEQ ID NO: 211396 - protein, 15 aa, Artificial Sequence
  Description of Artificial Sequence: Synthetic peptide
  Seed: ANQRLNPMHQLLRHF
ANQRFNPAHILLAHF

SEQ ID NO: 211397 - protein, 15 aa, Artificial Sequence
  Description of Artificial Sequence: Synthetic peptide
  Seed: ANQRLNPMHQLLRHF
ANQRFNPAHILLGHF

SEQ ID NO: 211398 - protein, 15 aa, Artificial Sequence
  Description of Artificial Sequence: Synthetic peptide
  Seed: ANQRLNPMHQLLRHF
ANQRFNPAHILLHHF

SEQ ID NO: 211399 - protein, 15 aa, Artificial Sequence
  Description of Artificial Sequence: Synthetic peptide
  Seed: ANQRLNPMHQLLRHF
ANQRFNPAHILLIHF

SEQ ID NO: 211400 - protein, 15 aa, Artificial Sequence
  Description of Artificial Sequence: Synthetic peptide
  Seed: ANQRLNPMHQLLRHF
ANQRFNPAHILLLHF

SEQ ID NO: 211401 - protein, 15 aa, Artificial Sequence
  Description of Artificial Sequence: Synthetic peptide
  Seed: ANQRLNPMHQLLRHF
ANQRFNPAHILLMHF

SEQ ID NO: 211402 - protein, 15 aa, Artificial Sequence
  Description of Artificial Sequence: Synthetic peptide
  Seed: ANQRLNPMHQLLRHF
ANQRFNPAHILLNHF

SEQ ID NO: 211403 - protein, 15 aa, Artificial Sequence
  Description of Artificial Sequence: Synthetic peptide
  Seed: ANQRLNPMHQLLRHF
ANQRFNPAHILLSHF

SEQ ID NO: 211404 - protein, 15 aa, Artificial Sequence
  Description of Artificial Sequence: Synthetic peptide
  Seed: ANQRLNPMHQLLRHF
ANQRFNPAHILLTHF

SEQ ID NO: 211405 - protein, 15 aa, Artificial Sequence
  Description of Artificial Sequence: Synthetic peptide
  Seed: ANQRLNPMHQLLRHF
ANQRFNPAHILLVHF

SEQ ID NO: 211406 - protein, 15 aa, Artificial Sequence
  Description of Artificial Sequence: Synthetic peptide
  Seed: ANQRLNPMHQLLRHF
ANQRFNPAHKLLAHF

SEQ ID NO: 211407 - protein, 15 aa, Artificial Sequence
  Description of Artificial Sequence: Synthetic peptide
  Seed: ANQRLNPMHQLLRHF
ANQRFNPAHKLLGHF

SEQ ID NO: 211408 - protein, 15 aa, Artificial Sequence
  Description of Artificial Sequence: Synthetic peptide
  Seed: ANQRLNPMHQLLRHF
ANQRFNPAHKLLHHF

SEQ ID NO: 211409 - protein, 15 aa, Artificial Sequence
  Description of Artificial Sequence: Synthetic peptide
  Seed: ANQRLNPMHQLLRHF
ANQRFNPAHKLLKHF

SEQ ID NO: 211410 - protein, 15 aa, Artificial Sequence
  Description of Artificial Sequence: Synthetic peptide
  Seed: ANQRLNPMHQLLRHF
ANQRFNPAHKLLMHF

SEQ ID NO: 211411 - protein, 15 aa, Artificial Sequence
  Description of Artificial Sequence: Synthetic peptide
  Seed: ANQRLNPMHQLLRHF
ANQRFNPAHKLLNHF

SEQ ID NO: 211412 - protein, 15 aa, Artificial Sequence
  Description of Artificial Sequence: Synthetic peptide
  Seed: ANQRLNPMHQLLRHF
ANQRFNPAHKLLQHF

SEQ ID NO: 211413 - protein, 15 aa, Artificial Sequence
  Description of Artificial Sequence: Synthetic peptide
  Seed: ANQRLNPMHQLLRHF
ANQRFNPAHKLLSHF

SEQ ID NO: 211414 - protein, 15 aa, Artificial Sequence
  Description of Artificial Sequence: Synthetic peptide
  Seed: ANQRLNPMHQLLRHF
ANQRFNPAHKLLTHF

SEQ ID NO: 211415 - protein, 15 aa, Artificial Sequence
  Description of Artificial Sequence: Synthetic peptide
  Seed: ANQRLNPMHQLLRHF
ANQRFNPAHKLLVHF

SEQ ID NO: 211416 - protein, 15 aa, Artificial Sequence
  Description of Artificial Sequence: Synthetic peptide
  Seed: ANQRLNPMHQLLRHF
ANQRFNPAHLLLAHF

SEQ ID NO: 211417 - protein, 15 aa, Artificial Sequence
  Description of Artificial Sequence: Synthetic peptide
  Seed: ANQRLNPMHQLLRHF
ANQRFNPAHLLLIHF

SEQ ID NO: 211418 - protein, 15 aa, Artificial Sequence
  Description of Artificial Sequence: Synthetic peptide
  Seed: ANQRLNPMHQLLRHF
ANQRFNPAHLLLNHF

SEQ ID NO: 211419 - protein, 15 aa, Artificial Sequence
  Description of Artificial Sequence: Synthetic peptide
  Seed: ANQRLNPMHQLLRHF
ANQRFNPAHLLLVHF

SEQ ID NO: 211420 - protein, 15 aa, Artificial Sequence
  Description of Artificial Sequence: Synthetic peptide
  Seed: ANQRLNPMHQLLRHF
ANQRFNPAHMLLAHF

SEQ ID NO: 211421 - protein, 15 aa, Artificial Sequence
  Description of Artificial Sequence: Synthetic peptide
  Seed: ANQRLNPMHQLLRHF
ANQRFNPAHMLLIHF

SEQ ID NO: 211422 - protein, 15 aa, Artificial Sequence
  Description of Artificial Sequence: Synthetic peptide
  Seed: ANQRLNPMHQLLRHF
ANQRFNPAHMLLLHF

SEQ ID NO: 211423 - protein, 15 aa, Artificial Sequence
  Description of Artificial Sequence: Synthetic peptide
  Seed: ANQRLNPMHQLLRHF
ANQRFNPAHMLLNHF

SEQ ID NO: 211424 - protein, 15 aa, Artificial Sequence
  Description of Artificial Sequence: Synthetic peptide
  Seed: ANQRLNPMHQLLRHF
ANQRFNPAHMLLSHF

SEQ ID NO: 211425 - protein, 15 aa, Artificial Sequence
  Description of Artificial Sequence: Synthetic peptide
  Seed: ANQRLNPMHQLLRHF
ANQRFNPAHMLLVHF

SEQ ID NO: 211426 - protein, 15 aa, Artificial Sequence
  Description of Artificial Sequence: Synthetic peptide
  Seed: ANQRLNPMHQLLRHF
ANQRFNPAHNLLAHF

SEQ ID NO: 211427 - protein, 15 aa, Artificial Sequence
  Description of Artificial Sequence: Synthetic peptide
  Seed: ANQRLNPMHQLLRHF
ANQRFNPAHNLLCHF

SEQ ID NO: 211428 - protein, 15 aa, Artificial Sequence
  Description of Artificial Sequence: Synthetic peptide
  Seed: ANQRLNPMHQLLRHF
ANQRFNPAHNLLFHF

SEQ ID NO: 211429 - protein, 15 aa, Artificial Sequence
  Description of Artificial Sequence: Synthetic peptide
  Seed: ANQRLNPMHQLLRHF
ANQRFNPAHNLLGHF

SEQ ID NO: 211430 - protein, 15 aa, Artificial Sequence
  Description of Artificial Sequence: Synthetic peptide
  Seed: ANQRLNPMHQLLRHF
ANQRFNPAHNLLIHF

SEQ ID NO: 211431 - protein, 15 aa, Artificial Sequence
  Description of Artificial Sequence: Synthetic peptide
  Seed: ANQRLNPMHQLLRHF
ANQRFNPAHNLLLHF

SEQ ID NO: 211432 - protein, 15 aa, Artificial Sequence
  Description of Artificial Sequence: Synthetic peptide
  Seed: ANQRLNPMHQLLRHF
ANQRFNPAHNLLMHF

SEQ ID NO: 211433 - protein, 15 aa, Artificial Sequence
  Description of Artificial Sequence: Synthetic peptide
  Seed: ANQRLNPMHQLLRHF
ANQRFNPAHNLLNHF

SEQ ID NO: 211434 - protein, 15 aa, Artificial Sequence
  Description of Artificial Sequence: Synthetic peptide
  Seed: ANQRLNPMHQLLRHF
ANQRFNPAHNLLSHF

SEQ ID NO: 211435 - protein, 15 aa, Artificial Sequence
  Description of Artificial Sequence: Synthetic peptide
  Seed: ANQRLNPMHQLLRHF
ANQRFNPAHNLLTHF

SEQ ID NO: 211436 - protein, 15 aa, Artificial Sequence
  Description of Artificial Sequence: Synthetic peptide
  Seed: ANQRLNPMHQLLRHF
ANQRFNPAHNLLVHF

SEQ ID NO: 211437 - protein, 15 aa, Artificial Sequence
  Description of Artificial Sequence: Synthetic peptide
  Seed: ANQRLNPMHQLLRHF
ANQRFNPAHPLLAHF

SEQ ID NO: 211438 - protein, 15 aa, Artificial Sequence
  Description of Artificial Sequence: Synthetic peptide
  Seed: ANQRLNPMHQLLRHF
ANQRFNPAHPLLCHF

SEQ ID NO: 211439 - protein, 15 aa, Artificial Sequence
  Description of Artificial Sequence: Synthetic peptide
  Seed: ANQRLNPMHQLLRHF
ANQRFNPAHPLLFHF

SEQ ID NO: 211440 - protein, 15 aa, Artificial Sequence
  Description of Artificial Sequence: Synthetic peptide
  Seed: ANQRLNPMHQLLRHF
ANQRFNPAHPLLGHF

SEQ ID NO: 211441 - protein, 15 aa, Artificial Sequence
  Description of Artificial Sequence: Synthetic peptide
  Seed: ANQRLNPMHQLLRHF
ANQRFNPAHPLLHHF

SEQ ID NO: 211442 - protein, 15 aa, Artificial Sequence
  Description of Artificial Sequence: Synthetic peptide
  Seed: ANQRLNPMHQLLRHF
ANQRFNPAHPLLIHF

SEQ ID NO: 211443 - protein, 15 aa, Artificial Sequence
  Description of Artificial Sequence: Synthetic peptide
  Seed: ANQRLNPMHQLLRHF
ANQRFNPAHPLLKHF

SEQ ID NO: 211444 - protein, 15 aa, Artificial Sequence
  Description of Artificial Sequence: Synthetic peptide
  Seed: ANQRLNPMHQLLRHF
ANQRFNPAHPLLLHF

SEQ ID NO: 211445 - protein, 15 aa, Artificial Sequence
  Description of Artificial Sequence: Synthetic peptide
  Seed: ANQRLNPMHQLLRHF
ANQRFNPAHPLLMHF

SEQ ID NO: 211446 - protein, 15 aa, Artificial Sequence
  Description of Artificial Sequence: Synthetic peptide
  Seed: ANQRLNPMHQLLRHF
ANQRFNPAHPLLNHF

SEQ ID NO: 211447 - protein, 15 aa, Artificial Sequence
  Description of Artificial Sequence: Synthetic peptide
  Seed: ANQRLNPMHQLLRHF
ANQRFNPAHPLLPHF

SEQ ID NO: 211448 - protein, 15 aa, Artificial Sequence
  Description of Artificial Sequence: Synthetic peptide
  Seed: ANQRLNPMHQLLRHF
ANQRFNPAHPLLQHF

SEQ ID NO: 211449 - protein, 15 aa, Artificial Sequence
  Description of Artificial Sequence: Synthetic peptide
  Seed: ANQRLNPMHQLLRHF
ANQRFNPAHPLLRHF

SEQ ID NO: 211450 - protein, 15 aa, Artificial Sequence
  Description of Artificial Sequence: Synthetic peptide
  Seed: ANQRLNPMHQLLRHF
ANQRFNPAHPLLSHF

SEQ ID NO: 211451 - protein, 15 aa, Artificial Sequence
  Description of Artificial Sequence: Synthetic peptide
  Seed: ANQRLNPMHQLLRHF
ANQRFNPAHPLLTHF

SEQ ID NO: 211452 - protein, 15 aa, Artificial Sequence
  Description of Artificial Sequence: Synthetic peptide
  Seed: ANQRLNPMHQLLRHF
ANQRFNPAHPLLVHF

SEQ ID NO: 211453 - protein, 15 aa, Artificial Sequence
  Description of Artificial Sequence: Synthetic peptide
  Seed: ANQRLNPMHQLLRHF
ANQRFNPAHPLLWHF

SEQ ID NO: 211454 - protein, 15 aa, Artificial Sequence
  Description of Artificial Sequence: Synthetic peptide
  Seed: ANQRLNPMHQLLRHF
ANQRFNPAHPLLYHF

SEQ ID NO: 211455 - protein, 15 aa, Artificial Sequence
  Description of Artificial Sequence: Synthetic peptide
  Seed: ANQRLNPMHQLLRHF
ANQRFNPAHQLLAHF

SEQ ID NO: 211456 - protein, 15 aa, Artificial Sequence
  Description of Artificial Sequence: Synthetic peptide
  Seed: ANQRLNPMHQLLRHF
ANQRFNPAHQLLIHF

SEQ ID NO: 211457 - protein, 15 aa, Artificial Sequence
  Description of Artificial Sequence: Synthetic peptide
  Seed: ANQRLNPMHQLLRHF
ANQRFNPAHQLLLHF

SEQ ID NO: 211458 - protein, 15 aa, Artificial Sequence
  Description of Artificial Sequence: Synthetic peptide
  Seed: ANQRLNPMHQLLRHF
ANQRFNPAHQLLVHF

SEQ ID NO: 211459 - protein, 15 aa, Artificial Sequence
  Description of Artificial Sequence: Synthetic peptide
  Seed: ANQRLNPMHQLLRHF
ANQRFNPAHRLLAHF

SEQ ID NO: 211460 - protein, 15 aa, Artificial Sequence
  Description of Artificial Sequence: Synthetic peptide
  Seed: ANQRLNPMHQLLRHF
ANQRFNPAHRLLGHF

SEQ ID NO: 211461 - protein, 15 aa, Artificial Sequence
  Description of Artificial Sequence: Synthetic peptide
  Seed: ANQRLNPMHQLLRHF
ANQRFNPAHRLLHHF

SEQ ID NO: 211462 - protein, 15 aa, Artificial Sequence
  Description of Artificial Sequence: Synthetic peptide
  Seed: ANQRLNPMHQLLRHF
ANQRFNPAHRLLIHF

SEQ ID NO: 211463 - protein, 15 aa, Artificial Sequence
  Description of Artificial Sequence: Synthetic peptide
  Seed: ANQRLNPMHQLLRHF
ANQRFNPAHRLLKHF

SEQ ID NO: 211464 - protein, 15 aa, Artificial Sequence
  Description of Artificial Sequence: Synthetic peptide
  Seed: ANQRLNPMHQLLRHF
ANQRFNPAHRLLLHF

SEQ ID NO: 211465 - protein, 15 aa, Artificial Sequence
  Description of Artificial Sequence: Synthetic peptide
  Seed: ANQRLNPMHQLLRHF
ANQRFNPAHRLLMHF

SEQ ID NO: 211466 - protein, 15 aa, Artificial Sequence
  Description of Artificial Sequence: Synthetic peptide
  Seed: ANQRLNPMHQLLRHF
ANQRFNPAHRLLNHF

SEQ ID NO: 211467 - protein, 15 aa, Artificial Sequence
  Description of Artificial Sequence: Synthetic peptide
  Seed: ANQRLNPMHQLLRHF
ANQRFNPAHRLLPHF

SEQ ID NO: 211468 - protein, 15 aa, Artificial Sequence
  Description of Artificial Sequence: Synthetic peptide
  Seed: ANQRLNPMHQLLRHF
ANQRFNPAHRLLQHF

SEQ ID NO: 211469 - protein, 15 aa, Artificial Sequence
  Description of Artificial Sequence: Synthetic peptide
  Seed: ANQRLNPMHQLLRHF
ANQRFNPAHRLLRHF

SEQ ID NO: 211470 - protein, 15 aa, Artificial Sequence
  Description of Artificial Sequence: Synthetic peptide
  Seed: ANQRLNPMHQLLRHF
ANQRFNPAHRLLSHF

SEQ ID NO: 211471 - protein, 15 aa, Artificial Sequence
  Description of Artificial Sequence: Synthetic peptide
  Seed: ANQRLNPMHQLLRHF
ANQRFNPAHRLLTHF

SEQ ID NO: 211472 - protein, 15 aa, Artificial Sequence
  Description of Artificial Sequence: Synthetic peptide
  Seed: ANQRLNPMHQLLRHF
ANQRFNPAHRLLVHF

SEQ ID NO: 211473 - protein, 15 aa, Artificial Sequence
  Description of Artificial Sequence: Synthetic peptide
  Seed: ANQRLNPMHQLLRHF
ANQRFNPAHSLLAHF

SEQ ID NO: 211474 - protein, 15 aa, Artificial Sequence
  Description of Artificial Sequence: Synthetic peptide
  Seed: ANQRLNPMHQLLRHF
ANQRFNPAHSLLCHF

SEQ ID NO: 211475 - protein, 15 aa, Artificial Sequence
  Description of Artificial Sequence: Synthetic peptide
  Seed: ANQRLNPMHQLLRHF
ANQRFNPAHSLLFHF

SEQ ID NO: 211476 - protein, 15 aa, Artificial Sequence
  Description of Artificial Sequence: Synthetic peptide
  Seed: ANQRLNPMHQLLRHF
ANQRFNPAHSLLGHF

SEQ ID NO: 211477 - protein, 15 aa, Artificial Sequence
  Description of Artificial Sequence: Synthetic peptide
  Seed: ANQRLNPMHQLLRHF
ANQRFNPAHSLLHHF

SEQ ID NO: 211478 - protein, 15 aa, Artificial Sequence
  Description of Artificial Sequence: Synthetic peptide
  Seed: ANQRLNPMHQLLRHF
ANQRFNPAHSLLIHF

SEQ ID NO: 211479 - protein, 15 aa, Artificial Sequence
  Description of Artificial Sequence: Synthetic peptide
  Seed: ANQRLNPMHQLLRHF
ANQRFNPAHSLLKHF

SEQ ID NO: 211480 - protein, 15 aa, Artificial Sequence
  Description of Artificial Sequence: Synthetic peptide
  Seed: ANQRLNPMHQLLRHF
ANQRFNPAHSLLLHF

SEQ ID NO: 211481 - protein, 15 aa, Artificial Sequence
  Description of Artificial Sequence: Synthetic peptide
  Seed: ANQRLNPMHQLLRHF
ANQRFNPAHSLLMHF

SEQ ID NO: 211482 - protein, 15 aa, Artificial Sequence
  Description of Artificial Sequence: Synthetic peptide
  Seed: ANQRLNPMHQLLRHF
ANQRFNPAHSLLNHF

SEQ ID NO: 211483 - protein, 15 aa, Artificial Sequence
  Description of Artificial Sequence: Synthetic peptide
  Seed: ANQRLNPMHQLLRHF
ANQRFNPAHSLLPHF

SEQ ID NO: 211484 - protein, 15 aa, Artificial Sequence
  Description of Artificial Sequence: Synthetic peptide
  Seed: ANQRLNPMHQLLRHF
ANQRFNPAHSLLQHF

SEQ ID NO: 211485 - protein, 15 aa, Artificial Sequence
  Description of Artificial Sequence: Synthetic peptide
  Seed: ANQRLNPMHQLLRHF
ANQRFNPAHSLLRHF

SEQ ID NO: 211486 - protein, 15 aa, Artificial Sequence
  Description of Artificial Sequence: Synthetic peptide
  Seed: ANQRLNPMHQLLRHF
ANQRFNPAHSLLSHF

SEQ ID NO: 211487 - protein, 15 aa, Artificial Sequence
  Description of Artificial Sequence: Synthetic peptide
  Seed: ANQRLNPMHQLLRHF
ANQRFNPAHSLLTHF

SEQ ID NO: 211488 - protein, 15 aa, Artificial Sequence
  Description of Artificial Sequence: Synthetic peptide
  Seed: ANQRLNPMHQLLRHF
ANQRFNPAHSLLVHF

SEQ ID NO: 211489 - protein, 15 aa, Artificial Sequence
  Description of Artificial Sequence: Synthetic peptide
  Seed: ANQRLNPMHQLLRHF
ANQRFNPAHSLLWHF

SEQ ID NO: 211490 - protein, 15 aa, Artificial Sequence
  Description of Artificial Sequence: Synthetic peptide
  Seed: ANQRLNPMHQLLRHF
ANQRFNPAHSLLYHF

SEQ ID NO: 211491 - protein, 15 aa, Artificial Sequence
  Description of Artificial Sequence: Synthetic peptide
  Seed: ANQRLNPMHQLLRHF
ANQRFNPAHTLLAHF

SEQ ID NO: 211492 - protein, 15 aa, Artificial Sequence
  Description of Artificial Sequence: Synthetic peptide
  Seed: ANQRLNPMHQLLRHF
ANQRFNPAHTLLCHF

SEQ ID NO: 211493 - protein, 15 aa, Artificial Sequence
  Description of Artificial Sequence: Synthetic peptide
  Seed: ANQRLNPMHQLLRHF
ANQRFNPAHTLLFHF

SEQ ID NO: 211494 - protein, 15 aa, Artificial Sequence
  Description of Artificial Sequence: Synthetic peptide
  Seed: ANQRLNPMHQLLRHF
ANQRFNPAHTLLGHF

SEQ ID NO: 211495 - protein, 15 aa, Artificial Sequence
  Description of Artificial Sequence: Synthetic peptide
  Seed: ANQRLNPMHQLLRHF
ANQRFNPAHTLLHHF

SEQ ID NO: 211496 - protein, 15 aa, Artificial Sequence
  Description of Artificial Sequence: Synthetic peptide
  Seed: ANQRLNPMHQLLRHF
ANQRFNPAHTLLIHF

SEQ ID NO: 211497 - protein, 15 aa, Artificial Sequence
  Description of Artificial Sequence: Synthetic peptide
  Seed: ANQRLNPMHQLLRHF
ANQRFNPAHTLLLHF

SEQ ID NO: 211498 - protein, 15 aa, Artificial Sequence
  Description of Artificial Sequence: Synthetic peptide
  Seed: ANQRLNPMHQLLRHF
ANQRFNPAHTLLMHF

SEQ ID NO: 211499 - protein, 15 aa, Artificial Sequence
  Description of Artificial Sequence: Synthetic peptide
  Seed: ANQRLNPMHQLLRHF
ANQRFNPAHTLLNHF

SEQ ID NO: 211500 - protein, 15 aa, Artificial Sequence
  Description of Artificial Sequence: Synthetic peptide
  Seed: ANQRLNPMHQLLRHF
ANQRFNPAHTLLQHF

SEQ ID NO: 211501 - protein, 15 aa, Artificial Sequence
  Description of Artificial Sequence: Synthetic peptide
  Seed: ANQRLNPMHQLLRHF
ANQRFNPAHTLLSHF

SEQ ID NO: 211502 - protein, 15 aa, Artificial Sequence
  Description of Artificial Sequence: Synthetic peptide
  Seed: ANQRLNPMHQLLRHF
ANQRFNPAHTLLTHF

SEQ ID NO: 211503 - protein, 15 aa, Artificial Sequence
  Description of Artificial Sequence: Synthetic peptide
  Seed: ANQRLNPMHQLLRHF
ANQRFNPAHTLLVHF

SEQ ID NO: 211504 - protein, 15 aa, Artificial Sequence
  Description of Artificial Sequence: Synthetic peptide
  Seed: ANQRLNPMHQLLRHF
ANQRFNPAHVLLAHF

SEQ ID NO: 211505 - protein, 15 aa, Artificial Sequence
  Description of Artificial Sequence: Synthetic peptide
  Seed: ANQRLNPMHQLLRHF
ANQRFNPAHVLLGHF

SEQ ID NO: 211506 - protein, 15 aa, Artificial Sequence
  Description of Artificial Sequence: Synthetic peptide
  Seed: ANQRLNPMHQLLRHF
ANQRFNPAHVLLHHF

SEQ ID NO: 211507 - protein, 15 aa, Artificial Sequence
  Description of Artificial Sequence: Synthetic peptide
  Seed: ANQRLNPMHQLLRHF
ANQRFNPAHVLLIHF

SEQ ID NO: 211508 - protein, 15 aa, Artificial Sequence
  Description of Artificial Sequence: Synthetic peptide
  Seed: ANQRLNPMHQLLRHF
ANQRFNPAHVLLLHF

SEQ ID NO: 211509 - protein, 15 aa, Artificial Sequence
  Description of Artificial Sequence: Synthetic peptide
  Seed: ANQRLNPMHQLLRHF
ANQRFNPAHVLLMHF

SEQ ID NO: 211510 - protein, 15 aa, Artificial Sequence
  Description of Artificial Sequence: Synthetic peptide
  Seed: ANQRLNPMHQLLRHF
ANQRFNPAHVLLNHF

SEQ ID NO: 211511 - protein, 15 aa, Artificial Sequence
  Description of Artificial Sequence: Synthetic peptide
  Seed: ANQRLNPMHQLLRHF
ANQRFNPAHVLLQHF

SEQ ID NO: 211512 - protein, 15 aa, Artificial Sequence
  Description of Artificial Sequence: Synthetic peptide
  Seed: ANQRLNPMHQLLRHF
ANQRFNPAHVLLSHF

SEQ ID NO: 211513 - protein, 15 aa, Artificial Sequence
  Description of Artificial Sequence: Synthetic peptide
  Seed: ANQRLNPMHQLLRHF
ANQRFNPAHVLLTHF

SEQ ID NO: 211514 - protein, 15 aa, Artificial Sequence
  Description of Artificial Sequence: Synthetic peptide
  Seed: ANQRLNPMHQLLRHF
ANQRFNPAHVLLVHF

SEQ ID NO: 211515 - protein, 15 aa, Artificial Sequence
  Description of Artificial Sequence: Synthetic peptide
  Seed: ANQRLNPMHQLLRHF
ANQRFNPAHWLLIHF

SEQ ID NO: 211516 - protein, 15 aa, Artificial Sequence
  Description of Artificial Sequence: Synthetic peptide
  Seed: ANQRLNPMHQLLRHF
ANQRFNPAHWLLLHF

SEQ ID NO: 211517 - protein, 15 aa, Artificial Sequence
  Description of Artificial Sequence: Synthetic peptide
  Seed: ANQRLNPMHQLLRHF
ANQRFNPAHWLLVHF

SEQ ID NO: 211518 - protein, 15 aa, Artificial Sequence
  Description of Artificial Sequence: Synthetic peptide
  Seed: ANQRLNPMHQLLRHF
ANQRFNPAHYLLIHF

SEQ ID NO: 211519 - protein, 15 aa, Artificial Sequence
  Description of Artificial Sequence: Synthetic peptide
  Seed: ANQRLNPMHQLLRHF
ANQRFNPAHYLLLHF

SEQ ID NO: 211520 - protein, 15 aa, Artificial Sequence
  Description of Artificial Sequence: Synthetic peptide
  Seed: ANQRLNPMHQLLRHF
ANQRFNPAHYLLVHF

SEQ ID NO: 211521 - protein, 15 aa, Artificial Sequence
  Description of Artificial Sequence: Synthetic peptide
  Seed: ANQRLNPMHQLLRHF
ANQRFNPCHALLAHF

SEQ ID NO: 211522 - protein, 15 aa, Artificial Sequence
  Description of Artificial Sequence: Synthetic peptide
  Seed: ANQRLNPMHQLLRHF
ANQRFNPCHALLIHF

SEQ ID NO: 211523 - protein, 15 aa, Artificial Sequence
  Description of Artificial Sequence: Synthetic peptide
  Seed: ANQRLNPMHQLLRHF
ANQRFNPCHALLLHF

SEQ ID NO: 211524 - protein, 15 aa, Artificial Sequence
  Description of Artificial Sequence: Synthetic peptide
  Seed: ANQRLNPMHQLLRHF
ANQRFNPCHALLMHF

SEQ ID NO: 211525 - protein, 15 aa, Artificial Sequence
  Description of Artificial Sequence: Synthetic peptide
  Seed: ANQRLNPMHQLLRHF
ANQRFNPCHALLSHF

SEQ ID NO: 211526 - protein, 15 aa, Artificial Sequence
  Description of Artificial Sequence: Synthetic peptide
  Seed: ANQRLNPMHQLLRHF
ANQRFNPCHALLTHF

SEQ ID NO: 211527 - protein, 15 aa, Artificial Sequence
  Description of Artificial Sequence: Synthetic peptide
  Seed: ANQRLNPMHQLLRHF
ANQRFNPCHALLVHF

SEQ ID NO: 211528 - protein, 15 aa, Artificial Sequence
  Description of Artificial Sequence: Synthetic peptide
  Seed: ANQRLNPMHQLLRHF
ANQRFNPCHFLLFHF

SEQ ID NO: 211529 - protein, 15 aa, Artificial Sequence
  Description of Artificial Sequence: Synthetic peptide
  Seed: ANQRLNPMHQLLRHF
ANQRFNPCHFLLIHF

SEQ ID NO: 211530 - protein, 15 aa, Artificial Sequence
  Description of Artificial Sequence: Synthetic peptide
  Seed: ANQRLNPMHQLLRHF
ANQRFNPCHFLLLHF

SEQ ID NO: 211531 - protein, 15 aa, Artificial Sequence
  Description of Artificial Sequence: Synthetic peptide
  Seed: ANQRLNPMHQLLRHF
ANQRFNPCHFLLMHF

SEQ ID NO: 211532 - protein, 15 aa, Artificial Sequence
  Description of Artificial Sequence: Synthetic peptide
  Seed: ANQRLNPMHQLLRHF
ANQRFNPCHFLLVHF

SEQ ID NO: 211533 - protein, 15 aa, Artificial Sequence
  Description of Artificial Sequence: Synthetic peptide
  Seed: ANQRLNPMHQLLRHF
ANQRFNPCHGLLAHF

SEQ ID NO: 211534 - protein, 15 aa, Artificial Sequence
  Description of Artificial Sequence: Synthetic peptide
  Seed: ANQRLNPMHQLLRHF
ANQRFNPCHGLLIHF

SEQ ID NO: 211535 - protein, 15 aa, Artificial Sequence
  Description of Artificial Sequence: Synthetic peptide
  Seed: ANQRLNPMHQLLRHF
ANQRFNPCHGLLLHF

SEQ ID NO: 211536 - protein, 15 aa, Artificial Sequence
  Description of Artificial Sequence: Synthetic peptide
  Seed: ANQRLNPMHQLLRHF
ANQRFNPCHGLLVHF

SEQ ID NO: 211537 - protein, 15 aa, Artificial Sequence
  Description of Artificial Sequence: Synthetic peptide
  Seed: ANQRLNPMHQLLRHF
ANQRFNPCHPLLAHF

SEQ ID NO: 211538 - protein, 15 aa, Artificial Sequence
  Description of Artificial Sequence: Synthetic peptide
  Seed: ANQRLNPMHQLLRHF
ANQRFNPCHPLLIHF

SEQ ID NO: 211539 - protein, 15 aa, Artificial Sequence
  Description of Artificial Sequence: Synthetic peptide
  Seed: ANQRLNPMHQLLRHF
ANQRFNPCHPLLLHF

SEQ ID NO: 211540 - protein, 15 aa, Artificial Sequence
  Description of Artificial Sequence: Synthetic peptide
  Seed: ANQRLNPMHQLLRHF
ANQRFNPCHPLLVHF

SEQ ID NO: 211541 - protein, 15 aa, Artificial Sequence
  Description of Artificial Sequence: Synthetic peptide
  Seed: ANQRLNPMHQLLRHF
ANQRFNPCHRLLAHF

SEQ ID NO: 211542 - protein, 15 aa, Artificial Sequence
  Description of Artificial Sequence: Synthetic peptide
  Seed: ANQRLNPMHQLLRHF
ANQRFNPCHRLLSHF

SEQ ID NO: 211543 - protein, 15 aa, Artificial Sequence
  Description of Artificial Sequence: Synthetic peptide
  Seed: ANQRLNPMHQLLRHF
ANQRFNPCHSLLAHF

SEQ ID NO: 211544 - protein, 15 aa, Artificial Sequence
  Description of Artificial Sequence: Synthetic peptide
  Seed: ANQRLNPMHQLLRHF
ANQRFNPCHSLLIHF

SEQ ID NO: 211545 - protein, 15 aa, Artificial Sequence
  Description of Artificial Sequence: Synthetic peptide
  Seed: ANQRLNPMHQLLRHF
ANQRFNPCHSLLLHF

SEQ ID NO: 211546 - protein, 15 aa, Artificial Sequence
  Description of Artificial Sequence: Synthetic peptide
  Seed: ANQRLNPMHQLLRHF
ANQRFNPCHSLLTHF

SEQ ID NO: 211547 - protein, 15 aa, Artificial Sequence
  Description of Artificial Sequence: Synthetic peptide
  Seed: ANQRLNPMHQLLRHF
ANQRFNPCHSLLVHF

SEQ ID NO: 211548 - protein, 15 aa, Artificial Sequence
  Description of Artificial Sequence: Synthetic peptide
  Seed: ANQRLNPMHQLLRHF
ANQRFNPCHTLLLHF

SEQ ID NO: 211549 - protein, 15 aa, Artificial Sequence
  Description of Artificial Sequence: Synthetic peptide
  Seed: ANQRLNPMHQLLRHF
ANQRFNPCHTLLVHF

SEQ ID NO: 211550 - protein, 15 aa, Artificial Sequence
  Description of Artificial Sequence: Synthetic peptide
  Seed: ANQRLNPMHQLLRHF
ANQRFNPDHALLIHF

SEQ ID NO: 211551 - protein, 15 aa, Artificial Sequence
  Description of Artificial Sequence: Synthetic peptide
  Seed: ANQRLNPMHQLLRHF
ANQRFNPDHALLLHF

SEQ ID NO: 211552 - protein, 15 aa, Artificial Sequence
  Description of Artificial Sequence: Synthetic peptide
  Seed: ANQRLNPMHQLLRHF
ANQRFNPDHALLVHF

SEQ ID NO: 211553 - protein, 15 aa, Artificial Sequence
  Description of Artificial Sequence: Synthetic peptide
  Seed: ANQRLNPMHQLLRHF
ANQRFNPDHFLLIHF

SEQ ID NO: 211554 - protein, 15 aa, Artificial Sequence
  Description of Artificial Sequence: Synthetic peptide
  Seed: ANQRLNPMHQLLRHF
ANQRFNPDHFLLLHF

SEQ ID NO: 211555 - protein, 15 aa, Artificial Sequence
  Description of Artificial Sequence: Synthetic peptide
  Seed: ANQRLNPMHQLLRHF
ANQRFNPDHFLLVHF

SEQ ID NO: 211556 - protein, 15 aa, Artificial Sequence
  Description of Artificial Sequence: Synthetic peptide
  Seed: ANQRLNPMHQLLRHF
ANQRFNPEHALLAHF

SEQ ID NO: 211557 - protein, 15 aa, Artificial Sequence
  Description of Artificial Sequence: Synthetic peptide
  Seed: ANQRLNPMHQLLRHF
ANQRFNPEHALLGHF

SEQ ID NO: 211558 - protein, 15 aa, Artificial Sequence
  Description of Artificial Sequence: Synthetic peptide
  Seed: ANQRLNPMHQLLRHF
ANQRFNPEHALLIHF

SEQ ID NO: 211559 - protein, 15 aa, Artificial Sequence
  Description of Artificial Sequence: Synthetic peptide
  Seed: ANQRLNPMHQLLRHF
ANQRFNPEHALLLHF

SEQ ID NO: 211560 - protein, 15 aa, Artificial Sequence
  Description of Artificial Sequence: Synthetic peptide
  Seed: ANQRLNPMHQLLRHF
ANQRFNPEHALLMHF

SEQ ID NO: 211561 - protein, 15 aa, Artificial Sequence
  Description of Artificial Sequence: Synthetic peptide
  Seed: ANQRLNPMHQLLRHF
ANQRFNPEHALLSHF

SEQ ID NO: 211562 - protein, 15 aa, Artificial Sequence
  Description of Artificial Sequence: Synthetic peptide
  Seed: ANQRLNPMHQLLRHF
ANQRFNPEHALLTHF

SEQ ID NO: 211563 - protein, 15 aa, Artificial Sequence
  Description of Artificial Sequence: Synthetic peptide
  Seed: ANQRLNPMHQLLRHF
ANQRFNPEHALLVHF

SEQ ID NO: 211564 - protein, 15 aa, Artificial Sequence
  Description of Artificial Sequence: Synthetic peptide
  Seed: ANQRLNPMHQLLRHF
ANQRFNPEHFLLAHF

SEQ ID NO: 211565 - protein, 15 aa, Artificial Sequence
  Description of Artificial Sequence: Synthetic peptide
  Seed: ANQRLNPMHQLLRHF
ANQRFNPEHFLLEHF

SEQ ID NO: 211566 - protein, 15 aa, Artificial Sequence
  Description of Artificial Sequence: Synthetic peptide
  Seed: ANQRLNPMHQLLRHF
ANQRFNPEHFLLFHF

SEQ ID NO: 211567 - protein, 15 aa, Artificial Sequence
  Description of Artificial Sequence: Synthetic peptide
  Seed: ANQRLNPMHQLLRHF
ANQRFNPEHFLLIHF

SEQ ID NO: 211568 - protein, 15 aa, Artificial Sequence
  Description of Artificial Sequence: Synthetic peptide
  Seed: ANQRLNPMHQLLRHF
ANQRFNPEHFLLLHF

SEQ ID NO: 211569 - protein, 15 aa, Artificial Sequence
  Description of Artificial Sequence: Synthetic peptide
  Seed: ANQRLNPMHQLLRHF
ANQRFNPEHFLLMHF

SEQ ID NO: 211570 - protein, 15 aa, Artificial Sequence
  Description of Artificial Sequence: Synthetic peptide
  Seed: ANQRLNPMHQLLRHF
ANQRFNPEHFLLNHF

SEQ ID NO: 211571 - protein, 15 aa, Artificial Sequence
  Description of Artificial Sequence: Synthetic peptide
  Seed: ANQRLNPMHQLLRHF
ANQRFNPEHFLLSHF

SEQ ID NO: 211572 - protein, 15 aa, Artificial Sequence
  Description of Artificial Sequence: Synthetic peptide
  Seed: ANQRLNPMHQLLRHF
ANQRFNPEHFLLTHF

SEQ ID NO: 211573 - protein, 15 aa, Artificial Sequence
  Description of Artificial Sequence: Synthetic peptide
  Seed: ANQRLNPMHQLLRHF
ANQRFNPEHFLLVHF

SEQ ID NO: 211574 - protein, 15 aa, Artificial Sequence
  Description of Artificial Sequence: Synthetic peptide
  Seed: ANQRLNPMHQLLRHF
ANQRFNPEHFLLYHF

SEQ ID NO: 211575 - protein, 15 aa, Artificial Sequence
  Description of Artificial Sequence: Synthetic peptide
  Seed: ANQRLNPMHQLLRHF
ANQRFNPEHGLLAHF

SEQ ID NO: 211576 - protein, 15 aa, Artificial Sequence
  Description of Artificial Sequence: Synthetic peptide
  Seed: ANQRLNPMHQLLRHF
ANQRFNPEHGLLIHF

SEQ ID NO: 211577 - protein, 15 aa, Artificial Sequence
  Description of Artificial Sequence: Synthetic peptide
  Seed: ANQRLNPMHQLLRHF
ANQRFNPEHGLLLHF

SEQ ID NO: 211578 - protein, 15 aa, Artificial Sequence
  Description of Artificial Sequence: Synthetic peptide
  Seed: ANQRLNPMHQLLRHF
ANQRFNPEHGLLMHF

SEQ ID NO: 211579 - protein, 15 aa, Artificial Sequence
  Description of Artificial Sequence: Synthetic peptide
  Seed: ANQRLNPMHQLLRHF
ANQRFNPEHGLLSHF

SEQ ID NO: 211580 - protein, 15 aa, Artificial Sequence
  Description of Artificial Sequence: Synthetic peptide
  Seed: ANQRLNPMHQLLRHF
ANQRFNPEHGLLTHF

SEQ ID NO: 211581 - protein, 15 aa, Artificial Sequence
  Description of Artificial Sequence: Synthetic peptide
  Seed: ANQRLNPMHQLLRHF
ANQRFNPEHGLLVHF

SEQ ID NO: 211582 - protein, 15 aa, Artificial Sequence
  Description of Artificial Sequence: Synthetic peptide
  Seed: ANQRLNPMHQLLRHF
ANQRFNPEHNLLAHF

SEQ ID NO: 211583 - protein, 15 aa, Artificial Sequence
  Description of Artificial Sequence: Synthetic peptide
  Seed: ANQRLNPMHQLLRHF
ANQRFNPEHNLLIHF

SEQ ID NO: 211584 - protein, 15 aa, Artificial Sequence
  Description of Artificial Sequence: Synthetic peptide
  Seed: ANQRLNPMHQLLRHF
ANQRFNPEHNLLLHF

SEQ ID NO: 211585 - protein, 15 aa, Artificial Sequence
  Description of Artificial Sequence: Synthetic peptide
  Seed: ANQRLNPMHQLLRHF
ANQRFNPEHNLLVHF

SEQ ID NO: 211586 - protein, 15 aa, Artificial Sequence
  Description of Artificial Sequence: Synthetic peptide
  Seed: ANQRLNPMHQLLRHF
ANQRFNPEHPLLAHF

SEQ ID NO: 211587 - protein, 15 aa, Artificial Sequence
  Description of Artificial Sequence: Synthetic peptide
  Seed: ANQRLNPMHQLLRHF
ANQRFNPEHPLLIHF

SEQ ID NO: 211588 - protein, 15 aa, Artificial Sequence
  Description of Artificial Sequence: Synthetic peptide
  Seed: ANQRLNPMHQLLRHF
ANQRFNPEHPLLLHF

SEQ ID NO: 211589 - protein, 15 aa, Artificial Sequence
  Description of Artificial Sequence: Synthetic peptide
  Seed: ANQRLNPMHQLLRHF
ANQRFNPEHPLLMHF

SEQ ID NO: 211590 - protein, 15 aa, Artificial Sequence
  Description of Artificial Sequence: Synthetic peptide
  Seed: ANQRLNPMHQLLRHF
ANQRFNPEHPLLVHF

SEQ ID NO: 211591 - protein, 15 aa, Artificial Sequence
  Description of Artificial Sequence: Synthetic peptide
  Seed: ANQRLNPMHQLLRHF
ANQRFNPEHSLLAHF

SEQ ID NO: 211592 - protein, 15 aa, Artificial Sequence
  Description of Artificial Sequence: Synthetic peptide
  Seed: ANQRLNPMHQLLRHF
ANQRFNPEHSLLIHF

SEQ ID NO: 211593 - protein, 15 aa, Artificial Sequence
  Description of Artificial Sequence: Synthetic peptide
  Seed: ANQRLNPMHQLLRHF
ANQRFNPEHSLLLHF

SEQ ID NO: 211594 - protein, 15 aa, Artificial Sequence
  Description of Artificial Sequence: Synthetic peptide
  Seed: ANQRLNPMHQLLRHF
ANQRFNPEHSLLMHF

SEQ ID NO: 211595 - protein, 15 aa, Artificial Sequence
  Description of Artificial Sequence: Synthetic peptide
  Seed: ANQRLNPMHQLLRHF
ANQRFNPEHSLLSHF

SEQ ID NO: 211596 - protein, 15 aa, Artificial Sequence
  Description of Artificial Sequence: Synthetic peptide
  Seed: ANQRLNPMHQLLRHF
ANQRFNPEHSLLTHF

SEQ ID NO: 211597 - protein, 15 aa, Artificial Sequence
  Description of Artificial Sequence: Synthetic peptide
  Seed: ANQRLNPMHQLLRHF
ANQRFNPEHSLLVHF

SEQ ID NO: 211598 - protein, 15 aa, Artificial Sequence
  Description of Artificial Sequence: Synthetic peptide
  Seed: ANQRLNPMHQLLRHF
ANQRFNPEHTLLAHF

SEQ ID NO: 211599 - protein, 15 aa, Artificial Sequence
  Description of Artificial Sequence: Synthetic peptide
  Seed: ANQRLNPMHQLLRHF
ANQRFNPEHTLLIHF

SEQ ID NO: 211600 - protein, 15 aa, Artificial Sequence
  Description of Artificial Sequence: Synthetic peptide
  Seed: ANQRLNPMHQLLRHF
ANQRFNPEHTLLLHF

SEQ ID NO: 211601 - protein, 15 aa, Artificial Sequence
  Description of Artificial Sequence: Synthetic peptide
  Seed: ANQRLNPMHQLLRHF
ANQRFNPEHTLLVHF

SEQ ID NO: 211602 - protein, 15 aa, Artificial Sequence
  Description of Artificial Sequence: Synthetic peptide
  Seed: ANQRLNPMHQLLRHF
ANQRFNPEHWLLLHF

SEQ ID NO: 211603 - protein, 15 aa, Artificial Sequence
  Description of Artificial Sequence: Synthetic peptide
  Seed: ANQRLNPMHQLLRHF
ANQRFNPEHYLLIHF

SEQ ID NO: 211604 - protein, 15 aa, Artificial Sequence
  Description of Artificial Sequence: Synthetic peptide
  Seed: ANQRLNPMHQLLRHF
ANQRFNPEHYLLLHF

SEQ ID NO: 211605 - protein, 15 aa, Artificial Sequence
  Description of Artificial Sequence: Synthetic peptide
  Seed: ANQRLNPMHQLLRHF
ANQRFNPFHALLAHF

SEQ ID NO: 211606 - protein, 15 aa, Artificial Sequence
  Description of Artificial Sequence: Synthetic peptide
  Seed: ANQRLNPMHQLLRHF
ANQRFNPFHALLGHF

SEQ ID NO: 211607 - protein, 15 aa, Artificial Sequence
  Description of Artificial Sequence: Synthetic peptide
  Seed: ANQRLNPMHQLLRHF
ANQRFNPFHALLIHF

SEQ ID NO: 211608 - protein, 15 aa, Artificial Sequence
  Description of Artificial Sequence: Synthetic peptide
  Seed: ANQRLNPMHQLLRHF
ANQRFNPFHALLLHF

SEQ ID NO: 211609 - protein, 15 aa, Artificial Sequence
  Description of Artificial Sequence: Synthetic peptide
  Seed: ANQRLNPMHQLLRHF
ANQRFNPFHALLMHF

SEQ ID NO: 211610 - protein, 15 aa, Artificial Sequence
  Description of Artificial Sequence: Synthetic peptide
  Seed: ANQRLNPMHQLLRHF
ANQRFNPFHALLNHF

SEQ ID NO: 211611 - protein, 15 aa, Artificial Sequence
  Description of Artificial Sequence: Synthetic peptide
  Seed: ANQRLNPMHQLLRHF
ANQRFNPFHALLSHF

SEQ ID NO: 211612 - protein, 15 aa, Artificial Sequence
  Description of Artificial Sequence: Synthetic peptide
  Seed: ANQRLNPMHQLLRHF
ANQRFNPFHALLTHF

SEQ ID NO: 211613 - protein, 15 aa, Artificial Sequence
  Description of Artificial Sequence: Synthetic peptide
  Seed: ANQRLNPMHQLLRHF
ANQRFNPFHALLVHF

SEQ ID NO: 211614 - protein, 15 aa, Artificial Sequence
  Description of Artificial Sequence: Synthetic peptide
  Seed: ANQRLNPMHQLLRHF
ANQRFNPFHFLLAHF

SEQ ID NO: 211615 - protein, 15 aa, Artificial Sequence
  Description of Artificial Sequence: Synthetic peptide
  Seed: ANQRLNPMHQLLRHF
ANQRFNPFHFLLDHF

SEQ ID NO: 211616 - protein, 15 aa, Artificial Sequence
  Description of Artificial Sequence: Synthetic peptide
  Seed: ANQRLNPMHQLLRHF
ANQRFNPFHFLLEHF

SEQ ID NO: 211617 - protein, 15 aa, Artificial Sequence
  Description of Artificial Sequence: Synthetic peptide
  Seed: ANQRLNPMHQLLRHF
ANQRFNPFHFLLFHF

SEQ ID NO: 211618 - protein, 15 aa, Artificial Sequence
  Description of Artificial Sequence: Synthetic peptide
  Seed: ANQRLNPMHQLLRHF
ANQRFNPFHFLLHHF

SEQ ID NO: 211619 - protein, 15 aa, Artificial Sequence
  Description of Artificial Sequence: Synthetic peptide
  Seed: ANQRLNPMHQLLRHF
ANQRFNPFHFLLIHF

SEQ ID NO: 211620 - protein, 15 aa, Artificial Sequence
  Description of Artificial Sequence: Synthetic peptide
  Seed: ANQRLNPMHQLLRHF
ANQRFNPFHFLLLHF

SEQ ID NO: 211621 - protein, 15 aa, Artificial Sequence
  Description of Artificial Sequence: Synthetic peptide
  Seed: ANQRLNPMHQLLRHF
ANQRFNPFHFLLMHF

SEQ ID NO: 211622 - protein, 15 aa, Artificial Sequence
  Description of Artificial Sequence: Synthetic peptide
  Seed: ANQRLNPMHQLLRHF
ANQRFNPFHFLLNHF

SEQ ID NO: 211623 - protein, 15 aa, Artificial Sequence
  Description of Artificial Sequence: Synthetic peptide
  Seed: ANQRLNPMHQLLRHF
ANQRFNPFHFLLRHF

SEQ ID NO: 211624 - protein, 15 aa, Artificial Sequence
  Description of Artificial Sequence: Synthetic peptide
  Seed: ANQRLNPMHQLLRHF
ANQRFNPFHFLLSHF

SEQ ID NO: 211625 - protein, 15 aa, Artificial Sequence
  Description of Artificial Sequence: Synthetic peptide
  Seed: ANQRLNPMHQLLRHF
ANQRFNPFHFLLTHF

SEQ ID NO: 211626 - protein, 15 aa, Artificial Sequence
  Description of Artificial Sequence: Synthetic peptide
  Seed: ANQRLNPMHQLLRHF
ANQRFNPFHFLLVHF

SEQ ID NO: 211627 - protein, 15 aa, Artificial Sequence
  Description of Artificial Sequence: Synthetic peptide
  Seed: ANQRLNPMHQLLRHF
ANQRFNPFHFLLYHF

SEQ ID NO: 211628 - protein, 15 aa, Artificial Sequence
  Description of Artificial Sequence: Synthetic peptide
  Seed: ANQRLNPMHQLLRHF
ANQRFNPFHGLLAHF

SEQ ID NO: 211629 - protein, 15 aa, Artificial Sequence
  Description of Artificial Sequence: Synthetic peptide
  Seed: ANQRLNPMHQLLRHF
ANQRFNPFHGLLIHF

SEQ ID NO: 211630 - protein, 15 aa, Artificial Sequence
  Description of Artificial Sequence: Synthetic peptide
  Seed: ANQRLNPMHQLLRHF
ANQRFNPFHGLLLHF

SEQ ID NO: 211631 - protein, 15 aa, Artificial Sequence
  Description of Artificial Sequence: Synthetic peptide
  Seed: ANQRLNPMHQLLRHF
ANQRFNPFHGLLMHF

SEQ ID NO: 211632 - protein, 15 aa, Artificial Sequence
  Description of Artificial Sequence: Synthetic peptide
  Seed: ANQRLNPMHQLLRHF
ANQRFNPFHGLLSHF

SEQ ID NO: 211633 - protein, 15 aa, Artificial Sequence
  Description of Artificial Sequence: Synthetic peptide
  Seed: ANQRLNPMHQLLRHF
ANQRFNPFHGLLTHF

SEQ ID NO: 211634 - protein, 15 aa, Artificial Sequence
  Description of Artificial Sequence: Synthetic peptide
  Seed: ANQRLNPMHQLLRHF
ANQRFNPFHGLLVHF

SEQ ID NO: 211635 - protein, 15 aa, Artificial Sequence
  Description of Artificial Sequence: Synthetic peptide
  Seed: ANQRLNPMHQLLRHF
ANQRFNPFHILLFHF

SEQ ID NO: 211636 - protein, 15 aa, Artificial Sequence
  Description of Artificial Sequence: Synthetic peptide
  Seed: ANQRLNPMHQLLRHF
ANQRFNPFHILLIHF

SEQ ID NO: 211637 - protein, 15 aa, Artificial Sequence
  Description of Artificial Sequence: Synthetic peptide
  Seed: ANQRLNPMHQLLRHF
ANQRFNPFHILLLHF

SEQ ID NO: 211638 - protein, 15 aa, Artificial Sequence
  Description of Artificial Sequence: Synthetic peptide
  Seed: ANQRLNPMHQLLRHF
ANQRFNPFHILLVHF

SEQ ID NO: 211639 - protein, 15 aa, Artificial Sequence
  Description of Artificial Sequence: Synthetic peptide
  Seed: ANQRLNPMHQLLRHF
ANQRFNPFHKLLAHF

SEQ ID NO: 211640 - protein, 15 aa, Artificial Sequence
  Description of Artificial Sequence: Synthetic peptide
  Seed: ANQRLNPMHQLLRHF
ANQRFNPFHKLLSHF

SEQ ID NO: 211641 - protein, 15 aa, Artificial Sequence
  Description of Artificial Sequence: Synthetic peptide
  Seed: ANQRLNPMHQLLRHF
ANQRFNPFHLLLFHF

SEQ ID NO: 211642 - protein, 15 aa, Artificial Sequence
  Description of Artificial Sequence: Synthetic peptide
  Seed: ANQRLNPMHQLLRHF
ANQRFNPFHLLLIHF

SEQ ID NO: 211643 - protein, 15 aa, Artificial Sequence
  Description of Artificial Sequence: Synthetic peptide
  Seed: ANQRLNPMHQLLRHF
ANQRFNPFHLLLLHF

SEQ ID NO: 211644 - protein, 15 aa, Artificial Sequence
  Description of Artificial Sequence: Synthetic peptide
  Seed: ANQRLNPMHQLLRHF
ANQRFNPFHLLLMHF

SEQ ID NO: 211645 - protein, 15 aa, Artificial Sequence
  Description of Artificial Sequence: Synthetic peptide
  Seed: ANQRLNPMHQLLRHF
ANQRFNPFHLLLVHF

SEQ ID NO: 211646 - protein, 15 aa, Artificial Sequence
  Description of Artificial Sequence: Synthetic peptide
  Seed: ANQRLNPMHQLLRHF
ANQRFNPFHLLLYHF

SEQ ID NO: 211647 - protein, 15 aa, Artificial Sequence
  Description of Artificial Sequence: Synthetic peptide
  Seed: ANQRLNPMHQLLRHF
ANQRFNPFHMLLFHF

SEQ ID NO: 211648 - protein, 15 aa, Artificial Sequence
  Description of Artificial Sequence: Synthetic peptide
  Seed: ANQRLNPMHQLLRHF
ANQRFNPFHMLLIHF

SEQ ID NO: 211649 - protein, 15 aa, Artificial Sequence
  Description of Artificial Sequence: Synthetic peptide
  Seed: ANQRLNPMHQLLRHF
ANQRFNPFHMLLLHF

SEQ ID NO: 211650 - protein, 15 aa, Artificial Sequence
  Description of Artificial Sequence: Synthetic peptide
  Seed: ANQRLNPMHQLLRHF
ANQRFNPFHMLLVHF

SEQ ID NO: 211651 - protein, 15 aa, Artificial Sequence
  Description of Artificial Sequence: Synthetic peptide
  Seed: ANQRLNPMHQLLRHF
ANQRFNPFHNLLAHF

SEQ ID NO: 211652 - protein, 15 aa, Artificial Sequence
  Description of Artificial Sequence: Synthetic peptide
  Seed: ANQRLNPMHQLLRHF
ANQRFNPFHNLLIHF

SEQ ID NO: 211653 - protein, 15 aa, Artificial Sequence
  Description of Artificial Sequence: Synthetic peptide
  Seed: ANQRLNPMHQLLRHF
ANQRFNPFHNLLLHF

SEQ ID NO: 211654 - protein, 15 aa, Artificial Sequence
  Description of Artificial Sequence: Synthetic peptide
  Seed: ANQRLNPMHQLLRHF
ANQRFNPFHNLLMHF

SEQ ID NO: 211655 - protein, 15 aa, Artificial Sequence
  Description of Artificial Sequence: Synthetic peptide
  Seed: ANQRLNPMHQLLRHF
ANQRFNPFHNLLVHF

SEQ ID NO: 211656 - protein, 15 aa, Artificial Sequence
  Description of Artificial Sequence: Synthetic peptide
  Seed: ANQRLNPMHQLLRHF
ANQRFNPFHPLLAHF

SEQ ID NO: 211657 - protein, 15 aa, Artificial Sequence
  Description of Artificial Sequence: Synthetic peptide
  Seed: ANQRLNPMHQLLRHF
ANQRFNPFHPLLIHF

SEQ ID NO: 211658 - protein, 15 aa, Artificial Sequence
  Description of Artificial Sequence: Synthetic peptide
  Seed: ANQRLNPMHQLLRHF
ANQRFNPFHPLLLHF

SEQ ID NO: 211659 - protein, 15 aa, Artificial Sequence
  Description of Artificial Sequence: Synthetic peptide
  Seed: ANQRLNPMHQLLRHF
ANQRFNPFHPLLMHF

SEQ ID NO: 211660 - protein, 15 aa, Artificial Sequence
  Description of Artificial Sequence: Synthetic peptide
  Seed: ANQRLNPMHQLLRHF
ANQRFNPFHPLLNHF

SEQ ID NO: 211661 - protein, 15 aa, Artificial Sequence
  Description of Artificial Sequence: Synthetic peptide
  Seed: ANQRLNPMHQLLRHF
ANQRFNPFHPLLSHF

SEQ ID NO: 211662 - protein, 15 aa, Artificial Sequence
  Description of Artificial Sequence: Synthetic peptide
  Seed: ANQRLNPMHQLLRHF
ANQRFNPFHPLLTHF

SEQ ID NO: 211663 - protein, 15 aa, Artificial Sequence
  Description of Artificial Sequence: Synthetic peptide
  Seed: ANQRLNPMHQLLRHF
ANQRFNPFHPLLVHF

SEQ ID NO: 211664 - protein, 15 aa, Artificial Sequence
  Description of Artificial Sequence: Synthetic peptide
  Seed: ANQRLNPMHQLLRHF
ANQRFNPFHRLLAHF

SEQ ID NO: 211665 - protein, 15 aa, Artificial Sequence
  Description of Artificial Sequence: Synthetic peptide
  Seed: ANQRLNPMHQLLRHF
ANQRFNPFHRLLGHF

SEQ ID NO: 211666 - protein, 15 aa, Artificial Sequence
  Description of Artificial Sequence: Synthetic peptide
  Seed: ANQRLNPMHQLLRHF
ANQRFNPFHRLLHHF

SEQ ID NO: 211667 - protein, 15 aa, Artificial Sequence
  Description of Artificial Sequence: Synthetic peptide
  Seed: ANQRLNPMHQLLRHF
ANQRFNPFHRLLRHF

SEQ ID NO: 211668 - protein, 15 aa, Artificial Sequence
  Description of Artificial Sequence: Synthetic peptide
  Seed: ANQRLNPMHQLLRHF
ANQRFNPFHRLLSHF

SEQ ID NO: 211669 - protein, 15 aa, Artificial Sequence
  Description of Artificial Sequence: Synthetic peptide
  Seed: ANQRLNPMHQLLRHF
ANQRFNPFHRLLTHF

SEQ ID NO: 211670 - protein, 15 aa, Artificial Sequence
  Description of Artificial Sequence: Synthetic peptide
  Seed: ANQRLNPMHQLLRHF
ANQRFNPFHRLLYHF

SEQ ID NO: 211671 - protein, 15 aa, Artificial Sequence
  Description of Artificial Sequence: Synthetic peptide
  Seed: ANQRLNPMHQLLRHF
ANQRFNPFHSLLAHF

SEQ ID NO: 211672 - protein, 15 aa, Artificial Sequence
  Description of Artificial Sequence: Synthetic peptide
  Seed: ANQRLNPMHQLLRHF
ANQRFNPFHSLLIHF

SEQ ID NO: 211673 - protein, 15 aa, Artificial Sequence
  Description of Artificial Sequence: Synthetic peptide
  Seed: ANQRLNPMHQLLRHF
ANQRFNPFHSLLLHF

SEQ ID NO: 211674 - protein, 15 aa, Artificial Sequence
  Description of Artificial Sequence: Synthetic peptide
  Seed: ANQRLNPMHQLLRHF
ANQRFNPFHSLLMHF

SEQ ID NO: 211675 - protein, 15 aa, Artificial Sequence
  Description of Artificial Sequence: Synthetic peptide
  Seed: ANQRLNPMHQLLRHF
ANQRFNPFHSLLNHF

SEQ ID NO: 211676 - protein, 15 aa, Artificial Sequence
  Description of Artificial Sequence: Synthetic peptide
  Seed: ANQRLNPMHQLLRHF
ANQRFNPFHSLLSHF

SEQ ID NO: 211677 - protein, 15 aa, Artificial Sequence
  Description of Artificial Sequence: Synthetic peptide
  Seed: ANQRLNPMHQLLRHF
ANQRFNPFHSLLTHF

SEQ ID NO: 211678 - protein, 15 aa, Artificial Sequence
  Description of Artificial Sequence: Synthetic peptide
  Seed: ANQRLNPMHQLLRHF
ANQRFNPFHSLLVHF

SEQ ID NO: 211679 - protein, 15 aa, Artificial Sequence
  Description of Artificial Sequence: Synthetic peptide
  Seed: ANQRLNPMHQLLRHF
ANQRFNPFHTLLAHF

SEQ ID NO: 211680 - protein, 15 aa, Artificial Sequence
  Description of Artificial Sequence: Synthetic peptide
  Seed: ANQRLNPMHQLLRHF
ANQRFNPFHTLLIHF

SEQ ID NO: 211681 - protein, 15 aa, Artificial Sequence
  Description of Artificial Sequence: Synthetic peptide
  Seed: ANQRLNPMHQLLRHF
ANQRFNPFHTLLLHF

SEQ ID NO: 211682 - protein, 15 aa, Artificial Sequence
  Description of Artificial Sequence: Synthetic peptide
  Seed: ANQRLNPMHQLLRHF
ANQRFNPFHTLLNHF

SEQ ID NO: 211683 - protein, 15 aa, Artificial Sequence
  Description of Artificial Sequence: Synthetic peptide
  Seed: ANQRLNPMHQLLRHF
ANQRFNPFHTLLVHF

SEQ ID NO: 211684 - protein, 15 aa, Artificial Sequence
  Description of Artificial Sequence: Synthetic peptide
  Seed: ANQRLNPMHQLLRHF
ANQRFNPFHWLLFHF

SEQ ID NO: 211685 - protein, 15 aa, Artificial Sequence
  Description of Artificial Sequence: Synthetic peptide
  Seed: ANQRLNPMHQLLRHF
ANQRFNPFHWLLIHF

SEQ ID NO: 211686 - protein, 15 aa, Artificial Sequence
  Description of Artificial Sequence: Synthetic peptide
  Seed: ANQRLNPMHQLLRHF
ANQRFNPFHWLLLHF

SEQ ID NO: 211687 - protein, 15 aa, Artificial Sequence
  Description of Artificial Sequence: Synthetic peptide
  Seed: ANQRLNPMHQLLRHF
ANQRFNPFHWLLMHF

SEQ ID NO: 211688 - protein, 15 aa, Artificial Sequence
  Description of Artificial Sequence: Synthetic peptide
  Seed: ANQRLNPMHQLLRHF
ANQRFNPFHWLLVHF

SEQ ID NO: 211689 - protein, 15 aa, Artificial Sequence
  Description of Artificial Sequence: Synthetic peptide
  Seed: ANQRLNPMHQLLRHF
ANQRFNPFHYLLFHF

SEQ ID NO: 211690 - protein, 15 aa, Artificial Sequence
  Description of Artificial Sequence: Synthetic peptide
  Seed: ANQRLNPMHQLLRHF
ANQRFNPFHYLLIHF

SEQ ID NO: 211691 - protein, 15 aa, Artificial Sequence
  Description of Artificial Sequence: Synthetic peptide
  Seed: ANQRLNPMHQLLRHF
ANQRFNPFHYLLLHF

SEQ ID NO: 211692 - protein, 15 aa, Artificial Sequence
  Description of Artificial Sequence: Synthetic peptide
  Seed: ANQRLNPMHQLLRHF
ANQRFNPFHYLLMHF

SEQ ID NO: 211693 - protein, 15 aa, Artificial Sequence
  Description of Artificial Sequence: Synthetic peptide
  Seed: ANQRLNPMHQLLRHF
ANQRFNPFHYLLVHF

SEQ ID NO: 211694 - protein, 15 aa, Artificial Sequence
  Description of Artificial Sequence: Synthetic peptide
  Seed: ANQRLNPMHQLLRHF
ANQRFNPGHALLAHF

SEQ ID NO: 211695 - protein, 15 aa, Artificial Sequence
  Description of Artificial Sequence: Synthetic peptide
  Seed: ANQRLNPMHQLLRHF
ANQRFNPGHALLCHF

SEQ ID NO: 211696 - protein, 15 aa, Artificial Sequence
  Description of Artificial Sequence: Synthetic peptide
  Seed: ANQRLNPMHQLLRHF
ANQRFNPGHALLFHF

SEQ ID NO: 211697 - protein, 15 aa, Artificial Sequence
  Description of Artificial Sequence: Synthetic peptide
  Seed: ANQRLNPMHQLLRHF
ANQRFNPGHALLGHF

SEQ ID NO: 211698 - protein, 15 aa, Artificial Sequence
  Description of Artificial Sequence: Synthetic peptide
  Seed: ANQRLNPMHQLLRHF
ANQRFNPGHALLIHF

SEQ ID NO: 211699 - protein, 15 aa, Artificial Sequence
  Description of Artificial Sequence: Synthetic peptide
  Seed: ANQRLNPMHQLLRHF
ANQRFNPGHALLLHF

SEQ ID NO: 211700 - protein, 15 aa, Artificial Sequence
  Description of Artificial Sequence: Synthetic peptide
  Seed: ANQRLNPMHQLLRHF
ANQRFNPGHALLMHF

SEQ ID NO: 211701 - protein, 15 aa, Artificial Sequence
  Description of Artificial Sequence: Synthetic peptide
  Seed: ANQRLNPMHQLLRHF
ANQRFNPGHALLNHF

SEQ ID NO: 211702 - protein, 15 aa, Artificial Sequence
  Description of Artificial Sequence: Synthetic peptide
  Seed: ANQRLNPMHQLLRHF
ANQRFNPGHALLSHF

SEQ ID NO: 211703 - protein, 15 aa, Artificial Sequence
  Description of Artificial Sequence: Synthetic peptide
  Seed: ANQRLNPMHQLLRHF
ANQRFNPGHALLTHF

SEQ ID NO: 211704 - protein, 15 aa, Artificial Sequence
  Description of Artificial Sequence: Synthetic peptide
  Seed: ANQRLNPMHQLLRHF
ANQRFNPGHALLVHF

SEQ ID NO: 211705 - protein, 15 aa, Artificial Sequence
  Description of Artificial Sequence: Synthetic peptide
  Seed: ANQRLNPMHQLLRHF
ANQRFNPGHFLLIHF

SEQ ID NO: 211706 - protein, 15 aa, Artificial Sequence
  Description of Artificial Sequence: Synthetic peptide
  Seed: ANQRLNPMHQLLRHF
ANQRFNPGHFLLLHF

SEQ ID NO: 211707 - protein, 15 aa, Artificial Sequence
  Description of Artificial Sequence: Synthetic peptide
  Seed: ANQRLNPMHQLLRHF
ANQRFNPGHFLLVHF

SEQ ID NO: 211708 - protein, 15 aa, Artificial Sequence
  Description of Artificial Sequence: Synthetic peptide
  Seed: ANQRLNPMHQLLRHF
ANQRFNPGHGLLAHF

SEQ ID NO: 211709 - protein, 15 aa, Artificial Sequence
  Description of Artificial Sequence: Synthetic peptide
  Seed: ANQRLNPMHQLLRHF
ANQRFNPGHGLLIHF

SEQ ID NO: 211710 - protein, 15 aa, Artificial Sequence
  Description of Artificial Sequence: Synthetic peptide
  Seed: ANQRLNPMHQLLRHF
ANQRFNPGHGLLLHF

SEQ ID NO: 211711 - protein, 15 aa, Artificial Sequence
  Description of Artificial Sequence: Synthetic peptide
  Seed: ANQRLNPMHQLLRHF
ANQRFNPGHGLLMHF

SEQ ID NO: 211712 - protein, 15 aa, Artificial Sequence
  Description of Artificial Sequence: Synthetic peptide
  Seed: ANQRLNPMHQLLRHF
ANQRFNPGHGLLSHF

SEQ ID NO: 211713 - protein, 15 aa, Artificial Sequence
  Description of Artificial Sequence: Synthetic peptide
  Seed: ANQRLNPMHQLLRHF
ANQRFNPGHGLLTHF

SEQ ID NO: 211714 - protein, 15 aa, Artificial Sequence
  Description of Artificial Sequence: Synthetic peptide
  Seed: ANQRLNPMHQLLRHF
ANQRFNPGHGLLVHF

SEQ ID NO: 211715 - protein, 15 aa, Artificial Sequence
  Description of Artificial Sequence: Synthetic peptide
  Seed: ANQRLNPMHQLLRHF
ANQRFNPGHNLLAHF

SEQ ID NO: 211716 - protein, 15 aa, Artificial Sequence
  Description of Artificial Sequence: Synthetic peptide
  Seed: ANQRLNPMHQLLRHF
ANQRFNPGHNLLIHF

SEQ ID NO: 211717 - protein, 15 aa, Artificial Sequence
  Description of Artificial Sequence: Synthetic peptide
  Seed: ANQRLNPMHQLLRHF
ANQRFNPGHNLLLHF

SEQ ID NO: 211718 - protein, 15 aa, Artificial Sequence
  Description of Artificial Sequence: Synthetic peptide
  Seed: ANQRLNPMHQLLRHF
ANQRFNPGHNLLMHF

SEQ ID NO: 211719 - protein, 15 aa, Artificial Sequence
  Description of Artificial Sequence: Synthetic peptide
  Seed: ANQRLNPMHQLLRHF
ANQRFNPGHNLLVHF

SEQ ID NO: 211720 - protein, 15 aa, Artificial Sequence
  Description of Artificial Sequence: Synthetic peptide
  Seed: ANQRLNPMHQLLRHF
ANQRFNPGHPLLAHF

SEQ ID NO: 211721 - protein, 15 aa, Artificial Sequence
  Description of Artificial Sequence: Synthetic peptide
  Seed: ANQRLNPMHQLLRHF
ANQRFNPGHPLLIHF

SEQ ID NO: 211722 - protein, 15 aa, Artificial Sequence
  Description of Artificial Sequence: Synthetic peptide
  Seed: ANQRLNPMHQLLRHF
ANQRFNPGHPLLLHF

SEQ ID NO: 211723 - protein, 15 aa, Artificial Sequence
  Description of Artificial Sequence: Synthetic peptide
  Seed: ANQRLNPMHQLLRHF
ANQRFNPGHPLLMHF

SEQ ID NO: 211724 - protein, 15 aa, Artificial Sequence
  Description of Artificial Sequence: Synthetic peptide
  Seed: ANQRLNPMHQLLRHF
ANQRFNPGHPLLSHF

SEQ ID NO: 211725 - protein, 15 aa, Artificial Sequence
  Description of Artificial Sequence: Synthetic peptide
  Seed: ANQRLNPMHQLLRHF
ANQRFNPGHPLLTHF

SEQ ID NO: 211726 - protein, 15 aa, Artificial Sequence
  Description of Artificial Sequence: Synthetic peptide
  Seed: ANQRLNPMHQLLRHF
ANQRFNPGHPLLVHF

SEQ ID NO: 211727 - protein, 15 aa, Artificial Sequence
  Description of Artificial Sequence: Synthetic peptide
  Seed: ANQRLNPMHQLLRHF
ANQRFNPGHSLLAHF

SEQ ID NO: 211728 - protein, 15 aa, Artificial Sequence
  Description of Artificial Sequence: Synthetic peptide
  Seed: ANQRLNPMHQLLRHF
ANQRFNPGHSLLIHF

SEQ ID NO: 211729 - protein, 15 aa, Artificial Sequence
  Description of Artificial Sequence: Synthetic peptide
  Seed: ANQRLNPMHQLLRHF
ANQRFNPGHSLLLHF

SEQ ID NO: 211730 - protein, 15 aa, Artificial Sequence
  Description of Artificial Sequence: Synthetic peptide
  Seed: ANQRLNPMHQLLRHF
ANQRFNPGHSLLMHF

SEQ ID NO: 211731 - protein, 15 aa, Artificial Sequence
  Description of Artificial Sequence: Synthetic peptide
  Seed: ANQRLNPMHQLLRHF
ANQRFNPGHSLLSHF

SEQ ID NO: 211732 - protein, 15 aa, Artificial Sequence
  Description of Artificial Sequence: Synthetic peptide
  Seed: ANQRLNPMHQLLRHF
ANQRFNPGHSLLTHF

SEQ ID NO: 211733 - protein, 15 aa, Artificial Sequence
  Description of Artificial Sequence: Synthetic peptide
  Seed: ANQRLNPMHQLLRHF
ANQRFNPGHSLLVHF

SEQ ID NO: 211734 - protein, 15 aa, Artificial Sequence
  Description of Artificial Sequence: Synthetic peptide
  Seed: ANQRLNPMHQLLRHF
ANQRFNPGHTLLAHF

SEQ ID NO: 211735 - protein, 15 aa, Artificial Sequence
  Description of Artificial Sequence: Synthetic peptide
  Seed: ANQRLNPMHQLLRHF
ANQRFNPGHTLLIHF

SEQ ID NO: 211736 - protein, 15 aa, Artificial Sequence
  Description of Artificial Sequence: Synthetic peptide
  Seed: ANQRLNPMHQLLRHF
ANQRFNPGHTLLLHF

SEQ ID NO: 211737 - protein, 15 aa, Artificial Sequence
  Description of Artificial Sequence: Synthetic peptide
  Seed: ANQRLNPMHQLLRHF
ANQRFNPGHTLLMHF

SEQ ID NO: 211738 - protein, 15 aa, Artificial Sequence
  Description of Artificial Sequence: Synthetic peptide
  Seed: ANQRLNPMHQLLRHF
ANQRFNPGHTLLVHF

SEQ ID NO: 211739 - protein, 15 aa, Artificial Sequence
  Description of Artificial Sequence: Synthetic peptide
  Seed: ANQRLNPMHQLLRHF
ANQRFNPGHVLLAHF

SEQ ID NO: 211740 - protein, 15 aa, Artificial Sequence
  Description of Artificial Sequence: Synthetic peptide
  Seed: ANQRLNPMHQLLRHF
ANQRFNPGHVLLIHF

SEQ ID NO: 211741 - protein, 15 aa, Artificial Sequence
  Description of Artificial Sequence: Synthetic peptide
  Seed: ANQRLNPMHQLLRHF
ANQRFNPGHVLLLHF

SEQ ID NO: 211742 - protein, 15 aa, Artificial Sequence
  Description of Artificial Sequence: Synthetic peptide
  Seed: ANQRLNPMHQLLRHF
ANQRFNPGHVLLVHF

SEQ ID NO: 211743 - protein, 15 aa, Artificial Sequence
  Description of Artificial Sequence: Synthetic peptide
  Seed: ANQRLNPMHQLLRHF
ANQRFNPHHALLAHF

SEQ ID NO: 211744 - protein, 15 aa, Artificial Sequence
  Description of Artificial Sequence: Synthetic peptide
  Seed: ANQRLNPMHQLLRHF
ANQRFNPHHALLIHF

SEQ ID NO: 211745 - protein, 15 aa, Artificial Sequence
  Description of Artificial Sequence: Synthetic peptide
  Seed: ANQRLNPMHQLLRHF
ANQRFNPHHALLLHF

SEQ ID NO: 211746 - protein, 15 aa, Artificial Sequence
  Description of Artificial Sequence: Synthetic peptide
  Seed: ANQRLNPMHQLLRHF
ANQRFNPHHALLMHF

SEQ ID NO: 211747 - protein, 15 aa, Artificial Sequence
  Description of Artificial Sequence: Synthetic peptide
  Seed: ANQRLNPMHQLLRHF
ANQRFNPHHALLSHF

SEQ ID NO: 211748 - protein, 15 aa, Artificial Sequence
  Description of Artificial Sequence: Synthetic peptide
  Seed: ANQRLNPMHQLLRHF
ANQRFNPHHALLTHF

SEQ ID NO: 211749 - protein, 15 aa, Artificial Sequence
  Description of Artificial Sequence: Synthetic peptide
  Seed: ANQRLNPMHQLLRHF
ANQRFNPHHALLVHF

SEQ ID NO: 211750 - protein, 15 aa, Artificial Sequence
  Description of Artificial Sequence: Synthetic peptide
  Seed: ANQRLNPMHQLLRHF
ANQRFNPHHFLLFHF

SEQ ID NO: 211751 - protein, 15 aa, Artificial Sequence
  Description of Artificial Sequence: Synthetic peptide
  Seed: ANQRLNPMHQLLRHF
ANQRFNPHHFLLIHF

SEQ ID NO: 211752 - protein, 15 aa, Artificial Sequence
  Description of Artificial Sequence: Synthetic peptide
  Seed: ANQRLNPMHQLLRHF
ANQRFNPHHFLLLHF

SEQ ID NO: 211753 - protein, 15 aa, Artificial Sequence
  Description of Artificial Sequence: Synthetic peptide
  Seed: ANQRLNPMHQLLRHF
ANQRFNPHHFLLMHF

SEQ ID NO: 211754 - protein, 15 aa, Artificial Sequence
  Description of Artificial Sequence: Synthetic peptide
  Seed: ANQRLNPMHQLLRHF
ANQRFNPHHFLLVHF

SEQ ID NO: 211755 - protein, 15 aa, Artificial Sequence
  Description of Artificial Sequence: Synthetic peptide
  Seed: ANQRLNPMHQLLRHF
ANQRFNPHHGLLAHF

SEQ ID NO: 211756 - protein, 15 aa, Artificial Sequence
  Description of Artificial Sequence: Synthetic peptide
  Seed: ANQRLNPMHQLLRHF
ANQRFNPHHGLLIHF

SEQ ID NO: 211757 - protein, 15 aa, Artificial Sequence
  Description of Artificial Sequence: Synthetic peptide
  Seed: ANQRLNPMHQLLRHF
ANQRFNPHHGLLLHF

SEQ ID NO: 211758 - protein, 15 aa, Artificial Sequence
  Description of Artificial Sequence: Synthetic peptide
  Seed: ANQRLNPMHQLLRHF
ANQRFNPHHGLLVHF

SEQ ID NO: 211759 - protein, 15 aa, Artificial Sequence
  Description of Artificial Sequence: Synthetic peptide
  Seed: ANQRLNPMHQLLRHF
ANQRFNPHHPLLIHF

SEQ ID NO: 211760 - protein, 15 aa, Artificial Sequence
  Description of Artificial Sequence: Synthetic peptide
  Seed: ANQRLNPMHQLLRHF
ANQRFNPHHPLLLHF

SEQ ID NO: 211761 - protein, 15 aa, Artificial Sequence
  Description of Artificial Sequence: Synthetic peptide
  Seed: ANQRLNPMHQLLRHF
ANQRFNPHHPLLVHF

SEQ ID NO: 211762 - protein, 15 aa, Artificial Sequence
  Description of Artificial Sequence: Synthetic peptide
  Seed: ANQRLNPMHQLLRHF
ANQRFNPHHSLLAHF

SEQ ID NO: 211763 - protein, 15 aa, Artificial Sequence
  Description of Artificial Sequence: Synthetic peptide
  Seed: ANQRLNPMHQLLRHF
ANQRFNPHHSLLIHF

SEQ ID NO: 211764 - protein, 15 aa, Artificial Sequence
  Description of Artificial Sequence: Synthetic peptide
  Seed: ANQRLNPMHQLLRHF
ANQRFNPHHSLLLHF

SEQ ID NO: 211765 - protein, 15 aa, Artificial Sequence
  Description of Artificial Sequence: Synthetic peptide
  Seed: ANQRLNPMHQLLRHF
ANQRFNPHHSLLVHF

SEQ ID NO: 211766 - protein, 15 aa, Artificial Sequence
  Description of Artificial Sequence: Synthetic peptide
  Seed: ANQRLNPMHQLLRHF
ANQRFNPIHALLAHF

SEQ ID NO: 211767 - protein, 15 aa, Artificial Sequence
  Description of Artificial Sequence: Synthetic peptide
  Seed: ANQRLNPMHQLLRHF
ANQRFNPIHALLCHF

SEQ ID NO: 211768 - protein, 15 aa, Artificial Sequence
  Description of Artificial Sequence: Synthetic peptide
  Seed: ANQRLNPMHQLLRHF
ANQRFNPIHALLDHF

SEQ ID NO: 211769 - protein, 15 aa, Artificial Sequence
  Description of Artificial Sequence: Synthetic peptide
  Seed: ANQRLNPMHQLLRHF
ANQRFNPIHALLEHF

SEQ ID NO: 211770 - protein, 15 aa, Artificial Sequence
  Description of Artificial Sequence: Synthetic peptide
  Seed: ANQRLNPMHQLLRHF
ANQRFNPIHALLFHF

SEQ ID NO: 211771 - protein, 15 aa, Artificial Sequence
  Description of Artificial Sequence: Synthetic peptide
  Seed: ANQRLNPMHQLLRHF
ANQRFNPIHALLGHF

SEQ ID NO: 211772 - protein, 15 aa, Artificial Sequence
  Description of Artificial Sequence: Synthetic peptide
  Seed: ANQRLNPMHQLLRHF
ANQRFNPIHALLHHF

SEQ ID NO: 211773 - protein, 15 aa, Artificial Sequence
  Description of Artificial Sequence: Synthetic peptide
  Seed: ANQRLNPMHQLLRHF
ANQRFNPIHALLIHF

SEQ ID NO: 211774 - protein, 15 aa, Artificial Sequence
  Description of Artificial Sequence: Synthetic peptide
  Seed: ANQRLNPMHQLLRHF
ANQRFNPIHALLKHF

SEQ ID NO: 211775 - protein, 15 aa, Artificial Sequence
  Description of Artificial Sequence: Synthetic peptide
  Seed: ANQRLNPMHQLLRHF
ANQRFNPIHALLLHF

SEQ ID NO: 211776 - protein, 15 aa, Artificial Sequence
  Description of Artificial Sequence: Synthetic peptide
  Seed: ANQRLNPMHQLLRHF
ANQRFNPIHALLMHF

SEQ ID NO: 211777 - protein, 15 aa, Artificial Sequence
  Description of Artificial Sequence: Synthetic peptide
  Seed: ANQRLNPMHQLLRHF
ANQRFNPIHALLNHF

SEQ ID NO: 211778 - protein, 15 aa, Artificial Sequence
  Description of Artificial Sequence: Synthetic peptide
  Seed: ANQRLNPMHQLLRHF
ANQRFNPIHALLPHF

SEQ ID NO: 211779 - protein, 15 aa, Artificial Sequence
  Description of Artificial Sequence: Synthetic peptide
  Seed: ANQRLNPMHQLLRHF
ANQRFNPIHALLQHF

SEQ ID NO: 211780 - protein, 15 aa, Artificial Sequence
  Description of Artificial Sequence: Synthetic peptide
  Seed: ANQRLNPMHQLLRHF
ANQRFNPIHALLRHF

SEQ ID NO: 211781 - protein, 15 aa, Artificial Sequence
  Description of Artificial Sequence: Synthetic peptide
  Seed: ANQRLNPMHQLLRHF
ANQRFNPIHALLSHF

SEQ ID NO: 211782 - protein, 15 aa, Artificial Sequence
  Description of Artificial Sequence: Synthetic peptide
  Seed: ANQRLNPMHQLLRHF
ANQRFNPIHALLTHF

SEQ ID NO: 211783 - protein, 15 aa, Artificial Sequence
  Description of Artificial Sequence: Synthetic peptide
  Seed: ANQRLNPMHQLLRHF
ANQRFNPIHALLVHF

SEQ ID NO: 211784 - protein, 15 aa, Artificial Sequence
  Description of Artificial Sequence: Synthetic peptide
  Seed: ANQRLNPMHQLLRHF
ANQRFNPIHALLWHF

SEQ ID NO: 211785 - protein, 15 aa, Artificial Sequence
  Description of Artificial Sequence: Synthetic peptide
  Seed: ANQRLNPMHQLLRHF
ANQRFNPIHALLYHF

SEQ ID NO: 211786 - protein, 15 aa, Artificial Sequence
  Description of Artificial Sequence: Synthetic peptide
  Seed: ANQRLNPMHQLLRHF
ANQRFNPIHCLLVHF

SEQ ID NO: 211787 - protein, 15 aa, Artificial Sequence
  Description of Artificial Sequence: Synthetic peptide
  Seed: ANQRLNPMHQLLRHF
ANQRFNPIHFLLAHF

SEQ ID NO: 211788 - protein, 15 aa, Artificial Sequence
  Description of Artificial Sequence: Synthetic peptide
  Seed: ANQRLNPMHQLLRHF
ANQRFNPIHFLLCHF

SEQ ID NO: 211789 - protein, 15 aa, Artificial Sequence
  Description of Artificial Sequence: Synthetic peptide
  Seed: ANQRLNPMHQLLRHF
ANQRFNPIHFLLDHF

SEQ ID NO: 211790 - protein, 15 aa, Artificial Sequence
  Description of Artificial Sequence: Synthetic peptide
  Seed: ANQRLNPMHQLLRHF
ANQRFNPIHFLLEHF

SEQ ID NO: 211791 - protein, 15 aa, Artificial Sequence
  Description of Artificial Sequence: Synthetic peptide
  Seed: ANQRLNPMHQLLRHF
ANQRFNPIHFLLFHF

SEQ ID NO: 211792 - protein, 15 aa, Artificial Sequence
  Description of Artificial Sequence: Synthetic peptide
  Seed: ANQRLNPMHQLLRHF
ANQRFNPIHFLLHHF

SEQ ID NO: 211793 - protein, 15 aa, Artificial Sequence
  Description of Artificial Sequence: Synthetic peptide
  Seed: ANQRLNPMHQLLRHF
ANQRFNPIHFLLIHF

SEQ ID NO: 211794 - protein, 15 aa, Artificial Sequence
  Description of Artificial Sequence: Synthetic peptide
  Seed: ANQRLNPMHQLLRHF
ANQRFNPIHFLLLHF

SEQ ID NO: 211795 - protein, 15 aa, Artificial Sequence
  Description of Artificial Sequence: Synthetic peptide
  Seed: ANQRLNPMHQLLRHF
ANQRFNPIHFLLMHF

SEQ ID NO: 211796 - protein, 15 aa, Artificial Sequence
  Description of Artificial Sequence: Synthetic peptide
  Seed: ANQRLNPMHQLLRHF
ANQRFNPIHFLLNHF

SEQ ID NO: 211797 - protein, 15 aa, Artificial Sequence
  Description of Artificial Sequence: Synthetic peptide
  Seed: ANQRLNPMHQLLRHF
ANQRFNPIHFLLPHF

SEQ ID NO: 211798 - protein, 15 aa, Artificial Sequence
  Description of Artificial Sequence: Synthetic peptide
  Seed: ANQRLNPMHQLLRHF
ANQRFNPIHFLLQHF

SEQ ID NO: 211799 - protein, 15 aa, Artificial Sequence
  Description of Artificial Sequence: Synthetic peptide
  Seed: ANQRLNPMHQLLRHF
ANQRFNPIHFLLRHF

SEQ ID NO: 211800 - protein, 15 aa, Artificial Sequence
  Description of Artificial Sequence: Synthetic peptide
  Seed: ANQRLNPMHQLLRHF
ANQRFNPIHFLLSHF

SEQ ID NO: 211801 - protein, 15 aa, Artificial Sequence
  Description of Artificial Sequence: Synthetic peptide
  Seed: ANQRLNPMHQLLRHF
ANQRFNPIHFLLTHF

SEQ ID NO: 211802 - protein, 15 aa, Artificial Sequence
  Description of Artificial Sequence: Synthetic peptide
  Seed: ANQRLNPMHQLLRHF
ANQRFNPIHFLLVHF

SEQ ID NO: 211803 - protein, 15 aa, Artificial Sequence
  Description of Artificial Sequence: Synthetic peptide
  Seed: ANQRLNPMHQLLRHF
ANQRFNPIHFLLWHF

SEQ ID NO: 211804 - protein, 15 aa, Artificial Sequence
  Description of Artificial Sequence: Synthetic peptide
  Seed: ANQRLNPMHQLLRHF
ANQRFNPIHFLLYHF

SEQ ID NO: 211805 - protein, 15 aa, Artificial Sequence
  Description of Artificial Sequence: Synthetic peptide
  Seed: ANQRLNPMHQLLRHF
ANQRFNPIHGLLAHF

SEQ ID NO: 211806 - protein, 15 aa, Artificial Sequence
  Description of Artificial Sequence: Synthetic peptide
  Seed: ANQRLNPMHQLLRHF
ANQRFNPIHGLLCHF

SEQ ID NO: 211807 - protein, 15 aa, Artificial Sequence
  Description of Artificial Sequence: Synthetic peptide
  Seed: ANQRLNPMHQLLRHF
ANQRFNPIHGLLFHF

SEQ ID NO: 211808 - protein, 15 aa, Artificial Sequence
  Description of Artificial Sequence: Synthetic peptide
  Seed: ANQRLNPMHQLLRHF
ANQRFNPIHGLLGHF

SEQ ID NO: 211809 - protein, 15 aa, Artificial Sequence
  Description of Artificial Sequence: Synthetic peptide
  Seed: ANQRLNPMHQLLRHF
ANQRFNPIHGLLHHF

SEQ ID NO: 211810 - protein, 15 aa, Artificial Sequence
  Description of Artificial Sequence: Synthetic peptide
  Seed: ANQRLNPMHQLLRHF
ANQRFNPIHGLLIHF

SEQ ID NO: 211811 - protein, 15 aa, Artificial Sequence
  Description of Artificial Sequence: Synthetic peptide
  Seed: ANQRLNPMHQLLRHF
ANQRFNPIHGLLKHF

SEQ ID NO: 211812 - protein, 15 aa, Artificial Sequence
  Description of Artificial Sequence: Synthetic peptide
  Seed: ANQRLNPMHQLLRHF
ANQRFNPIHGLLLHF

SEQ ID NO: 211813 - protein, 15 aa, Artificial Sequence
  Description of Artificial Sequence: Synthetic peptide
  Seed: ANQRLNPMHQLLRHF
ANQRFNPIHGLLMHF

SEQ ID NO: 211814 - protein, 15 aa, Artificial Sequence
  Description of Artificial Sequence: Synthetic peptide
  Seed: ANQRLNPMHQLLRHF
ANQRFNPIHGLLNHF

SEQ ID NO: 211815 - protein, 15 aa, Artificial Sequence
  Description of Artificial Sequence: Synthetic peptide
  Seed: ANQRLNPMHQLLRHF
ANQRFNPIHGLLPHF

SEQ ID NO: 211816 - protein, 15 aa, Artificial Sequence
  Description of Artificial Sequence: Synthetic peptide
  Seed: ANQRLNPMHQLLRHF
ANQRFNPIHGLLQHF

SEQ ID NO: 211817 - protein, 15 aa, Artificial Sequence
  Description of Artificial Sequence: Synthetic peptide
  Seed: ANQRLNPMHQLLRHF
ANQRFNPIHGLLRHF

SEQ ID NO: 211818 - protein, 15 aa, Artificial Sequence
  Description of Artificial Sequence: Synthetic peptide
  Seed: ANQRLNPMHQLLRHF
ANQRFNPIHGLLSHF

SEQ ID NO: 211819 - protein, 15 aa, Artificial Sequence
  Description of Artificial Sequence: Synthetic peptide
  Seed: ANQRLNPMHQLLRHF
ANQRFNPIHGLLTHF

SEQ ID NO: 211820 - protein, 15 aa, Artificial Sequence
  Description of Artificial Sequence: Synthetic peptide
  Seed: ANQRLNPMHQLLRHF
ANQRFNPIHGLLVHF

SEQ ID NO: 211821 - protein, 15 aa, Artificial Sequence
  Description of Artificial Sequence: Synthetic peptide
  Seed: ANQRLNPMHQLLRHF
ANQRFNPIHGLLYHF

SEQ ID NO: 211822 - protein, 15 aa, Artificial Sequence
  Description of Artificial Sequence: Synthetic peptide
  Seed: ANQRLNPMHQLLRHF
ANQRFNPIHHLLAHF

SEQ ID NO: 211823 - protein, 15 aa, Artificial Sequence
  Description of Artificial Sequence: Synthetic peptide
  Seed: ANQRLNPMHQLLRHF
ANQRFNPIHHLLIHF

SEQ ID NO: 211824 - protein, 15 aa, Artificial Sequence
  Description of Artificial Sequence: Synthetic peptide
  Seed: ANQRLNPMHQLLRHF
ANQRFNPIHHLLLHF

SEQ ID NO: 211825 - protein, 15 aa, Artificial Sequence
  Description of Artificial Sequence: Synthetic peptide
  Seed: ANQRLNPMHQLLRHF
ANQRFNPIHHLLSHF

SEQ ID NO: 211826 - protein, 15 aa, Artificial Sequence
  Description of Artificial Sequence: Synthetic peptide
  Seed: ANQRLNPMHQLLRHF
ANQRFNPIHHLLVHF

SEQ ID NO: 211827 - protein, 15 aa, Artificial Sequence
  Description of Artificial Sequence: Synthetic peptide
  Seed: ANQRLNPMHQLLRHF
ANQRFNPIHILLAHF

SEQ ID NO: 211828 - protein, 15 aa, Artificial Sequence
  Description of Artificial Sequence: Synthetic peptide
  Seed: ANQRLNPMHQLLRHF
ANQRFNPIHILLGHF

SEQ ID NO: 211829 - protein, 15 aa, Artificial Sequence
  Description of Artificial Sequence: Synthetic peptide
  Seed: ANQRLNPMHQLLRHF
ANQRFNPIHILLHHF

SEQ ID NO: 211830 - protein, 15 aa, Artificial Sequence
  Description of Artificial Sequence: Synthetic peptide
  Seed: ANQRLNPMHQLLRHF
ANQRFNPIHILLIHF

SEQ ID NO: 211831 - protein, 15 aa, Artificial Sequence
  Description of Artificial Sequence: Synthetic peptide
  Seed: ANQRLNPMHQLLRHF
ANQRFNPIHILLLHF

SEQ ID NO: 211832 - protein, 15 aa, Artificial Sequence
  Description of Artificial Sequence: Synthetic peptide
  Seed: ANQRLNPMHQLLRHF
ANQRFNPIHILLMHF

SEQ ID NO: 211833 - protein, 15 aa, Artificial Sequence
  Description of Artificial Sequence: Synthetic peptide
  Seed: ANQRLNPMHQLLRHF
ANQRFNPIHILLNHF

SEQ ID NO: 211834 - protein, 15 aa, Artificial Sequence
  Description of Artificial Sequence: Synthetic peptide
  Seed: ANQRLNPMHQLLRHF
ANQRFNPIHILLSHF

SEQ ID NO: 211835 - protein, 15 aa, Artificial Sequence
  Description of Artificial Sequence: Synthetic peptide
  Seed: ANQRLNPMHQLLRHF
ANQRFNPIHILLTHF

SEQ ID NO: 211836 - protein, 15 aa, Artificial Sequence
  Description of Artificial Sequence: Synthetic peptide
  Seed: ANQRLNPMHQLLRHF
ANQRFNPIHILLVHF

SEQ ID NO: 211837 - protein, 15 aa, Artificial Sequence
  Description of Artificial Sequence: Synthetic peptide
  Seed: ANQRLNPMHQLLRHF
ANQRFNPIHKLLAHF

SEQ ID NO: 211838 - protein, 15 aa, Artificial Sequence
  Description of Artificial Sequence: Synthetic peptide
  Seed: ANQRLNPMHQLLRHF
ANQRFNPIHKLLGHF

SEQ ID NO: 211839 - protein, 15 aa, Artificial Sequence
  Description of Artificial Sequence: Synthetic peptide
  Seed: ANQRLNPMHQLLRHF
ANQRFNPIHKLLHHF

SEQ ID NO: 211840 - protein, 15 aa, Artificial Sequence
  Description of Artificial Sequence: Synthetic peptide
  Seed: ANQRLNPMHQLLRHF
ANQRFNPIHKLLIHF

SEQ ID NO: 211841 - protein, 15 aa, Artificial Sequence
  Description of Artificial Sequence: Synthetic peptide
  Seed: ANQRLNPMHQLLRHF
ANQRFNPIHKLLKHF

SEQ ID NO: 211842 - protein, 15 aa, Artificial Sequence
  Description of Artificial Sequence: Synthetic peptide
  Seed: ANQRLNPMHQLLRHF
ANQRFNPIHKLLLHF

SEQ ID NO: 211843 - protein, 15 aa, Artificial Sequence
  Description of Artificial Sequence: Synthetic peptide
  Seed: ANQRLNPMHQLLRHF
ANQRFNPIHKLLMHF

SEQ ID NO: 211844 - protein, 15 aa, Artificial Sequence
  Description of Artificial Sequence: Synthetic peptide
  Seed: ANQRLNPMHQLLRHF
ANQRFNPIHKLLNHF

SEQ ID NO: 211845 - protein, 15 aa, Artificial Sequence
  Description of Artificial Sequence: Synthetic peptide
  Seed: ANQRLNPMHQLLRHF
ANQRFNPIHKLLPHF

SEQ ID NO: 211846 - protein, 15 aa, Artificial Sequence
  Description of Artificial Sequence: Synthetic peptide
  Seed: ANQRLNPMHQLLRHF
ANQRFNPIHKLLQHF

SEQ ID NO: 211847 - protein, 15 aa, Artificial Sequence
  Description of Artificial Sequence: Synthetic peptide
  Seed: ANQRLNPMHQLLRHF
ANQRFNPIHKLLRHF

SEQ ID NO: 211848 - protein, 15 aa, Artificial Sequence
  Description of Artificial Sequence: Synthetic peptide
  Seed: ANQRLNPMHQLLRHF
ANQRFNPIHKLLSHF

SEQ ID NO: 211849 - protein, 15 aa, Artificial Sequence
  Description of Artificial Sequence: Synthetic peptide
  Seed: ANQRLNPMHQLLRHF
ANQRFNPIHKLLTHF

SEQ ID NO: 211850 - protein, 15 aa, Artificial Sequence
  Description of Artificial Sequence: Synthetic peptide
  Seed: ANQRLNPMHQLLRHF
ANQRFNPIHKLLVHF

SEQ ID NO: 211851 - protein, 15 aa, Artificial Sequence
  Description of Artificial Sequence: Synthetic peptide
  Seed: ANQRLNPMHQLLRHF
ANQRFNPIHLLLAHF

SEQ ID NO: 211852 - protein, 15 aa, Artificial Sequence
  Description of Artificial Sequence: Synthetic peptide
  Seed: ANQRLNPMHQLLRHF
ANQRFNPIHLLLFHF

SEQ ID NO: 211853 - protein, 15 aa, Artificial Sequence
  Description of Artificial Sequence: Synthetic peptide
  Seed: ANQRLNPMHQLLRHF
ANQRFNPIHLLLIHF

SEQ ID NO: 211854 - protein, 15 aa, Artificial Sequence
  Description of Artificial Sequence: Synthetic peptide
  Seed: ANQRLNPMHQLLRHF
ANQRFNPIHLLLLHF

SEQ ID NO: 211855 - protein, 15 aa, Artificial Sequence
  Description of Artificial Sequence: Synthetic peptide
  Seed: ANQRLNPMHQLLRHF
ANQRFNPIHLLLMHF

SEQ ID NO: 211856 - protein, 15 aa, Artificial Sequence
  Description of Artificial Sequence: Synthetic peptide
  Seed: ANQRLNPMHQLLRHF
ANQRFNPIHLLLNHF

SEQ ID NO: 211857 - protein, 15 aa, Artificial Sequence
  Description of Artificial Sequence: Synthetic peptide
  Seed: ANQRLNPMHQLLRHF
ANQRFNPIHLLLSHF

SEQ ID NO: 211858 - protein, 15 aa, Artificial Sequence
  Description of Artificial Sequence: Synthetic peptide
  Seed: ANQRLNPMHQLLRHF
ANQRFNPIHLLLVHF

SEQ ID NO: 211859 - protein, 15 aa, Artificial Sequence
  Description of Artificial Sequence: Synthetic peptide
  Seed: ANQRLNPMHQLLRHF
ANQRFNPIHMLLAHF

SEQ ID NO: 211860 - protein, 15 aa, Artificial Sequence
  Description of Artificial Sequence: Synthetic peptide
  Seed: ANQRLNPMHQLLRHF
ANQRFNPIHMLLIHF

SEQ ID NO: 211861 - protein, 15 aa, Artificial Sequence
  Description of Artificial Sequence: Synthetic peptide
  Seed: ANQRLNPMHQLLRHF
ANQRFNPIHMLLLHF

SEQ ID NO: 211862 - protein, 15 aa, Artificial Sequence
  Description of Artificial Sequence: Synthetic peptide
  Seed: ANQRLNPMHQLLRHF
ANQRFNPIHMLLNHF

SEQ ID NO: 211863 - protein, 15 aa, Artificial Sequence
  Description of Artificial Sequence: Synthetic peptide
  Seed: ANQRLNPMHQLLRHF
ANQRFNPIHMLLSHF

SEQ ID NO: 211864 - protein, 15 aa, Artificial Sequence
  Description of Artificial Sequence: Synthetic peptide
  Seed: ANQRLNPMHQLLRHF
ANQRFNPIHMLLVHF

SEQ ID NO: 211865 - protein, 15 aa, Artificial Sequence
  Description of Artificial Sequence: Synthetic peptide
  Seed: ANQRLNPMHQLLRHF
ANQRFNPIHNLLAHF

SEQ ID NO: 211866 - protein, 15 aa, Artificial Sequence
  Description of Artificial Sequence: Synthetic peptide
  Seed: ANQRLNPMHQLLRHF
ANQRFNPIHNLLCHF

SEQ ID NO: 211867 - protein, 15 aa, Artificial Sequence
  Description of Artificial Sequence: Synthetic peptide
  Seed: ANQRLNPMHQLLRHF
ANQRFNPIHNLLGHF

SEQ ID NO: 211868 - protein, 15 aa, Artificial Sequence
  Description of Artificial Sequence: Synthetic peptide
  Seed: ANQRLNPMHQLLRHF
ANQRFNPIHNLLHHF

SEQ ID NO: 211869 - protein, 15 aa, Artificial Sequence
  Description of Artificial Sequence: Synthetic peptide
  Seed: ANQRLNPMHQLLRHF
ANQRFNPIHNLLIHF

SEQ ID NO: 211870 - protein, 15 aa, Artificial Sequence
  Description of Artificial Sequence: Synthetic peptide
  Seed: ANQRLNPMHQLLRHF
ANQRFNPIHNLLLHF

SEQ ID NO: 211871 - protein, 15 aa, Artificial Sequence
  Description of Artificial Sequence: Synthetic peptide
  Seed: ANQRLNPMHQLLRHF
ANQRFNPIHNLLMHF

SEQ ID NO: 211872 - protein, 15 aa, Artificial Sequence
  Description of Artificial Sequence: Synthetic peptide
  Seed: ANQRLNPMHQLLRHF
ANQRFNPIHNLLNHF

SEQ ID NO: 211873 - protein, 15 aa, Artificial Sequence
  Description of Artificial Sequence: Synthetic peptide
  Seed: ANQRLNPMHQLLRHF
ANQRFNPIHNLLSHF

SEQ ID NO: 211874 - protein, 15 aa, Artificial Sequence
  Description of Artificial Sequence: Synthetic peptide
  Seed: ANQRLNPMHQLLRHF
ANQRFNPIHNLLTHF

SEQ ID NO: 211875 - protein, 15 aa, Artificial Sequence
  Description of Artificial Sequence: Synthetic peptide
  Seed: ANQRLNPMHQLLRHF
ANQRFNPIHNLLVHF

SEQ ID NO: 211876 - protein, 15 aa, Artificial Sequence
  Description of Artificial Sequence: Synthetic peptide
  Seed: ANQRLNPMHQLLRHF
ANQRFNPIHPLLAHF

SEQ ID NO: 211877 - protein, 15 aa, Artificial Sequence
  Description of Artificial Sequence: Synthetic peptide
  Seed: ANQRLNPMHQLLRHF
ANQRFNPIHPLLCHF

SEQ ID NO: 211878 - protein, 15 aa, Artificial Sequence
  Description of Artificial Sequence: Synthetic peptide
  Seed: ANQRLNPMHQLLRHF
ANQRFNPIHPLLDHF

SEQ ID NO: 211879 - protein, 15 aa, Artificial Sequence
  Description of Artificial Sequence: Synthetic peptide
  Seed: ANQRLNPMHQLLRHF
ANQRFNPIHPLLFHF

SEQ ID NO: 211880 - protein, 15 aa, Artificial Sequence
  Description of Artificial Sequence: Synthetic peptide
  Seed: ANQRLNPMHQLLRHF
ANQRFNPIHPLLGHF

SEQ ID NO: 211881 - protein, 15 aa, Artificial Sequence
  Description of Artificial Sequence: Synthetic peptide
  Seed: ANQRLNPMHQLLRHF
ANQRFNPIHPLLHHF

SEQ ID NO: 211882 - protein, 15 aa, Artificial Sequence
  Description of Artificial Sequence: Synthetic peptide
  Seed: ANQRLNPMHQLLRHF
ANQRFNPIHPLLIHF

SEQ ID NO: 211883 - protein, 15 aa, Artificial Sequence
  Description of Artificial Sequence: Synthetic peptide
  Seed: ANQRLNPMHQLLRHF
ANQRFNPIHPLLLHF

SEQ ID NO: 211884 - protein, 15 aa, Artificial Sequence
  Description of Artificial Sequence: Synthetic peptide
  Seed: ANQRLNPMHQLLRHF
ANQRFNPIHPLLMHF

SEQ ID NO: 211885 - protein, 15 aa, Artificial Sequence
  Description of Artificial Sequence: Synthetic peptide
  Seed: ANQRLNPMHQLLRHF
ANQRFNPIHPLLNHF

SEQ ID NO: 211886 - protein, 15 aa, Artificial Sequence
  Description of Artificial Sequence: Synthetic peptide
  Seed: ANQRLNPMHQLLRHF
ANQRFNPIHPLLPHF

SEQ ID NO: 211887 - protein, 15 aa, Artificial Sequence
  Description of Artificial Sequence: Synthetic peptide
  Seed: ANQRLNPMHQLLRHF
ANQRFNPIHPLLQHF

SEQ ID NO: 211888 - protein, 15 aa, Artificial Sequence
  Description of Artificial Sequence: Synthetic peptide
  Seed: ANQRLNPMHQLLRHF
ANQRFNPIHPLLSHF

SEQ ID NO: 211889 - protein, 15 aa, Artificial Sequence
  Description of Artificial Sequence: Synthetic peptide
  Seed: ANQRLNPMHQLLRHF
ANQRFNPIHPLLTHF

SEQ ID NO: 211890 - protein, 15 aa, Artificial Sequence
  Description of Artificial Sequence: Synthetic peptide
  Seed: ANQRLNPMHQLLRHF
ANQRFNPIHPLLVHF

SEQ ID NO: 211891 - protein, 15 aa, Artificial Sequence
  Description of Artificial Sequence: Synthetic peptide
  Seed: ANQRLNPMHQLLRHF
ANQRFNPIHPLLWHF

SEQ ID NO: 211892 - protein, 15 aa, Artificial Sequence
  Description of Artificial Sequence: Synthetic peptide
  Seed: ANQRLNPMHQLLRHF
ANQRFNPIHPLLYHF

SEQ ID NO: 211893 - protein, 15 aa, Artificial Sequence
  Description of Artificial Sequence: Synthetic peptide
  Seed: ANQRLNPMHQLLRHF
ANQRFNPIHQLLAHF

SEQ ID NO: 211894 - protein, 15 aa, Artificial Sequence
  Description of Artificial Sequence: Synthetic peptide
  Seed: ANQRLNPMHQLLRHF
ANQRFNPIHQLLIHF

SEQ ID NO: 211895 - protein, 15 aa, Artificial Sequence
  Description of Artificial Sequence: Synthetic peptide
  Seed: ANQRLNPMHQLLRHF
ANQRFNPIHQLLLHF

SEQ ID NO: 211896 - protein, 15 aa, Artificial Sequence
  Description of Artificial Sequence: Synthetic peptide
  Seed: ANQRLNPMHQLLRHF
ANQRFNPIHQLLVHF

SEQ ID NO: 211897 - protein, 15 aa, Artificial Sequence
  Description of Artificial Sequence: Synthetic peptide
  Seed: ANQRLNPMHQLLRHF
ANQRFNPIHRLLAHF

SEQ ID NO: 211898 - protein, 15 aa, Artificial Sequence
  Description of Artificial Sequence: Synthetic peptide
  Seed: ANQRLNPMHQLLRHF
ANQRFNPIHRLLGHF

SEQ ID NO: 211899 - protein, 15 aa, Artificial Sequence
  Description of Artificial Sequence: Synthetic peptide
  Seed: ANQRLNPMHQLLRHF
ANQRFNPIHRLLHHF

SEQ ID NO: 211900 - protein, 15 aa, Artificial Sequence
  Description of Artificial Sequence: Synthetic peptide
  Seed: ANQRLNPMHQLLRHF
ANQRFNPIHRLLIHF

SEQ ID NO: 211901 - protein, 15 aa, Artificial Sequence
  Description of Artificial Sequence: Synthetic peptide
  Seed: ANQRLNPMHQLLRHF
ANQRFNPIHRLLKHF

SEQ ID NO: 211902 - protein, 15 aa, Artificial Sequence
  Description of Artificial Sequence: Synthetic peptide
  Seed: ANQRLNPMHQLLRHF
ANQRFNPIHRLLLHF

SEQ ID NO: 211903 - protein, 15 aa, Artificial Sequence
  Description of Artificial Sequence: Synthetic peptide
  Seed: ANQRLNPMHQLLRHF
ANQRFNPIHRLLMHF

SEQ ID NO: 211904 - protein, 15 aa, Artificial Sequence
  Description of Artificial Sequence: Synthetic peptide
  Seed: ANQRLNPMHQLLRHF
ANQRFNPIHRLLNHF

SEQ ID NO: 211905 - protein, 15 aa, Artificial Sequence
  Description of Artificial Sequence: Synthetic peptide
  Seed: ANQRLNPMHQLLRHF
ANQRFNPIHRLLPHF

SEQ ID NO: 211906 - protein, 15 aa, Artificial Sequence
  Description of Artificial Sequence: Synthetic peptide
  Seed: ANQRLNPMHQLLRHF
ANQRFNPIHRLLQHF

SEQ ID NO: 211907 - protein, 15 aa, Artificial Sequence
  Description of Artificial Sequence: Synthetic peptide
  Seed: ANQRLNPMHQLLRHF
ANQRFNPIHRLLRHF

SEQ ID NO: 211908 - protein, 15 aa, Artificial Sequence
  Description of Artificial Sequence: Synthetic peptide
  Seed: ANQRLNPMHQLLRHF
ANQRFNPIHRLLSHF

SEQ ID NO: 211909 - protein, 15 aa, Artificial Sequence
  Description of Artificial Sequence: Synthetic peptide
  Seed: ANQRLNPMHQLLRHF
ANQRFNPIHRLLTHF

SEQ ID NO: 211910 - protein, 15 aa, Artificial Sequence
  Description of Artificial Sequence: Synthetic peptide
  Seed: ANQRLNPMHQLLRHF
ANQRFNPIHRLLVHF

SEQ ID NO: 211911 - protein, 15 aa, Artificial Sequence
  Description of Artificial Sequence: Synthetic peptide
  Seed: ANQRLNPMHQLLRHF
ANQRFNPIHRLLWHF

SEQ ID NO: 211912 - protein, 15 aa, Artificial Sequence
  Description of Artificial Sequence: Synthetic peptide
  Seed: ANQRLNPMHQLLRHF
ANQRFNPIHRLLYHF

SEQ ID NO: 211913 - protein, 15 aa, Artificial Sequence
  Description of Artificial Sequence: Synthetic peptide
  Seed: ANQRLNPMHQLLRHF
ANQRFNPIHSLLAHF

SEQ ID NO: 211914 - protein, 15 aa, Artificial Sequence
  Description of Artificial Sequence: Synthetic peptide
  Seed: ANQRLNPMHQLLRHF
ANQRFNPIHSLLCHF

SEQ ID NO: 211915 - protein, 15 aa, Artificial Sequence
  Description of Artificial Sequence: Synthetic peptide
  Seed: ANQRLNPMHQLLRHF
ANQRFNPIHSLLDHF

SEQ ID NO: 211916 - protein, 15 aa, Artificial Sequence
  Description of Artificial Sequence: Synthetic peptide
  Seed: ANQRLNPMHQLLRHF
ANQRFNPIHSLLFHF

SEQ ID NO: 211917 - protein, 15 aa, Artificial Sequence
  Description of Artificial Sequence: Synthetic peptide
  Seed: ANQRLNPMHQLLRHF
ANQRFNPIHSLLGHF

SEQ ID NO: 211918 - protein, 15 aa, Artificial Sequence
  Description of Artificial Sequence: Synthetic peptide
  Seed: ANQRLNPMHQLLRHF
ANQRFNPIHSLLHHF

SEQ ID NO: 211919 - protein, 15 aa, Artificial Sequence
  Description of Artificial Sequence: Synthetic peptide
  Seed: ANQRLNPMHQLLRHF
ANQRFNPIHSLLIHF

SEQ ID NO: 211920 - protein, 15 aa, Artificial Sequence
  Description of Artificial Sequence: Synthetic peptide
  Seed: ANQRLNPMHQLLRHF
ANQRFNPIHSLLKHF

SEQ ID NO: 211921 - protein, 15 aa, Artificial Sequence
  Description of Artificial Sequence: Synthetic peptide
  Seed: ANQRLNPMHQLLRHF
ANQRFNPIHSLLLHF

SEQ ID NO: 211922 - protein, 15 aa, Artificial Sequence
  Description of Artificial Sequence: Synthetic peptide
  Seed: ANQRLNPMHQLLRHF
ANQRFNPIHSLLMHF

SEQ ID NO: 211923 - protein, 15 aa, Artificial Sequence
  Description of Artificial Sequence: Synthetic peptide
  Seed: ANQRLNPMHQLLRHF
ANQRFNPIHSLLNHF

SEQ ID NO: 211924 - protein, 15 aa, Artificial Sequence
  Description of Artificial Sequence: Synthetic peptide
  Seed: ANQRLNPMHQLLRHF
ANQRFNPIHSLLPHF

SEQ ID NO: 211925 - protein, 15 aa, Artificial Sequence
  Description of Artificial Sequence: Synthetic peptide
  Seed: ANQRLNPMHQLLRHF
ANQRFNPIHSLLQHF

SEQ ID NO: 211926 - protein, 15 aa, Artificial Sequence
  Description of Artificial Sequence: Synthetic peptide
  Seed: ANQRLNPMHQLLRHF
ANQRFNPIHSLLRHF

SEQ ID NO: 211927 - protein, 15 aa, Artificial Sequence
  Description of Artificial Sequence: Synthetic peptide
  Seed: ANQRLNPMHQLLRHF
ANQRFNPIHSLLSHF

SEQ ID NO: 211928 - protein, 15 aa, Artificial Sequence
  Description of Artificial Sequence: Synthetic peptide
  Seed: ANQRLNPMHQLLRHF
ANQRFNPIHSLLTHF

SEQ ID NO: 211929 - protein, 15 aa, Artificial Sequence
  Description of Artificial Sequence: Synthetic peptide
  Seed: ANQRLNPMHQLLRHF
ANQRFNPIHSLLVHF

SEQ ID NO: 211930 - protein, 15 aa, Artificial Sequence
  Description of Artificial Sequence: Synthetic peptide
  Seed: ANQRLNPMHQLLRHF
ANQRFNPIHSLLYHF

SEQ ID NO: 211931 - protein, 15 aa, Artificial Sequence
  Description of Artificial Sequence: Synthetic peptide
  Seed: ANQRLNPMHQLLRHF
ANQRFNPIHTLLAHF

SEQ ID NO: 211932 - protein, 15 aa, Artificial Sequence
  Description of Artificial Sequence: Synthetic peptide
  Seed: ANQRLNPMHQLLRHF
ANQRFNPIHTLLCHF

SEQ ID NO: 211933 - protein, 15 aa, Artificial Sequence
  Description of Artificial Sequence: Synthetic peptide
  Seed: ANQRLNPMHQLLRHF
ANQRFNPIHTLLFHF

SEQ ID NO: 211934 - protein, 15 aa, Artificial Sequence
  Description of Artificial Sequence: Synthetic peptide
  Seed: ANQRLNPMHQLLRHF
ANQRFNPIHTLLGHF

SEQ ID NO: 211935 - protein, 15 aa, Artificial Sequence
  Description of Artificial Sequence: Synthetic peptide
  Seed: ANQRLNPMHQLLRHF
ANQRFNPIHTLLHHF

SEQ ID NO: 211936 - protein, 15 aa, Artificial Sequence
  Description of Artificial Sequence: Synthetic peptide
  Seed: ANQRLNPMHQLLRHF
ANQRFNPIHTLLIHF

SEQ ID NO: 211937 - protein, 15 aa, Artificial Sequence
  Description of Artificial Sequence: Synthetic peptide
  Seed: ANQRLNPMHQLLRHF
ANQRFNPIHTLLLHF

SEQ ID NO: 211938 - protein, 15 aa, Artificial Sequence
  Description of Artificial Sequence: Synthetic peptide
  Seed: ANQRLNPMHQLLRHF
ANQRFNPIHTLLMHF

SEQ ID NO: 211939 - protein, 15 aa, Artificial Sequence
  Description of Artificial Sequence: Synthetic peptide
  Seed: ANQRLNPMHQLLRHF
ANQRFNPIHTLLNHF

SEQ ID NO: 211940 - protein, 15 aa, Artificial Sequence
  Description of Artificial Sequence: Synthetic peptide
  Seed: ANQRLNPMHQLLRHF
ANQRFNPIHTLLPHF

SEQ ID NO: 211941 - protein, 15 aa, Artificial Sequence
  Description of Artificial Sequence: Synthetic peptide
  Seed: ANQRLNPMHQLLRHF
ANQRFNPIHTLLQHF

SEQ ID NO: 211942 - protein, 15 aa, Artificial Sequence
  Description of Artificial Sequence: Synthetic peptide
  Seed: ANQRLNPMHQLLRHF
ANQRFNPIHTLLSHF

SEQ ID NO: 211943 - protein, 15 aa, Artificial Sequence
  Description of Artificial Sequence: Synthetic peptide
  Seed: ANQRLNPMHQLLRHF
ANQRFNPIHTLLTHF

SEQ ID NO: 211944 - protein, 15 aa, Artificial Sequence
  Description of Artificial Sequence: Synthetic peptide
  Seed: ANQRLNPMHQLLRHF
ANQRFNPIHTLLVHF

SEQ ID NO: 211945 - protein, 15 aa, Artificial Sequence
  Description of Artificial Sequence: Synthetic peptide
  Seed: ANQRLNPMHQLLRHF
ANQRFNPIHVLLAHF

SEQ ID NO: 211946 - protein, 15 aa, Artificial Sequence
  Description of Artificial Sequence: Synthetic peptide
  Seed: ANQRLNPMHQLLRHF
ANQRFNPIHVLLGHF

SEQ ID NO: 211947 - protein, 15 aa, Artificial Sequence
  Description of Artificial Sequence: Synthetic peptide
  Seed: ANQRLNPMHQLLRHF
ANQRFNPIHVLLHHF

SEQ ID NO: 211948 - protein, 15 aa, Artificial Sequence
  Description of Artificial Sequence: Synthetic peptide
  Seed: ANQRLNPMHQLLRHF
ANQRFNPIHVLLIHF

SEQ ID NO: 211949 - protein, 15 aa, Artificial Sequence
  Description of Artificial Sequence: Synthetic peptide
  Seed: ANQRLNPMHQLLRHF
ANQRFNPIHVLLLHF

SEQ ID NO: 211950 - protein, 15 aa, Artificial Sequence
  Description of Artificial Sequence: Synthetic peptide
  Seed: ANQRLNPMHQLLRHF
ANQRFNPIHVLLMHF

SEQ ID NO: 211951 - protein, 15 aa, Artificial Sequence
  Description of Artificial Sequence: Synthetic peptide
  Seed: ANQRLNPMHQLLRHF
ANQRFNPIHVLLNHF

SEQ ID NO: 211952 - protein, 15 aa, Artificial Sequence
  Description of Artificial Sequence: Synthetic peptide
  Seed: ANQRLNPMHQLLRHF
ANQRFNPIHVLLQHF

SEQ ID NO: 211953 - protein, 15 aa, Artificial Sequence
  Description of Artificial Sequence: Synthetic peptide
  Seed: ANQRLNPMHQLLRHF
ANQRFNPIHVLLSHF

SEQ ID NO: 211954 - protein, 15 aa, Artificial Sequence
  Description of Artificial Sequence: Synthetic peptide
  Seed: ANQRLNPMHQLLRHF
ANQRFNPIHVLLTHF

SEQ ID NO: 211955 - protein, 15 aa, Artificial Sequence
  Description of Artificial Sequence: Synthetic peptide
  Seed: ANQRLNPMHQLLRHF
ANQRFNPIHVLLVHF

SEQ ID NO: 211956 - protein, 15 aa, Artificial Sequence
  Description of Artificial Sequence: Synthetic peptide
  Seed: ANQRLNPMHQLLRHF
ANQRFNPIHWLLFHF

SEQ ID NO: 211957 - protein, 15 aa, Artificial Sequence
  Description of Artificial Sequence: Synthetic peptide
  Seed: ANQRLNPMHQLLRHF
ANQRFNPIHWLLIHF

SEQ ID NO: 211958 - protein, 15 aa, Artificial Sequence
  Description of Artificial Sequence: Synthetic peptide
  Seed: ANQRLNPMHQLLRHF
ANQRFNPIHWLLLHF

SEQ ID NO: 211959 - protein, 15 aa, Artificial Sequence
  Description of Artificial Sequence: Synthetic peptide
  Seed: ANQRLNPMHQLLRHF
ANQRFNPIHWLLMHF

SEQ ID NO: 211960 - protein, 15 aa, Artificial Sequence
  Description of Artificial Sequence: Synthetic peptide
  Seed: ANQRLNPMHQLLRHF
ANQRFNPIHWLLVHF

SEQ ID NO: 211961 - protein, 15 aa, Artificial Sequence
  Description of Artificial Sequence: Synthetic peptide
  Seed: ANQRLNPMHQLLRHF
ANQRFNPIHYLLFHF

SEQ ID NO: 211962 - protein, 15 aa, Artificial Sequence
  Description of Artificial Sequence: Synthetic peptide
  Seed: ANQRLNPMHQLLRHF
ANQRFNPIHYLLIHF

SEQ ID NO: 211963 - protein, 15 aa, Artificial Sequence
  Description of Artificial Sequence: Synthetic peptide
  Seed: ANQRLNPMHQLLRHF
ANQRFNPIHYLLLHF

SEQ ID NO: 211964 - protein, 15 aa, Artificial Sequence
  Description of Artificial Sequence: Synthetic peptide
  Seed: ANQRLNPMHQLLRHF
ANQRFNPIHYLLMHF

SEQ ID NO: 211965 - protein, 15 aa, Artificial Sequence
  Description of Artificial Sequence: Synthetic peptide
  Seed: ANQRLNPMHQLLRHF
ANQRFNPIHYLLVHF

SEQ ID NO: 211966 - protein, 15 aa, Artificial Sequence
  Description of Artificial Sequence: Synthetic peptide
  Seed: ANQRLNPMHQLLRHF
ANQRFNPKHALLAHF

SEQ ID NO: 211967 - protein, 15 aa, Artificial Sequence
  Description of Artificial Sequence: Synthetic peptide
  Seed: ANQRLNPMHQLLRHF
ANQRFNPKHALLIHF

SEQ ID NO: 211968 - protein, 15 aa, Artificial Sequence
  Description of Artificial Sequence: Synthetic peptide
  Seed: ANQRLNPMHQLLRHF
ANQRFNPKHALLLHF

SEQ ID NO: 211969 - protein, 15 aa, Artificial Sequence
  Description of Artificial Sequence: Synthetic peptide
  Seed: ANQRLNPMHQLLRHF
ANQRFNPKHALLVHF

SEQ ID NO: 211970 - protein, 15 aa, Artificial Sequence
  Description of Artificial Sequence: Synthetic peptide
  Seed: ANQRLNPMHQLLRHF
ANQRFNPKHFLLLHF

SEQ ID NO: 211971 - protein, 15 aa, Artificial Sequence
  Description of Artificial Sequence: Synthetic peptide
  Seed: ANQRLNPMHQLLRHF
ANQRFNPKHGLLLHF

SEQ ID NO: 211972 - protein, 15 aa, Artificial Sequence
  Description of Artificial Sequence: Synthetic peptide
  Seed: ANQRLNPMHQLLRHF
ANQRFNPKHGLLVHF

SEQ ID NO: 211973 - protein, 15 aa, Artificial Sequence
  Description of Artificial Sequence: Synthetic peptide
  Seed: ANQRLNPMHQLLRHF
ANQRFNPKHSLLIHF

SEQ ID NO: 211974 - protein, 15 aa, Artificial Sequence
  Description of Artificial Sequence: Synthetic peptide
  Seed: ANQRLNPMHQLLRHF
ANQRFNPKHSLLLHF

SEQ ID NO: 211975 - protein, 15 aa, Artificial Sequence
  Description of Artificial Sequence: Synthetic peptide
  Seed: ANQRLNPMHQLLRHF
ANQRFNPKHSLLVHF

SEQ ID NO: 211976 - protein, 15 aa, Artificial Sequence
  Description of Artificial Sequence: Synthetic peptide
  Seed: ANQRLNPMHQLLRHF
ANQRFNPLHALLAHF

SEQ ID NO: 211977 - protein, 15 aa, Artificial Sequence
  Description of Artificial Sequence: Synthetic peptide
  Seed: ANQRLNPMHQLLRHF
ANQRFNPLHALLCHF

SEQ ID NO: 211978 - protein, 15 aa, Artificial Sequence
  Description of Artificial Sequence: Synthetic peptide
  Seed: ANQRLNPMHQLLRHF
ANQRFNPLHALLDHF

SEQ ID NO: 211979 - protein, 15 aa, Artificial Sequence
  Description of Artificial Sequence: Synthetic peptide
  Seed: ANQRLNPMHQLLRHF
ANQRFNPLHALLEHF

SEQ ID NO: 211980 - protein, 15 aa, Artificial Sequence
  Description of Artificial Sequence: Synthetic peptide
  Seed: ANQRLNPMHQLLRHF
ANQRFNPLHALLFHF

SEQ ID NO: 211981 - protein, 15 aa, Artificial Sequence
  Description of Artificial Sequence: Synthetic peptide
  Seed: ANQRLNPMHQLLRHF
ANQRFNPLHALLGHF

SEQ ID NO: 211982 - protein, 15 aa, Artificial Sequence
  Description of Artificial Sequence: Synthetic peptide
  Seed: ANQRLNPMHQLLRHF
ANQRFNPLHALLHHF

SEQ ID NO: 211983 - protein, 15 aa, Artificial Sequence
  Description of Artificial Sequence: Synthetic peptide
  Seed: ANQRLNPMHQLLRHF
ANQRFNPLHALLIHF

SEQ ID NO: 211984 - protein, 15 aa, Artificial Sequence
  Description of Artificial Sequence: Synthetic peptide
  Seed: ANQRLNPMHQLLRHF
ANQRFNPLHALLKHF

SEQ ID NO: 211985 - protein, 15 aa, Artificial Sequence
  Description of Artificial Sequence: Synthetic peptide
  Seed: ANQRLNPMHQLLRHF
ANQRFNPLHALLLHF

SEQ ID NO: 211986 - protein, 15 aa, Artificial Sequence
  Description of Artificial Sequence: Synthetic peptide
  Seed: ANQRLNPMHQLLRHF
ANQRFNPLHALLMHF

SEQ ID NO: 211987 - protein, 15 aa, Artificial Sequence
  Description of Artificial Sequence: Synthetic peptide
  Seed: ANQRLNPMHQLLRHF
ANQRFNPLHALLNHF

SEQ ID NO: 211988 - protein, 15 aa, Artificial Sequence
  Description of Artificial Sequence: Synthetic peptide
  Seed: ANQRLNPMHQLLRHF
ANQRFNPLHALLPHF

SEQ ID NO: 211989 - protein, 15 aa, Artificial Sequence
  Description of Artificial Sequence: Synthetic peptide
  Seed: ANQRLNPMHQLLRHF
ANQRFNPLHALLQHF

SEQ ID NO: 211990 - protein, 15 aa, Artificial Sequence
  Description of Artificial Sequence: Synthetic peptide
  Seed: ANQRLNPMHQLLRHF
ANQRFNPLHALLRHF

SEQ ID NO: 211991 - protein, 15 aa, Artificial Sequence
  Description of Artificial Sequence: Synthetic peptide
  Seed: ANQRLNPMHQLLRHF
ANQRFNPLHALLSHF

SEQ ID NO: 211992 - protein, 15 aa, Artificial Sequence
  Description of Artificial Sequence: Synthetic peptide
  Seed: ANQRLNPMHQLLRHF
ANQRFNPLHALLTHF

SEQ ID NO: 211993 - protein, 15 aa, Artificial Sequence
  Description of Artificial Sequence: Synthetic peptide
  Seed: ANQRLNPMHQLLRHF
ANQRFNPLHALLVHF

SEQ ID NO: 211994 - protein, 15 aa, Artificial Sequence
  Description of Artificial Sequence: Synthetic peptide
  Seed: ANQRLNPMHQLLRHF
ANQRFNPLHALLWHF

SEQ ID NO: 211995 - protein, 15 aa, Artificial Sequence
  Description of Artificial Sequence: Synthetic peptide
  Seed: ANQRLNPMHQLLRHF
ANQRFNPLHALLYHF

SEQ ID NO: 211996 - protein, 15 aa, Artificial Sequence
  Description of Artificial Sequence: Synthetic peptide
  Seed: ANQRLNPMHQLLRHF
ANQRFNPLHCLLAHF

SEQ ID NO: 211997 - protein, 15 aa, Artificial Sequence
  Description of Artificial Sequence: Synthetic peptide
  Seed: ANQRLNPMHQLLRHF
ANQRFNPLHCLLIHF

SEQ ID NO: 211998 - protein, 15 aa, Artificial Sequence
  Description of Artificial Sequence: Synthetic peptide
  Seed: ANQRLNPMHQLLRHF
ANQRFNPLHCLLLHF

SEQ ID NO: 211999 - protein, 15 aa, Artificial Sequence
  Description of Artificial Sequence: Synthetic peptide
  Seed: ANQRLNPMHQLLRHF
ANQRFNPLHCLLTHF

SEQ ID NO: 212000 - protein, 15 aa, Artificial Sequence
  Description of Artificial Sequence: Synthetic peptide
  Seed: ANQRLNPMHQLLRHF
ANQRFNPLHCLLVHF

SEQ ID NO: 212001 - protein, 15 aa, Artificial Sequence
  Description of Artificial Sequence: Synthetic peptide
  Seed: ANQRLNPMHQLLRHF
ANQRFNPLHDLLAHF

SEQ ID NO: 212002 - protein, 15 aa, Artificial Sequence
  Description of Artificial Sequence: Synthetic peptide
  Seed: ANQRLNPMHQLLRHF
ANQRFNPLHDLLIHF

SEQ ID NO: 212003 - protein, 15 aa, Artificial Sequence
  Description of Artificial Sequence: Synthetic peptide
  Seed: ANQRLNPMHQLLRHF
ANQRFNPLHDLLLHF

SEQ ID NO: 212004 - protein, 15 aa, Artificial Sequence
  Description of Artificial Sequence: Synthetic peptide
  Seed: ANQRLNPMHQLLRHF
ANQRFNPLHDLLVHF

SEQ ID NO: 212005 - protein, 15 aa, Artificial Sequence
  Description of Artificial Sequence: Synthetic peptide
  Seed: ANQRLNPMHQLLRHF
ANQRFNPLHELLAHF

SEQ ID NO: 212006 - protein, 15 aa, Artificial Sequence
  Description of Artificial Sequence: Synthetic peptide
  Seed: ANQRLNPMHQLLRHF
ANQRFNPLHELLIHF

SEQ ID NO: 212007 - protein, 15 aa, Artificial Sequence
  Description of Artificial Sequence: Synthetic peptide
  Seed: ANQRLNPMHQLLRHF
ANQRFNPLHELLLHF

SEQ ID NO: 212008 - protein, 15 aa, Artificial Sequence
  Description of Artificial Sequence: Synthetic peptide
  Seed: ANQRLNPMHQLLRHF
ANQRFNPLHELLVHF

SEQ ID NO: 212009 - protein, 15 aa, Artificial Sequence
  Description of Artificial Sequence: Synthetic peptide
  Seed: ANQRLNPMHQLLRHF
ANQRFNPLHFLLAHF

SEQ ID NO: 212010 - protein, 15 aa, Artificial Sequence
  Description of Artificial Sequence: Synthetic peptide
  Seed: ANQRLNPMHQLLRHF
ANQRFNPLHFLLDHF

SEQ ID NO: 212011 - protein, 15 aa, Artificial Sequence
  Description of Artificial Sequence: Synthetic peptide
  Seed: ANQRLNPMHQLLRHF
ANQRFNPLHFLLEHF

SEQ ID NO: 212012 - protein, 15 aa, Artificial Sequence
  Description of Artificial Sequence: Synthetic peptide
  Seed: ANQRLNPMHQLLRHF
ANQRFNPLHFLLFHF

SEQ ID NO: 212013 - protein, 15 aa, Artificial Sequence
  Description of Artificial Sequence: Synthetic peptide
  Seed: ANQRLNPMHQLLRHF
ANQRFNPLHFLLHHF

SEQ ID NO: 212014 - protein, 15 aa, Artificial Sequence
  Description of Artificial Sequence: Synthetic peptide
  Seed: ANQRLNPMHQLLRHF
ANQRFNPLHFLLIHF

SEQ ID NO: 212015 - protein, 15 aa, Artificial Sequence
  Description of Artificial Sequence: Synthetic peptide
  Seed: ANQRLNPMHQLLRHF
ANQRFNPLHFLLLHF

SEQ ID NO: 212016 - protein, 15 aa, Artificial Sequence
  Description of Artificial Sequence: Synthetic peptide
  Seed: ANQRLNPMHQLLRHF
ANQRFNPLHFLLMHF

SEQ ID NO: 212017 - protein, 15 aa, Artificial Sequence
  Description of Artificial Sequence: Synthetic peptide
  Seed: ANQRLNPMHQLLRHF
ANQRFNPLHFLLNHF

SEQ ID NO: 212018 - protein, 15 aa, Artificial Sequence
  Description of Artificial Sequence: Synthetic peptide
  Seed: ANQRLNPMHQLLRHF
ANQRFNPLHFLLPHF

SEQ ID NO: 212019 - protein, 15 aa, Artificial Sequence
  Description of Artificial Sequence: Synthetic peptide
  Seed: ANQRLNPMHQLLRHF
ANQRFNPLHFLLQHF

SEQ ID NO: 212020 - protein, 15 aa, Artificial Sequence
  Description of Artificial Sequence: Synthetic peptide
  Seed: ANQRLNPMHQLLRHF
ANQRFNPLHFLLRHF

SEQ ID NO: 212021 - protein, 15 aa, Artificial Sequence
  Description of Artificial Sequence: Synthetic peptide
  Seed: ANQRLNPMHQLLRHF
ANQRFNPLHFLLSHF

SEQ ID NO: 212022 - protein, 15 aa, Artificial Sequence
  Description of Artificial Sequence: Synthetic peptide
  Seed: ANQRLNPMHQLLRHF
ANQRFNPLHFLLTHF

SEQ ID NO: 212023 - protein, 15 aa, Artificial Sequence
  Description of Artificial Sequence: Synthetic peptide
  Seed: ANQRLNPMHQLLRHF
ANQRFNPLHFLLVHF

SEQ ID NO: 212024 - protein, 15 aa, Artificial Sequence
  Description of Artificial Sequence: Synthetic peptide
  Seed: ANQRLNPMHQLLRHF
ANQRFNPLHFLLWHF

SEQ ID NO: 212025 - protein, 15 aa, Artificial Sequence
  Description of Artificial Sequence: Synthetic peptide
  Seed: ANQRLNPMHQLLRHF
ANQRFNPLHFLLYHF

SEQ ID NO: 212026 - protein, 15 aa, Artificial Sequence
  Description of Artificial Sequence: Synthetic peptide
  Seed: ANQRLNPMHQLLRHF
ANQRFNPLHGLLAHF

SEQ ID NO: 212027 - protein, 15 aa, Artificial Sequence
  Description of Artificial Sequence: Synthetic peptide
  Seed: ANQRLNPMHQLLRHF
ANQRFNPLHGLLCHF

SEQ ID NO: 212028 - protein, 15 aa, Artificial Sequence
  Description of Artificial Sequence: Synthetic peptide
  Seed: ANQRLNPMHQLLRHF
ANQRFNPLHGLLDHF

SEQ ID NO: 212029 - protein, 15 aa, Artificial Sequence
  Description of Artificial Sequence: Synthetic peptide
  Seed: ANQRLNPMHQLLRHF
ANQRFNPLHGLLEHF

SEQ ID NO: 212030 - protein, 15 aa, Artificial Sequence
  Description of Artificial Sequence: Synthetic peptide
  Seed: ANQRLNPMHQLLRHF
ANQRFNPLHGLLFHF

SEQ ID NO: 212031 - protein, 15 aa, Artificial Sequence
  Description of Artificial Sequence: Synthetic peptide
  Seed: ANQRLNPMHQLLRHF
ANQRFNPLHGLLGHF

SEQ ID NO: 212032 - protein, 15 aa, Artificial Sequence
  Description of Artificial Sequence: Synthetic peptide
  Seed: ANQRLNPMHQLLRHF
ANQRFNPLHGLLHHF

SEQ ID NO: 212033 - protein, 15 aa, Artificial Sequence
  Description of Artificial Sequence: Synthetic peptide
  Seed: ANQRLNPMHQLLRHF
ANQRFNPLHGLLIHF

SEQ ID NO: 212034 - protein, 15 aa, Artificial Sequence
  Description of Artificial Sequence: Synthetic peptide
  Seed: ANQRLNPMHQLLRHF
ANQRFNPLHGLLKHF

SEQ ID NO: 212035 - protein, 15 aa, Artificial Sequence
  Description of Artificial Sequence: Synthetic peptide
  Seed: ANQRLNPMHQLLRHF
ANQRFNPLHGLLLHF

SEQ ID NO: 212036 - protein, 15 aa, Artificial Sequence
  Description of Artificial Sequence: Synthetic peptide
  Seed: ANQRLNPMHQLLRHF
ANQRFNPLHGLLMHF

SEQ ID NO: 212037 - protein, 15 aa, Artificial Sequence
  Description of Artificial Sequence: Synthetic peptide
  Seed: ANQRLNPMHQLLRHF
ANQRFNPLHGLLNHF

SEQ ID NO: 212038 - protein, 15 aa, Artificial Sequence
  Description of Artificial Sequence: Synthetic peptide
  Seed: ANQRLNPMHQLLRHF
ANQRFNPLHGLLPHF

SEQ ID NO: 212039 - protein, 15 aa, Artificial Sequence
  Description of Artificial Sequence: Synthetic peptide
  Seed: ANQRLNPMHQLLRHF
ANQRFNPLHGLLQHF

SEQ ID NO: 212040 - protein, 15 aa, Artificial Sequence
  Description of Artificial Sequence: Synthetic peptide
  Seed: ANQRLNPMHQLLRHF
ANQRFNPLHGLLRHF

SEQ ID NO: 212041 - protein, 15 aa, Artificial Sequence
  Description of Artificial Sequence: Synthetic peptide
  Seed: ANQRLNPMHQLLRHF
ANQRFNPLHGLLSHF

SEQ ID NO: 212042 - protein, 15 aa, Artificial Sequence
  Description of Artificial Sequence: Synthetic peptide
  Seed: ANQRLNPMHQLLRHF
ANQRFNPLHGLLTHF

SEQ ID NO: 212043 - protein, 15 aa, Artificial Sequence
  Description of Artificial Sequence: Synthetic peptide
  Seed: ANQRLNPMHQLLRHF
ANQRFNPLHGLLVHF

SEQ ID NO: 212044 - protein, 15 aa, Artificial Sequence
  Description of Artificial Sequence: Synthetic peptide
  Seed: ANQRLNPMHQLLRHF
ANQRFNPLHGLLWHF

SEQ ID NO: 212045 - protein, 15 aa, Artificial Sequence
  Description of Artificial Sequence: Synthetic peptide
  Seed: ANQRLNPMHQLLRHF
ANQRFNPLHGLLYHF

SEQ ID NO: 212046 - protein, 15 aa, Artificial Sequence
  Description of Artificial Sequence: Synthetic peptide
  Seed: ANQRLNPMHQLLRHF
ANQRFNPLHHLLAHF

SEQ ID NO: 212047 - protein, 15 aa, Artificial Sequence
  Description of Artificial Sequence: Synthetic peptide
  Seed: ANQRLNPMHQLLRHF
ANQRFNPLHHLLIHF

SEQ ID NO: 212048 - protein, 15 aa, Artificial Sequence
  Description of Artificial Sequence: Synthetic peptide
  Seed: ANQRLNPMHQLLRHF
ANQRFNPLHHLLLHF

SEQ ID NO: 212049 - protein, 15 aa, Artificial Sequence
  Description of Artificial Sequence: Synthetic peptide
  Seed: ANQRLNPMHQLLRHF
ANQRFNPLHHLLMHF

SEQ ID NO: 212050 - protein, 15 aa, Artificial Sequence
  Description of Artificial Sequence: Synthetic peptide
  Seed: ANQRLNPMHQLLRHF
ANQRFNPLHHLLSHF

SEQ ID NO: 212051 - protein, 15 aa, Artificial Sequence
  Description of Artificial Sequence: Synthetic peptide
  Seed: ANQRLNPMHQLLRHF
ANQRFNPLHHLLTHF

SEQ ID NO: 212052 - protein, 15 aa, Artificial Sequence
  Description of Artificial Sequence: Synthetic peptide
  Seed: ANQRLNPMHQLLRHF
ANQRFNPLHHLLVHF

SEQ ID NO: 212053 - protein, 15 aa, Artificial Sequence
  Description of Artificial Sequence: Synthetic peptide
  Seed: ANQRLNPMHQLLRHF
ANQRFNPLHILLAHF

SEQ ID NO: 212054 - protein, 15 aa, Artificial Sequence
  Description of Artificial Sequence: Synthetic peptide
  Seed: ANQRLNPMHQLLRHF
ANQRFNPLHILLGHF

SEQ ID NO: 212055 - protein, 15 aa, Artificial Sequence
  Description of Artificial Sequence: Synthetic peptide
  Seed: ANQRLNPMHQLLRHF
ANQRFNPLHILLHHF

SEQ ID NO: 212056 - protein, 15 aa, Artificial Sequence
  Description of Artificial Sequence: Synthetic peptide
  Seed: ANQRLNPMHQLLRHF
ANQRFNPLHILLIHF

SEQ ID NO: 212057 - protein, 15 aa, Artificial Sequence
  Description of Artificial Sequence: Synthetic peptide
  Seed: ANQRLNPMHQLLRHF
ANQRFNPLHILLLHF

SEQ ID NO: 212058 - protein, 15 aa, Artificial Sequence
  Description of Artificial Sequence: Synthetic peptide
  Seed: ANQRLNPMHQLLRHF
ANQRFNPLHILLMHF

SEQ ID NO: 212059 - protein, 15 aa, Artificial Sequence
  Description of Artificial Sequence: Synthetic peptide
  Seed: ANQRLNPMHQLLRHF
ANQRFNPLHILLNHF

SEQ ID NO: 212060 - protein, 15 aa, Artificial Sequence
  Description of Artificial Sequence: Synthetic peptide
  Seed: ANQRLNPMHQLLRHF
ANQRFNPLHILLSHF

SEQ ID NO: 212061 - protein, 15 aa, Artificial Sequence
  Description of Artificial Sequence: Synthetic peptide
  Seed: ANQRLNPMHQLLRHF
ANQRFNPLHILLTHF

SEQ ID NO: 212062 - protein, 15 aa, Artificial Sequence
  Description of Artificial Sequence: Synthetic peptide
  Seed: ANQRLNPMHQLLRHF
ANQRFNPLHILLVHF

SEQ ID NO: 212063 - protein, 15 aa, Artificial Sequence
  Description of Artificial Sequence: Synthetic peptide
  Seed: ANQRLNPMHQLLRHF
ANQRFNPLHKLLAHF

SEQ ID NO: 212064 - protein, 15 aa, Artificial Sequence
  Description of Artificial Sequence: Synthetic peptide
  Seed: ANQRLNPMHQLLRHF
ANQRFNPLHKLLGHF

SEQ ID NO: 212065 - protein, 15 aa, Artificial Sequence
  Description of Artificial Sequence: Synthetic peptide
  Seed: ANQRLNPMHQLLRHF
ANQRFNPLHKLLHHF

SEQ ID NO: 212066 - protein, 15 aa, Artificial Sequence
  Description of Artificial Sequence: Synthetic peptide
  Seed: ANQRLNPMHQLLRHF
ANQRFNPLHKLLIHF

SEQ ID NO: 212067 - protein, 15 aa, Artificial Sequence
  Description of Artificial Sequence: Synthetic peptide
  Seed: ANQRLNPMHQLLRHF
ANQRFNPLHKLLKHF

SEQ ID NO: 212068 - protein, 15 aa, Artificial Sequence
  Description of Artificial Sequence: Synthetic peptide
  Seed: ANQRLNPMHQLLRHF
ANQRFNPLHKLLLHF

SEQ ID NO: 212069 - protein, 15 aa, Artificial Sequence
  Description of Artificial Sequence: Synthetic peptide
  Seed: ANQRLNPMHQLLRHF
ANQRFNPLHKLLMHF

SEQ ID NO: 212070 - protein, 15 aa, Artificial Sequence
  Description of Artificial Sequence: Synthetic peptide
  Seed: ANQRLNPMHQLLRHF
ANQRFNPLHKLLNHF

SEQ ID NO: 212071 - protein, 15 aa, Artificial Sequence
  Description of Artificial Sequence: Synthetic peptide
  Seed: ANQRLNPMHQLLRHF
ANQRFNPLHKLLPHF

SEQ ID NO: 212072 - protein, 15 aa, Artificial Sequence
  Description of Artificial Sequence: Synthetic peptide
  Seed: ANQRLNPMHQLLRHF
ANQRFNPLHKLLQHF

SEQ ID NO: 212073 - protein, 15 aa, Artificial Sequence
  Description of Artificial Sequence: Synthetic peptide
  Seed: ANQRLNPMHQLLRHF
ANQRFNPLHKLLRHF

SEQ ID NO: 212074 - protein, 15 aa, Artificial Sequence
  Description of Artificial Sequence: Synthetic peptide
  Seed: ANQRLNPMHQLLRHF
ANQRFNPLHKLLSHF

SEQ ID NO: 212075 - protein, 15 aa, Artificial Sequence
  Description of Artificial Sequence: Synthetic peptide
  Seed: ANQRLNPMHQLLRHF
ANQRFNPLHKLLTHF

SEQ ID NO: 212076 - protein, 15 aa, Artificial Sequence
  Description of Artificial Sequence: Synthetic peptide
  Seed: ANQRLNPMHQLLRHF
ANQRFNPLHKLLVHF

SEQ ID NO: 212077 - protein, 15 aa, Artificial Sequence
  Description of Artificial Sequence: Synthetic peptide
  Seed: ANQRLNPMHQLLRHF
ANQRFNPLHLLLAHF

SEQ ID NO: 212078 - protein, 15 aa, Artificial Sequence
  Description of Artificial Sequence: Synthetic peptide
  Seed: ANQRLNPMHQLLRHF
ANQRFNPLHLLLIHF

SEQ ID NO: 212079 - protein, 15 aa, Artificial Sequence
  Description of Artificial Sequence: Synthetic peptide
  Seed: ANQRLNPMHQLLRHF
ANQRFNPLHLLLLHF

SEQ ID NO: 212080 - protein, 15 aa, Artificial Sequence
  Description of Artificial Sequence: Synthetic peptide
  Seed: ANQRLNPMHQLLRHF
ANQRFNPLHLLLNHF

SEQ ID NO: 212081 - protein, 15 aa, Artificial Sequence
  Description of Artificial Sequence: Synthetic peptide
  Seed: ANQRLNPMHQLLRHF
ANQRFNPLHLLLSHF

SEQ ID NO: 212082 - protein, 15 aa, Artificial Sequence
  Description of Artificial Sequence: Synthetic peptide
  Seed: ANQRLNPMHQLLRHF
ANQRFNPLHLLLTHF

SEQ ID NO: 212083 - protein, 15 aa, Artificial Sequence
  Description of Artificial Sequence: Synthetic peptide
  Seed: ANQRLNPMHQLLRHF
ANQRFNPLHLLLVHF

SEQ ID NO: 212084 - protein, 15 aa, Artificial Sequence
  Description of Artificial Sequence: Synthetic peptide
  Seed: ANQRLNPMHQLLRHF
ANQRFNPLHMLLAHF

SEQ ID NO: 212085 - protein, 15 aa, Artificial Sequence
  Description of Artificial Sequence: Synthetic peptide
  Seed: ANQRLNPMHQLLRHF
ANQRFNPLHMLLIHF

SEQ ID NO: 212086 - protein, 15 aa, Artificial Sequence
  Description of Artificial Sequence: Synthetic peptide
  Seed: ANQRLNPMHQLLRHF
ANQRFNPLHMLLLHF

SEQ ID NO: 212087 - protein, 15 aa, Artificial Sequence
  Description of Artificial Sequence: Synthetic peptide
  Seed: ANQRLNPMHQLLRHF
ANQRFNPLHMLLMHF

SEQ ID NO: 212088 - protein, 15 aa, Artificial Sequence
  Description of Artificial Sequence: Synthetic peptide
  Seed: ANQRLNPMHQLLRHF
ANQRFNPLHMLLNHF

SEQ ID NO: 212089 - protein, 15 aa, Artificial Sequence
  Description of Artificial Sequence: Synthetic peptide
  Seed: ANQRLNPMHQLLRHF
ANQRFNPLHMLLSHF

SEQ ID NO: 212090 - protein, 15 aa, Artificial Sequence
  Description of Artificial Sequence: Synthetic peptide
  Seed: ANQRLNPMHQLLRHF
ANQRFNPLHMLLTHF

SEQ ID NO: 212091 - protein, 15 aa, Artificial Sequence
  Description of Artificial Sequence: Synthetic peptide
  Seed: ANQRLNPMHQLLRHF
ANQRFNPLHMLLVHF

SEQ ID NO: 212092 - protein, 15 aa, Artificial Sequence
  Description of Artificial Sequence: Synthetic peptide
  Seed: ANQRLNPMHQLLRHF
ANQRFNPLHNLLAHF

SEQ ID NO: 212093 - protein, 15 aa, Artificial Sequence
  Description of Artificial Sequence: Synthetic peptide
  Seed: ANQRLNPMHQLLRHF
ANQRFNPLHNLLCHF

SEQ ID NO: 212094 - protein, 15 aa, Artificial Sequence
  Description of Artificial Sequence: Synthetic peptide
  Seed: ANQRLNPMHQLLRHF
ANQRFNPLHNLLFHF

SEQ ID NO: 212095 - protein, 15 aa, Artificial Sequence
  Description of Artificial Sequence: Synthetic peptide
  Seed: ANQRLNPMHQLLRHF
ANQRFNPLHNLLGHF

SEQ ID NO: 212096 - protein, 15 aa, Artificial Sequence
  Description of Artificial Sequence: Synthetic peptide
  Seed: ANQRLNPMHQLLRHF
ANQRFNPLHNLLHHF

SEQ ID NO: 212097 - protein, 15 aa, Artificial Sequence
  Description of Artificial Sequence: Synthetic peptide
  Seed: ANQRLNPMHQLLRHF
ANQRFNPLHNLLIHF

SEQ ID NO: 212098 - protein, 15 aa, Artificial Sequence
  Description of Artificial Sequence: Synthetic peptide
  Seed: ANQRLNPMHQLLRHF
ANQRFNPLHNLLLHF

SEQ ID NO: 212099 - protein, 15 aa, Artificial Sequence
  Description of Artificial Sequence: Synthetic peptide
  Seed: ANQRLNPMHQLLRHF
ANQRFNPLHNLLMHF

SEQ ID NO: 212100 - protein, 15 aa, Artificial Sequence
  Description of Artificial Sequence: Synthetic peptide
  Seed: ANQRLNPMHQLLRHF
ANQRFNPLHNLLNHF

SEQ ID NO: 212101 - protein, 15 aa, Artificial Sequence
  Description of Artificial Sequence: Synthetic peptide
  Seed: ANQRLNPMHQLLRHF
ANQRFNPLHNLLPHF

SEQ ID NO: 212102 - protein, 15 aa, Artificial Sequence
  Description of Artificial Sequence: Synthetic peptide
  Seed: ANQRLNPMHQLLRHF
ANQRFNPLHNLLQHF

SEQ ID NO: 212103 - protein, 15 aa, Artificial Sequence
  Description of Artificial Sequence: Synthetic peptide
  Seed: ANQRLNPMHQLLRHF
ANQRFNPLHNLLSHF

SEQ ID NO: 212104 - protein, 15 aa, Artificial Sequence
  Description of Artificial Sequence: Synthetic peptide
  Seed: ANQRLNPMHQLLRHF
ANQRFNPLHNLLTHF

SEQ ID NO: 212105 - protein, 15 aa, Artificial Sequence
  Description of Artificial Sequence: Synthetic peptide
  Seed: ANQRLNPMHQLLRHF
ANQRFNPLHNLLVHF

SEQ ID NO: 212106 - protein, 15 aa, Artificial Sequence
  Description of Artificial Sequence: Synthetic peptide
  Seed: ANQRLNPMHQLLRHF
ANQRFNPLHNLLYHF

SEQ ID NO: 212107 - protein, 15 aa, Artificial Sequence
  Description of Artificial Sequence: Synthetic peptide
  Seed: ANQRLNPMHQLLRHF
ANQRFNPLHPLLAHF

SEQ ID NO: 212108 - protein, 15 aa, Artificial Sequence
  Description of Artificial Sequence: Synthetic peptide
  Seed: ANQRLNPMHQLLRHF
ANQRFNPLHPLLCHF

SEQ ID NO: 212109 - protein, 15 aa, Artificial Sequence
  Description of Artificial Sequence: Synthetic peptide
  Seed: ANQRLNPMHQLLRHF
ANQRFNPLHPLLDHF

SEQ ID NO: 212110 - protein, 15 aa, Artificial Sequence
  Description of Artificial Sequence: Synthetic peptide
  Seed: ANQRLNPMHQLLRHF
ANQRFNPLHPLLEHF

SEQ ID NO: 212111 - protein, 15 aa, Artificial Sequence
  Description of Artificial Sequence: Synthetic peptide
  Seed: ANQRLNPMHQLLRHF
ANQRFNPLHPLLFHF

SEQ ID NO: 212112 - protein, 15 aa, Artificial Sequence
  Description of Artificial Sequence: Synthetic peptide
  Seed: ANQRLNPMHQLLRHF
ANQRFNPLHPLLGHF

SEQ ID NO: 212113 - protein, 15 aa, Artificial Sequence
  Description of Artificial Sequence: Synthetic peptide
  Seed: ANQRLNPMHQLLRHF
ANQRFNPLHPLLHHF

SEQ ID NO: 212114 - protein, 15 aa, Artificial Sequence
  Description of Artificial Sequence: Synthetic peptide
  Seed: ANQRLNPMHQLLRHF
ANQRFNPLHPLLIHF

SEQ ID NO: 212115 - protein, 15 aa, Artificial Sequence
  Description of Artificial Sequence: Synthetic peptide
  Seed: ANQRLNPMHQLLRHF
ANQRFNPLHPLLKHF

SEQ ID NO: 212116 - protein, 15 aa, Artificial Sequence
  Description of Artificial Sequence: Synthetic peptide
  Seed: ANQRLNPMHQLLRHF
ANQRFNPLHPLLLHF

SEQ ID NO: 212117 - protein, 15 aa, Artificial Sequence
  Description of Artificial Sequence: Synthetic peptide
  Seed: ANQRLNPMHQLLRHF
ANQRFNPLHPLLMHF

SEQ ID NO: 212118 - protein, 15 aa, Artificial Sequence
  Description of Artificial Sequence: Synthetic peptide
  Seed: ANQRLNPMHQLLRHF
ANQRFNPLHPLLNHF

SEQ ID NO: 212119 - protein, 15 aa, Artificial Sequence
  Description of Artificial Sequence: Synthetic peptide
  Seed: ANQRLNPMHQLLRHF
ANQRFNPLHPLLPHF

SEQ ID NO: 212120 - protein, 15 aa, Artificial Sequence
  Description of Artificial Sequence: Synthetic peptide
  Seed: ANQRLNPMHQLLRHF
ANQRFNPLHPLLQHF

SEQ ID NO: 212121 - protein, 15 aa, Artificial Sequence
  Description of Artificial Sequence: Synthetic peptide
  Seed: ANQRLNPMHQLLRHF
ANQRFNPLHPLLRHF

SEQ ID NO: 212122 - protein, 15 aa, Artificial Sequence
  Description of Artificial Sequence: Synthetic peptide
  Seed: ANQRLNPMHQLLRHF
ANQRFNPLHPLLSHF

SEQ ID NO: 212123 - protein, 15 aa, Artificial Sequence
  Description of Artificial Sequence: Synthetic peptide
  Seed: ANQRLNPMHQLLRHF
ANQRFNPLHPLLTHF

SEQ ID NO: 212124 - protein, 15 aa, Artificial Sequence
  Description of Artificial Sequence: Synthetic peptide
  Seed: ANQRLNPMHQLLRHF
ANQRFNPLHPLLVHF

SEQ ID NO: 212125 - protein, 15 aa, Artificial Sequence
  Description of Artificial Sequence: Synthetic peptide
  Seed: ANQRLNPMHQLLRHF
ANQRFNPLHPLLWHF

SEQ ID NO: 212126 - protein, 15 aa, Artificial Sequence
  Description of Artificial Sequence: Synthetic peptide
  Seed: ANQRLNPMHQLLRHF
ANQRFNPLHPLLYHF

SEQ ID NO: 212127 - protein, 15 aa, Artificial Sequence
  Description of Artificial Sequence: Synthetic peptide
  Seed: ANQRLNPMHQLLRHF
ANQRFNPLHQLLAHF

SEQ ID NO: 212128 - protein, 15 aa, Artificial Sequence
  Description of Artificial Sequence: Synthetic peptide
  Seed: ANQRLNPMHQLLRHF
ANQRFNPLHQLLIHF

SEQ ID NO: 212129 - protein, 15 aa, Artificial Sequence
  Description of Artificial Sequence: Synthetic peptide
  Seed: ANQRLNPMHQLLRHF
ANQRFNPLHQLLLHF

SEQ ID NO: 212130 - protein, 15 aa, Artificial Sequence
  Description of Artificial Sequence: Synthetic peptide
  Seed: ANQRLNPMHQLLRHF
ANQRFNPLHQLLMHF

SEQ ID NO: 212131 - protein, 15 aa, Artificial Sequence
  Description of Artificial Sequence: Synthetic peptide
  Seed: ANQRLNPMHQLLRHF
ANQRFNPLHQLLTHF

SEQ ID NO: 212132 - protein, 15 aa, Artificial Sequence
  Description of Artificial Sequence: Synthetic peptide
  Seed: ANQRLNPMHQLLRHF
ANQRFNPLHQLLVHF

SEQ ID NO: 212133 - protein, 15 aa, Artificial Sequence
  Description of Artificial Sequence: Synthetic peptide
  Seed: ANQRLNPMHQLLRHF
ANQRFNPLHRLLAHF

SEQ ID NO: 212134 - protein, 15 aa, Artificial Sequence
  Description of Artificial Sequence: Synthetic peptide
  Seed: ANQRLNPMHQLLRHF
ANQRFNPLHRLLGHF

SEQ ID NO: 212135 - protein, 15 aa, Artificial Sequence
  Description of Artificial Sequence: Synthetic peptide
  Seed: ANQRLNPMHQLLRHF
ANQRFNPLHRLLHHF

SEQ ID NO: 212136 - protein, 15 aa, Artificial Sequence
  Description of Artificial Sequence: Synthetic peptide
  Seed: ANQRLNPMHQLLRHF
ANQRFNPLHRLLIHF

SEQ ID NO: 212137 - protein, 15 aa, Artificial Sequence
  Description of Artificial Sequence: Synthetic peptide
  Seed: ANQRLNPMHQLLRHF
ANQRFNPLHRLLKHF

SEQ ID NO: 212138 - protein, 15 aa, Artificial Sequence
  Description of Artificial Sequence: Synthetic peptide
  Seed: ANQRLNPMHQLLRHF
ANQRFNPLHRLLLHF

SEQ ID NO: 212139 - protein, 15 aa, Artificial Sequence
  Description of Artificial Sequence: Synthetic peptide
  Seed: ANQRLNPMHQLLRHF
ANQRFNPLHRLLMHF

SEQ ID NO: 212140 - protein, 15 aa, Artificial Sequence
  Description of Artificial Sequence: Synthetic peptide
  Seed: ANQRLNPMHQLLRHF
ANQRFNPLHRLLNHF

SEQ ID NO: 212141 - protein, 15 aa, Artificial Sequence
  Description of Artificial Sequence: Synthetic peptide
  Seed: ANQRLNPMHQLLRHF
ANQRFNPLHRLLPHF

SEQ ID NO: 212142 - protein, 15 aa, Artificial Sequence
  Description of Artificial Sequence: Synthetic peptide
  Seed: ANQRLNPMHQLLRHF
ANQRFNPLHRLLQHF

SEQ ID NO: 212143 - protein, 15 aa, Artificial Sequence
  Description of Artificial Sequence: Synthetic peptide
  Seed: ANQRLNPMHQLLRHF
ANQRFNPLHRLLRHF

SEQ ID NO: 212144 - protein, 15 aa, Artificial Sequence
  Description of Artificial Sequence: Synthetic peptide
  Seed: ANQRLNPMHQLLRHF
ANQRFNPLHRLLSHF

SEQ ID NO: 212145 - protein, 15 aa, Artificial Sequence
  Description of Artificial Sequence: Synthetic peptide
  Seed: ANQRLNPMHQLLRHF
ANQRFNPLHRLLTHF

SEQ ID NO: 212146 - protein, 15 aa, Artificial Sequence
  Description of Artificial Sequence: Synthetic peptide
  Seed: ANQRLNPMHQLLRHF
ANQRFNPLHRLLVHF

SEQ ID NO: 212147 - protein, 15 aa, Artificial Sequence
  Description of Artificial Sequence: Synthetic peptide
  Seed: ANQRLNPMHQLLRHF
ANQRFNPLHRLLWHF

SEQ ID NO: 212148 - protein, 15 aa, Artificial Sequence
  Description of Artificial Sequence: Synthetic peptide
  Seed: ANQRLNPMHQLLRHF
ANQRFNPLHRLLYHF

SEQ ID NO: 212149 - protein, 15 aa, Artificial Sequence
  Description of Artificial Sequence: Synthetic peptide
  Seed: ANQRLNPMHQLLRHF
ANQRFNPLHSLLAHF

SEQ ID NO: 212150 - protein, 15 aa, Artificial Sequence
  Description of Artificial Sequence: Synthetic peptide
  Seed: ANQRLNPMHQLLRHF
ANQRFNPLHSLLCHF

SEQ ID NO: 212151 - protein, 15 aa, Artificial Sequence
  Description of Artificial Sequence: Synthetic peptide
  Seed: ANQRLNPMHQLLRHF
ANQRFNPLHSLLDHF

SEQ ID NO: 212152 - protein, 15 aa, Artificial Sequence
  Description of Artificial Sequence: Synthetic peptide
  Seed: ANQRLNPMHQLLRHF
ANQRFNPLHSLLEHF

SEQ ID NO: 212153 - protein, 15 aa, Artificial Sequence
  Description of Artificial Sequence: Synthetic peptide
  Seed: ANQRLNPMHQLLRHF
ANQRFNPLHSLLFHF

SEQ ID NO: 212154 - protein, 15 aa, Artificial Sequence
  Description of Artificial Sequence: Synthetic peptide
  Seed: ANQRLNPMHQLLRHF
ANQRFNPLHSLLGHF

SEQ ID NO: 212155 - protein, 15 aa, Artificial Sequence
  Description of Artificial Sequence: Synthetic peptide
  Seed: ANQRLNPMHQLLRHF
ANQRFNPLHSLLHHF

SEQ ID NO: 212156 - protein, 15 aa, Artificial Sequence
  Description of Artificial Sequence: Synthetic peptide
  Seed: ANQRLNPMHQLLRHF
ANQRFNPLHSLLIHF

SEQ ID NO: 212157 - protein, 15 aa, Artificial Sequence
  Description of Artificial Sequence: Synthetic peptide
  Seed: ANQRLNPMHQLLRHF
ANQRFNPLHSLLKHF

SEQ ID NO: 212158 - protein, 15 aa, Artificial Sequence
  Description of Artificial Sequence: Synthetic peptide
  Seed: ANQRLNPMHQLLRHF
ANQRFNPLHSLLLHF

SEQ ID NO: 212159 - protein, 15 aa, Artificial Sequence
  Description of Artificial Sequence: Synthetic peptide
  Seed: ANQRLNPMHQLLRHF
ANQRFNPLHSLLMHF

SEQ ID NO: 212160 - protein, 15 aa, Artificial Sequence
  Description of Artificial Sequence: Synthetic peptide
  Seed: ANQRLNPMHQLLRHF
ANQRFNPLHSLLNHF

SEQ ID NO: 212161 - protein, 15 aa, Artificial Sequence
  Description of Artificial Sequence: Synthetic peptide
  Seed: ANQRLNPMHQLLRHF
ANQRFNPLHSLLPHF

SEQ ID NO: 212162 - protein, 15 aa, Artificial Sequence
  Description of Artificial Sequence: Synthetic peptide
  Seed: ANQRLNPMHQLLRHF
ANQRFNPLHSLLQHF

SEQ ID NO: 212163 - protein, 15 aa, Artificial Sequence
  Description of Artificial Sequence: Synthetic peptide
  Seed: ANQRLNPMHQLLRHF
ANQRFNPLHSLLRHF

SEQ ID NO: 212164 - protein, 15 aa, Artificial Sequence
  Description of Artificial Sequence: Synthetic peptide
  Seed: ANQRLNPMHQLLRHF
ANQRFNPLHSLLSHF

SEQ ID NO: 212165 - protein, 15 aa, Artificial Sequence
  Description of Artificial Sequence: Synthetic peptide
  Seed: ANQRLNPMHQLLRHF
ANQRFNPLHSLLTHF

SEQ ID NO: 212166 - protein, 15 aa, Artificial Sequence
  Description of Artificial Sequence: Synthetic peptide
  Seed: ANQRLNPMHQLLRHF
ANQRFNPLHSLLVHF

SEQ ID NO: 212167 - protein, 15 aa, Artificial Sequence
  Description of Artificial Sequence: Synthetic peptide
  Seed: ANQRLNPMHQLLRHF
ANQRFNPLHSLLWHF

SEQ ID NO: 212168 - protein, 15 aa, Artificial Sequence
  Description of Artificial Sequence: Synthetic peptide
  Seed: ANQRLNPMHQLLRHF
ANQRFNPLHSLLYHF

SEQ ID NO: 212169 - protein, 15 aa, Artificial Sequence
  Description of Artificial Sequence: Synthetic peptide
  Seed: ANQRLNPMHQLLRHF
ANQRFNPLHTLLAHF

SEQ ID NO: 212170 - protein, 15 aa, Artificial Sequence
  Description of Artificial Sequence: Synthetic peptide
  Seed: ANQRLNPMHQLLRHF
ANQRFNPLHTLLCHF

SEQ ID NO: 212171 - protein, 15 aa, Artificial Sequence
  Description of Artificial Sequence: Synthetic peptide
  Seed: ANQRLNPMHQLLRHF
ANQRFNPLHTLLDHF

SEQ ID NO: 212172 - protein, 15 aa, Artificial Sequence
  Description of Artificial Sequence: Synthetic peptide
  Seed: ANQRLNPMHQLLRHF
ANQRFNPLHTLLEHF

SEQ ID NO: 212173 - protein, 15 aa, Artificial Sequence
  Description of Artificial Sequence: Synthetic peptide
  Seed: ANQRLNPMHQLLRHF
ANQRFNPLHTLLFHF

SEQ ID NO: 212174 - protein, 15 aa, Artificial Sequence
  Description of Artificial Sequence: Synthetic peptide
  Seed: ANQRLNPMHQLLRHF
ANQRFNPLHTLLGHF

SEQ ID NO: 212175 - protein, 15 aa, Artificial Sequence
  Description of Artificial Sequence: Synthetic peptide
  Seed: ANQRLNPMHQLLRHF
ANQRFNPLHTLLHHF

SEQ ID NO: 212176 - protein, 15 aa, Artificial Sequence
  Description of Artificial Sequence: Synthetic peptide
  Seed: ANQRLNPMHQLLRHF
ANQRFNPLHTLLIHF

SEQ ID NO: 212177 - protein, 15 aa, Artificial Sequence
  Description of Artificial Sequence: Synthetic peptide
  Seed: ANQRLNPMHQLLRHF
ANQRFNPLHTLLKHF

SEQ ID NO: 212178 - protein, 15 aa, Artificial Sequence
  Description of Artificial Sequence: Synthetic peptide
  Seed: ANQRLNPMHQLLRHF
ANQRFNPLHTLLLHF

SEQ ID NO: 212179 - protein, 15 aa, Artificial Sequence
  Description of Artificial Sequence: Synthetic peptide
  Seed: ANQRLNPMHQLLRHF
ANQRFNPLHTLLMHF

SEQ ID NO: 212180 - protein, 15 aa, Artificial Sequence
  Description of Artificial Sequence: Synthetic peptide
  Seed: ANQRLNPMHQLLRHF
ANQRFNPLHTLLNHF

SEQ ID NO: 212181 - protein, 15 aa, Artificial Sequence
  Description of Artificial Sequence: Synthetic peptide
  Seed: ANQRLNPMHQLLRHF
ANQRFNPLHTLLPHF

SEQ ID NO: 212182 - protein, 15 aa, Artificial Sequence
  Description of Artificial Sequence: Synthetic peptide
  Seed: ANQRLNPMHQLLRHF
ANQRFNPLHTLLQHF

SEQ ID NO: 212183 - protein, 15 aa, Artificial Sequence
  Description of Artificial Sequence: Synthetic peptide
  Seed: ANQRLNPMHQLLRHF
ANQRFNPLHTLLRHF

SEQ ID NO: 212184 - protein, 15 aa, Artificial Sequence
  Description of Artificial Sequence: Synthetic peptide
  Seed: ANQRLNPMHQLLRHF
ANQRFNPLHTLLSHF

SEQ ID NO: 212185 - protein, 15 aa, Artificial Sequence
  Description of Artificial Sequence: Synthetic peptide
  Seed: ANQRLNPMHQLLRHF
ANQRFNPLHTLLTHF

SEQ ID NO: 212186 - protein, 15 aa, Artificial Sequence
  Description of Artificial Sequence: Synthetic peptide
  Seed: ANQRLNPMHQLLRHF
ANQRFNPLHTLLVHF

SEQ ID NO: 212187 - protein, 15 aa, Artificial Sequence
  Description of Artificial Sequence: Synthetic peptide
  Seed: ANQRLNPMHQLLRHF
ANQRFNPLHTLLWHF

SEQ ID NO: 212188 - protein, 15 aa, Artificial Sequence
  Description of Artificial Sequence: Synthetic peptide
  Seed: ANQRLNPMHQLLRHF
ANQRFNPLHTLLYHF

SEQ ID NO: 212189 - protein, 15 aa, Artificial Sequence
  Description of Artificial Sequence: Synthetic peptide
  Seed: ANQRLNPMHQLLRHF
ANQRFNPLHVLLAHF

SEQ ID NO: 212190 - protein, 15 aa, Artificial Sequence
  Description of Artificial Sequence: Synthetic peptide
  Seed: ANQRLNPMHQLLRHF
ANQRFNPLHVLLCHF

SEQ ID NO: 212191 - protein, 15 aa, Artificial Sequence
  Description of Artificial Sequence: Synthetic peptide
  Seed: ANQRLNPMHQLLRHF
ANQRFNPLHVLLDHF

SEQ ID NO: 212192 - protein, 15 aa, Artificial Sequence
  Description of Artificial Sequence: Synthetic peptide
  Seed: ANQRLNPMHQLLRHF
ANQRFNPLHVLLEHF

SEQ ID NO: 212193 - protein, 15 aa, Artificial Sequence
  Description of Artificial Sequence: Synthetic peptide
  Seed: ANQRLNPMHQLLRHF
ANQRFNPLHVLLGHF

SEQ ID NO: 212194 - protein, 15 aa, Artificial Sequence
  Description of Artificial Sequence: Synthetic peptide
  Seed: ANQRLNPMHQLLRHF
ANQRFNPLHVLLHHF

SEQ ID NO: 212195 - protein, 15 aa, Artificial Sequence
  Description of Artificial Sequence: Synthetic peptide
  Seed: ANQRLNPMHQLLRHF
ANQRFNPLHVLLIHF

SEQ ID NO: 212196 - protein, 15 aa, Artificial Sequence
  Description of Artificial Sequence: Synthetic peptide
  Seed: ANQRLNPMHQLLRHF
ANQRFNPLHVLLLHF

SEQ ID NO: 212197 - protein, 15 aa, Artificial Sequence
  Description of Artificial Sequence: Synthetic peptide
  Seed: ANQRLNPMHQLLRHF
ANQRFNPLHVLLMHF

SEQ ID NO: 212198 - protein, 15 aa, Artificial Sequence
  Description of Artificial Sequence: Synthetic peptide
  Seed: ANQRLNPMHQLLRHF
ANQRFNPLHVLLNHF

SEQ ID NO: 212199 - protein, 15 aa, Artificial Sequence
  Description of Artificial Sequence: Synthetic peptide
  Seed: ANQRLNPMHQLLRHF
ANQRFNPLHVLLPHF

SEQ ID NO: 212200 - protein, 15 aa, Artificial Sequence
  Description of Artificial Sequence: Synthetic peptide
  Seed: ANQRLNPMHQLLRHF
ANQRFNPLHVLLQHF

SEQ ID NO: 212201 - protein, 15 aa, Artificial Sequence
  Description of Artificial Sequence: Synthetic peptide
  Seed: ANQRLNPMHQLLRHF
ANQRFNPLHVLLSHF

SEQ ID NO: 212202 - protein, 15 aa, Artificial Sequence
  Description of Artificial Sequence: Synthetic peptide
  Seed: ANQRLNPMHQLLRHF
ANQRFNPLHVLLTHF

SEQ ID NO: 212203 - protein, 15 aa, Artificial Sequence
  Description of Artificial Sequence: Synthetic peptide
  Seed: ANQRLNPMHQLLRHF
ANQRFNPLHVLLVHF

SEQ ID NO: 212204 - protein, 15 aa, Artificial Sequence
  Description of Artificial Sequence: Synthetic peptide
  Seed: ANQRLNPMHQLLRHF
ANQRFNPLHWLLFHF

SEQ ID NO: 212205 - protein, 15 aa, Artificial Sequence
  Description of Artificial Sequence: Synthetic peptide
  Seed: ANQRLNPMHQLLRHF
ANQRFNPLHWLLIHF

SEQ ID NO: 212206 - protein, 15 aa, Artificial Sequence
  Description of Artificial Sequence: Synthetic peptide
  Seed: ANQRLNPMHQLLRHF
ANQRFNPLHWLLLHF

SEQ ID NO: 212207 - protein, 15 aa, Artificial Sequence
  Description of Artificial Sequence: Synthetic peptide
  Seed: ANQRLNPMHQLLRHF
ANQRFNPLHWLLMHF

SEQ ID NO: 212208 - protein, 15 aa, Artificial Sequence
  Description of Artificial Sequence: Synthetic peptide
  Seed: ANQRLNPMHQLLRHF
ANQRFNPLHWLLVHF

SEQ ID NO: 212209 - protein, 15 aa, Artificial Sequence
  Description of Artificial Sequence: Synthetic peptide
  Seed: ANQRLNPMHQLLRHF
ANQRFNPLHYLLFHF

SEQ ID NO: 212210 - protein, 15 aa, Artificial Sequence
  Description of Artificial Sequence: Synthetic peptide
  Seed: ANQRLNPMHQLLRHF
ANQRFNPLHYLLIHF

SEQ ID NO: 212211 - protein, 15 aa, Artificial Sequence
  Description of Artificial Sequence: Synthetic peptide
  Seed: ANQRLNPMHQLLRHF
ANQRFNPLHYLLLHF

SEQ ID NO: 212212 - protein, 15 aa, Artificial Sequence
  Description of Artificial Sequence: Synthetic peptide
  Seed: ANQRLNPMHQLLRHF
ANQRFNPLHYLLVHF

SEQ ID NO: 212213 - protein, 15 aa, Artificial Sequence
  Description of Artificial Sequence: Synthetic peptide
  Seed: ANQRLNPMHQLLRHF
ANQRFNPMHALLAHF

SEQ ID NO: 212214 - protein, 15 aa, Artificial Sequence
  Description of Artificial Sequence: Synthetic peptide
  Seed: ANQRLNPMHQLLRHF
ANQRFNPMHALLCHF

SEQ ID NO: 212215 - protein, 15 aa, Artificial Sequence
  Description of Artificial Sequence: Synthetic peptide
  Seed: ANQRLNPMHQLLRHF
ANQRFNPMHALLDHF

SEQ ID NO: 212216 - protein, 15 aa, Artificial Sequence
  Description of Artificial Sequence: Synthetic peptide
  Seed: ANQRLNPMHQLLRHF
ANQRFNPMHALLEHF

SEQ ID NO: 212217 - protein, 15 aa, Artificial Sequence
  Description of Artificial Sequence: Synthetic peptide
  Seed: ANQRLNPMHQLLRHF
ANQRFNPMHALLFHF

SEQ ID NO: 212218 - protein, 15 aa, Artificial Sequence
  Description of Artificial Sequence: Synthetic peptide
  Seed: ANQRLNPMHQLLRHF
ANQRFNPMHALLGHF

SEQ ID NO: 212219 - protein, 15 aa, Artificial Sequence
  Description of Artificial Sequence: Synthetic peptide
  Seed: ANQRLNPMHQLLRHF
ANQRFNPMHALLHHF

SEQ ID NO: 212220 - protein, 15 aa, Artificial Sequence
  Description of Artificial Sequence: Synthetic peptide
  Seed: ANQRLNPMHQLLRHF
ANQRFNPMHALLIHF

SEQ ID NO: 212221 - protein, 15 aa, Artificial Sequence
  Description of Artificial Sequence: Synthetic peptide
  Seed: ANQRLNPMHQLLRHF
ANQRFNPMHALLKHF

SEQ ID NO: 212222 - protein, 15 aa, Artificial Sequence
  Description of Artificial Sequence: Synthetic peptide
  Seed: ANQRLNPMHQLLRHF
ANQRFNPMHALLLHF

SEQ ID NO: 212223 - protein, 15 aa, Artificial Sequence
  Description of Artificial Sequence: Synthetic peptide
  Seed: ANQRLNPMHQLLRHF
ANQRFNPMHALLMHF

SEQ ID NO: 212224 - protein, 15 aa, Artificial Sequence
  Description of Artificial Sequence: Synthetic peptide
  Seed: ANQRLNPMHQLLRHF
ANQRFNPMHALLNHF

SEQ ID NO: 212225 - protein, 15 aa, Artificial Sequence
  Description of Artificial Sequence: Synthetic peptide
  Seed: ANQRLNPMHQLLRHF
ANQRFNPMHALLPHF

SEQ ID NO: 212226 - protein, 15 aa, Artificial Sequence
  Description of Artificial Sequence: Synthetic peptide
  Seed: ANQRLNPMHQLLRHF
ANQRFNPMHALLQHF

SEQ ID NO: 212227 - protein, 15 aa, Artificial Sequence
  Description of Artificial Sequence: Synthetic peptide
  Seed: ANQRLNPMHQLLRHF
ANQRFNPMHALLRHF

SEQ ID NO: 212228 - protein, 15 aa, Artificial Sequence
  Description of Artificial Sequence: Synthetic peptide
  Seed: ANQRLNPMHQLLRHF
ANQRFNPMHALLSHF

SEQ ID NO: 212229 - protein, 15 aa, Artificial Sequence
  Description of Artificial Sequence: Synthetic peptide
  Seed: ANQRLNPMHQLLRHF
ANQRFNPMHALLTHF

SEQ ID NO: 212230 - protein, 15 aa, Artificial Sequence
  Description of Artificial Sequence: Synthetic peptide
  Seed: ANQRLNPMHQLLRHF
ANQRFNPMHALLVHF

SEQ ID NO: 212231 - protein, 15 aa, Artificial Sequence
  Description of Artificial Sequence: Synthetic peptide
  Seed: ANQRLNPMHQLLRHF
ANQRFNPMHALLWHF

SEQ ID NO: 212232 - protein, 15 aa, Artificial Sequence
  Description of Artificial Sequence: Synthetic peptide
  Seed: ANQRLNPMHQLLRHF
ANQRFNPMHALLYHF

SEQ ID NO: 212233 - protein, 15 aa, Artificial Sequence
  Description of Artificial Sequence: Synthetic peptide
  Seed: ANQRLNPMHQLLRHF
ANQRFNPMHCLLAHF

SEQ ID NO: 212234 - protein, 15 aa, Artificial Sequence
  Description of Artificial Sequence: Synthetic peptide
  Seed: ANQRLNPMHQLLRHF
ANQRFNPMHCLLIHF

SEQ ID NO: 212235 - protein, 15 aa, Artificial Sequence
  Description of Artificial Sequence: Synthetic peptide
  Seed: ANQRLNPMHQLLRHF
ANQRFNPMHCLLLHF

SEQ ID NO: 212236 - protein, 15 aa, Artificial Sequence
  Description of Artificial Sequence: Synthetic peptide
  Seed: ANQRLNPMHQLLRHF
ANQRFNPMHCLLTHF

SEQ ID NO: 212237 - protein, 15 aa, Artificial Sequence
  Description of Artificial Sequence: Synthetic peptide
  Seed: ANQRLNPMHQLLRHF
ANQRFNPMHCLLVHF

SEQ ID NO: 212238 - protein, 15 aa, Artificial Sequence
  Description of Artificial Sequence: Synthetic peptide
  Seed: ANQRLNPMHQLLRHF
ANQRFNPMHDLLIHF

SEQ ID NO: 212239 - protein, 15 aa, Artificial Sequence
  Description of Artificial Sequence: Synthetic peptide
  Seed: ANQRLNPMHQLLRHF
ANQRFNPMHDLLLHF

SEQ ID NO: 212240 - protein, 15 aa, Artificial Sequence
  Description of Artificial Sequence: Synthetic peptide
  Seed: ANQRLNPMHQLLRHF
ANQRFNPMHDLLVHF

SEQ ID NO: 212241 - protein, 15 aa, Artificial Sequence
  Description of Artificial Sequence: Synthetic peptide
  Seed: ANQRLNPMHQLLRHF
ANQRFNPMHELLAHF

SEQ ID NO: 212242 - protein, 15 aa, Artificial Sequence
  Description of Artificial Sequence: Synthetic peptide
  Seed: ANQRLNPMHQLLRHF
ANQRFNPMHELLIHF

SEQ ID NO: 212243 - protein, 15 aa, Artificial Sequence
  Description of Artificial Sequence: Synthetic peptide
  Seed: ANQRLNPMHQLLRHF
ANQRFNPMHELLLHF

SEQ ID NO: 212244 - protein, 15 aa, Artificial Sequence
  Description of Artificial Sequence: Synthetic peptide
  Seed: ANQRLNPMHQLLRHF
ANQRFNPMHELLVHF

SEQ ID NO: 212245 - protein, 15 aa, Artificial Sequence
  Description of Artificial Sequence: Synthetic peptide
  Seed: ANQRLNPMHQLLRHF
ANQRFNPMHFLLAHF

SEQ ID NO: 212246 - protein, 15 aa, Artificial Sequence
  Description of Artificial Sequence: Synthetic peptide
  Seed: ANQRLNPMHQLLRHF
ANQRFNPMHFLLEHF

SEQ ID NO: 212247 - protein, 15 aa, Artificial Sequence
  Description of Artificial Sequence: Synthetic peptide
  Seed: ANQRLNPMHQLLRHF
ANQRFNPMHFLLFHF

SEQ ID NO: 212248 - protein, 15 aa, Artificial Sequence
  Description of Artificial Sequence: Synthetic peptide
  Seed: ANQRLNPMHQLLRHF
ANQRFNPMHFLLIHF

SEQ ID NO: 212249 - protein, 15 aa, Artificial Sequence
  Description of Artificial Sequence: Synthetic peptide
  Seed: ANQRLNPMHQLLRHF
ANQRFNPMHFLLLHF

SEQ ID NO: 212250 - protein, 15 aa, Artificial Sequence
  Description of Artificial Sequence: Synthetic peptide
  Seed: ANQRLNPMHQLLRHF
ANQRFNPMHFLLMHF

SEQ ID NO: 212251 - protein, 15 aa, Artificial Sequence
  Description of Artificial Sequence: Synthetic peptide
  Seed: ANQRLNPMHQLLRHF
ANQRFNPMHFLLNHF

SEQ ID NO: 212252 - protein, 15 aa, Artificial Sequence
  Description of Artificial Sequence: Synthetic peptide
  Seed: ANQRLNPMHQLLRHF
ANQRFNPMHFLLSHF

SEQ ID NO: 212253 - protein, 15 aa, Artificial Sequence
  Description of Artificial Sequence: Synthetic peptide
  Seed: ANQRLNPMHQLLRHF
ANQRFNPMHFLLTHF

SEQ ID NO: 212254 - protein, 15 aa, Artificial Sequence
  Description of Artificial Sequence: Synthetic peptide
  Seed: ANQRLNPMHQLLRHF
ANQRFNPMHFLLVHF

SEQ ID NO: 212255 - protein, 15 aa, Artificial Sequence
  Description of Artificial Sequence: Synthetic peptide
  Seed: ANQRLNPMHQLLRHF
ANQRFNPMHFLLYHF

SEQ ID NO: 212256 - protein, 15 aa, Artificial Sequence
  Description of Artificial Sequence: Synthetic peptide
  Seed: ANQRLNPMHQLLRHF
ANQRFNPMHGLLAHF

SEQ ID NO: 212257 - protein, 15 aa, Artificial Sequence
  Description of Artificial Sequence: Synthetic peptide
  Seed: ANQRLNPMHQLLRHF
ANQRFNPMHGLLCHF

SEQ ID NO: 212258 - protein, 15 aa, Artificial Sequence
  Description of Artificial Sequence: Synthetic peptide
  Seed: ANQRLNPMHQLLRHF
ANQRFNPMHGLLDHF

SEQ ID NO: 212259 - protein, 15 aa, Artificial Sequence
  Description of Artificial Sequence: Synthetic peptide
  Seed: ANQRLNPMHQLLRHF
ANQRFNPMHGLLEHF

SEQ ID NO: 212260 - protein, 15 aa, Artificial Sequence
  Description of Artificial Sequence: Synthetic peptide
  Seed: ANQRLNPMHQLLRHF
ANQRFNPMHGLLFHF

SEQ ID NO: 212261 - protein, 15 aa, Artificial Sequence
  Description of Artificial Sequence: Synthetic peptide
  Seed: ANQRLNPMHQLLRHF
ANQRFNPMHGLLGHF

SEQ ID NO: 212262 - protein, 15 aa, Artificial Sequence
  Description of Artificial Sequence: Synthetic peptide
  Seed: ANQRLNPMHQLLRHF
ANQRFNPMHGLLHHF

SEQ ID NO: 212263 - protein, 15 aa, Artificial Sequence
  Description of Artificial Sequence: Synthetic peptide
  Seed: ANQRLNPMHQLLRHF
ANQRFNPMHGLLIHF

SEQ ID NO: 212264 - protein, 15 aa, Artificial Sequence
  Description of Artificial Sequence: Synthetic peptide
  Seed: ANQRLNPMHQLLRHF
ANQRFNPMHGLLKHF

SEQ ID NO: 212265 - protein, 15 aa, Artificial Sequence
  Description of Artificial Sequence: Synthetic peptide
  Seed: ANQRLNPMHQLLRHF
ANQRFNPMHGLLLHF

SEQ ID NO: 212266 - protein, 15 aa, Artificial Sequence
  Description of Artificial Sequence: Synthetic peptide
  Seed: ANQRLNPMHQLLRHF
ANQRFNPMHGLLMHF

SEQ ID NO: 212267 - protein, 15 aa, Artificial Sequence
  Description of Artificial Sequence: Synthetic peptide
  Seed: ANQRLNPMHQLLRHF
ANQRFNPMHGLLNHF

SEQ ID NO: 212268 - protein, 15 aa, Artificial Sequence
  Description of Artificial Sequence: Synthetic peptide
  Seed: ANQRLNPMHQLLRHF
ANQRFNPMHGLLPHF

SEQ ID NO: 212269 - protein, 15 aa, Artificial Sequence
  Description of Artificial Sequence: Synthetic peptide
  Seed: ANQRLNPMHQLLRHF
ANQRFNPMHGLLQHF

SEQ ID NO: 212270 - protein, 15 aa, Artificial Sequence
  Description of Artificial Sequence: Synthetic peptide
  Seed: ANQRLNPMHQLLRHF
ANQRFNPMHGLLRHF

SEQ ID NO: 212271 - protein, 15 aa, Artificial Sequence
  Description of Artificial Sequence: Synthetic peptide
  Seed: ANQRLNPMHQLLRHF
ANQRFNPMHGLLSHF

SEQ ID NO: 212272 - protein, 15 aa, Artificial Sequence
  Description of Artificial Sequence: Synthetic peptide
  Seed: ANQRLNPMHQLLRHF
ANQRFNPMHGLLTHF

SEQ ID NO: 212273 - protein, 15 aa, Artificial Sequence
  Description of Artificial Sequence: Synthetic peptide
  Seed: ANQRLNPMHQLLRHF
ANQRFNPMHGLLVHF

SEQ ID NO: 212274 - protein, 15 aa, Artificial Sequence
  Description of Artificial Sequence: Synthetic peptide
  Seed: ANQRLNPMHQLLRHF
ANQRFNPMHGLLWHF

SEQ ID NO: 212275 - protein, 15 aa, Artificial Sequence
  Description of Artificial Sequence: Synthetic peptide
  Seed: ANQRLNPMHQLLRHF
ANQRFNPMHGLLYHF

SEQ ID NO: 212276 - protein, 15 aa, Artificial Sequence
  Description of Artificial Sequence: Synthetic peptide
  Seed: ANQRLNPMHQLLRHF
ANQRFNPMHHLLAHF

SEQ ID NO: 212277 - protein, 15 aa, Artificial Sequence
  Description of Artificial Sequence: Synthetic peptide
  Seed: ANQRLNPMHQLLRHF
ANQRFNPMHHLLHHF

SEQ ID NO: 212278 - protein, 15 aa, Artificial Sequence
  Description of Artificial Sequence: Synthetic peptide
  Seed: ANQRLNPMHQLLRHF
ANQRFNPMHHLLIHF

SEQ ID NO: 212279 - protein, 15 aa, Artificial Sequence
  Description of Artificial Sequence: Synthetic peptide
  Seed: ANQRLNPMHQLLRHF
ANQRFNPMHHLLLHF

SEQ ID NO: 212280 - protein, 15 aa, Artificial Sequence
  Description of Artificial Sequence: Synthetic peptide
  Seed: ANQRLNPMHQLLRHF
ANQRFNPMHHLLMHF

SEQ ID NO: 212281 - protein, 15 aa, Artificial Sequence
  Description of Artificial Sequence: Synthetic peptide
  Seed: ANQRLNPMHQLLRHF
ANQRFNPMHHLLSHF

SEQ ID NO: 212282 - protein, 15 aa, Artificial Sequence
  Description of Artificial Sequence: Synthetic peptide
  Seed: ANQRLNPMHQLLRHF
ANQRFNPMHHLLTHF

SEQ ID NO: 212283 - protein, 15 aa, Artificial Sequence
  Description of Artificial Sequence: Synthetic peptide
  Seed: ANQRLNPMHQLLRHF
ANQRFNPMHHLLVHF

SEQ ID NO: 212284 - protein, 15 aa, Artificial Sequence
  Description of Artificial Sequence: Synthetic peptide
  Seed: ANQRLNPMHQLLRHF
ANQRFNPMHILLAHF

SEQ ID NO: 212285 - protein, 15 aa, Artificial Sequence
  Description of Artificial Sequence: Synthetic peptide
  Seed: ANQRLNPMHQLLRHF
ANQRFNPMHILLGHF

SEQ ID NO: 212286 - protein, 15 aa, Artificial Sequence
  Description of Artificial Sequence: Synthetic peptide
  Seed: ANQRLNPMHQLLRHF
ANQRFNPMHILLHHF

SEQ ID NO: 212287 - protein, 15 aa, Artificial Sequence
  Description of Artificial Sequence: Synthetic peptide
  Seed: ANQRLNPMHQLLRHF
ANQRFNPMHILLIHF

SEQ ID NO: 212288 - protein, 15 aa, Artificial Sequence
  Description of Artificial Sequence: Synthetic peptide
  Seed: ANQRLNPMHQLLRHF
ANQRFNPMHILLLHF

SEQ ID NO: 212289 - protein, 15 aa, Artificial Sequence
  Description of Artificial Sequence: Synthetic peptide
  Seed: ANQRLNPMHQLLRHF
ANQRFNPMHILLMHF

SEQ ID NO: 212290 - protein, 15 aa, Artificial Sequence
  Description of Artificial Sequence: Synthetic peptide
  Seed: ANQRLNPMHQLLRHF
ANQRFNPMHILLNHF

SEQ ID NO: 212291 - protein, 15 aa, Artificial Sequence
  Description of Artificial Sequence: Synthetic peptide
  Seed: ANQRLNPMHQLLRHF
ANQRFNPMHILLPHF

SEQ ID NO: 212292 - protein, 15 aa, Artificial Sequence
  Description of Artificial Sequence: Synthetic peptide
  Seed: ANQRLNPMHQLLRHF
ANQRFNPMHILLQHF

SEQ ID NO: 212293 - protein, 15 aa, Artificial Sequence
  Description of Artificial Sequence: Synthetic peptide
  Seed: ANQRLNPMHQLLRHF
ANQRFNPMHILLSHF

SEQ ID NO: 212294 - protein, 15 aa, Artificial Sequence
  Description of Artificial Sequence: Synthetic peptide
  Seed: ANQRLNPMHQLLRHF
ANQRFNPMHILLTHF

SEQ ID NO: 212295 - protein, 15 aa, Artificial Sequence
  Description of Artificial Sequence: Synthetic peptide
  Seed: ANQRLNPMHQLLRHF
ANQRFNPMHILLVHF

SEQ ID NO: 212296 - protein, 15 aa, Artificial Sequence
  Description of Artificial Sequence: Synthetic peptide
  Seed: ANQRLNPMHQLLRHF
ANQRFNPMHKLLAHF

SEQ ID NO: 212297 - protein, 15 aa, Artificial Sequence
  Description of Artificial Sequence: Synthetic peptide
  Seed: ANQRLNPMHQLLRHF
ANQRFNPMHKLLGHF

SEQ ID NO: 212298 - protein, 15 aa, Artificial Sequence
  Description of Artificial Sequence: Synthetic peptide
  Seed: ANQRLNPMHQLLRHF
ANQRFNPMHKLLHHF

SEQ ID NO: 212299 - protein, 15 aa, Artificial Sequence
  Description of Artificial Sequence: Synthetic peptide
  Seed: ANQRLNPMHQLLRHF
ANQRFNPMHKLLIHF

SEQ ID NO: 212300 - protein, 15 aa, Artificial Sequence
  Description of Artificial Sequence: Synthetic peptide
  Seed: ANQRLNPMHQLLRHF
ANQRFNPMHKLLKHF

SEQ ID NO: 212301 - protein, 15 aa, Artificial Sequence
  Description of Artificial Sequence: Synthetic peptide
  Seed: ANQRLNPMHQLLRHF
ANQRFNPMHKLLLHF

SEQ ID NO: 212302 - protein, 15 aa, Artificial Sequence
  Description of Artificial Sequence: Synthetic peptide
  Seed: ANQRLNPMHQLLRHF
ANQRFNPMHKLLMHF

SEQ ID NO: 212303 - protein, 15 aa, Artificial Sequence
  Description of Artificial Sequence: Synthetic peptide
  Seed: ANQRLNPMHQLLRHF
ANQRFNPMHKLLNHF

SEQ ID NO: 212304 - protein, 15 aa, Artificial Sequence
  Description of Artificial Sequence: Synthetic peptide
  Seed: ANQRLNPMHQLLRHF
ANQRFNPMHKLLPHF

SEQ ID NO: 212305 - protein, 15 aa, Artificial Sequence
  Description of Artificial Sequence: Synthetic peptide
  Seed: ANQRLNPMHQLLRHF
ANQRFNPMHKLLQHF

SEQ ID NO: 212306 - protein, 15 aa, Artificial Sequence
  Description of Artificial Sequence: Synthetic peptide
  Seed: ANQRLNPMHQLLRHF
ANQRFNPMHKLLRHF

SEQ ID NO: 212307 - protein, 15 aa, Artificial Sequence
  Description of Artificial Sequence: Synthetic peptide
  Seed: ANQRLNPMHQLLRHF
ANQRFNPMHKLLSHF

SEQ ID NO: 212308 - protein, 15 aa, Artificial Sequence
  Description of Artificial Sequence: Synthetic peptide
  Seed: ANQRLNPMHQLLRHF
ANQRFNPMHKLLTHF

SEQ ID NO: 212309 - protein, 15 aa, Artificial Sequence
  Description of Artificial Sequence: Synthetic peptide
  Seed: ANQRLNPMHQLLRHF
ANQRFNPMHKLLVHF

SEQ ID NO: 212310 - protein, 15 aa, Artificial Sequence
  Description of Artificial Sequence: Synthetic peptide
  Seed: ANQRLNPMHQLLRHF
ANQRFNPMHLLLAHF

SEQ ID NO: 212311 - protein, 15 aa, Artificial Sequence
  Description of Artificial Sequence: Synthetic peptide
  Seed: ANQRLNPMHQLLRHF
ANQRFNPMHLLLIHF

SEQ ID NO: 212312 - protein, 15 aa, Artificial Sequence
  Description of Artificial Sequence: Synthetic peptide
  Seed: ANQRLNPMHQLLRHF
ANQRFNPMHLLLLHF

SEQ ID NO: 212313 - protein, 15 aa, Artificial Sequence
  Description of Artificial Sequence: Synthetic peptide
  Seed: ANQRLNPMHQLLRHF
ANQRFNPMHLLLNHF

SEQ ID NO: 212314 - protein, 15 aa, Artificial Sequence
  Description of Artificial Sequence: Synthetic peptide
  Seed: ANQRLNPMHQLLRHF
ANQRFNPMHLLLSHF

SEQ ID NO: 212315 - protein, 15 aa, Artificial Sequence
  Description of Artificial Sequence: Synthetic peptide
  Seed: ANQRLNPMHQLLRHF
ANQRFNPMHLLLTHF

SEQ ID NO: 212316 - protein, 15 aa, Artificial Sequence
  Description of Artificial Sequence: Synthetic peptide
  Seed: ANQRLNPMHQLLRHF
ANQRFNPMHLLLVHF

SEQ ID NO: 212317 - protein, 15 aa, Artificial Sequence
  Description of Artificial Sequence: Synthetic peptide
  Seed: ANQRLNPMHQLLRHF
ANQRFNPMHMLLAHF

SEQ ID NO: 212318 - protein, 15 aa, Artificial Sequence
  Description of Artificial Sequence: Synthetic peptide
  Seed: ANQRLNPMHQLLRHF
ANQRFNPMHMLLHHF

SEQ ID NO: 212319 - protein, 15 aa, Artificial Sequence
  Description of Artificial Sequence: Synthetic peptide
  Seed: ANQRLNPMHQLLRHF
ANQRFNPMHMLLIHF

SEQ ID NO: 212320 - protein, 15 aa, Artificial Sequence
  Description of Artificial Sequence: Synthetic peptide
  Seed: ANQRLNPMHQLLRHF
ANQRFNPMHMLLLHF

SEQ ID NO: 212321 - protein, 15 aa, Artificial Sequence
  Description of Artificial Sequence: Synthetic peptide
  Seed: ANQRLNPMHQLLRHF
ANQRFNPMHMLLMHF

SEQ ID NO: 212322 - protein, 15 aa, Artificial Sequence
  Description of Artificial Sequence: Synthetic peptide
  Seed: ANQRLNPMHQLLRHF
ANQRFNPMHMLLNHF

SEQ ID NO: 212323 - protein, 15 aa, Artificial Sequence
  Description of Artificial Sequence: Synthetic peptide
  Seed: ANQRLNPMHQLLRHF
ANQRFNPMHMLLSHF

SEQ ID NO: 212324 - protein, 15 aa, Artificial Sequence
  Description of Artificial Sequence: Synthetic peptide
  Seed: ANQRLNPMHQLLRHF
ANQRFNPMHMLLTHF

SEQ ID NO: 212325 - protein, 15 aa, Artificial Sequence
  Description of Artificial Sequence: Synthetic peptide
  Seed: ANQRLNPMHQLLRHF
ANQRFNPMHMLLVHF

SEQ ID NO: 212326 - protein, 15 aa, Artificial Sequence
  Description of Artificial Sequence: Synthetic peptide
  Seed: ANQRLNPMHQLLRHF
ANQRFNPMHNLLAHF

SEQ ID NO: 212327 - protein, 15 aa, Artificial Sequence
  Description of Artificial Sequence: Synthetic peptide
  Seed: ANQRLNPMHQLLRHF
ANQRFNPMHNLLCHF

SEQ ID NO: 212328 - protein, 15 aa, Artificial Sequence
  Description of Artificial Sequence: Synthetic peptide
  Seed: ANQRLNPMHQLLRHF
ANQRFNPMHNLLFHF

SEQ ID NO: 212329 - protein, 15 aa, Artificial Sequence
  Description of Artificial Sequence: Synthetic peptide
  Seed: ANQRLNPMHQLLRHF
ANQRFNPMHNLLGHF

SEQ ID NO: 212330 - protein, 15 aa, Artificial Sequence
  Description of Artificial Sequence: Synthetic peptide
  Seed: ANQRLNPMHQLLRHF
ANQRFNPMHNLLHHF

SEQ ID NO: 212331 - protein, 15 aa, Artificial Sequence
  Description of Artificial Sequence: Synthetic peptide
  Seed: ANQRLNPMHQLLRHF
ANQRFNPMHNLLIHF

SEQ ID NO: 212332 - protein, 15 aa, Artificial Sequence
  Description of Artificial Sequence: Synthetic peptide
  Seed: ANQRLNPMHQLLRHF
ANQRFNPMHNLLLHF

SEQ ID NO: 212333 - protein, 15 aa, Artificial Sequence
  Description of Artificial Sequence: Synthetic peptide
  Seed: ANQRLNPMHQLLRHF
ANQRFNPMHNLLMHF

SEQ ID NO: 212334 - protein, 15 aa, Artificial Sequence
  Description of Artificial Sequence: Synthetic peptide
  Seed: ANQRLNPMHQLLRHF
ANQRFNPMHNLLNHF

SEQ ID NO: 212335 - protein, 15 aa, Artificial Sequence
  Description of Artificial Sequence: Synthetic peptide
  Seed: ANQRLNPMHQLLRHF
ANQRFNPMHNLLPHF

SEQ ID NO: 212336 - protein, 15 aa, Artificial Sequence
  Description of Artificial Sequence: Synthetic peptide
  Seed: ANQRLNPMHQLLRHF
ANQRFNPMHNLLQHF

SEQ ID NO: 212337 - protein, 15 aa, Artificial Sequence
  Description of Artificial Sequence: Synthetic peptide
  Seed: ANQRLNPMHQLLRHF
ANQRFNPMHNLLRHF

SEQ ID NO: 212338 - protein, 15 aa, Artificial Sequence
  Description of Artificial Sequence: Synthetic peptide
  Seed: ANQRLNPMHQLLRHF
ANQRFNPMHNLLSHF

SEQ ID NO: 212339 - protein, 15 aa, Artificial Sequence
  Description of Artificial Sequence: Synthetic peptide
  Seed: ANQRLNPMHQLLRHF
ANQRFNPMHNLLTHF

SEQ ID NO: 212340 - protein, 15 aa, Artificial Sequence
  Description of Artificial Sequence: Synthetic peptide
  Seed: ANQRLNPMHQLLRHF
ANQRFNPMHNLLVHF

SEQ ID NO: 212341 - protein, 15 aa, Artificial Sequence
  Description of Artificial Sequence: Synthetic peptide
  Seed: ANQRLNPMHQLLRHF
ANQRFNPMHNLLYHF

SEQ ID NO: 212342 - protein, 15 aa, Artificial Sequence
  Description of Artificial Sequence: Synthetic peptide
  Seed: ANQRLNPMHQLLRHF
ANQRFNPMHPLLAHF

SEQ ID NO: 212343 - protein, 15 aa, Artificial Sequence
  Description of Artificial Sequence: Synthetic peptide
  Seed: ANQRLNPMHQLLRHF
ANQRFNPMHPLLCHF

SEQ ID NO: 212344 - protein, 15 aa, Artificial Sequence
  Description of Artificial Sequence: Synthetic peptide
  Seed: ANQRLNPMHQLLRHF
ANQRFNPMHPLLDHF

SEQ ID NO: 212345 - protein, 15 aa, Artificial Sequence
  Description of Artificial Sequence: Synthetic peptide
  Seed: ANQRLNPMHQLLRHF
ANQRFNPMHPLLEHF

SEQ ID NO: 212346 - protein, 15 aa, Artificial Sequence
  Description of Artificial Sequence: Synthetic peptide
  Seed: ANQRLNPMHQLLRHF
ANQRFNPMHPLLFHF

SEQ ID NO: 212347 - protein, 15 aa, Artificial Sequence
  Description of Artificial Sequence: Synthetic peptide
  Seed: ANQRLNPMHQLLRHF
ANQRFNPMHPLLGHF

SEQ ID NO: 212348 - protein, 15 aa, Artificial Sequence
  Description of Artificial Sequence: Synthetic peptide
  Seed: ANQRLNPMHQLLRHF
ANQRFNPMHPLLHHF

SEQ ID NO: 212349 - protein, 15 aa, Artificial Sequence
  Description of Artificial Sequence: Synthetic peptide
  Seed: ANQRLNPMHQLLRHF
ANQRFNPMHPLLIHF

SEQ ID NO: 212350 - protein, 15 aa, Artificial Sequence
  Description of Artificial Sequence: Synthetic peptide
  Seed: ANQRLNPMHQLLRHF
ANQRFNPMHPLLKHF

SEQ ID NO: 212351 - protein, 15 aa, Artificial Sequence
  Description of Artificial Sequence: Synthetic peptide
  Seed: ANQRLNPMHQLLRHF
ANQRFNPMHPLLLHF

SEQ ID NO: 212352 - protein, 15 aa, Artificial Sequence
  Description of Artificial Sequence: Synthetic peptide
  Seed: ANQRLNPMHQLLRHF
ANQRFNPMHPLLMHF

SEQ ID NO: 212353 - protein, 15 aa, Artificial Sequence
  Description of Artificial Sequence: Synthetic peptide
  Seed: ANQRLNPMHQLLRHF
ANQRFNPMHPLLNHF

SEQ ID NO: 212354 - protein, 15 aa, Artificial Sequence
  Description of Artificial Sequence: Synthetic peptide
  Seed: ANQRLNPMHQLLRHF
ANQRFNPMHPLLPHF

SEQ ID NO: 212355 - protein, 15 aa, Artificial Sequence
  Description of Artificial Sequence: Synthetic peptide
  Seed: ANQRLNPMHQLLRHF
ANQRFNPMHPLLQHF

SEQ ID NO: 212356 - protein, 15 aa, Artificial Sequence
  Description of Artificial Sequence: Synthetic peptide
  Seed: ANQRLNPMHQLLRHF
ANQRFNPMHPLLRHF

SEQ ID NO: 212357 - protein, 15 aa, Artificial Sequence
  Description of Artificial Sequence: Synthetic peptide
  Seed: ANQRLNPMHQLLRHF
ANQRFNPMHPLLSHF

SEQ ID NO: 212358 - protein, 15 aa, Artificial Sequence
  Description of Artificial Sequence: Synthetic peptide
  Seed: ANQRLNPMHQLLRHF
ANQRFNPMHPLLTHF

SEQ ID NO: 212359 - protein, 15 aa, Artificial Sequence
  Description of Artificial Sequence: Synthetic peptide
  Seed: ANQRLNPMHQLLRHF
ANQRFNPMHPLLVHF

SEQ ID NO: 212360 - protein, 15 aa, Artificial Sequence
  Description of Artificial Sequence: Synthetic peptide
  Seed: ANQRLNPMHQLLRHF
ANQRFNPMHPLLWHF

SEQ ID NO: 212361 - protein, 15 aa, Artificial Sequence
  Description of Artificial Sequence: Synthetic peptide
  Seed: ANQRLNPMHQLLRHF
ANQRFNPMHPLLYHF

SEQ ID NO: 212362 - protein, 15 aa, Artificial Sequence
  Description of Artificial Sequence: Synthetic peptide
  Seed: ANQRLNPMHQLLRHF
ANQRFNPMHQLLAHF

SEQ ID NO: 212363 - protein, 15 aa, Artificial Sequence
  Description of Artificial Sequence: Synthetic peptide
  Seed: ANQRLNPMHQLLRHF
ANQRFNPMHQLLIHF

SEQ ID NO: 212364 - protein, 15 aa, Artificial Sequence
  Description of Artificial Sequence: Synthetic peptide
  Seed: ANQRLNPMHQLLRHF
ANQRFNPMHQLLLHF

SEQ ID NO: 212365 - protein, 15 aa, Artificial Sequence
  Description of Artificial Sequence: Synthetic peptide
  Seed: ANQRLNPMHQLLRHF
ANQRFNPMHQLLMHF

SEQ ID NO: 212366 - protein, 15 aa, Artificial Sequence
  Description of Artificial Sequence: Synthetic peptide
  Seed: ANQRLNPMHQLLRHF
ANQRFNPMHQLLTHF

SEQ ID NO: 212367 - protein, 15 aa, Artificial Sequence
  Description of Artificial Sequence: Synthetic peptide
  Seed: ANQRLNPMHQLLRHF
ANQRFNPMHQLLVHF

SEQ ID NO: 212368 - protein, 15 aa, Artificial Sequence
  Description of Artificial Sequence: Synthetic peptide
  Seed: ANQRLNPMHQLLRHF
ANQRFNPMHRLLAHF

SEQ ID NO: 212369 - protein, 15 aa, Artificial Sequence
  Description of Artificial Sequence: Synthetic peptide
  Seed: ANQRLNPMHQLLRHF
ANQRFNPMHRLLGHF

SEQ ID NO: 212370 - protein, 15 aa, Artificial Sequence
  Description of Artificial Sequence: Synthetic peptide
  Seed: ANQRLNPMHQLLRHF
ANQRFNPMHRLLHHF

SEQ ID NO: 212371 - protein, 15 aa, Artificial Sequence
  Description of Artificial Sequence: Synthetic peptide
  Seed: ANQRLNPMHQLLRHF
ANQRFNPMHRLLIHF

SEQ ID NO: 212372 - protein, 15 aa, Artificial Sequence
  Description of Artificial Sequence: Synthetic peptide
  Seed: ANQRLNPMHQLLRHF
ANQRFNPMHRLLKHF

SEQ ID NO: 212373 - protein, 15 aa, Artificial Sequence
  Description of Artificial Sequence: Synthetic peptide
  Seed: ANQRLNPMHQLLRHF
ANQRFNPMHRLLLHF

SEQ ID NO: 212374 - protein, 15 aa, Artificial Sequence
  Description of Artificial Sequence: Synthetic peptide
  Seed: ANQRLNPMHQLLRHF
ANQRFNPMHRLLMHF

SEQ ID NO: 212375 - protein, 15 aa, Artificial Sequence
  Description of Artificial Sequence: Synthetic peptide
  Seed: ANQRLNPMHQLLRHF
ANQRFNPMHRLLNHF

SEQ ID NO: 212376 - protein, 15 aa, Artificial Sequence
  Description of Artificial Sequence: Synthetic peptide
  Seed: ANQRLNPMHQLLRHF
ANQRFNPMHRLLPHF

SEQ ID NO: 212377 - protein, 15 aa, Artificial Sequence
  Description of Artificial Sequence: Synthetic peptide
  Seed: ANQRLNPMHQLLRHF
ANQRFNPMHRLLQHF

SEQ ID NO: 212378 - protein, 15 aa, Artificial Sequence
  Description of Artificial Sequence: Synthetic peptide
  Seed: ANQRLNPMHQLLRHF
ANQRFNPMHRLLRHF

SEQ ID NO: 212379 - protein, 15 aa, Artificial Sequence
  Description of Artificial Sequence: Synthetic peptide
  Seed: ANQRLNPMHQLLRHF
ANQRFNPMHRLLSHF

SEQ ID NO: 212380 - protein, 15 aa, Artificial Sequence
  Description of Artificial Sequence: Synthetic peptide
  Seed: ANQRLNPMHQLLRHF
ANQRFNPMHRLLTHF

SEQ ID NO: 212381 - protein, 15 aa, Artificial Sequence
  Description of Artificial Sequence: Synthetic peptide
  Seed: ANQRLNPMHQLLRHF
ANQRFNPMHRLLVHF

SEQ ID NO: 212382 - protein, 15 aa, Artificial Sequence
  Description of Artificial Sequence: Synthetic peptide
  Seed: ANQRLNPMHQLLRHF
ANQRFNPMHRLLWHF

SEQ ID NO: 212383 - protein, 15 aa, Artificial Sequence
  Description of Artificial Sequence: Synthetic peptide
  Seed: ANQRLNPMHQLLRHF
ANQRFNPMHRLLYHF

SEQ ID NO: 212384 - protein, 15 aa, Artificial Sequence
  Description of Artificial Sequence: Synthetic peptide
  Seed: ANQRLNPMHQLLRHF
ANQRFNPMHSLLAHF

SEQ ID NO: 212385 - protein, 15 aa, Artificial Sequence
  Description of Artificial Sequence: Synthetic peptide
  Seed: ANQRLNPMHQLLRHF
ANQRFNPMHSLLCHF

SEQ ID NO: 212386 - protein, 15 aa, Artificial Sequence
  Description of Artificial Sequence: Synthetic peptide
  Seed: ANQRLNPMHQLLRHF
ANQRFNPMHSLLDHF

SEQ ID NO: 212387 - protein, 15 aa, Artificial Sequence
  Description of Artificial Sequence: Synthetic peptide
  Seed: ANQRLNPMHQLLRHF
ANQRFNPMHSLLEHF

SEQ ID NO: 212388 - protein, 15 aa, Artificial Sequence
  Description of Artificial Sequence: Synthetic peptide
  Seed: ANQRLNPMHQLLRHF
ANQRFNPMHSLLFHF

SEQ ID NO: 212389 - protein, 15 aa, Artificial Sequence
  Description of Artificial Sequence: Synthetic peptide
  Seed: ANQRLNPMHQLLRHF
ANQRFNPMHSLLGHF

SEQ ID NO: 212390 - protein, 15 aa, Artificial Sequence
  Description of Artificial Sequence: Synthetic peptide
  Seed: ANQRLNPMHQLLRHF
ANQRFNPMHSLLHHF

SEQ ID NO: 212391 - protein, 15 aa, Artificial Sequence
  Description of Artificial Sequence: Synthetic peptide
  Seed: ANQRLNPMHQLLRHF
ANQRFNPMHSLLIHF

SEQ ID NO: 212392 - protein, 15 aa, Artificial Sequence
  Description of Artificial Sequence: Synthetic peptide
  Seed: ANQRLNPMHQLLRHF
ANQRFNPMHSLLKHF

SEQ ID NO: 212393 - protein, 15 aa, Artificial Sequence
  Description of Artificial Sequence: Synthetic peptide
  Seed: ANQRLNPMHQLLRHF
ANQRFNPMHSLLLHF

SEQ ID NO: 212394 - protein, 15 aa, Artificial Sequence
  Description of Artificial Sequence: Synthetic peptide
  Seed: ANQRLNPMHQLLRHF
ANQRFNPMHSLLMHF

SEQ ID NO: 212395 - protein, 15 aa, Artificial Sequence
  Description of Artificial Sequence: Synthetic peptide
  Seed: ANQRLNPMHQLLRHF
ANQRFNPMHSLLNHF

SEQ ID NO: 212396 - protein, 15 aa, Artificial Sequence
  Description of Artificial Sequence: Synthetic peptide
  Seed: ANQRLNPMHQLLRHF
ANQRFNPMHSLLPHF

SEQ ID NO: 212397 - protein, 15 aa, Artificial Sequence
  Description of Artificial Sequence: Synthetic peptide
  Seed: ANQRLNPMHQLLRHF
ANQRFNPMHSLLQHF

SEQ ID NO: 212398 - protein, 15 aa, Artificial Sequence
  Description of Artificial Sequence: Synthetic peptide
  Seed: ANQRLNPMHQLLRHF
ANQRFNPMHSLLRHF

SEQ ID NO: 212399 - protein, 15 aa, Artificial Sequence
  Description of Artificial Sequence: Synthetic peptide
  Seed: ANQRLNPMHQLLRHF
ANQRFNPMHSLLSHF

SEQ ID NO: 212400 - protein, 15 aa, Artificial Sequence
  Description of Artificial Sequence: Synthetic peptide
  Seed: ANQRLNPMHQLLRHF
ANQRFNPMHSLLTHF

SEQ ID NO: 212401 - protein, 15 aa, Artificial Sequence
  Description of Artificial Sequence: Synthetic peptide
  Seed: ANQRLNPMHQLLRHF
ANQRFNPMHSLLVHF

SEQ ID NO: 212402 - protein, 15 aa, Artificial Sequence
  Description of Artificial Sequence: Synthetic peptide
  Seed: ANQRLNPMHQLLRHF
ANQRFNPMHSLLWHF

SEQ ID NO: 212403 - protein, 15 aa, Artificial Sequence
  Description of Artificial Sequence: Synthetic peptide
  Seed: ANQRLNPMHQLLRHF
ANQRFNPMHSLLYHF

SEQ ID NO: 212404 - protein, 15 aa, Artificial Sequence
  Description of Artificial Sequence: Synthetic peptide
  Seed: ANQRLNPMHQLLRHF
ANQRFNPMHTLLAHF

SEQ ID NO: 212405 - protein, 15 aa, Artificial Sequence
  Description of Artificial Sequence: Synthetic peptide
  Seed: ANQRLNPMHQLLRHF
ANQRFNPMHTLLCHF

SEQ ID NO: 212406 - protein, 15 aa, Artificial Sequence
  Description of Artificial Sequence: Synthetic peptide
  Seed: ANQRLNPMHQLLRHF
ANQRFNPMHTLLDHF

SEQ ID NO: 212407 - protein, 15 aa, Artificial Sequence
  Description of Artificial Sequence: Synthetic peptide
  Seed: ANQRLNPMHQLLRHF
ANQRFNPMHTLLEHF

SEQ ID NO: 212408 - protein, 15 aa, Artificial Sequence
  Description of Artificial Sequence: Synthetic peptide
  Seed: ANQRLNPMHQLLRHF
ANQRFNPMHTLLFHF

SEQ ID NO: 212409 - protein, 15 aa, Artificial Sequence
  Description of Artificial Sequence: Synthetic peptide
  Seed: ANQRLNPMHQLLRHF
ANQRFNPMHTLLGHF

SEQ ID NO: 212410 - protein, 15 aa, Artificial Sequence
  Description of Artificial Sequence: Synthetic peptide
  Seed: ANQRLNPMHQLLRHF
ANQRFNPMHTLLHHF

SEQ ID NO: 212411 - protein, 15 aa, Artificial Sequence
  Description of Artificial Sequence: Synthetic peptide
  Seed: ANQRLNPMHQLLRHF
ANQRFNPMHTLLIHF

SEQ ID NO: 212412 - protein, 15 aa, Artificial Sequence
  Description of Artificial Sequence: Synthetic peptide
  Seed: ANQRLNPMHQLLRHF
ANQRFNPMHTLLKHF

SEQ ID NO: 212413 - protein, 15 aa, Artificial Sequence
  Description of Artificial Sequence: Synthetic peptide
  Seed: ANQRLNPMHQLLRHF
ANQRFNPMHTLLLHF

SEQ ID NO: 212414 - protein, 15 aa, Artificial Sequence
  Description of Artificial Sequence: Synthetic peptide
  Seed: ANQRLNPMHQLLRHF
ANQRFNPMHTLLMHF

SEQ ID NO: 212415 - protein, 15 aa, Artificial Sequence
  Description of Artificial Sequence: Synthetic peptide
  Seed: ANQRLNPMHQLLRHF
ANQRFNPMHTLLNHF

SEQ ID NO: 212416 - protein, 15 aa, Artificial Sequence
  Description of Artificial Sequence: Synthetic peptide
  Seed: ANQRLNPMHQLLRHF
ANQRFNPMHTLLPHF

SEQ ID NO: 212417 - protein, 15 aa, Artificial Sequence
  Description of Artificial Sequence: Synthetic peptide
  Seed: ANQRLNPMHQLLRHF
ANQRFNPMHTLLQHF

SEQ ID NO: 212418 - protein, 15 aa, Artificial Sequence
  Description of Artificial Sequence: Synthetic peptide
  Seed: ANQRLNPMHQLLRHF
ANQRFNPMHTLLRHF

SEQ ID NO: 212419 - protein, 15 aa, Artificial Sequence
  Description of Artificial Sequence: Synthetic peptide
  Seed: ANQRLNPMHQLLRHF
ANQRFNPMHTLLSHF

SEQ ID NO: 212420 - protein, 15 aa, Artificial Sequence
  Description of Artificial Sequence: Synthetic peptide
  Seed: ANQRLNPMHQLLRHF
ANQRFNPMHTLLTHF

SEQ ID NO: 212421 - protein, 15 aa, Artificial Sequence
  Description of Artificial Sequence: Synthetic peptide
  Seed: ANQRLNPMHQLLRHF
ANQRFNPMHTLLVHF

SEQ ID NO: 212422 - protein, 15 aa, Artificial Sequence
  Description of Artificial Sequence: Synthetic peptide
  Seed: ANQRLNPMHQLLRHF
ANQRFNPMHTLLWHF

SEQ ID NO: 212423 - protein, 15 aa, Artificial Sequence
  Description of Artificial Sequence: Synthetic peptide
  Seed: ANQRLNPMHQLLRHF
ANQRFNPMHTLLYHF

SEQ ID NO: 212424 - protein, 15 aa, Artificial Sequence
  Description of Artificial Sequence: Synthetic peptide
  Seed: ANQRLNPMHQLLRHF
ANQRFNPMHVLLAHF

SEQ ID NO: 212425 - protein, 15 aa, Artificial Sequence
  Description of Artificial Sequence: Synthetic peptide
  Seed: ANQRLNPMHQLLRHF
ANQRFNPMHVLLCHF

SEQ ID NO: 212426 - protein, 15 aa, Artificial Sequence
  Description of Artificial Sequence: Synthetic peptide
  Seed: ANQRLNPMHQLLRHF
ANQRFNPMHVLLDHF

SEQ ID NO: 212427 - protein, 15 aa, Artificial Sequence
  Description of Artificial Sequence: Synthetic peptide
  Seed: ANQRLNPMHQLLRHF
ANQRFNPMHVLLEHF

SEQ ID NO: 212428 - protein, 15 aa, Artificial Sequence
  Description of Artificial Sequence: Synthetic peptide
  Seed: ANQRLNPMHQLLRHF
ANQRFNPMHVLLGHF

SEQ ID NO: 212429 - protein, 15 aa, Artificial Sequence
  Description of Artificial Sequence: Synthetic peptide
  Seed: ANQRLNPMHQLLRHF
ANQRFNPMHVLLHHF

SEQ ID NO: 212430 - protein, 15 aa, Artificial Sequence
  Description of Artificial Sequence: Synthetic peptide
  Seed: ANQRLNPMHQLLRHF
ANQRFNPMHVLLIHF

SEQ ID NO: 212431 - protein, 15 aa, Artificial Sequence
  Description of Artificial Sequence: Synthetic peptide
  Seed: ANQRLNPMHQLLRHF
ANQRFNPMHVLLKHF

SEQ ID NO: 212432 - protein, 15 aa, Artificial Sequence
  Description of Artificial Sequence: Synthetic peptide
  Seed: ANQRLNPMHQLLRHF
ANQRFNPMHVLLLHF

SEQ ID NO: 212433 - protein, 15 aa, Artificial Sequence
  Description of Artificial Sequence: Synthetic peptide
  Seed: ANQRLNPMHQLLRHF
ANQRFNPMHVLLMHF

SEQ ID NO: 212434 - protein, 15 aa, Artificial Sequence
  Description of Artificial Sequence: Synthetic peptide
  Seed: ANQRLNPMHQLLRHF
ANQRFNPMHVLLNHF

SEQ ID NO: 212435 - protein, 15 aa, Artificial Sequence
  Description of Artificial Sequence: Synthetic peptide
  Seed: ANQRLNPMHQLLRHF
ANQRFNPMHVLLPHF

SEQ ID NO: 212436 - protein, 15 aa, Artificial Sequence
  Description of Artificial Sequence: Synthetic peptide
  Seed: ANQRLNPMHQLLRHF
ANQRFNPMHVLLQHF

SEQ ID NO: 212437 - protein, 15 aa, Artificial Sequence
  Description of Artificial Sequence: Synthetic peptide
  Seed: ANQRLNPMHQLLRHF
ANQRFNPMHVLLSHF

SEQ ID NO: 212438 - protein, 15 aa, Artificial Sequence
  Description of Artificial Sequence: Synthetic peptide
  Seed: ANQRLNPMHQLLRHF
ANQRFNPMHVLLTHF

SEQ ID NO: 212439 - protein, 15 aa, Artificial Sequence
  Description of Artificial Sequence: Synthetic peptide
  Seed: ANQRLNPMHQLLRHF
ANQRFNPMHVLLVHF

SEQ ID NO: 212440 - protein, 15 aa, Artificial Sequence
  Description of Artificial Sequence: Synthetic peptide
  Seed: ANQRLNPMHQLLRHF
ANQRFNPMHWLLIHF

SEQ ID NO: 212441 - protein, 15 aa, Artificial Sequence
  Description of Artificial Sequence: Synthetic peptide
  Seed: ANQRLNPMHQLLRHF
ANQRFNPMHWLLLHF

SEQ ID NO: 212442 - protein, 15 aa, Artificial Sequence
  Description of Artificial Sequence: Synthetic peptide
  Seed: ANQRLNPMHQLLRHF
ANQRFNPMHWLLVHF

SEQ ID NO: 212443 - protein, 15 aa, Artificial Sequence
  Description of Artificial Sequence: Synthetic peptide
  Seed: ANQRLNPMHQLLRHF
ANQRFNPMHYLLIHF

SEQ ID NO: 212444 - protein, 15 aa, Artificial Sequence
  Description of Artificial Sequence: Synthetic peptide
  Seed: ANQRLNPMHQLLRHF
ANQRFNPMHYLLLHF

SEQ ID NO: 212445 - protein, 15 aa, Artificial Sequence
  Description of Artificial Sequence: Synthetic peptide
  Seed: ANQRLNPMHQLLRHF
ANQRFNPMHYLLVHF

SEQ ID NO: 212446 - protein, 15 aa, Artificial Sequence
  Description of Artificial Sequence: Synthetic peptide
  Seed: ANQRLNPMHQLLRHF
ANQRFNPNHALLAHF

SEQ ID NO: 212447 - protein, 15 aa, Artificial Sequence
  Description of Artificial Sequence: Synthetic peptide
  Seed: ANQRLNPMHQLLRHF
ANQRFNPNHALLFHF

SEQ ID NO: 212448 - protein, 15 aa, Artificial Sequence
  Description of Artificial Sequence: Synthetic peptide
  Seed: ANQRLNPMHQLLRHF
ANQRFNPNHALLIHF

SEQ ID NO: 212449 - protein, 15 aa, Artificial Sequence
  Description of Artificial Sequence: Synthetic peptide
  Seed: ANQRLNPMHQLLRHF
ANQRFNPNHALLLHF

SEQ ID NO: 212450 - protein, 15 aa, Artificial Sequence
  Description of Artificial Sequence: Synthetic peptide
  Seed: ANQRLNPMHQLLRHF
ANQRFNPNHALLMHF

SEQ ID NO: 212451 - protein, 15 aa, Artificial Sequence
  Description of Artificial Sequence: Synthetic peptide
  Seed: ANQRLNPMHQLLRHF
ANQRFNPNHALLSHF

SEQ ID NO: 212452 - protein, 15 aa, Artificial Sequence
  Description of Artificial Sequence: Synthetic peptide
  Seed: ANQRLNPMHQLLRHF
ANQRFNPNHALLTHF

SEQ ID NO: 212453 - protein, 15 aa, Artificial Sequence
  Description of Artificial Sequence: Synthetic peptide
  Seed: ANQRLNPMHQLLRHF
ANQRFNPNHALLVHF

SEQ ID NO: 212454 - protein, 15 aa, Artificial Sequence
  Description of Artificial Sequence: Synthetic peptide
  Seed: ANQRLNPMHQLLRHF
ANQRFNPNHALLWHF

SEQ ID NO: 212455 - protein, 15 aa, Artificial Sequence
  Description of Artificial Sequence: Synthetic peptide
  Seed: ANQRLNPMHQLLRHF
ANQRFNPNHALLYHF

SEQ ID NO: 212456 - protein, 15 aa, Artificial Sequence
  Description of Artificial Sequence: Synthetic peptide
  Seed: ANQRLNPMHQLLRHF
ANQRFNPNHFLLLHF

SEQ ID NO: 212457 - protein, 15 aa, Artificial Sequence
  Description of Artificial Sequence: Synthetic peptide
  Seed: ANQRLNPMHQLLRHF
ANQRFNPNHGLLAHF

SEQ ID NO: 212458 - protein, 15 aa, Artificial Sequence
  Description of Artificial Sequence: Synthetic peptide
  Seed: ANQRLNPMHQLLRHF
ANQRFNPNHGLLFHF

SEQ ID NO: 212459 - protein, 15 aa, Artificial Sequence
  Description of Artificial Sequence: Synthetic peptide
  Seed: ANQRLNPMHQLLRHF
ANQRFNPNHGLLIHF

SEQ ID NO: 212460 - protein, 15 aa, Artificial Sequence
  Description of Artificial Sequence: Synthetic peptide
  Seed: ANQRLNPMHQLLRHF
ANQRFNPNHGLLLHF

SEQ ID NO: 212461 - protein, 15 aa, Artificial Sequence
  Description of Artificial Sequence: Synthetic peptide
  Seed: ANQRLNPMHQLLRHF
ANQRFNPNHGLLMHF

SEQ ID NO: 212462 - protein, 15 aa, Artificial Sequence
  Description of Artificial Sequence: Synthetic peptide
  Seed: ANQRLNPMHQLLRHF
ANQRFNPNHGLLVHF

SEQ ID NO: 212463 - protein, 15 aa, Artificial Sequence
  Description of Artificial Sequence: Synthetic peptide
  Seed: ANQRLNPMHQLLRHF
ANQRFNPNHGLLYHF

SEQ ID NO: 212464 - protein, 15 aa, Artificial Sequence
  Description of Artificial Sequence: Synthetic peptide
  Seed: ANQRLNPMHQLLRHF
ANQRFNPNHHLLIHF

SEQ ID NO: 212465 - protein, 15 aa, Artificial Sequence
  Description of Artificial Sequence: Synthetic peptide
  Seed: ANQRLNPMHQLLRHF
ANQRFNPNHHLLVHF

SEQ ID NO: 212466 - protein, 15 aa, Artificial Sequence
  Description of Artificial Sequence: Synthetic peptide
  Seed: ANQRLNPMHQLLRHF
ANQRFNPNHILLAHF

SEQ ID NO: 212467 - protein, 15 aa, Artificial Sequence
  Description of Artificial Sequence: Synthetic peptide
  Seed: ANQRLNPMHQLLRHF
ANQRFNPNHILLFHF

SEQ ID NO: 212468 - protein, 15 aa, Artificial Sequence
  Description of Artificial Sequence: Synthetic peptide
  Seed: ANQRLNPMHQLLRHF
ANQRFNPNHILLIHF

SEQ ID NO: 212469 - protein, 15 aa, Artificial Sequence
  Description of Artificial Sequence: Synthetic peptide
  Seed: ANQRLNPMHQLLRHF
ANQRFNPNHILLLHF

SEQ ID NO: 212470 - protein, 15 aa, Artificial Sequence
  Description of Artificial Sequence: Synthetic peptide
  Seed: ANQRLNPMHQLLRHF
ANQRFNPNHILLMHF

SEQ ID NO: 212471 - protein, 15 aa, Artificial Sequence
  Description of Artificial Sequence: Synthetic peptide
  Seed: ANQRLNPMHQLLRHF
ANQRFNPNHILLVHF

SEQ ID NO: 212472 - protein, 15 aa, Artificial Sequence
  Description of Artificial Sequence: Synthetic peptide
  Seed: ANQRLNPMHQLLRHF
ANQRFNPNHILLYHF

SEQ ID NO: 212473 - protein, 15 aa, Artificial Sequence
  Description of Artificial Sequence: Synthetic peptide
  Seed: ANQRLNPMHQLLRHF
ANQRFNPNHLLLFHF

SEQ ID NO: 212474 - protein, 15 aa, Artificial Sequence
  Description of Artificial Sequence: Synthetic peptide
  Seed: ANQRLNPMHQLLRHF
ANQRFNPNHLLLIHF

SEQ ID NO: 212475 - protein, 15 aa, Artificial Sequence
  Description of Artificial Sequence: Synthetic peptide
  Seed: ANQRLNPMHQLLRHF
ANQRFNPNHLLLLHF

SEQ ID NO: 212476 - protein, 15 aa, Artificial Sequence
  Description of Artificial Sequence: Synthetic peptide
  Seed: ANQRLNPMHQLLRHF
ANQRFNPNHLLLVHF

SEQ ID NO: 212477 - protein, 15 aa, Artificial Sequence
  Description of Artificial Sequence: Synthetic peptide
  Seed: ANQRLNPMHQLLRHF
ANQRFNPNHLLLYHF

SEQ ID NO: 212478 - protein, 15 aa, Artificial Sequence
  Description of Artificial Sequence: Synthetic peptide
  Seed: ANQRLNPMHQLLRHF
ANQRFNPNHMLLFHF

SEQ ID NO: 212479 - protein, 15 aa, Artificial Sequence
  Description of Artificial Sequence: Synthetic peptide
  Seed: ANQRLNPMHQLLRHF
ANQRFNPNHMLLIHF

SEQ ID NO: 212480 - protein, 15 aa, Artificial Sequence
  Description of Artificial Sequence: Synthetic peptide
  Seed: ANQRLNPMHQLLRHF
ANQRFNPNHMLLLHF

SEQ ID NO: 212481 - protein, 15 aa, Artificial Sequence
  Description of Artificial Sequence: Synthetic peptide
  Seed: ANQRLNPMHQLLRHF
ANQRFNPNHMLLVHF

SEQ ID NO: 212482 - protein, 15 aa, Artificial Sequence
  Description of Artificial Sequence: Synthetic peptide
  Seed: ANQRLNPMHQLLRHF
ANQRFNPNHMLLYHF

SEQ ID NO: 212483 - protein, 15 aa, Artificial Sequence
  Description of Artificial Sequence: Synthetic peptide
  Seed: ANQRLNPMHQLLRHF
ANQRFNPNHNLLAHF

SEQ ID NO: 212484 - protein, 15 aa, Artificial Sequence
  Description of Artificial Sequence: Synthetic peptide
  Seed: ANQRLNPMHQLLRHF
ANQRFNPNHNLLFHF

SEQ ID NO: 212485 - protein, 15 aa, Artificial Sequence
  Description of Artificial Sequence: Synthetic peptide
  Seed: ANQRLNPMHQLLRHF
ANQRFNPNHNLLIHF

SEQ ID NO: 212486 - protein, 15 aa, Artificial Sequence
  Description of Artificial Sequence: Synthetic peptide
  Seed: ANQRLNPMHQLLRHF
ANQRFNPNHNLLLHF

SEQ ID NO: 212487 - protein, 15 aa, Artificial Sequence
  Description of Artificial Sequence: Synthetic peptide
  Seed: ANQRLNPMHQLLRHF
ANQRFNPNHNLLMHF

SEQ ID NO: 212488 - protein, 15 aa, Artificial Sequence
  Description of Artificial Sequence: Synthetic peptide
  Seed: ANQRLNPMHQLLRHF
ANQRFNPNHNLLVHF

SEQ ID NO: 212489 - protein, 15 aa, Artificial Sequence
  Description of Artificial Sequence: Synthetic peptide
  Seed: ANQRLNPMHQLLRHF
ANQRFNPNHNLLYHF

SEQ ID NO: 212490 - protein, 15 aa, Artificial Sequence
  Description of Artificial Sequence: Synthetic peptide
  Seed: ANQRLNPMHQLLRHF
ANQRFNPNHPLLAHF

SEQ ID NO: 212491 - protein, 15 aa, Artificial Sequence
  Description of Artificial Sequence: Synthetic peptide
  Seed: ANQRLNPMHQLLRHF
ANQRFNPNHPLLFHF

SEQ ID NO: 212492 - protein, 15 aa, Artificial Sequence
  Description of Artificial Sequence: Synthetic peptide
  Seed: ANQRLNPMHQLLRHF
ANQRFNPNHPLLIHF

SEQ ID NO: 212493 - protein, 15 aa, Artificial Sequence
  Description of Artificial Sequence: Synthetic peptide
  Seed: ANQRLNPMHQLLRHF
ANQRFNPNHPLLLHF

SEQ ID NO: 212494 - protein, 15 aa, Artificial Sequence
  Description of Artificial Sequence: Synthetic peptide
  Seed: ANQRLNPMHQLLRHF
ANQRFNPNHPLLMHF

SEQ ID NO: 212495 - protein, 15 aa, Artificial Sequence
  Description of Artificial Sequence: Synthetic peptide
  Seed: ANQRLNPMHQLLRHF
ANQRFNPNHPLLVHF

SEQ ID NO: 212496 - protein, 15 aa, Artificial Sequence
  Description of Artificial Sequence: Synthetic peptide
  Seed: ANQRLNPMHQLLRHF
ANQRFNPNHPLLYHF

SEQ ID NO: 212497 - protein, 15 aa, Artificial Sequence
  Description of Artificial Sequence: Synthetic peptide
  Seed: ANQRLNPMHQLLRHF
ANQRFNPNHSLLAHF

SEQ ID NO: 212498 - protein, 15 aa, Artificial Sequence
  Description of Artificial Sequence: Synthetic peptide
  Seed: ANQRLNPMHQLLRHF
ANQRFNPNHSLLFHF

SEQ ID NO: 212499 - protein, 15 aa, Artificial Sequence
  Description of Artificial Sequence: Synthetic peptide
  Seed: ANQRLNPMHQLLRHF
ANQRFNPNHSLLIHF

SEQ ID NO: 212500 - protein, 15 aa, Artificial Sequence
  Description of Artificial Sequence: Synthetic peptide
  Seed: ANQRLNPMHQLLRHF
ANQRFNPNHSLLLHF

SEQ ID NO: 212501 - protein, 15 aa, Artificial Sequence
  Description of Artificial Sequence: Synthetic peptide
  Seed: ANQRLNPMHQLLRHF
ANQRFNPNHSLLMHF

SEQ ID NO: 212502 - protein, 15 aa, Artificial Sequence
  Description of Artificial Sequence: Synthetic peptide
  Seed: ANQRLNPMHQLLRHF
ANQRFNPNHSLLTHF

SEQ ID NO: 212503 - protein, 15 aa, Artificial Sequence
  Description of Artificial Sequence: Synthetic peptide
  Seed: ANQRLNPMHQLLRHF
ANQRFNPNHSLLVHF

SEQ ID NO: 212504 - protein, 15 aa, Artificial Sequence
  Description of Artificial Sequence: Synthetic peptide
  Seed: ANQRLNPMHQLLRHF
ANQRFNPNHSLLYHF

SEQ ID NO: 212505 - protein, 15 aa, Artificial Sequence
  Description of Artificial Sequence: Synthetic peptide
  Seed: ANQRLNPMHQLLRHF
ANQRFNPNHTLLFHF

SEQ ID NO: 212506 - protein, 15 aa, Artificial Sequence
  Description of Artificial Sequence: Synthetic peptide
  Seed: ANQRLNPMHQLLRHF
ANQRFNPNHTLLIHF

SEQ ID NO: 212507 - protein, 15 aa, Artificial Sequence
  Description of Artificial Sequence: Synthetic peptide
  Seed: ANQRLNPMHQLLRHF
ANQRFNPNHTLLLHF

SEQ ID NO: 212508 - protein, 15 aa, Artificial Sequence
  Description of Artificial Sequence: Synthetic peptide
  Seed: ANQRLNPMHQLLRHF
ANQRFNPNHTLLMHF

SEQ ID NO: 212509 - protein, 15 aa, Artificial Sequence
  Description of Artificial Sequence: Synthetic peptide
  Seed: ANQRLNPMHQLLRHF
ANQRFNPNHTLLVHF

SEQ ID NO: 212510 - protein, 15 aa, Artificial Sequence
  Description of Artificial Sequence: Synthetic peptide
  Seed: ANQRLNPMHQLLRHF
ANQRFNPNHTLLYHF

SEQ ID NO: 212511 - protein, 15 aa, Artificial Sequence
  Description of Artificial Sequence: Synthetic peptide
  Seed: ANQRLNPMHQLLRHF
ANQRFNPNHVLLAHF

SEQ ID NO: 212512 - protein, 15 aa, Artificial Sequence
  Description of Artificial Sequence: Synthetic peptide
  Seed: ANQRLNPMHQLLRHF
ANQRFNPNHVLLFHF

SEQ ID NO: 212513 - protein, 15 aa, Artificial Sequence
  Description of Artificial Sequence: Synthetic peptide
  Seed: ANQRLNPMHQLLRHF
ANQRFNPNHVLLIHF

SEQ ID NO: 212514 - protein, 15 aa, Artificial Sequence
  Description of Artificial Sequence: Synthetic peptide
  Seed: ANQRLNPMHQLLRHF
ANQRFNPNHVLLLHF

SEQ ID NO: 212515 - protein, 15 aa, Artificial Sequence
  Description of Artificial Sequence: Synthetic peptide
  Seed: ANQRLNPMHQLLRHF
ANQRFNPNHVLLMHF

SEQ ID NO: 212516 - protein, 15 aa, Artificial Sequence
  Description of Artificial Sequence: Synthetic peptide
  Seed: ANQRLNPMHQLLRHF
ANQRFNPNHVLLVHF

SEQ ID NO: 212517 - protein, 15 aa, Artificial Sequence
  Description of Artificial Sequence: Synthetic peptide
  Seed: ANQRLNPMHQLLRHF
ANQRFNPNHVLLYHF

SEQ ID NO: 212518 - protein, 15 aa, Artificial Sequence
  Description of Artificial Sequence: Synthetic peptide
  Seed: ANQRLNPMHQLLRHF
ANQRFNPQHALLAHF

SEQ ID NO: 212519 - protein, 15 aa, Artificial Sequence
  Description of Artificial Sequence: Synthetic peptide
  Seed: ANQRLNPMHQLLRHF
ANQRFNPQHALLCHF

SEQ ID NO: 212520 - protein, 15 aa, Artificial Sequence
  Description of Artificial Sequence: Synthetic peptide
  Seed: ANQRLNPMHQLLRHF
ANQRFNPQHALLFHF

SEQ ID NO: 212521 - protein, 15 aa, Artificial Sequence
  Description of Artificial Sequence: Synthetic peptide
  Seed: ANQRLNPMHQLLRHF
ANQRFNPQHALLGHF

SEQ ID NO: 212522 - protein, 15 aa, Artificial Sequence
  Description of Artificial Sequence: Synthetic peptide
  Seed: ANQRLNPMHQLLRHF
ANQRFNPQHALLHHF

SEQ ID NO: 212523 - protein, 15 aa, Artificial Sequence
  Description of Artificial Sequence: Synthetic peptide
  Seed: ANQRLNPMHQLLRHF
ANQRFNPQHALLIHF

SEQ ID NO: 212524 - protein, 15 aa, Artificial Sequence
  Description of Artificial Sequence: Synthetic peptide
  Seed: ANQRLNPMHQLLRHF
ANQRFNPQHALLLHF

SEQ ID NO: 212525 - protein, 15 aa, Artificial Sequence
  Description of Artificial Sequence: Synthetic peptide
  Seed: ANQRLNPMHQLLRHF
ANQRFNPQHALLMHF

SEQ ID NO: 212526 - protein, 15 aa, Artificial Sequence
  Description of Artificial Sequence: Synthetic peptide
  Seed: ANQRLNPMHQLLRHF
ANQRFNPQHALLNHF

SEQ ID NO: 212527 - protein, 15 aa, Artificial Sequence
  Description of Artificial Sequence: Synthetic peptide
  Seed: ANQRLNPMHQLLRHF
ANQRFNPQHALLPHF

SEQ ID NO: 212528 - protein, 15 aa, Artificial Sequence
  Description of Artificial Sequence: Synthetic peptide
  Seed: ANQRLNPMHQLLRHF
ANQRFNPQHALLRHF

SEQ ID NO: 212529 - protein, 15 aa, Artificial Sequence
  Description of Artificial Sequence: Synthetic peptide
  Seed: ANQRLNPMHQLLRHF
ANQRFNPQHALLSHF

SEQ ID NO: 212530 - protein, 15 aa, Artificial Sequence
  Description of Artificial Sequence: Synthetic peptide
  Seed: ANQRLNPMHQLLRHF
ANQRFNPQHALLTHF

SEQ ID NO: 212531 - protein, 15 aa, Artificial Sequence
  Description of Artificial Sequence: Synthetic peptide
  Seed: ANQRLNPMHQLLRHF
ANQRFNPQHALLVHF

SEQ ID NO: 212532 - protein, 15 aa, Artificial Sequence
  Description of Artificial Sequence: Synthetic peptide
  Seed: ANQRLNPMHQLLRHF
ANQRFNPQHALLWHF

SEQ ID NO: 212533 - protein, 15 aa, Artificial Sequence
  Description of Artificial Sequence: Synthetic peptide
  Seed: ANQRLNPMHQLLRHF
ANQRFNPQHFLLFHF

SEQ ID NO: 212534 - protein, 15 aa, Artificial Sequence
  Description of Artificial Sequence: Synthetic peptide
  Seed: ANQRLNPMHQLLRHF
ANQRFNPQHFLLIHF

SEQ ID NO: 212535 - protein, 15 aa, Artificial Sequence
  Description of Artificial Sequence: Synthetic peptide
  Seed: ANQRLNPMHQLLRHF
ANQRFNPQHFLLLHF

SEQ ID NO: 212536 - protein, 15 aa, Artificial Sequence
  Description of Artificial Sequence: Synthetic peptide
  Seed: ANQRLNPMHQLLRHF
ANQRFNPQHFLLMHF

SEQ ID NO: 212537 - protein, 15 aa, Artificial Sequence
  Description of Artificial Sequence: Synthetic peptide
  Seed: ANQRLNPMHQLLRHF
ANQRFNPQHFLLVHF

SEQ ID NO: 212538 - protein, 15 aa, Artificial Sequence
  Description of Artificial Sequence: Synthetic peptide
  Seed: ANQRLNPMHQLLRHF
ANQRFNPQHGLLAHF

SEQ ID NO: 212539 - protein, 15 aa, Artificial Sequence
  Description of Artificial Sequence: Synthetic peptide
  Seed: ANQRLNPMHQLLRHF
ANQRFNPQHGLLCHF

SEQ ID NO: 212540 - protein, 15 aa, Artificial Sequence
  Description of Artificial Sequence: Synthetic peptide
  Seed: ANQRLNPMHQLLRHF
ANQRFNPQHGLLFHF

SEQ ID NO: 212541 - protein, 15 aa, Artificial Sequence
  Description of Artificial Sequence: Synthetic peptide
  Seed: ANQRLNPMHQLLRHF
ANQRFNPQHGLLGHF

SEQ ID NO: 212542 - protein, 15 aa, Artificial Sequence
  Description of Artificial Sequence: Synthetic peptide
  Seed: ANQRLNPMHQLLRHF
ANQRFNPQHGLLIHF

SEQ ID NO: 212543 - protein, 15 aa, Artificial Sequence
  Description of Artificial Sequence: Synthetic peptide
  Seed: ANQRLNPMHQLLRHF
ANQRFNPQHGLLLHF

SEQ ID NO: 212544 - protein, 15 aa, Artificial Sequence
  Description of Artificial Sequence: Synthetic peptide
  Seed: ANQRLNPMHQLLRHF
ANQRFNPQHGLLMHF

SEQ ID NO: 212545 - protein, 15 aa, Artificial Sequence
  Description of Artificial Sequence: Synthetic peptide
  Seed: ANQRLNPMHQLLRHF
ANQRFNPQHGLLNHF

SEQ ID NO: 212546 - protein, 15 aa, Artificial Sequence
  Description of Artificial Sequence: Synthetic peptide
  Seed: ANQRLNPMHQLLRHF
ANQRFNPQHGLLSHF

SEQ ID NO: 212547 - protein, 15 aa, Artificial Sequence
  Description of Artificial Sequence: Synthetic peptide
  Seed: ANQRLNPMHQLLRHF
ANQRFNPQHGLLTHF

SEQ ID NO: 212548 - protein, 15 aa, Artificial Sequence
  Description of Artificial Sequence: Synthetic peptide
  Seed: ANQRLNPMHQLLRHF
ANQRFNPQHGLLVHF

SEQ ID NO: 212549 - protein, 15 aa, Artificial Sequence
  Description of Artificial Sequence: Synthetic peptide
  Seed: ANQRLNPMHQLLRHF
ANQRFNPQHILLAHF

SEQ ID NO: 212550 - protein, 15 aa, Artificial Sequence
  Description of Artificial Sequence: Synthetic peptide
  Seed: ANQRLNPMHQLLRHF
ANQRFNPQHILLNHF

SEQ ID NO: 212551 - protein, 15 aa, Artificial Sequence
  Description of Artificial Sequence: Synthetic peptide
  Seed: ANQRLNPMHQLLRHF
ANQRFNPQHILLSHF

SEQ ID NO: 212552 - protein, 15 aa, Artificial Sequence
  Description of Artificial Sequence: Synthetic peptide
  Seed: ANQRLNPMHQLLRHF
ANQRFNPQHILLVHF

SEQ ID NO: 212553 - protein, 15 aa, Artificial Sequence
  Description of Artificial Sequence: Synthetic peptide
  Seed: ANQRLNPMHQLLRHF
ANQRFNPQHKLLSHF

SEQ ID NO: 212554 - protein, 15 aa, Artificial Sequence
  Description of Artificial Sequence: Synthetic peptide
  Seed: ANQRLNPMHQLLRHF
ANQRFNPQHNLLAHF

SEQ ID NO: 212555 - protein, 15 aa, Artificial Sequence
  Description of Artificial Sequence: Synthetic peptide
  Seed: ANQRLNPMHQLLRHF
ANQRFNPQHNLLIHF

SEQ ID NO: 212556 - protein, 15 aa, Artificial Sequence
  Description of Artificial Sequence: Synthetic peptide
  Seed: ANQRLNPMHQLLRHF
ANQRFNPQHNLLLHF

SEQ ID NO: 212557 - protein, 15 aa, Artificial Sequence
  Description of Artificial Sequence: Synthetic peptide
  Seed: ANQRLNPMHQLLRHF
ANQRFNPQHNLLMHF

SEQ ID NO: 212558 - protein, 15 aa, Artificial Sequence
  Description of Artificial Sequence: Synthetic peptide
  Seed: ANQRLNPMHQLLRHF
ANQRFNPQHNLLSHF

SEQ ID NO: 212559 - protein, 15 aa, Artificial Sequence
  Description of Artificial Sequence: Synthetic peptide
  Seed: ANQRLNPMHQLLRHF
ANQRFNPQHNLLTHF

SEQ ID NO: 212560 - protein, 15 aa, Artificial Sequence
  Description of Artificial Sequence: Synthetic peptide
  Seed: ANQRLNPMHQLLRHF
ANQRFNPQHNLLVHF

SEQ ID NO: 212561 - protein, 15 aa, Artificial Sequence
  Description of Artificial Sequence: Synthetic peptide
  Seed: ANQRLNPMHQLLRHF
ANQRFNPQHPLLAHF

SEQ ID NO: 212562 - protein, 15 aa, Artificial Sequence
  Description of Artificial Sequence: Synthetic peptide
  Seed: ANQRLNPMHQLLRHF
ANQRFNPQHPLLGHF

SEQ ID NO: 212563 - protein, 15 aa, Artificial Sequence
  Description of Artificial Sequence: Synthetic peptide
  Seed: ANQRLNPMHQLLRHF
ANQRFNPQHPLLIHF

SEQ ID NO: 212564 - protein, 15 aa, Artificial Sequence
  Description of Artificial Sequence: Synthetic peptide
  Seed: ANQRLNPMHQLLRHF
ANQRFNPQHPLLLHF

SEQ ID NO: 212565 - protein, 15 aa, Artificial Sequence
  Description of Artificial Sequence: Synthetic peptide
  Seed: ANQRLNPMHQLLRHF
ANQRFNPQHPLLMHF

SEQ ID NO: 212566 - protein, 15 aa, Artificial Sequence
  Description of Artificial Sequence: Synthetic peptide
  Seed: ANQRLNPMHQLLRHF
ANQRFNPQHPLLNHF

SEQ ID NO: 212567 - protein, 15 aa, Artificial Sequence
  Description of Artificial Sequence: Synthetic peptide
  Seed: ANQRLNPMHQLLRHF
ANQRFNPQHPLLSHF

SEQ ID NO: 212568 - protein, 15 aa, Artificial Sequence
  Description of Artificial Sequence: Synthetic peptide
  Seed: ANQRLNPMHQLLRHF
ANQRFNPQHPLLTHF

SEQ ID NO: 212569 - protein, 15 aa, Artificial Sequence
  Description of Artificial Sequence: Synthetic peptide
  Seed: ANQRLNPMHQLLRHF
ANQRFNPQHPLLVHF

SEQ ID NO: 212570 - protein, 15 aa, Artificial Sequence
  Description of Artificial Sequence: Synthetic peptide
  Seed: ANQRLNPMHQLLRHF
ANQRFNPQHRLLAHF

SEQ ID NO: 212571 - protein, 15 aa, Artificial Sequence
  Description of Artificial Sequence: Synthetic peptide
  Seed: ANQRLNPMHQLLRHF
ANQRFNPQHRLLHHF

SEQ ID NO: 212572 - protein, 15 aa, Artificial Sequence
  Description of Artificial Sequence: Synthetic peptide
  Seed: ANQRLNPMHQLLRHF
ANQRFNPQHRLLSHF

SEQ ID NO: 212573 - protein, 15 aa, Artificial Sequence
  Description of Artificial Sequence: Synthetic peptide
  Seed: ANQRLNPMHQLLRHF
ANQRFNPQHRLLTHF

SEQ ID NO: 212574 - protein, 15 aa, Artificial Sequence
  Description of Artificial Sequence: Synthetic peptide
  Seed: ANQRLNPMHQLLRHF
ANQRFNPQHSLLAHF

SEQ ID NO: 212575 - protein, 15 aa, Artificial Sequence
  Description of Artificial Sequence: Synthetic peptide
  Seed: ANQRLNPMHQLLRHF
ANQRFNPQHSLLCHF

SEQ ID NO: 212576 - protein, 15 aa, Artificial Sequence
  Description of Artificial Sequence: Synthetic peptide
  Seed: ANQRLNPMHQLLRHF
ANQRFNPQHSLLFHF

SEQ ID NO: 212577 - protein, 15 aa, Artificial Sequence
  Description of Artificial Sequence: Synthetic peptide
  Seed: ANQRLNPMHQLLRHF
ANQRFNPQHSLLGHF

SEQ ID NO: 212578 - protein, 15 aa, Artificial Sequence
  Description of Artificial Sequence: Synthetic peptide
  Seed: ANQRLNPMHQLLRHF
ANQRFNPQHSLLIHF

SEQ ID NO: 212579 - protein, 15 aa, Artificial Sequence
  Description of Artificial Sequence: Synthetic peptide
  Seed: ANQRLNPMHQLLRHF
ANQRFNPQHSLLLHF

SEQ ID NO: 212580 - protein, 15 aa, Artificial Sequence
  Description of Artificial Sequence: Synthetic peptide
  Seed: ANQRLNPMHQLLRHF
ANQRFNPQHSLLMHF

SEQ ID NO: 212581 - protein, 15 aa, Artificial Sequence
  Description of Artificial Sequence: Synthetic peptide
  Seed: ANQRLNPMHQLLRHF
ANQRFNPQHSLLNHF

SEQ ID NO: 212582 - protein, 15 aa, Artificial Sequence
  Description of Artificial Sequence: Synthetic peptide
  Seed: ANQRLNPMHQLLRHF
ANQRFNPQHSLLSHF

SEQ ID NO: 212583 - protein, 15 aa, Artificial Sequence
  Description of Artificial Sequence: Synthetic peptide
  Seed: ANQRLNPMHQLLRHF
ANQRFNPQHSLLTHF

SEQ ID NO: 212584 - protein, 15 aa, Artificial Sequence
  Description of Artificial Sequence: Synthetic peptide
  Seed: ANQRLNPMHQLLRHF
ANQRFNPQHSLLVHF

SEQ ID NO: 212585 - protein, 15 aa, Artificial Sequence
  Description of Artificial Sequence: Synthetic peptide
  Seed: ANQRLNPMHQLLRHF
ANQRFNPQHTLLAHF

SEQ ID NO: 212586 - protein, 15 aa, Artificial Sequence
  Description of Artificial Sequence: Synthetic peptide
  Seed: ANQRLNPMHQLLRHF
ANQRFNPQHTLLIHF

SEQ ID NO: 212587 - protein, 15 aa, Artificial Sequence
  Description of Artificial Sequence: Synthetic peptide
  Seed: ANQRLNPMHQLLRHF
ANQRFNPQHTLLLHF

SEQ ID NO: 212588 - protein, 15 aa, Artificial Sequence
  Description of Artificial Sequence: Synthetic peptide
  Seed: ANQRLNPMHQLLRHF
ANQRFNPQHTLLMHF

SEQ ID NO: 212589 - protein, 15 aa, Artificial Sequence
  Description of Artificial Sequence: Synthetic peptide
  Seed: ANQRLNPMHQLLRHF
ANQRFNPQHTLLNHF

SEQ ID NO: 212590 - protein, 15 aa, Artificial Sequence
  Description of Artificial Sequence: Synthetic peptide
  Seed: ANQRLNPMHQLLRHF
ANQRFNPQHTLLSHF

SEQ ID NO: 212591 - protein, 15 aa, Artificial Sequence
  Description of Artificial Sequence: Synthetic peptide
  Seed: ANQRLNPMHQLLRHF
ANQRFNPQHTLLTHF

SEQ ID NO: 212592 - protein, 15 aa, Artificial Sequence
  Description of Artificial Sequence: Synthetic peptide
  Seed: ANQRLNPMHQLLRHF
ANQRFNPQHTLLVHF

SEQ ID NO: 212593 - protein, 15 aa, Artificial Sequence
  Description of Artificial Sequence: Synthetic peptide
  Seed: ANQRLNPMHQLLRHF
ANQRFNPQHVLLAHF

SEQ ID NO: 212594 - protein, 15 aa, Artificial Sequence
  Description of Artificial Sequence: Synthetic peptide
  Seed: ANQRLNPMHQLLRHF
ANQRFNPQHVLLIHF

SEQ ID NO: 212595 - protein, 15 aa, Artificial Sequence
  Description of Artificial Sequence: Synthetic peptide
  Seed: ANQRLNPMHQLLRHF
ANQRFNPQHVLLLHF

SEQ ID NO: 212596 - protein, 15 aa, Artificial Sequence
  Description of Artificial Sequence: Synthetic peptide
  Seed: ANQRLNPMHQLLRHF
ANQRFNPQHVLLMHF

SEQ ID NO: 212597 - protein, 15 aa, Artificial Sequence
  Description of Artificial Sequence: Synthetic peptide
  Seed: ANQRLNPMHQLLRHF
ANQRFNPQHVLLNHF

SEQ ID NO: 212598 - protein, 15 aa, Artificial Sequence
  Description of Artificial Sequence: Synthetic peptide
  Seed: ANQRLNPMHQLLRHF
ANQRFNPQHVLLSHF

SEQ ID NO: 212599 - protein, 15 aa, Artificial Sequence
  Description of Artificial Sequence: Synthetic peptide
  Seed: ANQRLNPMHQLLRHF
ANQRFNPQHVLLTHF

SEQ ID NO: 212600 - protein, 15 aa, Artificial Sequence
  Description of Artificial Sequence: Synthetic peptide
  Seed: ANQRLNPMHQLLRHF
ANQRFNPQHVLLVHF

SEQ ID NO: 212601 - protein, 15 aa, Artificial Sequence
  Description of Artificial Sequence: Synthetic peptide
  Seed: ANQRLNPMHQLLRHF
ANQRFNPRHALLLHF

SEQ ID NO: 212602 - protein, 15 aa, Artificial Sequence
  Description of Artificial Sequence: Synthetic peptide
  Seed: ANQRLNPMHQLLRHF
ANQRFNPRHALLVHF

SEQ ID NO: 212603 - protein, 15 aa, Artificial Sequence
  Description of Artificial Sequence: Synthetic peptide
  Seed: ANQRLNPMHQLLRHF
ANQRFNPSHALLAHF

SEQ ID NO: 212604 - protein, 15 aa, Artificial Sequence
  Description of Artificial Sequence: Synthetic peptide
  Seed: ANQRLNPMHQLLRHF
ANQRFNPSHALLCHF

SEQ ID NO: 212605 - protein, 15 aa, Artificial Sequence
  Description of Artificial Sequence: Synthetic peptide
  Seed: ANQRLNPMHQLLRHF
ANQRFNPSHALLFHF

SEQ ID NO: 212606 - protein, 15 aa, Artificial Sequence
  Description of Artificial Sequence: Synthetic peptide
  Seed: ANQRLNPMHQLLRHF
ANQRFNPSHALLGHF

SEQ ID NO: 212607 - protein, 15 aa, Artificial Sequence
  Description of Artificial Sequence: Synthetic peptide
  Seed: ANQRLNPMHQLLRHF
ANQRFNPSHALLHHF

SEQ ID NO: 212608 - protein, 15 aa, Artificial Sequence
  Description of Artificial Sequence: Synthetic peptide
  Seed: ANQRLNPMHQLLRHF
ANQRFNPSHALLIHF

SEQ ID NO: 212609 - protein, 15 aa, Artificial Sequence
  Description of Artificial Sequence: Synthetic peptide
  Seed: ANQRLNPMHQLLRHF
ANQRFNPSHALLLHF

SEQ ID NO: 212610 - protein, 15 aa, Artificial Sequence
  Description of Artificial Sequence: Synthetic peptide
  Seed: ANQRLNPMHQLLRHF
ANQRFNPSHALLMHF

SEQ ID NO: 212611 - protein, 15 aa, Artificial Sequence
  Description of Artificial Sequence: Synthetic peptide
  Seed: ANQRLNPMHQLLRHF
ANQRFNPSHALLNHF

SEQ ID NO: 212612 - protein, 15 aa, Artificial Sequence
  Description of Artificial Sequence: Synthetic peptide
  Seed: ANQRLNPMHQLLRHF
ANQRFNPSHALLRHF

SEQ ID NO: 212613 - protein, 15 aa, Artificial Sequence
  Description of Artificial Sequence: Synthetic peptide
  Seed: ANQRLNPMHQLLRHF
ANQRFNPSHALLSHF

SEQ ID NO: 212614 - protein, 15 aa, Artificial Sequence
  Description of Artificial Sequence: Synthetic peptide
  Seed: ANQRLNPMHQLLRHF
ANQRFNPSHALLTHF

SEQ ID NO: 212615 - protein, 15 aa, Artificial Sequence
  Description of Artificial Sequence: Synthetic peptide
  Seed: ANQRLNPMHQLLRHF
ANQRFNPSHALLVHF

SEQ ID NO: 212616 - protein, 15 aa, Artificial Sequence
  Description of Artificial Sequence: Synthetic peptide
  Seed: ANQRLNPMHQLLRHF
ANQRFNPSHALLYHF

SEQ ID NO: 212617 - protein, 15 aa, Artificial Sequence
  Description of Artificial Sequence: Synthetic peptide
  Seed: ANQRLNPMHQLLRHF
ANQRFNPSHFLLAHF

SEQ ID NO: 212618 - protein, 15 aa, Artificial Sequence
  Description of Artificial Sequence: Synthetic peptide
  Seed: ANQRLNPMHQLLRHF
ANQRFNPSHFLLEHF

SEQ ID NO: 212619 - protein, 15 aa, Artificial Sequence
  Description of Artificial Sequence: Synthetic peptide
  Seed: ANQRLNPMHQLLRHF
ANQRFNPSHFLLFHF

SEQ ID NO: 212620 - protein, 15 aa, Artificial Sequence
  Description of Artificial Sequence: Synthetic peptide
  Seed: ANQRLNPMHQLLRHF
ANQRFNPSHFLLIHF

SEQ ID NO: 212621 - protein, 15 aa, Artificial Sequence
  Description of Artificial Sequence: Synthetic peptide
  Seed: ANQRLNPMHQLLRHF
ANQRFNPSHFLLLHF

SEQ ID NO: 212622 - protein, 15 aa, Artificial Sequence
  Description of Artificial Sequence: Synthetic peptide
  Seed: ANQRLNPMHQLLRHF
ANQRFNPSHFLLMHF

SEQ ID NO: 212623 - protein, 15 aa, Artificial Sequence
  Description of Artificial Sequence: Synthetic peptide
  Seed: ANQRLNPMHQLLRHF
ANQRFNPSHFLLNHF

SEQ ID NO: 212624 - protein, 15 aa, Artificial Sequence
  Description of Artificial Sequence: Synthetic peptide
  Seed: ANQRLNPMHQLLRHF
ANQRFNPSHFLLSHF

SEQ ID NO: 212625 - protein, 15 aa, Artificial Sequence
  Description of Artificial Sequence: Synthetic peptide
  Seed: ANQRLNPMHQLLRHF
ANQRFNPSHFLLTHF

SEQ ID NO: 212626 - protein, 15 aa, Artificial Sequence
  Description of Artificial Sequence: Synthetic peptide
  Seed: ANQRLNPMHQLLRHF
ANQRFNPSHFLLVHF

SEQ ID NO: 212627 - protein, 15 aa, Artificial Sequence
  Description of Artificial Sequence: Synthetic peptide
  Seed: ANQRLNPMHQLLRHF
ANQRFNPSHFLLWHF

SEQ ID NO: 212628 - protein, 15 aa, Artificial Sequence
  Description of Artificial Sequence: Synthetic peptide
  Seed: ANQRLNPMHQLLRHF
ANQRFNPSHFLLYHF

SEQ ID NO: 212629 - protein, 15 aa, Artificial Sequence
  Description of Artificial Sequence: Synthetic peptide
  Seed: ANQRLNPMHQLLRHF
ANQRFNPSHGLLAHF

SEQ ID NO: 212630 - protein, 15 aa, Artificial Sequence
  Description of Artificial Sequence: Synthetic peptide
  Seed: ANQRLNPMHQLLRHF
ANQRFNPSHGLLGHF

SEQ ID NO: 212631 - protein, 15 aa, Artificial Sequence
  Description of Artificial Sequence: Synthetic peptide
  Seed: ANQRLNPMHQLLRHF
ANQRFNPSHGLLIHF

SEQ ID NO: 212632 - protein, 15 aa, Artificial Sequence
  Description of Artificial Sequence: Synthetic peptide
  Seed: ANQRLNPMHQLLRHF
ANQRFNPSHGLLLHF

SEQ ID NO: 212633 - protein, 15 aa, Artificial Sequence
  Description of Artificial Sequence: Synthetic peptide
  Seed: ANQRLNPMHQLLRHF
ANQRFNPSHGLLMHF

SEQ ID NO: 212634 - protein, 15 aa, Artificial Sequence
  Description of Artificial Sequence: Synthetic peptide
  Seed: ANQRLNPMHQLLRHF
ANQRFNPSHGLLSHF

SEQ ID NO: 212635 - protein, 15 aa, Artificial Sequence
  Description of Artificial Sequence: Synthetic peptide
  Seed: ANQRLNPMHQLLRHF
ANQRFNPSHGLLTHF

SEQ ID NO: 212636 - protein, 15 aa, Artificial Sequence
  Description of Artificial Sequence: Synthetic peptide
  Seed: ANQRLNPMHQLLRHF
ANQRFNPSHGLLVHF

SEQ ID NO: 212637 - protein, 15 aa, Artificial Sequence
  Description of Artificial Sequence: Synthetic peptide
  Seed: ANQRLNPMHQLLRHF
ANQRFNPSHKLLAHF

SEQ ID NO: 212638 - protein, 15 aa, Artificial Sequence
  Description of Artificial Sequence: Synthetic peptide
  Seed: ANQRLNPMHQLLRHF
ANQRFNPSHKLLSHF

SEQ ID NO: 212639 - protein, 15 aa, Artificial Sequence
  Description of Artificial Sequence: Synthetic peptide
  Seed: ANQRLNPMHQLLRHF
ANQRFNPSHLLLLHF

SEQ ID NO: 212640 - protein, 15 aa, Artificial Sequence
  Description of Artificial Sequence: Synthetic peptide
  Seed: ANQRLNPMHQLLRHF
ANQRFNPSHNLLAHF

SEQ ID NO: 212641 - protein, 15 aa, Artificial Sequence
  Description of Artificial Sequence: Synthetic peptide
  Seed: ANQRLNPMHQLLRHF
ANQRFNPSHNLLIHF

SEQ ID NO: 212642 - protein, 15 aa, Artificial Sequence
  Description of Artificial Sequence: Synthetic peptide
  Seed: ANQRLNPMHQLLRHF
ANQRFNPSHNLLLHF

SEQ ID NO: 212643 - protein, 15 aa, Artificial Sequence
  Description of Artificial Sequence: Synthetic peptide
  Seed: ANQRLNPMHQLLRHF
ANQRFNPSHNLLVHF

SEQ ID NO: 212644 - protein, 15 aa, Artificial Sequence
  Description of Artificial Sequence: Synthetic peptide
  Seed: ANQRLNPMHQLLRHF
ANQRFNPSHPLLAHF

SEQ ID NO: 212645 - protein, 15 aa, Artificial Sequence
  Description of Artificial Sequence: Synthetic peptide
  Seed: ANQRLNPMHQLLRHF
ANQRFNPSHPLLIHF

SEQ ID NO: 212646 - protein, 15 aa, Artificial Sequence
  Description of Artificial Sequence: Synthetic peptide
  Seed: ANQRLNPMHQLLRHF
ANQRFNPSHPLLLHF

SEQ ID NO: 212647 - protein, 15 aa, Artificial Sequence
  Description of Artificial Sequence: Synthetic peptide
  Seed: ANQRLNPMHQLLRHF
ANQRFNPSHPLLMHF

SEQ ID NO: 212648 - protein, 15 aa, Artificial Sequence
  Description of Artificial Sequence: Synthetic peptide
  Seed: ANQRLNPMHQLLRHF
ANQRFNPSHPLLNHF

SEQ ID NO: 212649 - protein, 15 aa, Artificial Sequence
  Description of Artificial Sequence: Synthetic peptide
  Seed: ANQRLNPMHQLLRHF
ANQRFNPSHPLLSHF

SEQ ID NO: 212650 - protein, 15 aa, Artificial Sequence
  Description of Artificial Sequence: Synthetic peptide
  Seed: ANQRLNPMHQLLRHF
ANQRFNPSHPLLTHF

SEQ ID NO: 212651 - protein, 15 aa, Artificial Sequence
  Description of Artificial Sequence: Synthetic peptide
  Seed: ANQRLNPMHQLLRHF
ANQRFNPSHPLLVHF

SEQ ID NO: 212652 - protein, 15 aa, Artificial Sequence
  Description of Artificial Sequence: Synthetic peptide
  Seed: ANQRLNPMHQLLRHF
ANQRFNPSHRLLAHF

SEQ ID NO: 212653 - protein, 15 aa, Artificial Sequence
  Description of Artificial Sequence: Synthetic peptide
  Seed: ANQRLNPMHQLLRHF
ANQRFNPSHRLLGHF

SEQ ID NO: 212654 - protein, 15 aa, Artificial Sequence
  Description of Artificial Sequence: Synthetic peptide
  Seed: ANQRLNPMHQLLRHF
ANQRFNPSHRLLHHF

SEQ ID NO: 212655 - protein, 15 aa, Artificial Sequence
  Description of Artificial Sequence: Synthetic peptide
  Seed: ANQRLNPMHQLLRHF
ANQRFNPSHRLLSHF

SEQ ID NO: 212656 - protein, 15 aa, Artificial Sequence
  Description of Artificial Sequence: Synthetic peptide
  Seed: ANQRLNPMHQLLRHF
ANQRFNPSHRLLTHF

SEQ ID NO: 212657 - protein, 15 aa, Artificial Sequence
  Description of Artificial Sequence: Synthetic peptide
  Seed: ANQRLNPMHQLLRHF
ANQRFNPSHSLLAHF

SEQ ID NO: 212658 - protein, 15 aa, Artificial Sequence
  Description of Artificial Sequence: Synthetic peptide
  Seed: ANQRLNPMHQLLRHF
ANQRFNPSHSLLGHF

SEQ ID NO: 212659 - protein, 15 aa, Artificial Sequence
  Description of Artificial Sequence: Synthetic peptide
  Seed: ANQRLNPMHQLLRHF
ANQRFNPSHSLLIHF

SEQ ID NO: 212660 - protein, 15 aa, Artificial Sequence
  Description of Artificial Sequence: Synthetic peptide
  Seed: ANQRLNPMHQLLRHF
ANQRFNPSHSLLLHF

SEQ ID NO: 212661 - protein, 15 aa, Artificial Sequence
  Description of Artificial Sequence: Synthetic peptide
  Seed: ANQRLNPMHQLLRHF
ANQRFNPSHSLLMHF

SEQ ID NO: 212662 - protein, 15 aa, Artificial Sequence
  Description of Artificial Sequence: Synthetic peptide
  Seed: ANQRLNPMHQLLRHF
ANQRFNPSHSLLNHF

SEQ ID NO: 212663 - protein, 15 aa, Artificial Sequence
  Description of Artificial Sequence: Synthetic peptide
  Seed: ANQRLNPMHQLLRHF
ANQRFNPSHSLLSHF

SEQ ID NO: 212664 - protein, 15 aa, Artificial Sequence
  Description of Artificial Sequence: Synthetic peptide
  Seed: ANQRLNPMHQLLRHF
ANQRFNPSHSLLTHF

SEQ ID NO: 212665 - protein, 15 aa, Artificial Sequence
  Description of Artificial Sequence: Synthetic peptide
  Seed: ANQRLNPMHQLLRHF
ANQRFNPSHSLLVHF

SEQ ID NO: 212666 - protein, 15 aa, Artificial Sequence
  Description of Artificial Sequence: Synthetic peptide
  Seed: ANQRLNPMHQLLRHF
ANQRFNPSHTLLAHF

SEQ ID NO: 212667 - protein, 15 aa, Artificial Sequence
  Description of Artificial Sequence: Synthetic peptide
  Seed: ANQRLNPMHQLLRHF
ANQRFNPSHTLLIHF

SEQ ID NO: 212668 - protein, 15 aa, Artificial Sequence
  Description of Artificial Sequence: Synthetic peptide
  Seed: ANQRLNPMHQLLRHF
ANQRFNPSHTLLLHF

SEQ ID NO: 212669 - protein, 15 aa, Artificial Sequence
  Description of Artificial Sequence: Synthetic peptide
  Seed: ANQRLNPMHQLLRHF
ANQRFNPSHTLLMHF

SEQ ID NO: 212670 - protein, 15 aa, Artificial Sequence
  Description of Artificial Sequence: Synthetic peptide
  Seed: ANQRLNPMHQLLRHF
ANQRFNPSHTLLNHF

SEQ ID NO: 212671 - protein, 15 aa, Artificial Sequence
  Description of Artificial Sequence: Synthetic peptide
  Seed: ANQRLNPMHQLLRHF
ANQRFNPSHTLLSHF

SEQ ID NO: 212672 - protein, 15 aa, Artificial Sequence
  Description of Artificial Sequence: Synthetic peptide
  Seed: ANQRLNPMHQLLRHF
ANQRFNPSHTLLTHF

SEQ ID NO: 212673 - protein, 15 aa, Artificial Sequence
  Description of Artificial Sequence: Synthetic peptide
  Seed: ANQRLNPMHQLLRHF
ANQRFNPSHTLLVHF

SEQ ID NO: 212674 - protein, 15 aa, Artificial Sequence
  Description of Artificial Sequence: Synthetic peptide
  Seed: ANQRLNPMHQLLRHF
ANQRFNPSHVLLAHF

SEQ ID NO: 212675 - protein, 15 aa, Artificial Sequence
  Description of Artificial Sequence: Synthetic peptide
  Seed: ANQRLNPMHQLLRHF
ANQRFNPSHVLLIHF

SEQ ID NO: 212676 - protein, 15 aa, Artificial Sequence
  Description of Artificial Sequence: Synthetic peptide
  Seed: ANQRLNPMHQLLRHF
ANQRFNPSHVLLLHF

SEQ ID NO: 212677 - protein, 15 aa, Artificial Sequence
  Description of Artificial Sequence: Synthetic peptide
  Seed: ANQRLNPMHQLLRHF
ANQRFNPSHVLLNHF

SEQ ID NO: 212678 - protein, 15 aa, Artificial Sequence
  Description of Artificial Sequence: Synthetic peptide
  Seed: ANQRLNPMHQLLRHF
ANQRFNPSHVLLSHF

SEQ ID NO: 212679 - protein, 15 aa, Artificial Sequence
  Description of Artificial Sequence: Synthetic peptide
  Seed: ANQRLNPMHQLLRHF
ANQRFNPSHVLLVHF

SEQ ID NO: 212680 - protein, 15 aa, Artificial Sequence
  Description of Artificial Sequence: Synthetic peptide
  Seed: ANQRLNPMHQLLRHF
ANQRFNPSHWLLIHF

SEQ ID NO: 212681 - protein, 15 aa, Artificial Sequence
  Description of Artificial Sequence: Synthetic peptide
  Seed: ANQRLNPMHQLLRHF
ANQRFNPSHWLLLHF

SEQ ID NO: 212682 - protein, 15 aa, Artificial Sequence
  Description of Artificial Sequence: Synthetic peptide
  Seed: ANQRLNPMHQLLRHF
ANQRFNPSHYLLIHF

SEQ ID NO: 212683 - protein, 15 aa, Artificial Sequence
  Description of Artificial Sequence: Synthetic peptide
  Seed: ANQRLNPMHQLLRHF
ANQRFNPSHYLLLHF

SEQ ID NO: 212684 - protein, 15 aa, Artificial Sequence
  Description of Artificial Sequence: Synthetic peptide
  Seed: ANQRLNPMHQLLRHF
ANQRFNPSHYLLVHF

SEQ ID NO: 212685 - protein, 15 aa, Artificial Sequence
  Description of Artificial Sequence: Synthetic peptide
  Seed: ANQRLNPMHQLLRHF
ANQRFNPTHALLAHF

SEQ ID NO: 212686 - protein, 15 aa, Artificial Sequence
  Description of Artificial Sequence: Synthetic peptide
  Seed: ANQRLNPMHQLLRHF
ANQRFNPTHALLFHF

SEQ ID NO: 212687 - protein, 15 aa, Artificial Sequence
  Description of Artificial Sequence: Synthetic peptide
  Seed: ANQRLNPMHQLLRHF
ANQRFNPTHALLGHF

SEQ ID NO: 212688 - protein, 15 aa, Artificial Sequence
  Description of Artificial Sequence: Synthetic peptide
  Seed: ANQRLNPMHQLLRHF
ANQRFNPTHALLIHF

SEQ ID NO: 212689 - protein, 15 aa, Artificial Sequence
  Description of Artificial Sequence: Synthetic peptide
  Seed: ANQRLNPMHQLLRHF
ANQRFNPTHALLLHF

SEQ ID NO: 212690 - protein, 15 aa, Artificial Sequence
  Description of Artificial Sequence: Synthetic peptide
  Seed: ANQRLNPMHQLLRHF
ANQRFNPTHALLMHF

SEQ ID NO: 212691 - protein, 15 aa, Artificial Sequence
  Description of Artificial Sequence: Synthetic peptide
  Seed: ANQRLNPMHQLLRHF
ANQRFNPTHALLNHF

SEQ ID NO: 212692 - protein, 15 aa, Artificial Sequence
  Description of Artificial Sequence: Synthetic peptide
  Seed: ANQRLNPMHQLLRHF
ANQRFNPTHALLSHF

SEQ ID NO: 212693 - protein, 15 aa, Artificial Sequence
  Description of Artificial Sequence: Synthetic peptide
  Seed: ANQRLNPMHQLLRHF
ANQRFNPTHALLTHF

SEQ ID NO: 212694 - protein, 15 aa, Artificial Sequence
  Description of Artificial Sequence: Synthetic peptide
  Seed: ANQRLNPMHQLLRHF
ANQRFNPTHALLVHF

SEQ ID NO: 212695 - protein, 15 aa, Artificial Sequence
  Description of Artificial Sequence: Synthetic peptide
  Seed: ANQRLNPMHQLLRHF
ANQRFNPTHFLLAHF

SEQ ID NO: 212696 - protein, 15 aa, Artificial Sequence
  Description of Artificial Sequence: Synthetic peptide
  Seed: ANQRLNPMHQLLRHF
ANQRFNPTHFLLCHF

SEQ ID NO: 212697 - protein, 15 aa, Artificial Sequence
  Description of Artificial Sequence: Synthetic peptide
  Seed: ANQRLNPMHQLLRHF
ANQRFNPTHFLLDHF

SEQ ID NO: 212698 - protein, 15 aa, Artificial Sequence
  Description of Artificial Sequence: Synthetic peptide
  Seed: ANQRLNPMHQLLRHF
ANQRFNPTHFLLEHF

SEQ ID NO: 212699 - protein, 15 aa, Artificial Sequence
  Description of Artificial Sequence: Synthetic peptide
  Seed: ANQRLNPMHQLLRHF
ANQRFNPTHFLLFHF

SEQ ID NO: 212700 - protein, 15 aa, Artificial Sequence
  Description of Artificial Sequence: Synthetic peptide
  Seed: ANQRLNPMHQLLRHF
ANQRFNPTHFLLHHF

SEQ ID NO: 212701 - protein, 15 aa, Artificial Sequence
  Description of Artificial Sequence: Synthetic peptide
  Seed: ANQRLNPMHQLLRHF
ANQRFNPTHFLLIHF

SEQ ID NO: 212702 - protein, 15 aa, Artificial Sequence
  Description of Artificial Sequence: Synthetic peptide
  Seed: ANQRLNPMHQLLRHF
ANQRFNPTHFLLLHF

SEQ ID NO: 212703 - protein, 15 aa, Artificial Sequence
  Description of Artificial Sequence: Synthetic peptide
  Seed: ANQRLNPMHQLLRHF
ANQRFNPTHFLLMHF

SEQ ID NO: 212704 - protein, 15 aa, Artificial Sequence
  Description of Artificial Sequence: Synthetic peptide
  Seed: ANQRLNPMHQLLRHF
ANQRFNPTHFLLNHF

SEQ ID NO: 212705 - protein, 15 aa, Artificial Sequence
  Description of Artificial Sequence: Synthetic peptide
  Seed: ANQRLNPMHQLLRHF
ANQRFNPTHFLLPHF

SEQ ID NO: 212706 - protein, 15 aa, Artificial Sequence
  Description of Artificial Sequence: Synthetic peptide
  Seed: ANQRLNPMHQLLRHF
ANQRFNPTHFLLQHF

SEQ ID NO: 212707 - protein, 15 aa, Artificial Sequence
  Description of Artificial Sequence: Synthetic peptide
  Seed: ANQRLNPMHQLLRHF
ANQRFNPTHFLLSHF

SEQ ID NO: 212708 - protein, 15 aa, Artificial Sequence
  Description of Artificial Sequence: Synthetic peptide
  Seed: ANQRLNPMHQLLRHF
ANQRFNPTHFLLTHF

SEQ ID NO: 212709 - protein, 15 aa, Artificial Sequence
  Description of Artificial Sequence: Synthetic peptide
  Seed: ANQRLNPMHQLLRHF
ANQRFNPTHFLLVHF

SEQ ID NO: 212710 - protein, 15 aa, Artificial Sequence
  Description of Artificial Sequence: Synthetic peptide
  Seed: ANQRLNPMHQLLRHF
ANQRFNPTHFLLWHF

SEQ ID NO: 212711 - protein, 15 aa, Artificial Sequence
  Description of Artificial Sequence: Synthetic peptide
  Seed: ANQRLNPMHQLLRHF
ANQRFNPTHFLLYHF

SEQ ID NO: 212712 - protein, 15 aa, Artificial Sequence
  Description of Artificial Sequence: Synthetic peptide
  Seed: ANQRLNPMHQLLRHF
ANQRFNPTHGLLAHF

SEQ ID NO: 212713 - protein, 15 aa, Artificial Sequence
  Description of Artificial Sequence: Synthetic peptide
  Seed: ANQRLNPMHQLLRHF
ANQRFNPTHGLLIHF

SEQ ID NO: 212714 - protein, 15 aa, Artificial Sequence
  Description of Artificial Sequence: Synthetic peptide
  Seed: ANQRLNPMHQLLRHF
ANQRFNPTHGLLLHF

SEQ ID NO: 212715 - protein, 15 aa, Artificial Sequence
  Description of Artificial Sequence: Synthetic peptide
  Seed: ANQRLNPMHQLLRHF
ANQRFNPTHGLLMHF

SEQ ID NO: 212716 - protein, 15 aa, Artificial Sequence
  Description of Artificial Sequence: Synthetic peptide
  Seed: ANQRLNPMHQLLRHF
ANQRFNPTHGLLSHF

SEQ ID NO: 212717 - protein, 15 aa, Artificial Sequence
  Description of Artificial Sequence: Synthetic peptide
  Seed: ANQRLNPMHQLLRHF
ANQRFNPTHGLLTHF

SEQ ID NO: 212718 - protein, 15 aa, Artificial Sequence
  Description of Artificial Sequence: Synthetic peptide
  Seed: ANQRLNPMHQLLRHF
ANQRFNPTHGLLVHF

SEQ ID NO: 212719 - protein, 15 aa, Artificial Sequence
  Description of Artificial Sequence: Synthetic peptide
  Seed: ANQRLNPMHQLLRHF
ANQRFNPTHILLLHF

SEQ ID NO: 212720 - protein, 15 aa, Artificial Sequence
  Description of Artificial Sequence: Synthetic peptide
  Seed: ANQRLNPMHQLLRHF
ANQRFNPTHKLLAHF

SEQ ID NO: 212721 - protein, 15 aa, Artificial Sequence
  Description of Artificial Sequence: Synthetic peptide
  Seed: ANQRLNPMHQLLRHF
ANQRFNPTHKLLSHF

SEQ ID NO: 212722 - protein, 15 aa, Artificial Sequence
  Description of Artificial Sequence: Synthetic peptide
  Seed: ANQRLNPMHQLLRHF
ANQRFNPTHLLLFHF

SEQ ID NO: 212723 - protein, 15 aa, Artificial Sequence
  Description of Artificial Sequence: Synthetic peptide
  Seed: ANQRLNPMHQLLRHF
ANQRFNPTHLLLIHF

SEQ ID NO: 212724 - protein, 15 aa, Artificial Sequence
  Description of Artificial Sequence: Synthetic peptide
  Seed: ANQRLNPMHQLLRHF
ANQRFNPTHLLLLHF

SEQ ID NO: 212725 - protein, 15 aa, Artificial Sequence
  Description of Artificial Sequence: Synthetic peptide
  Seed: ANQRLNPMHQLLRHF
ANQRFNPTHNLLAHF

SEQ ID NO: 212726 - protein, 15 aa, Artificial Sequence
  Description of Artificial Sequence: Synthetic peptide
  Seed: ANQRLNPMHQLLRHF
ANQRFNPTHNLLIHF

SEQ ID NO: 212727 - protein, 15 aa, Artificial Sequence
  Description of Artificial Sequence: Synthetic peptide
  Seed: ANQRLNPMHQLLRHF
ANQRFNPTHNLLLHF

SEQ ID NO: 212728 - protein, 15 aa, Artificial Sequence
  Description of Artificial Sequence: Synthetic peptide
  Seed: ANQRLNPMHQLLRHF
ANQRFNPTHNLLVHF

SEQ ID NO: 212729 - protein, 15 aa, Artificial Sequence
  Description of Artificial Sequence: Synthetic peptide
  Seed: ANQRLNPMHQLLRHF
ANQRFNPTHPLLAHF

SEQ ID NO: 212730 - protein, 15 aa, Artificial Sequence
  Description of Artificial Sequence: Synthetic peptide
  Seed: ANQRLNPMHQLLRHF
ANQRFNPTHPLLIHF

SEQ ID NO: 212731 - protein, 15 aa, Artificial Sequence
  Description of Artificial Sequence: Synthetic peptide
  Seed: ANQRLNPMHQLLRHF
ANQRFNPTHPLLLHF

SEQ ID NO: 212732 - protein, 15 aa, Artificial Sequence
  Description of Artificial Sequence: Synthetic peptide
  Seed: ANQRLNPMHQLLRHF
ANQRFNPTHPLLMHF

SEQ ID NO: 212733 - protein, 15 aa, Artificial Sequence
  Description of Artificial Sequence: Synthetic peptide
  Seed: ANQRLNPMHQLLRHF
ANQRFNPTHPLLNHF

SEQ ID NO: 212734 - protein, 15 aa, Artificial Sequence
  Description of Artificial Sequence: Synthetic peptide
  Seed: ANQRLNPMHQLLRHF
ANQRFNPTHPLLSHF

SEQ ID NO: 212735 - protein, 15 aa, Artificial Sequence
  Description of Artificial Sequence: Synthetic peptide
  Seed: ANQRLNPMHQLLRHF
ANQRFNPTHPLLTHF

SEQ ID NO: 212736 - protein, 15 aa, Artificial Sequence
  Description of Artificial Sequence: Synthetic peptide
  Seed: ANQRLNPMHQLLRHF
ANQRFNPTHPLLVHF

SEQ ID NO: 212737 - protein, 15 aa, Artificial Sequence
  Description of Artificial Sequence: Synthetic peptide
  Seed: ANQRLNPMHQLLRHF
ANQRFNPTHRLLAHF

SEQ ID NO: 212738 - protein, 15 aa, Artificial Sequence
  Description of Artificial Sequence: Synthetic peptide
  Seed: ANQRLNPMHQLLRHF
ANQRFNPTHRLLGHF

SEQ ID NO: 212739 - protein, 15 aa, Artificial Sequence
  Description of Artificial Sequence: Synthetic peptide
  Seed: ANQRLNPMHQLLRHF
ANQRFNPTHRLLHHF

SEQ ID NO: 212740 - protein, 15 aa, Artificial Sequence
  Description of Artificial Sequence: Synthetic peptide
  Seed: ANQRLNPMHQLLRHF
ANQRFNPTHRLLSHF

SEQ ID NO: 212741 - protein, 15 aa, Artificial Sequence
  Description of Artificial Sequence: Synthetic peptide
  Seed: ANQRLNPMHQLLRHF
ANQRFNPTHRLLTHF

SEQ ID NO: 212742 - protein, 15 aa, Artificial Sequence
  Description of Artificial Sequence: Synthetic peptide
  Seed: ANQRLNPMHQLLRHF
ANQRFNPTHSLLAHF

SEQ ID NO: 212743 - protein, 15 aa, Artificial Sequence
  Description of Artificial Sequence: Synthetic peptide
  Seed: ANQRLNPMHQLLRHF
ANQRFNPTHSLLIHF

SEQ ID NO: 212744 - protein, 15 aa, Artificial Sequence
  Description of Artificial Sequence: Synthetic peptide
  Seed: ANQRLNPMHQLLRHF
ANQRFNPTHSLLLHF

SEQ ID NO: 212745 - protein, 15 aa, Artificial Sequence
  Description of Artificial Sequence: Synthetic peptide
  Seed: ANQRLNPMHQLLRHF
ANQRFNPTHSLLMHF

SEQ ID NO: 212746 - protein, 15 aa, Artificial Sequence
  Description of Artificial Sequence: Synthetic peptide
  Seed: ANQRLNPMHQLLRHF
ANQRFNPTHSLLNHF

SEQ ID NO: 212747 - protein, 15 aa, Artificial Sequence
  Description of Artificial Sequence: Synthetic peptide
  Seed: ANQRLNPMHQLLRHF
ANQRFNPTHSLLSHF

SEQ ID NO: 212748 - protein, 15 aa, Artificial Sequence
  Description of Artificial Sequence: Synthetic peptide
  Seed: ANQRLNPMHQLLRHF
ANQRFNPTHSLLTHF

SEQ ID NO: 212749 - protein, 15 aa, Artificial Sequence
  Description of Artificial Sequence: Synthetic peptide
  Seed: ANQRLNPMHQLLRHF
ANQRFNPTHSLLVHF

SEQ ID NO: 212750 - protein, 15 aa, Artificial Sequence
  Description of Artificial Sequence: Synthetic peptide
  Seed: ANQRLNPMHQLLRHF
ANQRFNPTHTLLAHF

SEQ ID NO: 212751 - protein, 15 aa, Artificial Sequence
  Description of Artificial Sequence: Synthetic peptide
  Seed: ANQRLNPMHQLLRHF
ANQRFNPTHTLLIHF

SEQ ID NO: 212752 - protein, 15 aa, Artificial Sequence
  Description of Artificial Sequence: Synthetic peptide
  Seed: ANQRLNPMHQLLRHF
ANQRFNPTHTLLLHF

SEQ ID NO: 212753 - protein, 15 aa, Artificial Sequence
  Description of Artificial Sequence: Synthetic peptide
  Seed: ANQRLNPMHQLLRHF
ANQRFNPTHTLLVHF

SEQ ID NO: 212754 - protein, 15 aa, Artificial Sequence
  Description of Artificial Sequence: Synthetic peptide
  Seed: ANQRLNPMHQLLRHF
ANQRFNPTHVLLAHF

SEQ ID NO: 212755 - protein, 15 aa, Artificial Sequence
  Description of Artificial Sequence: Synthetic peptide
  Seed: ANQRLNPMHQLLRHF
ANQRFNPTHVLLVHF

SEQ ID NO: 212756 - protein, 15 aa, Artificial Sequence
  Description of Artificial Sequence: Synthetic peptide
  Seed: ANQRLNPMHQLLRHF
ANQRFNPTHWLLFHF

SEQ ID NO: 212757 - protein, 15 aa, Artificial Sequence
  Description of Artificial Sequence: Synthetic peptide
  Seed: ANQRLNPMHQLLRHF
ANQRFNPTHWLLIHF

SEQ ID NO: 212758 - protein, 15 aa, Artificial Sequence
  Description of Artificial Sequence: Synthetic peptide
  Seed: ANQRLNPMHQLLRHF
ANQRFNPTHWLLLHF

SEQ ID NO: 212759 - protein, 15 aa, Artificial Sequence
  Description of Artificial Sequence: Synthetic peptide
  Seed: ANQRLNPMHQLLRHF
ANQRFNPTHWLLMHF

SEQ ID NO: 212760 - protein, 15 aa, Artificial Sequence
  Description of Artificial Sequence: Synthetic peptide
  Seed: ANQRLNPMHQLLRHF
ANQRFNPTHWLLVHF

SEQ ID NO: 212761 - protein, 15 aa, Artificial Sequence
  Description of Artificial Sequence: Synthetic peptide
  Seed: ANQRLNPMHQLLRHF
ANQRFNPTHYLLFHF

SEQ ID NO: 212762 - protein, 15 aa, Artificial Sequence
  Description of Artificial Sequence: Synthetic peptide
  Seed: ANQRLNPMHQLLRHF
ANQRFNPTHYLLIHF

SEQ ID NO: 212763 - protein, 15 aa, Artificial Sequence
  Description of Artificial Sequence: Synthetic peptide
  Seed: ANQRLNPMHQLLRHF
ANQRFNPTHYLLLHF

SEQ ID NO: 212764 - protein, 15 aa, Artificial Sequence
  Description of Artificial Sequence: Synthetic peptide
  Seed: ANQRLNPMHQLLRHF
ANQRFNPTHYLLMHF

SEQ ID NO: 212765 - protein, 15 aa, Artificial Sequence
  Description of Artificial Sequence: Synthetic peptide
  Seed: ANQRLNPMHQLLRHF
ANQRFNPTHYLLVHF

SEQ ID NO: 212766 - protein, 15 aa, Artificial Sequence
  Description of Artificial Sequence: Synthetic peptide
  Seed: ANQRLNPMHQLLRHF
ANQRFNPVHALLAHF

SEQ ID NO: 212767 - protein, 15 aa, Artificial Sequence
  Description of Artificial Sequence: Synthetic peptide
  Seed: ANQRLNPMHQLLRHF
ANQRFNPVHALLCHF

SEQ ID NO: 212768 - protein, 15 aa, Artificial Sequence
  Description of Artificial Sequence: Synthetic peptide
  Seed: ANQRLNPMHQLLRHF
ANQRFNPVHALLFHF

SEQ ID NO: 212769 - protein, 15 aa, Artificial Sequence
  Description of Artificial Sequence: Synthetic peptide
  Seed: ANQRLNPMHQLLRHF
ANQRFNPVHALLGHF

SEQ ID NO: 212770 - protein, 15 aa, Artificial Sequence
  Description of Artificial Sequence: Synthetic peptide
  Seed: ANQRLNPMHQLLRHF
ANQRFNPVHALLHHF

SEQ ID NO: 212771 - protein, 15 aa, Artificial Sequence
  Description of Artificial Sequence: Synthetic peptide
  Seed: ANQRLNPMHQLLRHF
ANQRFNPVHALLIHF

SEQ ID NO: 212772 - protein, 15 aa, Artificial Sequence
  Description of Artificial Sequence: Synthetic peptide
  Seed: ANQRLNPMHQLLRHF
ANQRFNPVHALLKHF

SEQ ID NO: 212773 - protein, 15 aa, Artificial Sequence
  Description of Artificial Sequence: Synthetic peptide
  Seed: ANQRLNPMHQLLRHF
ANQRFNPVHALLLHF

SEQ ID NO: 212774 - protein, 15 aa, Artificial Sequence
  Description of Artificial Sequence: Synthetic peptide
  Seed: ANQRLNPMHQLLRHF
ANQRFNPVHALLMHF

SEQ ID NO: 212775 - protein, 15 aa, Artificial Sequence
  Description of Artificial Sequence: Synthetic peptide
  Seed: ANQRLNPMHQLLRHF
ANQRFNPVHALLNHF

SEQ ID NO: 212776 - protein, 15 aa, Artificial Sequence
  Description of Artificial Sequence: Synthetic peptide
  Seed: ANQRLNPMHQLLRHF
ANQRFNPVHALLPHF

SEQ ID NO: 212777 - protein, 15 aa, Artificial Sequence
  Description of Artificial Sequence: Synthetic peptide
  Seed: ANQRLNPMHQLLRHF
ANQRFNPVHALLQHF

SEQ ID NO: 212778 - protein, 15 aa, Artificial Sequence
  Description of Artificial Sequence: Synthetic peptide
  Seed: ANQRLNPMHQLLRHF
ANQRFNPVHALLRHF

SEQ ID NO: 212779 - protein, 15 aa, Artificial Sequence
  Description of Artificial Sequence: Synthetic peptide
  Seed: ANQRLNPMHQLLRHF
ANQRFNPVHALLSHF

SEQ ID NO: 212780 - protein, 15 aa, Artificial Sequence
  Description of Artificial Sequence: Synthetic peptide
  Seed: ANQRLNPMHQLLRHF
ANQRFNPVHALLTHF

SEQ ID NO: 212781 - protein, 15 aa, Artificial Sequence
  Description of Artificial Sequence: Synthetic peptide
  Seed: ANQRLNPMHQLLRHF
ANQRFNPVHALLVHF

SEQ ID NO: 212782 - protein, 15 aa, Artificial Sequence
  Description of Artificial Sequence: Synthetic peptide
  Seed: ANQRLNPMHQLLRHF
ANQRFNPVHFLLAHF

SEQ ID NO: 212783 - protein, 15 aa, Artificial Sequence
  Description of Artificial Sequence: Synthetic peptide
  Seed: ANQRLNPMHQLLRHF
ANQRFNPVHFLLCHF

SEQ ID NO: 212784 - protein, 15 aa, Artificial Sequence
  Description of Artificial Sequence: Synthetic peptide
  Seed: ANQRLNPMHQLLRHF
ANQRFNPVHFLLDHF

SEQ ID NO: 212785 - protein, 15 aa, Artificial Sequence
  Description of Artificial Sequence: Synthetic peptide
  Seed: ANQRLNPMHQLLRHF
ANQRFNPVHFLLEHF

SEQ ID NO: 212786 - protein, 15 aa, Artificial Sequence
  Description of Artificial Sequence: Synthetic peptide
  Seed: ANQRLNPMHQLLRHF
ANQRFNPVHFLLFHF

SEQ ID NO: 212787 - protein, 15 aa, Artificial Sequence
  Description of Artificial Sequence: Synthetic peptide
  Seed: ANQRLNPMHQLLRHF
ANQRFNPVHFLLHHF

SEQ ID NO: 212788 - protein, 15 aa, Artificial Sequence
  Description of Artificial Sequence: Synthetic peptide
  Seed: ANQRLNPMHQLLRHF
ANQRFNPVHFLLIHF

SEQ ID NO: 212789 - protein, 15 aa, Artificial Sequence
  Description of Artificial Sequence: Synthetic peptide
  Seed: ANQRLNPMHQLLRHF
ANQRFNPVHFLLLHF

SEQ ID NO: 212790 - protein, 15 aa, Artificial Sequence
  Description of Artificial Sequence: Synthetic peptide
  Seed: ANQRLNPMHQLLRHF
ANQRFNPVHFLLMHF

SEQ ID NO: 212791 - protein, 15 aa, Artificial Sequence
  Description of Artificial Sequence: Synthetic peptide
  Seed: ANQRLNPMHQLLRHF
ANQRFNPVHFLLNHF

SEQ ID NO: 212792 - protein, 15 aa, Artificial Sequence
  Description of Artificial Sequence: Synthetic peptide
  Seed: ANQRLNPMHQLLRHF
ANQRFNPVHFLLPHF

SEQ ID NO: 212793 - protein, 15 aa, Artificial Sequence
  Description of Artificial Sequence: Synthetic peptide
  Seed: ANQRLNPMHQLLRHF
ANQRFNPVHFLLQHF

SEQ ID NO: 212794 - protein, 15 aa, Artificial Sequence
  Description of Artificial Sequence: Synthetic peptide
  Seed: ANQRLNPMHQLLRHF
ANQRFNPVHFLLRHF

SEQ ID NO: 212795 - protein, 15 aa, Artificial Sequence
  Description of Artificial Sequence: Synthetic peptide
  Seed: ANQRLNPMHQLLRHF
ANQRFNPVHFLLSHF

SEQ ID NO: 212796 - protein, 15 aa, Artificial Sequence
  Description of Artificial Sequence: Synthetic peptide
  Seed: ANQRLNPMHQLLRHF
ANQRFNPVHFLLTHF

SEQ ID NO: 212797 - protein, 15 aa, Artificial Sequence
  Description of Artificial Sequence: Synthetic peptide
  Seed: ANQRLNPMHQLLRHF
ANQRFNPVHFLLVHF

SEQ ID NO: 212798 - protein, 15 aa, Artificial Sequence
  Description of Artificial Sequence: Synthetic peptide
  Seed: ANQRLNPMHQLLRHF
ANQRFNPVHFLLWHF

SEQ ID NO: 212799 - protein, 15 aa, Artificial Sequence
  Description of Artificial Sequence: Synthetic peptide
  Seed: ANQRLNPMHQLLRHF
ANQRFNPVHFLLYHF

SEQ ID NO: 212800 - protein, 15 aa, Artificial Sequence
  Description of Artificial Sequence: Synthetic peptide
  Seed: ANQRLNPMHQLLRHF
ANQRFNPVHGLLAHF

SEQ ID NO: 212801 - protein, 15 aa, Artificial Sequence
  Description of Artificial Sequence: Synthetic peptide
  Seed: ANQRLNPMHQLLRHF
ANQRFNPVHGLLCHF

SEQ ID NO: 212802 - protein, 15 aa, Artificial Sequence
  Description of Artificial Sequence: Synthetic peptide
  Seed: ANQRLNPMHQLLRHF
ANQRFNPVHGLLFHF

SEQ ID NO: 212803 - protein, 15 aa, Artificial Sequence
  Description of Artificial Sequence: Synthetic peptide
  Seed: ANQRLNPMHQLLRHF
ANQRFNPVHGLLGHF

SEQ ID NO: 212804 - protein, 15 aa, Artificial Sequence
  Description of Artificial Sequence: Synthetic peptide
  Seed: ANQRLNPMHQLLRHF
ANQRFNPVHGLLIHF

SEQ ID NO: 212805 - protein, 15 aa, Artificial Sequence
  Description of Artificial Sequence: Synthetic peptide
  Seed: ANQRLNPMHQLLRHF
ANQRFNPVHGLLLHF

SEQ ID NO: 212806 - protein, 15 aa, Artificial Sequence
  Description of Artificial Sequence: Synthetic peptide
  Seed: ANQRLNPMHQLLRHF
ANQRFNPVHGLLMHF

SEQ ID NO: 212807 - protein, 15 aa, Artificial Sequence
  Description of Artificial Sequence: Synthetic peptide
  Seed: ANQRLNPMHQLLRHF
ANQRFNPVHGLLNHF

SEQ ID NO: 212808 - protein, 15 aa, Artificial Sequence
  Description of Artificial Sequence: Synthetic peptide
  Seed: ANQRLNPMHQLLRHF
ANQRFNPVHGLLSHF

SEQ ID NO: 212809 - protein, 15 aa, Artificial Sequence
  Description of Artificial Sequence: Synthetic peptide
  Seed: ANQRLNPMHQLLRHF
ANQRFNPVHGLLTHF

SEQ ID NO: 212810 - protein, 15 aa, Artificial Sequence
  Description of Artificial Sequence: Synthetic peptide
  Seed: ANQRLNPMHQLLRHF
ANQRFNPVHGLLVHF

SEQ ID NO: 212811 - protein, 15 aa, Artificial Sequence
  Description of Artificial Sequence: Synthetic peptide
  Seed: ANQRLNPMHQLLRHF
ANQRFNPVHILLAHF

SEQ ID NO: 212812 - protein, 15 aa, Artificial Sequence
  Description of Artificial Sequence: Synthetic peptide
  Seed: ANQRLNPMHQLLRHF
ANQRFNPVHILLIHF

SEQ ID NO: 212813 - protein, 15 aa, Artificial Sequence
  Description of Artificial Sequence: Synthetic peptide
  Seed: ANQRLNPMHQLLRHF
ANQRFNPVHILLLHF

SEQ ID NO: 212814 - protein, 15 aa, Artificial Sequence
  Description of Artificial Sequence: Synthetic peptide
  Seed: ANQRLNPMHQLLRHF
ANQRFNPVHILLNHF

SEQ ID NO: 212815 - protein, 15 aa, Artificial Sequence
  Description of Artificial Sequence: Synthetic peptide
  Seed: ANQRLNPMHQLLRHF
ANQRFNPVHILLSHF

SEQ ID NO: 212816 - protein, 15 aa, Artificial Sequence
  Description of Artificial Sequence: Synthetic peptide
  Seed: ANQRLNPMHQLLRHF
ANQRFNPVHILLVHF

SEQ ID NO: 212817 - protein, 15 aa, Artificial Sequence
  Description of Artificial Sequence: Synthetic peptide
  Seed: ANQRLNPMHQLLRHF
ANQRFNPVHKLLAHF

SEQ ID NO: 212818 - protein, 15 aa, Artificial Sequence
  Description of Artificial Sequence: Synthetic peptide
  Seed: ANQRLNPMHQLLRHF
ANQRFNPVHKLLGHF

SEQ ID NO: 212819 - protein, 15 aa, Artificial Sequence
  Description of Artificial Sequence: Synthetic peptide
  Seed: ANQRLNPMHQLLRHF
ANQRFNPVHKLLHHF

SEQ ID NO: 212820 - protein, 15 aa, Artificial Sequence
  Description of Artificial Sequence: Synthetic peptide
  Seed: ANQRLNPMHQLLRHF
ANQRFNPVHKLLKHF

SEQ ID NO: 212821 - protein, 15 aa, Artificial Sequence
  Description of Artificial Sequence: Synthetic peptide
  Seed: ANQRLNPMHQLLRHF
ANQRFNPVHKLLMHF

SEQ ID NO: 212822 - protein, 15 aa, Artificial Sequence
  Description of Artificial Sequence: Synthetic peptide
  Seed: ANQRLNPMHQLLRHF
ANQRFNPVHKLLNHF

SEQ ID NO: 212823 - protein, 15 aa, Artificial Sequence
  Description of Artificial Sequence: Synthetic peptide
  Seed: ANQRLNPMHQLLRHF
ANQRFNPVHKLLPHF

SEQ ID NO: 212824 - protein, 15 aa, Artificial Sequence
  Description of Artificial Sequence: Synthetic peptide
  Seed: ANQRLNPMHQLLRHF
ANQRFNPVHKLLQHF

SEQ ID NO: 212825 - protein, 15 aa, Artificial Sequence
  Description of Artificial Sequence: Synthetic peptide
  Seed: ANQRLNPMHQLLRHF
ANQRFNPVHKLLSHF

SEQ ID NO: 212826 - protein, 15 aa, Artificial Sequence
  Description of Artificial Sequence: Synthetic peptide
  Seed: ANQRLNPMHQLLRHF
ANQRFNPVHKLLTHF

SEQ ID NO: 212827 - protein, 15 aa, Artificial Sequence
  Description of Artificial Sequence: Synthetic peptide
  Seed: ANQRLNPMHQLLRHF
ANQRFNPVHKLLVHF

SEQ ID NO: 212828 - protein, 15 aa, Artificial Sequence
  Description of Artificial Sequence: Synthetic peptide
  Seed: ANQRLNPMHQLLRHF
ANQRFNPVHLLLIHF

SEQ ID NO: 212829 - protein, 15 aa, Artificial Sequence
  Description of Artificial Sequence: Synthetic peptide
  Seed: ANQRLNPMHQLLRHF
ANQRFNPVHLLLLHF

SEQ ID NO: 212830 - protein, 15 aa, Artificial Sequence
  Description of Artificial Sequence: Synthetic peptide
  Seed: ANQRLNPMHQLLRHF
ANQRFNPVHLLLMHF

SEQ ID NO: 212831 - protein, 15 aa, Artificial Sequence
  Description of Artificial Sequence: Synthetic peptide
  Seed: ANQRLNPMHQLLRHF
ANQRFNPVHLLLVHF

SEQ ID NO: 212832 - protein, 15 aa, Artificial Sequence
  Description of Artificial Sequence: Synthetic peptide
  Seed: ANQRLNPMHQLLRHF
ANQRFNPVHMLLLHF

SEQ ID NO: 212833 - protein, 15 aa, Artificial Sequence
  Description of Artificial Sequence: Synthetic peptide
  Seed: ANQRLNPMHQLLRHF
ANQRFNPVHNLLAHF

SEQ ID NO: 212834 - protein, 15 aa, Artificial Sequence
  Description of Artificial Sequence: Synthetic peptide
  Seed: ANQRLNPMHQLLRHF
ANQRFNPVHNLLGHF

SEQ ID NO: 212835 - protein, 15 aa, Artificial Sequence
  Description of Artificial Sequence: Synthetic peptide
  Seed: ANQRLNPMHQLLRHF
ANQRFNPVHNLLIHF

SEQ ID NO: 212836 - protein, 15 aa, Artificial Sequence
  Description of Artificial Sequence: Synthetic peptide
  Seed: ANQRLNPMHQLLRHF
ANQRFNPVHNLLLHF

SEQ ID NO: 212837 - protein, 15 aa, Artificial Sequence
  Description of Artificial Sequence: Synthetic peptide
  Seed: ANQRLNPMHQLLRHF
ANQRFNPVHNLLMHF

SEQ ID NO: 212838 - protein, 15 aa, Artificial Sequence
  Description of Artificial Sequence: Synthetic peptide
  Seed: ANQRLNPMHQLLRHF
ANQRFNPVHNLLNHF

SEQ ID NO: 212839 - protein, 15 aa, Artificial Sequence
  Description of Artificial Sequence: Synthetic peptide
  Seed: ANQRLNPMHQLLRHF
ANQRFNPVHNLLSHF

SEQ ID NO: 212840 - protein, 15 aa, Artificial Sequence
  Description of Artificial Sequence: Synthetic peptide
  Seed: ANQRLNPMHQLLRHF
ANQRFNPVHNLLTHF

SEQ ID NO: 212841 - protein, 15 aa, Artificial Sequence
  Description of Artificial Sequence: Synthetic peptide
  Seed: ANQRLNPMHQLLRHF
ANQRFNPVHNLLVHF

SEQ ID NO: 212842 - protein, 15 aa, Artificial Sequence
  Description of Artificial Sequence: Synthetic peptide
  Seed: ANQRLNPMHQLLRHF
ANQRFNPVHPLLAHF

SEQ ID NO: 212843 - protein, 15 aa, Artificial Sequence
  Description of Artificial Sequence: Synthetic peptide
  Seed: ANQRLNPMHQLLRHF
ANQRFNPVHPLLGHF

SEQ ID NO: 212844 - protein, 15 aa, Artificial Sequence
  Description of Artificial Sequence: Synthetic peptide
  Seed: ANQRLNPMHQLLRHF
ANQRFNPVHPLLHHF

SEQ ID NO: 212845 - protein, 15 aa, Artificial Sequence
  Description of Artificial Sequence: Synthetic peptide
  Seed: ANQRLNPMHQLLRHF
ANQRFNPVHPLLIHF

SEQ ID NO: 212846 - protein, 15 aa, Artificial Sequence
  Description of Artificial Sequence: Synthetic peptide
  Seed: ANQRLNPMHQLLRHF
ANQRFNPVHPLLLHF

SEQ ID NO: 212847 - protein, 15 aa, Artificial Sequence
  Description of Artificial Sequence: Synthetic peptide
  Seed: ANQRLNPMHQLLRHF
ANQRFNPVHPLLMHF

SEQ ID NO: 212848 - protein, 15 aa, Artificial Sequence
  Description of Artificial Sequence: Synthetic peptide
  Seed: ANQRLNPMHQLLRHF
ANQRFNPVHPLLNHF

SEQ ID NO: 212849 - protein, 15 aa, Artificial Sequence
  Description of Artificial Sequence: Synthetic peptide
  Seed: ANQRLNPMHQLLRHF
ANQRFNPVHPLLSHF

SEQ ID NO: 212850 - protein, 15 aa, Artificial Sequence
  Description of Artificial Sequence: Synthetic peptide
  Seed: ANQRLNPMHQLLRHF
ANQRFNPVHPLLTHF

SEQ ID NO: 212851 - protein, 15 aa, Artificial Sequence
  Description of Artificial Sequence: Synthetic peptide
  Seed: ANQRLNPMHQLLRHF
ANQRFNPVHPLLVHF

SEQ ID NO: 212852 - protein, 15 aa, Artificial Sequence
  Description of Artificial Sequence: Synthetic peptide
  Seed: ANQRLNPMHQLLRHF
ANQRFNPVHRLLAHF

SEQ ID NO: 212853 - protein, 15 aa, Artificial Sequence
  Description of Artificial Sequence: Synthetic peptide
  Seed: ANQRLNPMHQLLRHF
ANQRFNPVHRLLGHF

SEQ ID NO: 212854 - protein, 15 aa, Artificial Sequence
  Description of Artificial Sequence: Synthetic peptide
  Seed: ANQRLNPMHQLLRHF
ANQRFNPVHRLLHHF

SEQ ID NO: 212855 - protein, 15 aa, Artificial Sequence
  Description of Artificial Sequence: Synthetic peptide
  Seed: ANQRLNPMHQLLRHF
ANQRFNPVHRLLIHF

SEQ ID NO: 212856 - protein, 15 aa, Artificial Sequence
  Description of Artificial Sequence: Synthetic peptide
  Seed: ANQRLNPMHQLLRHF
ANQRFNPVHRLLKHF

SEQ ID NO: 212857 - protein, 15 aa, Artificial Sequence
  Description of Artificial Sequence: Synthetic peptide
  Seed: ANQRLNPMHQLLRHF
ANQRFNPVHRLLLHF

SEQ ID NO: 212858 - protein, 15 aa, Artificial Sequence
  Description of Artificial Sequence: Synthetic peptide
  Seed: ANQRLNPMHQLLRHF
ANQRFNPVHRLLMHF

SEQ ID NO: 212859 - protein, 15 aa, Artificial Sequence
  Description of Artificial Sequence: Synthetic peptide
  Seed: ANQRLNPMHQLLRHF
ANQRFNPVHRLLNHF

SEQ ID NO: 212860 - protein, 15 aa, Artificial Sequence
  Description of Artificial Sequence: Synthetic peptide
  Seed: ANQRLNPMHQLLRHF
ANQRFNPVHRLLPHF

SEQ ID NO: 212861 - protein, 15 aa, Artificial Sequence
  Description of Artificial Sequence: Synthetic peptide
  Seed: ANQRLNPMHQLLRHF
ANQRFNPVHRLLQHF

SEQ ID NO: 212862 - protein, 15 aa, Artificial Sequence
  Description of Artificial Sequence: Synthetic peptide
  Seed: ANQRLNPMHQLLRHF
ANQRFNPVHRLLRHF

SEQ ID NO: 212863 - protein, 15 aa, Artificial Sequence
  Description of Artificial Sequence: Synthetic peptide
  Seed: ANQRLNPMHQLLRHF
ANQRFNPVHRLLSHF

SEQ ID NO: 212864 - protein, 15 aa, Artificial Sequence
  Description of Artificial Sequence: Synthetic peptide
  Seed: ANQRLNPMHQLLRHF
ANQRFNPVHRLLTHF

SEQ ID NO: 212865 - protein, 15 aa, Artificial Sequence
  Description of Artificial Sequence: Synthetic peptide
  Seed: ANQRLNPMHQLLRHF
ANQRFNPVHRLLVHF

SEQ ID NO: 212866 - protein, 15 aa, Artificial Sequence
  Description of Artificial Sequence: Synthetic peptide
  Seed: ANQRLNPMHQLLRHF
ANQRFNPVHSLLAHF

SEQ ID NO: 212867 - protein, 15 aa, Artificial Sequence
  Description of Artificial Sequence: Synthetic peptide
  Seed: ANQRLNPMHQLLRHF
ANQRFNPVHSLLCHF

SEQ ID NO: 212868 - protein, 15 aa, Artificial Sequence
  Description of Artificial Sequence: Synthetic peptide
  Seed: ANQRLNPMHQLLRHF
ANQRFNPVHSLLFHF

SEQ ID NO: 212869 - protein, 15 aa, Artificial Sequence
  Description of Artificial Sequence: Synthetic peptide
  Seed: ANQRLNPMHQLLRHF
ANQRFNPVHSLLGHF

SEQ ID NO: 212870 - protein, 15 aa, Artificial Sequence
  Description of Artificial Sequence: Synthetic peptide
  Seed: ANQRLNPMHQLLRHF
ANQRFNPVHSLLHHF

SEQ ID NO: 212871 - protein, 15 aa, Artificial Sequence
  Description of Artificial Sequence: Synthetic peptide
  Seed: ANQRLNPMHQLLRHF
ANQRFNPVHSLLIHF

SEQ ID NO: 212872 - protein, 15 aa, Artificial Sequence
  Description of Artificial Sequence: Synthetic peptide
  Seed: ANQRLNPMHQLLRHF
ANQRFNPVHSLLLHF

SEQ ID NO: 212873 - protein, 15 aa, Artificial Sequence
  Description of Artificial Sequence: Synthetic peptide
  Seed: ANQRLNPMHQLLRHF
ANQRFNPVHSLLMHF

SEQ ID NO: 212874 - protein, 15 aa, Artificial Sequence
  Description of Artificial Sequence: Synthetic peptide
  Seed: ANQRLNPMHQLLRHF
ANQRFNPVHSLLNHF

SEQ ID NO: 212875 - protein, 15 aa, Artificial Sequence
  Description of Artificial Sequence: Synthetic peptide
  Seed: ANQRLNPMHQLLRHF
ANQRFNPVHSLLSHF

SEQ ID NO: 212876 - protein, 15 aa, Artificial Sequence
  Description of Artificial Sequence: Synthetic peptide
  Seed: ANQRLNPMHQLLRHF
ANQRFNPVHSLLTHF

SEQ ID NO: 212877 - protein, 15 aa, Artificial Sequence
  Description of Artificial Sequence: Synthetic peptide
  Seed: ANQRLNPMHQLLRHF
ANQRFNPVHSLLVHF

SEQ ID NO: 212878 - protein, 15 aa, Artificial Sequence
  Description of Artificial Sequence: Synthetic peptide
  Seed: ANQRLNPMHQLLRHF
ANQRFNPVHTLLAHF

SEQ ID NO: 212879 - protein, 15 aa, Artificial Sequence
  Description of Artificial Sequence: Synthetic peptide
  Seed: ANQRLNPMHQLLRHF
ANQRFNPVHTLLGHF

SEQ ID NO: 212880 - protein, 15 aa, Artificial Sequence
  Description of Artificial Sequence: Synthetic peptide
  Seed: ANQRLNPMHQLLRHF
ANQRFNPVHTLLHHF

SEQ ID NO: 212881 - protein, 15 aa, Artificial Sequence
  Description of Artificial Sequence: Synthetic peptide
  Seed: ANQRLNPMHQLLRHF
ANQRFNPVHTLLIHF

SEQ ID NO: 212882 - protein, 15 aa, Artificial Sequence
  Description of Artificial Sequence: Synthetic peptide
  Seed: ANQRLNPMHQLLRHF
ANQRFNPVHTLLLHF

SEQ ID NO: 212883 - protein, 15 aa, Artificial Sequence
  Description of Artificial Sequence: Synthetic peptide
  Seed: ANQRLNPMHQLLRHF
ANQRFNPVHTLLMHF

SEQ ID NO: 212884 - protein, 15 aa, Artificial Sequence
  Description of Artificial Sequence: Synthetic peptide
  Seed: ANQRLNPMHQLLRHF
ANQRFNPVHTLLNHF

SEQ ID NO: 212885 - protein, 15 aa, Artificial Sequence
  Description of Artificial Sequence: Synthetic peptide
  Seed: ANQRLNPMHQLLRHF
ANQRFNPVHTLLSHF

SEQ ID NO: 212886 - protein, 15 aa, Artificial Sequence
  Description of Artificial Sequence: Synthetic peptide
  Seed: ANQRLNPMHQLLRHF
ANQRFNPVHTLLTHF

SEQ ID NO: 212887 - protein, 15 aa, Artificial Sequence
  Description of Artificial Sequence: Synthetic peptide
  Seed: ANQRLNPMHQLLRHF
ANQRFNPVHTLLVHF

SEQ ID NO: 212888 - protein, 15 aa, Artificial Sequence
  Description of Artificial Sequence: Synthetic peptide
  Seed: ANQRLNPMHQLLRHF
ANQRFNPVHVLLAHF

SEQ ID NO: 212889 - protein, 15 aa, Artificial Sequence
  Description of Artificial Sequence: Synthetic peptide
  Seed: ANQRLNPMHQLLRHF
ANQRFNPVHVLLHHF

SEQ ID NO: 212890 - protein, 15 aa, Artificial Sequence
  Description of Artificial Sequence: Synthetic peptide
  Seed: ANQRLNPMHQLLRHF
ANQRFNPVHVLLIHF

SEQ ID NO: 212891 - protein, 15 aa, Artificial Sequence
  Description of Artificial Sequence: Synthetic peptide
  Seed: ANQRLNPMHQLLRHF
ANQRFNPVHVLLLHF

SEQ ID NO: 212892 - protein, 15 aa, Artificial Sequence
  Description of Artificial Sequence: Synthetic peptide
  Seed: ANQRLNPMHQLLRHF
ANQRFNPVHVLLMHF

SEQ ID NO: 212893 - protein, 15 aa, Artificial Sequence
  Description of Artificial Sequence: Synthetic peptide
  Seed: ANQRLNPMHQLLRHF
ANQRFNPVHVLLNHF

SEQ ID NO: 212894 - protein, 15 aa, Artificial Sequence
  Description of Artificial Sequence: Synthetic peptide
  Seed: ANQRLNPMHQLLRHF
ANQRFNPVHVLLSHF

SEQ ID NO: 212895 - protein, 15 aa, Artificial Sequence
  Description of Artificial Sequence: Synthetic peptide
  Seed: ANQRLNPMHQLLRHF
ANQRFNPVHVLLTHF

SEQ ID NO: 212896 - protein, 15 aa, Artificial Sequence
  Description of Artificial Sequence: Synthetic peptide
  Seed: ANQRLNPMHQLLRHF
ANQRFNPVHVLLVHF

SEQ ID NO: 212897 - protein, 15 aa, Artificial Sequence
  Description of Artificial Sequence: Synthetic peptide
  Seed: ANQRLNPMHQLLRHF
ANQRFNPVHWLLFHF

SEQ ID NO: 212898 - protein, 15 aa, Artificial Sequence
  Description of Artificial Sequence: Synthetic peptide
  Seed: ANQRLNPMHQLLRHF
ANQRFNPVHWLLIHF

SEQ ID NO: 212899 - protein, 15 aa, Artificial Sequence
  Description of Artificial Sequence: Synthetic peptide
  Seed: ANQRLNPMHQLLRHF
ANQRFNPVHWLLLHF

SEQ ID NO: 212900 - protein, 15 aa, Artificial Sequence
  Description of Artificial Sequence: Synthetic peptide
  Seed: ANQRLNPMHQLLRHF
ANQRFNPVHWLLMHF

SEQ ID NO: 212901 - protein, 15 aa, Artificial Sequence
  Description of Artificial Sequence: Synthetic peptide
  Seed: ANQRLNPMHQLLRHF
ANQRFNPVHWLLVHF

SEQ ID NO: 212902 - protein, 15 aa, Artificial Sequence
  Description of Artificial Sequence: Synthetic peptide
  Seed: ANQRLNPMHQLLRHF
ANQRFNPVHYLLFHF

SEQ ID NO: 212903 - protein, 15 aa, Artificial Sequence
  Description of Artificial Sequence: Synthetic peptide
  Seed: ANQRLNPMHQLLRHF
ANQRFNPVHYLLIHF

SEQ ID NO: 212904 - protein, 15 aa, Artificial Sequence
  Description of Artificial Sequence: Synthetic peptide
  Seed: ANQRLNPMHQLLRHF
ANQRFNPVHYLLLHF

SEQ ID NO: 212905 - protein, 15 aa, Artificial Sequence
  Description of Artificial Sequence: Synthetic peptide
  Seed: ANQRLNPMHQLLRHF
ANQRFNPVHYLLMHF

SEQ ID NO: 212906 - protein, 15 aa, Artificial Sequence
  Description of Artificial Sequence: Synthetic peptide
  Seed: ANQRLNPMHQLLRHF
ANQRFNPVHYLLVHF

SEQ ID NO: 212907 - protein, 15 aa, Artificial Sequence
  Description of Artificial Sequence: Synthetic peptide
  Seed: ANQRLNPMHQLLRHF
ANQRFNPWHALLAHF

SEQ ID NO: 212908 - protein, 15 aa, Artificial Sequence
  Description of Artificial Sequence: Synthetic peptide
  Seed: ANQRLNPMHQLLRHF
ANQRFNPWHALLIHF

SEQ ID NO: 212909 - protein, 15 aa, Artificial Sequence
  Description of Artificial Sequence: Synthetic peptide
  Seed: ANQRLNPMHQLLRHF
ANQRFNPWHALLLHF

SEQ ID NO: 212910 - protein, 15 aa, Artificial Sequence
  Description of Artificial Sequence: Synthetic peptide
  Seed: ANQRLNPMHQLLRHF
ANQRFNPWHALLMHF

SEQ ID NO: 212911 - protein, 15 aa, Artificial Sequence
  Description of Artificial Sequence: Synthetic peptide
  Seed: ANQRLNPMHQLLRHF
ANQRFNPWHALLVHF

SEQ ID NO: 212912 - protein, 15 aa, Artificial Sequence
  Description of Artificial Sequence: Synthetic peptide
  Seed: ANQRLNPMHQLLRHF
ANQRFNPWHFLLFHF

SEQ ID NO: 212913 - protein, 15 aa, Artificial Sequence
  Description of Artificial Sequence: Synthetic peptide
  Seed: ANQRLNPMHQLLRHF
ANQRFNPWHFLLIHF

SEQ ID NO: 212914 - protein, 15 aa, Artificial Sequence
  Description of Artificial Sequence: Synthetic peptide
  Seed: ANQRLNPMHQLLRHF
ANQRFNPWHFLLLHF

SEQ ID NO: 212915 - protein, 15 aa, Artificial Sequence
  Description of Artificial Sequence: Synthetic peptide
  Seed: ANQRLNPMHQLLRHF
ANQRFNPWHFLLMHF

SEQ ID NO: 212916 - protein, 15 aa, Artificial Sequence
  Description of Artificial Sequence: Synthetic peptide
  Seed: ANQRLNPMHQLLRHF
ANQRFNPWHFLLVHF

SEQ ID NO: 212917 - protein, 15 aa, Artificial Sequence
  Description of Artificial Sequence: Synthetic peptide
  Seed: ANQRLNPMHQLLRHF
ANQRFNPWHNLLIHF

SEQ ID NO: 212918 - protein, 15 aa, Artificial Sequence
  Description of Artificial Sequence: Synthetic peptide
  Seed: ANQRLNPMHQLLRHF
ANQRFNPWHNLLLHF

SEQ ID NO: 212919 - protein, 15 aa, Artificial Sequence
  Description of Artificial Sequence: Synthetic peptide
  Seed: ANQRLNPMHQLLRHF
ANQRFNPWHNLLVHF

SEQ ID NO: 212920 - protein, 15 aa, Artificial Sequence
  Description of Artificial Sequence: Synthetic peptide
  Seed: ANQRLNPMHQLLRHF
ANQRFNPWHSLLAHF

SEQ ID NO: 212921 - protein, 15 aa, Artificial Sequence
  Description of Artificial Sequence: Synthetic peptide
  Seed: ANQRLNPMHQLLRHF
ANQRFNPWHSLLIHF

SEQ ID NO: 212922 - protein, 15 aa, Artificial Sequence
  Description of Artificial Sequence: Synthetic peptide
  Seed: ANQRLNPMHQLLRHF
ANQRFNPWHSLLLHF

SEQ ID NO: 212923 - protein, 15 aa, Artificial Sequence
  Description of Artificial Sequence: Synthetic peptide
  Seed: ANQRLNPMHQLLRHF
ANQRFNPWHSLLVHF

SEQ ID NO: 212924 - protein, 15 aa, Artificial Sequence
  Description of Artificial Sequence: Synthetic peptide
  Seed: ANQRLNPMHQLLRHF
ANQRFNPYHFLLFHF

SEQ ID NO: 212925 - protein, 15 aa, Artificial Sequence
  Description of Artificial Sequence: Synthetic peptide
  Seed: ANQRLNPMHQLLRHF
ANQRFNPYHFLLIHF

SEQ ID NO: 212926 - protein, 15 aa, Artificial Sequence
  Description of Artificial Sequence: Synthetic peptide
  Seed: ANQRLNPMHQLLRHF
ANQRFNPYHFLLLHF

SEQ ID NO: 212927 - protein, 15 aa, Artificial Sequence
  Description of Artificial Sequence: Synthetic peptide
  Seed: ANQRLNPMHQLLRHF
ANQRFNPYHFLLMHF

SEQ ID NO: 212928 - protein, 15 aa, Artificial Sequence
  Description of Artificial Sequence: Synthetic peptide
  Seed: ANQRLNPMHQLLRHF
ANQRFNPYHFLLVHF

SEQ ID NO: 212929 - protein, 15 aa, Artificial Sequence
  Description of Artificial Sequence: Synthetic peptide
  Seed: ANQRLNPMHQLLRHF
ANQRFNPYHNLLAHF

SEQ ID NO: 212930 - protein, 15 aa, Artificial Sequence
  Description of Artificial Sequence: Synthetic peptide
  Seed: ANQRLNPMHQLLRHF
ANQRFNPYHNLLIHF

SEQ ID NO: 212931 - protein, 15 aa, Artificial Sequence
  Description of Artificial Sequence: Synthetic peptide
  Seed: ANQRLNPMHQLLRHF
ANQRFNPYHNLLLHF

SEQ ID NO: 212932 - protein, 15 aa, Artificial Sequence
  Description of Artificial Sequence: Synthetic peptide
  Seed: ANQRLNPMHQLLRHF
ANQRFNPYHNLLMHF

SEQ ID NO: 212933 - protein, 15 aa, Artificial Sequence
  Description of Artificial Sequence: Synthetic peptide
  Seed: ANQRLNPMHQLLRHF
ANQRFNPYHNLLVHF

SEQ ID NO: 212934 - protein, 15 aa, Artificial Sequence
  Description of Artificial Sequence: Synthetic peptide
  Seed: ANQRLNPMHQLLRHF
ANQRFNPYHSLLAHF

SEQ ID NO: 212935 - protein, 15 aa, Artificial Sequence
  Description of Artificial Sequence: Synthetic peptide
  Seed: ANQRLNPMHQLLRHF
ANQRFNPYHSLLIHF

SEQ ID NO: 212936 - protein, 15 aa, Artificial Sequence
  Description of Artificial Sequence: Synthetic peptide
  Seed: ANQRLNPMHQLLRHF
ANQRFNPYHSLLLHF

SEQ ID NO: 212937 - protein, 15 aa, Artificial Sequence
  Description of Artificial Sequence: Synthetic peptide
  Seed: ANQRLNPMHQLLRHF
ANQRFNPYHSLLMHF

SEQ ID NO: 212938 - protein, 15 aa, Artificial Sequence
  Description of Artificial Sequence: Synthetic peptide
  Seed: ANQRLNPMHQLLRHF
ANQRFNPYHSLLTHF

SEQ ID NO: 212939 - protein, 15 aa, Artificial Sequence
  Description of Artificial Sequence: Synthetic peptide
  Seed: ANQRLNPMHQLLRHF
ANQRFNPYHSLLVHF

SEQ ID NO: 212940 - protein, 15 aa, Artificial Sequence
  Description of Artificial Sequence: Synthetic peptide
  Seed: ANQRLNPMHQLLRHF
ANQRFNPYHTLLLHF

SEQ ID NO: 212941 - protein, 15 aa, Artificial Sequence
  Description of Artificial Sequence: Synthetic peptide
  Seed: ANQRLNPMHQLLRHF
ANQRFNPYHTLLVHF

SEQ ID NO: 212942 - protein, 15 aa, Artificial Sequence
  Description of Artificial Sequence: Synthetic peptide
  Seed: ANQRLNPMHQLLRHF
ANQRHNPLHALLLHF

SEQ ID NO: 212943 - protein, 15 aa, Artificial Sequence
  Description of Artificial Sequence: Synthetic peptide
  Seed: ANQRLNPMHQLLRHF
ANQRHNPLHALLVHF

SEQ ID NO: 212944 - protein, 15 aa, Artificial Sequence
  Description of Artificial Sequence: Synthetic peptide
  Seed: ANQRLNPMHQLLRHF
ANQRHNPMHALLLHF

SEQ ID NO: 212945 - protein, 15 aa, Artificial Sequence
  Description of Artificial Sequence: Synthetic peptide
  Seed: ANQRLNPMHQLLRHF
ANQRHNPMHALLVHF

SEQ ID NO: 212946 - protein, 15 aa, Artificial Sequence
  Description of Artificial Sequence: Synthetic peptide
  Seed: ANQRLNPMHQLLRHF
ANQRINPAHALLAHF

SEQ ID NO: 212947 - protein, 15 aa, Artificial Sequence
  Description of Artificial Sequence: Synthetic peptide
  Seed: ANQRLNPMHQLLRHF
ANQRINPAHALLCHF

SEQ ID NO: 212948 - protein, 15 aa, Artificial Sequence
  Description of Artificial Sequence: Synthetic peptide
  Seed: ANQRLNPMHQLLRHF
ANQRINPAHALLFHF

SEQ ID NO: 212949 - protein, 15 aa, Artificial Sequence
  Description of Artificial Sequence: Synthetic peptide
  Seed: ANQRLNPMHQLLRHF
ANQRINPAHALLGHF

SEQ ID NO: 212950 - protein, 15 aa, Artificial Sequence
  Description of Artificial Sequence: Synthetic peptide
  Seed: ANQRLNPMHQLLRHF
ANQRINPAHALLIHF

SEQ ID NO: 212951 - protein, 15 aa, Artificial Sequence
  Description of Artificial Sequence: Synthetic peptide
  Seed: ANQRLNPMHQLLRHF
ANQRINPAHALLLHF

SEQ ID NO: 212952 - protein, 15 aa, Artificial Sequence
  Description of Artificial Sequence: Synthetic peptide
  Seed: ANQRLNPMHQLLRHF
ANQRINPAHALLMHF

SEQ ID NO: 212953 - protein, 15 aa, Artificial Sequence
  Description of Artificial Sequence: Synthetic peptide
  Seed: ANQRLNPMHQLLRHF
ANQRINPAHALLNHF

SEQ ID NO: 212954 - protein, 15 aa, Artificial Sequence
  Description of Artificial Sequence: Synthetic peptide
  Seed: ANQRLNPMHQLLRHF
ANQRINPAHALLRHF

SEQ ID NO: 212955 - protein, 15 aa, Artificial Sequence
  Description of Artificial Sequence: Synthetic peptide
  Seed: ANQRLNPMHQLLRHF
ANQRINPAHALLSHF

SEQ ID NO: 212956 - protein, 15 aa, Artificial Sequence
  Description of Artificial Sequence: Synthetic peptide
  Seed: ANQRLNPMHQLLRHF
ANQRINPAHALLTHF

SEQ ID NO: 212957 - protein, 15 aa, Artificial Sequence
  Description of Artificial Sequence: Synthetic peptide
  Seed: ANQRLNPMHQLLRHF
ANQRINPAHALLVHF

SEQ ID NO: 212958 - protein, 15 aa, Artificial Sequence
  Description of Artificial Sequence: Synthetic peptide
  Seed: ANQRLNPMHQLLRHF
ANQRINPAHFLLFHF

SEQ ID NO: 212959 - protein, 15 aa, Artificial Sequence
  Description of Artificial Sequence: Synthetic peptide
  Seed: ANQRLNPMHQLLRHF
ANQRINPAHFLLIHF

SEQ ID NO: 212960 - protein, 15 aa, Artificial Sequence
  Description of Artificial Sequence: Synthetic peptide
  Seed: ANQRLNPMHQLLRHF
ANQRINPAHFLLLHF

SEQ ID NO: 212961 - protein, 15 aa, Artificial Sequence
  Description of Artificial Sequence: Synthetic peptide
  Seed: ANQRLNPMHQLLRHF
ANQRINPAHFLLMHF

SEQ ID NO: 212962 - protein, 15 aa, Artificial Sequence
  Description of Artificial Sequence: Synthetic peptide
  Seed: ANQRLNPMHQLLRHF
ANQRINPAHFLLVHF

SEQ ID NO: 212963 - protein, 15 aa, Artificial Sequence
  Description of Artificial Sequence: Synthetic peptide
  Seed: ANQRLNPMHQLLRHF
ANQRINPAHGLLAHF

SEQ ID NO: 212964 - protein, 15 aa, Artificial Sequence
  Description of Artificial Sequence: Synthetic peptide
  Seed: ANQRLNPMHQLLRHF
ANQRINPAHGLLGHF

SEQ ID NO: 212965 - protein, 15 aa, Artificial Sequence
  Description of Artificial Sequence: Synthetic peptide
  Seed: ANQRLNPMHQLLRHF
ANQRINPAHGLLIHF

SEQ ID NO: 212966 - protein, 15 aa, Artificial Sequence
  Description of Artificial Sequence: Synthetic peptide
  Seed: ANQRLNPMHQLLRHF
ANQRINPAHGLLLHF

SEQ ID NO: 212967 - protein, 15 aa, Artificial Sequence
  Description of Artificial Sequence: Synthetic peptide
  Seed: ANQRLNPMHQLLRHF
ANQRINPAHGLLMHF

SEQ ID NO: 212968 - protein, 15 aa, Artificial Sequence
  Description of Artificial Sequence: Synthetic peptide
  Seed: ANQRLNPMHQLLRHF
ANQRINPAHGLLSHF

SEQ ID NO: 212969 - protein, 15 aa, Artificial Sequence
  Description of Artificial Sequence: Synthetic peptide
  Seed: ANQRLNPMHQLLRHF
ANQRINPAHGLLTHF

SEQ ID NO: 212970 - protein, 15 aa, Artificial Sequence
  Description of Artificial Sequence: Synthetic peptide
  Seed: ANQRLNPMHQLLRHF
ANQRINPAHGLLVHF

SEQ ID NO: 212971 - protein, 15 aa, Artificial Sequence
  Description of Artificial Sequence: Synthetic peptide
  Seed: ANQRLNPMHQLLRHF
ANQRINPAHKLLAHF

SEQ ID NO: 212972 - protein, 15 aa, Artificial Sequence
  Description of Artificial Sequence: Synthetic peptide
  Seed: ANQRLNPMHQLLRHF
ANQRINPAHKLLFHF

SEQ ID NO: 212973 - protein, 15 aa, Artificial Sequence
  Description of Artificial Sequence: Synthetic peptide
  Seed: ANQRLNPMHQLLRHF
ANQRINPAHKLLGHF

SEQ ID NO: 212974 - protein, 15 aa, Artificial Sequence
  Description of Artificial Sequence: Synthetic peptide
  Seed: ANQRLNPMHQLLRHF
ANQRINPAHKLLHHF

SEQ ID NO: 212975 - protein, 15 aa, Artificial Sequence
  Description of Artificial Sequence: Synthetic peptide
  Seed: ANQRLNPMHQLLRHF
ANQRINPAHKLLIHF

SEQ ID NO: 212976 - protein, 15 aa, Artificial Sequence
  Description of Artificial Sequence: Synthetic peptide
  Seed: ANQRLNPMHQLLRHF
ANQRINPAHKLLKHF

SEQ ID NO: 212977 - protein, 15 aa, Artificial Sequence
  Description of Artificial Sequence: Synthetic peptide
  Seed: ANQRLNPMHQLLRHF
ANQRINPAHKLLLHF

SEQ ID NO: 212978 - protein, 15 aa, Artificial Sequence
  Description of Artificial Sequence: Synthetic peptide
  Seed: ANQRLNPMHQLLRHF
ANQRINPAHKLLMHF

SEQ ID NO: 212979 - protein, 15 aa, Artificial Sequence
  Description of Artificial Sequence: Synthetic peptide
  Seed: ANQRLNPMHQLLRHF
ANQRINPAHKLLQHF

SEQ ID NO: 212980 - protein, 15 aa, Artificial Sequence
  Description of Artificial Sequence: Synthetic peptide
  Seed: ANQRLNPMHQLLRHF
ANQRINPAHKLLRHF

SEQ ID NO: 212981 - protein, 15 aa, Artificial Sequence
  Description of Artificial Sequence: Synthetic peptide
  Seed: ANQRLNPMHQLLRHF
ANQRINPAHKLLSHF

SEQ ID NO: 212982 - protein, 15 aa, Artificial Sequence
  Description of Artificial Sequence: Synthetic peptide
  Seed: ANQRLNPMHQLLRHF
ANQRINPAHKLLTHF

SEQ ID NO: 212983 - protein, 15 aa, Artificial Sequence
  Description of Artificial Sequence: Synthetic peptide
  Seed: ANQRLNPMHQLLRHF
ANQRINPAHKLLVHF

SEQ ID NO: 212984 - protein, 15 aa, Artificial Sequence
  Description of Artificial Sequence: Synthetic peptide
  Seed: ANQRLNPMHQLLRHF
ANQRINPAHKLLYHF

SEQ ID NO: 212985 - protein, 15 aa, Artificial Sequence
  Description of Artificial Sequence: Synthetic peptide
  Seed: ANQRLNPMHQLLRHF
ANQRINPAHNLLAHF

SEQ ID NO: 212986 - protein, 15 aa, Artificial Sequence
  Description of Artificial Sequence: Synthetic peptide
  Seed: ANQRLNPMHQLLRHF
ANQRINPAHNLLFHF

SEQ ID NO: 212987 - protein, 15 aa, Artificial Sequence
  Description of Artificial Sequence: Synthetic peptide
  Seed: ANQRLNPMHQLLRHF
ANQRINPAHNLLIHF

SEQ ID NO: 212988 - protein, 15 aa, Artificial Sequence
  Description of Artificial Sequence: Synthetic peptide
  Seed: ANQRLNPMHQLLRHF
ANQRINPAHNLLLHF

SEQ ID NO: 212989 - protein, 15 aa, Artificial Sequence
  Description of Artificial Sequence: Synthetic peptide
  Seed: ANQRLNPMHQLLRHF
ANQRINPAHNLLSHF

SEQ ID NO: 212990 - protein, 15 aa, Artificial Sequence
  Description of Artificial Sequence: Synthetic peptide
  Seed: ANQRLNPMHQLLRHF
ANQRINPAHNLLTHF

SEQ ID NO: 212991 - protein, 15 aa, Artificial Sequence
  Description of Artificial Sequence: Synthetic peptide
  Seed: ANQRLNPMHQLLRHF
ANQRINPAHNLLVHF

SEQ ID NO: 212992 - protein, 15 aa, Artificial Sequence
  Description of Artificial Sequence: Synthetic peptide
  Seed: ANQRLNPMHQLLRHF
ANQRINPAHPLLAHF

SEQ ID NO: 212993 - protein, 15 aa, Artificial Sequence
  Description of Artificial Sequence: Synthetic peptide
  Seed: ANQRLNPMHQLLRHF
ANQRINPAHPLLIHF

SEQ ID NO: 212994 - protein, 15 aa, Artificial Sequence
  Description of Artificial Sequence: Synthetic peptide
  Seed: ANQRLNPMHQLLRHF
ANQRINPAHPLLLHF

SEQ ID NO: 212995 - protein, 15 aa, Artificial Sequence
  Description of Artificial Sequence: Synthetic peptide
  Seed: ANQRLNPMHQLLRHF
ANQRINPAHPLLMHF

SEQ ID NO: 212996 - protein, 15 aa, Artificial Sequence
  Description of Artificial Sequence: Synthetic peptide
  Seed: ANQRLNPMHQLLRHF
ANQRINPAHPLLSHF

SEQ ID NO: 212997 - protein, 15 aa, Artificial Sequence
  Description of Artificial Sequence: Synthetic peptide
  Seed: ANQRLNPMHQLLRHF
ANQRINPAHPLLTHF

SEQ ID NO: 212998 - protein, 15 aa, Artificial Sequence
  Description of Artificial Sequence: Synthetic peptide
  Seed: ANQRLNPMHQLLRHF
ANQRINPAHPLLVHF

SEQ ID NO: 212999 - protein, 15 aa, Artificial Sequence
  Description of Artificial Sequence: Synthetic peptide
  Seed: ANQRLNPMHQLLRHF
ANQRINPAHRLLAHF

SEQ ID NO: 213000 - protein, 15 aa, Artificial Sequence
  Description of Artificial Sequence: Synthetic peptide
  Seed: ANQRLNPMHQLLRHF
ANQRINPAHRLLFHF

SEQ ID NO: 213001 - protein, 15 aa, Artificial Sequence
  Description of Artificial Sequence: Synthetic peptide
  Seed: ANQRLNPMHQLLRHF
ANQRINPAHRLLGHF

SEQ ID NO: 213002 - protein, 15 aa, Artificial Sequence
  Description of Artificial Sequence: Synthetic peptide
  Seed: ANQRLNPMHQLLRHF
ANQRINPAHRLLHHF

SEQ ID NO: 213003 - protein, 15 aa, Artificial Sequence
  Description of Artificial Sequence: Synthetic peptide
  Seed: ANQRLNPMHQLLRHF
ANQRINPAHRLLIHF

SEQ ID NO: 213004 - protein, 15 aa, Artificial Sequence
  Description of Artificial Sequence: Synthetic peptide
  Seed: ANQRLNPMHQLLRHF
ANQRINPAHRLLKHF

SEQ ID NO: 213005 - protein, 15 aa, Artificial Sequence
  Description of Artificial Sequence: Synthetic peptide
  Seed: ANQRLNPMHQLLRHF
ANQRINPAHRLLLHF

SEQ ID NO: 213006 - protein, 15 aa, Artificial Sequence
  Description of Artificial Sequence: Synthetic peptide
  Seed: ANQRLNPMHQLLRHF
ANQRINPAHRLLMHF

SEQ ID NO: 213007 - protein, 15 aa, Artificial Sequence
  Description of Artificial Sequence: Synthetic peptide
  Seed: ANQRLNPMHQLLRHF
ANQRINPAHRLLNHF

SEQ ID NO: 213008 - protein, 15 aa, Artificial Sequence
  Description of Artificial Sequence: Synthetic peptide
  Seed: ANQRLNPMHQLLRHF
ANQRINPAHRLLQHF

SEQ ID NO: 213009 - protein, 15 aa, Artificial Sequence
  Description of Artificial Sequence: Synthetic peptide
  Seed: ANQRLNPMHQLLRHF
ANQRINPAHRLLRHF

SEQ ID NO: 213010 - protein, 15 aa, Artificial Sequence
  Description of Artificial Sequence: Synthetic peptide
  Seed: ANQRLNPMHQLLRHF
ANQRINPAHRLLSHF

SEQ ID NO: 213011 - protein, 15 aa, Artificial Sequence
  Description of Artificial Sequence: Synthetic peptide
  Seed: ANQRLNPMHQLLRHF
ANQRINPAHRLLTHF

SEQ ID NO: 213012 - protein, 15 aa, Artificial Sequence
  Description of Artificial Sequence: Synthetic peptide
  Seed: ANQRLNPMHQLLRHF
ANQRINPAHRLLVHF

SEQ ID NO: 213013 - protein, 15 aa, Artificial Sequence
  Description of Artificial Sequence: Synthetic peptide
  Seed: ANQRLNPMHQLLRHF
ANQRINPAHRLLWHF

SEQ ID NO: 213014 - protein, 15 aa, Artificial Sequence
  Description of Artificial Sequence: Synthetic peptide
  Seed: ANQRLNPMHQLLRHF
ANQRINPAHRLLYHF

SEQ ID NO: 213015 - protein, 15 aa, Artificial Sequence
  Description of Artificial Sequence: Synthetic peptide
  Seed: ANQRLNPMHQLLRHF
ANQRINPAHSLLAHF

SEQ ID NO: 213016 - protein, 15 aa, Artificial Sequence
  Description of Artificial Sequence: Synthetic peptide
  Seed: ANQRLNPMHQLLRHF
ANQRINPAHSLLGHF

SEQ ID NO: 213017 - protein, 15 aa, Artificial Sequence
  Description of Artificial Sequence: Synthetic peptide
  Seed: ANQRLNPMHQLLRHF
ANQRINPAHSLLIHF

SEQ ID NO: 213018 - protein, 15 aa, Artificial Sequence
  Description of Artificial Sequence: Synthetic peptide
  Seed: ANQRLNPMHQLLRHF
ANQRINPAHSLLLHF

SEQ ID NO: 213019 - protein, 15 aa, Artificial Sequence
  Description of Artificial Sequence: Synthetic peptide
  Seed: ANQRLNPMHQLLRHF
ANQRINPAHSLLMHF

SEQ ID NO: 213020 - protein, 15 aa, Artificial Sequence
  Description of Artificial Sequence: Synthetic peptide
  Seed: ANQRLNPMHQLLRHF
ANQRINPAHSLLRHF

SEQ ID NO: 213021 - protein, 15 aa, Artificial Sequence
  Description of Artificial Sequence: Synthetic peptide
  Seed: ANQRLNPMHQLLRHF
ANQRINPAHSLLSHF

SEQ ID NO: 213022 - protein, 15 aa, Artificial Sequence
  Description of Artificial Sequence: Synthetic peptide
  Seed: ANQRLNPMHQLLRHF
ANQRINPAHSLLTHF

SEQ ID NO: 213023 - protein, 15 aa, Artificial Sequence
  Description of Artificial Sequence: Synthetic peptide
  Seed: ANQRLNPMHQLLRHF
ANQRINPAHSLLVHF

SEQ ID NO: 213024 - protein, 15 aa, Artificial Sequence
  Description of Artificial Sequence: Synthetic peptide
  Seed: ANQRLNPMHQLLRHF
ANQRINPAHTLLAHF

SEQ ID NO: 213025 - protein, 15 aa, Artificial Sequence
  Description of Artificial Sequence: Synthetic peptide
  Seed: ANQRLNPMHQLLRHF
ANQRINPAHTLLIHF

SEQ ID NO: 213026 - protein, 15 aa, Artificial Sequence
  Description of Artificial Sequence: Synthetic peptide
  Seed: ANQRLNPMHQLLRHF
ANQRINPAHTLLLHF

SEQ ID NO: 213027 - protein, 15 aa, Artificial Sequence
  Description of Artificial Sequence: Synthetic peptide
  Seed: ANQRLNPMHQLLRHF
ANQRINPAHTLLMHF

SEQ ID NO: 213028 - protein, 15 aa, Artificial Sequence
  Description of Artificial Sequence: Synthetic peptide
  Seed: ANQRLNPMHQLLRHF
ANQRINPAHTLLRHF

SEQ ID NO: 213029 - protein, 15 aa, Artificial Sequence
  Description of Artificial Sequence: Synthetic peptide
  Seed: ANQRLNPMHQLLRHF
ANQRINPAHTLLSHF

SEQ ID NO: 213030 - protein, 15 aa, Artificial Sequence
  Description of Artificial Sequence: Synthetic peptide
  Seed: ANQRLNPMHQLLRHF
ANQRINPAHTLLTHF

SEQ ID NO: 213031 - protein, 15 aa, Artificial Sequence
  Description of Artificial Sequence: Synthetic peptide
  Seed: ANQRLNPMHQLLRHF
ANQRINPAHTLLVHF

SEQ ID NO: 213032 - protein, 15 aa, Artificial Sequence
  Description of Artificial Sequence: Synthetic peptide
  Seed: ANQRLNPMHQLLRHF
ANQRINPAHVLLAHF

SEQ ID NO: 213033 - protein, 15 aa, Artificial Sequence
  Description of Artificial Sequence: Synthetic peptide
  Seed: ANQRLNPMHQLLRHF
ANQRINPAHVLLIHF

SEQ ID NO: 213034 - protein, 15 aa, Artificial Sequence
  Description of Artificial Sequence: Synthetic peptide
  Seed: ANQRLNPMHQLLRHF
ANQRINPAHVLLLHF

SEQ ID NO: 213035 - protein, 15 aa, Artificial Sequence
  Description of Artificial Sequence: Synthetic peptide
  Seed: ANQRLNPMHQLLRHF
ANQRINPAHVLLRHF

SEQ ID NO: 213036 - protein, 15 aa, Artificial Sequence
  Description of Artificial Sequence: Synthetic peptide
  Seed: ANQRLNPMHQLLRHF
ANQRINPAHVLLVHF

SEQ ID NO: 213037 - protein, 15 aa, Artificial Sequence
  Description of Artificial Sequence: Synthetic peptide
  Seed: ANQRLNPMHQLLRHF
ANQRINPCHALLIHF

SEQ ID NO: 213038 - protein, 15 aa, Artificial Sequence
  Description of Artificial Sequence: Synthetic peptide
  Seed: ANQRLNPMHQLLRHF
ANQRINPCHALLLHF

SEQ ID NO: 213039 - protein, 15 aa, Artificial Sequence
  Description of Artificial Sequence: Synthetic peptide
  Seed: ANQRLNPMHQLLRHF
ANQRINPCHALLVHF

SEQ ID NO: 213040 - protein, 15 aa, Artificial Sequence
  Description of Artificial Sequence: Synthetic peptide
  Seed: ANQRLNPMHQLLRHF
ANQRINPCHKLLSHF

SEQ ID NO: 213041 - protein, 15 aa, Artificial Sequence
  Description of Artificial Sequence: Synthetic peptide
  Seed: ANQRLNPMHQLLRHF
ANQRINPCHRLLAHF

SEQ ID NO: 213042 - protein, 15 aa, Artificial Sequence
  Description of Artificial Sequence: Synthetic peptide
  Seed: ANQRLNPMHQLLRHF
ANQRINPCHRLLQHF

SEQ ID NO: 213043 - protein, 15 aa, Artificial Sequence
  Description of Artificial Sequence: Synthetic peptide
  Seed: ANQRLNPMHQLLRHF
ANQRINPCHRLLSHF

SEQ ID NO: 213044 - protein, 15 aa, Artificial Sequence
  Description of Artificial Sequence: Synthetic peptide
  Seed: ANQRLNPMHQLLRHF
ANQRINPDHALLIHF

SEQ ID NO: 213045 - protein, 15 aa, Artificial Sequence
  Description of Artificial Sequence: Synthetic peptide
  Seed: ANQRLNPMHQLLRHF
ANQRINPDHALLVHF

SEQ ID NO: 213046 - protein, 15 aa, Artificial Sequence
  Description of Artificial Sequence: Synthetic peptide
  Seed: ANQRLNPMHQLLRHF
ANQRINPEHALLAHF

SEQ ID NO: 213047 - protein, 15 aa, Artificial Sequence
  Description of Artificial Sequence: Synthetic peptide
  Seed: ANQRLNPMHQLLRHF
ANQRINPEHALLIHF

SEQ ID NO: 213048 - protein, 15 aa, Artificial Sequence
  Description of Artificial Sequence: Synthetic peptide
  Seed: ANQRLNPMHQLLRHF
ANQRINPEHALLLHF

SEQ ID NO: 213049 - protein, 15 aa, Artificial Sequence
  Description of Artificial Sequence: Synthetic peptide
  Seed: ANQRLNPMHQLLRHF
ANQRINPEHALLVHF

SEQ ID NO: 213050 - protein, 15 aa, Artificial Sequence
  Description of Artificial Sequence: Synthetic peptide
  Seed: ANQRLNPMHQLLRHF
ANQRINPEHFLLFHF

SEQ ID NO: 213051 - protein, 15 aa, Artificial Sequence
  Description of Artificial Sequence: Synthetic peptide
  Seed: ANQRLNPMHQLLRHF
ANQRINPEHFLLIHF

SEQ ID NO: 213052 - protein, 15 aa, Artificial Sequence
  Description of Artificial Sequence: Synthetic peptide
  Seed: ANQRLNPMHQLLRHF
ANQRINPEHFLLLHF

SEQ ID NO: 213053 - protein, 15 aa, Artificial Sequence
  Description of Artificial Sequence: Synthetic peptide
  Seed: ANQRLNPMHQLLRHF
ANQRINPEHFLLMHF

SEQ ID NO: 213054 - protein, 15 aa, Artificial Sequence
  Description of Artificial Sequence: Synthetic peptide
  Seed: ANQRLNPMHQLLRHF
ANQRINPEHFLLVHF

SEQ ID NO: 213055 - protein, 15 aa, Artificial Sequence
  Description of Artificial Sequence: Synthetic peptide
  Seed: ANQRLNPMHQLLRHF
ANQRINPEHGLLAHF

SEQ ID NO: 213056 - protein, 15 aa, Artificial Sequence
  Description of Artificial Sequence: Synthetic peptide
  Seed: ANQRLNPMHQLLRHF
ANQRINPEHGLLIHF

SEQ ID NO: 213057 - protein, 15 aa, Artificial Sequence
  Description of Artificial Sequence: Synthetic peptide
  Seed: ANQRLNPMHQLLRHF
ANQRINPEHGLLLHF

SEQ ID NO: 213058 - protein, 15 aa, Artificial Sequence
  Description of Artificial Sequence: Synthetic peptide
  Seed: ANQRLNPMHQLLRHF
ANQRINPEHGLLVHF

SEQ ID NO: 213059 - protein, 15 aa, Artificial Sequence
  Description of Artificial Sequence: Synthetic peptide
  Seed: ANQRLNPMHQLLRHF
ANQRINPEHSLLLHF

SEQ ID NO: 213060 - protein, 15 aa, Artificial Sequence
  Description of Artificial Sequence: Synthetic peptide
  Seed: ANQRLNPMHQLLRHF
ANQRINPEHSLLVHF

SEQ ID NO: 213061 - protein, 15 aa, Artificial Sequence
  Description of Artificial Sequence: Synthetic peptide
  Seed: ANQRLNPMHQLLRHF
ANQRINPFHALLAHF

SEQ ID NO: 213062 - protein, 15 aa, Artificial Sequence
  Description of Artificial Sequence: Synthetic peptide
  Seed: ANQRLNPMHQLLRHF
ANQRINPFHALLIHF

SEQ ID NO: 213063 - protein, 15 aa, Artificial Sequence
  Description of Artificial Sequence: Synthetic peptide
  Seed: ANQRLNPMHQLLRHF
ANQRINPFHALLLHF

SEQ ID NO: 213064 - protein, 15 aa, Artificial Sequence
  Description of Artificial Sequence: Synthetic peptide
  Seed: ANQRLNPMHQLLRHF
ANQRINPFHALLMHF

SEQ ID NO: 213065 - protein, 15 aa, Artificial Sequence
  Description of Artificial Sequence: Synthetic peptide
  Seed: ANQRLNPMHQLLRHF
ANQRINPFHALLRHF

SEQ ID NO: 213066 - protein, 15 aa, Artificial Sequence
  Description of Artificial Sequence: Synthetic peptide
  Seed: ANQRLNPMHQLLRHF
ANQRINPFHALLSHF

SEQ ID NO: 213067 - protein, 15 aa, Artificial Sequence
  Description of Artificial Sequence: Synthetic peptide
  Seed: ANQRLNPMHQLLRHF
ANQRINPFHALLTHF

SEQ ID NO: 213068 - protein, 15 aa, Artificial Sequence
  Description of Artificial Sequence: Synthetic peptide
  Seed: ANQRLNPMHQLLRHF
ANQRINPFHALLVHF

SEQ ID NO: 213069 - protein, 15 aa, Artificial Sequence
  Description of Artificial Sequence: Synthetic peptide
  Seed: ANQRLNPMHQLLRHF
ANQRINPFHFLLFHF

SEQ ID NO: 213070 - protein, 15 aa, Artificial Sequence
  Description of Artificial Sequence: Synthetic peptide
  Seed: ANQRLNPMHQLLRHF
ANQRINPFHFLLIHF

SEQ ID NO: 213071 - protein, 15 aa, Artificial Sequence
  Description of Artificial Sequence: Synthetic peptide
  Seed: ANQRLNPMHQLLRHF
ANQRINPFHFLLLHF

SEQ ID NO: 213072 - protein, 15 aa, Artificial Sequence
  Description of Artificial Sequence: Synthetic peptide
  Seed: ANQRLNPMHQLLRHF
ANQRINPFHFLLMHF

SEQ ID NO: 213073 - protein, 15 aa, Artificial Sequence
  Description of Artificial Sequence: Synthetic peptide
  Seed: ANQRLNPMHQLLRHF
ANQRINPFHFLLVHF

SEQ ID NO: 213074 - protein, 15 aa, Artificial Sequence
  Description of Artificial Sequence: Synthetic peptide
  Seed: ANQRLNPMHQLLRHF
ANQRINPFHGLLAHF

SEQ ID NO: 213075 - protein, 15 aa, Artificial Sequence
  Description of Artificial Sequence: Synthetic peptide
  Seed: ANQRLNPMHQLLRHF
ANQRINPFHGLLFHF

SEQ ID NO: 213076 - protein, 15 aa, Artificial Sequence
  Description of Artificial Sequence: Synthetic peptide
  Seed: ANQRLNPMHQLLRHF
ANQRINPFHGLLIHF

SEQ ID NO: 213077 - protein, 15 aa, Artificial Sequence
  Description of Artificial Sequence: Synthetic peptide
  Seed: ANQRLNPMHQLLRHF
ANQRINPFHGLLLHF

SEQ ID NO: 213078 - protein, 15 aa, Artificial Sequence
  Description of Artificial Sequence: Synthetic peptide
  Seed: ANQRLNPMHQLLRHF
ANQRINPFHGLLMHF

SEQ ID NO: 213079 - protein, 15 aa, Artificial Sequence
  Description of Artificial Sequence: Synthetic peptide
  Seed: ANQRLNPMHQLLRHF
ANQRINPFHGLLSHF

SEQ ID NO: 213080 - protein, 15 aa, Artificial Sequence
  Description of Artificial Sequence: Synthetic peptide
  Seed: ANQRLNPMHQLLRHF
ANQRINPFHGLLTHF

SEQ ID NO: 213081 - protein, 15 aa, Artificial Sequence
  Description of Artificial Sequence: Synthetic peptide
  Seed: ANQRLNPMHQLLRHF
ANQRINPFHGLLVHF

SEQ ID NO: 213082 - protein, 15 aa, Artificial Sequence
  Description of Artificial Sequence: Synthetic peptide
  Seed: ANQRLNPMHQLLRHF
ANQRINPFHKLLAHF

SEQ ID NO: 213083 - protein, 15 aa, Artificial Sequence
  Description of Artificial Sequence: Synthetic peptide
  Seed: ANQRLNPMHQLLRHF
ANQRINPFHKLLFHF

SEQ ID NO: 213084 - protein, 15 aa, Artificial Sequence
  Description of Artificial Sequence: Synthetic peptide
  Seed: ANQRLNPMHQLLRHF
ANQRINPFHKLLGHF

SEQ ID NO: 213085 - protein, 15 aa, Artificial Sequence
  Description of Artificial Sequence: Synthetic peptide
  Seed: ANQRLNPMHQLLRHF
ANQRINPFHKLLHHF

SEQ ID NO: 213086 - protein, 15 aa, Artificial Sequence
  Description of Artificial Sequence: Synthetic peptide
  Seed: ANQRLNPMHQLLRHF
ANQRINPFHKLLIHF

SEQ ID NO: 213087 - protein, 15 aa, Artificial Sequence
  Description of Artificial Sequence: Synthetic peptide
  Seed: ANQRLNPMHQLLRHF
ANQRINPFHKLLKHF

SEQ ID NO: 213088 - protein, 15 aa, Artificial Sequence
  Description of Artificial Sequence: Synthetic peptide
  Seed: ANQRLNPMHQLLRHF
ANQRINPFHKLLLHF

SEQ ID NO: 213089 - protein, 15 aa, Artificial Sequence
  Description of Artificial Sequence: Synthetic peptide
  Seed: ANQRLNPMHQLLRHF
ANQRINPFHKLLMHF

SEQ ID NO: 213090 - protein, 15 aa, Artificial Sequence
  Description of Artificial Sequence: Synthetic peptide
  Seed: ANQRLNPMHQLLRHF
ANQRINPFHKLLRHF

SEQ ID NO: 213091 - protein, 15 aa, Artificial Sequence
  Description of Artificial Sequence: Synthetic peptide
  Seed: ANQRLNPMHQLLRHF
ANQRINPFHKLLSHF

SEQ ID NO: 213092 - protein, 15 aa, Artificial Sequence
  Description of Artificial Sequence: Synthetic peptide
  Seed: ANQRLNPMHQLLRHF
ANQRINPFHKLLVHF

SEQ ID NO: 213093 - protein, 15 aa, Artificial Sequence
  Description of Artificial Sequence: Synthetic peptide
  Seed: ANQRLNPMHQLLRHF
ANQRINPFHKLLYHF

SEQ ID NO: 213094 - protein, 15 aa, Artificial Sequence
  Description of Artificial Sequence: Synthetic peptide
  Seed: ANQRLNPMHQLLRHF
ANQRINPFHLLLLHF

SEQ ID NO: 213095 - protein, 15 aa, Artificial Sequence
  Description of Artificial Sequence: Synthetic peptide
  Seed: ANQRLNPMHQLLRHF
ANQRINPFHNLLAHF

SEQ ID NO: 213096 - protein, 15 aa, Artificial Sequence
  Description of Artificial Sequence: Synthetic peptide
  Seed: ANQRLNPMHQLLRHF
ANQRINPFHNLLFHF

SEQ ID NO: 213097 - protein, 15 aa, Artificial Sequence
  Description of Artificial Sequence: Synthetic peptide
  Seed: ANQRLNPMHQLLRHF
ANQRINPFHNLLGHF

SEQ ID NO: 213098 - protein, 15 aa, Artificial Sequence
  Description of Artificial Sequence: Synthetic peptide
  Seed: ANQRLNPMHQLLRHF
ANQRINPFHNLLHHF

SEQ ID NO: 213099 - protein, 15 aa, Artificial Sequence
  Description of Artificial Sequence: Synthetic peptide
  Seed: ANQRLNPMHQLLRHF
ANQRINPFHNLLIHF

SEQ ID NO: 213100 - protein, 15 aa, Artificial Sequence
  Description of Artificial Sequence: Synthetic peptide
  Seed: ANQRLNPMHQLLRHF
ANQRINPFHNLLLHF

SEQ ID NO: 213101 - protein, 15 aa, Artificial Sequence
  Description of Artificial Sequence: Synthetic peptide
  Seed: ANQRLNPMHQLLRHF
ANQRINPFHNLLMHF

SEQ ID NO: 213102 - protein, 15 aa, Artificial Sequence
  Description of Artificial Sequence: Synthetic peptide
  Seed: ANQRLNPMHQLLRHF
ANQRINPFHNLLSHF

SEQ ID NO: 213103 - protein, 15 aa, Artificial Sequence
  Description of Artificial Sequence: Synthetic peptide
  Seed: ANQRLNPMHQLLRHF
ANQRINPFHNLLTHF

SEQ ID NO: 213104 - protein, 15 aa, Artificial Sequence
  Description of Artificial Sequence: Synthetic peptide
  Seed: ANQRLNPMHQLLRHF
ANQRINPFHNLLVHF

SEQ ID NO: 213105 - protein, 15 aa, Artificial Sequence
  Description of Artificial Sequence: Synthetic peptide
  Seed: ANQRLNPMHQLLRHF
ANQRINPFHPLLAHF

SEQ ID NO: 213106 - protein, 15 aa, Artificial Sequence
  Description of Artificial Sequence: Synthetic peptide
  Seed: ANQRLNPMHQLLRHF
ANQRINPFHPLLIHF

SEQ ID NO: 213107 - protein, 15 aa, Artificial Sequence
  Description of Artificial Sequence: Synthetic peptide
  Seed: ANQRLNPMHQLLRHF
ANQRINPFHPLLLHF

SEQ ID NO: 213108 - protein, 15 aa, Artificial Sequence
  Description of Artificial Sequence: Synthetic peptide
  Seed: ANQRLNPMHQLLRHF
ANQRINPFHPLLVHF

SEQ ID NO: 213109 - protein, 15 aa, Artificial Sequence
  Description of Artificial Sequence: Synthetic peptide
  Seed: ANQRLNPMHQLLRHF
ANQRINPFHRLLAHF

SEQ ID NO: 213110 - protein, 15 aa, Artificial Sequence
  Description of Artificial Sequence: Synthetic peptide
  Seed: ANQRLNPMHQLLRHF
ANQRINPFHRLLFHF

SEQ ID NO: 213111 - protein, 15 aa, Artificial Sequence
  Description of Artificial Sequence: Synthetic peptide
  Seed: ANQRLNPMHQLLRHF
ANQRINPFHRLLGHF

SEQ ID NO: 213112 - protein, 15 aa, Artificial Sequence
  Description of Artificial Sequence: Synthetic peptide
  Seed: ANQRLNPMHQLLRHF
ANQRINPFHRLLHHF

SEQ ID NO: 213113 - protein, 15 aa, Artificial Sequence
  Description of Artificial Sequence: Synthetic peptide
  Seed: ANQRLNPMHQLLRHF
ANQRINPFHRLLIHF

SEQ ID NO: 213114 - protein, 15 aa, Artificial Sequence
  Description of Artificial Sequence: Synthetic peptide
  Seed: ANQRLNPMHQLLRHF
ANQRINPFHRLLKHF

SEQ ID NO: 213115 - protein, 15 aa, Artificial Sequence
  Description of Artificial Sequence: Synthetic peptide
  Seed: ANQRLNPMHQLLRHF
ANQRINPFHRLLLHF

SEQ ID NO: 213116 - protein, 15 aa, Artificial Sequence
  Description of Artificial Sequence: Synthetic peptide
  Seed: ANQRLNPMHQLLRHF
ANQRINPFHRLLMHF

SEQ ID NO: 213117 - protein, 15 aa, Artificial Sequence
  Description of Artificial Sequence: Synthetic peptide
  Seed: ANQRLNPMHQLLRHF
ANQRINPFHRLLQHF

SEQ ID NO: 213118 - protein, 15 aa, Artificial Sequence
  Description of Artificial Sequence: Synthetic peptide
  Seed: ANQRLNPMHQLLRHF
ANQRINPFHRLLRHF

SEQ ID NO: 213119 - protein, 15 aa, Artificial Sequence
  Description of Artificial Sequence: Synthetic peptide
  Seed: ANQRLNPMHQLLRHF
ANQRINPFHRLLSHF

SEQ ID NO: 213120 - protein, 15 aa, Artificial Sequence
  Description of Artificial Sequence: Synthetic peptide
  Seed: ANQRLNPMHQLLRHF
ANQRINPFHRLLTHF

SEQ ID NO: 213121 - protein, 15 aa, Artificial Sequence
  Description of Artificial Sequence: Synthetic peptide
  Seed: ANQRLNPMHQLLRHF
ANQRINPFHRLLVHF

SEQ ID NO: 213122 - protein, 15 aa, Artificial Sequence
  Description of Artificial Sequence: Synthetic peptide
  Seed: ANQRLNPMHQLLRHF
ANQRINPFHRLLYHF

SEQ ID NO: 213123 - protein, 15 aa, Artificial Sequence
  Description of Artificial Sequence: Synthetic peptide
  Seed: ANQRLNPMHQLLRHF
ANQRINPFHSLLAHF

SEQ ID NO: 213124 - protein, 15 aa, Artificial Sequence
  Description of Artificial Sequence: Synthetic peptide
  Seed: ANQRLNPMHQLLRHF
ANQRINPFHSLLFHF

SEQ ID NO: 213125 - protein, 15 aa, Artificial Sequence
  Description of Artificial Sequence: Synthetic peptide
  Seed: ANQRLNPMHQLLRHF
ANQRINPFHSLLGHF

SEQ ID NO: 213126 - protein, 15 aa, Artificial Sequence
  Description of Artificial Sequence: Synthetic peptide
  Seed: ANQRLNPMHQLLRHF
ANQRINPFHSLLHHF

SEQ ID NO: 213127 - protein, 15 aa, Artificial Sequence
  Description of Artificial Sequence: Synthetic peptide
  Seed: ANQRLNPMHQLLRHF
ANQRINPFHSLLIHF

SEQ ID NO: 213128 - protein, 15 aa, Artificial Sequence
  Description of Artificial Sequence: Synthetic peptide
  Seed: ANQRLNPMHQLLRHF
ANQRINPFHSLLKHF

SEQ ID NO: 213129 - protein, 15 aa, Artificial Sequence
  Description of Artificial Sequence: Synthetic peptide
  Seed: ANQRLNPMHQLLRHF
ANQRINPFHSLLLHF

SEQ ID NO: 213130 - protein, 15 aa, Artificial Sequence
  Description of Artificial Sequence: Synthetic peptide
  Seed: ANQRLNPMHQLLRHF
ANQRINPFHSLLMHF

SEQ ID NO: 213131 - protein, 15 aa, Artificial Sequence
  Description of Artificial Sequence: Synthetic peptide
  Seed: ANQRLNPMHQLLRHF
ANQRINPFHSLLNHF

SEQ ID NO: 213132 - protein, 15 aa, Artificial Sequence
  Description of Artificial Sequence: Synthetic peptide
  Seed: ANQRLNPMHQLLRHF
ANQRINPFHSLLRHF

SEQ ID NO: 213133 - protein, 15 aa, Artificial Sequence
  Description of Artificial Sequence: Synthetic peptide
  Seed: ANQRLNPMHQLLRHF
ANQRINPFHSLLSHF

SEQ ID NO: 213134 - protein, 15 aa, Artificial Sequence
  Description of Artificial Sequence: Synthetic peptide
  Seed: ANQRLNPMHQLLRHF
ANQRINPFHSLLTHF

SEQ ID NO: 213135 - protein, 15 aa, Artificial Sequence
  Description of Artificial Sequence: Synthetic peptide
  Seed: ANQRLNPMHQLLRHF
ANQRINPFHSLLVHF

SEQ ID NO: 213136 - protein, 15 aa, Artificial Sequence
  Description of Artificial Sequence: Synthetic peptide
  Seed: ANQRLNPMHQLLRHF
ANQRINPFHTLLAHF

SEQ ID NO: 213137 - protein, 15 aa, Artificial Sequence
  Description of Artificial Sequence: Synthetic peptide
  Seed: ANQRLNPMHQLLRHF
ANQRINPFHTLLIHF

SEQ ID NO: 213138 - protein, 15 aa, Artificial Sequence
  Description of Artificial Sequence: Synthetic peptide
  Seed: ANQRLNPMHQLLRHF
ANQRINPFHTLLLHF

SEQ ID NO: 213139 - protein, 15 aa, Artificial Sequence
  Description of Artificial Sequence: Synthetic peptide
  Seed: ANQRLNPMHQLLRHF
ANQRINPFHTLLMHF

SEQ ID NO: 213140 - protein, 15 aa, Artificial Sequence
  Description of Artificial Sequence: Synthetic peptide
  Seed: ANQRLNPMHQLLRHF
ANQRINPFHTLLSHF

SEQ ID NO: 213141 - protein, 15 aa, Artificial Sequence
  Description of Artificial Sequence: Synthetic peptide
  Seed: ANQRLNPMHQLLRHF
ANQRINPFHTLLTHF

SEQ ID NO: 213142 - protein, 15 aa, Artificial Sequence
  Description of Artificial Sequence: Synthetic peptide
  Seed: ANQRLNPMHQLLRHF
ANQRINPFHTLLVHF

SEQ ID NO: 213143 - protein, 15 aa, Artificial Sequence
  Description of Artificial Sequence: Synthetic peptide
  Seed: ANQRLNPMHQLLRHF
ANQRINPFHVLLLHF

SEQ ID NO: 213144 - protein, 15 aa, Artificial Sequence
  Description of Artificial Sequence: Synthetic peptide
  Seed: ANQRLNPMHQLLRHF
ANQRINPFHVLLVHF

SEQ ID NO: 213145 - protein, 15 aa, Artificial Sequence
  Description of Artificial Sequence: Synthetic peptide
  Seed: ANQRLNPMHQLLRHF
ANQRINPGHALLAHF

SEQ ID NO: 213146 - protein, 15 aa, Artificial Sequence
  Description of Artificial Sequence: Synthetic peptide
  Seed: ANQRLNPMHQLLRHF
ANQRINPGHALLIHF

SEQ ID NO: 213147 - protein, 15 aa, Artificial Sequence
  Description of Artificial Sequence: Synthetic peptide
  Seed: ANQRLNPMHQLLRHF
ANQRINPGHALLLHF

SEQ ID NO: 213148 - protein, 15 aa, Artificial Sequence
  Description of Artificial Sequence: Synthetic peptide
  Seed: ANQRLNPMHQLLRHF
ANQRINPGHALLMHF

SEQ ID NO: 213149 - protein, 15 aa, Artificial Sequence
  Description of Artificial Sequence: Synthetic peptide
  Seed: ANQRLNPMHQLLRHF
ANQRINPGHALLVHF

SEQ ID NO: 213150 - protein, 15 aa, Artificial Sequence
  Description of Artificial Sequence: Synthetic peptide
  Seed: ANQRLNPMHQLLRHF
ANQRINPGHGLLIHF

SEQ ID NO: 213151 - protein, 15 aa, Artificial Sequence
  Description of Artificial Sequence: Synthetic peptide
  Seed: ANQRLNPMHQLLRHF
ANQRINPGHGLLLHF

SEQ ID NO: 213152 - protein, 15 aa, Artificial Sequence
  Description of Artificial Sequence: Synthetic peptide
  Seed: ANQRLNPMHQLLRHF
ANQRINPGHGLLVHF

SEQ ID NO: 213153 - protein, 15 aa, Artificial Sequence
  Description of Artificial Sequence: Synthetic peptide
  Seed: ANQRLNPMHQLLRHF
ANQRINPGHPLLLHF

SEQ ID NO: 213154 - protein, 15 aa, Artificial Sequence
  Description of Artificial Sequence: Synthetic peptide
  Seed: ANQRLNPMHQLLRHF
ANQRINPGHSLLAHF

SEQ ID NO: 213155 - protein, 15 aa, Artificial Sequence
  Description of Artificial Sequence: Synthetic peptide
  Seed: ANQRLNPMHQLLRHF
ANQRINPGHSLLIHF

SEQ ID NO: 213156 - protein, 15 aa, Artificial Sequence
  Description of Artificial Sequence: Synthetic peptide
  Seed: ANQRLNPMHQLLRHF
ANQRINPGHSLLLHF

SEQ ID NO: 213157 - protein, 15 aa, Artificial Sequence
  Description of Artificial Sequence: Synthetic peptide
  Seed: ANQRLNPMHQLLRHF
ANQRINPGHSLLVHF

SEQ ID NO: 213158 - protein, 15 aa, Artificial Sequence
  Description of Artificial Sequence: Synthetic peptide
  Seed: ANQRLNPMHQLLRHF
ANQRINPHHALLIHF

SEQ ID NO: 213159 - protein, 15 aa, Artificial Sequence
  Description of Artificial Sequence: Synthetic peptide
  Seed: ANQRLNPMHQLLRHF
ANQRINPHHALLKHF

SEQ ID NO: 213160 - protein, 15 aa, Artificial Sequence
  Description of Artificial Sequence: Synthetic peptide
  Seed: ANQRLNPMHQLLRHF
ANQRINPHHALLRHF

SEQ ID NO: 213161 - protein, 15 aa, Artificial Sequence
  Description of Artificial Sequence: Synthetic peptide
  Seed: ANQRLNPMHQLLRHF
ANQRINPHHFLLLHF

SEQ ID NO: 213162 - protein, 15 aa, Artificial Sequence
  Description of Artificial Sequence: Synthetic peptide
  Seed: ANQRLNPMHQLLRHF
ANQRINPHHILLRHF

SEQ ID NO: 213163 - protein, 15 aa, Artificial Sequence
  Description of Artificial Sequence: Synthetic peptide
  Seed: ANQRLNPMHQLLRHF
ANQRINPHHKLLRHF

SEQ ID NO: 213164 - protein, 15 aa, Artificial Sequence
  Description of Artificial Sequence: Synthetic peptide
  Seed: ANQRLNPMHQLLRHF
ANQRINPHHNLLRHF

SEQ ID NO: 213165 - protein, 15 aa, Artificial Sequence
  Description of Artificial Sequence: Synthetic peptide
  Seed: ANQRLNPMHQLLRHF
ANQRINPHHRLLAHF

SEQ ID NO: 213166 - protein, 15 aa, Artificial Sequence
  Description of Artificial Sequence: Synthetic peptide
  Seed: ANQRLNPMHQLLRHF
ANQRINPHHRLLFHF

SEQ ID NO: 213167 - protein, 15 aa, Artificial Sequence
  Description of Artificial Sequence: Synthetic peptide
  Seed: ANQRLNPMHQLLRHF
ANQRINPHHRLLHHF

SEQ ID NO: 213168 - protein, 15 aa, Artificial Sequence
  Description of Artificial Sequence: Synthetic peptide
  Seed: ANQRLNPMHQLLRHF
ANQRINPHHRLLIHF

SEQ ID NO: 213169 - protein, 15 aa, Artificial Sequence
  Description of Artificial Sequence: Synthetic peptide
  Seed: ANQRLNPMHQLLRHF
ANQRINPHHRLLKHF

SEQ ID NO: 213170 - protein, 15 aa, Artificial Sequence
  Description of Artificial Sequence: Synthetic peptide
  Seed: ANQRLNPMHQLLRHF
ANQRINPHHRLLLHF

SEQ ID NO: 213171 - protein, 15 aa, Artificial Sequence
  Description of Artificial Sequence: Synthetic peptide
  Seed: ANQRLNPMHQLLRHF
ANQRINPHHRLLMHF

SEQ ID NO: 213172 - protein, 15 aa, Artificial Sequence
  Description of Artificial Sequence: Synthetic peptide
  Seed: ANQRLNPMHQLLRHF
ANQRINPHHRLLRHF

SEQ ID NO: 213173 - protein, 15 aa, Artificial Sequence
  Description of Artificial Sequence: Synthetic peptide
  Seed: ANQRLNPMHQLLRHF
ANQRINPHHRLLSHF

SEQ ID NO: 213174 - protein, 15 aa, Artificial Sequence
  Description of Artificial Sequence: Synthetic peptide
  Seed: ANQRLNPMHQLLRHF
ANQRINPHHRLLVHF

SEQ ID NO: 213175 - protein, 15 aa, Artificial Sequence
  Description of Artificial Sequence: Synthetic peptide
  Seed: ANQRLNPMHQLLRHF
ANQRINPHHRLLYHF

SEQ ID NO: 213176 - protein, 15 aa, Artificial Sequence
  Description of Artificial Sequence: Synthetic peptide
  Seed: ANQRLNPMHQLLRHF
ANQRINPHHSLLLHF

SEQ ID NO: 213177 - protein, 15 aa, Artificial Sequence
  Description of Artificial Sequence: Synthetic peptide
  Seed: ANQRLNPMHQLLRHF
ANQRINPHHSLLRHF

SEQ ID NO: 213178 - protein, 15 aa, Artificial Sequence
  Description of Artificial Sequence: Synthetic peptide
  Seed: ANQRLNPMHQLLRHF
ANQRINPHHTLLRHF

SEQ ID NO: 213179 - protein, 15 aa, Artificial Sequence
  Description of Artificial Sequence: Synthetic peptide
  Seed: ANQRLNPMHQLLRHF
ANQRINPHHVLLRHF

SEQ ID NO: 213180 - protein, 15 aa, Artificial Sequence
  Description of Artificial Sequence: Synthetic peptide
  Seed: ANQRLNPMHQLLRHF
ANQRINPIHALLAHF

SEQ ID NO: 213181 - protein, 15 aa, Artificial Sequence
  Description of Artificial Sequence: Synthetic peptide
  Seed: ANQRLNPMHQLLRHF
ANQRINPIHALLCHF

SEQ ID NO: 213182 - protein, 15 aa, Artificial Sequence
  Description of Artificial Sequence: Synthetic peptide
  Seed: ANQRLNPMHQLLRHF
ANQRINPIHALLGHF

SEQ ID NO: 213183 - protein, 15 aa, Artificial Sequence
  Description of Artificial Sequence: Synthetic peptide
  Seed: ANQRLNPMHQLLRHF
ANQRINPIHALLIHF

SEQ ID NO: 213184 - protein, 15 aa, Artificial Sequence
  Description of Artificial Sequence: Synthetic peptide
  Seed: ANQRLNPMHQLLRHF
ANQRINPIHALLLHF

SEQ ID NO: 213185 - protein, 15 aa, Artificial Sequence
  Description of Artificial Sequence: Synthetic peptide
  Seed: ANQRLNPMHQLLRHF
ANQRINPIHALLMHF

SEQ ID NO: 213186 - protein, 15 aa, Artificial Sequence
  Description of Artificial Sequence: Synthetic peptide
  Seed: ANQRLNPMHQLLRHF
ANQRINPIHALLRHF

SEQ ID NO: 213187 - protein, 15 aa, Artificial Sequence
  Description of Artificial Sequence: Synthetic peptide
  Seed: ANQRLNPMHQLLRHF
ANQRINPIHALLSHF

SEQ ID NO: 213188 - protein, 15 aa, Artificial Sequence
  Description of Artificial Sequence: Synthetic peptide
  Seed: ANQRLNPMHQLLRHF
ANQRINPIHALLTHF

SEQ ID NO: 213189 - protein, 15 aa, Artificial Sequence
  Description of Artificial Sequence: Synthetic peptide
  Seed: ANQRLNPMHQLLRHF
ANQRINPIHALLVHF

SEQ ID NO: 213190 - protein, 15 aa, Artificial Sequence
  Description of Artificial Sequence: Synthetic peptide
  Seed: ANQRLNPMHQLLRHF
ANQRINPIHFLLAHF

SEQ ID NO: 213191 - protein, 15 aa, Artificial Sequence
  Description of Artificial Sequence: Synthetic peptide
  Seed: ANQRLNPMHQLLRHF
ANQRINPIHFLLEHF

SEQ ID NO: 213192 - protein, 15 aa, Artificial Sequence
  Description of Artificial Sequence: Synthetic peptide
  Seed: ANQRLNPMHQLLRHF
ANQRINPIHFLLFHF

SEQ ID NO: 213193 - protein, 15 aa, Artificial Sequence
  Description of Artificial Sequence: Synthetic peptide
  Seed: ANQRLNPMHQLLRHF
ANQRINPIHFLLIHF

SEQ ID NO: 213194 - protein, 15 aa, Artificial Sequence
  Description of Artificial Sequence: Synthetic peptide
  Seed: ANQRLNPMHQLLRHF
ANQRINPIHFLLLHF

SEQ ID NO: 213195 - protein, 15 aa, Artificial Sequence
  Description of Artificial Sequence: Synthetic peptide
  Seed: ANQRLNPMHQLLRHF
ANQRINPIHFLLMHF

SEQ ID NO: 213196 - protein, 15 aa, Artificial Sequence
  Description of Artificial Sequence: Synthetic peptide
  Seed: ANQRLNPMHQLLRHF
ANQRINPIHFLLNHF

SEQ ID NO: 213197 - protein, 15 aa, Artificial Sequence
  Description of Artificial Sequence: Synthetic peptide
  Seed: ANQRLNPMHQLLRHF
ANQRINPIHFLLTHF

SEQ ID NO: 213198 - protein, 15 aa, Artificial Sequence
  Description of Artificial Sequence: Synthetic peptide
  Seed: ANQRLNPMHQLLRHF
ANQRINPIHFLLVHF

SEQ ID NO: 213199 - protein, 15 aa, Artificial Sequence
  Description of Artificial Sequence: Synthetic peptide
  Seed: ANQRLNPMHQLLRHF
ANQRINPIHGLLAHF

SEQ ID NO: 213200 - protein, 15 aa, Artificial Sequence
  Description of Artificial Sequence: Synthetic peptide
  Seed: ANQRLNPMHQLLRHF
ANQRINPIHGLLGHF

SEQ ID NO: 213201 - protein, 15 aa, Artificial Sequence
  Description of Artificial Sequence: Synthetic peptide
  Seed: ANQRLNPMHQLLRHF
ANQRINPIHGLLIHF

SEQ ID NO: 213202 - protein, 15 aa, Artificial Sequence
  Description of Artificial Sequence: Synthetic peptide
  Seed: ANQRLNPMHQLLRHF
ANQRINPIHGLLLHF

SEQ ID NO: 213203 - protein, 15 aa, Artificial Sequence
  Description of Artificial Sequence: Synthetic peptide
  Seed: ANQRLNPMHQLLRHF
ANQRINPIHGLLMHF

SEQ ID NO: 213204 - protein, 15 aa, Artificial Sequence
  Description of Artificial Sequence: Synthetic peptide
  Seed: ANQRLNPMHQLLRHF
ANQRINPIHGLLSHF

SEQ ID NO: 213205 - protein, 15 aa, Artificial Sequence
  Description of Artificial Sequence: Synthetic peptide
  Seed: ANQRLNPMHQLLRHF
ANQRINPIHGLLTHF

SEQ ID NO: 213206 - protein, 15 aa, Artificial Sequence
  Description of Artificial Sequence: Synthetic peptide
  Seed: ANQRLNPMHQLLRHF
ANQRINPIHGLLVHF

SEQ ID NO: 213207 - protein, 15 aa, Artificial Sequence
  Description of Artificial Sequence: Synthetic peptide
  Seed: ANQRLNPMHQLLRHF
ANQRINPIHHLLSHF

SEQ ID NO: 213208 - protein, 15 aa, Artificial Sequence
  Description of Artificial Sequence: Synthetic peptide
  Seed: ANQRLNPMHQLLRHF
ANQRINPIHKLLAHF

SEQ ID NO: 213209 - protein, 15 aa, Artificial Sequence
  Description of Artificial Sequence: Synthetic peptide
  Seed: ANQRLNPMHQLLRHF
ANQRINPIHKLLFHF

SEQ ID NO: 213210 - protein, 15 aa, Artificial Sequence
  Description of Artificial Sequence: Synthetic peptide
  Seed: ANQRLNPMHQLLRHF
ANQRINPIHKLLGHF

SEQ ID NO: 213211 - protein, 15 aa, Artificial Sequence
  Description of Artificial Sequence: Synthetic peptide
  Seed: ANQRLNPMHQLLRHF
ANQRINPIHKLLHHF

SEQ ID NO: 213212 - protein, 15 aa, Artificial Sequence
  Description of Artificial Sequence: Synthetic peptide
  Seed: ANQRLNPMHQLLRHF
ANQRINPIHKLLIHF

SEQ ID NO: 213213 - protein, 15 aa, Artificial Sequence
  Description of Artificial Sequence: Synthetic peptide
  Seed: ANQRLNPMHQLLRHF
ANQRINPIHKLLKHF

SEQ ID NO: 213214 - protein, 15 aa, Artificial Sequence
  Description of Artificial Sequence: Synthetic peptide
  Seed: ANQRLNPMHQLLRHF
ANQRINPIHKLLLHF

SEQ ID NO: 213215 - protein, 15 aa, Artificial Sequence
  Description of Artificial Sequence: Synthetic peptide
  Seed: ANQRLNPMHQLLRHF
ANQRINPIHKLLMHF

SEQ ID NO: 213216 - protein, 15 aa, Artificial Sequence
  Description of Artificial Sequence: Synthetic peptide
  Seed: ANQRLNPMHQLLRHF
ANQRINPIHKLLNHF

SEQ ID NO: 213217 - protein, 15 aa, Artificial Sequence
  Description of Artificial Sequence: Synthetic peptide
  Seed: ANQRLNPMHQLLRHF
ANQRINPIHKLLPHF

SEQ ID NO: 213218 - protein, 15 aa, Artificial Sequence
  Description of Artificial Sequence: Synthetic peptide
  Seed: ANQRLNPMHQLLRHF
ANQRINPIHKLLQHF

SEQ ID NO: 213219 - protein, 15 aa, Artificial Sequence
  Description of Artificial Sequence: Synthetic peptide
  Seed: ANQRLNPMHQLLRHF
ANQRINPIHKLLRHF

SEQ ID NO: 213220 - protein, 15 aa, Artificial Sequence
  Description of Artificial Sequence: Synthetic peptide
  Seed: ANQRLNPMHQLLRHF
ANQRINPIHKLLSHF

SEQ ID NO: 213221 - protein, 15 aa, Artificial Sequence
  Description of Artificial Sequence: Synthetic peptide
  Seed: ANQRLNPMHQLLRHF
ANQRINPIHKLLTHF

SEQ ID NO: 213222 - protein, 15 aa, Artificial Sequence
  Description of Artificial Sequence: Synthetic peptide
  Seed: ANQRLNPMHQLLRHF
ANQRINPIHKLLVHF

SEQ ID NO: 213223 - protein, 15 aa, Artificial Sequence
  Description of Artificial Sequence: Synthetic peptide
  Seed: ANQRLNPMHQLLRHF
ANQRINPIHKLLYHF

SEQ ID NO: 213224 - protein, 15 aa, Artificial Sequence
  Description of Artificial Sequence: Synthetic peptide
  Seed: ANQRLNPMHQLLRHF
ANQRINPIHNLLAHF

SEQ ID NO: 213225 - protein, 15 aa, Artificial Sequence
  Description of Artificial Sequence: Synthetic peptide
  Seed: ANQRLNPMHQLLRHF
ANQRINPIHNLLFHF

SEQ ID NO: 213226 - protein, 15 aa, Artificial Sequence
  Description of Artificial Sequence: Synthetic peptide
  Seed: ANQRLNPMHQLLRHF
ANQRINPIHNLLIHF

SEQ ID NO: 213227 - protein, 15 aa, Artificial Sequence
  Description of Artificial Sequence: Synthetic peptide
  Seed: ANQRLNPMHQLLRHF
ANQRINPIHNLLLHF

SEQ ID NO: 213228 - protein, 15 aa, Artificial Sequence
  Description of Artificial Sequence: Synthetic peptide
  Seed: ANQRLNPMHQLLRHF
ANQRINPIHNLLMHF

SEQ ID NO: 213229 - protein, 15 aa, Artificial Sequence
  Description of Artificial Sequence: Synthetic peptide
  Seed: ANQRLNPMHQLLRHF
ANQRINPIHNLLTHF

SEQ ID NO: 213230 - protein, 15 aa, Artificial Sequence
  Description of Artificial Sequence: Synthetic peptide
  Seed: ANQRLNPMHQLLRHF
ANQRINPIHNLLVHF

SEQ ID NO: 213231 - protein, 15 aa, Artificial Sequence
  Description of Artificial Sequence: Synthetic peptide
  Seed: ANQRLNPMHQLLRHF
ANQRINPIHPLLAHF

SEQ ID NO: 213232 - protein, 15 aa, Artificial Sequence
  Description of Artificial Sequence: Synthetic peptide
  Seed: ANQRLNPMHQLLRHF
ANQRINPIHPLLIHF

SEQ ID NO: 213233 - protein, 15 aa, Artificial Sequence
  Description of Artificial Sequence: Synthetic peptide
  Seed: ANQRLNPMHQLLRHF
ANQRINPIHPLLLHF

SEQ ID NO: 213234 - protein, 15 aa, Artificial Sequence
  Description of Artificial Sequence: Synthetic peptide
  Seed: ANQRLNPMHQLLRHF
ANQRINPIHPLLMHF

SEQ ID NO: 213235 - protein, 15 aa, Artificial Sequence
  Description of Artificial Sequence: Synthetic peptide
  Seed: ANQRLNPMHQLLRHF
ANQRINPIHPLLRHF

SEQ ID NO: 213236 - protein, 15 aa, Artificial Sequence
  Description of Artificial Sequence: Synthetic peptide
  Seed: ANQRLNPMHQLLRHF
ANQRINPIHPLLSHF

SEQ ID NO: 213237 - protein, 15 aa, Artificial Sequence
  Description of Artificial Sequence: Synthetic peptide
  Seed: ANQRLNPMHQLLRHF
ANQRINPIHPLLTHF

SEQ ID NO: 213238 - protein, 15 aa, Artificial Sequence
  Description of Artificial Sequence: Synthetic peptide
  Seed: ANQRLNPMHQLLRHF
ANQRINPIHPLLVHF

SEQ ID NO: 213239 - protein, 15 aa, Artificial Sequence
  Description of Artificial Sequence: Synthetic peptide
  Seed: ANQRLNPMHQLLRHF
ANQRINPIHRLLAHF

SEQ ID NO: 213240 - protein, 15 aa, Artificial Sequence
  Description of Artificial Sequence: Synthetic peptide
  Seed: ANQRLNPMHQLLRHF
ANQRINPIHRLLFHF

SEQ ID NO: 213241 - protein, 15 aa, Artificial Sequence
  Description of Artificial Sequence: Synthetic peptide
  Seed: ANQRLNPMHQLLRHF
ANQRINPIHRLLGHF

SEQ ID NO: 213242 - protein, 15 aa, Artificial Sequence
  Description of Artificial Sequence: Synthetic peptide
  Seed: ANQRLNPMHQLLRHF
ANQRINPIHRLLHHF

SEQ ID NO: 213243 - protein, 15 aa, Artificial Sequence
  Description of Artificial Sequence: Synthetic peptide
  Seed: ANQRLNPMHQLLRHF
ANQRINPIHRLLIHF

SEQ ID NO: 213244 - protein, 15 aa, Artificial Sequence
  Description of Artificial Sequence: Synthetic peptide
  Seed: ANQRLNPMHQLLRHF
ANQRINPIHRLLKHF

SEQ ID NO: 213245 - protein, 15 aa, Artificial Sequence
  Description of Artificial Sequence: Synthetic peptide
  Seed: ANQRLNPMHQLLRHF
ANQRINPIHRLLLHF

SEQ ID NO: 213246 - protein, 15 aa, Artificial Sequence
  Description of Artificial Sequence: Synthetic peptide
  Seed: ANQRLNPMHQLLRHF
ANQRINPIHRLLMHF

SEQ ID NO: 213247 - protein, 15 aa, Artificial Sequence
  Description of Artificial Sequence: Synthetic peptide
  Seed: ANQRLNPMHQLLRHF
ANQRINPIHRLLNHF

SEQ ID NO: 213248 - protein, 15 aa, Artificial Sequence
  Description of Artificial Sequence: Synthetic peptide
  Seed: ANQRLNPMHQLLRHF
ANQRINPIHRLLPHF

SEQ ID NO: 213249 - protein, 15 aa, Artificial Sequence
  Description of Artificial Sequence: Synthetic peptide
  Seed: ANQRLNPMHQLLRHF
ANQRINPIHRLLQHF

SEQ ID NO: 213250 - protein, 15 aa, Artificial Sequence
  Description of Artificial Sequence: Synthetic peptide
  Seed: ANQRLNPMHQLLRHF
ANQRINPIHRLLRHF

SEQ ID NO: 213251 - protein, 15 aa, Artificial Sequence
  Description of Artificial Sequence: Synthetic peptide
  Seed: ANQRLNPMHQLLRHF
ANQRINPIHRLLSHF

SEQ ID NO: 213252 - protein, 15 aa, Artificial Sequence
  Description of Artificial Sequence: Synthetic peptide
  Seed: ANQRLNPMHQLLRHF
ANQRINPIHRLLTHF

SEQ ID NO: 213253 - protein, 15 aa, Artificial Sequence
  Description of Artificial Sequence: Synthetic peptide
  Seed: ANQRLNPMHQLLRHF
ANQRINPIHRLLVHF

SEQ ID NO: 213254 - protein, 15 aa, Artificial Sequence
  Description of Artificial Sequence: Synthetic peptide
  Seed: ANQRLNPMHQLLRHF
ANQRINPIHRLLWHF

SEQ ID NO: 213255 - protein, 15 aa, Artificial Sequence
  Description of Artificial Sequence: Synthetic peptide
  Seed: ANQRLNPMHQLLRHF
ANQRINPIHRLLYHF

SEQ ID NO: 213256 - protein, 15 aa, Artificial Sequence
  Description of Artificial Sequence: Synthetic peptide
  Seed: ANQRLNPMHQLLRHF
ANQRINPIHSLLAHF

SEQ ID NO: 213257 - protein, 15 aa, Artificial Sequence
  Description of Artificial Sequence: Synthetic peptide
  Seed: ANQRLNPMHQLLRHF
ANQRINPIHSLLGHF

SEQ ID NO: 213258 - protein, 15 aa, Artificial Sequence
  Description of Artificial Sequence: Synthetic peptide
  Seed: ANQRLNPMHQLLRHF
ANQRINPIHSLLIHF

SEQ ID NO: 213259 - protein, 15 aa, Artificial Sequence
  Description of Artificial Sequence: Synthetic peptide
  Seed: ANQRLNPMHQLLRHF
ANQRINPIHSLLLHF

SEQ ID NO: 213260 - protein, 15 aa, Artificial Sequence
  Description of Artificial Sequence: Synthetic peptide
  Seed: ANQRLNPMHQLLRHF
ANQRINPIHSLLMHF

SEQ ID NO: 213261 - protein, 15 aa, Artificial Sequence
  Description of Artificial Sequence: Synthetic peptide
  Seed: ANQRLNPMHQLLRHF
ANQRINPIHSLLRHF

SEQ ID NO: 213262 - protein, 15 aa, Artificial Sequence
  Description of Artificial Sequence: Synthetic peptide
  Seed: ANQRLNPMHQLLRHF
ANQRINPIHSLLSHF

SEQ ID NO: 213263 - protein, 15 aa, Artificial Sequence
  Description of Artificial Sequence: Synthetic peptide
  Seed: ANQRLNPMHQLLRHF
ANQRINPIHSLLTHF

SEQ ID NO: 213264 - protein, 15 aa, Artificial Sequence
  Description of Artificial Sequence: Synthetic peptide
  Seed: ANQRLNPMHQLLRHF
ANQRINPIHSLLVHF

SEQ ID NO: 213265 - protein, 15 aa, Artificial Sequence
  Description of Artificial Sequence: Synthetic peptide
  Seed: ANQRLNPMHQLLRHF
ANQRINPIHTLLAHF

SEQ ID NO: 213266 - protein, 15 aa, Artificial Sequence
  Description of Artificial Sequence: Synthetic peptide
  Seed: ANQRLNPMHQLLRHF
ANQRINPIHTLLIHF

SEQ ID NO: 213267 - protein, 15 aa, Artificial Sequence
  Description of Artificial Sequence: Synthetic peptide
  Seed: ANQRLNPMHQLLRHF
ANQRINPIHTLLLHF

SEQ ID NO: 213268 - protein, 15 aa, Artificial Sequence
  Description of Artificial Sequence: Synthetic peptide
  Seed: ANQRLNPMHQLLRHF
ANQRINPIHTLLRHF

SEQ ID NO: 213269 - protein, 15 aa, Artificial Sequence
  Description of Artificial Sequence: Synthetic peptide
  Seed: ANQRLNPMHQLLRHF
ANQRINPIHTLLTHF

SEQ ID NO: 213270 - protein, 15 aa, Artificial Sequence
  Description of Artificial Sequence: Synthetic peptide
  Seed: ANQRLNPMHQLLRHF
ANQRINPIHTLLVHF

SEQ ID NO: 213271 - protein, 15 aa, Artificial Sequence
  Description of Artificial Sequence: Synthetic peptide
  Seed: ANQRLNPMHQLLRHF
ANQRINPIHVLLRHF

SEQ ID NO: 213272 - protein, 15 aa, Artificial Sequence
  Description of Artificial Sequence: Synthetic peptide
  Seed: ANQRLNPMHQLLRHF
ANQRINPIHVLLVHF

SEQ ID NO: 213273 - protein, 15 aa, Artificial Sequence
  Description of Artificial Sequence: Synthetic peptide
  Seed: ANQRLNPMHQLLRHF
ANQRINPIHWLLLHF

SEQ ID NO: 213274 - protein, 15 aa, Artificial Sequence
  Description of Artificial Sequence: Synthetic peptide
  Seed: ANQRLNPMHQLLRHF
ANQRINPIHYLLLHF

SEQ ID NO: 213275 - protein, 15 aa, Artificial Sequence
  Description of Artificial Sequence: Synthetic peptide
  Seed: ANQRLNPMHQLLRHF
ANQRINPKHKLLSHF

SEQ ID NO: 213276 - protein, 15 aa, Artificial Sequence
  Description of Artificial Sequence: Synthetic peptide
  Seed: ANQRLNPMHQLLRHF
ANQRINPKHRLLAHF

SEQ ID NO: 213277 - protein, 15 aa, Artificial Sequence
  Description of Artificial Sequence: Synthetic peptide
  Seed: ANQRLNPMHQLLRHF
ANQRINPKHRLLHHF

SEQ ID NO: 213278 - protein, 15 aa, Artificial Sequence
  Description of Artificial Sequence: Synthetic peptide
  Seed: ANQRLNPMHQLLRHF
ANQRINPKHRLLLHF

SEQ ID NO: 213279 - protein, 15 aa, Artificial Sequence
  Description of Artificial Sequence: Synthetic peptide
  Seed: ANQRLNPMHQLLRHF
ANQRINPKHRLLRHF

SEQ ID NO: 213280 - protein, 15 aa, Artificial Sequence
  Description of Artificial Sequence: Synthetic peptide
  Seed: ANQRLNPMHQLLRHF
ANQRINPKHRLLSHF

SEQ ID NO: 213281 - protein, 15 aa, Artificial Sequence
  Description of Artificial Sequence: Synthetic peptide
  Seed: ANQRLNPMHQLLRHF
ANQRINPLHALLAHF

SEQ ID NO: 213282 - protein, 15 aa, Artificial Sequence
  Description of Artificial Sequence: Synthetic peptide
  Seed: ANQRLNPMHQLLRHF
ANQRINPLHALLCHF

SEQ ID NO: 213283 - protein, 15 aa, Artificial Sequence
  Description of Artificial Sequence: Synthetic peptide
  Seed: ANQRLNPMHQLLRHF
ANQRINPLHALLFHF

SEQ ID NO: 213284 - protein, 15 aa, Artificial Sequence
  Description of Artificial Sequence: Synthetic peptide
  Seed: ANQRLNPMHQLLRHF
ANQRINPLHALLGHF

SEQ ID NO: 213285 - protein, 15 aa, Artificial Sequence
  Description of Artificial Sequence: Synthetic peptide
  Seed: ANQRLNPMHQLLRHF
ANQRINPLHALLHHF

SEQ ID NO: 213286 - protein, 15 aa, Artificial Sequence
  Description of Artificial Sequence: Synthetic peptide
  Seed: ANQRLNPMHQLLRHF
ANQRINPLHALLIHF

SEQ ID NO: 213287 - protein, 15 aa, Artificial Sequence
  Description of Artificial Sequence: Synthetic peptide
  Seed: ANQRLNPMHQLLRHF
ANQRINPLHALLKHF

SEQ ID NO: 213288 - protein, 15 aa, Artificial Sequence
  Description of Artificial Sequence: Synthetic peptide
  Seed: ANQRLNPMHQLLRHF
ANQRINPLHALLLHF

SEQ ID NO: 213289 - protein, 15 aa, Artificial Sequence
  Description of Artificial Sequence: Synthetic peptide
  Seed: ANQRLNPMHQLLRHF
ANQRINPLHALLMHF

SEQ ID NO: 213290 - protein, 15 aa, Artificial Sequence
  Description of Artificial Sequence: Synthetic peptide
  Seed: ANQRLNPMHQLLRHF
ANQRINPLHALLNHF

SEQ ID NO: 213291 - protein, 15 aa, Artificial Sequence
  Description of Artificial Sequence: Synthetic peptide
  Seed: ANQRLNPMHQLLRHF
ANQRINPLHALLPHF

SEQ ID NO: 213292 - protein, 15 aa, Artificial Sequence
  Description of Artificial Sequence: Synthetic peptide
  Seed: ANQRLNPMHQLLRHF
ANQRINPLHALLRHF

SEQ ID NO: 213293 - protein, 15 aa, Artificial Sequence
  Description of Artificial Sequence: Synthetic peptide
  Seed: ANQRLNPMHQLLRHF
ANQRINPLHALLSHF

SEQ ID NO: 213294 - protein, 15 aa, Artificial Sequence
  Description of Artificial Sequence: Synthetic peptide
  Seed: ANQRLNPMHQLLRHF
ANQRINPLHALLTHF

SEQ ID NO: 213295 - protein, 15 aa, Artificial Sequence
  Description of Artificial Sequence: Synthetic peptide
  Seed: ANQRLNPMHQLLRHF
ANQRINPLHALLVHF

SEQ ID NO: 213296 - protein, 15 aa, Artificial Sequence
  Description of Artificial Sequence: Synthetic peptide
  Seed: ANQRLNPMHQLLRHF
ANQRINPLHALLYHF

SEQ ID NO: 213297 - protein, 15 aa, Artificial Sequence
  Description of Artificial Sequence: Synthetic peptide
  Seed: ANQRLNPMHQLLRHF
ANQRINPLHFLLEHF

SEQ ID NO: 213298 - protein, 15 aa, Artificial Sequence
  Description of Artificial Sequence: Synthetic peptide
  Seed: ANQRLNPMHQLLRHF
ANQRINPLHFLLFHF

SEQ ID NO: 213299 - protein, 15 aa, Artificial Sequence
  Description of Artificial Sequence: Synthetic peptide
  Seed: ANQRLNPMHQLLRHF
ANQRINPLHFLLIHF

SEQ ID NO: 213300 - protein, 15 aa, Artificial Sequence
  Description of Artificial Sequence: Synthetic peptide
  Seed: ANQRLNPMHQLLRHF
ANQRINPLHFLLLHF

SEQ ID NO: 213301 - protein, 15 aa, Artificial Sequence
  Description of Artificial Sequence: Synthetic peptide
  Seed: ANQRLNPMHQLLRHF
ANQRINPLHFLLMHF

SEQ ID NO: 213302 - protein, 15 aa, Artificial Sequence
  Description of Artificial Sequence: Synthetic peptide
  Seed: ANQRLNPMHQLLRHF
ANQRINPLHFLLTHF

SEQ ID NO: 213303 - protein, 15 aa, Artificial Sequence
  Description of Artificial Sequence: Synthetic peptide
  Seed: ANQRLNPMHQLLRHF
ANQRINPLHFLLVHF

SEQ ID NO: 213304 - protein, 15 aa, Artificial Sequence
  Description of Artificial Sequence: Synthetic peptide
  Seed: ANQRLNPMHQLLRHF
ANQRINPLHGLLAHF

SEQ ID NO: 213305 - protein, 15 aa, Artificial Sequence
  Description of Artificial Sequence: Synthetic peptide
  Seed: ANQRLNPMHQLLRHF
ANQRINPLHGLLCHF

SEQ ID NO: 213306 - protein, 15 aa, Artificial Sequence
  Description of Artificial Sequence: Synthetic peptide
  Seed: ANQRLNPMHQLLRHF
ANQRINPLHGLLFHF

SEQ ID NO: 213307 - protein, 15 aa, Artificial Sequence
  Description of Artificial Sequence: Synthetic peptide
  Seed: ANQRLNPMHQLLRHF
ANQRINPLHGLLGHF

SEQ ID NO: 213308 - protein, 15 aa, Artificial Sequence
  Description of Artificial Sequence: Synthetic peptide
  Seed: ANQRLNPMHQLLRHF
ANQRINPLHGLLHHF

SEQ ID NO: 213309 - protein, 15 aa, Artificial Sequence
  Description of Artificial Sequence: Synthetic peptide
  Seed: ANQRLNPMHQLLRHF
ANQRINPLHGLLIHF

SEQ ID NO: 213310 - protein, 15 aa, Artificial Sequence
  Description of Artificial Sequence: Synthetic peptide
  Seed: ANQRLNPMHQLLRHF
ANQRINPLHGLLLHF

SEQ ID NO: 213311 - protein, 15 aa, Artificial Sequence
  Description of Artificial Sequence: Synthetic peptide
  Seed: ANQRLNPMHQLLRHF
ANQRINPLHGLLMHF

SEQ ID NO: 213312 - protein, 15 aa, Artificial Sequence
  Description of Artificial Sequence: Synthetic peptide
  Seed: ANQRLNPMHQLLRHF
ANQRINPLHGLLNHF

SEQ ID NO: 213313 - protein, 15 aa, Artificial Sequence
  Description of Artificial Sequence: Synthetic peptide
  Seed: ANQRLNPMHQLLRHF
ANQRINPLHGLLSHF

SEQ ID NO: 213314 - protein, 15 aa, Artificial Sequence
  Description of Artificial Sequence: Synthetic peptide
  Seed: ANQRLNPMHQLLRHF
ANQRINPLHGLLTHF

SEQ ID NO: 213315 - protein, 15 aa, Artificial Sequence
  Description of Artificial Sequence: Synthetic peptide
  Seed: ANQRLNPMHQLLRHF
ANQRINPLHGLLVHF

SEQ ID NO: 213316 - protein, 15 aa, Artificial Sequence
  Description of Artificial Sequence: Synthetic peptide
  Seed: ANQRLNPMHQLLRHF
ANQRINPLHHLLAHF

SEQ ID NO: 213317 - protein, 15 aa, Artificial Sequence
  Description of Artificial Sequence: Synthetic peptide
  Seed: ANQRLNPMHQLLRHF
ANQRINPLHHLLSHF

SEQ ID NO: 213318 - protein, 15 aa, Artificial Sequence
  Description of Artificial Sequence: Synthetic peptide
  Seed: ANQRLNPMHQLLRHF
ANQRINPLHILLAHF

SEQ ID NO: 213319 - protein, 15 aa, Artificial Sequence
  Description of Artificial Sequence: Synthetic peptide
  Seed: ANQRLNPMHQLLRHF
ANQRINPLHILLVHF

SEQ ID NO: 213320 - protein, 15 aa, Artificial Sequence
  Description of Artificial Sequence: Synthetic peptide
  Seed: ANQRLNPMHQLLRHF
ANQRINPLHKLLAHF

SEQ ID NO: 213321 - protein, 15 aa, Artificial Sequence
  Description of Artificial Sequence: Synthetic peptide
  Seed: ANQRLNPMHQLLRHF
ANQRINPLHKLLFHF

SEQ ID NO: 213322 - protein, 15 aa, Artificial Sequence
  Description of Artificial Sequence: Synthetic peptide
  Seed: ANQRLNPMHQLLRHF
ANQRINPLHKLLGHF

SEQ ID NO: 213323 - protein, 15 aa, Artificial Sequence
  Description of Artificial Sequence: Synthetic peptide
  Seed: ANQRLNPMHQLLRHF
ANQRINPLHKLLHHF

SEQ ID NO: 213324 - protein, 15 aa, Artificial Sequence
  Description of Artificial Sequence: Synthetic peptide
  Seed: ANQRLNPMHQLLRHF
ANQRINPLHKLLIHF

SEQ ID NO: 213325 - protein, 15 aa, Artificial Sequence
  Description of Artificial Sequence: Synthetic peptide
  Seed: ANQRLNPMHQLLRHF
ANQRINPLHKLLKHF

SEQ ID NO: 213326 - protein, 15 aa, Artificial Sequence
  Description of Artificial Sequence: Synthetic peptide
  Seed: ANQRLNPMHQLLRHF
ANQRINPLHKLLLHF

SEQ ID NO: 213327 - protein, 15 aa, Artificial Sequence
  Description of Artificial Sequence: Synthetic peptide
  Seed: ANQRLNPMHQLLRHF
ANQRINPLHKLLMHF

SEQ ID NO: 213328 - protein, 15 aa, Artificial Sequence
  Description of Artificial Sequence: Synthetic peptide
  Seed: ANQRLNPMHQLLRHF
ANQRINPLHKLLNHF

SEQ ID NO: 213329 - protein, 15 aa, Artificial Sequence
  Description of Artificial Sequence: Synthetic peptide
  Seed: ANQRLNPMHQLLRHF
ANQRINPLHKLLPHF

SEQ ID NO: 213330 - protein, 15 aa, Artificial Sequence
  Description of Artificial Sequence: Synthetic peptide
  Seed: ANQRLNPMHQLLRHF
ANQRINPLHKLLQHF

SEQ ID NO: 213331 - protein, 15 aa, Artificial Sequence
  Description of Artificial Sequence: Synthetic peptide
  Seed: ANQRLNPMHQLLRHF
ANQRINPLHKLLRHF

SEQ ID NO: 213332 - protein, 15 aa, Artificial Sequence
  Description of Artificial Sequence: Synthetic peptide
  Seed: ANQRLNPMHQLLRHF
ANQRINPLHKLLSHF

SEQ ID NO: 213333 - protein, 15 aa, Artificial Sequence
  Description of Artificial Sequence: Synthetic peptide
  Seed: ANQRLNPMHQLLRHF
ANQRINPLHKLLTHF

SEQ ID NO: 213334 - protein, 15 aa, Artificial Sequence
  Description of Artificial Sequence: Synthetic peptide
  Seed: ANQRLNPMHQLLRHF
ANQRINPLHKLLVHF

SEQ ID NO: 213335 - protein, 15 aa, Artificial Sequence
  Description of Artificial Sequence: Synthetic peptide
  Seed: ANQRLNPMHQLLRHF
ANQRINPLHKLLYHF

SEQ ID NO: 213336 - protein, 15 aa, Artificial Sequence
  Description of Artificial Sequence: Synthetic peptide
  Seed: ANQRLNPMHQLLRHF
ANQRINPLHNLLAHF

SEQ ID NO: 213337 - protein, 15 aa, Artificial Sequence
  Description of Artificial Sequence: Synthetic peptide
  Seed: ANQRLNPMHQLLRHF
ANQRINPLHNLLIHF

SEQ ID NO: 213338 - protein, 15 aa, Artificial Sequence
  Description of Artificial Sequence: Synthetic peptide
  Seed: ANQRLNPMHQLLRHF
ANQRINPLHNLLLHF

SEQ ID NO: 213339 - protein, 15 aa, Artificial Sequence
  Description of Artificial Sequence: Synthetic peptide
  Seed: ANQRLNPMHQLLRHF
ANQRINPLHNLLMHF

SEQ ID NO: 213340 - protein, 15 aa, Artificial Sequence
  Description of Artificial Sequence: Synthetic peptide
  Seed: ANQRLNPMHQLLRHF
ANQRINPLHNLLSHF

SEQ ID NO: 213341 - protein, 15 aa, Artificial Sequence
  Description of Artificial Sequence: Synthetic peptide
  Seed: ANQRLNPMHQLLRHF
ANQRINPLHNLLTHF

SEQ ID NO: 213342 - protein, 15 aa, Artificial Sequence
  Description of Artificial Sequence: Synthetic peptide
  Seed: ANQRLNPMHQLLRHF
ANQRINPLHNLLVHF

SEQ ID NO: 213343 - protein, 15 aa, Artificial Sequence
  Description of Artificial Sequence: Synthetic peptide
  Seed: ANQRLNPMHQLLRHF
ANQRINPLHPLLAHF

SEQ ID NO: 213344 - protein, 15 aa, Artificial Sequence
  Description of Artificial Sequence: Synthetic peptide
  Seed: ANQRLNPMHQLLRHF
ANQRINPLHPLLCHF

SEQ ID NO: 213345 - protein, 15 aa, Artificial Sequence
  Description of Artificial Sequence: Synthetic peptide
  Seed: ANQRLNPMHQLLRHF
ANQRINPLHPLLGHF

SEQ ID NO: 213346 - protein, 15 aa, Artificial Sequence
  Description of Artificial Sequence: Synthetic peptide
  Seed: ANQRLNPMHQLLRHF
ANQRINPLHPLLIHF

SEQ ID NO: 213347 - protein, 15 aa, Artificial Sequence
  Description of Artificial Sequence: Synthetic peptide
  Seed: ANQRLNPMHQLLRHF
ANQRINPLHPLLLHF

SEQ ID NO: 213348 - protein, 15 aa, Artificial Sequence
  Description of Artificial Sequence: Synthetic peptide
  Seed: ANQRLNPMHQLLRHF
ANQRINPLHPLLMHF

SEQ ID NO: 213349 - protein, 15 aa, Artificial Sequence
  Description of Artificial Sequence: Synthetic peptide
  Seed: ANQRLNPMHQLLRHF
ANQRINPLHPLLNHF

SEQ ID NO: 213350 - protein, 15 aa, Artificial Sequence
  Description of Artificial Sequence: Synthetic peptide
  Seed: ANQRLNPMHQLLRHF
ANQRINPLHPLLSHF

SEQ ID NO: 213351 - protein, 15 aa, Artificial Sequence
  Description of Artificial Sequence: Synthetic peptide
  Seed: ANQRLNPMHQLLRHF
ANQRINPLHPLLTHF

SEQ ID NO: 213352 - protein, 15 aa, Artificial Sequence
  Description of Artificial Sequence: Synthetic peptide
  Seed: ANQRLNPMHQLLRHF
ANQRINPLHPLLVHF

SEQ ID NO: 213353 - protein, 15 aa, Artificial Sequence
  Description of Artificial Sequence: Synthetic peptide
  Seed: ANQRLNPMHQLLRHF
ANQRINPLHRLLAHF

SEQ ID NO: 213354 - protein, 15 aa, Artificial Sequence
  Description of Artificial Sequence: Synthetic peptide
  Seed: ANQRLNPMHQLLRHF
ANQRINPLHRLLEHF

SEQ ID NO: 213355 - protein, 15 aa, Artificial Sequence
  Description of Artificial Sequence: Synthetic peptide
  Seed: ANQRLNPMHQLLRHF
ANQRINPLHRLLFHF

SEQ ID NO: 213356 - protein, 15 aa, Artificial Sequence
  Description of Artificial Sequence: Synthetic peptide
  Seed: ANQRLNPMHQLLRHF
ANQRINPLHRLLGHF

SEQ ID NO: 213357 - protein, 15 aa, Artificial Sequence
  Description of Artificial Sequence: Synthetic peptide
  Seed: ANQRLNPMHQLLRHF
ANQRINPLHRLLHHF

SEQ ID NO: 213358 - protein, 15 aa, Artificial Sequence
  Description of Artificial Sequence: Synthetic peptide
  Seed: ANQRLNPMHQLLRHF
ANQRINPLHRLLIHF

SEQ ID NO: 213359 - protein, 15 aa, Artificial Sequence
  Description of Artificial Sequence: Synthetic peptide
  Seed: ANQRLNPMHQLLRHF
ANQRINPLHRLLKHF

SEQ ID NO: 213360 - protein, 15 aa, Artificial Sequence
  Description of Artificial Sequence: Synthetic peptide
  Seed: ANQRLNPMHQLLRHF
ANQRINPLHRLLLHF

SEQ ID NO: 213361 - protein, 15 aa, Artificial Sequence
  Description of Artificial Sequence: Synthetic peptide
  Seed: ANQRLNPMHQLLRHF
ANQRINPLHRLLMHF

SEQ ID NO: 213362 - protein, 15 aa, Artificial Sequence
  Description of Artificial Sequence: Synthetic peptide
  Seed: ANQRLNPMHQLLRHF
ANQRINPLHRLLNHF

SEQ ID NO: 213363 - protein, 15 aa, Artificial Sequence
  Description of Artificial Sequence: Synthetic peptide
  Seed: ANQRLNPMHQLLRHF
ANQRINPLHRLLPHF

SEQ ID NO: 213364 - protein, 15 aa, Artificial Sequence
  Description of Artificial Sequence: Synthetic peptide
  Seed: ANQRLNPMHQLLRHF
ANQRINPLHRLLQHF

SEQ ID NO: 213365 - protein, 15 aa, Artificial Sequence
  Description of Artificial Sequence: Synthetic peptide
  Seed: ANQRLNPMHQLLRHF
ANQRINPLHRLLRHF

SEQ ID NO: 213366 - protein, 15 aa, Artificial Sequence
  Description of Artificial Sequence: Synthetic peptide
  Seed: ANQRLNPMHQLLRHF
ANQRINPLHRLLSHF

SEQ ID NO: 213367 - protein, 15 aa, Artificial Sequence
  Description of Artificial Sequence: Synthetic peptide
  Seed: ANQRLNPMHQLLRHF
ANQRINPLHRLLTHF

SEQ ID NO: 213368 - protein, 15 aa, Artificial Sequence
  Description of Artificial Sequence: Synthetic peptide
  Seed: ANQRLNPMHQLLRHF
ANQRINPLHRLLVHF

SEQ ID NO: 213369 - protein, 15 aa, Artificial Sequence
  Description of Artificial Sequence: Synthetic peptide
  Seed: ANQRLNPMHQLLRHF
ANQRINPLHRLLYHF

SEQ ID NO: 213370 - protein, 15 aa, Artificial Sequence
  Description of Artificial Sequence: Synthetic peptide
  Seed: ANQRLNPMHQLLRHF
ANQRINPLHSLLAHF

SEQ ID NO: 213371 - protein, 15 aa, Artificial Sequence
  Description of Artificial Sequence: Synthetic peptide
  Seed: ANQRLNPMHQLLRHF
ANQRINPLHSLLCHF

SEQ ID NO: 213372 - protein, 15 aa, Artificial Sequence
  Description of Artificial Sequence: Synthetic peptide
  Seed: ANQRLNPMHQLLRHF
ANQRINPLHSLLFHF

SEQ ID NO: 213373 - protein, 15 aa, Artificial Sequence
  Description of Artificial Sequence: Synthetic peptide
  Seed: ANQRLNPMHQLLRHF
ANQRINPLHSLLGHF

SEQ ID NO: 213374 - protein, 15 aa, Artificial Sequence
  Description of Artificial Sequence: Synthetic peptide
  Seed: ANQRLNPMHQLLRHF
ANQRINPLHSLLHHF

SEQ ID NO: 213375 - protein, 15 aa, Artificial Sequence
  Description of Artificial Sequence: Synthetic peptide
  Seed: ANQRLNPMHQLLRHF
ANQRINPLHSLLIHF

SEQ ID NO: 213376 - protein, 15 aa, Artificial Sequence
  Description of Artificial Sequence: Synthetic peptide
  Seed: ANQRLNPMHQLLRHF
ANQRINPLHSLLLHF

SEQ ID NO: 213377 - protein, 15 aa, Artificial Sequence
  Description of Artificial Sequence: Synthetic peptide
  Seed: ANQRLNPMHQLLRHF
ANQRINPLHSLLMHF

SEQ ID NO: 213378 - protein, 15 aa, Artificial Sequence
  Description of Artificial Sequence: Synthetic peptide
  Seed: ANQRLNPMHQLLRHF
ANQRINPLHSLLNHF

SEQ ID NO: 213379 - protein, 15 aa, Artificial Sequence
  Description of Artificial Sequence: Synthetic peptide
  Seed: ANQRLNPMHQLLRHF
ANQRINPLHSLLRHF

SEQ ID NO: 213380 - protein, 15 aa, Artificial Sequence
  Description of Artificial Sequence: Synthetic peptide
  Seed: ANQRLNPMHQLLRHF
ANQRINPLHSLLSHF

SEQ ID NO: 213381 - protein, 15 aa, Artificial Sequence
  Description of Artificial Sequence: Synthetic peptide
  Seed: ANQRLNPMHQLLRHF
ANQRINPLHSLLTHF

SEQ ID NO: 213382 - protein, 15 aa, Artificial Sequence
  Description of Artificial Sequence: Synthetic peptide
  Seed: ANQRLNPMHQLLRHF
ANQRINPLHSLLVHF

SEQ ID NO: 213383 - protein, 15 aa, Artificial Sequence
  Description of Artificial Sequence: Synthetic peptide
  Seed: ANQRLNPMHQLLRHF
ANQRINPLHSLLYHF

SEQ ID NO: 213384 - protein, 15 aa, Artificial Sequence
  Description of Artificial Sequence: Synthetic peptide
  Seed: ANQRLNPMHQLLRHF
ANQRINPLHTLLAHF

SEQ ID NO: 213385 - protein, 15 aa, Artificial Sequence
  Description of Artificial Sequence: Synthetic peptide
  Seed: ANQRLNPMHQLLRHF
ANQRINPLHTLLIHF

SEQ ID NO: 213386 - protein, 15 aa, Artificial Sequence
  Description of Artificial Sequence: Synthetic peptide
  Seed: ANQRLNPMHQLLRHF
ANQRINPLHTLLLHF

SEQ ID NO: 213387 - protein, 15 aa, Artificial Sequence
  Description of Artificial Sequence: Synthetic peptide
  Seed: ANQRLNPMHQLLRHF
ANQRINPLHTLLMHF

SEQ ID NO: 213388 - protein, 15 aa, Artificial Sequence
  Description of Artificial Sequence: Synthetic peptide
  Seed: ANQRLNPMHQLLRHF
ANQRINPLHTLLNHF

SEQ ID NO: 213389 - protein, 15 aa, Artificial Sequence
  Description of Artificial Sequence: Synthetic peptide
  Seed: ANQRLNPMHQLLRHF
ANQRINPLHTLLSHF

SEQ ID NO: 213390 - protein, 15 aa, Artificial Sequence
  Description of Artificial Sequence: Synthetic peptide
  Seed: ANQRLNPMHQLLRHF
ANQRINPLHTLLTHF

SEQ ID NO: 213391 - protein, 15 aa, Artificial Sequence
  Description of Artificial Sequence: Synthetic peptide
  Seed: ANQRLNPMHQLLRHF
ANQRINPLHTLLVHF

SEQ ID NO: 213392 - protein, 15 aa, Artificial Sequence
  Description of Artificial Sequence: Synthetic peptide
  Seed: ANQRLNPMHQLLRHF
ANQRINPLHVLLAHF

SEQ ID NO: 213393 - protein, 15 aa, Artificial Sequence
  Description of Artificial Sequence: Synthetic peptide
  Seed: ANQRLNPMHQLLRHF
ANQRINPLHVLLIHF

SEQ ID NO: 213394 - protein, 15 aa, Artificial Sequence
  Description of Artificial Sequence: Synthetic peptide
  Seed: ANQRLNPMHQLLRHF
ANQRINPLHVLLLHF

SEQ ID NO: 213395 - protein, 15 aa, Artificial Sequence
  Description of Artificial Sequence: Synthetic peptide
  Seed: ANQRLNPMHQLLRHF
ANQRINPLHVLLMHF

SEQ ID NO: 213396 - protein, 15 aa, Artificial Sequence
  Description of Artificial Sequence: Synthetic peptide
  Seed: ANQRLNPMHQLLRHF
ANQRINPLHVLLNHF

SEQ ID NO: 213397 - protein, 15 aa, Artificial Sequence
  Description of Artificial Sequence: Synthetic peptide
  Seed: ANQRLNPMHQLLRHF
ANQRINPLHVLLSHF

SEQ ID NO: 213398 - protein, 15 aa, Artificial Sequence
  Description of Artificial Sequence: Synthetic peptide
  Seed: ANQRLNPMHQLLRHF
ANQRINPLHVLLTHF

SEQ ID NO: 213399 - protein, 15 aa, Artificial Sequence
  Description of Artificial Sequence: Synthetic peptide
  Seed: ANQRLNPMHQLLRHF
ANQRINPLHVLLVHF

SEQ ID NO: 213400 - protein, 15 aa, Artificial Sequence
  Description of Artificial Sequence: Synthetic peptide
  Seed: ANQRLNPMHQLLRHF
ANQRINPMHALLAHF

SEQ ID NO: 213401 - protein, 15 aa, Artificial Sequence
  Description of Artificial Sequence: Synthetic peptide
  Seed: ANQRLNPMHQLLRHF
ANQRINPMHALLCHF

SEQ ID NO: 213402 - protein, 15 aa, Artificial Sequence
  Description of Artificial Sequence: Synthetic peptide
  Seed: ANQRLNPMHQLLRHF
ANQRINPMHALLFHF

SEQ ID NO: 213403 - protein, 15 aa, Artificial Sequence
  Description of Artificial Sequence: Synthetic peptide
  Seed: ANQRLNPMHQLLRHF
ANQRINPMHALLGHF

SEQ ID NO: 213404 - protein, 15 aa, Artificial Sequence
  Description of Artificial Sequence: Synthetic peptide
  Seed: ANQRLNPMHQLLRHF
ANQRINPMHALLHHF

SEQ ID NO: 213405 - protein, 15 aa, Artificial Sequence
  Description of Artificial Sequence: Synthetic peptide
  Seed: ANQRLNPMHQLLRHF
ANQRINPMHALLIHF

SEQ ID NO: 213406 - protein, 15 aa, Artificial Sequence
  Description of Artificial Sequence: Synthetic peptide
  Seed: ANQRLNPMHQLLRHF
ANQRINPMHALLKHF

SEQ ID NO: 213407 - protein, 15 aa, Artificial Sequence
  Description of Artificial Sequence: Synthetic peptide
  Seed: ANQRLNPMHQLLRHF
ANQRINPMHALLLHF

SEQ ID NO: 213408 - protein, 15 aa, Artificial Sequence
  Description of Artificial Sequence: Synthetic peptide
  Seed: ANQRLNPMHQLLRHF
ANQRINPMHALLMHF

SEQ ID NO: 213409 - protein, 15 aa, Artificial Sequence
  Description of Artificial Sequence: Synthetic peptide
  Seed: ANQRLNPMHQLLRHF
ANQRINPMHALLNHF

SEQ ID NO: 213410 - protein, 15 aa, Artificial Sequence
  Description of Artificial Sequence: Synthetic peptide
  Seed: ANQRLNPMHQLLRHF
ANQRINPMHALLPHF

SEQ ID NO: 213411 - protein, 15 aa, Artificial Sequence
  Description of Artificial Sequence: Synthetic peptide
  Seed: ANQRLNPMHQLLRHF
ANQRINPMHALLRHF

SEQ ID NO: 213412 - protein, 15 aa, Artificial Sequence
  Description of Artificial Sequence: Synthetic peptide
  Seed: ANQRLNPMHQLLRHF
ANQRINPMHALLSHF

SEQ ID NO: 213413 - protein, 15 aa, Artificial Sequence
  Description of Artificial Sequence: Synthetic peptide
  Seed: ANQRLNPMHQLLRHF
ANQRINPMHALLTHF

SEQ ID NO: 213414 - protein, 15 aa, Artificial Sequence
  Description of Artificial Sequence: Synthetic peptide
  Seed: ANQRLNPMHQLLRHF
ANQRINPMHALLVHF

SEQ ID NO: 213415 - protein, 15 aa, Artificial Sequence
  Description of Artificial Sequence: Synthetic peptide
  Seed: ANQRLNPMHQLLRHF
ANQRINPMHFLLFHF

SEQ ID NO: 213416 - protein, 15 aa, Artificial Sequence
  Description of Artificial Sequence: Synthetic peptide
  Seed: ANQRLNPMHQLLRHF
ANQRINPMHFLLIHF

SEQ ID NO: 213417 - protein, 15 aa, Artificial Sequence
  Description of Artificial Sequence: Synthetic peptide
  Seed: ANQRLNPMHQLLRHF
ANQRINPMHFLLLHF

SEQ ID NO: 213418 - protein, 15 aa, Artificial Sequence
  Description of Artificial Sequence: Synthetic peptide
  Seed: ANQRLNPMHQLLRHF
ANQRINPMHFLLMHF

SEQ ID NO: 213419 - protein, 15 aa, Artificial Sequence
  Description of Artificial Sequence: Synthetic peptide
  Seed: ANQRLNPMHQLLRHF
ANQRINPMHFLLVHF

SEQ ID NO: 213420 - protein, 15 aa, Artificial Sequence
  Description of Artificial Sequence: Synthetic peptide
  Seed: ANQRLNPMHQLLRHF
ANQRINPMHGLLAHF

SEQ ID NO: 213421 - protein, 15 aa, Artificial Sequence
  Description of Artificial Sequence: Synthetic peptide
  Seed: ANQRLNPMHQLLRHF
ANQRINPMHGLLCHF

SEQ ID NO: 213422 - protein, 15 aa, Artificial Sequence
  Description of Artificial Sequence: Synthetic peptide
  Seed: ANQRLNPMHQLLRHF
ANQRINPMHGLLFHF

SEQ ID NO: 213423 - protein, 15 aa, Artificial Sequence
  Description of Artificial Sequence: Synthetic peptide
  Seed: ANQRLNPMHQLLRHF
ANQRINPMHGLLGHF

SEQ ID NO: 213424 - protein, 15 aa, Artificial Sequence
  Description of Artificial Sequence: Synthetic peptide
  Seed: ANQRLNPMHQLLRHF
ANQRINPMHGLLHHF

SEQ ID NO: 213425 - protein, 15 aa, Artificial Sequence
  Description of Artificial Sequence: Synthetic peptide
  Seed: ANQRLNPMHQLLRHF
ANQRINPMHGLLIHF

SEQ ID NO: 213426 - protein, 15 aa, Artificial Sequence
  Description of Artificial Sequence: Synthetic peptide
  Seed: ANQRLNPMHQLLRHF
ANQRINPMHGLLLHF

SEQ ID NO: 213427 - protein, 15 aa, Artificial Sequence
  Description of Artificial Sequence: Synthetic peptide
  Seed: ANQRLNPMHQLLRHF
ANQRINPMHGLLMHF

SEQ ID NO: 213428 - protein, 15 aa, Artificial Sequence
  Description of Artificial Sequence: Synthetic peptide
  Seed: ANQRLNPMHQLLRHF
ANQRINPMHGLLNHF

SEQ ID NO: 213429 - protein, 15 aa, Artificial Sequence
  Description of Artificial Sequence: Synthetic peptide
  Seed: ANQRLNPMHQLLRHF
ANQRINPMHGLLSHF

SEQ ID NO: 213430 - protein, 15 aa, Artificial Sequence
  Description of Artificial Sequence: Synthetic peptide
  Seed: ANQRLNPMHQLLRHF
ANQRINPMHGLLTHF

SEQ ID NO: 213431 - protein, 15 aa, Artificial Sequence
  Description of Artificial Sequence: Synthetic peptide
  Seed: ANQRLNPMHQLLRHF
ANQRINPMHGLLVHF

SEQ ID NO: 213432 - protein, 15 aa, Artificial Sequence
  Description of Artificial Sequence: Synthetic peptide
  Seed: ANQRLNPMHQLLRHF
ANQRINPMHHLLAHF

SEQ ID NO: 213433 - protein, 15 aa, Artificial Sequence
  Description of Artificial Sequence: Synthetic peptide
  Seed: ANQRLNPMHQLLRHF
ANQRINPMHHLLSHF

SEQ ID NO: 213434 - protein, 15 aa, Artificial Sequence
  Description of Artificial Sequence: Synthetic peptide
  Seed: ANQRLNPMHQLLRHF
ANQRINPMHILLAHF

SEQ ID NO: 213435 - protein, 15 aa, Artificial Sequence
  Description of Artificial Sequence: Synthetic peptide
  Seed: ANQRLNPMHQLLRHF
ANQRINPMHILLVHF

SEQ ID NO: 213436 - protein, 15 aa, Artificial Sequence
  Description of Artificial Sequence: Synthetic peptide
  Seed: ANQRLNPMHQLLRHF
ANQRINPMHKLLAHF

SEQ ID NO: 213437 - protein, 15 aa, Artificial Sequence
  Description of Artificial Sequence: Synthetic peptide
  Seed: ANQRLNPMHQLLRHF
ANQRINPMHKLLFHF

SEQ ID NO: 213438 - protein, 15 aa, Artificial Sequence
  Description of Artificial Sequence: Synthetic peptide
  Seed: ANQRLNPMHQLLRHF
ANQRINPMHKLLGHF

SEQ ID NO: 213439 - protein, 15 aa, Artificial Sequence
  Description of Artificial Sequence: Synthetic peptide
  Seed: ANQRLNPMHQLLRHF
ANQRINPMHKLLHHF

SEQ ID NO: 213440 - protein, 15 aa, Artificial Sequence
  Description of Artificial Sequence: Synthetic peptide
  Seed: ANQRLNPMHQLLRHF
ANQRINPMHKLLIHF

SEQ ID NO: 213441 - protein, 15 aa, Artificial Sequence
  Description of Artificial Sequence: Synthetic peptide
  Seed: ANQRLNPMHQLLRHF
ANQRINPMHKLLKHF

SEQ ID NO: 213442 - protein, 15 aa, Artificial Sequence
  Description of Artificial Sequence: Synthetic peptide
  Seed: ANQRLNPMHQLLRHF
ANQRINPMHKLLLHF

SEQ ID NO: 213443 - protein, 15 aa, Artificial Sequence
  Description of Artificial Sequence: Synthetic peptide
  Seed: ANQRLNPMHQLLRHF
ANQRINPMHKLLMHF

SEQ ID NO: 213444 - protein, 15 aa, Artificial Sequence
  Description of Artificial Sequence: Synthetic peptide
  Seed: ANQRLNPMHQLLRHF
ANQRINPMHKLLNHF

SEQ ID NO: 213445 - protein, 15 aa, Artificial Sequence
  Description of Artificial Sequence: Synthetic peptide
  Seed: ANQRLNPMHQLLRHF
ANQRINPMHKLLPHF

SEQ ID NO: 213446 - protein, 15 aa, Artificial Sequence
  Description of Artificial Sequence: Synthetic peptide
  Seed: ANQRLNPMHQLLRHF
ANQRINPMHKLLQHF

SEQ ID NO: 213447 - protein, 15 aa, Artificial Sequence
  Description of Artificial Sequence: Synthetic peptide
  Seed: ANQRLNPMHQLLRHF
ANQRINPMHKLLRHF

SEQ ID NO: 213448 - protein, 15 aa, Artificial Sequence
  Description of Artificial Sequence: Synthetic peptide
  Seed: ANQRLNPMHQLLRHF
ANQRINPMHKLLSHF

SEQ ID NO: 213449 - protein, 15 aa, Artificial Sequence
  Description of Artificial Sequence: Synthetic peptide
  Seed: ANQRLNPMHQLLRHF
ANQRINPMHKLLTHF

SEQ ID NO: 213450 - protein, 15 aa, Artificial Sequence
  Description of Artificial Sequence: Synthetic peptide
  Seed: ANQRLNPMHQLLRHF
ANQRINPMHKLLVHF

SEQ ID NO: 213451 - protein, 15 aa, Artificial Sequence
  Description of Artificial Sequence: Synthetic peptide
  Seed: ANQRLNPMHQLLRHF
ANQRINPMHKLLYHF

SEQ ID NO: 213452 - protein, 15 aa, Artificial Sequence
  Description of Artificial Sequence: Synthetic peptide
  Seed: ANQRLNPMHQLLRHF
ANQRINPMHNLLAHF

SEQ ID NO: 213453 - protein, 15 aa, Artificial Sequence
  Description of Artificial Sequence: Synthetic peptide
  Seed: ANQRLNPMHQLLRHF
ANQRINPMHNLLIHF

SEQ ID NO: 213454 - protein, 15 aa, Artificial Sequence
  Description of Artificial Sequence: Synthetic peptide
  Seed: ANQRLNPMHQLLRHF
ANQRINPMHNLLLHF

SEQ ID NO: 213455 - protein, 15 aa, Artificial Sequence
  Description of Artificial Sequence: Synthetic peptide
  Seed: ANQRLNPMHQLLRHF
ANQRINPMHNLLMHF

SEQ ID NO: 213456 - protein, 15 aa, Artificial Sequence
  Description of Artificial Sequence: Synthetic peptide
  Seed: ANQRLNPMHQLLRHF
ANQRINPMHNLLSHF

SEQ ID NO: 213457 - protein, 15 aa, Artificial Sequence
  Description of Artificial Sequence: Synthetic peptide
  Seed: ANQRLNPMHQLLRHF
ANQRINPMHNLLTHF

SEQ ID NO: 213458 - protein, 15 aa, Artificial Sequence
  Description of Artificial Sequence: Synthetic peptide
  Seed: ANQRLNPMHQLLRHF
ANQRINPMHNLLVHF

SEQ ID NO: 213459 - protein, 15 aa, Artificial Sequence
  Description of Artificial Sequence: Synthetic peptide
  Seed: ANQRLNPMHQLLRHF
ANQRINPMHPLLAHF

SEQ ID NO: 213460 - protein, 15 aa, Artificial Sequence
  Description of Artificial Sequence: Synthetic peptide
  Seed: ANQRLNPMHQLLRHF
ANQRINPMHPLLCHF

SEQ ID NO: 213461 - protein, 15 aa, Artificial Sequence
  Description of Artificial Sequence: Synthetic peptide
  Seed: ANQRLNPMHQLLRHF
ANQRINPMHPLLGHF

SEQ ID NO: 213462 - protein, 15 aa, Artificial Sequence
  Description of Artificial Sequence: Synthetic peptide
  Seed: ANQRLNPMHQLLRHF
ANQRINPMHPLLIHF

SEQ ID NO: 213463 - protein, 15 aa, Artificial Sequence
  Description of Artificial Sequence: Synthetic peptide
  Seed: ANQRLNPMHQLLRHF
ANQRINPMHPLLLHF

SEQ ID NO: 213464 - protein, 15 aa, Artificial Sequence
  Description of Artificial Sequence: Synthetic peptide
  Seed: ANQRLNPMHQLLRHF
ANQRINPMHPLLMHF

SEQ ID NO: 213465 - protein, 15 aa, Artificial Sequence
  Description of Artificial Sequence: Synthetic peptide
  Seed: ANQRLNPMHQLLRHF
ANQRINPMHPLLNHF

SEQ ID NO: 213466 - protein, 15 aa, Artificial Sequence
  Description of Artificial Sequence: Synthetic peptide
  Seed: ANQRLNPMHQLLRHF
ANQRINPMHPLLSHF

SEQ ID NO: 213467 - protein, 15 aa, Artificial Sequence
  Description of Artificial Sequence: Synthetic peptide
  Seed: ANQRLNPMHQLLRHF
ANQRINPMHPLLTHF

SEQ ID NO: 213468 - protein, 15 aa, Artificial Sequence
  Description of Artificial Sequence: Synthetic peptide
  Seed: ANQRLNPMHQLLRHF
ANQRINPMHPLLVHF

SEQ ID NO: 213469 - protein, 15 aa, Artificial Sequence
  Description of Artificial Sequence: Synthetic peptide
  Seed: ANQRLNPMHQLLRHF
ANQRINPMHRLLAHF

SEQ ID NO: 213470 - protein, 15 aa, Artificial Sequence
  Description of Artificial Sequence: Synthetic peptide
  Seed: ANQRLNPMHQLLRHF
ANQRINPMHRLLEHF

SEQ ID NO: 213471 - protein, 15 aa, Artificial Sequence
  Description of Artificial Sequence: Synthetic peptide
  Seed: ANQRLNPMHQLLRHF
ANQRINPMHRLLFHF

SEQ ID NO: 213472 - protein, 15 aa, Artificial Sequence
  Description of Artificial Sequence: Synthetic peptide
  Seed: ANQRLNPMHQLLRHF
ANQRINPMHRLLGHF

SEQ ID NO: 213473 - protein, 15 aa, Artificial Sequence
  Description of Artificial Sequence: Synthetic peptide
  Seed: ANQRLNPMHQLLRHF
ANQRINPMHRLLHHF

SEQ ID NO: 213474 - protein, 15 aa, Artificial Sequence
  Description of Artificial Sequence: Synthetic peptide
  Seed: ANQRLNPMHQLLRHF
ANQRINPMHRLLIHF

SEQ ID NO: 213475 - protein, 15 aa, Artificial Sequence
  Description of Artificial Sequence: Synthetic peptide
  Seed: ANQRLNPMHQLLRHF
ANQRINPMHRLLKHF

SEQ ID NO: 213476 - protein, 15 aa, Artificial Sequence
  Description of Artificial Sequence: Synthetic peptide
  Seed: ANQRLNPMHQLLRHF
ANQRINPMHRLLLHF

SEQ ID NO: 213477 - protein, 15 aa, Artificial Sequence
  Description of Artificial Sequence: Synthetic peptide
  Seed: ANQRLNPMHQLLRHF
ANQRINPMHRLLMHF

SEQ ID NO: 213478 - protein, 15 aa, Artificial Sequence
  Description of Artificial Sequence: Synthetic peptide
  Seed: ANQRLNPMHQLLRHF
ANQRINPMHRLLNHF

SEQ ID NO: 213479 - protein, 15 aa, Artificial Sequence
  Description of Artificial Sequence: Synthetic peptide
  Seed: ANQRLNPMHQLLRHF
ANQRINPMHRLLPHF

SEQ ID NO: 213480 - protein, 15 aa, Artificial Sequence
  Description of Artificial Sequence: Synthetic peptide
  Seed: ANQRLNPMHQLLRHF
ANQRINPMHRLLQHF

SEQ ID NO: 213481 - protein, 15 aa, Artificial Sequence
  Description of Artificial Sequence: Synthetic peptide
  Seed: ANQRLNPMHQLLRHF
ANQRINPMHRLLRHF

SEQ ID NO: 213482 - protein, 15 aa, Artificial Sequence
  Description of Artificial Sequence: Synthetic peptide
  Seed: ANQRLNPMHQLLRHF
ANQRINPMHRLLSHF

SEQ ID NO: 213483 - protein, 15 aa, Artificial Sequence
  Description of Artificial Sequence: Synthetic peptide
  Seed: ANQRLNPMHQLLRHF
ANQRINPMHRLLTHF

SEQ ID NO: 213484 - protein, 15 aa, Artificial Sequence
  Description of Artificial Sequence: Synthetic peptide
  Seed: ANQRLNPMHQLLRHF
ANQRINPMHRLLVHF

SEQ ID NO: 213485 - protein, 15 aa, Artificial Sequence
  Description of Artificial Sequence: Synthetic peptide
  Seed: ANQRLNPMHQLLRHF
ANQRINPMHRLLWHF

SEQ ID NO: 213486 - protein, 15 aa, Artificial Sequence
  Description of Artificial Sequence: Synthetic peptide
  Seed: ANQRLNPMHQLLRHF
ANQRINPMHRLLYHF

SEQ ID NO: 213487 - protein, 15 aa, Artificial Sequence
  Description of Artificial Sequence: Synthetic peptide
  Seed: ANQRLNPMHQLLRHF
ANQRINPMHSLLAHF

SEQ ID NO: 213488 - protein, 15 aa, Artificial Sequence
  Description of Artificial Sequence: Synthetic peptide
  Seed: ANQRLNPMHQLLRHF
ANQRINPMHSLLCHF

SEQ ID NO: 213489 - protein, 15 aa, Artificial Sequence
  Description of Artificial Sequence: Synthetic peptide
  Seed: ANQRLNPMHQLLRHF
ANQRINPMHSLLFHF

SEQ ID NO: 213490 - protein, 15 aa, Artificial Sequence
  Description of Artificial Sequence: Synthetic peptide
  Seed: ANQRLNPMHQLLRHF
ANQRINPMHSLLGHF

SEQ ID NO: 213491 - protein, 15 aa, Artificial Sequence
  Description of Artificial Sequence: Synthetic peptide
  Seed: ANQRLNPMHQLLRHF
ANQRINPMHSLLHHF

SEQ ID NO: 213492 - protein, 15 aa, Artificial Sequence
  Description of Artificial Sequence: Synthetic peptide
  Seed: ANQRLNPMHQLLRHF
ANQRINPMHSLLIHF

SEQ ID NO: 213493 - protein, 15 aa, Artificial Sequence
  Description of Artificial Sequence: Synthetic peptide
  Seed: ANQRLNPMHQLLRHF
ANQRINPMHSLLLHF

SEQ ID NO: 213494 - protein, 15 aa, Artificial Sequence
  Description of Artificial Sequence: Synthetic peptide
  Seed: ANQRLNPMHQLLRHF
ANQRINPMHSLLMHF

SEQ ID NO: 213495 - protein, 15 aa, Artificial Sequence
  Description of Artificial Sequence: Synthetic peptide
  Seed: ANQRLNPMHQLLRHF
ANQRINPMHSLLNHF

SEQ ID NO: 213496 - protein, 15 aa, Artificial Sequence
  Description of Artificial Sequence: Synthetic peptide
  Seed: ANQRLNPMHQLLRHF
ANQRINPMHSLLRHF

SEQ ID NO: 213497 - protein, 15 aa, Artificial Sequence
  Description of Artificial Sequence: Synthetic peptide
  Seed: ANQRLNPMHQLLRHF
ANQRINPMHSLLSHF

SEQ ID NO: 213498 - protein, 15 aa, Artificial Sequence
  Description of Artificial Sequence: Synthetic peptide
  Seed: ANQRLNPMHQLLRHF
ANQRINPMHSLLTHF

SEQ ID NO: 213499 - protein, 15 aa, Artificial Sequence
  Description of Artificial Sequence: Synthetic peptide
  Seed: ANQRLNPMHQLLRHF
ANQRINPMHSLLVHF

SEQ ID NO: 213500 - protein, 15 aa, Artificial Sequence
  Description of Artificial Sequence: Synthetic peptide
  Seed: ANQRLNPMHQLLRHF
ANQRINPMHTLLAHF

SEQ ID NO: 213501 - protein, 15 aa, Artificial Sequence
  Description of Artificial Sequence: Synthetic peptide
  Seed: ANQRLNPMHQLLRHF
ANQRINPMHTLLIHF

SEQ ID NO: 213502 - protein, 15 aa, Artificial Sequence
  Description of Artificial Sequence: Synthetic peptide
  Seed: ANQRLNPMHQLLRHF
ANQRINPMHTLLLHF

SEQ ID NO: 213503 - protein, 15 aa, Artificial Sequence
  Description of Artificial Sequence: Synthetic peptide
  Seed: ANQRLNPMHQLLRHF
ANQRINPMHTLLMHF

SEQ ID NO: 213504 - protein, 15 aa, Artificial Sequence
  Description of Artificial Sequence: Synthetic peptide
  Seed: ANQRLNPMHQLLRHF
ANQRINPMHTLLNHF

SEQ ID NO: 213505 - protein, 15 aa, Artificial Sequence
  Description of Artificial Sequence: Synthetic peptide
  Seed: ANQRLNPMHQLLRHF
ANQRINPMHTLLSHF

SEQ ID NO: 213506 - protein, 15 aa, Artificial Sequence
  Description of Artificial Sequence: Synthetic peptide
  Seed: ANQRLNPMHQLLRHF
ANQRINPMHTLLTHF

SEQ ID NO: 213507 - protein, 15 aa, Artificial Sequence
  Description of Artificial Sequence: Synthetic peptide
  Seed: ANQRLNPMHQLLRHF
ANQRINPMHTLLVHF

SEQ ID NO: 213508 - protein, 15 aa, Artificial Sequence
  Description of Artificial Sequence: Synthetic peptide
  Seed: ANQRLNPMHQLLRHF
ANQRINPMHVLLAHF

SEQ ID NO: 213509 - protein, 15 aa, Artificial Sequence
  Description of Artificial Sequence: Synthetic peptide
  Seed: ANQRLNPMHQLLRHF
ANQRINPMHVLLIHF

SEQ ID NO: 213510 - protein, 15 aa, Artificial Sequence
  Description of Artificial Sequence: Synthetic peptide
  Seed: ANQRLNPMHQLLRHF
ANQRINPMHVLLLHF

SEQ ID NO: 213511 - protein, 15 aa, Artificial Sequence
  Description of Artificial Sequence: Synthetic peptide
  Seed: ANQRLNPMHQLLRHF
ANQRINPMHVLLMHF

SEQ ID NO: 213512 - protein, 15 aa, Artificial Sequence
  Description of Artificial Sequence: Synthetic peptide
  Seed: ANQRLNPMHQLLRHF
ANQRINPMHVLLNHF

SEQ ID NO: 213513 - protein, 15 aa, Artificial Sequence
  Description of Artificial Sequence: Synthetic peptide
  Seed: ANQRLNPMHQLLRHF
ANQRINPMHVLLSHF

SEQ ID NO: 213514 - protein, 15 aa, Artificial Sequence
  Description of Artificial Sequence: Synthetic peptide
  Seed: ANQRLNPMHQLLRHF
ANQRINPMHVLLTHF

SEQ ID NO: 213515 - protein, 15 aa, Artificial Sequence
  Description of Artificial Sequence: Synthetic peptide
  Seed: ANQRLNPMHQLLRHF
ANQRINPMHVLLVHF

SEQ ID NO: 213516 - protein, 15 aa, Artificial Sequence
  Description of Artificial Sequence: Synthetic peptide
  Seed: ANQRLNPMHQLLRHF
ANQRINPNHALLAHF

SEQ ID NO: 213517 - protein, 15 aa, Artificial Sequence
  Description of Artificial Sequence: Synthetic peptide
  Seed: ANQRLNPMHQLLRHF
ANQRINPNHALLFHF

SEQ ID NO: 213518 - protein, 15 aa, Artificial Sequence
  Description of Artificial Sequence: Synthetic peptide
  Seed: ANQRLNPMHQLLRHF
ANQRINPNHALLHHF

SEQ ID NO: 213519 - protein, 15 aa, Artificial Sequence
  Description of Artificial Sequence: Synthetic peptide
  Seed: ANQRLNPMHQLLRHF
ANQRINPNHALLIHF

SEQ ID NO: 213520 - protein, 15 aa, Artificial Sequence
  Description of Artificial Sequence: Synthetic peptide
  Seed: ANQRLNPMHQLLRHF
ANQRINPNHALLLHF

SEQ ID NO: 213521 - protein, 15 aa, Artificial Sequence
  Description of Artificial Sequence: Synthetic peptide
  Seed: ANQRLNPMHQLLRHF
ANQRINPNHALLMHF

SEQ ID NO: 213522 - protein, 15 aa, Artificial Sequence
  Description of Artificial Sequence: Synthetic peptide
  Seed: ANQRLNPMHQLLRHF
ANQRINPNHALLNHF

SEQ ID NO: 213523 - protein, 15 aa, Artificial Sequence
  Description of Artificial Sequence: Synthetic peptide
  Seed: ANQRLNPMHQLLRHF
ANQRINPNHALLQHF

SEQ ID NO: 213524 - protein, 15 aa, Artificial Sequence
  Description of Artificial Sequence: Synthetic peptide
  Seed: ANQRLNPMHQLLRHF
ANQRINPNHALLSHF

SEQ ID NO: 213525 - protein, 15 aa, Artificial Sequence
  Description of Artificial Sequence: Synthetic peptide
  Seed: ANQRLNPMHQLLRHF
ANQRINPNHALLTHF

SEQ ID NO: 213526 - protein, 15 aa, Artificial Sequence
  Description of Artificial Sequence: Synthetic peptide
  Seed: ANQRLNPMHQLLRHF
ANQRINPNHALLVHF

SEQ ID NO: 213527 - protein, 15 aa, Artificial Sequence
  Description of Artificial Sequence: Synthetic peptide
  Seed: ANQRLNPMHQLLRHF
ANQRINPNHALLWHF

SEQ ID NO: 213528 - protein, 15 aa, Artificial Sequence
  Description of Artificial Sequence: Synthetic peptide
  Seed: ANQRLNPMHQLLRHF
ANQRINPNHALLYHF

SEQ ID NO: 213529 - protein, 15 aa, Artificial Sequence
  Description of Artificial Sequence: Synthetic peptide
  Seed: ANQRLNPMHQLLRHF
ANQRINPNHCLLIHF

SEQ ID NO: 213530 - protein, 15 aa, Artificial Sequence
  Description of Artificial Sequence: Synthetic peptide
  Seed: ANQRLNPMHQLLRHF
ANQRINPNHCLLVHF

SEQ ID NO: 213531 - protein, 15 aa, Artificial Sequence
  Description of Artificial Sequence: Synthetic peptide
  Seed: ANQRLNPMHQLLRHF
ANQRINPNHDLLIHF

SEQ ID NO: 213532 - protein, 15 aa, Artificial Sequence
  Description of Artificial Sequence: Synthetic peptide
  Seed: ANQRLNPMHQLLRHF
ANQRINPNHFLLIHF

SEQ ID NO: 213533 - protein, 15 aa, Artificial Sequence
  Description of Artificial Sequence: Synthetic peptide
  Seed: ANQRLNPMHQLLRHF
ANQRINPNHFLLVHF

SEQ ID NO: 213534 - protein, 15 aa, Artificial Sequence
  Description of Artificial Sequence: Synthetic peptide
  Seed: ANQRLNPMHQLLRHF
ANQRINPNHGLLAHF

SEQ ID NO: 213535 - protein, 15 aa, Artificial Sequence
  Description of Artificial Sequence: Synthetic peptide
  Seed: ANQRLNPMHQLLRHF
ANQRINPNHGLLFHF

SEQ ID NO: 213536 - protein, 15 aa, Artificial Sequence
  Description of Artificial Sequence: Synthetic peptide
  Seed: ANQRLNPMHQLLRHF
ANQRINPNHGLLIHF

SEQ ID NO: 213537 - protein, 15 aa, Artificial Sequence
  Description of Artificial Sequence: Synthetic peptide
  Seed: ANQRLNPMHQLLRHF
ANQRINPNHGLLLHF

SEQ ID NO: 213538 - protein, 15 aa, Artificial Sequence
  Description of Artificial Sequence: Synthetic peptide
  Seed: ANQRLNPMHQLLRHF
ANQRINPNHGLLMHF

SEQ ID NO: 213539 - protein, 15 aa, Artificial Sequence
  Description of Artificial Sequence: Synthetic peptide
  Seed: ANQRLNPMHQLLRHF
ANQRINPNHGLLSHF

SEQ ID NO: 213540 - protein, 15 aa, Artificial Sequence
  Description of Artificial Sequence: Synthetic peptide
  Seed: ANQRLNPMHQLLRHF
ANQRINPNHGLLTHF

SEQ ID NO: 213541 - protein, 15 aa, Artificial Sequence
  Description of Artificial Sequence: Synthetic peptide
  Seed: ANQRLNPMHQLLRHF
ANQRINPNHGLLVHF

SEQ ID NO: 213542 - protein, 15 aa, Artificial Sequence
  Description of Artificial Sequence: Synthetic peptide
  Seed: ANQRLNPMHQLLRHF
ANQRINPNHGLLYHF

SEQ ID NO: 213543 - protein, 15 aa, Artificial Sequence
  Description of Artificial Sequence: Synthetic peptide
  Seed: ANQRLNPMHQLLRHF
ANQRINPNHHLLFHF

SEQ ID NO: 213544 - protein, 15 aa, Artificial Sequence
  Description of Artificial Sequence: Synthetic peptide
  Seed: ANQRLNPMHQLLRHF
ANQRINPNHHLLIHF

SEQ ID NO: 213545 - protein, 15 aa, Artificial Sequence
  Description of Artificial Sequence: Synthetic peptide
  Seed: ANQRLNPMHQLLRHF
ANQRINPNHHLLLHF

SEQ ID NO: 213546 - protein, 15 aa, Artificial Sequence
  Description of Artificial Sequence: Synthetic peptide
  Seed: ANQRLNPMHQLLRHF
ANQRINPNHHLLMHF

SEQ ID NO: 213547 - protein, 15 aa, Artificial Sequence
  Description of Artificial Sequence: Synthetic peptide
  Seed: ANQRLNPMHQLLRHF
ANQRINPNHHLLVHF

SEQ ID NO: 213548 - protein, 15 aa, Artificial Sequence
  Description of Artificial Sequence: Synthetic peptide
  Seed: ANQRLNPMHQLLRHF
ANQRINPNHILLAHF

SEQ ID NO: 213549 - protein, 15 aa, Artificial Sequence
  Description of Artificial Sequence: Synthetic peptide
  Seed: ANQRLNPMHQLLRHF
ANQRINPNHILLFHF

SEQ ID NO: 213550 - protein, 15 aa, Artificial Sequence
  Description of Artificial Sequence: Synthetic peptide
  Seed: ANQRLNPMHQLLRHF
ANQRINPNHILLIHF

SEQ ID NO: 213551 - protein, 15 aa, Artificial Sequence
  Description of Artificial Sequence: Synthetic peptide
  Seed: ANQRLNPMHQLLRHF
ANQRINPNHILLLHF

SEQ ID NO: 213552 - protein, 15 aa, Artificial Sequence
  Description of Artificial Sequence: Synthetic peptide
  Seed: ANQRLNPMHQLLRHF
ANQRINPNHILLMHF

SEQ ID NO: 213553 - protein, 15 aa, Artificial Sequence
  Description of Artificial Sequence: Synthetic peptide
  Seed: ANQRLNPMHQLLRHF
ANQRINPNHILLSHF

SEQ ID NO: 213554 - protein, 15 aa, Artificial Sequence
  Description of Artificial Sequence: Synthetic peptide
  Seed: ANQRLNPMHQLLRHF
ANQRINPNHILLTHF

SEQ ID NO: 213555 - protein, 15 aa, Artificial Sequence
  Description of Artificial Sequence: Synthetic peptide
  Seed: ANQRLNPMHQLLRHF
ANQRINPNHILLVHF

SEQ ID NO: 213556 - protein, 15 aa, Artificial Sequence
  Description of Artificial Sequence: Synthetic peptide
  Seed: ANQRLNPMHQLLRHF
ANQRINPNHILLWHF

SEQ ID NO: 213557 - protein, 15 aa, Artificial Sequence
  Description of Artificial Sequence: Synthetic peptide
  Seed: ANQRLNPMHQLLRHF
ANQRINPNHILLYHF

SEQ ID NO: 213558 - protein, 15 aa, Artificial Sequence
  Description of Artificial Sequence: Synthetic peptide
  Seed: ANQRLNPMHQLLRHF
ANQRINPNHLLLAHF

SEQ ID NO: 213559 - protein, 15 aa, Artificial Sequence
  Description of Artificial Sequence: Synthetic peptide
  Seed: ANQRLNPMHQLLRHF
ANQRINPNHLLLFHF

SEQ ID NO: 213560 - protein, 15 aa, Artificial Sequence
  Description of Artificial Sequence: Synthetic peptide
  Seed: ANQRLNPMHQLLRHF
ANQRINPNHLLLIHF

SEQ ID NO: 213561 - protein, 15 aa, Artificial Sequence
  Description of Artificial Sequence: Synthetic peptide
  Seed: ANQRLNPMHQLLRHF
ANQRINPNHLLLLHF

SEQ ID NO: 213562 - protein, 15 aa, Artificial Sequence
  Description of Artificial Sequence: Synthetic peptide
  Seed: ANQRLNPMHQLLRHF
ANQRINPNHLLLMHF

SEQ ID NO: 213563 - protein, 15 aa, Artificial Sequence
  Description of Artificial Sequence: Synthetic peptide
  Seed: ANQRLNPMHQLLRHF
ANQRINPNHLLLVHF

SEQ ID NO: 213564 - protein, 15 aa, Artificial Sequence
  Description of Artificial Sequence: Synthetic peptide
  Seed: ANQRLNPMHQLLRHF
ANQRINPNHLLLYHF

SEQ ID NO: 213565 - protein, 15 aa, Artificial Sequence
  Description of Artificial Sequence: Synthetic peptide
  Seed: ANQRLNPMHQLLRHF
ANQRINPNHMLLAHF

SEQ ID NO: 213566 - protein, 15 aa, Artificial Sequence
  Description of Artificial Sequence: Synthetic peptide
  Seed: ANQRLNPMHQLLRHF
ANQRINPNHMLLFHF

SEQ ID NO: 213567 - protein, 15 aa, Artificial Sequence
  Description of Artificial Sequence: Synthetic peptide
  Seed: ANQRLNPMHQLLRHF
ANQRINPNHMLLIHF

SEQ ID NO: 213568 - protein, 15 aa, Artificial Sequence
  Description of Artificial Sequence: Synthetic peptide
  Seed: ANQRLNPMHQLLRHF
ANQRINPNHMLLLHF

SEQ ID NO: 213569 - protein, 15 aa, Artificial Sequence
  Description of Artificial Sequence: Synthetic peptide
  Seed: ANQRLNPMHQLLRHF
ANQRINPNHMLLMHF

SEQ ID NO: 213570 - protein, 15 aa, Artificial Sequence
  Description of Artificial Sequence: Synthetic peptide
  Seed: ANQRLNPMHQLLRHF
ANQRINPNHMLLVHF

SEQ ID NO: 213571 - protein, 15 aa, Artificial Sequence
  Description of Artificial Sequence: Synthetic peptide
  Seed: ANQRLNPMHQLLRHF
ANQRINPNHMLLYHF

SEQ ID NO: 213572 - protein, 15 aa, Artificial Sequence
  Description of Artificial Sequence: Synthetic peptide
  Seed: ANQRLNPMHQLLRHF
ANQRINPNHNLLAHF

SEQ ID NO: 213573 - protein, 15 aa, Artificial Sequence
  Description of Artificial Sequence: Synthetic peptide
  Seed: ANQRLNPMHQLLRHF
ANQRINPNHNLLFHF

SEQ ID NO: 213574 - protein, 15 aa, Artificial Sequence
  Description of Artificial Sequence: Synthetic peptide
  Seed: ANQRLNPMHQLLRHF
ANQRINPNHNLLIHF

SEQ ID NO: 213575 - protein, 15 aa, Artificial Sequence
  Description of Artificial Sequence: Synthetic peptide
  Seed: ANQRLNPMHQLLRHF
ANQRINPNHNLLLHF

SEQ ID NO: 213576 - protein, 15 aa, Artificial Sequence
  Description of Artificial Sequence: Synthetic peptide
  Seed: ANQRLNPMHQLLRHF
ANQRINPNHNLLMHF

SEQ ID NO: 213577 - protein, 15 aa, Artificial Sequence
  Description of Artificial Sequence: Synthetic peptide
  Seed: ANQRLNPMHQLLRHF
ANQRINPNHNLLNHF

SEQ ID NO: 213578 - protein, 15 aa, Artificial Sequence
  Description of Artificial Sequence: Synthetic peptide
  Seed: ANQRLNPMHQLLRHF
ANQRINPNHNLLSHF

SEQ ID NO: 213579 - protein, 15 aa, Artificial Sequence
  Description of Artificial Sequence: Synthetic peptide
  Seed: ANQRLNPMHQLLRHF
ANQRINPNHNLLTHF

SEQ ID NO: 213580 - protein, 15 aa, Artificial Sequence
  Description of Artificial Sequence: Synthetic peptide
  Seed: ANQRLNPMHQLLRHF
ANQRINPNHNLLVHF

SEQ ID NO: 213581 - protein, 15 aa, Artificial Sequence
  Description of Artificial Sequence: Synthetic peptide
  Seed: ANQRLNPMHQLLRHF
ANQRINPNHNLLWHF

SEQ ID NO: 213582 - protein, 15 aa, Artificial Sequence
  Description of Artificial Sequence: Synthetic peptide
  Seed: ANQRLNPMHQLLRHF
ANQRINPNHNLLYHF

SEQ ID NO: 213583 - protein, 15 aa, Artificial Sequence
  Description of Artificial Sequence: Synthetic peptide
  Seed: ANQRLNPMHQLLRHF
ANQRINPNHPLLAHF

SEQ ID NO: 213584 - protein, 15 aa, Artificial Sequence
  Description of Artificial Sequence: Synthetic peptide
  Seed: ANQRLNPMHQLLRHF
ANQRINPNHPLLFHF

SEQ ID NO: 213585 - protein, 15 aa, Artificial Sequence
  Description of Artificial Sequence: Synthetic peptide
  Seed: ANQRLNPMHQLLRHF
ANQRINPNHPLLIHF

SEQ ID NO: 213586 - protein, 15 aa, Artificial Sequence
  Description of Artificial Sequence: Synthetic peptide
  Seed: ANQRLNPMHQLLRHF
ANQRINPNHPLLLHF

SEQ ID NO: 213587 - protein, 15 aa, Artificial Sequence
  Description of Artificial Sequence: Synthetic peptide
  Seed: ANQRLNPMHQLLRHF
ANQRINPNHPLLMHF

SEQ ID NO: 213588 - protein, 15 aa, Artificial Sequence
  Description of Artificial Sequence: Synthetic peptide
  Seed: ANQRLNPMHQLLRHF
ANQRINPNHPLLSHF

SEQ ID NO: 213589 - protein, 15 aa, Artificial Sequence
  Description of Artificial Sequence: Synthetic peptide
  Seed: ANQRLNPMHQLLRHF
ANQRINPNHPLLTHF

SEQ ID NO: 213590 - protein, 15 aa, Artificial Sequence
  Description of Artificial Sequence: Synthetic peptide
  Seed: ANQRLNPMHQLLRHF
ANQRINPNHPLLVHF

SEQ ID NO: 213591 - protein, 15 aa, Artificial Sequence
  Description of Artificial Sequence: Synthetic peptide
  Seed: ANQRLNPMHQLLRHF
ANQRINPNHPLLWHF

SEQ ID NO: 213592 - protein, 15 aa, Artificial Sequence
  Description of Artificial Sequence: Synthetic peptide
  Seed: ANQRLNPMHQLLRHF
ANQRINPNHPLLYHF

SEQ ID NO: 213593 - protein, 15 aa, Artificial Sequence
  Description of Artificial Sequence: Synthetic peptide
  Seed: ANQRLNPMHQLLRHF
ANQRINPNHQLLIHF

SEQ ID NO: 213594 - protein, 15 aa, Artificial Sequence
  Description of Artificial Sequence: Synthetic peptide
  Seed: ANQRLNPMHQLLRHF
ANQRINPNHQLLVHF

SEQ ID NO: 213595 - protein, 15 aa, Artificial Sequence
  Description of Artificial Sequence: Synthetic peptide
  Seed: ANQRLNPMHQLLRHF
ANQRINPNHRLLIHF

SEQ ID NO: 213596 - protein, 15 aa, Artificial Sequence
  Description of Artificial Sequence: Synthetic peptide
  Seed: ANQRLNPMHQLLRHF
ANQRINPNHRLLLHF

SEQ ID NO: 213597 - protein, 15 aa, Artificial Sequence
  Description of Artificial Sequence: Synthetic peptide
  Seed: ANQRLNPMHQLLRHF
ANQRINPNHRLLRHF

SEQ ID NO: 213598 - protein, 15 aa, Artificial Sequence
  Description of Artificial Sequence: Synthetic peptide
  Seed: ANQRLNPMHQLLRHF
ANQRINPNHRLLVHF

SEQ ID NO: 213599 - protein, 15 aa, Artificial Sequence
  Description of Artificial Sequence: Synthetic peptide
  Seed: ANQRLNPMHQLLRHF
ANQRINPNHSLLAHF

SEQ ID NO: 213600 - protein, 15 aa, Artificial Sequence
  Description of Artificial Sequence: Synthetic peptide
  Seed: ANQRLNPMHQLLRHF
ANQRINPNHSLLFHF

SEQ ID NO: 213601 - protein, 15 aa, Artificial Sequence
  Description of Artificial Sequence: Synthetic peptide
  Seed: ANQRLNPMHQLLRHF
ANQRINPNHSLLIHF

SEQ ID NO: 213602 - protein, 15 aa, Artificial Sequence
  Description of Artificial Sequence: Synthetic peptide
  Seed: ANQRLNPMHQLLRHF
ANQRINPNHSLLLHF

SEQ ID NO: 213603 - protein, 15 aa, Artificial Sequence
  Description of Artificial Sequence: Synthetic peptide
  Seed: ANQRLNPMHQLLRHF
ANQRINPNHSLLMHF

SEQ ID NO: 213604 - protein, 15 aa, Artificial Sequence
  Description of Artificial Sequence: Synthetic peptide
  Seed: ANQRLNPMHQLLRHF
ANQRINPNHSLLNHF

SEQ ID NO: 213605 - protein, 15 aa, Artificial Sequence
  Description of Artificial Sequence: Synthetic peptide
  Seed: ANQRLNPMHQLLRHF
ANQRINPNHSLLSHF

SEQ ID NO: 213606 - protein, 15 aa, Artificial Sequence
  Description of Artificial Sequence: Synthetic peptide
  Seed: ANQRLNPMHQLLRHF
ANQRINPNHSLLTHF

SEQ ID NO: 213607 - protein, 15 aa, Artificial Sequence
  Description of Artificial Sequence: Synthetic peptide
  Seed: ANQRLNPMHQLLRHF
ANQRINPNHSLLVHF

SEQ ID NO: 213608 - protein, 15 aa, Artificial Sequence
  Description of Artificial Sequence: Synthetic peptide
  Seed: ANQRLNPMHQLLRHF
ANQRINPNHSLLWHF

SEQ ID NO: 213609 - protein, 15 aa, Artificial Sequence
  Description of Artificial Sequence: Synthetic peptide
  Seed: ANQRLNPMHQLLRHF
ANQRINPNHSLLYHF

SEQ ID NO: 213610 - protein, 15 aa, Artificial Sequence
  Description of Artificial Sequence: Synthetic peptide
  Seed: ANQRLNPMHQLLRHF
ANQRINPNHTLLAHF

SEQ ID NO: 213611 - protein, 15 aa, Artificial Sequence
  Description of Artificial Sequence: Synthetic peptide
  Seed: ANQRLNPMHQLLRHF
ANQRINPNHTLLFHF

SEQ ID NO: 213612 - protein, 15 aa, Artificial Sequence
  Description of Artificial Sequence: Synthetic peptide
  Seed: ANQRLNPMHQLLRHF
ANQRINPNHTLLIHF

SEQ ID NO: 213613 - protein, 15 aa, Artificial Sequence
  Description of Artificial Sequence: Synthetic peptide
  Seed: ANQRLNPMHQLLRHF
ANQRINPNHTLLLHF

SEQ ID NO: 213614 - protein, 15 aa, Artificial Sequence
  Description of Artificial Sequence: Synthetic peptide
  Seed: ANQRLNPMHQLLRHF
ANQRINPNHTLLMHF

SEQ ID NO: 213615 - protein, 15 aa, Artificial Sequence
  Description of Artificial Sequence: Synthetic peptide
  Seed: ANQRLNPMHQLLRHF
ANQRINPNHTLLSHF

SEQ ID NO: 213616 - protein, 15 aa, Artificial Sequence
  Description of Artificial Sequence: Synthetic peptide
  Seed: ANQRLNPMHQLLRHF
ANQRINPNHTLLTHF

SEQ ID NO: 213617 - protein, 15 aa, Artificial Sequence
  Description of Artificial Sequence: Synthetic peptide
  Seed: ANQRLNPMHQLLRHF
ANQRINPNHTLLVHF

SEQ ID NO: 213618 - protein, 15 aa, Artificial Sequence
  Description of Artificial Sequence: Synthetic peptide
  Seed: ANQRLNPMHQLLRHF
ANQRINPNHTLLYHF

SEQ ID NO: 213619 - protein, 15 aa, Artificial Sequence
  Description of Artificial Sequence: Synthetic peptide
  Seed: ANQRLNPMHQLLRHF
ANQRINPNHVLLAHF

SEQ ID NO: 213620 - protein, 15 aa, Artificial Sequence
  Description of Artificial Sequence: Synthetic peptide
  Seed: ANQRLNPMHQLLRHF
ANQRINPNHVLLFHF

SEQ ID NO: 213621 - protein, 15 aa, Artificial Sequence
  Description of Artificial Sequence: Synthetic peptide
  Seed: ANQRLNPMHQLLRHF
ANQRINPNHVLLIHF

SEQ ID NO: 213622 - protein, 15 aa, Artificial Sequence
  Description of Artificial Sequence: Synthetic peptide
  Seed: ANQRLNPMHQLLRHF
ANQRINPNHVLLLHF

SEQ ID NO: 213623 - protein, 15 aa, Artificial Sequence
  Description of Artificial Sequence: Synthetic peptide
  Seed: ANQRLNPMHQLLRHF
ANQRINPNHVLLMHF

SEQ ID NO: 213624 - protein, 15 aa, Artificial Sequence
  Description of Artificial Sequence: Synthetic peptide
  Seed: ANQRLNPMHQLLRHF
ANQRINPNHVLLSHF

SEQ ID NO: 213625 - protein, 15 aa, Artificial Sequence
  Description of Artificial Sequence: Synthetic peptide
  Seed: ANQRLNPMHQLLRHF
ANQRINPNHVLLTHF

SEQ ID NO: 213626 - protein, 15 aa, Artificial Sequence
  Description of Artificial Sequence: Synthetic peptide
  Seed: ANQRLNPMHQLLRHF
ANQRINPNHVLLVHF

SEQ ID NO: 213627 - protein, 15 aa, Artificial Sequence
  Description of Artificial Sequence: Synthetic peptide
  Seed: ANQRLNPMHQLLRHF
ANQRINPNHVLLWHF

SEQ ID NO: 213628 - protein, 15 aa, Artificial Sequence
  Description of Artificial Sequence: Synthetic peptide
  Seed: ANQRLNPMHQLLRHF
ANQRINPNHVLLYHF

SEQ ID NO: 213629 - protein, 15 aa, Artificial Sequence
  Description of Artificial Sequence: Synthetic peptide
  Seed: ANQRLNPMHQLLRHF
ANQRINPNHWLLIHF

SEQ ID NO: 213630 - protein, 15 aa, Artificial Sequence
  Description of Artificial Sequence: Synthetic peptide
  Seed: ANQRLNPMHQLLRHF
ANQRINPNHWLLVHF

SEQ ID NO: 213631 - protein, 15 aa, Artificial Sequence
  Description of Artificial Sequence: Synthetic peptide
  Seed: ANQRLNPMHQLLRHF
ANQRINPNHYLLIHF

SEQ ID NO: 213632 - protein, 15 aa, Artificial Sequence
  Description of Artificial Sequence: Synthetic peptide
  Seed: ANQRLNPMHQLLRHF
ANQRINPNHYLLLHF

SEQ ID NO: 213633 - protein, 15 aa, Artificial Sequence
  Description of Artificial Sequence: Synthetic peptide
  Seed: ANQRLNPMHQLLRHF
ANQRINPNHYLLVHF

SEQ ID NO: 213634 - protein, 15 aa, Artificial Sequence
  Description of Artificial Sequence: Synthetic peptide
  Seed: ANQRLNPMHQLLRHF
ANQRINPQHALLAHF

SEQ ID NO: 213635 - protein, 15 aa, Artificial Sequence
  Description of Artificial Sequence: Synthetic peptide
  Seed: ANQRLNPMHQLLRHF
ANQRINPQHALLIHF

SEQ ID NO: 213636 - protein, 15 aa, Artificial Sequence
  Description of Artificial Sequence: Synthetic peptide
  Seed: ANQRLNPMHQLLRHF
ANQRINPQHALLLHF

SEQ ID NO: 213637 - protein, 15 aa, Artificial Sequence
  Description of Artificial Sequence: Synthetic peptide
  Seed: ANQRLNPMHQLLRHF
ANQRINPQHALLMHF

SEQ ID NO: 213638 - protein, 15 aa, Artificial Sequence
  Description of Artificial Sequence: Synthetic peptide
  Seed: ANQRLNPMHQLLRHF
ANQRINPQHALLRHF

SEQ ID NO: 213639 - protein, 15 aa, Artificial Sequence
  Description of Artificial Sequence: Synthetic peptide
  Seed: ANQRLNPMHQLLRHF
ANQRINPQHALLSHF

SEQ ID NO: 213640 - protein, 15 aa, Artificial Sequence
  Description of Artificial Sequence: Synthetic peptide
  Seed: ANQRLNPMHQLLRHF
ANQRINPQHALLTHF

SEQ ID NO: 213641 - protein, 15 aa, Artificial Sequence
  Description of Artificial Sequence: Synthetic peptide
  Seed: ANQRLNPMHQLLRHF
ANQRINPQHALLVHF

SEQ ID NO: 213642 - protein, 15 aa, Artificial Sequence
  Description of Artificial Sequence: Synthetic peptide
  Seed: ANQRLNPMHQLLRHF
ANQRINPQHFLLIHF

SEQ ID NO: 213643 - protein, 15 aa, Artificial Sequence
  Description of Artificial Sequence: Synthetic peptide
  Seed: ANQRLNPMHQLLRHF
ANQRINPQHFLLLHF

SEQ ID NO: 213644 - protein, 15 aa, Artificial Sequence
  Description of Artificial Sequence: Synthetic peptide
  Seed: ANQRLNPMHQLLRHF
ANQRINPQHFLLVHF

SEQ ID NO: 213645 - protein, 15 aa, Artificial Sequence
  Description of Artificial Sequence: Synthetic peptide
  Seed: ANQRLNPMHQLLRHF
ANQRINPQHGLLAHF

SEQ ID NO: 213646 - protein, 15 aa, Artificial Sequence
  Description of Artificial Sequence: Synthetic peptide
  Seed: ANQRLNPMHQLLRHF
ANQRINPQHGLLIHF

SEQ ID NO: 213647 - protein, 15 aa, Artificial Sequence
  Description of Artificial Sequence: Synthetic peptide
  Seed: ANQRLNPMHQLLRHF
ANQRINPQHGLLLHF

SEQ ID NO: 213648 - protein, 15 aa, Artificial Sequence
  Description of Artificial Sequence: Synthetic peptide
  Seed: ANQRLNPMHQLLRHF
ANQRINPQHGLLMHF

SEQ ID NO: 213649 - protein, 15 aa, Artificial Sequence
  Description of Artificial Sequence: Synthetic peptide
  Seed: ANQRLNPMHQLLRHF
ANQRINPQHGLLSHF

SEQ ID NO: 213650 - protein, 15 aa, Artificial Sequence
  Description of Artificial Sequence: Synthetic peptide
  Seed: ANQRLNPMHQLLRHF
ANQRINPQHGLLTHF

SEQ ID NO: 213651 - protein, 15 aa, Artificial Sequence
  Description of Artificial Sequence: Synthetic peptide
  Seed: ANQRLNPMHQLLRHF
ANQRINPQHGLLVHF

SEQ ID NO: 213652 - protein, 15 aa, Artificial Sequence
  Description of Artificial Sequence: Synthetic peptide
  Seed: ANQRLNPMHQLLRHF
ANQRINPQHKLLAHF

SEQ ID NO: 213653 - protein, 15 aa, Artificial Sequence
  Description of Artificial Sequence: Synthetic peptide
  Seed: ANQRLNPMHQLLRHF
ANQRINPQHKLLRHF

SEQ ID NO: 213654 - protein, 15 aa, Artificial Sequence
  Description of Artificial Sequence: Synthetic peptide
  Seed: ANQRLNPMHQLLRHF
ANQRINPQHKLLSHF

SEQ ID NO: 213655 - protein, 15 aa, Artificial Sequence
  Description of Artificial Sequence: Synthetic peptide
  Seed: ANQRLNPMHQLLRHF
ANQRINPQHNLLIHF

SEQ ID NO: 213656 - protein, 15 aa, Artificial Sequence
  Description of Artificial Sequence: Synthetic peptide
  Seed: ANQRLNPMHQLLRHF
ANQRINPQHNLLLHF

SEQ ID NO: 213657 - protein, 15 aa, Artificial Sequence
  Description of Artificial Sequence: Synthetic peptide
  Seed: ANQRLNPMHQLLRHF
ANQRINPQHNLLVHF

SEQ ID NO: 213658 - protein, 15 aa, Artificial Sequence
  Description of Artificial Sequence: Synthetic peptide
  Seed: ANQRLNPMHQLLRHF
ANQRINPQHPLLAHF

SEQ ID NO: 213659 - protein, 15 aa, Artificial Sequence
  Description of Artificial Sequence: Synthetic peptide
  Seed: ANQRLNPMHQLLRHF
ANQRINPQHPLLIHF

SEQ ID NO: 213660 - protein, 15 aa, Artificial Sequence
  Description of Artificial Sequence: Synthetic peptide
  Seed: ANQRLNPMHQLLRHF
ANQRINPQHPLLLHF

SEQ ID NO: 213661 - protein, 15 aa, Artificial Sequence
  Description of Artificial Sequence: Synthetic peptide
  Seed: ANQRLNPMHQLLRHF
ANQRINPQHPLLVHF

SEQ ID NO: 213662 - protein, 15 aa, Artificial Sequence
  Description of Artificial Sequence: Synthetic peptide
  Seed: ANQRLNPMHQLLRHF
ANQRINPQHRLLAHF

SEQ ID NO: 213663 - protein, 15 aa, Artificial Sequence
  Description of Artificial Sequence: Synthetic peptide
  Seed: ANQRLNPMHQLLRHF
ANQRINPQHRLLFHF

SEQ ID NO: 213664 - protein, 15 aa, Artificial Sequence
  Description of Artificial Sequence: Synthetic peptide
  Seed: ANQRLNPMHQLLRHF
ANQRINPQHRLLGHF

SEQ ID NO: 213665 - protein, 15 aa, Artificial Sequence
  Description of Artificial Sequence: Synthetic peptide
  Seed: ANQRLNPMHQLLRHF
ANQRINPQHRLLHHF

SEQ ID NO: 213666 - protein, 15 aa, Artificial Sequence
  Description of Artificial Sequence: Synthetic peptide
  Seed: ANQRLNPMHQLLRHF
ANQRINPQHRLLIHF

SEQ ID NO: 213667 - protein, 15 aa, Artificial Sequence
  Description of Artificial Sequence: Synthetic peptide
  Seed: ANQRLNPMHQLLRHF
ANQRINPQHRLLKHF

SEQ ID NO: 213668 - protein, 15 aa, Artificial Sequence
  Description of Artificial Sequence: Synthetic peptide
  Seed: ANQRLNPMHQLLRHF
ANQRINPQHRLLLHF

SEQ ID NO: 213669 - protein, 15 aa, Artificial Sequence
  Description of Artificial Sequence: Synthetic peptide
  Seed: ANQRLNPMHQLLRHF
ANQRINPQHRLLMHF

SEQ ID NO: 213670 - protein, 15 aa, Artificial Sequence
  Description of Artificial Sequence: Synthetic peptide
  Seed: ANQRLNPMHQLLRHF
ANQRINPQHRLLQHF

SEQ ID NO: 213671 - protein, 15 aa, Artificial Sequence
  Description of Artificial Sequence: Synthetic peptide
  Seed: ANQRLNPMHQLLRHF
ANQRINPQHRLLRHF

SEQ ID NO: 213672 - protein, 15 aa, Artificial Sequence
  Description of Artificial Sequence: Synthetic peptide
  Seed: ANQRLNPMHQLLRHF
ANQRINPQHRLLSHF

SEQ ID NO: 213673 - protein, 15 aa, Artificial Sequence
  Description of Artificial Sequence: Synthetic peptide
  Seed: ANQRLNPMHQLLRHF
ANQRINPQHRLLTHF

SEQ ID NO: 213674 - protein, 15 aa, Artificial Sequence
  Description of Artificial Sequence: Synthetic peptide
  Seed: ANQRLNPMHQLLRHF
ANQRINPQHRLLVHF

SEQ ID NO: 213675 - protein, 15 aa, Artificial Sequence
  Description of Artificial Sequence: Synthetic peptide
  Seed: ANQRLNPMHQLLRHF
ANQRINPQHRLLYHF

SEQ ID NO: 213676 - protein, 15 aa, Artificial Sequence
  Description of Artificial Sequence: Synthetic peptide
  Seed: ANQRLNPMHQLLRHF
ANQRINPQHSLLAHF

SEQ ID NO: 213677 - protein, 15 aa, Artificial Sequence
  Description of Artificial Sequence: Synthetic peptide
  Seed: ANQRLNPMHQLLRHF
ANQRINPQHSLLIHF

SEQ ID NO: 213678 - protein, 15 aa, Artificial Sequence
  Description of Artificial Sequence: Synthetic peptide
  Seed: ANQRLNPMHQLLRHF
ANQRINPQHSLLLHF

SEQ ID NO: 213679 - protein, 15 aa, Artificial Sequence
  Description of Artificial Sequence: Synthetic peptide
  Seed: ANQRLNPMHQLLRHF
ANQRINPQHSLLMHF

SEQ ID NO: 213680 - protein, 15 aa, Artificial Sequence
  Description of Artificial Sequence: Synthetic peptide
  Seed: ANQRLNPMHQLLRHF
ANQRINPQHSLLSHF

SEQ ID NO: 213681 - protein, 15 aa, Artificial Sequence
  Description of Artificial Sequence: Synthetic peptide
  Seed: ANQRLNPMHQLLRHF
ANQRINPQHSLLTHF

SEQ ID NO: 213682 - protein, 15 aa, Artificial Sequence
  Description of Artificial Sequence: Synthetic peptide
  Seed: ANQRLNPMHQLLRHF
ANQRINPQHSLLVHF

SEQ ID NO: 213683 - protein, 15 aa, Artificial Sequence
  Description of Artificial Sequence: Synthetic peptide
  Seed: ANQRLNPMHQLLRHF
ANQRINPQHTLLLHF

SEQ ID NO: 213684 - protein, 15 aa, Artificial Sequence
  Description of Artificial Sequence: Synthetic peptide
  Seed: ANQRLNPMHQLLRHF
ANQRINPQHTLLVHF

SEQ ID NO: 213685 - protein, 15 aa, Artificial Sequence
  Description of Artificial Sequence: Synthetic peptide
  Seed: ANQRLNPMHQLLRHF
ANQRINPRHALLRHF

SEQ ID NO: 213686 - protein, 15 aa, Artificial Sequence
  Description of Artificial Sequence: Synthetic peptide
  Seed: ANQRLNPMHQLLRHF
ANQRINPRHKLLSHF

SEQ ID NO: 213687 - protein, 15 aa, Artificial Sequence
  Description of Artificial Sequence: Synthetic peptide
  Seed: ANQRLNPMHQLLRHF
ANQRINPRHRLLAHF

SEQ ID NO: 213688 - protein, 15 aa, Artificial Sequence
  Description of Artificial Sequence: Synthetic peptide
  Seed: ANQRLNPMHQLLRHF
ANQRINPRHRLLFHF

SEQ ID NO: 213689 - protein, 15 aa, Artificial Sequence
  Description of Artificial Sequence: Synthetic peptide
  Seed: ANQRLNPMHQLLRHF
ANQRINPRHRLLIHF

SEQ ID NO: 213690 - protein, 15 aa, Artificial Sequence
  Description of Artificial Sequence: Synthetic peptide
  Seed: ANQRLNPMHQLLRHF
ANQRINPRHRLLLHF

SEQ ID NO: 213691 - protein, 15 aa, Artificial Sequence
  Description of Artificial Sequence: Synthetic peptide
  Seed: ANQRLNPMHQLLRHF
ANQRINPRHRLLMHF

SEQ ID NO: 213692 - protein, 15 aa, Artificial Sequence
  Description of Artificial Sequence: Synthetic peptide
  Seed: ANQRLNPMHQLLRHF
ANQRINPRHRLLRHF

SEQ ID NO: 213693 - protein, 15 aa, Artificial Sequence
  Description of Artificial Sequence: Synthetic peptide
  Seed: ANQRLNPMHQLLRHF
ANQRINPRHRLLSHF

SEQ ID NO: 213694 - protein, 15 aa, Artificial Sequence
  Description of Artificial Sequence: Synthetic peptide
  Seed: ANQRLNPMHQLLRHF
ANQRINPRHRLLVHF

SEQ ID NO: 213695 - protein, 15 aa, Artificial Sequence
  Description of Artificial Sequence: Synthetic peptide
  Seed: ANQRLNPMHQLLRHF
ANQRINPRHRLLYHF

SEQ ID NO: 213696 - protein, 15 aa, Artificial Sequence
  Description of Artificial Sequence: Synthetic peptide
  Seed: ANQRLNPMHQLLRHF
ANQRINPRHSLLRHF

SEQ ID NO: 213697 - protein, 15 aa, Artificial Sequence
  Description of Artificial Sequence: Synthetic peptide
  Seed: ANQRLNPMHQLLRHF
ANQRINPSHALLAHF

SEQ ID NO: 213698 - protein, 15 aa, Artificial Sequence
  Description of Artificial Sequence: Synthetic peptide
  Seed: ANQRLNPMHQLLRHF
ANQRINPSHALLFHF

SEQ ID NO: 213699 - protein, 15 aa, Artificial Sequence
  Description of Artificial Sequence: Synthetic peptide
  Seed: ANQRLNPMHQLLRHF
ANQRINPSHALLIHF

SEQ ID NO: 213700 - protein, 15 aa, Artificial Sequence
  Description of Artificial Sequence: Synthetic peptide
  Seed: ANQRLNPMHQLLRHF
ANQRINPSHALLLHF

SEQ ID NO: 213701 - protein, 15 aa, Artificial Sequence
  Description of Artificial Sequence: Synthetic peptide
  Seed: ANQRLNPMHQLLRHF
ANQRINPSHALLMHF

SEQ ID NO: 213702 - protein, 15 aa, Artificial Sequence
  Description of Artificial Sequence: Synthetic peptide
  Seed: ANQRLNPMHQLLRHF
ANQRINPSHALLRHF

SEQ ID NO: 213703 - protein, 15 aa, Artificial Sequence
  Description of Artificial Sequence: Synthetic peptide
  Seed: ANQRLNPMHQLLRHF
ANQRINPSHALLSHF

SEQ ID NO: 213704 - protein, 15 aa, Artificial Sequence
  Description of Artificial Sequence: Synthetic peptide
  Seed: ANQRLNPMHQLLRHF
ANQRINPSHALLTHF

SEQ ID NO: 213705 - protein, 15 aa, Artificial Sequence
  Description of Artificial Sequence: Synthetic peptide
  Seed: ANQRLNPMHQLLRHF
ANQRINPSHALLVHF

SEQ ID NO: 213706 - protein, 15 aa, Artificial Sequence
  Description of Artificial Sequence: Synthetic peptide
  Seed: ANQRLNPMHQLLRHF
ANQRINPSHALLYHF

SEQ ID NO: 213707 - protein, 15 aa, Artificial Sequence
  Description of Artificial Sequence: Synthetic peptide
  Seed: ANQRLNPMHQLLRHF
ANQRINPSHFLLFHF

SEQ ID NO: 213708 - protein, 15 aa, Artificial Sequence
  Description of Artificial Sequence: Synthetic peptide
  Seed: ANQRLNPMHQLLRHF
ANQRINPSHFLLIHF

SEQ ID NO: 213709 - protein, 15 aa, Artificial Sequence
  Description of Artificial Sequence: Synthetic peptide
  Seed: ANQRLNPMHQLLRHF
ANQRINPSHFLLLHF

SEQ ID NO: 213710 - protein, 15 aa, Artificial Sequence
  Description of Artificial Sequence: Synthetic peptide
  Seed: ANQRLNPMHQLLRHF
ANQRINPSHFLLMHF

SEQ ID NO: 213711 - protein, 15 aa, Artificial Sequence
  Description of Artificial Sequence: Synthetic peptide
  Seed: ANQRLNPMHQLLRHF
ANQRINPSHFLLVHF

SEQ ID NO: 213712 - protein, 15 aa, Artificial Sequence
  Description of Artificial Sequence: Synthetic peptide
  Seed: ANQRLNPMHQLLRHF
ANQRINPSHGLLAHF

SEQ ID NO: 213713 - protein, 15 aa, Artificial Sequence
  Description of Artificial Sequence: Synthetic peptide
  Seed: ANQRLNPMHQLLRHF
ANQRINPSHGLLIHF

SEQ ID NO: 213714 - protein, 15 aa, Artificial Sequence
  Description of Artificial Sequence: Synthetic peptide
  Seed: ANQRLNPMHQLLRHF
ANQRINPSHGLLLHF

SEQ ID NO: 213715 - protein, 15 aa, Artificial Sequence
  Description of Artificial Sequence: Synthetic peptide
  Seed: ANQRLNPMHQLLRHF
ANQRINPSHGLLVHF

SEQ ID NO: 213716 - protein, 15 aa, Artificial Sequence
  Description of Artificial Sequence: Synthetic peptide
  Seed: ANQRLNPMHQLLRHF
ANQRINPSHILLIHF

SEQ ID NO: 213717 - protein, 15 aa, Artificial Sequence
  Description of Artificial Sequence: Synthetic peptide
  Seed: ANQRLNPMHQLLRHF
ANQRINPSHILLVHF

SEQ ID NO: 213718 - protein, 15 aa, Artificial Sequence
  Description of Artificial Sequence: Synthetic peptide
  Seed: ANQRLNPMHQLLRHF
ANQRINPSHKLLIHF

SEQ ID NO: 213719 - protein, 15 aa, Artificial Sequence
  Description of Artificial Sequence: Synthetic peptide
  Seed: ANQRLNPMHQLLRHF
ANQRINPSHKLLLHF

SEQ ID NO: 213720 - protein, 15 aa, Artificial Sequence
  Description of Artificial Sequence: Synthetic peptide
  Seed: ANQRLNPMHQLLRHF
ANQRINPSHKLLRHF

SEQ ID NO: 213721 - protein, 15 aa, Artificial Sequence
  Description of Artificial Sequence: Synthetic peptide
  Seed: ANQRLNPMHQLLRHF
ANQRINPSHKLLVHF

SEQ ID NO: 213722 - protein, 15 aa, Artificial Sequence
  Description of Artificial Sequence: Synthetic peptide
  Seed: ANQRLNPMHQLLRHF
ANQRINPSHKLLYHF

SEQ ID NO: 213723 - protein, 15 aa, Artificial Sequence
  Description of Artificial Sequence: Synthetic peptide
  Seed: ANQRLNPMHQLLRHF
ANQRINPSHNLLFHF

SEQ ID NO: 213724 - protein, 15 aa, Artificial Sequence
  Description of Artificial Sequence: Synthetic peptide
  Seed: ANQRLNPMHQLLRHF
ANQRINPSHNLLIHF

SEQ ID NO: 213725 - protein, 15 aa, Artificial Sequence
  Description of Artificial Sequence: Synthetic peptide
  Seed: ANQRLNPMHQLLRHF
ANQRINPSHNLLLHF

SEQ ID NO: 213726 - protein, 15 aa, Artificial Sequence
  Description of Artificial Sequence: Synthetic peptide
  Seed: ANQRLNPMHQLLRHF
ANQRINPSHNLLMHF

SEQ ID NO: 213727 - protein, 15 aa, Artificial Sequence
  Description of Artificial Sequence: Synthetic peptide
  Seed: ANQRLNPMHQLLRHF
ANQRINPSHNLLVHF

SEQ ID NO: 213728 - protein, 15 aa, Artificial Sequence
  Description of Artificial Sequence: Synthetic peptide
  Seed: ANQRLNPMHQLLRHF
ANQRINPSHNLLYHF

SEQ ID NO: 213729 - protein, 15 aa, Artificial Sequence
  Description of Artificial Sequence: Synthetic peptide
  Seed: ANQRLNPMHQLLRHF
ANQRINPSHPLLAHF

SEQ ID NO: 213730 - protein, 15 aa, Artificial Sequence
  Description of Artificial Sequence: Synthetic peptide
  Seed: ANQRLNPMHQLLRHF
ANQRINPSHPLLFHF

SEQ ID NO: 213731 - protein, 15 aa, Artificial Sequence
  Description of Artificial Sequence: Synthetic peptide
  Seed: ANQRLNPMHQLLRHF
ANQRINPSHPLLIHF

SEQ ID NO: 213732 - protein, 15 aa, Artificial Sequence
  Description of Artificial Sequence: Synthetic peptide
  Seed: ANQRLNPMHQLLRHF
ANQRINPSHPLLLHF

SEQ ID NO: 213733 - protein, 15 aa, Artificial Sequence
  Description of Artificial Sequence: Synthetic peptide
  Seed: ANQRLNPMHQLLRHF
ANQRINPSHPLLVHF

SEQ ID NO: 213734 - protein, 15 aa, Artificial Sequence
  Description of Artificial Sequence: Synthetic peptide
  Seed: ANQRLNPMHQLLRHF
ANQRINPSHRLLAHF

SEQ ID NO: 213735 - protein, 15 aa, Artificial Sequence
  Description of Artificial Sequence: Synthetic peptide
  Seed: ANQRLNPMHQLLRHF
ANQRINPSHRLLFHF

SEQ ID NO: 213736 - protein, 15 aa, Artificial Sequence
  Description of Artificial Sequence: Synthetic peptide
  Seed: ANQRLNPMHQLLRHF
ANQRINPSHRLLHHF

SEQ ID NO: 213737 - protein, 15 aa, Artificial Sequence
  Description of Artificial Sequence: Synthetic peptide
  Seed: ANQRLNPMHQLLRHF
ANQRINPSHRLLIHF

SEQ ID NO: 213738 - protein, 15 aa, Artificial Sequence
  Description of Artificial Sequence: Synthetic peptide
  Seed: ANQRLNPMHQLLRHF
ANQRINPSHRLLKHF

SEQ ID NO: 213739 - protein, 15 aa, Artificial Sequence
  Description of Artificial Sequence: Synthetic peptide
  Seed: ANQRLNPMHQLLRHF
ANQRINPSHRLLLHF

SEQ ID NO: 213740 - protein, 15 aa, Artificial Sequence
  Description of Artificial Sequence: Synthetic peptide
  Seed: ANQRLNPMHQLLRHF
ANQRINPSHRLLMHF

SEQ ID NO: 213741 - protein, 15 aa, Artificial Sequence
  Description of Artificial Sequence: Synthetic peptide
  Seed: ANQRLNPMHQLLRHF
ANQRINPSHRLLQHF

SEQ ID NO: 213742 - protein, 15 aa, Artificial Sequence
  Description of Artificial Sequence: Synthetic peptide
  Seed: ANQRLNPMHQLLRHF
ANQRINPSHRLLRHF

SEQ ID NO: 213743 - protein, 15 aa, Artificial Sequence
  Description of Artificial Sequence: Synthetic peptide
  Seed: ANQRLNPMHQLLRHF
ANQRINPSHRLLSHF

SEQ ID NO: 213744 - protein, 15 aa, Artificial Sequence
  Description of Artificial Sequence: Synthetic peptide
  Seed: ANQRLNPMHQLLRHF
ANQRINPSHRLLVHF

SEQ ID NO: 213745 - protein, 15 aa, Artificial Sequence
  Description of Artificial Sequence: Synthetic peptide
  Seed: ANQRLNPMHQLLRHF
ANQRINPSHRLLYHF

SEQ ID NO: 213746 - protein, 15 aa, Artificial Sequence
  Description of Artificial Sequence: Synthetic peptide
  Seed: ANQRLNPMHQLLRHF
ANQRINPSHSLLAHF

SEQ ID NO: 213747 - protein, 15 aa, Artificial Sequence
  Description of Artificial Sequence: Synthetic peptide
  Seed: ANQRLNPMHQLLRHF
ANQRINPSHSLLFHF

SEQ ID NO: 213748 - protein, 15 aa, Artificial Sequence
  Description of Artificial Sequence: Synthetic peptide
  Seed: ANQRLNPMHQLLRHF
ANQRINPSHSLLIHF

SEQ ID NO: 213749 - protein, 15 aa, Artificial Sequence
  Description of Artificial Sequence: Synthetic peptide
  Seed: ANQRLNPMHQLLRHF
ANQRINPSHSLLLHF

SEQ ID NO: 213750 - protein, 15 aa, Artificial Sequence
  Description of Artificial Sequence: Synthetic peptide
  Seed: ANQRLNPMHQLLRHF
ANQRINPSHSLLMHF

SEQ ID NO: 213751 - protein, 15 aa, Artificial Sequence
  Description of Artificial Sequence: Synthetic peptide
  Seed: ANQRLNPMHQLLRHF
ANQRINPSHSLLRHF

SEQ ID NO: 213752 - protein, 15 aa, Artificial Sequence
  Description of Artificial Sequence: Synthetic peptide
  Seed: ANQRLNPMHQLLRHF
ANQRINPSHSLLVHF

SEQ ID NO: 213753 - protein, 15 aa, Artificial Sequence
  Description of Artificial Sequence: Synthetic peptide
  Seed: ANQRLNPMHQLLRHF
ANQRINPSHSLLYHF

SEQ ID NO: 213754 - protein, 15 aa, Artificial Sequence
  Description of Artificial Sequence: Synthetic peptide
  Seed: ANQRLNPMHQLLRHF
ANQRINPSHTLLFHF

SEQ ID NO: 213755 - protein, 15 aa, Artificial Sequence
  Description of Artificial Sequence: Synthetic peptide
  Seed: ANQRLNPMHQLLRHF
ANQRINPSHTLLIHF

SEQ ID NO: 213756 - protein, 15 aa, Artificial Sequence
  Description of Artificial Sequence: Synthetic peptide
  Seed: ANQRLNPMHQLLRHF
ANQRINPSHTLLLHF

SEQ ID NO: 213757 - protein, 15 aa, Artificial Sequence
  Description of Artificial Sequence: Synthetic peptide
  Seed: ANQRLNPMHQLLRHF
ANQRINPSHTLLVHF

SEQ ID NO: 213758 - protein, 15 aa, Artificial Sequence
  Description of Artificial Sequence: Synthetic peptide
  Seed: ANQRLNPMHQLLRHF
ANQRINPSHVLLIHF

SEQ ID NO: 213759 - protein, 15 aa, Artificial Sequence
  Description of Artificial Sequence: Synthetic peptide
  Seed: ANQRLNPMHQLLRHF
ANQRINPSHVLLVHF

SEQ ID NO: 213760 - protein, 15 aa, Artificial Sequence
  Description of Artificial Sequence: Synthetic peptide
  Seed: ANQRLNPMHQLLRHF
ANQRINPTHALLAHF

SEQ ID NO: 213761 - protein, 15 aa, Artificial Sequence
  Description of Artificial Sequence: Synthetic peptide
  Seed: ANQRLNPMHQLLRHF
ANQRINPTHALLIHF

SEQ ID NO: 213762 - protein, 15 aa, Artificial Sequence
  Description of Artificial Sequence: Synthetic peptide
  Seed: ANQRLNPMHQLLRHF
ANQRINPTHALLLHF

SEQ ID NO: 213763 - protein, 15 aa, Artificial Sequence
  Description of Artificial Sequence: Synthetic peptide
  Seed: ANQRLNPMHQLLRHF
ANQRINPTHALLVHF

SEQ ID NO: 213764 - protein, 15 aa, Artificial Sequence
  Description of Artificial Sequence: Synthetic peptide
  Seed: ANQRLNPMHQLLRHF
ANQRINPTHFLLAHF

SEQ ID NO: 213765 - protein, 15 aa, Artificial Sequence
  Description of Artificial Sequence: Synthetic peptide
  Seed: ANQRLNPMHQLLRHF
ANQRINPTHFLLFHF

SEQ ID NO: 213766 - protein, 15 aa, Artificial Sequence
  Description of Artificial Sequence: Synthetic peptide
  Seed: ANQRLNPMHQLLRHF
ANQRINPTHFLLIHF

SEQ ID NO: 213767 - protein, 15 aa, Artificial Sequence
  Description of Artificial Sequence: Synthetic peptide
  Seed: ANQRLNPMHQLLRHF
ANQRINPTHFLLLHF

SEQ ID NO: 213768 - protein, 15 aa, Artificial Sequence
  Description of Artificial Sequence: Synthetic peptide
  Seed: ANQRLNPMHQLLRHF
ANQRINPTHFLLMHF

SEQ ID NO: 213769 - protein, 15 aa, Artificial Sequence
  Description of Artificial Sequence: Synthetic peptide
  Seed: ANQRLNPMHQLLRHF
ANQRINPTHFLLNHF

SEQ ID NO: 213770 - protein, 15 aa, Artificial Sequence
  Description of Artificial Sequence: Synthetic peptide
  Seed: ANQRLNPMHQLLRHF
ANQRINPTHFLLSHF

SEQ ID NO: 213771 - protein, 15 aa, Artificial Sequence
  Description of Artificial Sequence: Synthetic peptide
  Seed: ANQRLNPMHQLLRHF
ANQRINPTHFLLTHF

SEQ ID NO: 213772 - protein, 15 aa, Artificial Sequence
  Description of Artificial Sequence: Synthetic peptide
  Seed: ANQRLNPMHQLLRHF
ANQRINPTHFLLVHF

SEQ ID NO: 213773 - protein, 15 aa, Artificial Sequence
  Description of Artificial Sequence: Synthetic peptide
  Seed: ANQRLNPMHQLLRHF
ANQRINPTHFLLYHF

SEQ ID NO: 213774 - protein, 15 aa, Artificial Sequence
  Description of Artificial Sequence: Synthetic peptide
  Seed: ANQRLNPMHQLLRHF
ANQRINPTHNLLIHF

SEQ ID NO: 213775 - protein, 15 aa, Artificial Sequence
  Description of Artificial Sequence: Synthetic peptide
  Seed: ANQRLNPMHQLLRHF
ANQRINPTHNLLVHF

SEQ ID NO: 213776 - protein, 15 aa, Artificial Sequence
  Description of Artificial Sequence: Synthetic peptide
  Seed: ANQRLNPMHQLLRHF
ANQRINPTHRLLAHF

SEQ ID NO: 213777 - protein, 15 aa, Artificial Sequence
  Description of Artificial Sequence: Synthetic peptide
  Seed: ANQRLNPMHQLLRHF
ANQRINPTHRLLRHF

SEQ ID NO: 213778 - protein, 15 aa, Artificial Sequence
  Description of Artificial Sequence: Synthetic peptide
  Seed: ANQRLNPMHQLLRHF
ANQRINPTHRLLSHF

SEQ ID NO: 213779 - protein, 15 aa, Artificial Sequence
  Description of Artificial Sequence: Synthetic peptide
  Seed: ANQRLNPMHQLLRHF
ANQRINPTHRLLYHF

SEQ ID NO: 213780 - protein, 15 aa, Artificial Sequence
  Description of Artificial Sequence: Synthetic peptide
  Seed: ANQRLNPMHQLLRHF
ANQRINPTHSLLIHF

SEQ ID NO: 213781 - protein, 15 aa, Artificial Sequence
  Description of Artificial Sequence: Synthetic peptide
  Seed: ANQRLNPMHQLLRHF
ANQRINPTHSLLVHF

SEQ ID NO: 213782 - protein, 15 aa, Artificial Sequence
  Description of Artificial Sequence: Synthetic peptide
  Seed: ANQRLNPMHQLLRHF
ANQRINPVHALLAHF

SEQ ID NO: 213783 - protein, 15 aa, Artificial Sequence
  Description of Artificial Sequence: Synthetic peptide
  Seed: ANQRLNPMHQLLRHF
ANQRINPVHALLIHF

SEQ ID NO: 213784 - protein, 15 aa, Artificial Sequence
  Description of Artificial Sequence: Synthetic peptide
  Seed: ANQRLNPMHQLLRHF
ANQRINPVHALLLHF

SEQ ID NO: 213785 - protein, 15 aa, Artificial Sequence
  Description of Artificial Sequence: Synthetic peptide
  Seed: ANQRLNPMHQLLRHF
ANQRINPVHALLMHF

SEQ ID NO: 213786 - protein, 15 aa, Artificial Sequence
  Description of Artificial Sequence: Synthetic peptide
  Seed: ANQRLNPMHQLLRHF
ANQRINPVHALLRHF

SEQ ID NO: 213787 - protein, 15 aa, Artificial Sequence
  Description of Artificial Sequence: Synthetic peptide
  Seed: ANQRLNPMHQLLRHF
ANQRINPVHALLSHF

SEQ ID NO: 213788 - protein, 15 aa, Artificial Sequence
  Description of Artificial Sequence: Synthetic peptide
  Seed: ANQRLNPMHQLLRHF
ANQRINPVHALLTHF

SEQ ID NO: 213789 - protein, 15 aa, Artificial Sequence
  Description of Artificial Sequence: Synthetic peptide
  Seed: ANQRLNPMHQLLRHF
ANQRINPVHALLVHF

SEQ ID NO: 213790 - protein, 15 aa, Artificial Sequence
  Description of Artificial Sequence: Synthetic peptide
  Seed: ANQRLNPMHQLLRHF
ANQRINPVHFLLAHF

SEQ ID NO: 213791 - protein, 15 aa, Artificial Sequence
  Description of Artificial Sequence: Synthetic peptide
  Seed: ANQRLNPMHQLLRHF
ANQRINPVHFLLEHF

SEQ ID NO: 213792 - protein, 15 aa, Artificial Sequence
  Description of Artificial Sequence: Synthetic peptide
  Seed: ANQRLNPMHQLLRHF
ANQRINPVHFLLFHF

SEQ ID NO: 213793 - protein, 15 aa, Artificial Sequence
  Description of Artificial Sequence: Synthetic peptide
  Seed: ANQRLNPMHQLLRHF
ANQRINPVHFLLIHF

SEQ ID NO: 213794 - protein, 15 aa, Artificial Sequence
  Description of Artificial Sequence: Synthetic peptide
  Seed: ANQRLNPMHQLLRHF
ANQRINPVHFLLLHF

SEQ ID NO: 213795 - protein, 15 aa, Artificial Sequence
  Description of Artificial Sequence: Synthetic peptide
  Seed: ANQRLNPMHQLLRHF
ANQRINPVHFLLMHF

SEQ ID NO: 213796 - protein, 15 aa, Artificial Sequence
  Description of Artificial Sequence: Synthetic peptide
  Seed: ANQRLNPMHQLLRHF
ANQRINPVHFLLNHF

SEQ ID NO: 213797 - protein, 15 aa, Artificial Sequence
  Description of Artificial Sequence: Synthetic peptide
  Seed: ANQRLNPMHQLLRHF
ANQRINPVHFLLSHF

SEQ ID NO: 213798 - protein, 15 aa, Artificial Sequence
  Description of Artificial Sequence: Synthetic peptide
  Seed: ANQRLNPMHQLLRHF
ANQRINPVHFLLTHF

SEQ ID NO: 213799 - protein, 15 aa, Artificial Sequence
  Description of Artificial Sequence: Synthetic peptide
  Seed: ANQRLNPMHQLLRHF
ANQRINPVHFLLVHF

SEQ ID NO: 213800 - protein, 15 aa, Artificial Sequence
  Description of Artificial Sequence: Synthetic peptide
  Seed: ANQRLNPMHQLLRHF
ANQRINPVHGLLAHF

SEQ ID NO: 213801 - protein, 15 aa, Artificial Sequence
  Description of Artificial Sequence: Synthetic peptide
  Seed: ANQRLNPMHQLLRHF
ANQRINPVHGLLIHF

SEQ ID NO: 213802 - protein, 15 aa, Artificial Sequence
  Description of Artificial Sequence: Synthetic peptide
  Seed: ANQRLNPMHQLLRHF
ANQRINPVHGLLLHF

SEQ ID NO: 213803 - protein, 15 aa, Artificial Sequence
  Description of Artificial Sequence: Synthetic peptide
  Seed: ANQRLNPMHQLLRHF
ANQRINPVHGLLMHF

SEQ ID NO: 213804 - protein, 15 aa, Artificial Sequence
  Description of Artificial Sequence: Synthetic peptide
  Seed: ANQRLNPMHQLLRHF
ANQRINPVHGLLSHF

SEQ ID NO: 213805 - protein, 15 aa, Artificial Sequence
  Description of Artificial Sequence: Synthetic peptide
  Seed: ANQRLNPMHQLLRHF
ANQRINPVHGLLTHF

SEQ ID NO: 213806 - protein, 15 aa, Artificial Sequence
  Description of Artificial Sequence: Synthetic peptide
  Seed: ANQRLNPMHQLLRHF
ANQRINPVHGLLVHF

SEQ ID NO: 213807 - protein, 15 aa, Artificial Sequence
  Description of Artificial Sequence: Synthetic peptide
  Seed: ANQRLNPMHQLLRHF
ANQRINPVHKLLAHF

SEQ ID NO: 213808 - protein, 15 aa, Artificial Sequence
  Description of Artificial Sequence: Synthetic peptide
  Seed: ANQRLNPMHQLLRHF
ANQRINPVHKLLFHF

SEQ ID NO: 213809 - protein, 15 aa, Artificial Sequence
  Description of Artificial Sequence: Synthetic peptide
  Seed: ANQRLNPMHQLLRHF
ANQRINPVHKLLGHF

SEQ ID NO: 213810 - protein, 15 aa, Artificial Sequence
  Description of Artificial Sequence: Synthetic peptide
  Seed: ANQRLNPMHQLLRHF
ANQRINPVHKLLHHF

SEQ ID NO: 213811 - protein, 15 aa, Artificial Sequence
  Description of Artificial Sequence: Synthetic peptide
  Seed: ANQRLNPMHQLLRHF
ANQRINPVHKLLIHF

SEQ ID NO: 213812 - protein, 15 aa, Artificial Sequence
  Description of Artificial Sequence: Synthetic peptide
  Seed: ANQRLNPMHQLLRHF
ANQRINPVHKLLKHF

SEQ ID NO: 213813 - protein, 15 aa, Artificial Sequence
  Description of Artificial Sequence: Synthetic peptide
  Seed: ANQRLNPMHQLLRHF
ANQRINPVHKLLLHF

SEQ ID NO: 213814 - protein, 15 aa, Artificial Sequence
  Description of Artificial Sequence: Synthetic peptide
  Seed: ANQRLNPMHQLLRHF
ANQRINPVHKLLMHF

SEQ ID NO: 213815 - protein, 15 aa, Artificial Sequence
  Description of Artificial Sequence: Synthetic peptide
  Seed: ANQRLNPMHQLLRHF
ANQRINPVHKLLNHF

SEQ ID NO: 213816 - protein, 15 aa, Artificial Sequence
  Description of Artificial Sequence: Synthetic peptide
  Seed: ANQRLNPMHQLLRHF
ANQRINPVHKLLQHF

SEQ ID NO: 213817 - protein, 15 aa, Artificial Sequence
  Description of Artificial Sequence: Synthetic peptide
  Seed: ANQRLNPMHQLLRHF
ANQRINPVHKLLRHF

SEQ ID NO: 213818 - protein, 15 aa, Artificial Sequence
  Description of Artificial Sequence: Synthetic peptide
  Seed: ANQRLNPMHQLLRHF
ANQRINPVHKLLSHF

SEQ ID NO: 213819 - protein, 15 aa, Artificial Sequence
  Description of Artificial Sequence: Synthetic peptide
  Seed: ANQRLNPMHQLLRHF
ANQRINPVHKLLTHF

SEQ ID NO: 213820 - protein, 15 aa, Artificial Sequence
  Description of Artificial Sequence: Synthetic peptide
  Seed: ANQRLNPMHQLLRHF
ANQRINPVHKLLVHF

SEQ ID NO: 213821 - protein, 15 aa, Artificial Sequence
  Description of Artificial Sequence: Synthetic peptide
  Seed: ANQRLNPMHQLLRHF
ANQRINPVHKLLYHF

SEQ ID NO: 213822 - protein, 15 aa, Artificial Sequence
  Description of Artificial Sequence: Synthetic peptide
  Seed: ANQRLNPMHQLLRHF
ANQRINPVHNLLIHF

SEQ ID NO: 213823 - protein, 15 aa, Artificial Sequence
  Description of Artificial Sequence: Synthetic peptide
  Seed: ANQRLNPMHQLLRHF
ANQRINPVHNLLLHF

SEQ ID NO: 213824 - protein, 15 aa, Artificial Sequence
  Description of Artificial Sequence: Synthetic peptide
  Seed: ANQRLNPMHQLLRHF
ANQRINPVHNLLVHF

SEQ ID NO: 213825 - protein, 15 aa, Artificial Sequence
  Description of Artificial Sequence: Synthetic peptide
  Seed: ANQRLNPMHQLLRHF
ANQRINPVHPLLAHF

SEQ ID NO: 213826 - protein, 15 aa, Artificial Sequence
  Description of Artificial Sequence: Synthetic peptide
  Seed: ANQRLNPMHQLLRHF
ANQRINPVHPLLIHF

SEQ ID NO: 213827 - protein, 15 aa, Artificial Sequence
  Description of Artificial Sequence: Synthetic peptide
  Seed: ANQRLNPMHQLLRHF
ANQRINPVHPLLLHF

SEQ ID NO: 213828 - protein, 15 aa, Artificial Sequence
  Description of Artificial Sequence: Synthetic peptide
  Seed: ANQRLNPMHQLLRHF
ANQRINPVHPLLVHF

SEQ ID NO: 213829 - protein, 15 aa, Artificial Sequence
  Description of Artificial Sequence: Synthetic peptide
  Seed: ANQRLNPMHQLLRHF
ANQRINPVHRLLAHF

SEQ ID NO: 213830 - protein, 15 aa, Artificial Sequence
  Description of Artificial Sequence: Synthetic peptide
  Seed: ANQRLNPMHQLLRHF
ANQRINPVHRLLFHF

SEQ ID NO: 213831 - protein, 15 aa, Artificial Sequence
  Description of Artificial Sequence: Synthetic peptide
  Seed: ANQRLNPMHQLLRHF
ANQRINPVHRLLGHF

SEQ ID NO: 213832 - protein, 15 aa, Artificial Sequence
  Description of Artificial Sequence: Synthetic peptide
  Seed: ANQRLNPMHQLLRHF
ANQRINPVHRLLHHF

SEQ ID NO: 213833 - protein, 15 aa, Artificial Sequence
  Description of Artificial Sequence: Synthetic peptide
  Seed: ANQRLNPMHQLLRHF
ANQRINPVHRLLIHF

SEQ ID NO: 213834 - protein, 15 aa, Artificial Sequence
  Description of Artificial Sequence: Synthetic peptide
  Seed: ANQRLNPMHQLLRHF
ANQRINPVHRLLKHF

SEQ ID NO: 213835 - protein, 15 aa, Artificial Sequence
  Description of Artificial Sequence: Synthetic peptide
  Seed: ANQRLNPMHQLLRHF
ANQRINPVHRLLLHF

SEQ ID NO: 213836 - protein, 15 aa, Artificial Sequence
  Description of Artificial Sequence: Synthetic peptide
  Seed: ANQRLNPMHQLLRHF
ANQRINPVHRLLMHF

SEQ ID NO: 213837 - protein, 15 aa, Artificial Sequence
  Description of Artificial Sequence: Synthetic peptide
  Seed: ANQRLNPMHQLLRHF
ANQRINPVHRLLNHF

SEQ ID NO: 213838 - protein, 15 aa, Artificial Sequence
  Description of Artificial Sequence: Synthetic peptide
  Seed: ANQRLNPMHQLLRHF
ANQRINPVHRLLPHF

SEQ ID NO: 213839 - protein, 15 aa, Artificial Sequence
  Description of Artificial Sequence: Synthetic peptide
  Seed: ANQRLNPMHQLLRHF
ANQRINPVHRLLQHF

SEQ ID NO: 213840 - protein, 15 aa, Artificial Sequence
  Description of Artificial Sequence: Synthetic peptide
  Seed: ANQRLNPMHQLLRHF
ANQRINPVHRLLRHF

SEQ ID NO: 213841 - protein, 15 aa, Artificial Sequence
  Description of Artificial Sequence: Synthetic peptide
  Seed: ANQRLNPMHQLLRHF
ANQRINPVHRLLSHF

SEQ ID NO: 213842 - protein, 15 aa, Artificial Sequence
  Description of Artificial Sequence: Synthetic peptide
  Seed: ANQRLNPMHQLLRHF
ANQRINPVHRLLTHF

SEQ ID NO: 213843 - protein, 15 aa, Artificial Sequence
  Description of Artificial Sequence: Synthetic peptide
  Seed: ANQRLNPMHQLLRHF
ANQRINPVHRLLVHF

SEQ ID NO: 213844 - protein, 15 aa, Artificial Sequence
  Description of Artificial Sequence: Synthetic peptide
  Seed: ANQRLNPMHQLLRHF
ANQRINPVHRLLYHF

SEQ ID NO: 213845 - protein, 15 aa, Artificial Sequence
  Description of Artificial Sequence: Synthetic peptide
  Seed: ANQRLNPMHQLLRHF
ANQRINPVHSLLAHF

SEQ ID NO: 213846 - protein, 15 aa, Artificial Sequence
  Description of Artificial Sequence: Synthetic peptide
  Seed: ANQRLNPMHQLLRHF
ANQRINPVHSLLIHF

SEQ ID NO: 213847 - protein, 15 aa, Artificial Sequence
  Description of Artificial Sequence: Synthetic peptide
  Seed: ANQRLNPMHQLLRHF
ANQRINPVHSLLLHF

SEQ ID NO: 213848 - protein, 15 aa, Artificial Sequence
  Description of Artificial Sequence: Synthetic peptide
  Seed: ANQRLNPMHQLLRHF
ANQRINPVHSLLMHF

SEQ ID NO: 213849 - protein, 15 aa, Artificial Sequence
  Description of Artificial Sequence: Synthetic peptide
  Seed: ANQRLNPMHQLLRHF
ANQRINPVHSLLRHF

SEQ ID NO: 213850 - protein, 15 aa, Artificial Sequence
  Description of Artificial Sequence: Synthetic peptide
  Seed: ANQRLNPMHQLLRHF
ANQRINPVHSLLSHF

SEQ ID NO: 213851 - protein, 15 aa, Artificial Sequence
  Description of Artificial Sequence: Synthetic peptide
  Seed: ANQRLNPMHQLLRHF
ANQRINPVHSLLTHF

SEQ ID NO: 213852 - protein, 15 aa, Artificial Sequence
  Description of Artificial Sequence: Synthetic peptide
  Seed: ANQRLNPMHQLLRHF
ANQRINPVHSLLVHF

SEQ ID NO: 213853 - protein, 15 aa, Artificial Sequence
  Description of Artificial Sequence: Synthetic peptide
  Seed: ANQRLNPMHQLLRHF
ANQRINPVHTLLLHF

SEQ ID NO: 213854 - protein, 15 aa, Artificial Sequence
  Description of Artificial Sequence: Synthetic peptide
  Seed: ANQRLNPMHQLLRHF
ANQRINPVHTLLRHF

SEQ ID NO: 213855 - protein, 15 aa, Artificial Sequence
  Description of Artificial Sequence: Synthetic peptide
  Seed: ANQRLNPMHQLLRHF
ANQRINPVHTLLVHF

SEQ ID NO: 213856 - protein, 15 aa, Artificial Sequence
  Description of Artificial Sequence: Synthetic peptide
  Seed: ANQRLNPMHQLLRHF
ANQRINPVHWLLLHF

SEQ ID NO: 213857 - protein, 15 aa, Artificial Sequence
  Description of Artificial Sequence: Synthetic peptide
  Seed: ANQRLNPMHQLLRHF
ANQRINPVHYLLLHF

SEQ ID NO: 213858 - protein, 15 aa, Artificial Sequence
  Description of Artificial Sequence: Synthetic peptide
  Seed: ANQRLNPMHQLLRHF
ANQRINPWHALLAHF

SEQ ID NO: 213859 - protein, 15 aa, Artificial Sequence
  Description of Artificial Sequence: Synthetic peptide
  Seed: ANQRLNPMHQLLRHF
ANQRINPWHALLIHF

SEQ ID NO: 213860 - protein, 15 aa, Artificial Sequence
  Description of Artificial Sequence: Synthetic peptide
  Seed: ANQRLNPMHQLLRHF
ANQRINPWHALLLHF

SEQ ID NO: 213861 - protein, 15 aa, Artificial Sequence
  Description of Artificial Sequence: Synthetic peptide
  Seed: ANQRLNPMHQLLRHF
ANQRINPWHALLMHF

SEQ ID NO: 213862 - protein, 15 aa, Artificial Sequence
  Description of Artificial Sequence: Synthetic peptide
  Seed: ANQRLNPMHQLLRHF
ANQRINPWHALLRHF

SEQ ID NO: 213863 - protein, 15 aa, Artificial Sequence
  Description of Artificial Sequence: Synthetic peptide
  Seed: ANQRLNPMHQLLRHF
ANQRINPWHALLVHF

SEQ ID NO: 213864 - protein, 15 aa, Artificial Sequence
  Description of Artificial Sequence: Synthetic peptide
  Seed: ANQRLNPMHQLLRHF
ANQRINPWHGLLAHF

SEQ ID NO: 213865 - protein, 15 aa, Artificial Sequence
  Description of Artificial Sequence: Synthetic peptide
  Seed: ANQRLNPMHQLLRHF
ANQRINPWHGLLIHF

SEQ ID NO: 213866 - protein, 15 aa, Artificial Sequence
  Description of Artificial Sequence: Synthetic peptide
  Seed: ANQRLNPMHQLLRHF
ANQRINPWHGLLLHF

SEQ ID NO: 213867 - protein, 15 aa, Artificial Sequence
  Description of Artificial Sequence: Synthetic peptide
  Seed: ANQRLNPMHQLLRHF
ANQRINPWHGLLMHF

SEQ ID NO: 213868 - protein, 15 aa, Artificial Sequence
  Description of Artificial Sequence: Synthetic peptide
  Seed: ANQRLNPMHQLLRHF
ANQRINPWHGLLVHF

SEQ ID NO: 213869 - protein, 15 aa, Artificial Sequence
  Description of Artificial Sequence: Synthetic peptide
  Seed: ANQRLNPMHQLLRHF
ANQRINPWHKLLAHF

SEQ ID NO: 213870 - protein, 15 aa, Artificial Sequence
  Description of Artificial Sequence: Synthetic peptide
  Seed: ANQRLNPMHQLLRHF
ANQRINPWHKLLIHF

SEQ ID NO: 213871 - protein, 15 aa, Artificial Sequence
  Description of Artificial Sequence: Synthetic peptide
  Seed: ANQRLNPMHQLLRHF
ANQRINPWHKLLKHF

SEQ ID NO: 213872 - protein, 15 aa, Artificial Sequence
  Description of Artificial Sequence: Synthetic peptide
  Seed: ANQRLNPMHQLLRHF
ANQRINPWHKLLLHF

SEQ ID NO: 213873 - protein, 15 aa, Artificial Sequence
  Description of Artificial Sequence: Synthetic peptide
  Seed: ANQRLNPMHQLLRHF
ANQRINPWHKLLRHF

SEQ ID NO: 213874 - protein, 15 aa, Artificial Sequence
  Description of Artificial Sequence: Synthetic peptide
  Seed: ANQRLNPMHQLLRHF
ANQRINPWHKLLSHF

SEQ ID NO: 213875 - protein, 15 aa, Artificial Sequence
  Description of Artificial Sequence: Synthetic peptide
  Seed: ANQRLNPMHQLLRHF
ANQRINPWHKLLVHF

SEQ ID NO: 213876 - protein, 15 aa, Artificial Sequence
  Description of Artificial Sequence: Synthetic peptide
  Seed: ANQRLNPMHQLLRHF
ANQRINPWHNLLAHF

SEQ ID NO: 213877 - protein, 15 aa, Artificial Sequence
  Description of Artificial Sequence: Synthetic peptide
  Seed: ANQRLNPMHQLLRHF
ANQRINPWHNLLFHF

SEQ ID NO: 213878 - protein, 15 aa, Artificial Sequence
  Description of Artificial Sequence: Synthetic peptide
  Seed: ANQRLNPMHQLLRHF
ANQRINPWHNLLIHF

SEQ ID NO: 213879 - protein, 15 aa, Artificial Sequence
  Description of Artificial Sequence: Synthetic peptide
  Seed: ANQRLNPMHQLLRHF
ANQRINPWHNLLLHF

SEQ ID NO: 213880 - protein, 15 aa, Artificial Sequence
  Description of Artificial Sequence: Synthetic peptide
  Seed: ANQRLNPMHQLLRHF
ANQRINPWHNLLMHF

SEQ ID NO: 213881 - protein, 15 aa, Artificial Sequence
  Description of Artificial Sequence: Synthetic peptide
  Seed: ANQRLNPMHQLLRHF
ANQRINPWHNLLSHF

SEQ ID NO: 213882 - protein, 15 aa, Artificial Sequence
  Description of Artificial Sequence: Synthetic peptide
  Seed: ANQRLNPMHQLLRHF
ANQRINPWHNLLTHF

SEQ ID NO: 213883 - protein, 15 aa, Artificial Sequence
  Description of Artificial Sequence: Synthetic peptide
  Seed: ANQRLNPMHQLLRHF
ANQRINPWHNLLVHF

SEQ ID NO: 213884 - protein, 15 aa, Artificial Sequence
  Description of Artificial Sequence: Synthetic peptide
  Seed: ANQRLNPMHQLLRHF
ANQRINPWHRLLAHF

SEQ ID NO: 213885 - protein, 15 aa, Artificial Sequence
  Description of Artificial Sequence: Synthetic peptide
  Seed: ANQRLNPMHQLLRHF
ANQRINPWHRLLFHF

SEQ ID NO: 213886 - protein, 15 aa, Artificial Sequence
  Description of Artificial Sequence: Synthetic peptide
  Seed: ANQRLNPMHQLLRHF
ANQRINPWHRLLHHF

SEQ ID NO: 213887 - protein, 15 aa, Artificial Sequence
  Description of Artificial Sequence: Synthetic peptide
  Seed: ANQRLNPMHQLLRHF
ANQRINPWHRLLIHF

SEQ ID NO: 213888 - protein, 15 aa, Artificial Sequence
  Description of Artificial Sequence: Synthetic peptide
  Seed: ANQRLNPMHQLLRHF
ANQRINPWHRLLKHF

SEQ ID NO: 213889 - protein, 15 aa, Artificial Sequence
  Description of Artificial Sequence: Synthetic peptide
  Seed: ANQRLNPMHQLLRHF
ANQRINPWHRLLLHF

SEQ ID NO: 213890 - protein, 15 aa, Artificial Sequence
  Description of Artificial Sequence: Synthetic peptide
  Seed: ANQRLNPMHQLLRHF
ANQRINPWHRLLMHF

SEQ ID NO: 213891 - protein, 15 aa, Artificial Sequence
  Description of Artificial Sequence: Synthetic peptide
  Seed: ANQRLNPMHQLLRHF
ANQRINPWHRLLRHF

SEQ ID NO: 213892 - protein, 15 aa, Artificial Sequence
  Description of Artificial Sequence: Synthetic peptide
  Seed: ANQRLNPMHQLLRHF
ANQRINPWHRLLSHF

SEQ ID NO: 213893 - protein, 15 aa, Artificial Sequence
  Description of Artificial Sequence: Synthetic peptide
  Seed: ANQRLNPMHQLLRHF
ANQRINPWHRLLVHF

SEQ ID NO: 213894 - protein, 15 aa, Artificial Sequence
  Description of Artificial Sequence: Synthetic peptide
  Seed: ANQRLNPMHQLLRHF
ANQRINPWHRLLYHF

SEQ ID NO: 213895 - protein, 15 aa, Artificial Sequence
  Description of Artificial Sequence: Synthetic peptide
  Seed: ANQRLNPMHQLLRHF
ANQRINPWHSLLAHF

SEQ ID NO: 213896 - protein, 15 aa, Artificial Sequence
  Description of Artificial Sequence: Synthetic peptide
  Seed: ANQRLNPMHQLLRHF
ANQRINPWHSLLFHF

SEQ ID NO: 213897 - protein, 15 aa, Artificial Sequence
  Description of Artificial Sequence: Synthetic peptide
  Seed: ANQRLNPMHQLLRHF
ANQRINPWHSLLIHF

SEQ ID NO: 213898 - protein, 15 aa, Artificial Sequence
  Description of Artificial Sequence: Synthetic peptide
  Seed: ANQRLNPMHQLLRHF
ANQRINPWHSLLLHF

SEQ ID NO: 213899 - protein, 15 aa, Artificial Sequence
  Description of Artificial Sequence: Synthetic peptide
  Seed: ANQRLNPMHQLLRHF
ANQRINPWHSLLMHF

SEQ ID NO: 213900 - protein, 15 aa, Artificial Sequence
  Description of Artificial Sequence: Synthetic peptide
  Seed: ANQRLNPMHQLLRHF
ANQRINPWHSLLSHF

SEQ ID NO: 213901 - protein, 15 aa, Artificial Sequence
  Description of Artificial Sequence: Synthetic peptide
  Seed: ANQRLNPMHQLLRHF
ANQRINPWHSLLTHF

SEQ ID NO: 213902 - protein, 15 aa, Artificial Sequence
  Description of Artificial Sequence: Synthetic peptide
  Seed: ANQRLNPMHQLLRHF
ANQRINPWHSLLVHF

SEQ ID NO: 213903 - protein, 15 aa, Artificial Sequence
  Description of Artificial Sequence: Synthetic peptide
  Seed: ANQRLNPMHQLLRHF
ANQRINPWHTLLIHF

SEQ ID NO: 213904 - protein, 15 aa, Artificial Sequence
  Description of Artificial Sequence: Synthetic peptide
  Seed: ANQRLNPMHQLLRHF
ANQRINPWHTLLLHF

SEQ ID NO: 213905 - protein, 15 aa, Artificial Sequence
  Description of Artificial Sequence: Synthetic peptide
  Seed: ANQRLNPMHQLLRHF
ANQRINPWHTLLVHF

SEQ ID NO: 213906 - protein, 15 aa, Artificial Sequence
  Description of Artificial Sequence: Synthetic peptide
  Seed: ANQRLNPMHQLLRHF
ANQRINPYHALLAHF

SEQ ID NO: 213907 - protein, 15 aa, Artificial Sequence
  Description of Artificial Sequence: Synthetic peptide
  Seed: ANQRLNPMHQLLRHF
ANQRINPYHALLHHF

SEQ ID NO: 213908 - protein, 15 aa, Artificial Sequence
  Description of Artificial Sequence: Synthetic peptide
  Seed: ANQRLNPMHQLLRHF
ANQRINPYHALLIHF

SEQ ID NO: 213909 - protein, 15 aa, Artificial Sequence
  Description of Artificial Sequence: Synthetic peptide
  Seed: ANQRLNPMHQLLRHF
ANQRINPYHALLLHF

SEQ ID NO: 213910 - protein, 15 aa, Artificial Sequence
  Description of Artificial Sequence: Synthetic peptide
  Seed: ANQRLNPMHQLLRHF
ANQRINPYHALLMHF

SEQ ID NO: 213911 - protein, 15 aa, Artificial Sequence
  Description of Artificial Sequence: Synthetic peptide
  Seed: ANQRLNPMHQLLRHF
ANQRINPYHALLSHF

SEQ ID NO: 213912 - protein, 15 aa, Artificial Sequence
  Description of Artificial Sequence: Synthetic peptide
  Seed: ANQRLNPMHQLLRHF
ANQRINPYHALLTHF

SEQ ID NO: 213913 - protein, 15 aa, Artificial Sequence
  Description of Artificial Sequence: Synthetic peptide
  Seed: ANQRLNPMHQLLRHF
ANQRINPYHALLVHF

SEQ ID NO: 213914 - protein, 15 aa, Artificial Sequence
  Description of Artificial Sequence: Synthetic peptide
  Seed: ANQRLNPMHQLLRHF
ANQRINPYHGLLAHF

SEQ ID NO: 213915 - protein, 15 aa, Artificial Sequence
  Description of Artificial Sequence: Synthetic peptide
  Seed: ANQRLNPMHQLLRHF
ANQRINPYHGLLHHF

SEQ ID NO: 213916 - protein, 15 aa, Artificial Sequence
  Description of Artificial Sequence: Synthetic peptide
  Seed: ANQRLNPMHQLLRHF
ANQRINPYHGLLIHF

SEQ ID NO: 213917 - protein, 15 aa, Artificial Sequence
  Description of Artificial Sequence: Synthetic peptide
  Seed: ANQRLNPMHQLLRHF
ANQRINPYHGLLLHF

SEQ ID NO: 213918 - protein, 15 aa, Artificial Sequence
  Description of Artificial Sequence: Synthetic peptide
  Seed: ANQRLNPMHQLLRHF
ANQRINPYHGLLMHF

SEQ ID NO: 213919 - protein, 15 aa, Artificial Sequence
  Description of Artificial Sequence: Synthetic peptide
  Seed: ANQRLNPMHQLLRHF
ANQRINPYHGLLSHF

SEQ ID NO: 213920 - protein, 15 aa, Artificial Sequence
  Description of Artificial Sequence: Synthetic peptide
  Seed: ANQRLNPMHQLLRHF
ANQRINPYHGLLTHF

SEQ ID NO: 213921 - protein, 15 aa, Artificial Sequence
  Description of Artificial Sequence: Synthetic peptide
  Seed: ANQRLNPMHQLLRHF
ANQRINPYHGLLVHF

SEQ ID NO: 213922 - protein, 15 aa, Artificial Sequence
  Description of Artificial Sequence: Synthetic peptide
  Seed: ANQRLNPMHQLLRHF
ANQRINPYHNLLAHF

SEQ ID NO: 213923 - protein, 15 aa, Artificial Sequence
  Description of Artificial Sequence: Synthetic peptide
  Seed: ANQRLNPMHQLLRHF
ANQRINPYHNLLFHF

SEQ ID NO: 213924 - protein, 15 aa, Artificial Sequence
  Description of Artificial Sequence: Synthetic peptide
  Seed: ANQRLNPMHQLLRHF
ANQRINPYHNLLGHF

SEQ ID NO: 213925 - protein, 15 aa, Artificial Sequence
  Description of Artificial Sequence: Synthetic peptide
  Seed: ANQRLNPMHQLLRHF
ANQRINPYHNLLHHF

SEQ ID NO: 213926 - protein, 15 aa, Artificial Sequence
  Description of Artificial Sequence: Synthetic peptide
  Seed: ANQRLNPMHQLLRHF
ANQRINPYHNLLIHF

SEQ ID NO: 213927 - protein, 15 aa, Artificial Sequence
  Description of Artificial Sequence: Synthetic peptide
  Seed: ANQRLNPMHQLLRHF
ANQRINPYHNLLLHF

SEQ ID NO: 213928 - protein, 15 aa, Artificial Sequence
  Description of Artificial Sequence: Synthetic peptide
  Seed: ANQRLNPMHQLLRHF
ANQRINPYHNLLMHF

SEQ ID NO: 213929 - protein, 15 aa, Artificial Sequence
  Description of Artificial Sequence: Synthetic peptide
  Seed: ANQRLNPMHQLLRHF
ANQRINPYHNLLSHF

SEQ ID NO: 213930 - protein, 15 aa, Artificial Sequence
  Description of Artificial Sequence: Synthetic peptide
  Seed: ANQRLNPMHQLLRHF
ANQRINPYHNLLTHF

SEQ ID NO: 213931 - protein, 15 aa, Artificial Sequence
  Description of Artificial Sequence: Synthetic peptide
  Seed: ANQRLNPMHQLLRHF
ANQRINPYHNLLVHF

SEQ ID NO: 213932 - protein, 15 aa, Artificial Sequence
  Description of Artificial Sequence: Synthetic peptide
  Seed: ANQRLNPMHQLLRHF
ANQRINPYHPLLAHF

SEQ ID NO: 213933 - protein, 15 aa, Artificial Sequence
  Description of Artificial Sequence: Synthetic peptide
  Seed: ANQRLNPMHQLLRHF
ANQRINPYHPLLIHF

SEQ ID NO: 213934 - protein, 15 aa, Artificial Sequence
  Description of Artificial Sequence: Synthetic peptide
  Seed: ANQRLNPMHQLLRHF
ANQRINPYHPLLLHF

SEQ ID NO: 213935 - protein, 15 aa, Artificial Sequence
  Description of Artificial Sequence: Synthetic peptide
  Seed: ANQRLNPMHQLLRHF
ANQRINPYHPLLVHF

SEQ ID NO: 213936 - protein, 15 aa, Artificial Sequence
  Description of Artificial Sequence: Synthetic peptide
  Seed: ANQRLNPMHQLLRHF
ANQRINPYHRLLAHF

SEQ ID NO: 213937 - protein, 15 aa, Artificial Sequence
  Description of Artificial Sequence: Synthetic peptide
  Seed: ANQRLNPMHQLLRHF
ANQRINPYHRLLHHF

SEQ ID NO: 213938 - protein, 15 aa, Artificial Sequence
  Description of Artificial Sequence: Synthetic peptide
  Seed: ANQRLNPMHQLLRHF
ANQRINPYHRLLRHF

SEQ ID NO: 213939 - protein, 15 aa, Artificial Sequence
  Description of Artificial Sequence: Synthetic peptide
  Seed: ANQRLNPMHQLLRHF
ANQRINPYHSLLAHF

SEQ ID NO: 213940 - protein, 15 aa, Artificial Sequence
  Description of Artificial Sequence: Synthetic peptide
  Seed: ANQRLNPMHQLLRHF
ANQRINPYHSLLFHF

SEQ ID NO: 213941 - protein, 15 aa, Artificial Sequence
  Description of Artificial Sequence: Synthetic peptide
  Seed: ANQRLNPMHQLLRHF
ANQRINPYHSLLGHF

SEQ ID NO: 213942 - protein, 15 aa, Artificial Sequence
  Description of Artificial Sequence: Synthetic peptide
  Seed: ANQRLNPMHQLLRHF
ANQRINPYHSLLHHF

SEQ ID NO: 213943 - protein, 15 aa, Artificial Sequence
  Description of Artificial Sequence: Synthetic peptide
  Seed: ANQRLNPMHQLLRHF
ANQRINPYHSLLIHF

SEQ ID NO: 213944 - protein, 15 aa, Artificial Sequence
  Description of Artificial Sequence: Synthetic peptide
  Seed: ANQRLNPMHQLLRHF
ANQRINPYHSLLKHF

SEQ ID NO: 213945 - protein, 15 aa, Artificial Sequence
  Description of Artificial Sequence: Synthetic peptide
  Seed: ANQRLNPMHQLLRHF
ANQRINPYHSLLLHF

SEQ ID NO: 213946 - protein, 15 aa, Artificial Sequence
  Description of Artificial Sequence: Synthetic peptide
  Seed: ANQRLNPMHQLLRHF
ANQRINPYHSLLMHF

SEQ ID NO: 213947 - protein, 15 aa, Artificial Sequence
  Description of Artificial Sequence: Synthetic peptide
  Seed: ANQRLNPMHQLLRHF
ANQRINPYHSLLRHF

SEQ ID NO: 213948 - protein, 15 aa, Artificial Sequence
  Description of Artificial Sequence: Synthetic peptide
  Seed: ANQRLNPMHQLLRHF
ANQRINPYHSLLSHF

SEQ ID NO: 213949 - protein, 15 aa, Artificial Sequence
  Description of Artificial Sequence: Synthetic peptide
  Seed: ANQRLNPMHQLLRHF
ANQRINPYHSLLTHF

SEQ ID NO: 213950 - protein, 15 aa, Artificial Sequence
  Description of Artificial Sequence: Synthetic peptide
  Seed: ANQRLNPMHQLLRHF
ANQRINPYHSLLVHF

SEQ ID NO: 213951 - protein, 15 aa, Artificial Sequence
  Description of Artificial Sequence: Synthetic peptide
  Seed: ANQRLNPMHQLLRHF
ANQRINPYHTLLAHF

SEQ ID NO: 213952 - protein, 15 aa, Artificial Sequence
  Description of Artificial Sequence: Synthetic peptide
  Seed: ANQRLNPMHQLLRHF
ANQRINPYHTLLIHF

SEQ ID NO: 213953 - protein, 15 aa, Artificial Sequence
  Description of Artificial Sequence: Synthetic peptide
  Seed: ANQRLNPMHQLLRHF
ANQRINPYHTLLLHF

SEQ ID NO: 213954 - protein, 15 aa, Artificial Sequence
  Description of Artificial Sequence: Synthetic peptide
  Seed: ANQRLNPMHQLLRHF
ANQRINPYHTLLMHF

SEQ ID NO: 213955 - protein, 15 aa, Artificial Sequence
  Description of Artificial Sequence: Synthetic peptide
  Seed: ANQRLNPMHQLLRHF
ANQRINPYHTLLTHF

SEQ ID NO: 213956 - protein, 15 aa, Artificial Sequence
  Description of Artificial Sequence: Synthetic peptide
  Seed: ANQRLNPMHQLLRHF
ANQRINPYHTLLVHF

SEQ ID NO: 213957 - protein, 15 aa, Artificial Sequence
  Description of Artificial Sequence: Synthetic peptide
  Seed: ANQRLNPMHQLLRHF
ANQRINPYHVLLLHF

SEQ ID NO: 213958 - protein, 15 aa, Artificial Sequence
  Description of Artificial Sequence: Synthetic peptide
  Seed: ANQRLNPMHQLLRHF
ANQRLNPAHALLAHF

SEQ ID NO: 213959 - protein, 15 aa, Artificial Sequence
  Description of Artificial Sequence: Synthetic peptide
  Seed: ANQRLNPMHQLLRHF
ANQRLNPAHALLCHF

SEQ ID NO: 213960 - protein, 15 aa, Artificial Sequence
  Description of Artificial Sequence: Synthetic peptide
  Seed: ANQRLNPMHQLLRHF
ANQRLNPAHALLGHF

SEQ ID NO: 213961 - protein, 15 aa, Artificial Sequence
  Description of Artificial Sequence: Synthetic peptide
  Seed: ANQRLNPMHQLLRHF
ANQRLNPAHALLIHF

SEQ ID NO: 213962 - protein, 15 aa, Artificial Sequence
  Description of Artificial Sequence: Synthetic peptide
  Seed: ANQRLNPMHQLLRHF
ANQRLNPAHALLLHF

SEQ ID NO: 213963 - protein, 15 aa, Artificial Sequence
  Description of Artificial Sequence: Synthetic peptide
  Seed: ANQRLNPMHQLLRHF
ANQRLNPAHALLMHF

SEQ ID NO: 213964 - protein, 15 aa, Artificial Sequence
  Description of Artificial Sequence: Synthetic peptide
  Seed: ANQRLNPMHQLLRHF
ANQRLNPAHALLRHF

SEQ ID NO: 213965 - protein, 15 aa, Artificial Sequence
  Description of Artificial Sequence: Synthetic peptide
  Seed: ANQRLNPMHQLLRHF
ANQRLNPAHALLSHF

SEQ ID NO: 213966 - protein, 15 aa, Artificial Sequence
  Description of Artificial Sequence: Synthetic peptide
  Seed: ANQRLNPMHQLLRHF
ANQRLNPAHALLTHF

SEQ ID NO: 213967 - protein, 15 aa, Artificial Sequence
  Description of Artificial Sequence: Synthetic peptide
  Seed: ANQRLNPMHQLLRHF
ANQRLNPAHALLVHF

SEQ ID NO: 213968 - protein, 15 aa, Artificial Sequence
  Description of Artificial Sequence: Synthetic peptide
  Seed: ANQRLNPMHQLLRHF
ANQRLNPAHFLLFHF

SEQ ID NO: 213969 - protein, 15 aa, Artificial Sequence
  Description of Artificial Sequence: Synthetic peptide
  Seed: ANQRLNPMHQLLRHF
ANQRLNPAHFLLIHF

SEQ ID NO: 213970 - protein, 15 aa, Artificial Sequence
  Description of Artificial Sequence: Synthetic peptide
  Seed: ANQRLNPMHQLLRHF
ANQRLNPAHFLLLHF

SEQ ID NO: 213971 - protein, 15 aa, Artificial Sequence
  Description of Artificial Sequence: Synthetic peptide
  Seed: ANQRLNPMHQLLRHF
ANQRLNPAHFLLMHF

SEQ ID NO: 213972 - protein, 15 aa, Artificial Sequence
  Description of Artificial Sequence: Synthetic peptide
  Seed: ANQRLNPMHQLLRHF
ANQRLNPAHFLLVHF

SEQ ID NO: 213973 - protein, 15 aa, Artificial Sequence
  Description of Artificial Sequence: Synthetic peptide
  Seed: ANQRLNPMHQLLRHF
ANQRLNPAHGLLAHF

SEQ ID NO: 213974 - protein, 15 aa, Artificial Sequence
  Description of Artificial Sequence: Synthetic peptide
  Seed: ANQRLNPMHQLLRHF
ANQRLNPAHGLLGHF

SEQ ID NO: 213975 - protein, 15 aa, Artificial Sequence
  Description of Artificial Sequence: Synthetic peptide
  Seed: ANQRLNPMHQLLRHF
ANQRLNPAHGLLIHF

SEQ ID NO: 213976 - protein, 15 aa, Artificial Sequence
  Description of Artificial Sequence: Synthetic peptide
  Seed: ANQRLNPMHQLLRHF
ANQRLNPAHGLLLHF

SEQ ID NO: 213977 - protein, 15 aa, Artificial Sequence
  Description of Artificial Sequence: Synthetic peptide
  Seed: ANQRLNPMHQLLRHF
ANQRLNPAHGLLMHF

SEQ ID NO: 213978 - protein, 15 aa, Artificial Sequence
  Description of Artificial Sequence: Synthetic peptide
  Seed: ANQRLNPMHQLLRHF
ANQRLNPAHGLLSHF

SEQ ID NO: 213979 - protein, 15 aa, Artificial Sequence
  Description of Artificial Sequence: Synthetic peptide
  Seed: ANQRLNPMHQLLRHF
ANQRLNPAHGLLTHF

SEQ ID NO: 213980 - protein, 15 aa, Artificial Sequence
  Description of Artificial Sequence: Synthetic peptide
  Seed: ANQRLNPMHQLLRHF
ANQRLNPAHGLLVHF

SEQ ID NO: 213981 - protein, 15 aa, Artificial Sequence
  Description of Artificial Sequence: Synthetic peptide
  Seed: ANQRLNPMHQLLRHF
ANQRLNPAHKLLAHF

SEQ ID NO: 213982 - protein, 15 aa, Artificial Sequence
  Description of Artificial Sequence: Synthetic peptide
  Seed: ANQRLNPMHQLLRHF
ANQRLNPAHKLLHHF

SEQ ID NO: 213983 - protein, 15 aa, Artificial Sequence
  Description of Artificial Sequence: Synthetic peptide
  Seed: ANQRLNPMHQLLRHF
ANQRLNPAHKLLKHF

SEQ ID NO: 213984 - protein, 15 aa, Artificial Sequence
  Description of Artificial Sequence: Synthetic peptide
  Seed: ANQRLNPMHQLLRHF
ANQRLNPAHKLLQHF

SEQ ID NO: 213985 - protein, 15 aa, Artificial Sequence
  Description of Artificial Sequence: Synthetic peptide
  Seed: ANQRLNPMHQLLRHF
ANQRLNPAHKLLRHF

SEQ ID NO: 213986 - protein, 15 aa, Artificial Sequence
  Description of Artificial Sequence: Synthetic peptide
  Seed: ANQRLNPMHQLLRHF
ANQRLNPAHKLLSHF

SEQ ID NO: 213987 - protein, 15 aa, Artificial Sequence
  Description of Artificial Sequence: Synthetic peptide
  Seed: ANQRLNPMHQLLRHF
ANQRLNPAHKLLYHF

SEQ ID NO: 213988 - protein, 15 aa, Artificial Sequence
  Description of Artificial Sequence: Synthetic peptide
  Seed: ANQRLNPMHQLLRHF
ANQRLNPAHNLLAHF

SEQ ID NO: 213989 - protein, 15 aa, Artificial Sequence
  Description of Artificial Sequence: Synthetic peptide
  Seed: ANQRLNPMHQLLRHF
ANQRLNPAHNLLIHF

SEQ ID NO: 213990 - protein, 15 aa, Artificial Sequence
  Description of Artificial Sequence: Synthetic peptide
  Seed: ANQRLNPMHQLLRHF
ANQRLNPAHNLLLHF

SEQ ID NO: 213991 - protein, 15 aa, Artificial Sequence
  Description of Artificial Sequence: Synthetic peptide
  Seed: ANQRLNPMHQLLRHF
ANQRLNPAHNLLVHF

SEQ ID NO: 213992 - protein, 15 aa, Artificial Sequence
  Description of Artificial Sequence: Synthetic peptide
  Seed: ANQRLNPMHQLLRHF
ANQRLNPAHPLLAHF

SEQ ID NO: 213993 - protein, 15 aa, Artificial Sequence
  Description of Artificial Sequence: Synthetic peptide
  Seed: ANQRLNPMHQLLRHF
ANQRLNPAHPLLIHF

SEQ ID NO: 213994 - protein, 15 aa, Artificial Sequence
  Description of Artificial Sequence: Synthetic peptide
  Seed: ANQRLNPMHQLLRHF
ANQRLNPAHPLLLHF

SEQ ID NO: 213995 - protein, 15 aa, Artificial Sequence
  Description of Artificial Sequence: Synthetic peptide
  Seed: ANQRLNPMHQLLRHF
ANQRLNPAHPLLMHF

SEQ ID NO: 213996 - protein, 15 aa, Artificial Sequence
  Description of Artificial Sequence: Synthetic peptide
  Seed: ANQRLNPMHQLLRHF
ANQRLNPAHPLLSHF

SEQ ID NO: 213997 - protein, 15 aa, Artificial Sequence
  Description of Artificial Sequence: Synthetic peptide
  Seed: ANQRLNPMHQLLRHF
ANQRLNPAHPLLTHF

SEQ ID NO: 213998 - protein, 15 aa, Artificial Sequence
  Description of Artificial Sequence: Synthetic peptide
  Seed: ANQRLNPMHQLLRHF
ANQRLNPAHPLLVHF

SEQ ID NO: 213999 - protein, 15 aa, Artificial Sequence
  Description of Artificial Sequence: Synthetic peptide
  Seed: ANQRLNPMHQLLRHF
ANQRLNPAHRLLAHF

SEQ ID NO: 214000 - protein, 15 aa, Artificial Sequence
  Description of Artificial Sequence: Synthetic peptide
  Seed: ANQRLNPMHQLLRHF
ANQRLNPAHRLLFHF

SEQ ID NO: 214001 - protein, 15 aa, Artificial Sequence
  Description of Artificial Sequence: Synthetic peptide
  Seed: ANQRLNPMHQLLRHF
ANQRLNPAHRLLGHF

SEQ ID NO: 214002 - protein, 15 aa, Artificial Sequence
  Description of Artificial Sequence: Synthetic peptide
  Seed: ANQRLNPMHQLLRHF
ANQRLNPAHRLLHHF

SEQ ID NO: 214003 - protein, 15 aa, Artificial Sequence
  Description of Artificial Sequence: Synthetic peptide
  Seed: ANQRLNPMHQLLRHF
ANQRLNPAHRLLIHF

SEQ ID NO: 214004 - protein, 15 aa, Artificial Sequence
  Description of Artificial Sequence: Synthetic peptide
  Seed: ANQRLNPMHQLLRHF
ANQRLNPAHRLLKHF

SEQ ID NO: 214005 - protein, 15 aa, Artificial Sequence
  Description of Artificial Sequence: Synthetic peptide
  Seed: ANQRLNPMHQLLRHF
ANQRLNPAHRLLLHF

SEQ ID NO: 214006 - protein, 15 aa, Artificial Sequence
  Description of Artificial Sequence: Synthetic peptide
  Seed: ANQRLNPMHQLLRHF
ANQRLNPAHRLLMHF

SEQ ID NO: 214007 - protein, 15 aa, Artificial Sequence
  Description of Artificial Sequence: Synthetic peptide
  Seed: ANQRLNPMHQLLRHF
ANQRLNPAHRLLQHF

SEQ ID NO: 214008 - protein, 15 aa, Artificial Sequence
  Description of Artificial Sequence: Synthetic peptide
  Seed: ANQRLNPMHQLLRHF
ANQRLNPAHRLLRHF

SEQ ID NO: 214009 - protein, 15 aa, Artificial Sequence
  Description of Artificial Sequence: Synthetic peptide
  Seed: ANQRLNPMHQLLRHF
ANQRLNPAHRLLSHF

SEQ ID NO: 214010 - protein, 15 aa, Artificial Sequence
  Description of Artificial Sequence: Synthetic peptide
  Seed: ANQRLNPMHQLLRHF
ANQRLNPAHRLLTHF

SEQ ID NO: 214011 - protein, 15 aa, Artificial Sequence
  Description of Artificial Sequence: Synthetic peptide
  Seed: ANQRLNPMHQLLRHF
ANQRLNPAHRLLVHF

SEQ ID NO: 214012 - protein, 15 aa, Artificial Sequence
  Description of Artificial Sequence: Synthetic peptide
  Seed: ANQRLNPMHQLLRHF
ANQRLNPAHRLLYHF

SEQ ID NO: 214013 - protein, 15 aa, Artificial Sequence
  Description of Artificial Sequence: Synthetic peptide
  Seed: ANQRLNPMHQLLRHF
ANQRLNPAHSLLAHF

SEQ ID NO: 214014 - protein, 15 aa, Artificial Sequence
  Description of Artificial Sequence: Synthetic peptide
  Seed: ANQRLNPMHQLLRHF
ANQRLNPAHSLLIHF

SEQ ID NO: 214015 - protein, 15 aa, Artificial Sequence
  Description of Artificial Sequence: Synthetic peptide
  Seed: ANQRLNPMHQLLRHF
ANQRLNPAHSLLLHF

SEQ ID NO: 214016 - protein, 15 aa, Artificial Sequence
  Description of Artificial Sequence: Synthetic peptide
  Seed: ANQRLNPMHQLLRHF
ANQRLNPAHSLLMHF

SEQ ID NO: 214017 - protein, 15 aa, Artificial Sequence
  Description of Artificial Sequence: Synthetic peptide
  Seed: ANQRLNPMHQLLRHF
ANQRLNPAHSLLSHF

SEQ ID NO: 214018 - protein, 15 aa, Artificial Sequence
  Description of Artificial Sequence: Synthetic peptide
  Seed: ANQRLNPMHQLLRHF
ANQRLNPAHSLLTHF

SEQ ID NO: 214019 - protein, 15 aa, Artificial Sequence
  Description of Artificial Sequence: Synthetic peptide
  Seed: ANQRLNPMHQLLRHF
ANQRLNPAHSLLVHF

SEQ ID NO: 214020 - protein, 15 aa, Artificial Sequence
  Description of Artificial Sequence: Synthetic peptide
  Seed: ANQRLNPMHQLLRHF
ANQRLNPAHTLLAHF

SEQ ID NO: 214021 - protein, 15 aa, Artificial Sequence
  Description of Artificial Sequence: Synthetic peptide
  Seed: ANQRLNPMHQLLRHF
ANQRLNPAHTLLIHF

SEQ ID NO: 214022 - protein, 15 aa, Artificial Sequence
  Description of Artificial Sequence: Synthetic peptide
  Seed: ANQRLNPMHQLLRHF
ANQRLNPAHTLLLHF

SEQ ID NO: 214023 - protein, 15 aa, Artificial Sequence
  Description of Artificial Sequence: Synthetic peptide
  Seed: ANQRLNPMHQLLRHF
ANQRLNPAHTLLVHF

SEQ ID NO: 214024 - protein, 15 aa, Artificial Sequence
  Description of Artificial Sequence: Synthetic peptide
  Seed: ANQRLNPMHQLLRHF
ANQRLNPAHVLLAHF

SEQ ID NO: 214025 - protein, 15 aa, Artificial Sequence
  Description of Artificial Sequence: Synthetic peptide
  Seed: ANQRLNPMHQLLRHF
ANQRLNPAHVLLIHF

SEQ ID NO: 214026 - protein, 15 aa, Artificial Sequence
  Description of Artificial Sequence: Synthetic peptide
  Seed: ANQRLNPMHQLLRHF
ANQRLNPAHVLLLHF

SEQ ID NO: 214027 - protein, 15 aa, Artificial Sequence
  Description of Artificial Sequence: Synthetic peptide
  Seed: ANQRLNPMHQLLRHF
ANQRLNPAHVLLVHF

SEQ ID NO: 214028 - protein, 15 aa, Artificial Sequence
  Description of Artificial Sequence: Synthetic peptide
  Seed: ANQRLNPMHQLLRHF
ANQRLNPCHALLVHF

SEQ ID NO: 214029 - protein, 15 aa, Artificial Sequence
  Description of Artificial Sequence: Synthetic peptide
  Seed: ANQRLNPMHQLLRHF
ANQRLNPCHRLLAHF

SEQ ID NO: 214030 - protein, 15 aa, Artificial Sequence
  Description of Artificial Sequence: Synthetic peptide
  Seed: ANQRLNPMHQLLRHF
ANQRLNPCHRLLSHF

SEQ ID NO: 214031 - protein, 15 aa, Artificial Sequence
  Description of Artificial Sequence: Synthetic peptide
  Seed: ANQRLNPMHQLLRHF
ANQRLNPEHALLAHF

SEQ ID NO: 214032 - protein, 15 aa, Artificial Sequence
  Description of Artificial Sequence: Synthetic peptide
  Seed: ANQRLNPMHQLLRHF
ANQRLNPEHALLIHF

SEQ ID NO: 214033 - protein, 15 aa, Artificial Sequence
  Description of Artificial Sequence: Synthetic peptide
  Seed: ANQRLNPMHQLLRHF
ANQRLNPEHALLLHF

SEQ ID NO: 214034 - protein, 15 aa, Artificial Sequence
  Description of Artificial Sequence: Synthetic peptide
  Seed: ANQRLNPMHQLLRHF
ANQRLNPEHALLVHF

SEQ ID NO: 214035 - protein, 15 aa, Artificial Sequence
  Description of Artificial Sequence: Synthetic peptide
  Seed: ANQRLNPMHQLLRHF
ANQRLNPEHFLLFHF

SEQ ID NO: 214036 - protein, 15 aa, Artificial Sequence
  Description of Artificial Sequence: Synthetic peptide
  Seed: ANQRLNPMHQLLRHF
ANQRLNPEHFLLIHF

SEQ ID NO: 214037 - protein, 15 aa, Artificial Sequence
  Description of Artificial Sequence: Synthetic peptide
  Seed: ANQRLNPMHQLLRHF
ANQRLNPEHFLLLHF

SEQ ID NO: 214038 - protein, 15 aa, Artificial Sequence
  Description of Artificial Sequence: Synthetic peptide
  Seed: ANQRLNPMHQLLRHF
ANQRLNPEHFLLMHF

SEQ ID NO: 214039 - protein, 15 aa, Artificial Sequence
  Description of Artificial Sequence: Synthetic peptide
  Seed: ANQRLNPMHQLLRHF
ANQRLNPEHFLLVHF

SEQ ID NO: 214040 - protein, 15 aa, Artificial Sequence
  Description of Artificial Sequence: Synthetic peptide
  Seed: ANQRLNPMHQLLRHF
ANQRLNPFHALLAHF

SEQ ID NO: 214041 - protein, 15 aa, Artificial Sequence
  Description of Artificial Sequence: Synthetic peptide
  Seed: ANQRLNPMHQLLRHF
ANQRLNPFHALLIHF

SEQ ID NO: 214042 - protein, 15 aa, Artificial Sequence
  Description of Artificial Sequence: Synthetic peptide
  Seed: ANQRLNPMHQLLRHF
ANQRLNPFHALLLHF

SEQ ID NO: 214043 - protein, 15 aa, Artificial Sequence
  Description of Artificial Sequence: Synthetic peptide
  Seed: ANQRLNPMHQLLRHF
ANQRLNPFHALLTHF

SEQ ID NO: 214044 - protein, 15 aa, Artificial Sequence
  Description of Artificial Sequence: Synthetic peptide
  Seed: ANQRLNPMHQLLRHF
ANQRLNPFHALLVHF

SEQ ID NO: 214045 - protein, 15 aa, Artificial Sequence
  Description of Artificial Sequence: Synthetic peptide
  Seed: ANQRLNPMHQLLRHF
ANQRLNPFHFLLFHF

SEQ ID NO: 214046 - protein, 15 aa, Artificial Sequence
  Description of Artificial Sequence: Synthetic peptide
  Seed: ANQRLNPMHQLLRHF
ANQRLNPFHFLLIHF

SEQ ID NO: 214047 - protein, 15 aa, Artificial Sequence
  Description of Artificial Sequence: Synthetic peptide
  Seed: ANQRLNPMHQLLRHF
ANQRLNPFHFLLLHF

SEQ ID NO: 214048 - protein, 15 aa, Artificial Sequence
  Description of Artificial Sequence: Synthetic peptide
  Seed: ANQRLNPMHQLLRHF
ANQRLNPFHFLLMHF

SEQ ID NO: 214049 - protein, 15 aa, Artificial Sequence
  Description of Artificial Sequence: Synthetic peptide
  Seed: ANQRLNPMHQLLRHF
ANQRLNPFHFLLVHF

SEQ ID NO: 214050 - protein, 15 aa, Artificial Sequence
  Description of Artificial Sequence: Synthetic peptide
  Seed: ANQRLNPMHQLLRHF
ANQRLNPFHFLLYHF

SEQ ID NO: 214051 - protein, 15 aa, Artificial Sequence
  Description of Artificial Sequence: Synthetic peptide
  Seed: ANQRLNPMHQLLRHF
ANQRLNPFHGLLAHF

SEQ ID NO: 214052 - protein, 15 aa, Artificial Sequence
  Description of Artificial Sequence: Synthetic peptide
  Seed: ANQRLNPMHQLLRHF
ANQRLNPFHGLLIHF

SEQ ID NO: 214053 - protein, 15 aa, Artificial Sequence
  Description of Artificial Sequence: Synthetic peptide
  Seed: ANQRLNPMHQLLRHF
ANQRLNPFHGLLLHF

SEQ ID NO: 214054 - protein, 15 aa, Artificial Sequence
  Description of Artificial Sequence: Synthetic peptide
  Seed: ANQRLNPMHQLLRHF
ANQRLNPFHGLLMHF

SEQ ID NO: 214055 - protein, 15 aa, Artificial Sequence
  Description of Artificial Sequence: Synthetic peptide
  Seed: ANQRLNPMHQLLRHF
ANQRLNPFHGLLTHF

SEQ ID NO: 214056 - protein, 15 aa, Artificial Sequence
  Description of Artificial Sequence: Synthetic peptide
  Seed: ANQRLNPMHQLLRHF
ANQRLNPFHGLLVHF

SEQ ID NO: 214057 - protein, 15 aa, Artificial Sequence
  Description of Artificial Sequence: Synthetic peptide
  Seed: ANQRLNPMHQLLRHF
ANQRLNPFHKLLAHF

SEQ ID NO: 214058 - protein, 15 aa, Artificial Sequence
  Description of Artificial Sequence: Synthetic peptide
  Seed: ANQRLNPMHQLLRHF
ANQRLNPFHKLLHHF

SEQ ID NO: 214059 - protein, 15 aa, Artificial Sequence
  Description of Artificial Sequence: Synthetic peptide
  Seed: ANQRLNPMHQLLRHF
ANQRLNPFHKLLIHF

SEQ ID NO: 214060 - protein, 15 aa, Artificial Sequence
  Description of Artificial Sequence: Synthetic peptide
  Seed: ANQRLNPMHQLLRHF
ANQRLNPFHKLLKHF

SEQ ID NO: 214061 - protein, 15 aa, Artificial Sequence
  Description of Artificial Sequence: Synthetic peptide
  Seed: ANQRLNPMHQLLRHF
ANQRLNPFHKLLLHF

SEQ ID NO: 214062 - protein, 15 aa, Artificial Sequence
  Description of Artificial Sequence: Synthetic peptide
  Seed: ANQRLNPMHQLLRHF
ANQRLNPFHKLLMHF

SEQ ID NO: 214063 - protein, 15 aa, Artificial Sequence
  Description of Artificial Sequence: Synthetic peptide
  Seed: ANQRLNPMHQLLRHF
ANQRLNPFHKLLRHF

SEQ ID NO: 214064 - protein, 15 aa, Artificial Sequence
  Description of Artificial Sequence: Synthetic peptide
  Seed: ANQRLNPMHQLLRHF
ANQRLNPFHKLLSHF

SEQ ID NO: 214065 - protein, 15 aa, Artificial Sequence
  Description of Artificial Sequence: Synthetic peptide
  Seed: ANQRLNPMHQLLRHF
ANQRLNPFHKLLVHF

SEQ ID NO: 214066 - protein, 15 aa, Artificial Sequence
  Description of Artificial Sequence: Synthetic peptide
  Seed: ANQRLNPMHQLLRHF
ANQRLNPFHKLLYHF

SEQ ID NO: 214067 - protein, 15 aa, Artificial Sequence
  Description of Artificial Sequence: Synthetic peptide
  Seed: ANQRLNPMHQLLRHF
ANQRLNPFHLLLLHF

SEQ ID NO: 214068 - protein, 15 aa, Artificial Sequence
  Description of Artificial Sequence: Synthetic peptide
  Seed: ANQRLNPMHQLLRHF
ANQRLNPFHNLLAHF

SEQ ID NO: 214069 - protein, 15 aa, Artificial Sequence
  Description of Artificial Sequence: Synthetic peptide
  Seed: ANQRLNPMHQLLRHF
ANQRLNPFHNLLFHF

SEQ ID NO: 214070 - protein, 15 aa, Artificial Sequence
  Description of Artificial Sequence: Synthetic peptide
  Seed: ANQRLNPMHQLLRHF
ANQRLNPFHNLLIHF

SEQ ID NO: 214071 - protein, 15 aa, Artificial Sequence
  Description of Artificial Sequence: Synthetic peptide
  Seed: ANQRLNPMHQLLRHF
ANQRLNPFHNLLLHF

SEQ ID NO: 214072 - protein, 15 aa, Artificial Sequence
  Description of Artificial Sequence: Synthetic peptide
  Seed: ANQRLNPMHQLLRHF
ANQRLNPFHNLLMHF

SEQ ID NO: 214073 - protein, 15 aa, Artificial Sequence
  Description of Artificial Sequence: Synthetic peptide
  Seed: ANQRLNPMHQLLRHF
ANQRLNPFHNLLSHF

SEQ ID NO: 214074 - protein, 15 aa, Artificial Sequence
  Description of Artificial Sequence: Synthetic peptide
  Seed: ANQRLNPMHQLLRHF
ANQRLNPFHNLLTHF

SEQ ID NO: 214075 - protein, 15 aa, Artificial Sequence
  Description of Artificial Sequence: Synthetic peptide
  Seed: ANQRLNPMHQLLRHF
ANQRLNPFHNLLVHF

SEQ ID NO: 214076 - protein, 15 aa, Artificial Sequence
  Description of Artificial Sequence: Synthetic peptide
  Seed: ANQRLNPMHQLLRHF
ANQRLNPFHRLLAHF

SEQ ID NO: 214077 - protein, 15 aa, Artificial Sequence
  Description of Artificial Sequence: Synthetic peptide
  Seed: ANQRLNPMHQLLRHF
ANQRLNPFHRLLFHF

SEQ ID NO: 214078 - protein, 15 aa, Artificial Sequence
  Description of Artificial Sequence: Synthetic peptide
  Seed: ANQRLNPMHQLLRHF
ANQRLNPFHRLLGHF

SEQ ID NO: 214079 - protein, 15 aa, Artificial Sequence
  Description of Artificial Sequence: Synthetic peptide
  Seed: ANQRLNPMHQLLRHF
ANQRLNPFHRLLHHF

SEQ ID NO: 214080 - protein, 15 aa, Artificial Sequence
  Description of Artificial Sequence: Synthetic peptide
  Seed: ANQRLNPMHQLLRHF
ANQRLNPFHRLLIHF

SEQ ID NO: 214081 - protein, 15 aa, Artificial Sequence
  Description of Artificial Sequence: Synthetic peptide
  Seed: ANQRLNPMHQLLRHF
ANQRLNPFHRLLKHF

SEQ ID NO: 214082 - protein, 15 aa, Artificial Sequence
  Description of Artificial Sequence: Synthetic peptide
  Seed: ANQRLNPMHQLLRHF
ANQRLNPFHRLLLHF

SEQ ID NO: 214083 - protein, 15 aa, Artificial Sequence
  Description of Artificial Sequence: Synthetic peptide
  Seed: ANQRLNPMHQLLRHF
ANQRLNPFHRLLMHF

SEQ ID NO: 214084 - protein, 15 aa, Artificial Sequence
  Description of Artificial Sequence: Synthetic peptide
  Seed: ANQRLNPMHQLLRHF
ANQRLNPFHRLLQHF

SEQ ID NO: 214085 - protein, 15 aa, Artificial Sequence
  Description of Artificial Sequence: Synthetic peptide
  Seed: ANQRLNPMHQLLRHF
ANQRLNPFHRLLRHF

SEQ ID NO: 214086 - protein, 15 aa, Artificial Sequence
  Description of Artificial Sequence: Synthetic peptide
  Seed: ANQRLNPMHQLLRHF
ANQRLNPFHRLLSHF

SEQ ID NO: 214087 - protein, 15 aa, Artificial Sequence
  Description of Artificial Sequence: Synthetic peptide
  Seed: ANQRLNPMHQLLRHF
ANQRLNPFHRLLTHF

SEQ ID NO: 214088 - protein, 15 aa, Artificial Sequence
  Description of Artificial Sequence: Synthetic peptide
  Seed: ANQRLNPMHQLLRHF
ANQRLNPFHRLLVHF

SEQ ID NO: 214089 - protein, 15 aa, Artificial Sequence
  Description of Artificial Sequence: Synthetic peptide
  Seed: ANQRLNPMHQLLRHF
ANQRLNPFHRLLYHF

SEQ ID NO: 214090 - protein, 15 aa, Artificial Sequence
  Description of Artificial Sequence: Synthetic peptide
  Seed: ANQRLNPMHQLLRHF
ANQRLNPFHSLLAHF

SEQ ID NO: 214091 - protein, 15 aa, Artificial Sequence
  Description of Artificial Sequence: Synthetic peptide
  Seed: ANQRLNPMHQLLRHF
ANQRLNPFHSLLFHF

SEQ ID NO: 214092 - protein, 15 aa, Artificial Sequence
  Description of Artificial Sequence: Synthetic peptide
  Seed: ANQRLNPMHQLLRHF
ANQRLNPFHSLLGHF

SEQ ID NO: 214093 - protein, 15 aa, Artificial Sequence
  Description of Artificial Sequence: Synthetic peptide
  Seed: ANQRLNPMHQLLRHF
ANQRLNPFHSLLIHF

SEQ ID NO: 214094 - protein, 15 aa, Artificial Sequence
  Description of Artificial Sequence: Synthetic peptide
  Seed: ANQRLNPMHQLLRHF
ANQRLNPFHSLLLHF

SEQ ID NO: 214095 - protein, 15 aa, Artificial Sequence
  Description of Artificial Sequence: Synthetic peptide
  Seed: ANQRLNPMHQLLRHF
ANQRLNPFHSLLMHF

SEQ ID NO: 214096 - protein, 15 aa, Artificial Sequence
  Description of Artificial Sequence: Synthetic peptide
  Seed: ANQRLNPMHQLLRHF
ANQRLNPFHSLLSHF

SEQ ID NO: 214097 - protein, 15 aa, Artificial Sequence
  Description of Artificial Sequence: Synthetic peptide
  Seed: ANQRLNPMHQLLRHF
ANQRLNPFHSLLTHF

SEQ ID NO: 214098 - protein, 15 aa, Artificial Sequence
  Description of Artificial Sequence: Synthetic peptide
  Seed: ANQRLNPMHQLLRHF
ANQRLNPFHSLLVHF

SEQ ID NO: 214099 - protein, 15 aa, Artificial Sequence
  Description of Artificial Sequence: Synthetic peptide
  Seed: ANQRLNPMHQLLRHF
ANQRLNPFHTLLAHF

SEQ ID NO: 214100 - protein, 15 aa, Artificial Sequence
  Description of Artificial Sequence: Synthetic peptide
  Seed: ANQRLNPMHQLLRHF
ANQRLNPFHTLLIHF

SEQ ID NO: 214101 - protein, 15 aa, Artificial Sequence
  Description of Artificial Sequence: Synthetic peptide
  Seed: ANQRLNPMHQLLRHF
ANQRLNPFHTLLLHF

SEQ ID NO: 214102 - protein, 15 aa, Artificial Sequence
  Description of Artificial Sequence: Synthetic peptide
  Seed: ANQRLNPMHQLLRHF
ANQRLNPFHTLLVHF

SEQ ID NO: 214103 - protein, 15 aa, Artificial Sequence
  Description of Artificial Sequence: Synthetic peptide
  Seed: ANQRLNPMHQLLRHF
ANQRLNPFHYLLLHF

SEQ ID NO: 214104 - protein, 15 aa, Artificial Sequence
  Description of Artificial Sequence: Synthetic peptide
  Seed: ANQRLNPMHQLLRHF
ANQRLNPGHALLAHF

SEQ ID NO: 214105 - protein, 15 aa, Artificial Sequence
  Description of Artificial Sequence: Synthetic peptide
  Seed: ANQRLNPMHQLLRHF
ANQRLNPGHALLIHF

SEQ ID NO: 214106 - protein, 15 aa, Artificial Sequence
  Description of Artificial Sequence: Synthetic peptide
  Seed: ANQRLNPMHQLLRHF
ANQRLNPGHALLLHF

SEQ ID NO: 214107 - protein, 15 aa, Artificial Sequence
  Description of Artificial Sequence: Synthetic peptide
  Seed: ANQRLNPMHQLLRHF
ANQRLNPGHALLMHF

SEQ ID NO: 214108 - protein, 15 aa, Artificial Sequence
  Description of Artificial Sequence: Synthetic peptide
  Seed: ANQRLNPMHQLLRHF
ANQRLNPGHALLVHF

SEQ ID NO: 214109 - protein, 15 aa, Artificial Sequence
  Description of Artificial Sequence: Synthetic peptide
  Seed: ANQRLNPMHQLLRHF
ANQRLNPGHGLLLHF

SEQ ID NO: 214110 - protein, 15 aa, Artificial Sequence
  Description of Artificial Sequence: Synthetic peptide
  Seed: ANQRLNPMHQLLRHF
ANQRLNPGHGLLVHF

SEQ ID NO: 214111 - protein, 15 aa, Artificial Sequence
  Description of Artificial Sequence: Synthetic peptide
  Seed: ANQRLNPMHQLLRHF
ANQRLNPGHSLLIHF

SEQ ID NO: 214112 - protein, 15 aa, Artificial Sequence
  Description of Artificial Sequence: Synthetic peptide
  Seed: ANQRLNPMHQLLRHF
ANQRLNPGHSLLLHF

SEQ ID NO: 214113 - protein, 15 aa, Artificial Sequence
  Description of Artificial Sequence: Synthetic peptide
  Seed: ANQRLNPMHQLLRHF
ANQRLNPGHSLLVHF

SEQ ID NO: 214114 - protein, 15 aa, Artificial Sequence
  Description of Artificial Sequence: Synthetic peptide
  Seed: ANQRLNPMHQLLRHF
ANQRLNPHHALLRHF

SEQ ID NO: 214115 - protein, 15 aa, Artificial Sequence
  Description of Artificial Sequence: Synthetic peptide
  Seed: ANQRLNPMHQLLRHF
ANQRLNPHHFLLLHF

SEQ ID NO: 214116 - protein, 15 aa, Artificial Sequence
  Description of Artificial Sequence: Synthetic peptide
  Seed: ANQRLNPMHQLLRHF
ANQRLNPHHKLLRHF

SEQ ID NO: 214117 - protein, 15 aa, Artificial Sequence
  Description of Artificial Sequence: Synthetic peptide
  Seed: ANQRLNPMHQLLRHF
ANQRLNPHHRLLKHF

SEQ ID NO: 214118 - protein, 15 aa, Artificial Sequence
  Description of Artificial Sequence: Synthetic peptide
  Seed: ANQRLNPMHQLLRHF
ANQRLNPHHRLLRHF

SEQ ID NO: 214119 - protein, 15 aa, Artificial Sequence
  Description of Artificial Sequence: Synthetic peptide
  Seed: ANQRLNPMHQLLRHF
ANQRLNPHHSLLRHF

SEQ ID NO: 214120 - protein, 15 aa, Artificial Sequence
  Description of Artificial Sequence: Synthetic peptide
  Seed: ANQRLNPMHQLLRHF
ANQRLNPHHVLLRHF

SEQ ID NO: 214121 - protein, 15 aa, Artificial Sequence
  Description of Artificial Sequence: Synthetic peptide
  Seed: ANQRLNPMHQLLRHF
ANQRLNPIHALLAHF

SEQ ID NO: 214122 - protein, 15 aa, Artificial Sequence
  Description of Artificial Sequence: Synthetic peptide
  Seed: ANQRLNPMHQLLRHF
ANQRLNPIHALLCHF

SEQ ID NO: 214123 - protein, 15 aa, Artificial Sequence
  Description of Artificial Sequence: Synthetic peptide
  Seed: ANQRLNPMHQLLRHF
ANQRLNPIHALLGHF

SEQ ID NO: 214124 - protein, 15 aa, Artificial Sequence
  Description of Artificial Sequence: Synthetic peptide
  Seed: ANQRLNPMHQLLRHF
ANQRLNPIHALLIHF

SEQ ID NO: 214125 - protein, 15 aa, Artificial Sequence
  Description of Artificial Sequence: Synthetic peptide
  Seed: ANQRLNPMHQLLRHF
ANQRLNPIHALLLHF

SEQ ID NO: 214126 - protein, 15 aa, Artificial Sequence
  Description of Artificial Sequence: Synthetic peptide
  Seed: ANQRLNPMHQLLRHF
ANQRLNPIHALLMHF

SEQ ID NO: 214127 - protein, 15 aa, Artificial Sequence
  Description of Artificial Sequence: Synthetic peptide
  Seed: ANQRLNPMHQLLRHF
ANQRLNPIHALLNHF

SEQ ID NO: 214128 - protein, 15 aa, Artificial Sequence
  Description of Artificial Sequence: Synthetic peptide
  Seed: ANQRLNPMHQLLRHF
ANQRLNPIHALLRHF

SEQ ID NO: 214129 - protein, 15 aa, Artificial Sequence
  Description of Artificial Sequence: Synthetic peptide
  Seed: ANQRLNPMHQLLRHF
ANQRLNPIHALLSHF

SEQ ID NO: 214130 - protein, 15 aa, Artificial Sequence
  Description of Artificial Sequence: Synthetic peptide
  Seed: ANQRLNPMHQLLRHF
ANQRLNPIHALLTHF

SEQ ID NO: 214131 - protein, 15 aa, Artificial Sequence
  Description of Artificial Sequence: Synthetic peptide
  Seed: ANQRLNPMHQLLRHF
ANQRLNPIHALLVHF

SEQ ID NO: 214132 - protein, 15 aa, Artificial Sequence
  Description of Artificial Sequence: Synthetic peptide
  Seed: ANQRLNPMHQLLRHF
ANQRLNPIHFLLAHF

SEQ ID NO: 214133 - protein, 15 aa, Artificial Sequence
  Description of Artificial Sequence: Synthetic peptide
  Seed: ANQRLNPMHQLLRHF
ANQRLNPIHFLLEHF

SEQ ID NO: 214134 - protein, 15 aa, Artificial Sequence
  Description of Artificial Sequence: Synthetic peptide
  Seed: ANQRLNPMHQLLRHF
ANQRLNPIHFLLFHF

SEQ ID NO: 214135 - protein, 15 aa, Artificial Sequence
  Description of Artificial Sequence: Synthetic peptide
  Seed: ANQRLNPMHQLLRHF
ANQRLNPIHFLLIHF

SEQ ID NO: 214136 - protein, 15 aa, Artificial Sequence
  Description of Artificial Sequence: Synthetic peptide
  Seed: ANQRLNPMHQLLRHF
ANQRLNPIHFLLLHF

SEQ ID NO: 214137 - protein, 15 aa, Artificial Sequence
  Description of Artificial Sequence: Synthetic peptide
  Seed: ANQRLNPMHQLLRHF
ANQRLNPIHFLLMHF

SEQ ID NO: 214138 - protein, 15 aa, Artificial Sequence
  Description of Artificial Sequence: Synthetic peptide
  Seed: ANQRLNPMHQLLRHF
ANQRLNPIHFLLNHF

SEQ ID NO: 214139 - protein, 15 aa, Artificial Sequence
  Description of Artificial Sequence: Synthetic peptide
  Seed: ANQRLNPMHQLLRHF
ANQRLNPIHFLLTHF

SEQ ID NO: 214140 - protein, 15 aa, Artificial Sequence
  Description of Artificial Sequence: Synthetic peptide
  Seed: ANQRLNPMHQLLRHF
ANQRLNPIHFLLVHF

SEQ ID NO: 214141 - protein, 15 aa, Artificial Sequence
  Description of Artificial Sequence: Synthetic peptide
  Seed: ANQRLNPMHQLLRHF
ANQRLNPIHFLLYHF

SEQ ID NO: 214142 - protein, 15 aa, Artificial Sequence
  Description of Artificial Sequence: Synthetic peptide
  Seed: ANQRLNPMHQLLRHF
ANQRLNPIHGLLAHF

SEQ ID NO: 214143 - protein, 15 aa, Artificial Sequence
  Description of Artificial Sequence: Synthetic peptide
  Seed: ANQRLNPMHQLLRHF
ANQRLNPIHGLLGHF

SEQ ID NO: 214144 - protein, 15 aa, Artificial Sequence
  Description of Artificial Sequence: Synthetic peptide
  Seed: ANQRLNPMHQLLRHF
ANQRLNPIHGLLIHF

SEQ ID NO: 214145 - protein, 15 aa, Artificial Sequence
  Description of Artificial Sequence: Synthetic peptide
  Seed: ANQRLNPMHQLLRHF
ANQRLNPIHGLLLHF

SEQ ID NO: 214146 - protein, 15 aa, Artificial Sequence
  Description of Artificial Sequence: Synthetic peptide
  Seed: ANQRLNPMHQLLRHF
ANQRLNPIHGLLMHF

SEQ ID NO: 214147 - protein, 15 aa, Artificial Sequence
  Description of Artificial Sequence: Synthetic peptide
  Seed: ANQRLNPMHQLLRHF
ANQRLNPIHGLLSHF

SEQ ID NO: 214148 - protein, 15 aa, Artificial Sequence
  Description of Artificial Sequence: Synthetic peptide
  Seed: ANQRLNPMHQLLRHF
ANQRLNPIHGLLTHF

SEQ ID NO: 214149 - protein, 15 aa, Artificial Sequence
  Description of Artificial Sequence: Synthetic peptide
  Seed: ANQRLNPMHQLLRHF
ANQRLNPIHGLLVHF

SEQ ID NO: 214150 - protein, 15 aa, Artificial Sequence
  Description of Artificial Sequence: Synthetic peptide
  Seed: ANQRLNPMHQLLRHF
ANQRLNPIHKLLAHF

SEQ ID NO: 214151 - protein, 15 aa, Artificial Sequence
  Description of Artificial Sequence: Synthetic peptide
  Seed: ANQRLNPMHQLLRHF
ANQRLNPIHKLLFHF

SEQ ID NO: 214152 - protein, 15 aa, Artificial Sequence
  Description of Artificial Sequence: Synthetic peptide
  Seed: ANQRLNPMHQLLRHF
ANQRLNPIHKLLGHF

SEQ ID NO: 214153 - protein, 15 aa, Artificial Sequence
  Description of Artificial Sequence: Synthetic peptide
  Seed: ANQRLNPMHQLLRHF
ANQRLNPIHKLLHHF

SEQ ID NO: 214154 - protein, 15 aa, Artificial Sequence
  Description of Artificial Sequence: Synthetic peptide
  Seed: ANQRLNPMHQLLRHF
ANQRLNPIHKLLIHF

SEQ ID NO: 214155 - protein, 15 aa, Artificial Sequence
  Description of Artificial Sequence: Synthetic peptide
  Seed: ANQRLNPMHQLLRHF
ANQRLNPIHKLLKHF

SEQ ID NO: 214156 - protein, 15 aa, Artificial Sequence
  Description of Artificial Sequence: Synthetic peptide
  Seed: ANQRLNPMHQLLRHF
ANQRLNPIHKLLLHF

SEQ ID NO: 214157 - protein, 15 aa, Artificial Sequence
  Description of Artificial Sequence: Synthetic peptide
  Seed: ANQRLNPMHQLLRHF
ANQRLNPIHKLLMHF

SEQ ID NO: 214158 - protein, 15 aa, Artificial Sequence
  Description of Artificial Sequence: Synthetic peptide
  Seed: ANQRLNPMHQLLRHF
ANQRLNPIHKLLNHF

SEQ ID NO: 214159 - protein, 15 aa, Artificial Sequence
  Description of Artificial Sequence: Synthetic peptide
  Seed: ANQRLNPMHQLLRHF
ANQRLNPIHKLLQHF

SEQ ID NO: 214160 - protein, 15 aa, Artificial Sequence
  Description of Artificial Sequence: Synthetic peptide
  Seed: ANQRLNPMHQLLRHF
ANQRLNPIHKLLRHF

SEQ ID NO: 214161 - protein, 15 aa, Artificial Sequence
  Description of Artificial Sequence: Synthetic peptide
  Seed: ANQRLNPMHQLLRHF
ANQRLNPIHKLLSHF

SEQ ID NO: 214162 - protein, 15 aa, Artificial Sequence
  Description of Artificial Sequence: Synthetic peptide
  Seed: ANQRLNPMHQLLRHF
ANQRLNPIHKLLTHF

SEQ ID NO: 214163 - protein, 15 aa, Artificial Sequence
  Description of Artificial Sequence: Synthetic peptide
  Seed: ANQRLNPMHQLLRHF
ANQRLNPIHKLLVHF

SEQ ID NO: 214164 - protein, 15 aa, Artificial Sequence
  Description of Artificial Sequence: Synthetic peptide
  Seed: ANQRLNPMHQLLRHF
ANQRLNPIHKLLYHF

SEQ ID NO: 214165 - protein, 15 aa, Artificial Sequence
  Description of Artificial Sequence: Synthetic peptide
  Seed: ANQRLNPMHQLLRHF
ANQRLNPIHLLLLHF

SEQ ID NO: 214166 - protein, 15 aa, Artificial Sequence
  Description of Artificial Sequence: Synthetic peptide
  Seed: ANQRLNPMHQLLRHF
ANQRLNPIHNLLAHF

SEQ ID NO: 214167 - protein, 15 aa, Artificial Sequence
  Description of Artificial Sequence: Synthetic peptide
  Seed: ANQRLNPMHQLLRHF
ANQRLNPIHNLLIHF

SEQ ID NO: 214168 - protein, 15 aa, Artificial Sequence
  Description of Artificial Sequence: Synthetic peptide
  Seed: ANQRLNPMHQLLRHF
ANQRLNPIHNLLLHF

SEQ ID NO: 214169 - protein, 15 aa, Artificial Sequence
  Description of Artificial Sequence: Synthetic peptide
  Seed: ANQRLNPMHQLLRHF
ANQRLNPIHNLLVHF

SEQ ID NO: 214170 - protein, 15 aa, Artificial Sequence
  Description of Artificial Sequence: Synthetic peptide
  Seed: ANQRLNPMHQLLRHF
ANQRLNPIHPLLAHF

SEQ ID NO: 214171 - protein, 15 aa, Artificial Sequence
  Description of Artificial Sequence: Synthetic peptide
  Seed: ANQRLNPMHQLLRHF
ANQRLNPIHPLLIHF

SEQ ID NO: 214172 - protein, 15 aa, Artificial Sequence
  Description of Artificial Sequence: Synthetic peptide
  Seed: ANQRLNPMHQLLRHF
ANQRLNPIHPLLLHF

SEQ ID NO: 214173 - protein, 15 aa, Artificial Sequence
  Description of Artificial Sequence: Synthetic peptide
  Seed: ANQRLNPMHQLLRHF
ANQRLNPIHPLLMHF

SEQ ID NO: 214174 - protein, 15 aa, Artificial Sequence
  Description of Artificial Sequence: Synthetic peptide
  Seed: ANQRLNPMHQLLRHF
ANQRLNPIHPLLNHF

SEQ ID NO: 214175 - protein, 15 aa, Artificial Sequence
  Description of Artificial Sequence: Synthetic peptide
  Seed: ANQRLNPMHQLLRHF
ANQRLNPIHPLLSHF

SEQ ID NO: 214176 - protein, 15 aa, Artificial Sequence
  Description of Artificial Sequence: Synthetic peptide
  Seed: ANQRLNPMHQLLRHF
ANQRLNPIHPLLTHF

SEQ ID NO: 214177 - protein, 15 aa, Artificial Sequence
  Description of Artificial Sequence: Synthetic peptide
  Seed: ANQRLNPMHQLLRHF
ANQRLNPIHPLLVHF

SEQ ID NO: 214178 - protein, 15 aa, Artificial Sequence
  Description of Artificial Sequence: Synthetic peptide
  Seed: ANQRLNPMHQLLRHF
ANQRLNPIHRLLAHF

SEQ ID NO: 214179 - protein, 15 aa, Artificial Sequence
  Description of Artificial Sequence: Synthetic peptide
  Seed: ANQRLNPMHQLLRHF
ANQRLNPIHRLLFHF

SEQ ID NO: 214180 - protein, 15 aa, Artificial Sequence
  Description of Artificial Sequence: Synthetic peptide
  Seed: ANQRLNPMHQLLRHF
ANQRLNPIHRLLGHF

SEQ ID NO: 214181 - protein, 15 aa, Artificial Sequence
  Description of Artificial Sequence: Synthetic peptide
  Seed: ANQRLNPMHQLLRHF
ANQRLNPIHRLLHHF

SEQ ID NO: 214182 - protein, 15 aa, Artificial Sequence
  Description of Artificial Sequence: Synthetic peptide
  Seed: ANQRLNPMHQLLRHF
ANQRLNPIHRLLIHF

SEQ ID NO: 214183 - protein, 15 aa, Artificial Sequence
  Description of Artificial Sequence: Synthetic peptide
  Seed: ANQRLNPMHQLLRHF
ANQRLNPIHRLLKHF

SEQ ID NO: 214184 - protein, 15 aa, Artificial Sequence
  Description of Artificial Sequence: Synthetic peptide
  Seed: ANQRLNPMHQLLRHF
ANQRLNPIHRLLLHF

SEQ ID NO: 214185 - protein, 15 aa, Artificial Sequence
  Description of Artificial Sequence: Synthetic peptide
  Seed: ANQRLNPMHQLLRHF
ANQRLNPIHRLLMHF

SEQ ID NO: 214186 - protein, 15 aa, Artificial Sequence
  Description of Artificial Sequence: Synthetic peptide
  Seed: ANQRLNPMHQLLRHF
ANQRLNPIHRLLNHF

SEQ ID NO: 214187 - protein, 15 aa, Artificial Sequence
  Description of Artificial Sequence: Synthetic peptide
  Seed: ANQRLNPMHQLLRHF
ANQRLNPIHRLLPHF

SEQ ID NO: 214188 - protein, 15 aa, Artificial Sequence
  Description of Artificial Sequence: Synthetic peptide
  Seed: ANQRLNPMHQLLRHF
ANQRLNPIHRLLQHF

SEQ ID NO: 214189 - protein, 15 aa, Artificial Sequence
  Description of Artificial Sequence: Synthetic peptide
  Seed: ANQRLNPMHQLLRHF
ANQRLNPIHRLLRHF

SEQ ID NO: 214190 - protein, 15 aa, Artificial Sequence
  Description of Artificial Sequence: Synthetic peptide
  Seed: ANQRLNPMHQLLRHF
ANQRLNPIHRLLSHF

SEQ ID NO: 214191 - protein, 15 aa, Artificial Sequence
  Description of Artificial Sequence: Synthetic peptide
  Seed: ANQRLNPMHQLLRHF
ANQRLNPIHRLLTHF

SEQ ID NO: 214192 - protein, 15 aa, Artificial Sequence
  Description of Artificial Sequence: Synthetic peptide
  Seed: ANQRLNPMHQLLRHF
ANQRLNPIHRLLVHF

SEQ ID NO: 214193 - protein, 15 aa, Artificial Sequence
  Description of Artificial Sequence: Synthetic peptide
  Seed: ANQRLNPMHQLLRHF
ANQRLNPIHRLLYHF

SEQ ID NO: 214194 - protein, 15 aa, Artificial Sequence
  Description of Artificial Sequence: Synthetic peptide
  Seed: ANQRLNPMHQLLRHF
ANQRLNPIHSLLAHF

SEQ ID NO: 214195 - protein, 15 aa, Artificial Sequence
  Description of Artificial Sequence: Synthetic peptide
  Seed: ANQRLNPMHQLLRHF
ANQRLNPIHSLLIHF

SEQ ID NO: 214196 - protein, 15 aa, Artificial Sequence
  Description of Artificial Sequence: Synthetic peptide
  Seed: ANQRLNPMHQLLRHF
ANQRLNPIHSLLLHF

SEQ ID NO: 214197 - protein, 15 aa, Artificial Sequence
  Description of Artificial Sequence: Synthetic peptide
  Seed: ANQRLNPMHQLLRHF
ANQRLNPIHSLLMHF

SEQ ID NO: 214198 - protein, 15 aa, Artificial Sequence
  Description of Artificial Sequence: Synthetic peptide
  Seed: ANQRLNPMHQLLRHF
ANQRLNPIHSLLSHF

SEQ ID NO: 214199 - protein, 15 aa, Artificial Sequence
  Description of Artificial Sequence: Synthetic peptide
  Seed: ANQRLNPMHQLLRHF
ANQRLNPIHSLLTHF

SEQ ID NO: 214200 - protein, 15 aa, Artificial Sequence
  Description of Artificial Sequence: Synthetic peptide
  Seed: ANQRLNPMHQLLRHF
ANQRLNPIHSLLVHF

SEQ ID NO: 214201 - protein, 15 aa, Artificial Sequence
  Description of Artificial Sequence: Synthetic peptide
  Seed: ANQRLNPMHQLLRHF
ANQRLNPIHTLLAHF

SEQ ID NO: 214202 - protein, 15 aa, Artificial Sequence
  Description of Artificial Sequence: Synthetic peptide
  Seed: ANQRLNPMHQLLRHF
ANQRLNPIHTLLIHF

SEQ ID NO: 214203 - protein, 15 aa, Artificial Sequence
  Description of Artificial Sequence: Synthetic peptide
  Seed: ANQRLNPMHQLLRHF
ANQRLNPIHTLLLHF

SEQ ID NO: 214204 - protein, 15 aa, Artificial Sequence
  Description of Artificial Sequence: Synthetic peptide
  Seed: ANQRLNPMHQLLRHF
ANQRLNPIHTLLVHF

SEQ ID NO: 214205 - protein, 15 aa, Artificial Sequence
  Description of Artificial Sequence: Synthetic peptide
  Seed: ANQRLNPMHQLLRHF
ANQRLNPIHWLLLHF

SEQ ID NO: 214206 - protein, 15 aa, Artificial Sequence
  Description of Artificial Sequence: Synthetic peptide
  Seed: ANQRLNPMHQLLRHF
ANQRLNPIHYLLLHF

SEQ ID NO: 214207 - protein, 15 aa, Artificial Sequence
  Description of Artificial Sequence: Synthetic peptide
  Seed: ANQRLNPMHQLLRHF
ANQRLNPKHRLLAHF

SEQ ID NO: 214208 - protein, 15 aa, Artificial Sequence
  Description of Artificial Sequence: Synthetic peptide
  Seed: ANQRLNPMHQLLRHF
ANQRLNPKHRLLSHF

SEQ ID NO: 214209 - protein, 15 aa, Artificial Sequence
  Description of Artificial Sequence: Synthetic peptide
  Seed: ANQRLNPMHQLLRHF
ANQRLNPLHALLAHF

SEQ ID NO: 214210 - protein, 15 aa, Artificial Sequence
  Description of Artificial Sequence: Synthetic peptide
  Seed: ANQRLNPMHQLLRHF
ANQRLNPLHALLCHF

SEQ ID NO: 214211 - protein, 15 aa, Artificial Sequence
  Description of Artificial Sequence: Synthetic peptide
  Seed: ANQRLNPMHQLLRHF
ANQRLNPLHALLFHF

SEQ ID NO: 214212 - protein, 15 aa, Artificial Sequence
  Description of Artificial Sequence: Synthetic peptide
  Seed: ANQRLNPMHQLLRHF
ANQRLNPLHALLGHF

SEQ ID NO: 214213 - protein, 15 aa, Artificial Sequence
  Description of Artificial Sequence: Synthetic peptide
  Seed: ANQRLNPMHQLLRHF
ANQRLNPLHALLHHF

SEQ ID NO: 214214 - protein, 15 aa, Artificial Sequence
  Description of Artificial Sequence: Synthetic peptide
  Seed: ANQRLNPMHQLLRHF
ANQRLNPLHALLIHF

SEQ ID NO: 214215 - protein, 15 aa, Artificial Sequence
  Description of Artificial Sequence: Synthetic peptide
  Seed: ANQRLNPMHQLLRHF
ANQRLNPLHALLLHF

SEQ ID NO: 214216 - protein, 15 aa, Artificial Sequence
  Description of Artificial Sequence: Synthetic peptide
  Seed: ANQRLNPMHQLLRHF
ANQRLNPLHALLMHF

SEQ ID NO: 214217 - protein, 15 aa, Artificial Sequence
  Description of Artificial Sequence: Synthetic peptide
  Seed: ANQRLNPMHQLLRHF
ANQRLNPLHALLNHF

SEQ ID NO: 214218 - protein, 15 aa, Artificial Sequence
  Description of Artificial Sequence: Synthetic peptide
  Seed: ANQRLNPMHQLLRHF
ANQRLNPLHALLSHF

SEQ ID NO: 214219 - protein, 15 aa, Artificial Sequence
  Description of Artificial Sequence: Synthetic peptide
  Seed: ANQRLNPMHQLLRHF
ANQRLNPLHALLTHF

SEQ ID NO: 214220 - protein, 15 aa, Artificial Sequence
  Description of Artificial Sequence: Synthetic peptide
  Seed: ANQRLNPMHQLLRHF
ANQRLNPLHALLVHF

SEQ ID NO: 214221 - protein, 15 aa, Artificial Sequence
  Description of Artificial Sequence: Synthetic peptide
  Seed: ANQRLNPMHQLLRHF
ANQRLNPLHFLLEHF

SEQ ID NO: 214222 - protein, 15 aa, Artificial Sequence
  Description of Artificial Sequence: Synthetic peptide
  Seed: ANQRLNPMHQLLRHF
ANQRLNPLHFLLFHF

SEQ ID NO: 214223 - protein, 15 aa, Artificial Sequence
  Description of Artificial Sequence: Synthetic peptide
  Seed: ANQRLNPMHQLLRHF
ANQRLNPLHFLLIHF

SEQ ID NO: 214224 - protein, 15 aa, Artificial Sequence
  Description of Artificial Sequence: Synthetic peptide
  Seed: ANQRLNPMHQLLRHF
ANQRLNPLHFLLLHF

SEQ ID NO: 214225 - protein, 15 aa, Artificial Sequence
  Description of Artificial Sequence: Synthetic peptide
  Seed: ANQRLNPMHQLLRHF
ANQRLNPLHFLLMHF

SEQ ID NO: 214226 - protein, 15 aa, Artificial Sequence
  Description of Artificial Sequence: Synthetic peptide
  Seed: ANQRLNPMHQLLRHF
ANQRLNPLHFLLTHF

SEQ ID NO: 214227 - protein, 15 aa, Artificial Sequence
  Description of Artificial Sequence: Synthetic peptide
  Seed: ANQRLNPMHQLLRHF
ANQRLNPLHFLLVHF

SEQ ID NO: 214228 - protein, 15 aa, Artificial Sequence
  Description of Artificial Sequence: Synthetic peptide
  Seed: ANQRLNPMHQLLRHF
ANQRLNPLHFLLYHF

SEQ ID NO: 214229 - protein, 15 aa, Artificial Sequence
  Description of Artificial Sequence: Synthetic peptide
  Seed: ANQRLNPMHQLLRHF
ANQRLNPLHGLLAHF

SEQ ID NO: 214230 - protein, 15 aa, Artificial Sequence
  Description of Artificial Sequence: Synthetic peptide
  Seed: ANQRLNPMHQLLRHF
ANQRLNPLHGLLCHF

SEQ ID NO: 214231 - protein, 15 aa, Artificial Sequence
  Description of Artificial Sequence: Synthetic peptide
  Seed: ANQRLNPMHQLLRHF
ANQRLNPLHGLLGHF

SEQ ID NO: 214232 - protein, 15 aa, Artificial Sequence
  Description of Artificial Sequence: Synthetic peptide
  Seed: ANQRLNPMHQLLRHF
ANQRLNPLHGLLIHF

SEQ ID NO: 214233 - protein, 15 aa, Artificial Sequence
  Description of Artificial Sequence: Synthetic peptide
  Seed: ANQRLNPMHQLLRHF
ANQRLNPLHGLLLHF

SEQ ID NO: 214234 - protein, 15 aa, Artificial Sequence
  Description of Artificial Sequence: Synthetic peptide
  Seed: ANQRLNPMHQLLRHF
ANQRLNPLHGLLMHF

SEQ ID NO: 214235 - protein, 15 aa, Artificial Sequence
  Description of Artificial Sequence: Synthetic peptide
  Seed: ANQRLNPMHQLLRHF
ANQRLNPLHGLLNHF

SEQ ID NO: 214236 - protein, 15 aa, Artificial Sequence
  Description of Artificial Sequence: Synthetic peptide
  Seed: ANQRLNPMHQLLRHF
ANQRLNPLHGLLSHF

SEQ ID NO: 214237 - protein, 15 aa, Artificial Sequence
  Description of Artificial Sequence: Synthetic peptide
  Seed: ANQRLNPMHQLLRHF
ANQRLNPLHGLLTHF

SEQ ID NO: 214238 - protein, 15 aa, Artificial Sequence
  Description of Artificial Sequence: Synthetic peptide
  Seed: ANQRLNPMHQLLRHF
ANQRLNPLHGLLVHF

SEQ ID NO: 214239 - protein, 15 aa, Artificial Sequence
  Description of Artificial Sequence: Synthetic peptide
  Seed: ANQRLNPMHQLLRHF
ANQRLNPLHILLVHF

SEQ ID NO: 214240 - protein, 15 aa, Artificial Sequence
  Description of Artificial Sequence: Synthetic peptide
  Seed: ANQRLNPMHQLLRHF
ANQRLNPLHKLLAHF

SEQ ID NO: 214241 - protein, 15 aa, Artificial Sequence
  Description of Artificial Sequence: Synthetic peptide
  Seed: ANQRLNPMHQLLRHF
ANQRLNPLHKLLGHF

SEQ ID NO: 214242 - protein, 15 aa, Artificial Sequence
  Description of Artificial Sequence: Synthetic peptide
  Seed: ANQRLNPMHQLLRHF
ANQRLNPLHKLLHHF

SEQ ID NO: 214243 - protein, 15 aa, Artificial Sequence
  Description of Artificial Sequence: Synthetic peptide
  Seed: ANQRLNPMHQLLRHF
ANQRLNPLHKLLKHF

SEQ ID NO: 214244 - protein, 15 aa, Artificial Sequence
  Description of Artificial Sequence: Synthetic peptide
  Seed: ANQRLNPMHQLLRHF
ANQRLNPLHKLLMHF

SEQ ID NO: 214245 - protein, 15 aa, Artificial Sequence
  Description of Artificial Sequence: Synthetic peptide
  Seed: ANQRLNPMHQLLRHF
ANQRLNPLHKLLNHF

SEQ ID NO: 214246 - protein, 15 aa, Artificial Sequence
  Description of Artificial Sequence: Synthetic peptide
  Seed: ANQRLNPMHQLLRHF
ANQRLNPLHKLLPHF

SEQ ID NO: 214247 - protein, 15 aa, Artificial Sequence
  Description of Artificial Sequence: Synthetic peptide
  Seed: ANQRLNPMHQLLRHF
ANQRLNPLHKLLQHF

SEQ ID NO: 214248 - protein, 15 aa, Artificial Sequence
  Description of Artificial Sequence: Synthetic peptide
  Seed: ANQRLNPMHQLLRHF
ANQRLNPLHKLLRHF

SEQ ID NO: 214249 - protein, 15 aa, Artificial Sequence
  Description of Artificial Sequence: Synthetic peptide
  Seed: ANQRLNPMHQLLRHF
ANQRLNPLHKLLSHF

SEQ ID NO: 214250 - protein, 15 aa, Artificial Sequence
  Description of Artificial Sequence: Synthetic peptide
  Seed: ANQRLNPMHQLLRHF
ANQRLNPLHKLLTHF

SEQ ID NO: 214251 - protein, 15 aa, Artificial Sequence
  Description of Artificial Sequence: Synthetic peptide
  Seed: ANQRLNPMHQLLRHF
ANQRLNPLHKLLVHF

SEQ ID NO: 214252 - protein, 15 aa, Artificial Sequence
  Description of Artificial Sequence: Synthetic peptide
  Seed: ANQRLNPMHQLLRHF
ANQRLNPLHNLLAHF

SEQ ID NO: 214253 - protein, 15 aa, Artificial Sequence
  Description of Artificial Sequence: Synthetic peptide
  Seed: ANQRLNPMHQLLRHF
ANQRLNPLHNLLIHF

SEQ ID NO: 214254 - protein, 15 aa, Artificial Sequence
  Description of Artificial Sequence: Synthetic peptide
  Seed: ANQRLNPMHQLLRHF
ANQRLNPLHNLLLHF

SEQ ID NO: 214255 - protein, 15 aa, Artificial Sequence
  Description of Artificial Sequence: Synthetic peptide
  Seed: ANQRLNPMHQLLRHF
ANQRLNPLHNLLMHF

SEQ ID NO: 214256 - protein, 15 aa, Artificial Sequence
  Description of Artificial Sequence: Synthetic peptide
  Seed: ANQRLNPMHQLLRHF
ANQRLNPLHNLLSHF

SEQ ID NO: 214257 - protein, 15 aa, Artificial Sequence
  Description of Artificial Sequence: Synthetic peptide
  Seed: ANQRLNPMHQLLRHF
ANQRLNPLHNLLTHF

SEQ ID NO: 214258 - protein, 15 aa, Artificial Sequence
  Description of Artificial Sequence: Synthetic peptide
  Seed: ANQRLNPMHQLLRHF
ANQRLNPLHNLLVHF

SEQ ID NO: 214259 - protein, 15 aa, Artificial Sequence
  Description of Artificial Sequence: Synthetic peptide
  Seed: ANQRLNPMHQLLRHF
ANQRLNPLHPLLAHF

SEQ ID NO: 214260 - protein, 15 aa, Artificial Sequence
  Description of Artificial Sequence: Synthetic peptide
  Seed: ANQRLNPMHQLLRHF
ANQRLNPLHPLLGHF

SEQ ID NO: 214261 - protein, 15 aa, Artificial Sequence
  Description of Artificial Sequence: Synthetic peptide
  Seed: ANQRLNPMHQLLRHF
ANQRLNPLHPLLIHF

SEQ ID NO: 214262 - protein, 15 aa, Artificial Sequence
  Description of Artificial Sequence: Synthetic peptide
  Seed: ANQRLNPMHQLLRHF
ANQRLNPLHPLLLHF

SEQ ID NO: 214263 - protein, 15 aa, Artificial Sequence
  Description of Artificial Sequence: Synthetic peptide
  Seed: ANQRLNPMHQLLRHF
ANQRLNPLHPLLMHF

SEQ ID NO: 214264 - protein, 15 aa, Artificial Sequence
  Description of Artificial Sequence: Synthetic peptide
  Seed: ANQRLNPMHQLLRHF
ANQRLNPLHPLLNHF

SEQ ID NO: 214265 - protein, 15 aa, Artificial Sequence
  Description of Artificial Sequence: Synthetic peptide
  Seed: ANQRLNPMHQLLRHF
ANQRLNPLHPLLSHF

SEQ ID NO: 214266 - protein, 15 aa, Artificial Sequence
  Description of Artificial Sequence: Synthetic peptide
  Seed: ANQRLNPMHQLLRHF
ANQRLNPLHPLLTHF

SEQ ID NO: 214267 - protein, 15 aa, Artificial Sequence
  Description of Artificial Sequence: Synthetic peptide
  Seed: ANQRLNPMHQLLRHF
ANQRLNPLHPLLVHF

SEQ ID NO: 214268 - protein, 15 aa, Artificial Sequence
  Description of Artificial Sequence: Synthetic peptide
  Seed: ANQRLNPMHQLLRHF
ANQRLNPLHRLLAHF

SEQ ID NO: 214269 - protein, 15 aa, Artificial Sequence
  Description of Artificial Sequence: Synthetic peptide
  Seed: ANQRLNPMHQLLRHF
ANQRLNPLHRLLFHF

SEQ ID NO: 214270 - protein, 15 aa, Artificial Sequence
  Description of Artificial Sequence: Synthetic peptide
  Seed: ANQRLNPMHQLLRHF
ANQRLNPLHRLLGHF

SEQ ID NO: 214271 - protein, 15 aa, Artificial Sequence
  Description of Artificial Sequence: Synthetic peptide
  Seed: ANQRLNPMHQLLRHF
ANQRLNPLHRLLHHF

SEQ ID NO: 214272 - protein, 15 aa, Artificial Sequence
  Description of Artificial Sequence: Synthetic peptide
  Seed: ANQRLNPMHQLLRHF
ANQRLNPLHRLLIHF

SEQ ID NO: 214273 - protein, 15 aa, Artificial Sequence
  Description of Artificial Sequence: Synthetic peptide
  Seed: ANQRLNPMHQLLRHF
ANQRLNPLHRLLKHF

SEQ ID NO: 214274 - protein, 15 aa, Artificial Sequence
  Description of Artificial Sequence: Synthetic peptide
  Seed: ANQRLNPMHQLLRHF
ANQRLNPLHRLLLHF

SEQ ID NO: 214275 - protein, 15 aa, Artificial Sequence
  Description of Artificial Sequence: Synthetic peptide
  Seed: ANQRLNPMHQLLRHF
ANQRLNPLHRLLMHF

SEQ ID NO: 214276 - protein, 15 aa, Artificial Sequence
  Description of Artificial Sequence: Synthetic peptide
  Seed: ANQRLNPMHQLLRHF
ANQRLNPLHRLLNHF

SEQ ID NO: 214277 - protein, 15 aa, Artificial Sequence
  Description of Artificial Sequence: Synthetic peptide
  Seed: ANQRLNPMHQLLRHF
ANQRLNPLHRLLPHF

SEQ ID NO: 214278 - protein, 15 aa, Artificial Sequence
  Description of Artificial Sequence: Synthetic peptide
  Seed: ANQRLNPMHQLLRHF
ANQRLNPLHRLLQHF

SEQ ID NO: 214279 - protein, 15 aa, Artificial Sequence
  Description of Artificial Sequence: Synthetic peptide
  Seed: ANQRLNPMHQLLRHF
ANQRLNPLHRLLRHF

SEQ ID NO: 214280 - protein, 15 aa, Artificial Sequence
  Description of Artificial Sequence: Synthetic peptide
  Seed: ANQRLNPMHQLLRHF
ANQRLNPLHRLLSHF

SEQ ID NO: 214281 - protein, 15 aa, Artificial Sequence
  Description of Artificial Sequence: Synthetic peptide
  Seed: ANQRLNPMHQLLRHF
ANQRLNPLHRLLTHF

SEQ ID NO: 214282 - protein, 15 aa, Artificial Sequence
  Description of Artificial Sequence: Synthetic peptide
  Seed: ANQRLNPMHQLLRHF
ANQRLNPLHRLLVHF

SEQ ID NO: 214283 - protein, 15 aa, Artificial Sequence
  Description of Artificial Sequence: Synthetic peptide
  Seed: ANQRLNPMHQLLRHF
ANQRLNPLHRLLYHF

SEQ ID NO: 214284 - protein, 15 aa, Artificial Sequence
  Description of Artificial Sequence: Synthetic peptide
  Seed: ANQRLNPMHQLLRHF
ANQRLNPLHSLLAHF

SEQ ID NO: 214285 - protein, 15 aa, Artificial Sequence
  Description of Artificial Sequence: Synthetic peptide
  Seed: ANQRLNPMHQLLRHF
ANQRLNPLHSLLCHF

SEQ ID NO: 214286 - protein, 15 aa, Artificial Sequence
  Description of Artificial Sequence: Synthetic peptide
  Seed: ANQRLNPMHQLLRHF
ANQRLNPLHSLLGHF

SEQ ID NO: 214287 - protein, 15 aa, Artificial Sequence
  Description of Artificial Sequence: Synthetic peptide
  Seed: ANQRLNPMHQLLRHF
ANQRLNPLHSLLIHF

SEQ ID NO: 214288 - protein, 15 aa, Artificial Sequence
  Description of Artificial Sequence: Synthetic peptide
  Seed: ANQRLNPMHQLLRHF
ANQRLNPLHSLLLHF

SEQ ID NO: 214289 - protein, 15 aa, Artificial Sequence
  Description of Artificial Sequence: Synthetic peptide
  Seed: ANQRLNPMHQLLRHF
ANQRLNPLHSLLMHF

SEQ ID NO: 214290 - protein, 15 aa, Artificial Sequence
  Description of Artificial Sequence: Synthetic peptide
  Seed: ANQRLNPMHQLLRHF
ANQRLNPLHSLLNHF

SEQ ID NO: 214291 - protein, 15 aa, Artificial Sequence
  Description of Artificial Sequence: Synthetic peptide
  Seed: ANQRLNPMHQLLRHF
ANQRLNPLHSLLSHF

SEQ ID NO: 214292 - protein, 15 aa, Artificial Sequence
  Description of Artificial Sequence: Synthetic peptide
  Seed: ANQRLNPMHQLLRHF
ANQRLNPLHSLLTHF

SEQ ID NO: 214293 - protein, 15 aa, Artificial Sequence
  Description of Artificial Sequence: Synthetic peptide
  Seed: ANQRLNPMHQLLRHF
ANQRLNPLHSLLVHF

SEQ ID NO: 214294 - protein, 15 aa, Artificial Sequence
  Description of Artificial Sequence: Synthetic peptide
  Seed: ANQRLNPMHQLLRHF
ANQRLNPLHTLLAHF

SEQ ID NO: 214295 - protein, 15 aa, Artificial Sequence
  Description of Artificial Sequence: Synthetic peptide
  Seed: ANQRLNPMHQLLRHF
ANQRLNPLHTLLIHF

SEQ ID NO: 214296 - protein, 15 aa, Artificial Sequence
  Description of Artificial Sequence: Synthetic peptide
  Seed: ANQRLNPMHQLLRHF
ANQRLNPLHTLLLHF

SEQ ID NO: 214297 - protein, 15 aa, Artificial Sequence
  Description of Artificial Sequence: Synthetic peptide
  Seed: ANQRLNPMHQLLRHF
ANQRLNPLHTLLMHF

SEQ ID NO: 214298 - protein, 15 aa, Artificial Sequence
  Description of Artificial Sequence: Synthetic peptide
  Seed: ANQRLNPMHQLLRHF
ANQRLNPLHTLLNHF

SEQ ID NO: 214299 - protein, 15 aa, Artificial Sequence
  Description of Artificial Sequence: Synthetic peptide
  Seed: ANQRLNPMHQLLRHF
ANQRLNPLHTLLSHF

SEQ ID NO: 214300 - protein, 15 aa, Artificial Sequence
  Description of Artificial Sequence: Synthetic peptide
  Seed: ANQRLNPMHQLLRHF
ANQRLNPLHTLLTHF

SEQ ID NO: 214301 - protein, 15 aa, Artificial Sequence
  Description of Artificial Sequence: Synthetic peptide
  Seed: ANQRLNPMHQLLRHF
ANQRLNPLHTLLVHF

SEQ ID NO: 214302 - protein, 15 aa, Artificial Sequence
  Description of Artificial Sequence: Synthetic peptide
  Seed: ANQRLNPMHQLLRHF
ANQRLNPLHVLLAHF

SEQ ID NO: 214303 - protein, 15 aa, Artificial Sequence
  Description of Artificial Sequence: Synthetic peptide
  Seed: ANQRLNPMHQLLRHF
ANQRLNPLHVLLIHF

SEQ ID NO: 214304 - protein, 15 aa, Artificial Sequence
  Description of Artificial Sequence: Synthetic peptide
  Seed: ANQRLNPMHQLLRHF
ANQRLNPLHVLLLHF

SEQ ID NO: 214305 - protein, 15 aa, Artificial Sequence
  Description of Artificial Sequence: Synthetic peptide
  Seed: ANQRLNPMHQLLRHF
ANQRLNPLHVLLNHF

SEQ ID NO: 214306 - protein, 15 aa, Artificial Sequence
  Description of Artificial Sequence: Synthetic peptide
  Seed: ANQRLNPMHQLLRHF
ANQRLNPLHVLLSHF

SEQ ID NO: 214307 - protein, 15 aa, Artificial Sequence
  Description of Artificial Sequence: Synthetic peptide
  Seed: ANQRLNPMHQLLRHF
ANQRLNPLHVLLTHF

SEQ ID NO: 214308 - protein, 15 aa, Artificial Sequence
  Description of Artificial Sequence: Synthetic peptide
  Seed: ANQRLNPMHQLLRHF
ANQRLNPLHVLLVHF

SEQ ID NO: 214309 - protein, 15 aa, Artificial Sequence
  Description of Artificial Sequence: Synthetic peptide
  Seed: ANQRLNPMHQLLRHF
ANQRLNPLHWLLLHF

SEQ ID NO: 214310 - protein, 15 aa, Artificial Sequence
  Description of Artificial Sequence: Synthetic peptide
  Seed: ANQRLNPMHQLLRHF
ANQRLNPLHYLLLHF

SEQ ID NO: 214311 - protein, 15 aa, Artificial Sequence
  Description of Artificial Sequence: Synthetic peptide
  Seed: ANQRLNPMHQLLRHF
ANQRLNPMHALLAHF

SEQ ID NO: 214312 - protein, 15 aa, Artificial Sequence
  Description of Artificial Sequence: Synthetic peptide
  Seed: ANQRLNPMHQLLRHF
ANQRLNPMHALLCHF

SEQ ID NO: 214313 - protein, 15 aa, Artificial Sequence
  Description of Artificial Sequence: Synthetic peptide
  Seed: ANQRLNPMHQLLRHF
ANQRLNPMHALLFHF

SEQ ID NO: 214314 - protein, 15 aa, Artificial Sequence
  Description of Artificial Sequence: Synthetic peptide
  Seed: ANQRLNPMHQLLRHF
ANQRLNPMHALLGHF

SEQ ID NO: 214315 - protein, 15 aa, Artificial Sequence
  Description of Artificial Sequence: Synthetic peptide
  Seed: ANQRLNPMHQLLRHF
ANQRLNPMHALLHHF

SEQ ID NO: 214316 - protein, 15 aa, Artificial Sequence
  Description of Artificial Sequence: Synthetic peptide
  Seed: ANQRLNPMHQLLRHF
ANQRLNPMHALLIHF

SEQ ID NO: 214317 - protein, 15 aa, Artificial Sequence
  Description of Artificial Sequence: Synthetic peptide
  Seed: ANQRLNPMHQLLRHF
ANQRLNPMHALLLHF

SEQ ID NO: 214318 - protein, 15 aa, Artificial Sequence
  Description of Artificial Sequence: Synthetic peptide
  Seed: ANQRLNPMHQLLRHF
ANQRLNPMHALLMHF

SEQ ID NO: 214319 - protein, 15 aa, Artificial Sequence
  Description of Artificial Sequence: Synthetic peptide
  Seed: ANQRLNPMHQLLRHF
ANQRLNPMHALLNHF

SEQ ID NO: 214320 - protein, 15 aa, Artificial Sequence
  Description of Artificial Sequence: Synthetic peptide
  Seed: ANQRLNPMHQLLRHF
ANQRLNPMHALLSHF

SEQ ID NO: 214321 - protein, 15 aa, Artificial Sequence
  Description of Artificial Sequence: Synthetic peptide
  Seed: ANQRLNPMHQLLRHF
ANQRLNPMHALLTHF

SEQ ID NO: 214322 - protein, 15 aa, Artificial Sequence
  Description of Artificial Sequence: Synthetic peptide
  Seed: ANQRLNPMHQLLRHF
ANQRLNPMHALLVHF

SEQ ID NO: 214323 - protein, 15 aa, Artificial Sequence
  Description of Artificial Sequence: Synthetic peptide
  Seed: ANQRLNPMHQLLRHF
ANQRLNPMHFLLFHF

SEQ ID NO: 214324 - protein, 15 aa, Artificial Sequence
  Description of Artificial Sequence: Synthetic peptide
  Seed: ANQRLNPMHQLLRHF
ANQRLNPMHFLLIHF

SEQ ID NO: 214325 - protein, 15 aa, Artificial Sequence
  Description of Artificial Sequence: Synthetic peptide
  Seed: ANQRLNPMHQLLRHF
ANQRLNPMHFLLLHF

SEQ ID NO: 214326 - protein, 15 aa, Artificial Sequence
  Description of Artificial Sequence: Synthetic peptide
  Seed: ANQRLNPMHQLLRHF
ANQRLNPMHFLLMHF

SEQ ID NO: 214327 - protein, 15 aa, Artificial Sequence
  Description of Artificial Sequence: Synthetic peptide
  Seed: ANQRLNPMHQLLRHF
ANQRLNPMHFLLVHF

SEQ ID NO: 214328 - protein, 15 aa, Artificial Sequence
  Description of Artificial Sequence: Synthetic peptide
  Seed: ANQRLNPMHQLLRHF
ANQRLNPMHGLLAHF

SEQ ID NO: 214329 - protein, 15 aa, Artificial Sequence
  Description of Artificial Sequence: Synthetic peptide
  Seed: ANQRLNPMHQLLRHF
ANQRLNPMHGLLCHF

SEQ ID NO: 214330 - protein, 15 aa, Artificial Sequence
  Description of Artificial Sequence: Synthetic peptide
  Seed: ANQRLNPMHQLLRHF
ANQRLNPMHGLLGHF

SEQ ID NO: 214331 - protein, 15 aa, Artificial Sequence
  Description of Artificial Sequence: Synthetic peptide
  Seed: ANQRLNPMHQLLRHF
ANQRLNPMHGLLHHF

SEQ ID NO: 214332 - protein, 15 aa, Artificial Sequence
  Description of Artificial Sequence: Synthetic peptide
  Seed: ANQRLNPMHQLLRHF
ANQRLNPMHGLLIHF

SEQ ID NO: 214333 - protein, 15 aa, Artificial Sequence
  Description of Artificial Sequence: Synthetic peptide
  Seed: ANQRLNPMHQLLRHF
ANQRLNPMHGLLLHF

SEQ ID NO: 214334 - protein, 15 aa, Artificial Sequence
  Description of Artificial Sequence: Synthetic peptide
  Seed: ANQRLNPMHQLLRHF
ANQRLNPMHGLLMHF

SEQ ID NO: 214335 - protein, 15 aa, Artificial Sequence
  Description of Artificial Sequence: Synthetic peptide
  Seed: ANQRLNPMHQLLRHF
ANQRLNPMHGLLNHF

SEQ ID NO: 214336 - protein, 15 aa, Artificial Sequence
  Description of Artificial Sequence: Synthetic peptide
  Seed: ANQRLNPMHQLLRHF
ANQRLNPMHGLLSHF

SEQ ID NO: 214337 - protein, 15 aa, Artificial Sequence
  Description of Artificial Sequence: Synthetic peptide
  Seed: ANQRLNPMHQLLRHF
ANQRLNPMHGLLTHF

SEQ ID NO: 214338 - protein, 15 aa, Artificial Sequence
  Description of Artificial Sequence: Synthetic peptide
  Seed: ANQRLNPMHQLLRHF
ANQRLNPMHGLLVHF

SEQ ID NO: 214339 - protein, 15 aa, Artificial Sequence
  Description of Artificial Sequence: Synthetic peptide
  Seed: ANQRLNPMHQLLRHF
ANQRLNPMHILLAHF

SEQ ID NO: 214340 - protein, 15 aa, Artificial Sequence
  Description of Artificial Sequence: Synthetic peptide
  Seed: ANQRLNPMHQLLRHF
ANQRLNPMHILLVHF

SEQ ID NO: 214341 - protein, 15 aa, Artificial Sequence
  Description of Artificial Sequence: Synthetic peptide
  Seed: ANQRLNPMHQLLRHF
ANQRLNPMHKLLAHF

SEQ ID NO: 214342 - protein, 15 aa, Artificial Sequence
  Description of Artificial Sequence: Synthetic peptide
  Seed: ANQRLNPMHQLLRHF
ANQRLNPMHKLLGHF

SEQ ID NO: 214343 - protein, 15 aa, Artificial Sequence
  Description of Artificial Sequence: Synthetic peptide
  Seed: ANQRLNPMHQLLRHF
ANQRLNPMHKLLHHF

SEQ ID NO: 214344 - protein, 15 aa, Artificial Sequence
  Description of Artificial Sequence: Synthetic peptide
  Seed: ANQRLNPMHQLLRHF
ANQRLNPMHKLLIHF

SEQ ID NO: 214345 - protein, 15 aa, Artificial Sequence
  Description of Artificial Sequence: Synthetic peptide
  Seed: ANQRLNPMHQLLRHF
ANQRLNPMHKLLKHF

SEQ ID NO: 214346 - protein, 15 aa, Artificial Sequence
  Description of Artificial Sequence: Synthetic peptide
  Seed: ANQRLNPMHQLLRHF
ANQRLNPMHKLLLHF

SEQ ID NO: 214347 - protein, 15 aa, Artificial Sequence
  Description of Artificial Sequence: Synthetic peptide
  Seed: ANQRLNPMHQLLRHF
ANQRLNPMHKLLMHF

SEQ ID NO: 214348 - protein, 15 aa, Artificial Sequence
  Description of Artificial Sequence: Synthetic peptide
  Seed: ANQRLNPMHQLLRHF
ANQRLNPMHKLLNHF

SEQ ID NO: 214349 - protein, 15 aa, Artificial Sequence
  Description of Artificial Sequence: Synthetic peptide
  Seed: ANQRLNPMHQLLRHF
ANQRLNPMHKLLPHF

SEQ ID NO: 214350 - protein, 15 aa, Artificial Sequence
  Description of Artificial Sequence: Synthetic peptide
  Seed: ANQRLNPMHQLLRHF
ANQRLNPMHKLLQHF

SEQ ID NO: 214351 - protein, 15 aa, Artificial Sequence
  Description of Artificial Sequence: Synthetic peptide
  Seed: ANQRLNPMHQLLRHF
ANQRLNPMHKLLRHF

SEQ ID NO: 214352 - protein, 15 aa, Artificial Sequence
  Description of Artificial Sequence: Synthetic peptide
  Seed: ANQRLNPMHQLLRHF
ANQRLNPMHKLLSHF

SEQ ID NO: 214353 - protein, 15 aa, Artificial Sequence
  Description of Artificial Sequence: Synthetic peptide
  Seed: ANQRLNPMHQLLRHF
ANQRLNPMHKLLTHF

SEQ ID NO: 214354 - protein, 15 aa, Artificial Sequence
  Description of Artificial Sequence: Synthetic peptide
  Seed: ANQRLNPMHQLLRHF
ANQRLNPMHKLLVHF

SEQ ID NO: 214355 - protein, 15 aa, Artificial Sequence
  Description of Artificial Sequence: Synthetic peptide
  Seed: ANQRLNPMHQLLRHF
ANQRLNPMHKLLYHF

SEQ ID NO: 214356 - protein, 15 aa, Artificial Sequence
  Description of Artificial Sequence: Synthetic peptide
  Seed: ANQRLNPMHQLLRHF
ANQRLNPMHNLLAHF

SEQ ID NO: 214357 - protein, 15 aa, Artificial Sequence
  Description of Artificial Sequence: Synthetic peptide
  Seed: ANQRLNPMHQLLRHF
ANQRLNPMHNLLIHF

SEQ ID NO: 214358 - protein, 15 aa, Artificial Sequence
  Description of Artificial Sequence: Synthetic peptide
  Seed: ANQRLNPMHQLLRHF
ANQRLNPMHNLLLHF

SEQ ID NO: 214359 - protein, 15 aa, Artificial Sequence
  Description of Artificial Sequence: Synthetic peptide
  Seed: ANQRLNPMHQLLRHF
ANQRLNPMHNLLMHF

SEQ ID NO: 214360 - protein, 15 aa, Artificial Sequence
  Description of Artificial Sequence: Synthetic peptide
  Seed: ANQRLNPMHQLLRHF
ANQRLNPMHNLLSHF

SEQ ID NO: 214361 - protein, 15 aa, Artificial Sequence
  Description of Artificial Sequence: Synthetic peptide
  Seed: ANQRLNPMHQLLRHF
ANQRLNPMHNLLTHF

SEQ ID NO: 214362 - protein, 15 aa, Artificial Sequence
  Description of Artificial Sequence: Synthetic peptide
  Seed: ANQRLNPMHQLLRHF
ANQRLNPMHNLLVHF

SEQ ID NO: 214363 - protein, 15 aa, Artificial Sequence
  Description of Artificial Sequence: Synthetic peptide
  Seed: ANQRLNPMHQLLRHF
ANQRLNPMHPLLAHF

SEQ ID NO: 214364 - protein, 15 aa, Artificial Sequence
  Description of Artificial Sequence: Synthetic peptide
  Seed: ANQRLNPMHQLLRHF
ANQRLNPMHPLLIHF

SEQ ID NO: 214365 - protein, 15 aa, Artificial Sequence
  Description of Artificial Sequence: Synthetic peptide
  Seed: ANQRLNPMHQLLRHF
ANQRLNPMHPLLLHF

SEQ ID NO: 214366 - protein, 15 aa, Artificial Sequence
  Description of Artificial Sequence: Synthetic peptide
  Seed: ANQRLNPMHQLLRHF
ANQRLNPMHPLLMHF

SEQ ID NO: 214367 - protein, 15 aa, Artificial Sequence
  Description of Artificial Sequence: Synthetic peptide
  Seed: ANQRLNPMHQLLRHF
ANQRLNPMHPLLNHF

SEQ ID NO: 214368 - protein, 15 aa, Artificial Sequence
  Description of Artificial Sequence: Synthetic peptide
  Seed: ANQRLNPMHQLLRHF
ANQRLNPMHPLLSHF

SEQ ID NO: 214369 - protein, 15 aa, Artificial Sequence
  Description of Artificial Sequence: Synthetic peptide
  Seed: ANQRLNPMHQLLRHF
ANQRLNPMHPLLTHF

SEQ ID NO: 214370 - protein, 15 aa, Artificial Sequence
  Description of Artificial Sequence: Synthetic peptide
  Seed: ANQRLNPMHQLLRHF
ANQRLNPMHPLLVHF

SEQ ID NO: 214371 - protein, 15 aa, Artificial Sequence
  Description of Artificial Sequence: Synthetic peptide
  Seed: ANQRLNPMHQLLRHF
ANQRLNPMHRLLAHF

SEQ ID NO: 214372 - protein, 15 aa, Artificial Sequence
  Description of Artificial Sequence: Synthetic peptide
  Seed: ANQRLNPMHQLLRHF
ANQRLNPMHRLLFHF

SEQ ID NO: 214373 - protein, 15 aa, Artificial Sequence
  Description of Artificial Sequence: Synthetic peptide
  Seed: ANQRLNPMHQLLRHF
ANQRLNPMHRLLGHF

SEQ ID NO: 214374 - protein, 15 aa, Artificial Sequence
  Description of Artificial Sequence: Synthetic peptide
  Seed: ANQRLNPMHQLLRHF
ANQRLNPMHRLLHHF

SEQ ID NO: 214375 - protein, 15 aa, Artificial Sequence
  Description of Artificial Sequence: Synthetic peptide
  Seed: ANQRLNPMHQLLRHF
ANQRLNPMHRLLIHF

SEQ ID NO: 214376 - protein, 15 aa, Artificial Sequence
  Description of Artificial Sequence: Synthetic peptide
  Seed: ANQRLNPMHQLLRHF
ANQRLNPMHRLLKHF

SEQ ID NO: 214377 - protein, 15 aa, Artificial Sequence
  Description of Artificial Sequence: Synthetic peptide
  Seed: ANQRLNPMHQLLRHF
ANQRLNPMHRLLLHF

SEQ ID NO: 214378 - protein, 15 aa, Artificial Sequence
  Description of Artificial Sequence: Synthetic peptide
  Seed: ANQRLNPMHQLLRHF
ANQRLNPMHRLLMHF

SEQ ID NO: 214379 - protein, 15 aa, Artificial Sequence
  Description of Artificial Sequence: Synthetic peptide
  Seed: ANQRLNPMHQLLRHF
ANQRLNPMHRLLNHF

SEQ ID NO: 214380 - protein, 15 aa, Artificial Sequence
  Description of Artificial Sequence: Synthetic peptide
  Seed: ANQRLNPMHQLLRHF
ANQRLNPMHRLLPHF

SEQ ID NO: 214381 - protein, 15 aa, Artificial Sequence
  Description of Artificial Sequence: Synthetic peptide
  Seed: ANQRLNPMHQLLRHF
ANQRLNPMHRLLQHF

SEQ ID NO: 214382 - protein, 15 aa, Artificial Sequence
  Description of Artificial Sequence: Synthetic peptide
  Seed: ANQRLNPMHQLLRHF
ANQRLNPMHRLLRHF

SEQ ID NO: 214383 - protein, 15 aa, Artificial Sequence
  Description of Artificial Sequence: Synthetic peptide
  Seed: ANQRLNPMHQLLRHF
ANQRLNPMHRLLSHF

SEQ ID NO: 214384 - protein, 15 aa, Artificial Sequence
  Description of Artificial Sequence: Synthetic peptide
  Seed: ANQRLNPMHQLLRHF
ANQRLNPMHRLLTHF

SEQ ID NO: 214385 - protein, 15 aa, Artificial Sequence
  Description of Artificial Sequence: Synthetic peptide
  Seed: ANQRLNPMHQLLRHF
ANQRLNPMHRLLVHF

SEQ ID NO: 214386 - protein, 15 aa, Artificial Sequence
  Description of Artificial Sequence: Synthetic peptide
  Seed: ANQRLNPMHQLLRHF
ANQRLNPMHRLLYHF

SEQ ID NO: 214387 - protein, 15 aa, Artificial Sequence
  Description of Artificial Sequence: Synthetic peptide
  Seed: ANQRLNPMHQLLRHF
ANQRLNPMHSLLAHF

SEQ ID NO: 214388 - protein, 15 aa, Artificial Sequence
  Description of Artificial Sequence: Synthetic peptide
  Seed: ANQRLNPMHQLLRHF
ANQRLNPMHSLLCHF

SEQ ID NO: 214389 - protein, 15 aa, Artificial Sequence
  Description of Artificial Sequence: Synthetic peptide
  Seed: ANQRLNPMHQLLRHF
ANQRLNPMHSLLGHF

SEQ ID NO: 214390 - protein, 15 aa, Artificial Sequence
  Description of Artificial Sequence: Synthetic peptide
  Seed: ANQRLNPMHQLLRHF
ANQRLNPMHSLLIHF

SEQ ID NO: 214391 - protein, 15 aa, Artificial Sequence
  Description of Artificial Sequence: Synthetic peptide
  Seed: ANQRLNPMHQLLRHF
ANQRLNPMHSLLLHF

SEQ ID NO: 214392 - protein, 15 aa, Artificial Sequence
  Description of Artificial Sequence: Synthetic peptide
  Seed: ANQRLNPMHQLLRHF
ANQRLNPMHSLLMHF

SEQ ID NO: 214393 - protein, 15 aa, Artificial Sequence
  Description of Artificial Sequence: Synthetic peptide
  Seed: ANQRLNPMHQLLRHF
ANQRLNPMHSLLNHF

SEQ ID NO: 214394 - protein, 15 aa, Artificial Sequence
  Description of Artificial Sequence: Synthetic peptide
  Seed: ANQRLNPMHQLLRHF
ANQRLNPMHSLLSHF

SEQ ID NO: 214395 - protein, 15 aa, Artificial Sequence
  Description of Artificial Sequence: Synthetic peptide
  Seed: ANQRLNPMHQLLRHF
ANQRLNPMHSLLTHF

SEQ ID NO: 214396 - protein, 15 aa, Artificial Sequence
  Description of Artificial Sequence: Synthetic peptide
  Seed: ANQRLNPMHQLLRHF
ANQRLNPMHSLLVHF

SEQ ID NO: 214397 - protein, 15 aa, Artificial Sequence
  Description of Artificial Sequence: Synthetic peptide
  Seed: ANQRLNPMHQLLRHF
ANQRLNPMHTLLAHF

SEQ ID NO: 214398 - protein, 15 aa, Artificial Sequence
  Description of Artificial Sequence: Synthetic peptide
  Seed: ANQRLNPMHQLLRHF
ANQRLNPMHTLLIHF

SEQ ID NO: 214399 - protein, 15 aa, Artificial Sequence
  Description of Artificial Sequence: Synthetic peptide
  Seed: ANQRLNPMHQLLRHF
ANQRLNPMHTLLLHF

SEQ ID NO: 214400 - protein, 15 aa, Artificial Sequence
  Description of Artificial Sequence: Synthetic peptide
  Seed: ANQRLNPMHQLLRHF
ANQRLNPMHTLLMHF

SEQ ID NO: 214401 - protein, 15 aa, Artificial Sequence
  Description of Artificial Sequence: Synthetic peptide
  Seed: ANQRLNPMHQLLRHF
ANQRLNPMHTLLNHF

SEQ ID NO: 214402 - protein, 15 aa, Artificial Sequence
  Description of Artificial Sequence: Synthetic peptide
  Seed: ANQRLNPMHQLLRHF
ANQRLNPMHTLLSHF

SEQ ID NO: 214403 - protein, 15 aa, Artificial Sequence
  Description of Artificial Sequence: Synthetic peptide
  Seed: ANQRLNPMHQLLRHF
ANQRLNPMHTLLTHF

SEQ ID NO: 214404 - protein, 15 aa, Artificial Sequence
  Description of Artificial Sequence: Synthetic peptide
  Seed: ANQRLNPMHQLLRHF
ANQRLNPMHTLLVHF

SEQ ID NO: 214405 - protein, 15 aa, Artificial Sequence
  Description of Artificial Sequence: Synthetic peptide
  Seed: ANQRLNPMHQLLRHF
ANQRLNPMHVLLAHF

SEQ ID NO: 214406 - protein, 15 aa, Artificial Sequence
  Description of Artificial Sequence: Synthetic peptide
  Seed: ANQRLNPMHQLLRHF
ANQRLNPMHVLLIHF

SEQ ID NO: 214407 - protein, 15 aa, Artificial Sequence
  Description of Artificial Sequence: Synthetic peptide
  Seed: ANQRLNPMHQLLRHF
ANQRLNPMHVLLLHF

SEQ ID NO: 214408 - protein, 15 aa, Artificial Sequence
  Description of Artificial Sequence: Synthetic peptide
  Seed: ANQRLNPMHQLLRHF
ANQRLNPMHVLLNHF

SEQ ID NO: 214409 - protein, 15 aa, Artificial Sequence
  Description of Artificial Sequence: Synthetic peptide
  Seed: ANQRLNPMHQLLRHF
ANQRLNPMHVLLSHF

SEQ ID NO: 214410 - protein, 15 aa, Artificial Sequence
  Description of Artificial Sequence: Synthetic peptide
  Seed: ANQRLNPMHQLLRHF
ANQRLNPMHVLLTHF

SEQ ID NO: 214411 - protein, 15 aa, Artificial Sequence
  Description of Artificial Sequence: Synthetic peptide
  Seed: ANQRLNPMHQLLRHF
ANQRLNPMHVLLVHF

SEQ ID NO: 214412 - protein, 15 aa, Artificial Sequence
  Description of Artificial Sequence: Synthetic peptide
  Seed: ANQRLNPMHQLLRHF
ANQRLNPNHALLAHF

SEQ ID NO: 214413 - protein, 15 aa, Artificial Sequence
  Description of Artificial Sequence: Synthetic peptide
  Seed: ANQRLNPMHQLLRHF
ANQRLNPNHALLFHF

SEQ ID NO: 214414 - protein, 15 aa, Artificial Sequence
  Description of Artificial Sequence: Synthetic peptide
  Seed: ANQRLNPMHQLLRHF
ANQRLNPNHALLIHF

SEQ ID NO: 214415 - protein, 15 aa, Artificial Sequence
  Description of Artificial Sequence: Synthetic peptide
  Seed: ANQRLNPMHQLLRHF
ANQRLNPNHALLLHF

SEQ ID NO: 214416 - protein, 15 aa, Artificial Sequence
  Description of Artificial Sequence: Synthetic peptide
  Seed: ANQRLNPMHQLLRHF
ANQRLNPNHALLMHF

SEQ ID NO: 214417 - protein, 15 aa, Artificial Sequence
  Description of Artificial Sequence: Synthetic peptide
  Seed: ANQRLNPMHQLLRHF
ANQRLNPNHALLSHF

SEQ ID NO: 214418 - protein, 15 aa, Artificial Sequence
  Description of Artificial Sequence: Synthetic peptide
  Seed: ANQRLNPMHQLLRHF
ANQRLNPNHALLTHF

SEQ ID NO: 214419 - protein, 15 aa, Artificial Sequence
  Description of Artificial Sequence: Synthetic peptide
  Seed: ANQRLNPMHQLLRHF
ANQRLNPNHALLVHF

SEQ ID NO: 214420 - protein, 15 aa, Artificial Sequence
  Description of Artificial Sequence: Synthetic peptide
  Seed: ANQRLNPMHQLLRHF
ANQRLNPNHALLWHF

SEQ ID NO: 214421 - protein, 15 aa, Artificial Sequence
  Description of Artificial Sequence: Synthetic peptide
  Seed: ANQRLNPMHQLLRHF
ANQRLNPNHALLYHF

SEQ ID NO: 214422 - protein, 15 aa, Artificial Sequence
  Description of Artificial Sequence: Synthetic peptide
  Seed: ANQRLNPMHQLLRHF
ANQRLNPNHGLLAHF

SEQ ID NO: 214423 - protein, 15 aa, Artificial Sequence
  Description of Artificial Sequence: Synthetic peptide
  Seed: ANQRLNPMHQLLRHF
ANQRLNPNHGLLFHF

SEQ ID NO: 214424 - protein, 15 aa, Artificial Sequence
  Description of Artificial Sequence: Synthetic peptide
  Seed: ANQRLNPMHQLLRHF
ANQRLNPNHGLLIHF

SEQ ID NO: 214425 - protein, 15 aa, Artificial Sequence
  Description of Artificial Sequence: Synthetic peptide
  Seed: ANQRLNPMHQLLRHF
ANQRLNPNHGLLLHF

SEQ ID NO: 214426 - protein, 15 aa, Artificial Sequence
  Description of Artificial Sequence: Synthetic peptide
  Seed: ANQRLNPMHQLLRHF
ANQRLNPNHGLLMHF

SEQ ID NO: 214427 - protein, 15 aa, Artificial Sequence
  Description of Artificial Sequence: Synthetic peptide
  Seed: ANQRLNPMHQLLRHF
ANQRLNPNHGLLVHF

SEQ ID NO: 214428 - protein, 15 aa, Artificial Sequence
  Description of Artificial Sequence: Synthetic peptide
  Seed: ANQRLNPMHQLLRHF
ANQRLNPNHGLLYHF

SEQ ID NO: 214429 - protein, 15 aa, Artificial Sequence
  Description of Artificial Sequence: Synthetic peptide
  Seed: ANQRLNPMHQLLRHF
ANQRLNPNHHLLFHF

SEQ ID NO: 214430 - protein, 15 aa, Artificial Sequence
  Description of Artificial Sequence: Synthetic peptide
  Seed: ANQRLNPMHQLLRHF
ANQRLNPNHHLLIHF

SEQ ID NO: 214431 - protein, 15 aa, Artificial Sequence
  Description of Artificial Sequence: Synthetic peptide
  Seed: ANQRLNPMHQLLRHF
ANQRLNPNHHLLLHF

SEQ ID NO: 214432 - protein, 15 aa, Artificial Sequence
  Description of Artificial Sequence: Synthetic peptide
  Seed: ANQRLNPMHQLLRHF
ANQRLNPNHHLLVHF

SEQ ID NO: 214433 - protein, 15 aa, Artificial Sequence
  Description of Artificial Sequence: Synthetic peptide
  Seed: ANQRLNPMHQLLRHF
ANQRLNPNHILLAHF

SEQ ID NO: 214434 - protein, 15 aa, Artificial Sequence
  Description of Artificial Sequence: Synthetic peptide
  Seed: ANQRLNPMHQLLRHF
ANQRLNPNHILLFHF

SEQ ID NO: 214435 - protein, 15 aa, Artificial Sequence
  Description of Artificial Sequence: Synthetic peptide
  Seed: ANQRLNPMHQLLRHF
ANQRLNPNHILLIHF

SEQ ID NO: 214436 - protein, 15 aa, Artificial Sequence
  Description of Artificial Sequence: Synthetic peptide
  Seed: ANQRLNPMHQLLRHF
ANQRLNPNHILLLHF

SEQ ID NO: 214437 - protein, 15 aa, Artificial Sequence
  Description of Artificial Sequence: Synthetic peptide
  Seed: ANQRLNPMHQLLRHF
ANQRLNPNHILLMHF

SEQ ID NO: 214438 - protein, 15 aa, Artificial Sequence
  Description of Artificial Sequence: Synthetic peptide
  Seed: ANQRLNPMHQLLRHF
ANQRLNPNHILLSHF

SEQ ID NO: 214439 - protein, 15 aa, Artificial Sequence
  Description of Artificial Sequence: Synthetic peptide
  Seed: ANQRLNPMHQLLRHF
ANQRLNPNHILLTHF

SEQ ID NO: 214440 - protein, 15 aa, Artificial Sequence
  Description of Artificial Sequence: Synthetic peptide
  Seed: ANQRLNPMHQLLRHF
ANQRLNPNHILLVHF

SEQ ID NO: 214441 - protein, 15 aa, Artificial Sequence
  Description of Artificial Sequence: Synthetic peptide
  Seed: ANQRLNPMHQLLRHF
ANQRLNPNHILLYHF

SEQ ID NO: 214442 - protein, 15 aa, Artificial Sequence
  Description of Artificial Sequence: Synthetic peptide
  Seed: ANQRLNPMHQLLRHF
ANQRLNPNHLLLFHF

SEQ ID NO: 214443 - protein, 15 aa, Artificial Sequence
  Description of Artificial Sequence: Synthetic peptide
  Seed: ANQRLNPMHQLLRHF
ANQRLNPNHLLLIHF

SEQ ID NO: 214444 - protein, 15 aa, Artificial Sequence
  Description of Artificial Sequence: Synthetic peptide
  Seed: ANQRLNPMHQLLRHF
ANQRLNPNHLLLLHF

SEQ ID NO: 214445 - protein, 15 aa, Artificial Sequence
  Description of Artificial Sequence: Synthetic peptide
  Seed: ANQRLNPMHQLLRHF
ANQRLNPNHLLLMHF

SEQ ID NO: 214446 - protein, 15 aa, Artificial Sequence
  Description of Artificial Sequence: Synthetic peptide
  Seed: ANQRLNPMHQLLRHF
ANQRLNPNHLLLVHF

SEQ ID NO: 214447 - protein, 15 aa, Artificial Sequence
  Description of Artificial Sequence: Synthetic peptide
  Seed: ANQRLNPMHQLLRHF
ANQRLNPNHLLLYHF

SEQ ID NO: 214448 - protein, 15 aa, Artificial Sequence
  Description of Artificial Sequence: Synthetic peptide
  Seed: ANQRLNPMHQLLRHF
ANQRLNPNHMLLFHF

SEQ ID NO: 214449 - protein, 15 aa, Artificial Sequence
  Description of Artificial Sequence: Synthetic peptide
  Seed: ANQRLNPMHQLLRHF
ANQRLNPNHMLLIHF

SEQ ID NO: 214450 - protein, 15 aa, Artificial Sequence
  Description of Artificial Sequence: Synthetic peptide
  Seed: ANQRLNPMHQLLRHF
ANQRLNPNHMLLLHF

SEQ ID NO: 214451 - protein, 15 aa, Artificial Sequence
  Description of Artificial Sequence: Synthetic peptide
  Seed: ANQRLNPMHQLLRHF
ANQRLNPNHMLLMHF

SEQ ID NO: 214452 - protein, 15 aa, Artificial Sequence
  Description of Artificial Sequence: Synthetic peptide
  Seed: ANQRLNPMHQLLRHF
ANQRLNPNHMLLVHF

SEQ ID NO: 214453 - protein, 15 aa, Artificial Sequence
  Description of Artificial Sequence: Synthetic peptide
  Seed: ANQRLNPMHQLLRHF
ANQRLNPNHMLLYHF

SEQ ID NO: 214454 - protein, 15 aa, Artificial Sequence
  Description of Artificial Sequence: Synthetic peptide
  Seed: ANQRLNPMHQLLRHF
ANQRLNPNHNLLAHF

SEQ ID NO: 214455 - protein, 15 aa, Artificial Sequence
  Description of Artificial Sequence: Synthetic peptide
  Seed: ANQRLNPMHQLLRHF
ANQRLNPNHNLLFHF

SEQ ID NO: 214456 - protein, 15 aa, Artificial Sequence
  Description of Artificial Sequence: Synthetic peptide
  Seed: ANQRLNPMHQLLRHF
ANQRLNPNHNLLIHF

SEQ ID NO: 214457 - protein, 15 aa, Artificial Sequence
  Description of Artificial Sequence: Synthetic peptide
  Seed: ANQRLNPMHQLLRHF
ANQRLNPNHNLLLHF

SEQ ID NO: 214458 - protein, 15 aa, Artificial Sequence
  Description of Artificial Sequence: Synthetic peptide
  Seed: ANQRLNPMHQLLRHF
ANQRLNPNHNLLMHF

SEQ ID NO: 214459 - protein, 15 aa, Artificial Sequence
  Description of Artificial Sequence: Synthetic peptide
  Seed: ANQRLNPMHQLLRHF
ANQRLNPNHNLLSHF

SEQ ID NO: 214460 - protein, 15 aa, Artificial Sequence
  Description of Artificial Sequence: Synthetic peptide
  Seed: ANQRLNPMHQLLRHF
ANQRLNPNHNLLTHF

SEQ ID NO: 214461 - protein, 15 aa, Artificial Sequence
  Description of Artificial Sequence: Synthetic peptide
  Seed: ANQRLNPMHQLLRHF
ANQRLNPNHNLLVHF

SEQ ID NO: 214462 - protein, 15 aa, Artificial Sequence
  Description of Artificial Sequence: Synthetic peptide
  Seed: ANQRLNPMHQLLRHF
ANQRLNPNHNLLWHF

SEQ ID NO: 214463 - protein, 15 aa, Artificial Sequence
  Description of Artificial Sequence: Synthetic peptide
  Seed: ANQRLNPMHQLLRHF
ANQRLNPNHNLLYHF

SEQ ID NO: 214464 - protein, 15 aa, Artificial Sequence
  Description of Artificial Sequence: Synthetic peptide
  Seed: ANQRLNPMHQLLRHF
ANQRLNPNHPLLAHF

SEQ ID NO: 214465 - protein, 15 aa, Artificial Sequence
  Description of Artificial Sequence: Synthetic peptide
  Seed: ANQRLNPMHQLLRHF
ANQRLNPNHPLLFHF

SEQ ID NO: 214466 - protein, 15 aa, Artificial Sequence
  Description of Artificial Sequence: Synthetic peptide
  Seed: ANQRLNPMHQLLRHF
ANQRLNPNHPLLIHF

SEQ ID NO: 214467 - protein, 15 aa, Artificial Sequence
  Description of Artificial Sequence: Synthetic peptide
  Seed: ANQRLNPMHQLLRHF
ANQRLNPNHPLLLHF

SEQ ID NO: 214468 - protein, 15 aa, Artificial Sequence
  Description of Artificial Sequence: Synthetic peptide
  Seed: ANQRLNPMHQLLRHF
ANQRLNPNHPLLMHF

SEQ ID NO: 214469 - protein, 15 aa, Artificial Sequence
  Description of Artificial Sequence: Synthetic peptide
  Seed: ANQRLNPMHQLLRHF
ANQRLNPNHPLLVHF

SEQ ID NO: 214470 - protein, 15 aa, Artificial Sequence
  Description of Artificial Sequence: Synthetic peptide
  Seed: ANQRLNPMHQLLRHF
ANQRLNPNHPLLYHF

SEQ ID NO: 214471 - protein, 15 aa, Artificial Sequence
  Description of Artificial Sequence: Synthetic peptide
  Seed: ANQRLNPMHQLLRHF
ANQRLNPNHSLLAHF

SEQ ID NO: 214472 - protein, 15 aa, Artificial Sequence
  Description of Artificial Sequence: Synthetic peptide
  Seed: ANQRLNPMHQLLRHF
ANQRLNPNHSLLFHF

SEQ ID NO: 214473 - protein, 15 aa, Artificial Sequence
  Description of Artificial Sequence: Synthetic peptide
  Seed: ANQRLNPMHQLLRHF
ANQRLNPNHSLLIHF

SEQ ID NO: 214474 - protein, 15 aa, Artificial Sequence
  Description of Artificial Sequence: Synthetic peptide
  Seed: ANQRLNPMHQLLRHF
ANQRLNPNHSLLLHF

SEQ ID NO: 214475 - protein, 15 aa, Artificial Sequence
  Description of Artificial Sequence: Synthetic peptide
  Seed: ANQRLNPMHQLLRHF
ANQRLNPNHSLLMHF

SEQ ID NO: 214476 - protein, 15 aa, Artificial Sequence
  Description of Artificial Sequence: Synthetic peptide
  Seed: ANQRLNPMHQLLRHF
ANQRLNPNHSLLSHF

SEQ ID NO: 214477 - protein, 15 aa, Artificial Sequence
  Description of Artificial Sequence: Synthetic peptide
  Seed: ANQRLNPMHQLLRHF
ANQRLNPNHSLLTHF

SEQ ID NO: 214478 - protein, 15 aa, Artificial Sequence
  Description of Artificial Sequence: Synthetic peptide
  Seed: ANQRLNPMHQLLRHF
ANQRLNPNHSLLVHF

SEQ ID NO: 214479 - protein, 15 aa, Artificial Sequence
  Description of Artificial Sequence: Synthetic peptide
  Seed: ANQRLNPMHQLLRHF
ANQRLNPNHSLLYHF

SEQ ID NO: 214480 - protein, 15 aa, Artificial Sequence
  Description of Artificial Sequence: Synthetic peptide
  Seed: ANQRLNPMHQLLRHF
ANQRLNPNHTLLAHF

SEQ ID NO: 214481 - protein, 15 aa, Artificial Sequence
  Description of Artificial Sequence: Synthetic peptide
  Seed: ANQRLNPMHQLLRHF
ANQRLNPNHTLLFHF

SEQ ID NO: 214482 - protein, 15 aa, Artificial Sequence
  Description of Artificial Sequence: Synthetic peptide
  Seed: ANQRLNPMHQLLRHF
ANQRLNPNHTLLIHF

SEQ ID NO: 214483 - protein, 15 aa, Artificial Sequence
  Description of Artificial Sequence: Synthetic peptide
  Seed: ANQRLNPMHQLLRHF
ANQRLNPNHTLLLHF

SEQ ID NO: 214484 - protein, 15 aa, Artificial Sequence
  Description of Artificial Sequence: Synthetic peptide
  Seed: ANQRLNPMHQLLRHF
ANQRLNPNHTLLMHF

SEQ ID NO: 214485 - protein, 15 aa, Artificial Sequence
  Description of Artificial Sequence: Synthetic peptide
  Seed: ANQRLNPMHQLLRHF
ANQRLNPNHTLLVHF

SEQ ID NO: 214486 - protein, 15 aa, Artificial Sequence
  Description of Artificial Sequence: Synthetic peptide
  Seed: ANQRLNPMHQLLRHF
ANQRLNPNHTLLYHF

SEQ ID NO: 214487 - protein, 15 aa, Artificial Sequence
  Description of Artificial Sequence: Synthetic peptide
  Seed: ANQRLNPMHQLLRHF
ANQRLNPNHVLLAHF

SEQ ID NO: 214488 - protein, 15 aa, Artificial Sequence
  Description of Artificial Sequence: Synthetic peptide
  Seed: ANQRLNPMHQLLRHF
ANQRLNPNHVLLFHF

SEQ ID NO: 214489 - protein, 15 aa, Artificial Sequence
  Description of Artificial Sequence: Synthetic peptide
  Seed: ANQRLNPMHQLLRHF
ANQRLNPNHVLLIHF

SEQ ID NO: 214490 - protein, 15 aa, Artificial Sequence
  Description of Artificial Sequence: Synthetic peptide
  Seed: ANQRLNPMHQLLRHF
ANQRLNPNHVLLLHF

SEQ ID NO: 214491 - protein, 15 aa, Artificial Sequence
  Description of Artificial Sequence: Synthetic peptide
  Seed: ANQRLNPMHQLLRHF
ANQRLNPNHVLLMHF

SEQ ID NO: 214492 - protein, 15 aa, Artificial Sequence
  Description of Artificial Sequence: Synthetic peptide
  Seed: ANQRLNPMHQLLRHF
ANQRLNPNHVLLTHF

SEQ ID NO: 214493 - protein, 15 aa, Artificial Sequence
  Description of Artificial Sequence: Synthetic peptide
  Seed: ANQRLNPMHQLLRHF
ANQRLNPNHVLLVHF

SEQ ID NO: 214494 - protein, 15 aa, Artificial Sequence
  Description of Artificial Sequence: Synthetic peptide
  Seed: ANQRLNPMHQLLRHF
ANQRLNPNHVLLYHF

SEQ ID NO: 214495 - protein, 15 aa, Artificial Sequence
  Description of Artificial Sequence: Synthetic peptide
  Seed: ANQRLNPMHQLLRHF
ANQRLNPNHYLLIHF

SEQ ID NO: 214496 - protein, 15 aa, Artificial Sequence
  Description of Artificial Sequence: Synthetic peptide
  Seed: ANQRLNPMHQLLRHF
ANQRLNPQHALLAHF

SEQ ID NO: 214497 - protein, 15 aa, Artificial Sequence
  Description of Artificial Sequence: Synthetic peptide
  Seed: ANQRLNPMHQLLRHF
ANQRLNPQHALLIHF

SEQ ID NO: 214498 - protein, 15 aa, Artificial Sequence
  Description of Artificial Sequence: Synthetic peptide
  Seed: ANQRLNPMHQLLRHF
ANQRLNPQHALLLHF

SEQ ID NO: 214499 - protein, 15 aa, Artificial Sequence
  Description of Artificial Sequence: Synthetic peptide
  Seed: ANQRLNPMHQLLRHF
ANQRLNPQHALLMHF

SEQ ID NO: 214500 - protein, 15 aa, Artificial Sequence
  Description of Artificial Sequence: Synthetic peptide
  Seed: ANQRLNPMHQLLRHF
ANQRLNPQHALLSHF

SEQ ID NO: 214501 - protein, 15 aa, Artificial Sequence
  Description of Artificial Sequence: Synthetic peptide
  Seed: ANQRLNPMHQLLRHF
ANQRLNPQHALLTHF

SEQ ID NO: 214502 - protein, 15 aa, Artificial Sequence
  Description of Artificial Sequence: Synthetic peptide
  Seed: ANQRLNPMHQLLRHF
ANQRLNPQHALLVHF

SEQ ID NO: 214503 - protein, 15 aa, Artificial Sequence
  Description of Artificial Sequence: Synthetic peptide
  Seed: ANQRLNPMHQLLRHF
ANQRLNPQHFLLIHF

SEQ ID NO: 214504 - protein, 15 aa, Artificial Sequence
  Description of Artificial Sequence: Synthetic peptide
  Seed: ANQRLNPMHQLLRHF
ANQRLNPQHFLLLHF

SEQ ID NO: 214505 - protein, 15 aa, Artificial Sequence
  Description of Artificial Sequence: Synthetic peptide
  Seed: ANQRLNPMHQLLRHF
ANQRLNPQHFLLVHF

SEQ ID NO: 214506 - protein, 15 aa, Artificial Sequence
  Description of Artificial Sequence: Synthetic peptide
  Seed: ANQRLNPMHQLLRHF
ANQRLNPQHGLLAHF

SEQ ID NO: 214507 - protein, 15 aa, Artificial Sequence
  Description of Artificial Sequence: Synthetic peptide
  Seed: ANQRLNPMHQLLRHF
ANQRLNPQHGLLIHF

SEQ ID NO: 214508 - protein, 15 aa, Artificial Sequence
  Description of Artificial Sequence: Synthetic peptide
  Seed: ANQRLNPMHQLLRHF
ANQRLNPQHGLLLHF

SEQ ID NO: 214509 - protein, 15 aa, Artificial Sequence
  Description of Artificial Sequence: Synthetic peptide
  Seed: ANQRLNPMHQLLRHF
ANQRLNPQHGLLMHF

SEQ ID NO: 214510 - protein, 15 aa, Artificial Sequence
  Description of Artificial Sequence: Synthetic peptide
  Seed: ANQRLNPMHQLLRHF
ANQRLNPQHGLLTHF

SEQ ID NO: 214511 - protein, 15 aa, Artificial Sequence
  Description of Artificial Sequence: Synthetic peptide
  Seed: ANQRLNPMHQLLRHF
ANQRLNPQHGLLVHF

SEQ ID NO: 214512 - protein, 15 aa, Artificial Sequence
  Description of Artificial Sequence: Synthetic peptide
  Seed: ANQRLNPMHQLLRHF
ANQRLNPQHKLLSHF

SEQ ID NO: 214513 - protein, 15 aa, Artificial Sequence
  Description of Artificial Sequence: Synthetic peptide
  Seed: ANQRLNPMHQLLRHF
ANQRLNPQHPLLAHF

SEQ ID NO: 214514 - protein, 15 aa, Artificial Sequence
  Description of Artificial Sequence: Synthetic peptide
  Seed: ANQRLNPMHQLLRHF
ANQRLNPQHPLLIHF

SEQ ID NO: 214515 - protein, 15 aa, Artificial Sequence
  Description of Artificial Sequence: Synthetic peptide
  Seed: ANQRLNPMHQLLRHF
ANQRLNPQHPLLLHF

SEQ ID NO: 214516 - protein, 15 aa, Artificial Sequence
  Description of Artificial Sequence: Synthetic peptide
  Seed: ANQRLNPMHQLLRHF
ANQRLNPQHPLLVHF

SEQ ID NO: 214517 - protein, 15 aa, Artificial Sequence
  Description of Artificial Sequence: Synthetic peptide
  Seed: ANQRLNPMHQLLRHF
ANQRLNPQHRLLAHF

SEQ ID NO: 214518 - protein, 15 aa, Artificial Sequence
  Description of Artificial Sequence: Synthetic peptide
  Seed: ANQRLNPMHQLLRHF
ANQRLNPQHRLLRHF

SEQ ID NO: 214519 - protein, 15 aa, Artificial Sequence
  Description of Artificial Sequence: Synthetic peptide
  Seed: ANQRLNPMHQLLRHF
ANQRLNPQHRLLSHF

SEQ ID NO: 214520 - protein, 15 aa, Artificial Sequence
  Description of Artificial Sequence: Synthetic peptide
  Seed: ANQRLNPMHQLLRHF
ANQRLNPQHSLLAHF

SEQ ID NO: 214521 - protein, 15 aa, Artificial Sequence
  Description of Artificial Sequence: Synthetic peptide
  Seed: ANQRLNPMHQLLRHF
ANQRLNPQHSLLIHF

SEQ ID NO: 214522 - protein, 15 aa, Artificial Sequence
  Description of Artificial Sequence: Synthetic peptide
  Seed: ANQRLNPMHQLLRHF
ANQRLNPQHSLLLHF

SEQ ID NO: 214523 - protein, 15 aa, Artificial Sequence
  Description of Artificial Sequence: Synthetic peptide
  Seed: ANQRLNPMHQLLRHF
ANQRLNPQHSLLTHF

SEQ ID NO: 214524 - protein, 15 aa, Artificial Sequence
  Description of Artificial Sequence: Synthetic peptide
  Seed: ANQRLNPMHQLLRHF
ANQRLNPQHSLLVHF

SEQ ID NO: 214525 - protein, 15 aa, Artificial Sequence
  Description of Artificial Sequence: Synthetic peptide
  Seed: ANQRLNPMHQLLRHF
ANQRLNPRHRLLAHF

SEQ ID NO: 214526 - protein, 15 aa, Artificial Sequence
  Description of Artificial Sequence: Synthetic peptide
  Seed: ANQRLNPMHQLLRHF
ANQRLNPRHRLLRHF

SEQ ID NO: 214527 - protein, 15 aa, Artificial Sequence
  Description of Artificial Sequence: Synthetic peptide
  Seed: ANQRLNPMHQLLRHF
ANQRLNPSHALLAHF

SEQ ID NO: 214528 - protein, 15 aa, Artificial Sequence
  Description of Artificial Sequence: Synthetic peptide
  Seed: ANQRLNPMHQLLRHF
ANQRLNPSHALLFHF

SEQ ID NO: 214529 - protein, 15 aa, Artificial Sequence
  Description of Artificial Sequence: Synthetic peptide
  Seed: ANQRLNPMHQLLRHF
ANQRLNPSHALLIHF

SEQ ID NO: 214530 - protein, 15 aa, Artificial Sequence
  Description of Artificial Sequence: Synthetic peptide
  Seed: ANQRLNPMHQLLRHF
ANQRLNPSHALLLHF

SEQ ID NO: 214531 - protein, 15 aa, Artificial Sequence
  Description of Artificial Sequence: Synthetic peptide
  Seed: ANQRLNPMHQLLRHF
ANQRLNPSHALLMHF

SEQ ID NO: 214532 - protein, 15 aa, Artificial Sequence
  Description of Artificial Sequence: Synthetic peptide
  Seed: ANQRLNPMHQLLRHF
ANQRLNPSHALLTHF

SEQ ID NO: 214533 - protein, 15 aa, Artificial Sequence
  Description of Artificial Sequence: Synthetic peptide
  Seed: ANQRLNPMHQLLRHF
ANQRLNPSHALLVHF

SEQ ID NO: 214534 - protein, 15 aa, Artificial Sequence
  Description of Artificial Sequence: Synthetic peptide
  Seed: ANQRLNPMHQLLRHF
ANQRLNPSHALLYHF

SEQ ID NO: 214535 - protein, 15 aa, Artificial Sequence
  Description of Artificial Sequence: Synthetic peptide
  Seed: ANQRLNPMHQLLRHF
ANQRLNPSHFLLFHF

SEQ ID NO: 214536 - protein, 15 aa, Artificial Sequence
  Description of Artificial Sequence: Synthetic peptide
  Seed: ANQRLNPMHQLLRHF
ANQRLNPSHFLLIHF

SEQ ID NO: 214537 - protein, 15 aa, Artificial Sequence
  Description of Artificial Sequence: Synthetic peptide
  Seed: ANQRLNPMHQLLRHF
ANQRLNPSHFLLLHF

SEQ ID NO: 214538 - protein, 15 aa, Artificial Sequence
  Description of Artificial Sequence: Synthetic peptide
  Seed: ANQRLNPMHQLLRHF
ANQRLNPSHFLLMHF

SEQ ID NO: 214539 - protein, 15 aa, Artificial Sequence
  Description of Artificial Sequence: Synthetic peptide
  Seed: ANQRLNPMHQLLRHF
ANQRLNPSHFLLVHF

SEQ ID NO: 214540 - protein, 15 aa, Artificial Sequence
  Description of Artificial Sequence: Synthetic peptide
  Seed: ANQRLNPMHQLLRHF
ANQRLNPSHGLLAHF

SEQ ID NO: 214541 - protein, 15 aa, Artificial Sequence
  Description of Artificial Sequence: Synthetic peptide
  Seed: ANQRLNPMHQLLRHF
ANQRLNPSHGLLIHF

SEQ ID NO: 214542 - protein, 15 aa, Artificial Sequence
  Description of Artificial Sequence: Synthetic peptide
  Seed: ANQRLNPMHQLLRHF
ANQRLNPSHGLLLHF

SEQ ID NO: 214543 - protein, 15 aa, Artificial Sequence
  Description of Artificial Sequence: Synthetic peptide
  Seed: ANQRLNPMHQLLRHF
ANQRLNPSHGLLVHF

SEQ ID NO: 214544 - protein, 15 aa, Artificial Sequence
  Description of Artificial Sequence: Synthetic peptide
  Seed: ANQRLNPMHQLLRHF
ANQRLNPSHKLLRHF

SEQ ID NO: 214545 - protein, 15 aa, Artificial Sequence
  Description of Artificial Sequence: Synthetic peptide
  Seed: ANQRLNPMHQLLRHF
ANQRLNPSHNLLFHF

SEQ ID NO: 214546 - protein, 15 aa, Artificial Sequence
  Description of Artificial Sequence: Synthetic peptide
  Seed: ANQRLNPMHQLLRHF
ANQRLNPSHNLLIHF

SEQ ID NO: 214547 - protein, 15 aa, Artificial Sequence
  Description of Artificial Sequence: Synthetic peptide
  Seed: ANQRLNPMHQLLRHF
ANQRLNPSHNLLLHF

SEQ ID NO: 214548 - protein, 15 aa, Artificial Sequence
  Description of Artificial Sequence: Synthetic peptide
  Seed: ANQRLNPMHQLLRHF
ANQRLNPSHNLLVHF

SEQ ID NO: 214549 - protein, 15 aa, Artificial Sequence
  Description of Artificial Sequence: Synthetic peptide
  Seed: ANQRLNPMHQLLRHF
ANQRLNPSHPLLIHF

SEQ ID NO: 214550 - protein, 15 aa, Artificial Sequence
  Description of Artificial Sequence: Synthetic peptide
  Seed: ANQRLNPMHQLLRHF
ANQRLNPSHPLLVHF

SEQ ID NO: 214551 - protein, 15 aa, Artificial Sequence
  Description of Artificial Sequence: Synthetic peptide
  Seed: ANQRLNPMHQLLRHF
ANQRLNPSHRLLAHF

SEQ ID NO: 214552 - protein, 15 aa, Artificial Sequence
  Description of Artificial Sequence: Synthetic peptide
  Seed: ANQRLNPMHQLLRHF
ANQRLNPSHRLLFHF

SEQ ID NO: 214553 - protein, 15 aa, Artificial Sequence
  Description of Artificial Sequence: Synthetic peptide
  Seed: ANQRLNPMHQLLRHF
ANQRLNPSHRLLKHF

SEQ ID NO: 214554 - protein, 15 aa, Artificial Sequence
  Description of Artificial Sequence: Synthetic peptide
  Seed: ANQRLNPMHQLLRHF
ANQRLNPSHRLLRHF

SEQ ID NO: 214555 - protein, 15 aa, Artificial Sequence
  Description of Artificial Sequence: Synthetic peptide
  Seed: ANQRLNPMHQLLRHF
ANQRLNPSHRLLSHF

SEQ ID NO: 214556 - protein, 15 aa, Artificial Sequence
  Description of Artificial Sequence: Synthetic peptide
  Seed: ANQRLNPMHQLLRHF
ANQRLNPSHRLLYHF

SEQ ID NO: 214557 - protein, 15 aa, Artificial Sequence
  Description of Artificial Sequence: Synthetic peptide
  Seed: ANQRLNPMHQLLRHF
ANQRLNPSHSLLAHF

SEQ ID NO: 214558 - protein, 15 aa, Artificial Sequence
  Description of Artificial Sequence: Synthetic peptide
  Seed: ANQRLNPMHQLLRHF
ANQRLNPSHSLLIHF

SEQ ID NO: 214559 - protein, 15 aa, Artificial Sequence
  Description of Artificial Sequence: Synthetic peptide
  Seed: ANQRLNPMHQLLRHF
ANQRLNPSHSLLLHF

SEQ ID NO: 214560 - protein, 15 aa, Artificial Sequence
  Description of Artificial Sequence: Synthetic peptide
  Seed: ANQRLNPMHQLLRHF
ANQRLNPSHSLLVHF

SEQ ID NO: 214561 - protein, 15 aa, Artificial Sequence
  Description of Artificial Sequence: Synthetic peptide
  Seed: ANQRLNPMHQLLRHF
ANQRLNPSHTLLIHF

SEQ ID NO: 214562 - protein, 15 aa, Artificial Sequence
  Description of Artificial Sequence: Synthetic peptide
  Seed: ANQRLNPMHQLLRHF
ANQRLNPSHTLLVHF

SEQ ID NO: 214563 - protein, 15 aa, Artificial Sequence
  Description of Artificial Sequence: Synthetic peptide
  Seed: ANQRLNPMHQLLRHF
ANQRLNPSHVLLIHF

SEQ ID NO: 214564 - protein, 15 aa, Artificial Sequence
  Description of Artificial Sequence: Synthetic peptide
  Seed: ANQRLNPMHQLLRHF
ANQRLNPTHALLLHF

SEQ ID NO: 214565 - protein, 15 aa, Artificial Sequence
  Description of Artificial Sequence: Synthetic peptide
  Seed: ANQRLNPMHQLLRHF
ANQRLNPTHALLVHF

SEQ ID NO: 214566 - protein, 15 aa, Artificial Sequence
  Description of Artificial Sequence: Synthetic peptide
  Seed: ANQRLNPMHQLLRHF
ANQRLNPTHFLLAHF

SEQ ID NO: 214567 - protein, 15 aa, Artificial Sequence
  Description of Artificial Sequence: Synthetic peptide
  Seed: ANQRLNPMHQLLRHF
ANQRLNPTHFLLFHF

SEQ ID NO: 214568 - protein, 15 aa, Artificial Sequence
  Description of Artificial Sequence: Synthetic peptide
  Seed: ANQRLNPMHQLLRHF
ANQRLNPTHFLLIHF

SEQ ID NO: 214569 - protein, 15 aa, Artificial Sequence
  Description of Artificial Sequence: Synthetic peptide
  Seed: ANQRLNPMHQLLRHF
ANQRLNPTHFLLLHF

SEQ ID NO: 214570 - protein, 15 aa, Artificial Sequence
  Description of Artificial Sequence: Synthetic peptide
  Seed: ANQRLNPMHQLLRHF
ANQRLNPTHFLLMHF

SEQ ID NO: 214571 - protein, 15 aa, Artificial Sequence
  Description of Artificial Sequence: Synthetic peptide
  Seed: ANQRLNPMHQLLRHF
ANQRLNPTHFLLSHF

SEQ ID NO: 214572 - protein, 15 aa, Artificial Sequence
  Description of Artificial Sequence: Synthetic peptide
  Seed: ANQRLNPMHQLLRHF
ANQRLNPTHFLLTHF

SEQ ID NO: 214573 - protein, 15 aa, Artificial Sequence
  Description of Artificial Sequence: Synthetic peptide
  Seed: ANQRLNPMHQLLRHF
ANQRLNPTHFLLVHF

SEQ ID NO: 214574 - protein, 15 aa, Artificial Sequence
  Description of Artificial Sequence: Synthetic peptide
  Seed: ANQRLNPMHQLLRHF
ANQRLNPTHFLLYHF

SEQ ID NO: 214575 - protein, 15 aa, Artificial Sequence
  Description of Artificial Sequence: Synthetic peptide
  Seed: ANQRLNPMHQLLRHF
ANQRLNPTHRLLRHF

SEQ ID NO: 214576 - protein, 15 aa, Artificial Sequence
  Description of Artificial Sequence: Synthetic peptide
  Seed: ANQRLNPMHQLLRHF
ANQRLNPTHRLLSHF

SEQ ID NO: 214577 - protein, 15 aa, Artificial Sequence
  Description of Artificial Sequence: Synthetic peptide
  Seed: ANQRLNPMHQLLRHF
ANQRLNPVHALLAHF

SEQ ID NO: 214578 - protein, 15 aa, Artificial Sequence
  Description of Artificial Sequence: Synthetic peptide
  Seed: ANQRLNPMHQLLRHF
ANQRLNPVHALLIHF

SEQ ID NO: 214579 - protein, 15 aa, Artificial Sequence
  Description of Artificial Sequence: Synthetic peptide
  Seed: ANQRLNPMHQLLRHF
ANQRLNPVHALLLHF

SEQ ID NO: 214580 - protein, 15 aa, Artificial Sequence
  Description of Artificial Sequence: Synthetic peptide
  Seed: ANQRLNPMHQLLRHF
ANQRLNPVHALLMHF

SEQ ID NO: 214581 - protein, 15 aa, Artificial Sequence
  Description of Artificial Sequence: Synthetic peptide
  Seed: ANQRLNPMHQLLRHF
ANQRLNPVHALLSHF

SEQ ID NO: 214582 - protein, 15 aa, Artificial Sequence
  Description of Artificial Sequence: Synthetic peptide
  Seed: ANQRLNPMHQLLRHF
ANQRLNPVHALLTHF

SEQ ID NO: 214583 - protein, 15 aa, Artificial Sequence
  Description of Artificial Sequence: Synthetic peptide
  Seed: ANQRLNPMHQLLRHF
ANQRLNPVHALLVHF

SEQ ID NO: 214584 - protein, 15 aa, Artificial Sequence
  Description of Artificial Sequence: Synthetic peptide
  Seed: ANQRLNPMHQLLRHF
ANQRLNPVHFLLAHF

SEQ ID NO: 214585 - protein, 15 aa, Artificial Sequence
  Description of Artificial Sequence: Synthetic peptide
  Seed: ANQRLNPMHQLLRHF
ANQRLNPVHFLLEHF

SEQ ID NO: 214586 - protein, 15 aa, Artificial Sequence
  Description of Artificial Sequence: Synthetic peptide
  Seed: ANQRLNPMHQLLRHF
ANQRLNPVHFLLFHF

SEQ ID NO: 214587 - protein, 15 aa, Artificial Sequence
  Description of Artificial Sequence: Synthetic peptide
  Seed: ANQRLNPMHQLLRHF
ANQRLNPVHFLLIHF

SEQ ID NO: 214588 - protein, 15 aa, Artificial Sequence
  Description of Artificial Sequence: Synthetic peptide
  Seed: ANQRLNPMHQLLRHF
ANQRLNPVHFLLLHF

SEQ ID NO: 214589 - protein, 15 aa, Artificial Sequence
  Description of Artificial Sequence: Synthetic peptide
  Seed: ANQRLNPMHQLLRHF
ANQRLNPVHFLLMHF

SEQ ID NO: 214590 - protein, 15 aa, Artificial Sequence
  Description of Artificial Sequence: Synthetic peptide
  Seed: ANQRLNPMHQLLRHF
ANQRLNPVHFLLNHF

SEQ ID NO: 214591 - protein, 15 aa, Artificial Sequence
  Description of Artificial Sequence: Synthetic peptide
  Seed: ANQRLNPMHQLLRHF
ANQRLNPVHFLLSHF

SEQ ID NO: 214592 - protein, 15 aa, Artificial Sequence
  Description of Artificial Sequence: Synthetic peptide
  Seed: ANQRLNPMHQLLRHF
ANQRLNPVHFLLTHF

SEQ ID NO: 214593 - protein, 15 aa, Artificial Sequence
  Description of Artificial Sequence: Synthetic peptide
  Seed: ANQRLNPMHQLLRHF
ANQRLNPVHFLLVHF

SEQ ID NO: 214594 - protein, 15 aa, Artificial Sequence
  Description of Artificial Sequence: Synthetic peptide
  Seed: ANQRLNPMHQLLRHF
ANQRLNPVHFLLYHF

SEQ ID NO: 214595 - protein, 15 aa, Artificial Sequence
  Description of Artificial Sequence: Synthetic peptide
  Seed: ANQRLNPMHQLLRHF
ANQRLNPVHGLLAHF

SEQ ID NO: 214596 - protein, 15 aa, Artificial Sequence
  Description of Artificial Sequence: Synthetic peptide
  Seed: ANQRLNPMHQLLRHF
ANQRLNPVHGLLIHF

SEQ ID NO: 214597 - protein, 15 aa, Artificial Sequence
  Description of Artificial Sequence: Synthetic peptide
  Seed: ANQRLNPMHQLLRHF
ANQRLNPVHGLLLHF

SEQ ID NO: 214598 - protein, 15 aa, Artificial Sequence
  Description of Artificial Sequence: Synthetic peptide
  Seed: ANQRLNPMHQLLRHF
ANQRLNPVHGLLMHF

SEQ ID NO: 214599 - protein, 15 aa, Artificial Sequence
  Description of Artificial Sequence: Synthetic peptide
  Seed: ANQRLNPMHQLLRHF
ANQRLNPVHGLLSHF

SEQ ID NO: 214600 - protein, 15 aa, Artificial Sequence
  Description of Artificial Sequence: Synthetic peptide
  Seed: ANQRLNPMHQLLRHF
ANQRLNPVHGLLTHF

SEQ ID NO: 214601 - protein, 15 aa, Artificial Sequence
  Description of Artificial Sequence: Synthetic peptide
  Seed: ANQRLNPMHQLLRHF
ANQRLNPVHGLLVHF

SEQ ID NO: 214602 - protein, 15 aa, Artificial Sequence
  Description of Artificial Sequence: Synthetic peptide
  Seed: ANQRLNPMHQLLRHF
ANQRLNPVHKLLAHF

SEQ ID NO: 214603 - protein, 15 aa, Artificial Sequence
  Description of Artificial Sequence: Synthetic peptide
  Seed: ANQRLNPMHQLLRHF
ANQRLNPVHKLLGHF

SEQ ID NO: 214604 - protein, 15 aa, Artificial Sequence
  Description of Artificial Sequence: Synthetic peptide
  Seed: ANQRLNPMHQLLRHF
ANQRLNPVHKLLHHF

SEQ ID NO: 214605 - protein, 15 aa, Artificial Sequence
  Description of Artificial Sequence: Synthetic peptide
  Seed: ANQRLNPMHQLLRHF
ANQRLNPVHKLLKHF

SEQ ID NO: 214606 - protein, 15 aa, Artificial Sequence
  Description of Artificial Sequence: Synthetic peptide
  Seed: ANQRLNPMHQLLRHF
ANQRLNPVHKLLQHF

SEQ ID NO: 214607 - protein, 15 aa, Artificial Sequence
  Description of Artificial Sequence: Synthetic peptide
  Seed: ANQRLNPMHQLLRHF
ANQRLNPVHKLLRHF

SEQ ID NO: 214608 - protein, 15 aa, Artificial Sequence
  Description of Artificial Sequence: Synthetic peptide
  Seed: ANQRLNPMHQLLRHF
ANQRLNPVHKLLSHF

SEQ ID NO: 214609 - protein, 15 aa, Artificial Sequence
  Description of Artificial Sequence: Synthetic peptide
  Seed: ANQRLNPMHQLLRHF
ANQRLNPVHKLLTHF

SEQ ID NO: 214610 - protein, 15 aa, Artificial Sequence
  Description of Artificial Sequence: Synthetic peptide
  Seed: ANQRLNPMHQLLRHF
ANQRLNPVHKLLYHF

SEQ ID NO: 214611 - protein, 15 aa, Artificial Sequence
  Description of Artificial Sequence: Synthetic peptide
  Seed: ANQRLNPMHQLLRHF
ANQRLNPVHLLLLHF

SEQ ID NO: 214612 - protein, 15 aa, Artificial Sequence
  Description of Artificial Sequence: Synthetic peptide
  Seed: ANQRLNPMHQLLRHF
ANQRLNPVHNLLLHF

SEQ ID NO: 214613 - protein, 15 aa, Artificial Sequence
  Description of Artificial Sequence: Synthetic peptide
  Seed: ANQRLNPMHQLLRHF
ANQRLNPVHPLLAHF

SEQ ID NO: 214614 - protein, 15 aa, Artificial Sequence
  Description of Artificial Sequence: Synthetic peptide
  Seed: ANQRLNPMHQLLRHF
ANQRLNPVHPLLIHF

SEQ ID NO: 214615 - protein, 15 aa, Artificial Sequence
  Description of Artificial Sequence: Synthetic peptide
  Seed: ANQRLNPMHQLLRHF
ANQRLNPVHPLLLHF

SEQ ID NO: 214616 - protein, 15 aa, Artificial Sequence
  Description of Artificial Sequence: Synthetic peptide
  Seed: ANQRLNPMHQLLRHF
ANQRLNPVHPLLVHF

SEQ ID NO: 214617 - protein, 15 aa, Artificial Sequence
  Description of Artificial Sequence: Synthetic peptide
  Seed: ANQRLNPMHQLLRHF
ANQRLNPVHRLLAHF

SEQ ID NO: 214618 - protein, 15 aa, Artificial Sequence
  Description of Artificial Sequence: Synthetic peptide
  Seed: ANQRLNPMHQLLRHF
ANQRLNPVHRLLFHF

SEQ ID NO: 214619 - protein, 15 aa, Artificial Sequence
  Description of Artificial Sequence: Synthetic peptide
  Seed: ANQRLNPMHQLLRHF
ANQRLNPVHRLLGHF

SEQ ID NO: 214620 - protein, 15 aa, Artificial Sequence
  Description of Artificial Sequence: Synthetic peptide
  Seed: ANQRLNPMHQLLRHF
ANQRLNPVHRLLHHF

SEQ ID NO: 214621 - protein, 15 aa, Artificial Sequence
  Description of Artificial Sequence: Synthetic peptide
  Seed: ANQRLNPMHQLLRHF
ANQRLNPVHRLLIHF

SEQ ID NO: 214622 - protein, 15 aa, Artificial Sequence
  Description of Artificial Sequence: Synthetic peptide
  Seed: ANQRLNPMHQLLRHF
ANQRLNPVHRLLKHF

SEQ ID NO: 214623 - protein, 15 aa, Artificial Sequence
  Description of Artificial Sequence: Synthetic peptide
  Seed: ANQRLNPMHQLLRHF
ANQRLNPVHRLLLHF

SEQ ID NO: 214624 - protein, 15 aa, Artificial Sequence
  Description of Artificial Sequence: Synthetic peptide
  Seed: ANQRLNPMHQLLRHF
ANQRLNPVHRLLMHF

SEQ ID NO: 214625 - protein, 15 aa, Artificial Sequence
  Description of Artificial Sequence: Synthetic peptide
  Seed: ANQRLNPMHQLLRHF
ANQRLNPVHRLLNHF

SEQ ID NO: 214626 - protein, 15 aa, Artificial Sequence
  Description of Artificial Sequence: Synthetic peptide
  Seed: ANQRLNPMHQLLRHF
ANQRLNPVHRLLPHF

SEQ ID NO: 214627 - protein, 15 aa, Artificial Sequence
  Description of Artificial Sequence: Synthetic peptide
  Seed: ANQRLNPMHQLLRHF
ANQRLNPVHRLLQHF

SEQ ID NO: 214628 - protein, 15 aa, Artificial Sequence
  Description of Artificial Sequence: Synthetic peptide
  Seed: ANQRLNPMHQLLRHF
ANQRLNPVHRLLRHF

SEQ ID NO: 214629 - protein, 15 aa, Artificial Sequence
  Description of Artificial Sequence: Synthetic peptide
  Seed: ANQRLNPMHQLLRHF
ANQRLNPVHRLLSHF

SEQ ID NO: 214630 - protein, 15 aa, Artificial Sequence
  Description of Artificial Sequence: Synthetic peptide
  Seed: ANQRLNPMHQLLRHF
ANQRLNPVHRLLTHF

SEQ ID NO: 214631 - protein, 15 aa, Artificial Sequence
  Description of Artificial Sequence: Synthetic peptide
  Seed: ANQRLNPMHQLLRHF
ANQRLNPVHRLLVHF

SEQ ID NO: 214632 - protein, 15 aa, Artificial Sequence
  Description of Artificial Sequence: Synthetic peptide
  Seed: ANQRLNPMHQLLRHF
ANQRLNPVHRLLYHF

SEQ ID NO: 214633 - protein, 15 aa, Artificial Sequence
  Description of Artificial Sequence: Synthetic peptide
  Seed: ANQRLNPMHQLLRHF
ANQRLNPVHSLLAHF

SEQ ID NO: 214634 - protein, 15 aa, Artificial Sequence
  Description of Artificial Sequence: Synthetic peptide
  Seed: ANQRLNPMHQLLRHF
ANQRLNPVHSLLIHF

SEQ ID NO: 214635 - protein, 15 aa, Artificial Sequence
  Description of Artificial Sequence: Synthetic peptide
  Seed: ANQRLNPMHQLLRHF
ANQRLNPVHSLLLHF

SEQ ID NO: 214636 - protein, 15 aa, Artificial Sequence
  Description of Artificial Sequence: Synthetic peptide
  Seed: ANQRLNPMHQLLRHF
ANQRLNPVHSLLTHF

SEQ ID NO: 214637 - protein, 15 aa, Artificial Sequence
  Description of Artificial Sequence: Synthetic peptide
  Seed: ANQRLNPMHQLLRHF
ANQRLNPVHSLLVHF

SEQ ID NO: 214638 - protein, 15 aa, Artificial Sequence
  Description of Artificial Sequence: Synthetic peptide
  Seed: ANQRLNPMHQLLRHF
ANQRLNPVHWLLLHF

SEQ ID NO: 214639 - protein, 15 aa, Artificial Sequence
  Description of Artificial Sequence: Synthetic peptide
  Seed: ANQRLNPMHQLLRHF
ANQRLNPVHYLLLHF

SEQ ID NO: 214640 - protein, 15 aa, Artificial Sequence
  Description of Artificial Sequence: Synthetic peptide
  Seed: ANQRLNPMHQLLRHF
ANQRLNPWHALLIHF

SEQ ID NO: 214641 - protein, 15 aa, Artificial Sequence
  Description of Artificial Sequence: Synthetic peptide
  Seed: ANQRLNPMHQLLRHF
ANQRLNPWHALLLHF

SEQ ID NO: 214642 - protein, 15 aa, Artificial Sequence
  Description of Artificial Sequence: Synthetic peptide
  Seed: ANQRLNPMHQLLRHF
ANQRLNPWHALLVHF

SEQ ID NO: 214643 - protein, 15 aa, Artificial Sequence
  Description of Artificial Sequence: Synthetic peptide
  Seed: ANQRLNPMHQLLRHF
ANQRLNPWHGLLLHF

SEQ ID NO: 214644 - protein, 15 aa, Artificial Sequence
  Description of Artificial Sequence: Synthetic peptide
  Seed: ANQRLNPMHQLLRHF
ANQRLNPWHGLLVHF

SEQ ID NO: 214645 - protein, 15 aa, Artificial Sequence
  Description of Artificial Sequence: Synthetic peptide
  Seed: ANQRLNPMHQLLRHF
ANQRLNPWHNLLAHF

SEQ ID NO: 214646 - protein, 15 aa, Artificial Sequence
  Description of Artificial Sequence: Synthetic peptide
  Seed: ANQRLNPMHQLLRHF
ANQRLNPWHNLLIHF

SEQ ID NO: 214647 - protein, 15 aa, Artificial Sequence
  Description of Artificial Sequence: Synthetic peptide
  Seed: ANQRLNPMHQLLRHF
ANQRLNPWHNLLLHF

SEQ ID NO: 214648 - protein, 15 aa, Artificial Sequence
  Description of Artificial Sequence: Synthetic peptide
  Seed: ANQRLNPMHQLLRHF
ANQRLNPWHNLLMHF

SEQ ID NO: 214649 - protein, 15 aa, Artificial Sequence
  Description of Artificial Sequence: Synthetic peptide
  Seed: ANQRLNPMHQLLRHF
ANQRLNPWHNLLVHF

SEQ ID NO: 214650 - protein, 15 aa, Artificial Sequence
  Description of Artificial Sequence: Synthetic peptide
  Seed: ANQRLNPMHQLLRHF
ANQRLNPWHRLLAHF

SEQ ID NO: 214651 - protein, 15 aa, Artificial Sequence
  Description of Artificial Sequence: Synthetic peptide
  Seed: ANQRLNPMHQLLRHF
ANQRLNPWHRLLFHF

SEQ ID NO: 214652 - protein, 15 aa, Artificial Sequence
  Description of Artificial Sequence: Synthetic peptide
  Seed: ANQRLNPMHQLLRHF
ANQRLNPWHRLLHHF

SEQ ID NO: 214653 - protein, 15 aa, Artificial Sequence
  Description of Artificial Sequence: Synthetic peptide
  Seed: ANQRLNPMHQLLRHF
ANQRLNPWHRLLIHF

SEQ ID NO: 214654 - protein, 15 aa, Artificial Sequence
  Description of Artificial Sequence: Synthetic peptide
  Seed: ANQRLNPMHQLLRHF
ANQRLNPWHRLLKHF

SEQ ID NO: 214655 - protein, 15 aa, Artificial Sequence
  Description of Artificial Sequence: Synthetic peptide
  Seed: ANQRLNPMHQLLRHF
ANQRLNPWHRLLLHF

SEQ ID NO: 214656 - protein, 15 aa, Artificial Sequence
  Description of Artificial Sequence: Synthetic peptide
  Seed: ANQRLNPMHQLLRHF
ANQRLNPWHRLLRHF

SEQ ID NO: 214657 - protein, 15 aa, Artificial Sequence
  Description of Artificial Sequence: Synthetic peptide
  Seed: ANQRLNPMHQLLRHF
ANQRLNPWHRLLSHF

SEQ ID NO: 214658 - protein, 15 aa, Artificial Sequence
  Description of Artificial Sequence: Synthetic peptide
  Seed: ANQRLNPMHQLLRHF
ANQRLNPWHRLLVHF

SEQ ID NO: 214659 - protein, 15 aa, Artificial Sequence
  Description of Artificial Sequence: Synthetic peptide
  Seed: ANQRLNPMHQLLRHF
ANQRLNPWHRLLYHF

SEQ ID NO: 214660 - protein, 15 aa, Artificial Sequence
  Description of Artificial Sequence: Synthetic peptide
  Seed: ANQRLNPMHQLLRHF
ANQRLNPWHSLLAHF

SEQ ID NO: 214661 - protein, 15 aa, Artificial Sequence
  Description of Artificial Sequence: Synthetic peptide
  Seed: ANQRLNPMHQLLRHF
ANQRLNPWHSLLIHF

SEQ ID NO: 214662 - protein, 15 aa, Artificial Sequence
  Description of Artificial Sequence: Synthetic peptide
  Seed: ANQRLNPMHQLLRHF
ANQRLNPWHSLLLHF

SEQ ID NO: 214663 - protein, 15 aa, Artificial Sequence
  Description of Artificial Sequence: Synthetic peptide
  Seed: ANQRLNPMHQLLRHF
ANQRLNPWHSLLMHF

SEQ ID NO: 214664 - protein, 15 aa, Artificial Sequence
  Description of Artificial Sequence: Synthetic peptide
  Seed: ANQRLNPMHQLLRHF
ANQRLNPWHSLLTHF

SEQ ID NO: 214665 - protein, 15 aa, Artificial Sequence
  Description of Artificial Sequence: Synthetic peptide
  Seed: ANQRLNPMHQLLRHF
ANQRLNPWHSLLVHF

SEQ ID NO: 214666 - protein, 15 aa, Artificial Sequence
  Description of Artificial Sequence: Synthetic peptide
  Seed: ANQRLNPMHQLLRHF
ANQRLNPWHTLLLHF

SEQ ID NO: 214667 - protein, 15 aa, Artificial Sequence
  Description of Artificial Sequence: Synthetic peptide
  Seed: ANQRLNPMHQLLRHF
ANQRLNPYHALLAHF

SEQ ID NO: 214668 - protein, 15 aa, Artificial Sequence
  Description of Artificial Sequence: Synthetic peptide
  Seed: ANQRLNPMHQLLRHF
ANQRLNPYHALLIHF

SEQ ID NO: 214669 - protein, 15 aa, Artificial Sequence
  Description of Artificial Sequence: Synthetic peptide
  Seed: ANQRLNPMHQLLRHF
ANQRLNPYHALLLHF

SEQ ID NO: 214670 - protein, 15 aa, Artificial Sequence
  Description of Artificial Sequence: Synthetic peptide
  Seed: ANQRLNPMHQLLRHF
ANQRLNPYHALLMHF

SEQ ID NO: 214671 - protein, 15 aa, Artificial Sequence
  Description of Artificial Sequence: Synthetic peptide
  Seed: ANQRLNPMHQLLRHF
ANQRLNPYHALLTHF

SEQ ID NO: 214672 - protein, 15 aa, Artificial Sequence
  Description of Artificial Sequence: Synthetic peptide
  Seed: ANQRLNPMHQLLRHF
ANQRLNPYHALLVHF

SEQ ID NO: 214673 - protein, 15 aa, Artificial Sequence
  Description of Artificial Sequence: Synthetic peptide
  Seed: ANQRLNPMHQLLRHF
ANQRLNPYHGLLAHF

SEQ ID NO: 214674 - protein, 15 aa, Artificial Sequence
  Description of Artificial Sequence: Synthetic peptide
  Seed: ANQRLNPMHQLLRHF
ANQRLNPYHGLLIHF

SEQ ID NO: 214675 - protein, 15 aa, Artificial Sequence
  Description of Artificial Sequence: Synthetic peptide
  Seed: ANQRLNPMHQLLRHF
ANQRLNPYHGLLLHF

SEQ ID NO: 214676 - protein, 15 aa, Artificial Sequence
  Description of Artificial Sequence: Synthetic peptide
  Seed: ANQRLNPMHQLLRHF
ANQRLNPYHGLLMHF

SEQ ID NO: 214677 - protein, 15 aa, Artificial Sequence
  Description of Artificial Sequence: Synthetic peptide
  Seed: ANQRLNPMHQLLRHF
ANQRLNPYHGLLSHF

SEQ ID NO: 214678 - protein, 15 aa, Artificial Sequence
  Description of Artificial Sequence: Synthetic peptide
  Seed: ANQRLNPMHQLLRHF
ANQRLNPYHGLLTHF

SEQ ID NO: 214679 - protein, 15 aa, Artificial Sequence
  Description of Artificial Sequence: Synthetic peptide
  Seed: ANQRLNPMHQLLRHF
ANQRLNPYHGLLVHF

SEQ ID NO: 214680 - protein, 15 aa, Artificial Sequence
  Description of Artificial Sequence: Synthetic peptide
  Seed: ANQRLNPMHQLLRHF
ANQRLNPYHNLLAHF

SEQ ID NO: 214681 - protein, 15 aa, Artificial Sequence
  Description of Artificial Sequence: Synthetic peptide
  Seed: ANQRLNPMHQLLRHF
ANQRLNPYHNLLIHF

SEQ ID NO: 214682 - protein, 15 aa, Artificial Sequence
  Description of Artificial Sequence: Synthetic peptide
  Seed: ANQRLNPMHQLLRHF
ANQRLNPYHNLLLHF

SEQ ID NO: 214683 - protein, 15 aa, Artificial Sequence
  Description of Artificial Sequence: Synthetic peptide
  Seed: ANQRLNPMHQLLRHF
ANQRLNPYHNLLMHF

SEQ ID NO: 214684 - protein, 15 aa, Artificial Sequence
  Description of Artificial Sequence: Synthetic peptide
  Seed: ANQRLNPMHQLLRHF
ANQRLNPYHNLLSHF

SEQ ID NO: 214685 - protein, 15 aa, Artificial Sequence
  Description of Artificial Sequence: Synthetic peptide
  Seed: ANQRLNPMHQLLRHF
ANQRLNPYHNLLTHF

SEQ ID NO: 214686 - protein, 15 aa, Artificial Sequence
  Description of Artificial Sequence: Synthetic peptide
  Seed: ANQRLNPMHQLLRHF
ANQRLNPYHNLLVHF

SEQ ID NO: 214687 - protein, 15 aa, Artificial Sequence
  Description of Artificial Sequence: Synthetic peptide
  Seed: ANQRLNPMHQLLRHF
ANQRLNPYHSLLAHF

SEQ ID NO: 214688 - protein, 15 aa, Artificial Sequence
  Description of Artificial Sequence: Synthetic peptide
  Seed: ANQRLNPMHQLLRHF
ANQRLNPYHSLLGHF

SEQ ID NO: 214689 - protein, 15 aa, Artificial Sequence
  Description of Artificial Sequence: Synthetic peptide
  Seed: ANQRLNPMHQLLRHF
ANQRLNPYHSLLIHF

SEQ ID NO: 214690 - protein, 15 aa, Artificial Sequence
  Description of Artificial Sequence: Synthetic peptide
  Seed: ANQRLNPMHQLLRHF
ANQRLNPYHSLLLHF

SEQ ID NO: 214691 - protein, 15 aa, Artificial Sequence
  Description of Artificial Sequence: Synthetic peptide
  Seed: ANQRLNPMHQLLRHF
ANQRLNPYHSLLMHF

SEQ ID NO: 214692 - protein, 15 aa, Artificial Sequence
  Description of Artificial Sequence: Synthetic peptide
  Seed: ANQRLNPMHQLLRHF
ANQRLNPYHSLLSHF

SEQ ID NO: 214693 - protein, 15 aa, Artificial Sequence
  Description of Artificial Sequence: Synthetic peptide
  Seed: ANQRLNPMHQLLRHF
ANQRLNPYHSLLTHF

SEQ ID NO: 214694 - protein, 15 aa, Artificial Sequence
  Description of Artificial Sequence: Synthetic peptide
  Seed: ANQRLNPMHQLLRHF
ANQRLNPYHSLLVHF

SEQ ID NO: 214695 - protein, 15 aa, Artificial Sequence
  Description of Artificial Sequence: Synthetic peptide
  Seed: ANQRLNPMHQLLRHF
ANQRLNPYHTLLAHF

SEQ ID NO: 214696 - protein, 15 aa, Artificial Sequence
  Description of Artificial Sequence: Synthetic peptide
  Seed: ANQRLNPMHQLLRHF
ANQRLNPYHTLLIHF

SEQ ID NO: 214697 - protein, 15 aa, Artificial Sequence
  Description of Artificial Sequence: Synthetic peptide
  Seed: ANQRLNPMHQLLRHF
ANQRLNPYHTLLLHF

SEQ ID NO: 214698 - protein, 15 aa, Artificial Sequence
  Description of Artificial Sequence: Synthetic peptide
  Seed: ANQRLNPMHQLLRHF
ANQRLNPYHTLLVHF

SEQ ID NO: 214699 - protein, 15 aa, Artificial Sequence
  Description of Artificial Sequence: Synthetic peptide
  Seed: ANQRLNPMHQLLRHF
ANQRMNPAHALLAHF

SEQ ID NO: 214700 - protein, 15 aa, Artificial Sequence
  Description of Artificial Sequence: Synthetic peptide
  Seed: ANQRLNPMHQLLRHF
ANQRMNPAHALLIHF

SEQ ID NO: 214701 - protein, 15 aa, Artificial Sequence
  Description of Artificial Sequence: Synthetic peptide
  Seed: ANQRLNPMHQLLRHF
ANQRMNPAHALLLHF

SEQ ID NO: 214702 - protein, 15 aa, Artificial Sequence
  Description of Artificial Sequence: Synthetic peptide
  Seed: ANQRLNPMHQLLRHF
ANQRMNPAHALLMHF

SEQ ID NO: 214703 - protein, 15 aa, Artificial Sequence
  Description of Artificial Sequence: Synthetic peptide
  Seed: ANQRLNPMHQLLRHF
ANQRMNPAHALLSHF

SEQ ID NO: 214704 - protein, 15 aa, Artificial Sequence
  Description of Artificial Sequence: Synthetic peptide
  Seed: ANQRLNPMHQLLRHF
ANQRMNPAHALLTHF

SEQ ID NO: 214705 - protein, 15 aa, Artificial Sequence
  Description of Artificial Sequence: Synthetic peptide
  Seed: ANQRLNPMHQLLRHF
ANQRMNPAHALLVHF

SEQ ID NO: 214706 - protein, 15 aa, Artificial Sequence
  Description of Artificial Sequence: Synthetic peptide
  Seed: ANQRLNPMHQLLRHF
ANQRMNPAHFLLIHF

SEQ ID NO: 214707 - protein, 15 aa, Artificial Sequence
  Description of Artificial Sequence: Synthetic peptide
  Seed: ANQRLNPMHQLLRHF
ANQRMNPAHFLLLHF

SEQ ID NO: 214708 - protein, 15 aa, Artificial Sequence
  Description of Artificial Sequence: Synthetic peptide
  Seed: ANQRLNPMHQLLRHF
ANQRMNPAHFLLVHF

SEQ ID NO: 214709 - protein, 15 aa, Artificial Sequence
  Description of Artificial Sequence: Synthetic peptide
  Seed: ANQRLNPMHQLLRHF
ANQRMNPAHGLLAHF

SEQ ID NO: 214710 - protein, 15 aa, Artificial Sequence
  Description of Artificial Sequence: Synthetic peptide
  Seed: ANQRLNPMHQLLRHF
ANQRMNPAHGLLIHF

SEQ ID NO: 214711 - protein, 15 aa, Artificial Sequence
  Description of Artificial Sequence: Synthetic peptide
  Seed: ANQRLNPMHQLLRHF
ANQRMNPAHGLLLHF

SEQ ID NO: 214712 - protein, 15 aa, Artificial Sequence
  Description of Artificial Sequence: Synthetic peptide
  Seed: ANQRLNPMHQLLRHF
ANQRMNPAHGLLMHF

SEQ ID NO: 214713 - protein, 15 aa, Artificial Sequence
  Description of Artificial Sequence: Synthetic peptide
  Seed: ANQRLNPMHQLLRHF
ANQRMNPAHGLLVHF

SEQ ID NO: 214714 - protein, 15 aa, Artificial Sequence
  Description of Artificial Sequence: Synthetic peptide
  Seed: ANQRLNPMHQLLRHF
ANQRMNPAHPLLAHF

SEQ ID NO: 214715 - protein, 15 aa, Artificial Sequence
  Description of Artificial Sequence: Synthetic peptide
  Seed: ANQRLNPMHQLLRHF
ANQRMNPAHPLLIHF

SEQ ID NO: 214716 - protein, 15 aa, Artificial Sequence
  Description of Artificial Sequence: Synthetic peptide
  Seed: ANQRLNPMHQLLRHF
ANQRMNPAHPLLLHF

SEQ ID NO: 214717 - protein, 15 aa, Artificial Sequence
  Description of Artificial Sequence: Synthetic peptide
  Seed: ANQRLNPMHQLLRHF
ANQRMNPAHPLLVHF

SEQ ID NO: 214718 - protein, 15 aa, Artificial Sequence
  Description of Artificial Sequence: Synthetic peptide
  Seed: ANQRLNPMHQLLRHF
ANQRMNPAHRLLAHF

SEQ ID NO: 214719 - protein, 15 aa, Artificial Sequence
  Description of Artificial Sequence: Synthetic peptide
  Seed: ANQRLNPMHQLLRHF
ANQRMNPAHRLLQHF

SEQ ID NO: 214720 - protein, 15 aa, Artificial Sequence
  Description of Artificial Sequence: Synthetic peptide
  Seed: ANQRLNPMHQLLRHF
ANQRMNPAHRLLRHF

SEQ ID NO: 214721 - protein, 15 aa, Artificial Sequence
  Description of Artificial Sequence: Synthetic peptide
  Seed: ANQRLNPMHQLLRHF
ANQRMNPAHRLLSHF

SEQ ID NO: 214722 - protein, 15 aa, Artificial Sequence
  Description of Artificial Sequence: Synthetic peptide
  Seed: ANQRLNPMHQLLRHF
ANQRMNPAHRLLYHF

SEQ ID NO: 214723 - protein, 15 aa, Artificial Sequence
  Description of Artificial Sequence: Synthetic peptide
  Seed: ANQRLNPMHQLLRHF
ANQRMNPAHSLLAHF

SEQ ID NO: 214724 - protein, 15 aa, Artificial Sequence
  Description of Artificial Sequence: Synthetic peptide
  Seed: ANQRLNPMHQLLRHF
ANQRMNPAHSLLIHF

SEQ ID NO: 214725 - protein, 15 aa, Artificial Sequence
  Description of Artificial Sequence: Synthetic peptide
  Seed: ANQRLNPMHQLLRHF
ANQRMNPAHSLLLHF

SEQ ID NO: 214726 - protein, 15 aa, Artificial Sequence
  Description of Artificial Sequence: Synthetic peptide
  Seed: ANQRLNPMHQLLRHF
ANQRMNPAHSLLMHF

SEQ ID NO: 214727 - protein, 15 aa, Artificial Sequence
  Description of Artificial Sequence: Synthetic peptide
  Seed: ANQRLNPMHQLLRHF
ANQRMNPAHSLLTHF

SEQ ID NO: 214728 - protein, 15 aa, Artificial Sequence
  Description of Artificial Sequence: Synthetic peptide
  Seed: ANQRLNPMHQLLRHF
ANQRMNPAHSLLVHF

SEQ ID NO: 214729 - protein, 15 aa, Artificial Sequence
  Description of Artificial Sequence: Synthetic peptide
  Seed: ANQRLNPMHQLLRHF
ANQRMNPAHTLLLHF

SEQ ID NO: 214730 - protein, 15 aa, Artificial Sequence
  Description of Artificial Sequence: Synthetic peptide
  Seed: ANQRLNPMHQLLRHF
ANQRMNPAHTLLVHF

SEQ ID NO: 214731 - protein, 15 aa, Artificial Sequence
  Description of Artificial Sequence: Synthetic peptide
  Seed: ANQRLNPMHQLLRHF
ANQRMNPEHFLLIHF

SEQ ID NO: 214732 - protein, 15 aa, Artificial Sequence
  Description of Artificial Sequence: Synthetic peptide
  Seed: ANQRLNPMHQLLRHF
ANQRMNPEHFLLLHF

SEQ ID NO: 214733 - protein, 15 aa, Artificial Sequence
  Description of Artificial Sequence: Synthetic peptide
  Seed: ANQRLNPMHQLLRHF
ANQRMNPEHFLLVHF

SEQ ID NO: 214734 - protein, 15 aa, Artificial Sequence
  Description of Artificial Sequence: Synthetic peptide
  Seed: ANQRLNPMHQLLRHF
ANQRMNPFHALLLHF

SEQ ID NO: 214735 - protein, 15 aa, Artificial Sequence
  Description of Artificial Sequence: Synthetic peptide
  Seed: ANQRLNPMHQLLRHF
ANQRMNPFHFLLFHF

SEQ ID NO: 214736 - protein, 15 aa, Artificial Sequence
  Description of Artificial Sequence: Synthetic peptide
  Seed: ANQRLNPMHQLLRHF
ANQRMNPFHFLLIHF

SEQ ID NO: 214737 - protein, 15 aa, Artificial Sequence
  Description of Artificial Sequence: Synthetic peptide
  Seed: ANQRLNPMHQLLRHF
ANQRMNPFHFLLLHF

SEQ ID NO: 214738 - protein, 15 aa, Artificial Sequence
  Description of Artificial Sequence: Synthetic peptide
  Seed: ANQRLNPMHQLLRHF
ANQRMNPFHFLLMHF

SEQ ID NO: 214739 - protein, 15 aa, Artificial Sequence
  Description of Artificial Sequence: Synthetic peptide
  Seed: ANQRLNPMHQLLRHF
ANQRMNPFHFLLVHF

SEQ ID NO: 214740 - protein, 15 aa, Artificial Sequence
  Description of Artificial Sequence: Synthetic peptide
  Seed: ANQRLNPMHQLLRHF
ANQRMNPFHGLLLHF

SEQ ID NO: 214741 - protein, 15 aa, Artificial Sequence
  Description of Artificial Sequence: Synthetic peptide
  Seed: ANQRLNPMHQLLRHF
ANQRMNPFHGLLVHF

SEQ ID NO: 214742 - protein, 15 aa, Artificial Sequence
  Description of Artificial Sequence: Synthetic peptide
  Seed: ANQRLNPMHQLLRHF
ANQRMNPFHKLLAHF

SEQ ID NO: 214743 - protein, 15 aa, Artificial Sequence
  Description of Artificial Sequence: Synthetic peptide
  Seed: ANQRLNPMHQLLRHF
ANQRMNPFHKLLSHF

SEQ ID NO: 214744 - protein, 15 aa, Artificial Sequence
  Description of Artificial Sequence: Synthetic peptide
  Seed: ANQRLNPMHQLLRHF
ANQRMNPFHNLLAHF

SEQ ID NO: 214745 - protein, 15 aa, Artificial Sequence
  Description of Artificial Sequence: Synthetic peptide
  Seed: ANQRLNPMHQLLRHF
ANQRMNPFHNLLIHF

SEQ ID NO: 214746 - protein, 15 aa, Artificial Sequence
  Description of Artificial Sequence: Synthetic peptide
  Seed: ANQRLNPMHQLLRHF
ANQRMNPFHNLLLHF

SEQ ID NO: 214747 - protein, 15 aa, Artificial Sequence
  Description of Artificial Sequence: Synthetic peptide
  Seed: ANQRLNPMHQLLRHF
ANQRMNPFHNLLVHF

SEQ ID NO: 214748 - protein, 15 aa, Artificial Sequence
  Description of Artificial Sequence: Synthetic peptide
  Seed: ANQRLNPMHQLLRHF
ANQRMNPFHRLLAHF

SEQ ID NO: 214749 - protein, 15 aa, Artificial Sequence
  Description of Artificial Sequence: Synthetic peptide
  Seed: ANQRLNPMHQLLRHF
ANQRMNPFHRLLHHF

SEQ ID NO: 214750 - protein, 15 aa, Artificial Sequence
  Description of Artificial Sequence: Synthetic peptide
  Seed: ANQRLNPMHQLLRHF
ANQRMNPFHRLLKHF

SEQ ID NO: 214751 - protein, 15 aa, Artificial Sequence
  Description of Artificial Sequence: Synthetic peptide
  Seed: ANQRLNPMHQLLRHF
ANQRMNPFHRLLRHF

SEQ ID NO: 214752 - protein, 15 aa, Artificial Sequence
  Description of Artificial Sequence: Synthetic peptide
  Seed: ANQRLNPMHQLLRHF
ANQRMNPFHRLLSHF

SEQ ID NO: 214753 - protein, 15 aa, Artificial Sequence
  Description of Artificial Sequence: Synthetic peptide
  Seed: ANQRLNPMHQLLRHF
ANQRMNPFHRLLYHF

SEQ ID NO: 214754 - protein, 15 aa, Artificial Sequence
  Description of Artificial Sequence: Synthetic peptide
  Seed: ANQRLNPMHQLLRHF
ANQRMNPFHSLLAHF

SEQ ID NO: 214755 - protein, 15 aa, Artificial Sequence
  Description of Artificial Sequence: Synthetic peptide
  Seed: ANQRLNPMHQLLRHF
ANQRMNPFHSLLIHF

SEQ ID NO: 214756 - protein, 15 aa, Artificial Sequence
  Description of Artificial Sequence: Synthetic peptide
  Seed: ANQRLNPMHQLLRHF
ANQRMNPFHSLLLHF

SEQ ID NO: 214757 - protein, 15 aa, Artificial Sequence
  Description of Artificial Sequence: Synthetic peptide
  Seed: ANQRLNPMHQLLRHF
ANQRMNPFHSLLMHF

SEQ ID NO: 214758 - protein, 15 aa, Artificial Sequence
  Description of Artificial Sequence: Synthetic peptide
  Seed: ANQRLNPMHQLLRHF
ANQRMNPFHSLLTHF

SEQ ID NO: 214759 - protein, 15 aa, Artificial Sequence
  Description of Artificial Sequence: Synthetic peptide
  Seed: ANQRLNPMHQLLRHF
ANQRMNPFHSLLVHF

SEQ ID NO: 214760 - protein, 15 aa, Artificial Sequence
  Description of Artificial Sequence: Synthetic peptide
  Seed: ANQRLNPMHQLLRHF
ANQRMNPGHALLIHF

SEQ ID NO: 214761 - protein, 15 aa, Artificial Sequence
  Description of Artificial Sequence: Synthetic peptide
  Seed: ANQRLNPMHQLLRHF
ANQRMNPGHALLLHF

SEQ ID NO: 214762 - protein, 15 aa, Artificial Sequence
  Description of Artificial Sequence: Synthetic peptide
  Seed: ANQRLNPMHQLLRHF
ANQRMNPGHALLVHF

SEQ ID NO: 214763 - protein, 15 aa, Artificial Sequence
  Description of Artificial Sequence: Synthetic peptide
  Seed: ANQRLNPMHQLLRHF
ANQRMNPHHRLLRHF

SEQ ID NO: 214764 - protein, 15 aa, Artificial Sequence
  Description of Artificial Sequence: Synthetic peptide
  Seed: ANQRLNPMHQLLRHF
ANQRMNPIHALLAHF

SEQ ID NO: 214765 - protein, 15 aa, Artificial Sequence
  Description of Artificial Sequence: Synthetic peptide
  Seed: ANQRLNPMHQLLRHF
ANQRMNPIHALLIHF

SEQ ID NO: 214766 - protein, 15 aa, Artificial Sequence
  Description of Artificial Sequence: Synthetic peptide
  Seed: ANQRLNPMHQLLRHF
ANQRMNPIHALLLHF

SEQ ID NO: 214767 - protein, 15 aa, Artificial Sequence
  Description of Artificial Sequence: Synthetic peptide
  Seed: ANQRLNPMHQLLRHF
ANQRMNPIHALLMHF

SEQ ID NO: 214768 - protein, 15 aa, Artificial Sequence
  Description of Artificial Sequence: Synthetic peptide
  Seed: ANQRLNPMHQLLRHF
ANQRMNPIHALLSHF

SEQ ID NO: 214769 - protein, 15 aa, Artificial Sequence
  Description of Artificial Sequence: Synthetic peptide
  Seed: ANQRLNPMHQLLRHF
ANQRMNPIHALLTHF

SEQ ID NO: 214770 - protein, 15 aa, Artificial Sequence
  Description of Artificial Sequence: Synthetic peptide
  Seed: ANQRLNPMHQLLRHF
ANQRMNPIHALLVHF

SEQ ID NO: 214771 - protein, 15 aa, Artificial Sequence
  Description of Artificial Sequence: Synthetic peptide
  Seed: ANQRLNPMHQLLRHF
ANQRMNPIHFLLFHF

SEQ ID NO: 214772 - protein, 15 aa, Artificial Sequence
  Description of Artificial Sequence: Synthetic peptide
  Seed: ANQRLNPMHQLLRHF
ANQRMNPIHFLLIHF

SEQ ID NO: 214773 - protein, 15 aa, Artificial Sequence
  Description of Artificial Sequence: Synthetic peptide
  Seed: ANQRLNPMHQLLRHF
ANQRMNPIHFLLLHF

SEQ ID NO: 214774 - protein, 15 aa, Artificial Sequence
  Description of Artificial Sequence: Synthetic peptide
  Seed: ANQRLNPMHQLLRHF
ANQRMNPIHFLLMHF

SEQ ID NO: 214775 - protein, 15 aa, Artificial Sequence
  Description of Artificial Sequence: Synthetic peptide
  Seed: ANQRLNPMHQLLRHF
ANQRMNPIHFLLVHF

SEQ ID NO: 214776 - protein, 15 aa, Artificial Sequence
  Description of Artificial Sequence: Synthetic peptide
  Seed: ANQRLNPMHQLLRHF
ANQRMNPIHGLLAHF

SEQ ID NO: 214777 - protein, 15 aa, Artificial Sequence
  Description of Artificial Sequence: Synthetic peptide
  Seed: ANQRLNPMHQLLRHF
ANQRMNPIHGLLIHF

SEQ ID NO: 214778 - protein, 15 aa, Artificial Sequence
  Description of Artificial Sequence: Synthetic peptide
  Seed: ANQRLNPMHQLLRHF
ANQRMNPIHGLLLHF

SEQ ID NO: 214779 - protein, 15 aa, Artificial Sequence
  Description of Artificial Sequence: Synthetic peptide
  Seed: ANQRLNPMHQLLRHF
ANQRMNPIHGLLMHF

SEQ ID NO: 214780 - protein, 15 aa, Artificial Sequence
  Description of Artificial Sequence: Synthetic peptide
  Seed: ANQRLNPMHQLLRHF
ANQRMNPIHGLLSHF

SEQ ID NO: 214781 - protein, 15 aa, Artificial Sequence
  Description of Artificial Sequence: Synthetic peptide
  Seed: ANQRLNPMHQLLRHF
ANQRMNPIHGLLTHF

SEQ ID NO: 214782 - protein, 15 aa, Artificial Sequence
  Description of Artificial Sequence: Synthetic peptide
  Seed: ANQRLNPMHQLLRHF
ANQRMNPIHGLLVHF

SEQ ID NO: 214783 - protein, 15 aa, Artificial Sequence
  Description of Artificial Sequence: Synthetic peptide
  Seed: ANQRLNPMHQLLRHF
ANQRMNPIHKLLAHF

SEQ ID NO: 214784 - protein, 15 aa, Artificial Sequence
  Description of Artificial Sequence: Synthetic peptide
  Seed: ANQRLNPMHQLLRHF
ANQRMNPIHKLLGHF

SEQ ID NO: 214785 - protein, 15 aa, Artificial Sequence
  Description of Artificial Sequence: Synthetic peptide
  Seed: ANQRLNPMHQLLRHF
ANQRMNPIHKLLHHF

SEQ ID NO: 214786 - protein, 15 aa, Artificial Sequence
  Description of Artificial Sequence: Synthetic peptide
  Seed: ANQRLNPMHQLLRHF
ANQRMNPIHKLLKHF

SEQ ID NO: 214787 - protein, 15 aa, Artificial Sequence
  Description of Artificial Sequence: Synthetic peptide
  Seed: ANQRLNPMHQLLRHF
ANQRMNPIHKLLQHF

SEQ ID NO: 214788 - protein, 15 aa, Artificial Sequence
  Description of Artificial Sequence: Synthetic peptide
  Seed: ANQRLNPMHQLLRHF
ANQRMNPIHKLLRHF

SEQ ID NO: 214789 - protein, 15 aa, Artificial Sequence
  Description of Artificial Sequence: Synthetic peptide
  Seed: ANQRLNPMHQLLRHF
ANQRMNPIHKLLSHF

SEQ ID NO: 214790 - protein, 15 aa, Artificial Sequence
  Description of Artificial Sequence: Synthetic peptide
  Seed: ANQRLNPMHQLLRHF
ANQRMNPIHKLLTHF

SEQ ID NO: 214791 - protein, 15 aa, Artificial Sequence
  Description of Artificial Sequence: Synthetic peptide
  Seed: ANQRLNPMHQLLRHF
ANQRMNPIHPLLAHF

SEQ ID NO: 214792 - protein, 15 aa, Artificial Sequence
  Description of Artificial Sequence: Synthetic peptide
  Seed: ANQRLNPMHQLLRHF
ANQRMNPIHPLLIHF

SEQ ID NO: 214793 - protein, 15 aa, Artificial Sequence
  Description of Artificial Sequence: Synthetic peptide
  Seed: ANQRLNPMHQLLRHF
ANQRMNPIHPLLLHF

SEQ ID NO: 214794 - protein, 15 aa, Artificial Sequence
  Description of Artificial Sequence: Synthetic peptide
  Seed: ANQRLNPMHQLLRHF
ANQRMNPIHPLLVHF

SEQ ID NO: 214795 - protein, 15 aa, Artificial Sequence
  Description of Artificial Sequence: Synthetic peptide
  Seed: ANQRLNPMHQLLRHF
ANQRMNPIHRLLAHF

SEQ ID NO: 214796 - protein, 15 aa, Artificial Sequence
  Description of Artificial Sequence: Synthetic peptide
  Seed: ANQRLNPMHQLLRHF
ANQRMNPIHRLLFHF

SEQ ID NO: 214797 - protein, 15 aa, Artificial Sequence
  Description of Artificial Sequence: Synthetic peptide
  Seed: ANQRLNPMHQLLRHF
ANQRMNPIHRLLGHF

SEQ ID NO: 214798 - protein, 15 aa, Artificial Sequence
  Description of Artificial Sequence: Synthetic peptide
  Seed: ANQRLNPMHQLLRHF
ANQRMNPIHRLLHHF

SEQ ID NO: 214799 - protein, 15 aa, Artificial Sequence
  Description of Artificial Sequence: Synthetic peptide
  Seed: ANQRLNPMHQLLRHF
ANQRMNPIHRLLKHF

SEQ ID NO: 214800 - protein, 15 aa, Artificial Sequence
  Description of Artificial Sequence: Synthetic peptide
  Seed: ANQRLNPMHQLLRHF
ANQRMNPIHRLLLHF

SEQ ID NO: 214801 - protein, 15 aa, Artificial Sequence
  Description of Artificial Sequence: Synthetic peptide
  Seed: ANQRLNPMHQLLRHF
ANQRMNPIHRLLMHF

SEQ ID NO: 214802 - protein, 15 aa, Artificial Sequence
  Description of Artificial Sequence: Synthetic peptide
  Seed: ANQRLNPMHQLLRHF
ANQRMNPIHRLLNHF

SEQ ID NO: 214803 - protein, 15 aa, Artificial Sequence
  Description of Artificial Sequence: Synthetic peptide
  Seed: ANQRLNPMHQLLRHF
ANQRMNPIHRLLQHF

SEQ ID NO: 214804 - protein, 15 aa, Artificial Sequence
  Description of Artificial Sequence: Synthetic peptide
  Seed: ANQRLNPMHQLLRHF
ANQRMNPIHRLLRHF

SEQ ID NO: 214805 - protein, 15 aa, Artificial Sequence
  Description of Artificial Sequence: Synthetic peptide
  Seed: ANQRLNPMHQLLRHF
ANQRMNPIHRLLSHF

SEQ ID NO: 214806 - protein, 15 aa, Artificial Sequence
  Description of Artificial Sequence: Synthetic peptide
  Seed: ANQRLNPMHQLLRHF
ANQRMNPIHRLLTHF

SEQ ID NO: 214807 - protein, 15 aa, Artificial Sequence
  Description of Artificial Sequence: Synthetic peptide
  Seed: ANQRLNPMHQLLRHF
ANQRMNPIHRLLVHF

SEQ ID NO: 214808 - protein, 15 aa, Artificial Sequence
  Description of Artificial Sequence: Synthetic peptide
  Seed: ANQRLNPMHQLLRHF
ANQRMNPIHRLLYHF

SEQ ID NO: 214809 - protein, 15 aa, Artificial Sequence
  Description of Artificial Sequence: Synthetic peptide
  Seed: ANQRLNPMHQLLRHF
ANQRMNPIHSLLAHF

SEQ ID NO: 214810 - protein, 15 aa, Artificial Sequence
  Description of Artificial Sequence: Synthetic peptide
  Seed: ANQRLNPMHQLLRHF
ANQRMNPIHSLLIHF

SEQ ID NO: 214811 - protein, 15 aa, Artificial Sequence
  Description of Artificial Sequence: Synthetic peptide
  Seed: ANQRLNPMHQLLRHF
ANQRMNPIHSLLLHF

SEQ ID NO: 214812 - protein, 15 aa, Artificial Sequence
  Description of Artificial Sequence: Synthetic peptide
  Seed: ANQRLNPMHQLLRHF
ANQRMNPIHSLLTHF

SEQ ID NO: 214813 - protein, 15 aa, Artificial Sequence
  Description of Artificial Sequence: Synthetic peptide
  Seed: ANQRLNPMHQLLRHF
ANQRMNPIHSLLVHF

SEQ ID NO: 214814 - protein, 15 aa, Artificial Sequence
  Description of Artificial Sequence: Synthetic peptide
  Seed: ANQRLNPMHQLLRHF
ANQRMNPLHALLAHF

SEQ ID NO: 214815 - protein, 15 aa, Artificial Sequence
  Description of Artificial Sequence: Synthetic peptide
  Seed: ANQRLNPMHQLLRHF
ANQRMNPLHALLCHF

SEQ ID NO: 214816 - protein, 15 aa, Artificial Sequence
  Description of Artificial Sequence: Synthetic peptide
  Seed: ANQRLNPMHQLLRHF
ANQRMNPLHALLGHF

SEQ ID NO: 214817 - protein, 15 aa, Artificial Sequence
  Description of Artificial Sequence: Synthetic peptide
  Seed: ANQRLNPMHQLLRHF
ANQRMNPLHALLIHF

SEQ ID NO: 214818 - protein, 15 aa, Artificial Sequence
  Description of Artificial Sequence: Synthetic peptide
  Seed: ANQRLNPMHQLLRHF
ANQRMNPLHALLLHF

SEQ ID NO: 214819 - protein, 15 aa, Artificial Sequence
  Description of Artificial Sequence: Synthetic peptide
  Seed: ANQRLNPMHQLLRHF
ANQRMNPLHALLMHF

SEQ ID NO: 214820 - protein, 15 aa, Artificial Sequence
  Description of Artificial Sequence: Synthetic peptide
  Seed: ANQRLNPMHQLLRHF
ANQRMNPLHALLNHF

SEQ ID NO: 214821 - protein, 15 aa, Artificial Sequence
  Description of Artificial Sequence: Synthetic peptide
  Seed: ANQRLNPMHQLLRHF
ANQRMNPLHALLSHF

SEQ ID NO: 214822 - protein, 15 aa, Artificial Sequence
  Description of Artificial Sequence: Synthetic peptide
  Seed: ANQRLNPMHQLLRHF
ANQRMNPLHALLTHF

SEQ ID NO: 214823 - protein, 15 aa, Artificial Sequence
  Description of Artificial Sequence: Synthetic peptide
  Seed: ANQRLNPMHQLLRHF
ANQRMNPLHALLVHF

SEQ ID NO: 214824 - protein, 15 aa, Artificial Sequence
  Description of Artificial Sequence: Synthetic peptide
  Seed: ANQRLNPMHQLLRHF
ANQRMNPLHFLLFHF

SEQ ID NO: 214825 - protein, 15 aa, Artificial Sequence
  Description of Artificial Sequence: Synthetic peptide
  Seed: ANQRLNPMHQLLRHF
ANQRMNPLHFLLIHF

SEQ ID NO: 214826 - protein, 15 aa, Artificial Sequence
  Description of Artificial Sequence: Synthetic peptide
  Seed: ANQRLNPMHQLLRHF
ANQRMNPLHFLLLHF

SEQ ID NO: 214827 - protein, 15 aa, Artificial Sequence
  Description of Artificial Sequence: Synthetic peptide
  Seed: ANQRLNPMHQLLRHF
ANQRMNPLHFLLMHF

SEQ ID NO: 214828 - protein, 15 aa, Artificial Sequence
  Description of Artificial Sequence: Synthetic peptide
  Seed: ANQRLNPMHQLLRHF
ANQRMNPLHFLLVHF

SEQ ID NO: 214829 - protein, 15 aa, Artificial Sequence
  Description of Artificial Sequence: Synthetic peptide
  Seed: ANQRLNPMHQLLRHF
ANQRMNPLHGLLAHF

SEQ ID NO: 214830 - protein, 15 aa, Artificial Sequence
  Description of Artificial Sequence: Synthetic peptide
  Seed: ANQRLNPMHQLLRHF
ANQRMNPLHGLLCHF

SEQ ID NO: 214831 - protein, 15 aa, Artificial Sequence
  Description of Artificial Sequence: Synthetic peptide
  Seed: ANQRLNPMHQLLRHF
ANQRMNPLHGLLGHF

SEQ ID NO: 214832 - protein, 15 aa, Artificial Sequence
  Description of Artificial Sequence: Synthetic peptide
  Seed: ANQRLNPMHQLLRHF
ANQRMNPLHGLLIHF

SEQ ID NO: 214833 - protein, 15 aa, Artificial Sequence
  Description of Artificial Sequence: Synthetic peptide
  Seed: ANQRLNPMHQLLRHF
ANQRMNPLHGLLLHF

SEQ ID NO: 214834 - protein, 15 aa, Artificial Sequence
  Description of Artificial Sequence: Synthetic peptide
  Seed: ANQRLNPMHQLLRHF
ANQRMNPLHGLLMHF

SEQ ID NO: 214835 - protein, 15 aa, Artificial Sequence
  Description of Artificial Sequence: Synthetic peptide
  Seed: ANQRLNPMHQLLRHF
ANQRMNPLHGLLSHF

SEQ ID NO: 214836 - protein, 15 aa, Artificial Sequence
  Description of Artificial Sequence: Synthetic peptide
  Seed: ANQRLNPMHQLLRHF
ANQRMNPLHGLLTHF

SEQ ID NO: 214837 - protein, 15 aa, Artificial Sequence
  Description of Artificial Sequence: Synthetic peptide
  Seed: ANQRLNPMHQLLRHF
ANQRMNPLHGLLVHF

SEQ ID NO: 214838 - protein, 15 aa, Artificial Sequence
  Description of Artificial Sequence: Synthetic peptide
  Seed: ANQRLNPMHQLLRHF
ANQRMNPLHKLLAHF

SEQ ID NO: 214839 - protein, 15 aa, Artificial Sequence
  Description of Artificial Sequence: Synthetic peptide
  Seed: ANQRLNPMHQLLRHF
ANQRMNPLHKLLGHF

SEQ ID NO: 214840 - protein, 15 aa, Artificial Sequence
  Description of Artificial Sequence: Synthetic peptide
  Seed: ANQRLNPMHQLLRHF
ANQRMNPLHKLLHHF

SEQ ID NO: 214841 - protein, 15 aa, Artificial Sequence
  Description of Artificial Sequence: Synthetic peptide
  Seed: ANQRLNPMHQLLRHF
ANQRMNPLHKLLKHF

SEQ ID NO: 214842 - protein, 15 aa, Artificial Sequence
  Description of Artificial Sequence: Synthetic peptide
  Seed: ANQRLNPMHQLLRHF
ANQRMNPLHKLLQHF

SEQ ID NO: 214843 - protein, 15 aa, Artificial Sequence
  Description of Artificial Sequence: Synthetic peptide
  Seed: ANQRLNPMHQLLRHF
ANQRMNPLHKLLRHF

SEQ ID NO: 214844 - protein, 15 aa, Artificial Sequence
  Description of Artificial Sequence: Synthetic peptide
  Seed: ANQRLNPMHQLLRHF
ANQRMNPLHKLLSHF

SEQ ID NO: 214845 - protein, 15 aa, Artificial Sequence
  Description of Artificial Sequence: Synthetic peptide
  Seed: ANQRLNPMHQLLRHF
ANQRMNPLHKLLTHF

SEQ ID NO: 214846 - protein, 15 aa, Artificial Sequence
  Description of Artificial Sequence: Synthetic peptide
  Seed: ANQRLNPMHQLLRHF
ANQRMNPLHNLLAHF

SEQ ID NO: 214847 - protein, 15 aa, Artificial Sequence
  Description of Artificial Sequence: Synthetic peptide
  Seed: ANQRLNPMHQLLRHF
ANQRMNPLHNLLIHF

SEQ ID NO: 214848 - protein, 15 aa, Artificial Sequence
  Description of Artificial Sequence: Synthetic peptide
  Seed: ANQRLNPMHQLLRHF
ANQRMNPLHNLLLHF

SEQ ID NO: 214849 - protein, 15 aa, Artificial Sequence
  Description of Artificial Sequence: Synthetic peptide
  Seed: ANQRLNPMHQLLRHF
ANQRMNPLHNLLTHF

SEQ ID NO: 214850 - protein, 15 aa, Artificial Sequence
  Description of Artificial Sequence: Synthetic peptide
  Seed: ANQRLNPMHQLLRHF
ANQRMNPLHNLLVHF

SEQ ID NO: 214851 - protein, 15 aa, Artificial Sequence
  Description of Artificial Sequence: Synthetic peptide
  Seed: ANQRLNPMHQLLRHF
ANQRMNPLHPLLAHF

SEQ ID NO: 214852 - protein, 15 aa, Artificial Sequence
  Description of Artificial Sequence: Synthetic peptide
  Seed: ANQRLNPMHQLLRHF
ANQRMNPLHPLLIHF

SEQ ID NO: 214853 - protein, 15 aa, Artificial Sequence
  Description of Artificial Sequence: Synthetic peptide
  Seed: ANQRLNPMHQLLRHF
ANQRMNPLHPLLLHF

SEQ ID NO: 214854 - protein, 15 aa, Artificial Sequence
  Description of Artificial Sequence: Synthetic peptide
  Seed: ANQRLNPMHQLLRHF
ANQRMNPLHPLLMHF

SEQ ID NO: 214855 - protein, 15 aa, Artificial Sequence
  Description of Artificial Sequence: Synthetic peptide
  Seed: ANQRLNPMHQLLRHF
ANQRMNPLHPLLNHF

SEQ ID NO: 214856 - protein, 15 aa, Artificial Sequence
  Description of Artificial Sequence: Synthetic peptide
  Seed: ANQRLNPMHQLLRHF
ANQRMNPLHPLLSHF

SEQ ID NO: 214857 - protein, 15 aa, Artificial Sequence
  Description of Artificial Sequence: Synthetic peptide
  Seed: ANQRLNPMHQLLRHF
ANQRMNPLHPLLTHF

SEQ ID NO: 214858 - protein, 15 aa, Artificial Sequence
  Description of Artificial Sequence: Synthetic peptide
  Seed: ANQRLNPMHQLLRHF
ANQRMNPLHPLLVHF

SEQ ID NO: 214859 - protein, 15 aa, Artificial Sequence
  Description of Artificial Sequence: Synthetic peptide
  Seed: ANQRLNPMHQLLRHF
ANQRMNPLHRLLAHF

SEQ ID NO: 214860 - protein, 15 aa, Artificial Sequence
  Description of Artificial Sequence: Synthetic peptide
  Seed: ANQRLNPMHQLLRHF
ANQRMNPLHRLLGHF

SEQ ID NO: 214861 - protein, 15 aa, Artificial Sequence
  Description of Artificial Sequence: Synthetic peptide
  Seed: ANQRLNPMHQLLRHF
ANQRMNPLHRLLHHF

SEQ ID NO: 214862 - protein, 15 aa, Artificial Sequence
  Description of Artificial Sequence: Synthetic peptide
  Seed: ANQRLNPMHQLLRHF
ANQRMNPLHRLLIHF

SEQ ID NO: 214863 - protein, 15 aa, Artificial Sequence
  Description of Artificial Sequence: Synthetic peptide
  Seed: ANQRLNPMHQLLRHF
ANQRMNPLHRLLKHF

SEQ ID NO: 214864 - protein, 15 aa, Artificial Sequence
  Description of Artificial Sequence: Synthetic peptide
  Seed: ANQRLNPMHQLLRHF
ANQRMNPLHRLLLHF

SEQ ID NO: 214865 - protein, 15 aa, Artificial Sequence
  Description of Artificial Sequence: Synthetic peptide
  Seed: ANQRLNPMHQLLRHF
ANQRMNPLHRLLMHF

SEQ ID NO: 214866 - protein, 15 aa, Artificial Sequence
  Description of Artificial Sequence: Synthetic peptide
  Seed: ANQRLNPMHQLLRHF
ANQRMNPLHRLLNHF

SEQ ID NO: 214867 - protein, 15 aa, Artificial Sequence
  Description of Artificial Sequence: Synthetic peptide
  Seed: ANQRLNPMHQLLRHF
ANQRMNPLHRLLPHF

SEQ ID NO: 214868 - protein, 15 aa, Artificial Sequence
  Description of Artificial Sequence: Synthetic peptide
  Seed: ANQRLNPMHQLLRHF
ANQRMNPLHRLLQHF

SEQ ID NO: 214869 - protein, 15 aa, Artificial Sequence
  Description of Artificial Sequence: Synthetic peptide
  Seed: ANQRLNPMHQLLRHF
ANQRMNPLHRLLRHF

SEQ ID NO: 214870 - protein, 15 aa, Artificial Sequence
  Description of Artificial Sequence: Synthetic peptide
  Seed: ANQRLNPMHQLLRHF
ANQRMNPLHRLLSHF

SEQ ID NO: 214871 - protein, 15 aa, Artificial Sequence
  Description of Artificial Sequence: Synthetic peptide
  Seed: ANQRLNPMHQLLRHF
ANQRMNPLHRLLTHF

SEQ ID NO: 214872 - protein, 15 aa, Artificial Sequence
  Description of Artificial Sequence: Synthetic peptide
  Seed: ANQRLNPMHQLLRHF
ANQRMNPLHRLLVHF

SEQ ID NO: 214873 - protein, 15 aa, Artificial Sequence
  Description of Artificial Sequence: Synthetic peptide
  Seed: ANQRLNPMHQLLRHF
ANQRMNPLHSLLAHF

SEQ ID NO: 214874 - protein, 15 aa, Artificial Sequence
  Description of Artificial Sequence: Synthetic peptide
  Seed: ANQRLNPMHQLLRHF
ANQRMNPLHSLLGHF

SEQ ID NO: 214875 - protein, 15 aa, Artificial Sequence
  Description of Artificial Sequence: Synthetic peptide
  Seed: ANQRLNPMHQLLRHF
ANQRMNPLHSLLIHF

SEQ ID NO: 214876 - protein, 15 aa, Artificial Sequence
  Description of Artificial Sequence: Synthetic peptide
  Seed: ANQRLNPMHQLLRHF
ANQRMNPLHSLLLHF

SEQ ID NO: 214877 - protein, 15 aa, Artificial Sequence
  Description of Artificial Sequence: Synthetic peptide
  Seed: ANQRLNPMHQLLRHF
ANQRMNPLHSLLMHF

SEQ ID NO: 214878 - protein, 15 aa, Artificial Sequence
  Description of Artificial Sequence: Synthetic peptide
  Seed: ANQRLNPMHQLLRHF
ANQRMNPLHSLLNHF

SEQ ID NO: 214879 - protein, 15 aa, Artificial Sequence
  Description of Artificial Sequence: Synthetic peptide
  Seed: ANQRLNPMHQLLRHF
ANQRMNPLHSLLSHF

SEQ ID NO: 214880 - protein, 15 aa, Artificial Sequence
  Description of Artificial Sequence: Synthetic peptide
  Seed: ANQRLNPMHQLLRHF
ANQRMNPLHSLLTHF

SEQ ID NO: 214881 - protein, 15 aa, Artificial Sequence
  Description of Artificial Sequence: Synthetic peptide
  Seed: ANQRLNPMHQLLRHF
ANQRMNPLHSLLVHF

SEQ ID NO: 214882 - protein, 15 aa, Artificial Sequence
  Description of Artificial Sequence: Synthetic peptide
  Seed: ANQRLNPMHQLLRHF
ANQRMNPLHTLLAHF

SEQ ID NO: 214883 - protein, 15 aa, Artificial Sequence
  Description of Artificial Sequence: Synthetic peptide
  Seed: ANQRLNPMHQLLRHF
ANQRMNPLHTLLIHF

SEQ ID NO: 214884 - protein, 15 aa, Artificial Sequence
  Description of Artificial Sequence: Synthetic peptide
  Seed: ANQRLNPMHQLLRHF
ANQRMNPLHTLLLHF

SEQ ID NO: 214885 - protein, 15 aa, Artificial Sequence
  Description of Artificial Sequence: Synthetic peptide
  Seed: ANQRLNPMHQLLRHF
ANQRMNPLHTLLMHF

SEQ ID NO: 214886 - protein, 15 aa, Artificial Sequence
  Description of Artificial Sequence: Synthetic peptide
  Seed: ANQRLNPMHQLLRHF
ANQRMNPLHTLLNHF

SEQ ID NO: 214887 - protein, 15 aa, Artificial Sequence
  Description of Artificial Sequence: Synthetic peptide
  Seed: ANQRLNPMHQLLRHF
ANQRMNPLHTLLSHF

SEQ ID NO: 214888 - protein, 15 aa, Artificial Sequence
  Description of Artificial Sequence: Synthetic peptide
  Seed: ANQRLNPMHQLLRHF
ANQRMNPLHTLLTHF

SEQ ID NO: 214889 - protein, 15 aa, Artificial Sequence
  Description of Artificial Sequence: Synthetic peptide
  Seed: ANQRLNPMHQLLRHF
ANQRMNPLHTLLVHF

SEQ ID NO: 214890 - protein, 15 aa, Artificial Sequence
  Description of Artificial Sequence: Synthetic peptide
  Seed: ANQRLNPMHQLLRHF
ANQRMNPLHVLLAHF

SEQ ID NO: 214891 - protein, 15 aa, Artificial Sequence
  Description of Artificial Sequence: Synthetic peptide
  Seed: ANQRLNPMHQLLRHF
ANQRMNPLHVLLIHF

SEQ ID NO: 214892 - protein, 15 aa, Artificial Sequence
  Description of Artificial Sequence: Synthetic peptide
  Seed: ANQRLNPMHQLLRHF
ANQRMNPLHVLLLHF

SEQ ID NO: 214893 - protein, 15 aa, Artificial Sequence
  Description of Artificial Sequence: Synthetic peptide
  Seed: ANQRLNPMHQLLRHF
ANQRMNPLHVLLVHF

SEQ ID NO: 214894 - protein, 15 aa, Artificial Sequence
  Description of Artificial Sequence: Synthetic peptide
  Seed: ANQRLNPMHQLLRHF
ANQRMNPMHALLAHF

SEQ ID NO: 214895 - protein, 15 aa, Artificial Sequence
  Description of Artificial Sequence: Synthetic peptide
  Seed: ANQRLNPMHQLLRHF
ANQRMNPMHALLCHF

SEQ ID NO: 214896 - protein, 15 aa, Artificial Sequence
  Description of Artificial Sequence: Synthetic peptide
  Seed: ANQRLNPMHQLLRHF
ANQRMNPMHALLGHF

SEQ ID NO: 214897 - protein, 15 aa, Artificial Sequence
  Description of Artificial Sequence: Synthetic peptide
  Seed: ANQRLNPMHQLLRHF
ANQRMNPMHALLIHF

SEQ ID NO: 214898 - protein, 15 aa, Artificial Sequence
  Description of Artificial Sequence: Synthetic peptide
  Seed: ANQRLNPMHQLLRHF
ANQRMNPMHALLLHF

SEQ ID NO: 214899 - protein, 15 aa, Artificial Sequence
  Description of Artificial Sequence: Synthetic peptide
  Seed: ANQRLNPMHQLLRHF
ANQRMNPMHALLMHF

SEQ ID NO: 214900 - protein, 15 aa, Artificial Sequence
  Description of Artificial Sequence: Synthetic peptide
  Seed: ANQRLNPMHQLLRHF
ANQRMNPMHALLNHF

SEQ ID NO: 214901 - protein, 15 aa, Artificial Sequence
  Description of Artificial Sequence: Synthetic peptide
  Seed: ANQRLNPMHQLLRHF
ANQRMNPMHALLSHF

SEQ ID NO: 214902 - protein, 15 aa, Artificial Sequence
  Description of Artificial Sequence: Synthetic peptide
  Seed: ANQRLNPMHQLLRHF
ANQRMNPMHALLTHF

SEQ ID NO: 214903 - protein, 15 aa, Artificial Sequence
  Description of Artificial Sequence: Synthetic peptide
  Seed: ANQRLNPMHQLLRHF
ANQRMNPMHALLVHF

SEQ ID NO: 214904 - protein, 15 aa, Artificial Sequence
  Description of Artificial Sequence: Synthetic peptide
  Seed: ANQRLNPMHQLLRHF
ANQRMNPMHFLLIHF

SEQ ID NO: 214905 - protein, 15 aa, Artificial Sequence
  Description of Artificial Sequence: Synthetic peptide
  Seed: ANQRLNPMHQLLRHF
ANQRMNPMHFLLLHF

SEQ ID NO: 214906 - protein, 15 aa, Artificial Sequence
  Description of Artificial Sequence: Synthetic peptide
  Seed: ANQRLNPMHQLLRHF
ANQRMNPMHFLLVHF

SEQ ID NO: 214907 - protein, 15 aa, Artificial Sequence
  Description of Artificial Sequence: Synthetic peptide
  Seed: ANQRLNPMHQLLRHF
ANQRMNPMHGLLAHF

SEQ ID NO: 214908 - protein, 15 aa, Artificial Sequence
  Description of Artificial Sequence: Synthetic peptide
  Seed: ANQRLNPMHQLLRHF
ANQRMNPMHGLLGHF

SEQ ID NO: 214909 - protein, 15 aa, Artificial Sequence
  Description of Artificial Sequence: Synthetic peptide
  Seed: ANQRLNPMHQLLRHF
ANQRMNPMHGLLIHF

SEQ ID NO: 214910 - protein, 15 aa, Artificial Sequence
  Description of Artificial Sequence: Synthetic peptide
  Seed: ANQRLNPMHQLLRHF
ANQRMNPMHGLLLHF

SEQ ID NO: 214911 - protein, 15 aa, Artificial Sequence
  Description of Artificial Sequence: Synthetic peptide
  Seed: ANQRLNPMHQLLRHF
ANQRMNPMHGLLMHF

SEQ ID NO: 214912 - protein, 15 aa, Artificial Sequence
  Description of Artificial Sequence: Synthetic peptide
  Seed: ANQRLNPMHQLLRHF
ANQRMNPMHGLLSHF

SEQ ID NO: 214913 - protein, 15 aa, Artificial Sequence
  Description of Artificial Sequence: Synthetic peptide
  Seed: ANQRLNPMHQLLRHF
ANQRMNPMHGLLTHF

SEQ ID NO: 214914 - protein, 15 aa, Artificial Sequence
  Description of Artificial Sequence: Synthetic peptide
  Seed: ANQRLNPMHQLLRHF
ANQRMNPMHGLLVHF

SEQ ID NO: 214915 - protein, 15 aa, Artificial Sequence
  Description of Artificial Sequence: Synthetic peptide
  Seed: ANQRLNPMHQLLRHF
ANQRMNPMHKLLAHF

SEQ ID NO: 214916 - protein, 15 aa, Artificial Sequence
  Description of Artificial Sequence: Synthetic peptide
  Seed: ANQRLNPMHQLLRHF
ANQRMNPMHKLLGHF

SEQ ID NO: 214917 - protein, 15 aa, Artificial Sequence
  Description of Artificial Sequence: Synthetic peptide
  Seed: ANQRLNPMHQLLRHF
ANQRMNPMHKLLHHF

SEQ ID NO: 214918 - protein, 15 aa, Artificial Sequence
  Description of Artificial Sequence: Synthetic peptide
  Seed: ANQRLNPMHQLLRHF
ANQRMNPMHKLLKHF

SEQ ID NO: 214919 - protein, 15 aa, Artificial Sequence
  Description of Artificial Sequence: Synthetic peptide
  Seed: ANQRLNPMHQLLRHF
ANQRMNPMHKLLQHF

SEQ ID NO: 214920 - protein, 15 aa, Artificial Sequence
  Description of Artificial Sequence: Synthetic peptide
  Seed: ANQRLNPMHQLLRHF
ANQRMNPMHKLLRHF

SEQ ID NO: 214921 - protein, 15 aa, Artificial Sequence
  Description of Artificial Sequence: Synthetic peptide
  Seed: ANQRLNPMHQLLRHF
ANQRMNPMHKLLSHF

SEQ ID NO: 214922 - protein, 15 aa, Artificial Sequence
  Description of Artificial Sequence: Synthetic peptide
  Seed: ANQRLNPMHQLLRHF
ANQRMNPMHKLLTHF

SEQ ID NO: 214923 - protein, 15 aa, Artificial Sequence
  Description of Artificial Sequence: Synthetic peptide
  Seed: ANQRLNPMHQLLRHF
ANQRMNPMHKLLVHF

SEQ ID NO: 214924 - protein, 15 aa, Artificial Sequence
  Description of Artificial Sequence: Synthetic peptide
  Seed: ANQRLNPMHQLLRHF
ANQRMNPMHNLLAHF

SEQ ID NO: 214925 - protein, 15 aa, Artificial Sequence
  Description of Artificial Sequence: Synthetic peptide
  Seed: ANQRLNPMHQLLRHF
ANQRMNPMHNLLIHF

SEQ ID NO: 214926 - protein, 15 aa, Artificial Sequence
  Description of Artificial Sequence: Synthetic peptide
  Seed: ANQRLNPMHQLLRHF
ANQRMNPMHNLLLHF

SEQ ID NO: 214927 - protein, 15 aa, Artificial Sequence
  Description of Artificial Sequence: Synthetic peptide
  Seed: ANQRLNPMHQLLRHF
ANQRMNPMHNLLTHF

SEQ ID NO: 214928 - protein, 15 aa, Artificial Sequence
  Description of Artificial Sequence: Synthetic peptide
  Seed: ANQRLNPMHQLLRHF
ANQRMNPMHNLLVHF

SEQ ID NO: 214929 - protein, 15 aa, Artificial Sequence
  Description of Artificial Sequence: Synthetic peptide
  Seed: ANQRLNPMHQLLRHF
ANQRMNPMHPLLAHF

SEQ ID NO: 214930 - protein, 15 aa, Artificial Sequence
  Description of Artificial Sequence: Synthetic peptide
  Seed: ANQRLNPMHQLLRHF
ANQRMNPMHPLLIHF

SEQ ID NO: 214931 - protein, 15 aa, Artificial Sequence
  Description of Artificial Sequence: Synthetic peptide
  Seed: ANQRLNPMHQLLRHF
ANQRMNPMHPLLLHF

SEQ ID NO: 214932 - protein, 15 aa, Artificial Sequence
  Description of Artificial Sequence: Synthetic peptide
  Seed: ANQRLNPMHQLLRHF
ANQRMNPMHPLLMHF

SEQ ID NO: 214933 - protein, 15 aa, Artificial Sequence
  Description of Artificial Sequence: Synthetic peptide
  Seed: ANQRLNPMHQLLRHF
ANQRMNPMHPLLNHF

SEQ ID NO: 214934 - protein, 15 aa, Artificial Sequence
  Description of Artificial Sequence: Synthetic peptide
  Seed: ANQRLNPMHQLLRHF
ANQRMNPMHPLLSHF

SEQ ID NO: 214935 - protein, 15 aa, Artificial Sequence
  Description of Artificial Sequence: Synthetic peptide
  Seed: ANQRLNPMHQLLRHF
ANQRMNPMHPLLTHF

SEQ ID NO: 214936 - protein, 15 aa, Artificial Sequence
  Description of Artificial Sequence: Synthetic peptide
  Seed: ANQRLNPMHQLLRHF
ANQRMNPMHPLLVHF

SEQ ID NO: 214937 - protein, 15 aa, Artificial Sequence
  Description of Artificial Sequence: Synthetic peptide
  Seed: ANQRLNPMHQLLRHF
ANQRMNPMHRLLAHF

SEQ ID NO: 214938 - protein, 15 aa, Artificial Sequence
  Description of Artificial Sequence: Synthetic peptide
  Seed: ANQRLNPMHQLLRHF
ANQRMNPMHRLLGHF

SEQ ID NO: 214939 - protein, 15 aa, Artificial Sequence
  Description of Artificial Sequence: Synthetic peptide
  Seed: ANQRLNPMHQLLRHF
ANQRMNPMHRLLHHF

SEQ ID NO: 214940 - protein, 15 aa, Artificial Sequence
  Description of Artificial Sequence: Synthetic peptide
  Seed: ANQRLNPMHQLLRHF
ANQRMNPMHRLLIHF

SEQ ID NO: 214941 - protein, 15 aa, Artificial Sequence
  Description of Artificial Sequence: Synthetic peptide
  Seed: ANQRLNPMHQLLRHF
ANQRMNPMHRLLKHF

SEQ ID NO: 214942 - protein, 15 aa, Artificial Sequence
  Description of Artificial Sequence: Synthetic peptide
  Seed: ANQRLNPMHQLLRHF
ANQRMNPMHRLLLHF

SEQ ID NO: 214943 - protein, 15 aa, Artificial Sequence
  Description of Artificial Sequence: Synthetic peptide
  Seed: ANQRLNPMHQLLRHF
ANQRMNPMHRLLMHF

SEQ ID NO: 214944 - protein, 15 aa, Artificial Sequence
  Description of Artificial Sequence: Synthetic peptide
  Seed: ANQRLNPMHQLLRHF
ANQRMNPMHRLLNHF

SEQ ID NO: 214945 - protein, 15 aa, Artificial Sequence
  Description of Artificial Sequence: Synthetic peptide
  Seed: ANQRLNPMHQLLRHF
ANQRMNPMHRLLPHF

SEQ ID NO: 214946 - protein, 15 aa, Artificial Sequence
  Description of Artificial Sequence: Synthetic peptide
  Seed: ANQRLNPMHQLLRHF
ANQRMNPMHRLLQHF

SEQ ID NO: 214947 - protein, 15 aa, Artificial Sequence
  Description of Artificial Sequence: Synthetic peptide
  Seed: ANQRLNPMHQLLRHF
ANQRMNPMHRLLRHF

SEQ ID NO: 214948 - protein, 15 aa, Artificial Sequence
  Description of Artificial Sequence: Synthetic peptide
  Seed: ANQRLNPMHQLLRHF
ANQRMNPMHRLLSHF

SEQ ID NO: 214949 - protein, 15 aa, Artificial Sequence
  Description of Artificial Sequence: Synthetic peptide
  Seed: ANQRLNPMHQLLRHF
ANQRMNPMHRLLTHF

SEQ ID NO: 214950 - protein, 15 aa, Artificial Sequence
  Description of Artificial Sequence: Synthetic peptide
  Seed: ANQRLNPMHQLLRHF
ANQRMNPMHRLLVHF

SEQ ID NO: 214951 - protein, 15 aa, Artificial Sequence
  Description of Artificial Sequence: Synthetic peptide
  Seed: ANQRLNPMHQLLRHF
ANQRMNPMHRLLYHF

SEQ ID NO: 214952 - protein, 15 aa, Artificial Sequence
  Description of Artificial Sequence: Synthetic peptide
  Seed: ANQRLNPMHQLLRHF
ANQRMNPMHSLLAHF

SEQ ID NO: 214953 - protein, 15 aa, Artificial Sequence
  Description of Artificial Sequence: Synthetic peptide
  Seed: ANQRLNPMHQLLRHF
ANQRMNPMHSLLIHF

SEQ ID NO: 214954 - protein, 15 aa, Artificial Sequence
  Description of Artificial Sequence: Synthetic peptide
  Seed: ANQRLNPMHQLLRHF
ANQRMNPMHSLLLHF

SEQ ID NO: 214955 - protein, 15 aa, Artificial Sequence
  Description of Artificial Sequence: Synthetic peptide
  Seed: ANQRLNPMHQLLRHF
ANQRMNPMHSLLMHF

SEQ ID NO: 214956 - protein, 15 aa, Artificial Sequence
  Description of Artificial Sequence: Synthetic peptide
  Seed: ANQRLNPMHQLLRHF
ANQRMNPMHSLLNHF

SEQ ID NO: 214957 - protein, 15 aa, Artificial Sequence
  Description of Artificial Sequence: Synthetic peptide
  Seed: ANQRLNPMHQLLRHF
ANQRMNPMHSLLSHF

SEQ ID NO: 214958 - protein, 15 aa, Artificial Sequence
  Description of Artificial Sequence: Synthetic peptide
  Seed: ANQRLNPMHQLLRHF
ANQRMNPMHSLLTHF

SEQ ID NO: 214959 - protein, 15 aa, Artificial Sequence
  Description of Artificial Sequence: Synthetic peptide
  Seed: ANQRLNPMHQLLRHF
ANQRMNPMHSLLVHF

SEQ ID NO: 214960 - protein, 15 aa, Artificial Sequence
  Description of Artificial Sequence: Synthetic peptide
  Seed: ANQRLNPMHQLLRHF
ANQRMNPMHTLLAHF

SEQ ID NO: 214961 - protein, 15 aa, Artificial Sequence
  Description of Artificial Sequence: Synthetic peptide
  Seed: ANQRLNPMHQLLRHF
ANQRMNPMHTLLIHF

SEQ ID NO: 214962 - protein, 15 aa, Artificial Sequence
  Description of Artificial Sequence: Synthetic peptide
  Seed: ANQRLNPMHQLLRHF
ANQRMNPMHTLLLHF

SEQ ID NO: 214963 - protein, 15 aa, Artificial Sequence
  Description of Artificial Sequence: Synthetic peptide
  Seed: ANQRLNPMHQLLRHF
ANQRMNPMHTLLMHF

SEQ ID NO: 214964 - protein, 15 aa, Artificial Sequence
  Description of Artificial Sequence: Synthetic peptide
  Seed: ANQRLNPMHQLLRHF
ANQRMNPMHTLLTHF

SEQ ID NO: 214965 - protein, 15 aa, Artificial Sequence
  Description of Artificial Sequence: Synthetic peptide
  Seed: ANQRLNPMHQLLRHF
ANQRMNPMHTLLVHF

SEQ ID NO: 214966 - protein, 15 aa, Artificial Sequence
  Description of Artificial Sequence: Synthetic peptide
  Seed: ANQRLNPMHQLLRHF
ANQRMNPMHVLLAHF

SEQ ID NO: 214967 - protein, 15 aa, Artificial Sequence
  Description of Artificial Sequence: Synthetic peptide
  Seed: ANQRLNPMHQLLRHF
ANQRMNPMHVLLIHF

SEQ ID NO: 214968 - protein, 15 aa, Artificial Sequence
  Description of Artificial Sequence: Synthetic peptide
  Seed: ANQRLNPMHQLLRHF
ANQRMNPMHVLLLHF

SEQ ID NO: 214969 - protein, 15 aa, Artificial Sequence
  Description of Artificial Sequence: Synthetic peptide
  Seed: ANQRLNPMHQLLRHF
ANQRMNPMHVLLSHF

SEQ ID NO: 214970 - protein, 15 aa, Artificial Sequence
  Description of Artificial Sequence: Synthetic peptide
  Seed: ANQRLNPMHQLLRHF
ANQRMNPMHVLLVHF

SEQ ID NO: 214971 - protein, 15 aa, Artificial Sequence
  Description of Artificial Sequence: Synthetic peptide
  Seed: ANQRLNPMHQLLRHF
ANQRMNPNHALLFHF

SEQ ID NO: 214972 - protein, 15 aa, Artificial Sequence
  Description of Artificial Sequence: Synthetic peptide
  Seed: ANQRLNPMHQLLRHF
ANQRMNPNHALLIHF

SEQ ID NO: 214973 - protein, 15 aa, Artificial Sequence
  Description of Artificial Sequence: Synthetic peptide
  Seed: ANQRLNPMHQLLRHF
ANQRMNPNHALLLHF

SEQ ID NO: 214974 - protein, 15 aa, Artificial Sequence
  Description of Artificial Sequence: Synthetic peptide
  Seed: ANQRLNPMHQLLRHF
ANQRMNPNHALLMHF

SEQ ID NO: 214975 - protein, 15 aa, Artificial Sequence
  Description of Artificial Sequence: Synthetic peptide
  Seed: ANQRLNPMHQLLRHF
ANQRMNPNHALLVHF

SEQ ID NO: 214976 - protein, 15 aa, Artificial Sequence
  Description of Artificial Sequence: Synthetic peptide
  Seed: ANQRLNPMHQLLRHF
ANQRMNPNHALLYHF

SEQ ID NO: 214977 - protein, 15 aa, Artificial Sequence
  Description of Artificial Sequence: Synthetic peptide
  Seed: ANQRLNPMHQLLRHF
ANQRMNPNHGLLIHF

SEQ ID NO: 214978 - protein, 15 aa, Artificial Sequence
  Description of Artificial Sequence: Synthetic peptide
  Seed: ANQRLNPMHQLLRHF
ANQRMNPNHGLLLHF

SEQ ID NO: 214979 - protein, 15 aa, Artificial Sequence
  Description of Artificial Sequence: Synthetic peptide
  Seed: ANQRLNPMHQLLRHF
ANQRMNPNHGLLVHF

SEQ ID NO: 214980 - protein, 15 aa, Artificial Sequence
  Description of Artificial Sequence: Synthetic peptide
  Seed: ANQRLNPMHQLLRHF
ANQRMNPNHILLFHF

SEQ ID NO: 214981 - protein, 15 aa, Artificial Sequence
  Description of Artificial Sequence: Synthetic peptide
  Seed: ANQRLNPMHQLLRHF
ANQRMNPNHILLIHF

SEQ ID NO: 214982 - protein, 15 aa, Artificial Sequence
  Description of Artificial Sequence: Synthetic peptide
  Seed: ANQRLNPMHQLLRHF
ANQRMNPNHILLLHF

SEQ ID NO: 214983 - protein, 15 aa, Artificial Sequence
  Description of Artificial Sequence: Synthetic peptide
  Seed: ANQRLNPMHQLLRHF
ANQRMNPNHILLVHF

SEQ ID NO: 214984 - protein, 15 aa, Artificial Sequence
  Description of Artificial Sequence: Synthetic peptide
  Seed: ANQRLNPMHQLLRHF
ANQRMNPNHLLLIHF

SEQ ID NO: 214985 - protein, 15 aa, Artificial Sequence
  Description of Artificial Sequence: Synthetic peptide
  Seed: ANQRLNPMHQLLRHF
ANQRMNPNHLLLVHF

SEQ ID NO: 214986 - protein, 15 aa, Artificial Sequence
  Description of Artificial Sequence: Synthetic peptide
  Seed: ANQRLNPMHQLLRHF
ANQRMNPNHMLLIHF

SEQ ID NO: 214987 - protein, 15 aa, Artificial Sequence
  Description of Artificial Sequence: Synthetic peptide
  Seed: ANQRLNPMHQLLRHF
ANQRMNPNHNLLFHF

SEQ ID NO: 214988 - protein, 15 aa, Artificial Sequence
  Description of Artificial Sequence: Synthetic peptide
  Seed: ANQRLNPMHQLLRHF
ANQRMNPNHNLLIHF

SEQ ID NO: 214989 - protein, 15 aa, Artificial Sequence
  Description of Artificial Sequence: Synthetic peptide
  Seed: ANQRLNPMHQLLRHF
ANQRMNPNHNLLLHF

SEQ ID NO: 214990 - protein, 15 aa, Artificial Sequence
  Description of Artificial Sequence: Synthetic peptide
  Seed: ANQRLNPMHQLLRHF
ANQRMNPNHNLLVHF

SEQ ID NO: 214991 - protein, 15 aa, Artificial Sequence
  Description of Artificial Sequence: Synthetic peptide
  Seed: ANQRLNPMHQLLRHF
ANQRMNPNHNLLYHF

SEQ ID NO: 214992 - protein, 15 aa, Artificial Sequence
  Description of Artificial Sequence: Synthetic peptide
  Seed: ANQRLNPMHQLLRHF
ANQRMNPNHPLLFHF

SEQ ID NO: 214993 - protein, 15 aa, Artificial Sequence
  Description of Artificial Sequence: Synthetic peptide
  Seed: ANQRLNPMHQLLRHF
ANQRMNPNHPLLIHF

SEQ ID NO: 214994 - protein, 15 aa, Artificial Sequence
  Description of Artificial Sequence: Synthetic peptide
  Seed: ANQRLNPMHQLLRHF
ANQRMNPNHPLLLHF

SEQ ID NO: 214995 - protein, 15 aa, Artificial Sequence
  Description of Artificial Sequence: Synthetic peptide
  Seed: ANQRLNPMHQLLRHF
ANQRMNPNHPLLVHF

SEQ ID NO: 214996 - protein, 15 aa, Artificial Sequence
  Description of Artificial Sequence: Synthetic peptide
  Seed: ANQRLNPMHQLLRHF
ANQRMNPNHSLLFHF

SEQ ID NO: 214997 - protein, 15 aa, Artificial Sequence
  Description of Artificial Sequence: Synthetic peptide
  Seed: ANQRLNPMHQLLRHF
ANQRMNPNHSLLIHF

SEQ ID NO: 214998 - protein, 15 aa, Artificial Sequence
  Description of Artificial Sequence: Synthetic peptide
  Seed: ANQRLNPMHQLLRHF
ANQRMNPNHSLLLHF

SEQ ID NO: 214999 - protein, 15 aa, Artificial Sequence
  Description of Artificial Sequence: Synthetic peptide
  Seed: ANQRLNPMHQLLRHF
ANQRMNPNHSLLMHF

SEQ ID NO: 215000 - protein, 15 aa, Artificial Sequence
  Description of Artificial Sequence: Synthetic peptide
  Seed: ANQRLNPMHQLLRHF
ANQRMNPNHSLLVHF

SEQ ID NO: 215001 - protein, 15 aa, Artificial Sequence
  Description of Artificial Sequence: Synthetic peptide
  Seed: ANQRLNPMHQLLRHF
ANQRMNPNHSLLYHF

SEQ ID NO: 215002 - protein, 15 aa, Artificial Sequence
  Description of Artificial Sequence: Synthetic peptide
  Seed: ANQRLNPMHQLLRHF
ANQRMNPNHTLLFHF

SEQ ID NO: 215003 - protein, 15 aa, Artificial Sequence
  Description of Artificial Sequence: Synthetic peptide
  Seed: ANQRLNPMHQLLRHF
ANQRMNPNHTLLIHF

SEQ ID NO: 215004 - protein, 15 aa, Artificial Sequence
  Description of Artificial Sequence: Synthetic peptide
  Seed: ANQRLNPMHQLLRHF
ANQRMNPNHTLLLHF

SEQ ID NO: 215005 - protein, 15 aa, Artificial Sequence
  Description of Artificial Sequence: Synthetic peptide
  Seed: ANQRLNPMHQLLRHF
ANQRMNPNHTLLVHF

SEQ ID NO: 215006 - protein, 15 aa, Artificial Sequence
  Description of Artificial Sequence: Synthetic peptide
  Seed: ANQRLNPMHQLLRHF
ANQRMNPNHVLLFHF

SEQ ID NO: 215007 - protein, 15 aa, Artificial Sequence
  Description of Artificial Sequence: Synthetic peptide
  Seed: ANQRLNPMHQLLRHF
ANQRMNPNHVLLIHF

SEQ ID NO: 215008 - protein, 15 aa, Artificial Sequence
  Description of Artificial Sequence: Synthetic peptide
  Seed: ANQRLNPMHQLLRHF
ANQRMNPNHVLLLHF

SEQ ID NO: 215009 - protein, 15 aa, Artificial Sequence
  Description of Artificial Sequence: Synthetic peptide
  Seed: ANQRLNPMHQLLRHF
ANQRMNPNHVLLVHF

SEQ ID NO: 215010 - protein, 15 aa, Artificial Sequence
  Description of Artificial Sequence: Synthetic peptide
  Seed: ANQRLNPMHQLLRHF
ANQRMNPQHALLAHF

SEQ ID NO: 215011 - protein, 15 aa, Artificial Sequence
  Description of Artificial Sequence: Synthetic peptide
  Seed: ANQRLNPMHQLLRHF
ANQRMNPQHALLIHF

SEQ ID NO: 215012 - protein, 15 aa, Artificial Sequence
  Description of Artificial Sequence: Synthetic peptide
  Seed: ANQRLNPMHQLLRHF
ANQRMNPQHALLLHF

SEQ ID NO: 215013 - protein, 15 aa, Artificial Sequence
  Description of Artificial Sequence: Synthetic peptide
  Seed: ANQRLNPMHQLLRHF
ANQRMNPQHALLTHF

SEQ ID NO: 215014 - protein, 15 aa, Artificial Sequence
  Description of Artificial Sequence: Synthetic peptide
  Seed: ANQRLNPMHQLLRHF
ANQRMNPQHALLVHF

SEQ ID NO: 215015 - protein, 15 aa, Artificial Sequence
  Description of Artificial Sequence: Synthetic peptide
  Seed: ANQRLNPMHQLLRHF
ANQRMNPQHGLLAHF

SEQ ID NO: 215016 - protein, 15 aa, Artificial Sequence
  Description of Artificial Sequence: Synthetic peptide
  Seed: ANQRLNPMHQLLRHF
ANQRMNPQHGLLIHF

SEQ ID NO: 215017 - protein, 15 aa, Artificial Sequence
  Description of Artificial Sequence: Synthetic peptide
  Seed: ANQRLNPMHQLLRHF
ANQRMNPQHGLLLHF

SEQ ID NO: 215018 - protein, 15 aa, Artificial Sequence
  Description of Artificial Sequence: Synthetic peptide
  Seed: ANQRLNPMHQLLRHF
ANQRMNPQHGLLVHF

SEQ ID NO: 215019 - protein, 15 aa, Artificial Sequence
  Description of Artificial Sequence: Synthetic peptide
  Seed: ANQRLNPMHQLLRHF
ANQRMNPQHSLLAHF

SEQ ID NO: 215020 - protein, 15 aa, Artificial Sequence
  Description of Artificial Sequence: Synthetic peptide
  Seed: ANQRLNPMHQLLRHF
ANQRMNPQHSLLLHF

SEQ ID NO: 215021 - protein, 15 aa, Artificial Sequence
  Description of Artificial Sequence: Synthetic peptide
  Seed: ANQRLNPMHQLLRHF
ANQRMNPQHSLLVHF

SEQ ID NO: 215022 - protein, 15 aa, Artificial Sequence
  Description of Artificial Sequence: Synthetic peptide
  Seed: ANQRLNPMHQLLRHF
ANQRMNPSHALLAHF

SEQ ID NO: 215023 - protein, 15 aa, Artificial Sequence
  Description of Artificial Sequence: Synthetic peptide
  Seed: ANQRLNPMHQLLRHF
ANQRMNPSHALLIHF

SEQ ID NO: 215024 - protein, 15 aa, Artificial Sequence
  Description of Artificial Sequence: Synthetic peptide
  Seed: ANQRLNPMHQLLRHF
ANQRMNPSHALLLHF

SEQ ID NO: 215025 - protein, 15 aa, Artificial Sequence
  Description of Artificial Sequence: Synthetic peptide
  Seed: ANQRLNPMHQLLRHF
ANQRMNPSHALLVHF

SEQ ID NO: 215026 - protein, 15 aa, Artificial Sequence
  Description of Artificial Sequence: Synthetic peptide
  Seed: ANQRLNPMHQLLRHF
ANQRMNPSHFLLIHF

SEQ ID NO: 215027 - protein, 15 aa, Artificial Sequence
  Description of Artificial Sequence: Synthetic peptide
  Seed: ANQRLNPMHQLLRHF
ANQRMNPSHFLLLHF

SEQ ID NO: 215028 - protein, 15 aa, Artificial Sequence
  Description of Artificial Sequence: Synthetic peptide
  Seed: ANQRLNPMHQLLRHF
ANQRMNPSHFLLVHF

SEQ ID NO: 215029 - protein, 15 aa, Artificial Sequence
  Description of Artificial Sequence: Synthetic peptide
  Seed: ANQRLNPMHQLLRHF
ANQRMNPSHRLLRHF

SEQ ID NO: 215030 - protein, 15 aa, Artificial Sequence
  Description of Artificial Sequence: Synthetic peptide
  Seed: ANQRLNPMHQLLRHF
ANQRMNPTHFLLFHF

SEQ ID NO: 215031 - protein, 15 aa, Artificial Sequence
  Description of Artificial Sequence: Synthetic peptide
  Seed: ANQRLNPMHQLLRHF
ANQRMNPTHFLLIHF

SEQ ID NO: 215032 - protein, 15 aa, Artificial Sequence
  Description of Artificial Sequence: Synthetic peptide
  Seed: ANQRLNPMHQLLRHF
ANQRMNPTHFLLLHF

SEQ ID NO: 215033 - protein, 15 aa, Artificial Sequence
  Description of Artificial Sequence: Synthetic peptide
  Seed: ANQRLNPMHQLLRHF
ANQRMNPTHFLLMHF

SEQ ID NO: 215034 - protein, 15 aa, Artificial Sequence
  Description of Artificial Sequence: Synthetic peptide
  Seed: ANQRLNPMHQLLRHF
ANQRMNPTHFLLVHF

SEQ ID NO: 215035 - protein, 15 aa, Artificial Sequence
  Description of Artificial Sequence: Synthetic peptide
  Seed: ANQRLNPMHQLLRHF
ANQRMNPVHALLAHF

SEQ ID NO: 215036 - protein, 15 aa, Artificial Sequence
  Description of Artificial Sequence: Synthetic peptide
  Seed: ANQRLNPMHQLLRHF
ANQRMNPVHALLIHF

SEQ ID NO: 215037 - protein, 15 aa, Artificial Sequence
  Description of Artificial Sequence: Synthetic peptide
  Seed: ANQRLNPMHQLLRHF
ANQRMNPVHALLLHF

SEQ ID NO: 215038 - protein, 15 aa, Artificial Sequence
  Description of Artificial Sequence: Synthetic peptide
  Seed: ANQRLNPMHQLLRHF
ANQRMNPVHALLVHF

SEQ ID NO: 215039 - protein, 15 aa, Artificial Sequence
  Description of Artificial Sequence: Synthetic peptide
  Seed: ANQRLNPMHQLLRHF
ANQRMNPVHFLLFHF

SEQ ID NO: 215040 - protein, 15 aa, Artificial Sequence
  Description of Artificial Sequence: Synthetic peptide
  Seed: ANQRLNPMHQLLRHF
ANQRMNPVHFLLIHF

SEQ ID NO: 215041 - protein, 15 aa, Artificial Sequence
  Description of Artificial Sequence: Synthetic peptide
  Seed: ANQRLNPMHQLLRHF
ANQRMNPVHFLLLHF

SEQ ID NO: 215042 - protein, 15 aa, Artificial Sequence
  Description of Artificial Sequence: Synthetic peptide
  Seed: ANQRLNPMHQLLRHF
ANQRMNPVHFLLMHF

SEQ ID NO: 215043 - protein, 15 aa, Artificial Sequence
  Description of Artificial Sequence: Synthetic peptide
  Seed: ANQRLNPMHQLLRHF
ANQRMNPVHFLLVHF

SEQ ID NO: 215044 - protein, 15 aa, Artificial Sequence
  Description of Artificial Sequence: Synthetic peptide
  Seed: ANQRLNPMHQLLRHF
ANQRMNPVHGLLAHF

SEQ ID NO: 215045 - protein, 15 aa, Artificial Sequence
  Description of Artificial Sequence: Synthetic peptide
  Seed: ANQRLNPMHQLLRHF
ANQRMNPVHGLLIHF

SEQ ID NO: 215046 - protein, 15 aa, Artificial Sequence
  Description of Artificial Sequence: Synthetic peptide
  Seed: ANQRLNPMHQLLRHF
ANQRMNPVHGLLLHF

SEQ ID NO: 215047 - protein, 15 aa, Artificial Sequence
  Description of Artificial Sequence: Synthetic peptide
  Seed: ANQRLNPMHQLLRHF
ANQRMNPVHGLLVHF

SEQ ID NO: 215048 - protein, 15 aa, Artificial Sequence
  Description of Artificial Sequence: Synthetic peptide
  Seed: ANQRLNPMHQLLRHF
ANQRMNPVHKLLAHF

SEQ ID NO: 215049 - protein, 15 aa, Artificial Sequence
  Description of Artificial Sequence: Synthetic peptide
  Seed: ANQRLNPMHQLLRHF
ANQRMNPVHKLLSHF

SEQ ID NO: 215050 - protein, 15 aa, Artificial Sequence
  Description of Artificial Sequence: Synthetic peptide
  Seed: ANQRLNPMHQLLRHF
ANQRMNPVHRLLAHF

SEQ ID NO: 215051 - protein, 15 aa, Artificial Sequence
  Description of Artificial Sequence: Synthetic peptide
  Seed: ANQRLNPMHQLLRHF
ANQRMNPVHRLLGHF

SEQ ID NO: 215052 - protein, 15 aa, Artificial Sequence
  Description of Artificial Sequence: Synthetic peptide
  Seed: ANQRLNPMHQLLRHF
ANQRMNPVHRLLHHF

SEQ ID NO: 215053 - protein, 15 aa, Artificial Sequence
  Description of Artificial Sequence: Synthetic peptide
  Seed: ANQRLNPMHQLLRHF
ANQRMNPVHRLLKHF

SEQ ID NO: 215054 - protein, 15 aa, Artificial Sequence
  Description of Artificial Sequence: Synthetic peptide
  Seed: ANQRLNPMHQLLRHF
ANQRMNPVHRLLQHF

SEQ ID NO: 215055 - protein, 15 aa, Artificial Sequence
  Description of Artificial Sequence: Synthetic peptide
  Seed: ANQRLNPMHQLLRHF
ANQRMNPVHRLLRHF

SEQ ID NO: 215056 - protein, 15 aa, Artificial Sequence
  Description of Artificial Sequence: Synthetic peptide
  Seed: ANQRLNPMHQLLRHF
ANQRMNPVHRLLSHF

SEQ ID NO: 215057 - protein, 15 aa, Artificial Sequence
  Description of Artificial Sequence: Synthetic peptide
  Seed: ANQRLNPMHQLLRHF
ANQRMNPVHRLLTHF

SEQ ID NO: 215058 - protein, 15 aa, Artificial Sequence
  Description of Artificial Sequence: Synthetic peptide
  Seed: ANQRLNPMHQLLRHF
ANQRMNPVHRLLYHF

SEQ ID NO: 215059 - protein, 15 aa, Artificial Sequence
  Description of Artificial Sequence: Synthetic peptide
  Seed: ANQRLNPMHQLLRHF
ANQRMNPVHSLLIHF

SEQ ID NO: 215060 - protein, 15 aa, Artificial Sequence
  Description of Artificial Sequence: Synthetic peptide
  Seed: ANQRLNPMHQLLRHF
ANQRMNPVHSLLLHF

SEQ ID NO: 215061 - protein, 15 aa, Artificial Sequence
  Description of Artificial Sequence: Synthetic peptide
  Seed: ANQRLNPMHQLLRHF
ANQRMNPVHSLLVHF

SEQ ID NO: 215062 - protein, 15 aa, Artificial Sequence
  Description of Artificial Sequence: Synthetic peptide
  Seed: ANQRLNPMHQLLRHF
ANQRMNPWHNLLLHF

SEQ ID NO: 215063 - protein, 15 aa, Artificial Sequence
  Description of Artificial Sequence: Synthetic peptide
  Seed: ANQRLNPMHQLLRHF
ANQRMNPWHNLLVHF

SEQ ID NO: 215064 - protein, 15 aa, Artificial Sequence
  Description of Artificial Sequence: Synthetic peptide
  Seed: ANQRLNPMHQLLRHF
ANQRMNPWHSLLIHF

SEQ ID NO: 215065 - protein, 15 aa, Artificial Sequence
  Description of Artificial Sequence: Synthetic peptide
  Seed: ANQRLNPMHQLLRHF
ANQRMNPWHSLLLHF

SEQ ID NO: 215066 - protein, 15 aa, Artificial Sequence
  Description of Artificial Sequence: Synthetic peptide
  Seed: ANQRLNPMHQLLRHF
ANQRMNPWHSLLVHF

SEQ ID NO: 215067 - protein, 15 aa, Artificial Sequence
  Description of Artificial Sequence: Synthetic peptide
  Seed: ANQRLNPMHQLLRHF
ANQRMNPYHGLLLHF

SEQ ID NO: 215068 - protein, 15 aa, Artificial Sequence
  Description of Artificial Sequence: Synthetic peptide
  Seed: ANQRLNPMHQLLRHF
ANQRMNPYHGLLVHF

SEQ ID NO: 215069 - protein, 15 aa, Artificial Sequence
  Description of Artificial Sequence: Synthetic peptide
  Seed: ANQRLNPMHQLLRHF
ANQRMNPYHNLLAHF

SEQ ID NO: 215070 - protein, 15 aa, Artificial Sequence
  Description of Artificial Sequence: Synthetic peptide
  Seed: ANQRLNPMHQLLRHF
ANQRMNPYHNLLIHF

SEQ ID NO: 215071 - protein, 15 aa, Artificial Sequence
  Description of Artificial Sequence: Synthetic peptide
  Seed: ANQRLNPMHQLLRHF
ANQRMNPYHNLLLHF

SEQ ID NO: 215072 - protein, 15 aa, Artificial Sequence
  Description of Artificial Sequence: Synthetic peptide
  Seed: ANQRLNPMHQLLRHF
ANQRMNPYHNLLVHF

SEQ ID NO: 215073 - protein, 15 aa, Artificial Sequence
  Description of Artificial Sequence: Synthetic peptide
  Seed: ANQRLNPMHQLLRHF
ANQRMNPYHSLLAHF

SEQ ID NO: 215074 - protein, 15 aa, Artificial Sequence
  Description of Artificial Sequence: Synthetic peptide
  Seed: ANQRLNPMHQLLRHF
ANQRMNPYHSLLIHF

SEQ ID NO: 215075 - protein, 15 aa, Artificial Sequence
  Description of Artificial Sequence: Synthetic peptide
  Seed: ANQRLNPMHQLLRHF
ANQRMNPYHSLLLHF

SEQ ID NO: 215076 - protein, 15 aa, Artificial Sequence
  Description of Artificial Sequence: Synthetic peptide
  Seed: ANQRLNPMHQLLRHF
ANQRMNPYHSLLMHF

SEQ ID NO: 215077 - protein, 15 aa, Artificial Sequence
  Description of Artificial Sequence: Synthetic peptide
  Seed: ANQRLNPMHQLLRHF
ANQRMNPYHSLLSHF

SEQ ID NO: 215078 - protein, 15 aa, Artificial Sequence
  Description of Artificial Sequence: Synthetic peptide
  Seed: ANQRLNPMHQLLRHF
ANQRMNPYHSLLTHF

SEQ ID NO: 215079 - protein, 15 aa, Artificial Sequence
  Description of Artificial Sequence: Synthetic peptide
  Seed: ANQRLNPMHQLLRHF
ANQRMNPYHSLLVHF

SEQ ID NO: 215080 - protein, 15 aa, Artificial Sequence
  Description of Artificial Sequence: Synthetic peptide
  Seed: ANQRLNPMHQLLRHF
ANQRVNPAHALLAHF

SEQ ID NO: 215081 - protein, 15 aa, Artificial Sequence
  Description of Artificial Sequence: Synthetic peptide
  Seed: ANQRLNPMHQLLRHF
ANQRVNPAHALLIHF

SEQ ID NO: 215082 - protein, 15 aa, Artificial Sequence
  Description of Artificial Sequence: Synthetic peptide
  Seed: ANQRLNPMHQLLRHF
ANQRVNPAHALLLHF

SEQ ID NO: 215083 - protein, 15 aa, Artificial Sequence
  Description of Artificial Sequence: Synthetic peptide
  Seed: ANQRLNPMHQLLRHF
ANQRVNPAHALLMHF

SEQ ID NO: 215084 - protein, 15 aa, Artificial Sequence
  Description of Artificial Sequence: Synthetic peptide
  Seed: ANQRLNPMHQLLRHF
ANQRVNPAHALLSHF

SEQ ID NO: 215085 - protein, 15 aa, Artificial Sequence
  Description of Artificial Sequence: Synthetic peptide
  Seed: ANQRLNPMHQLLRHF
ANQRVNPAHALLTHF

SEQ ID NO: 215086 - protein, 15 aa, Artificial Sequence
  Description of Artificial Sequence: Synthetic peptide
  Seed: ANQRLNPMHQLLRHF
ANQRVNPAHALLVHF

SEQ ID NO: 215087 - protein, 15 aa, Artificial Sequence
  Description of Artificial Sequence: Synthetic peptide
  Seed: ANQRLNPMHQLLRHF
ANQRVNPAHFLLIHF

SEQ ID NO: 215088 - protein, 15 aa, Artificial Sequence
  Description of Artificial Sequence: Synthetic peptide
  Seed: ANQRLNPMHQLLRHF
ANQRVNPAHFLLLHF

SEQ ID NO: 215089 - protein, 15 aa, Artificial Sequence
  Description of Artificial Sequence: Synthetic peptide
  Seed: ANQRLNPMHQLLRHF
ANQRVNPAHFLLVHF

SEQ ID NO: 215090 - protein, 15 aa, Artificial Sequence
  Description of Artificial Sequence: Synthetic peptide
  Seed: ANQRLNPMHQLLRHF
ANQRVNPAHGLLAHF

SEQ ID NO: 215091 - protein, 15 aa, Artificial Sequence
  Description of Artificial Sequence: Synthetic peptide
  Seed: ANQRLNPMHQLLRHF
ANQRVNPAHGLLIHF

SEQ ID NO: 215092 - protein, 15 aa, Artificial Sequence
  Description of Artificial Sequence: Synthetic peptide
  Seed: ANQRLNPMHQLLRHF
ANQRVNPAHGLLLHF

SEQ ID NO: 215093 - protein, 15 aa, Artificial Sequence
  Description of Artificial Sequence: Synthetic peptide
  Seed: ANQRLNPMHQLLRHF
ANQRVNPAHGLLMHF

SEQ ID NO: 215094 - protein, 15 aa, Artificial Sequence
  Description of Artificial Sequence: Synthetic peptide
  Seed: ANQRLNPMHQLLRHF
ANQRVNPAHGLLVHF

SEQ ID NO: 215095 - protein, 15 aa, Artificial Sequence
  Description of Artificial Sequence: Synthetic peptide
  Seed: ANQRLNPMHQLLRHF
ANQRVNPAHPLLIHF

SEQ ID NO: 215096 - protein, 15 aa, Artificial Sequence
  Description of Artificial Sequence: Synthetic peptide
  Seed: ANQRLNPMHQLLRHF
ANQRVNPAHPLLLHF

SEQ ID NO: 215097 - protein, 15 aa, Artificial Sequence
  Description of Artificial Sequence: Synthetic peptide
  Seed: ANQRLNPMHQLLRHF
ANQRVNPAHPLLVHF

SEQ ID NO: 215098 - protein, 15 aa, Artificial Sequence
  Description of Artificial Sequence: Synthetic peptide
  Seed: ANQRLNPMHQLLRHF
ANQRVNPAHRLLAHF

SEQ ID NO: 215099 - protein, 15 aa, Artificial Sequence
  Description of Artificial Sequence: Synthetic peptide
  Seed: ANQRLNPMHQLLRHF
ANQRVNPAHRLLIHF

SEQ ID NO: 215100 - protein, 15 aa, Artificial Sequence
  Description of Artificial Sequence: Synthetic peptide
  Seed: ANQRLNPMHQLLRHF
ANQRVNPAHRLLLHF

SEQ ID NO: 215101 - protein, 15 aa, Artificial Sequence
  Description of Artificial Sequence: Synthetic peptide
  Seed: ANQRLNPMHQLLRHF
ANQRVNPAHRLLMHF

SEQ ID NO: 215102 - protein, 15 aa, Artificial Sequence
  Description of Artificial Sequence: Synthetic peptide
  Seed: ANQRLNPMHQLLRHF
ANQRVNPAHRLLRHF

SEQ ID NO: 215103 - protein, 15 aa, Artificial Sequence
  Description of Artificial Sequence: Synthetic peptide
  Seed: ANQRLNPMHQLLRHF
ANQRVNPAHRLLSHF

SEQ ID NO: 215104 - protein, 15 aa, Artificial Sequence
  Description of Artificial Sequence: Synthetic peptide
  Seed: ANQRLNPMHQLLRHF
ANQRVNPAHRLLVHF

SEQ ID NO: 215105 - protein, 15 aa, Artificial Sequence
  Description of Artificial Sequence: Synthetic peptide
  Seed: ANQRLNPMHQLLRHF
ANQRVNPAHRLLYHF

SEQ ID NO: 215106 - protein, 15 aa, Artificial Sequence
  Description of Artificial Sequence: Synthetic peptide
  Seed: ANQRLNPMHQLLRHF
ANQRVNPAHSLLAHF

SEQ ID NO: 215107 - protein, 15 aa, Artificial Sequence
  Description of Artificial Sequence: Synthetic peptide
  Seed: ANQRLNPMHQLLRHF
ANQRVNPAHSLLIHF

SEQ ID NO: 215108 - protein, 15 aa, Artificial Sequence
  Description of Artificial Sequence: Synthetic peptide
  Seed: ANQRLNPMHQLLRHF
ANQRVNPAHSLLLHF

SEQ ID NO: 215109 - protein, 15 aa, Artificial Sequence
  Description of Artificial Sequence: Synthetic peptide
  Seed: ANQRLNPMHQLLRHF
ANQRVNPAHSLLVHF

SEQ ID NO: 215110 - protein, 15 aa, Artificial Sequence
  Description of Artificial Sequence: Synthetic peptide
  Seed: ANQRLNPMHQLLRHF
ANQRVNPEHFLLIHF

SEQ ID NO: 215111 - protein, 15 aa, Artificial Sequence
  Description of Artificial Sequence: Synthetic peptide
  Seed: ANQRLNPMHQLLRHF
ANQRVNPEHFLLLHF

SEQ ID NO: 215112 - protein, 15 aa, Artificial Sequence
  Description of Artificial Sequence: Synthetic peptide
  Seed: ANQRLNPMHQLLRHF
ANQRVNPEHFLLVHF

SEQ ID NO: 215113 - protein, 15 aa, Artificial Sequence
  Description of Artificial Sequence: Synthetic peptide
  Seed: ANQRLNPMHQLLRHF
ANQRVNPFHALLAHF

SEQ ID NO: 215114 - protein, 15 aa, Artificial Sequence
  Description of Artificial Sequence: Synthetic peptide
  Seed: ANQRLNPMHQLLRHF
ANQRVNPFHALLIHF

SEQ ID NO: 215115 - protein, 15 aa, Artificial Sequence
  Description of Artificial Sequence: Synthetic peptide
  Seed: ANQRLNPMHQLLRHF
ANQRVNPFHALLLHF

SEQ ID NO: 215116 - protein, 15 aa, Artificial Sequence
  Description of Artificial Sequence: Synthetic peptide
  Seed: ANQRLNPMHQLLRHF
ANQRVNPFHALLVHF

SEQ ID NO: 215117 - protein, 15 aa, Artificial Sequence
  Description of Artificial Sequence: Synthetic peptide
  Seed: ANQRLNPMHQLLRHF
ANQRVNPFHFLLFHF

SEQ ID NO: 215118 - protein, 15 aa, Artificial Sequence
  Description of Artificial Sequence: Synthetic peptide
  Seed: ANQRLNPMHQLLRHF
ANQRVNPFHFLLIHF

SEQ ID NO: 215119 - protein, 15 aa, Artificial Sequence
  Description of Artificial Sequence: Synthetic peptide
  Seed: ANQRLNPMHQLLRHF
ANQRVNPFHFLLLHF

SEQ ID NO: 215120 - protein, 15 aa, Artificial Sequence
  Description of Artificial Sequence: Synthetic peptide
  Seed: ANQRLNPMHQLLRHF
ANQRVNPFHFLLVHF

SEQ ID NO: 215121 - protein, 15 aa, Artificial Sequence
  Description of Artificial Sequence: Synthetic peptide
  Seed: ANQRLNPMHQLLRHF
ANQRVNPFHGLLAHF

SEQ ID NO: 215122 - protein, 15 aa, Artificial Sequence
  Description of Artificial Sequence: Synthetic peptide
  Seed: ANQRLNPMHQLLRHF
ANQRVNPFHGLLIHF

SEQ ID NO: 215123 - protein, 15 aa, Artificial Sequence
  Description of Artificial Sequence: Synthetic peptide
  Seed: ANQRLNPMHQLLRHF
ANQRVNPFHGLLLHF

SEQ ID NO: 215124 - protein, 15 aa, Artificial Sequence
  Description of Artificial Sequence: Synthetic peptide
  Seed: ANQRLNPMHQLLRHF
ANQRVNPFHGLLVHF

SEQ ID NO: 215125 - protein, 15 aa, Artificial Sequence
  Description of Artificial Sequence: Synthetic peptide
  Seed: ANQRLNPMHQLLRHF
ANQRVNPFHNLLAHF

SEQ ID NO: 215126 - protein, 15 aa, Artificial Sequence
  Description of Artificial Sequence: Synthetic peptide
  Seed: ANQRLNPMHQLLRHF
ANQRVNPFHNLLIHF

SEQ ID NO: 215127 - protein, 15 aa, Artificial Sequence
  Description of Artificial Sequence: Synthetic peptide
  Seed: ANQRLNPMHQLLRHF
ANQRVNPFHNLLLHF

SEQ ID NO: 215128 - protein, 15 aa, Artificial Sequence
  Description of Artificial Sequence: Synthetic peptide
  Seed: ANQRLNPMHQLLRHF
ANQRVNPFHNLLMHF

SEQ ID NO: 215129 - protein, 15 aa, Artificial Sequence
  Description of Artificial Sequence: Synthetic peptide
  Seed: ANQRLNPMHQLLRHF
ANQRVNPFHNLLTHF

SEQ ID NO: 215130 - protein, 15 aa, Artificial Sequence
  Description of Artificial Sequence: Synthetic peptide
  Seed: ANQRLNPMHQLLRHF
ANQRVNPFHNLLVHF

SEQ ID NO: 215131 - protein, 15 aa, Artificial Sequence
  Description of Artificial Sequence: Synthetic peptide
  Seed: ANQRLNPMHQLLRHF
ANQRVNPFHRLLAHF

SEQ ID NO: 215132 - protein, 15 aa, Artificial Sequence
  Description of Artificial Sequence: Synthetic peptide
  Seed: ANQRLNPMHQLLRHF
ANQRVNPFHRLLHHF

SEQ ID NO: 215133 - protein, 15 aa, Artificial Sequence
  Description of Artificial Sequence: Synthetic peptide
  Seed: ANQRLNPMHQLLRHF
ANQRVNPFHRLLKHF

SEQ ID NO: 215134 - protein, 15 aa, Artificial Sequence
  Description of Artificial Sequence: Synthetic peptide
  Seed: ANQRLNPMHQLLRHF
ANQRVNPFHRLLRHF

SEQ ID NO: 215135 - protein, 15 aa, Artificial Sequence
  Description of Artificial Sequence: Synthetic peptide
  Seed: ANQRLNPMHQLLRHF
ANQRVNPFHRLLSHF

SEQ ID NO: 215136 - protein, 15 aa, Artificial Sequence
  Description of Artificial Sequence: Synthetic peptide
  Seed: ANQRLNPMHQLLRHF
ANQRVNPFHSLLAHF

SEQ ID NO: 215137 - protein, 15 aa, Artificial Sequence
  Description of Artificial Sequence: Synthetic peptide
  Seed: ANQRLNPMHQLLRHF
ANQRVNPFHSLLIHF

SEQ ID NO: 215138 - protein, 15 aa, Artificial Sequence
  Description of Artificial Sequence: Synthetic peptide
  Seed: ANQRLNPMHQLLRHF
ANQRVNPFHSLLLHF

SEQ ID NO: 215139 - protein, 15 aa, Artificial Sequence
  Description of Artificial Sequence: Synthetic peptide
  Seed: ANQRLNPMHQLLRHF
ANQRVNPFHSLLMHF

SEQ ID NO: 215140 - protein, 15 aa, Artificial Sequence
  Description of Artificial Sequence: Synthetic peptide
  Seed: ANQRLNPMHQLLRHF
ANQRVNPFHSLLSHF

SEQ ID NO: 215141 - protein, 15 aa, Artificial Sequence
  Description of Artificial Sequence: Synthetic peptide
  Seed: ANQRLNPMHQLLRHF
ANQRVNPFHSLLTHF

SEQ ID NO: 215142 - protein, 15 aa, Artificial Sequence
  Description of Artificial Sequence: Synthetic peptide
  Seed: ANQRLNPMHQLLRHF
ANQRVNPFHSLLVHF

SEQ ID NO: 215143 - protein, 15 aa, Artificial Sequence
  Description of Artificial Sequence: Synthetic peptide
  Seed: ANQRLNPMHQLLRHF
ANQRVNPFHTLLIHF

SEQ ID NO: 215144 - protein, 15 aa, Artificial Sequence
  Description of Artificial Sequence: Synthetic peptide
  Seed: ANQRLNPMHQLLRHF
ANQRVNPFHTLLLHF

SEQ ID NO: 215145 - protein, 15 aa, Artificial Sequence
  Description of Artificial Sequence: Synthetic peptide
  Seed: ANQRLNPMHQLLRHF
ANQRVNPFHTLLVHF

SEQ ID NO: 215146 - protein, 15 aa, Artificial Sequence
  Description of Artificial Sequence: Synthetic peptide
  Seed: ANQRLNPMHQLLRHF
ANQRVNPGHALLLHF

SEQ ID NO: 215147 - protein, 15 aa, Artificial Sequence
  Description of Artificial Sequence: Synthetic peptide
  Seed: ANQRLNPMHQLLRHF
ANQRVNPHHRLLRHF

SEQ ID NO: 215148 - protein, 15 aa, Artificial Sequence
  Description of Artificial Sequence: Synthetic peptide
  Seed: ANQRLNPMHQLLRHF
ANQRVNPIHALLAHF

SEQ ID NO: 215149 - protein, 15 aa, Artificial Sequence
  Description of Artificial Sequence: Synthetic peptide
  Seed: ANQRLNPMHQLLRHF
ANQRVNPIHALLIHF

SEQ ID NO: 215150 - protein, 15 aa, Artificial Sequence
  Description of Artificial Sequence: Synthetic peptide
  Seed: ANQRLNPMHQLLRHF
ANQRVNPIHALLLHF

SEQ ID NO: 215151 - protein, 15 aa, Artificial Sequence
  Description of Artificial Sequence: Synthetic peptide
  Seed: ANQRLNPMHQLLRHF
ANQRVNPIHALLMHF

SEQ ID NO: 215152 - protein, 15 aa, Artificial Sequence
  Description of Artificial Sequence: Synthetic peptide
  Seed: ANQRLNPMHQLLRHF
ANQRVNPIHALLSHF

SEQ ID NO: 215153 - protein, 15 aa, Artificial Sequence
  Description of Artificial Sequence: Synthetic peptide
  Seed: ANQRLNPMHQLLRHF
ANQRVNPIHALLTHF

SEQ ID NO: 215154 - protein, 15 aa, Artificial Sequence
  Description of Artificial Sequence: Synthetic peptide
  Seed: ANQRLNPMHQLLRHF
ANQRVNPIHALLVHF

SEQ ID NO: 215155 - protein, 15 aa, Artificial Sequence
  Description of Artificial Sequence: Synthetic peptide
  Seed: ANQRLNPMHQLLRHF
ANQRVNPIHFLLFHF

SEQ ID NO: 215156 - protein, 15 aa, Artificial Sequence
  Description of Artificial Sequence: Synthetic peptide
  Seed: ANQRLNPMHQLLRHF
ANQRVNPIHFLLIHF

SEQ ID NO: 215157 - protein, 15 aa, Artificial Sequence
  Description of Artificial Sequence: Synthetic peptide
  Seed: ANQRLNPMHQLLRHF
ANQRVNPIHFLLLHF

SEQ ID NO: 215158 - protein, 15 aa, Artificial Sequence
  Description of Artificial Sequence: Synthetic peptide
  Seed: ANQRLNPMHQLLRHF
ANQRVNPIHFLLMHF

SEQ ID NO: 215159 - protein, 15 aa, Artificial Sequence
  Description of Artificial Sequence: Synthetic peptide
  Seed: ANQRLNPMHQLLRHF
ANQRVNPIHFLLVHF

SEQ ID NO: 215160 - protein, 15 aa, Artificial Sequence
  Description of Artificial Sequence: Synthetic peptide
  Seed: ANQRLNPMHQLLRHF
ANQRVNPIHGLLAHF

SEQ ID NO: 215161 - protein, 15 aa, Artificial Sequence
  Description of Artificial Sequence: Synthetic peptide
  Seed: ANQRLNPMHQLLRHF
ANQRVNPIHGLLIHF

SEQ ID NO: 215162 - protein, 15 aa, Artificial Sequence
  Description of Artificial Sequence: Synthetic peptide
  Seed: ANQRLNPMHQLLRHF
ANQRVNPIHGLLLHF

SEQ ID NO: 215163 - protein, 15 aa, Artificial Sequence
  Description of Artificial Sequence: Synthetic peptide
  Seed: ANQRLNPMHQLLRHF
ANQRVNPIHGLLMHF

SEQ ID NO: 215164 - protein, 15 aa, Artificial Sequence
  Description of Artificial Sequence: Synthetic peptide
  Seed: ANQRLNPMHQLLRHF
ANQRVNPIHGLLTHF

SEQ ID NO: 215165 - protein, 15 aa, Artificial Sequence
  Description of Artificial Sequence: Synthetic peptide
  Seed: ANQRLNPMHQLLRHF
ANQRVNPIHGLLVHF

SEQ ID NO: 215166 - protein, 15 aa, Artificial Sequence
  Description of Artificial Sequence: Synthetic peptide
  Seed: ANQRLNPMHQLLRHF
ANQRVNPIHKLLAHF

SEQ ID NO: 215167 - protein, 15 aa, Artificial Sequence
  Description of Artificial Sequence: Synthetic peptide
  Seed: ANQRLNPMHQLLRHF
ANQRVNPIHKLLGHF

SEQ ID NO: 215168 - protein, 15 aa, Artificial Sequence
  Description of Artificial Sequence: Synthetic peptide
  Seed: ANQRLNPMHQLLRHF
ANQRVNPIHKLLHHF

SEQ ID NO: 215169 - protein, 15 aa, Artificial Sequence
  Description of Artificial Sequence: Synthetic peptide
  Seed: ANQRLNPMHQLLRHF
ANQRVNPIHKLLKHF

SEQ ID NO: 215170 - protein, 15 aa, Artificial Sequence
  Description of Artificial Sequence: Synthetic peptide
  Seed: ANQRLNPMHQLLRHF
ANQRVNPIHKLLQHF

SEQ ID NO: 215171 - protein, 15 aa, Artificial Sequence
  Description of Artificial Sequence: Synthetic peptide
  Seed: ANQRLNPMHQLLRHF
ANQRVNPIHKLLRHF

SEQ ID NO: 215172 - protein, 15 aa, Artificial Sequence
  Description of Artificial Sequence: Synthetic peptide
  Seed: ANQRLNPMHQLLRHF
ANQRVNPIHKLLSHF

SEQ ID NO: 215173 - protein, 15 aa, Artificial Sequence
  Description of Artificial Sequence: Synthetic peptide
  Seed: ANQRLNPMHQLLRHF
ANQRVNPIHKLLTHF

SEQ ID NO: 215174 - protein, 15 aa, Artificial Sequence
  Description of Artificial Sequence: Synthetic peptide
  Seed: ANQRLNPMHQLLRHF
ANQRVNPIHNLLIHF

SEQ ID NO: 215175 - protein, 15 aa, Artificial Sequence
  Description of Artificial Sequence: Synthetic peptide
  Seed: ANQRLNPMHQLLRHF
ANQRVNPIHNLLLHF

SEQ ID NO: 215176 - protein, 15 aa, Artificial Sequence
  Description of Artificial Sequence: Synthetic peptide
  Seed: ANQRLNPMHQLLRHF
ANQRVNPIHNLLVHF

SEQ ID NO: 215177 - protein, 15 aa, Artificial Sequence
  Description of Artificial Sequence: Synthetic peptide
  Seed: ANQRLNPMHQLLRHF
ANQRVNPIHPLLAHF

SEQ ID NO: 215178 - protein, 15 aa, Artificial Sequence
  Description of Artificial Sequence: Synthetic peptide
  Seed: ANQRLNPMHQLLRHF
ANQRVNPIHPLLIHF

SEQ ID NO: 215179 - protein, 15 aa, Artificial Sequence
  Description of Artificial Sequence: Synthetic peptide
  Seed: ANQRLNPMHQLLRHF
ANQRVNPIHPLLLHF

SEQ ID NO: 215180 - protein, 15 aa, Artificial Sequence
  Description of Artificial Sequence: Synthetic peptide
  Seed: ANQRLNPMHQLLRHF
ANQRVNPIHPLLVHF

SEQ ID NO: 215181 - protein, 15 aa, Artificial Sequence
  Description of Artificial Sequence: Synthetic peptide
  Seed: ANQRLNPMHQLLRHF
ANQRVNPIHRLLAHF

SEQ ID NO: 215182 - protein, 15 aa, Artificial Sequence
  Description of Artificial Sequence: Synthetic peptide
  Seed: ANQRLNPMHQLLRHF
ANQRVNPIHRLLFHF

SEQ ID NO: 215183 - protein, 15 aa, Artificial Sequence
  Description of Artificial Sequence: Synthetic peptide
  Seed: ANQRLNPMHQLLRHF
ANQRVNPIHRLLGHF

SEQ ID NO: 215184 - protein, 15 aa, Artificial Sequence
  Description of Artificial Sequence: Synthetic peptide
  Seed: ANQRLNPMHQLLRHF
ANQRVNPIHRLLHHF

SEQ ID NO: 215185 - protein, 15 aa, Artificial Sequence
  Description of Artificial Sequence: Synthetic peptide
  Seed: ANQRLNPMHQLLRHF
ANQRVNPIHRLLIHF

SEQ ID NO: 215186 - protein, 15 aa, Artificial Sequence
  Description of Artificial Sequence: Synthetic peptide
  Seed: ANQRLNPMHQLLRHF
ANQRVNPIHRLLKHF

SEQ ID NO: 215187 - protein, 15 aa, Artificial Sequence
  Description of Artificial Sequence: Synthetic peptide
  Seed: ANQRLNPMHQLLRHF
ANQRVNPIHRLLLHF

SEQ ID NO: 215188 - protein, 15 aa, Artificial Sequence
  Description of Artificial Sequence: Synthetic peptide
  Seed: ANQRLNPMHQLLRHF
ANQRVNPIHRLLMHF

SEQ ID NO: 215189 - protein, 15 aa, Artificial Sequence
  Description of Artificial Sequence: Synthetic peptide
  Seed: ANQRLNPMHQLLRHF
ANQRVNPIHRLLNHF

SEQ ID NO: 215190 - protein, 15 aa, Artificial Sequence
  Description of Artificial Sequence: Synthetic peptide
  Seed: ANQRLNPMHQLLRHF
ANQRVNPIHRLLQHF

SEQ ID NO: 215191 - protein, 15 aa, Artificial Sequence
  Description of Artificial Sequence: Synthetic peptide
  Seed: ANQRLNPMHQLLRHF
ANQRVNPIHRLLRHF

SEQ ID NO: 215192 - protein, 15 aa, Artificial Sequence
  Description of Artificial Sequence: Synthetic peptide
  Seed: ANQRLNPMHQLLRHF
ANQRVNPIHRLLSHF

SEQ ID NO: 215193 - protein, 15 aa, Artificial Sequence
  Description of Artificial Sequence: Synthetic peptide
  Seed: ANQRLNPMHQLLRHF
ANQRVNPIHRLLTHF

SEQ ID NO: 215194 - protein, 15 aa, Artificial Sequence
  Description of Artificial Sequence: Synthetic peptide
  Seed: ANQRLNPMHQLLRHF
ANQRVNPIHRLLVHF

SEQ ID NO: 215195 - protein, 15 aa, Artificial Sequence
  Description of Artificial Sequence: Synthetic peptide
  Seed: ANQRLNPMHQLLRHF
ANQRVNPIHRLLYHF

SEQ ID NO: 215196 - protein, 15 aa, Artificial Sequence
  Description of Artificial Sequence: Synthetic peptide
  Seed: ANQRLNPMHQLLRHF
ANQRVNPIHSLLAHF

SEQ ID NO: 215197 - protein, 15 aa, Artificial Sequence
  Description of Artificial Sequence: Synthetic peptide
  Seed: ANQRLNPMHQLLRHF
ANQRVNPIHSLLIHF

SEQ ID NO: 215198 - protein, 15 aa, Artificial Sequence
  Description of Artificial Sequence: Synthetic peptide
  Seed: ANQRLNPMHQLLRHF
ANQRVNPIHSLLLHF

SEQ ID NO: 215199 - protein, 15 aa, Artificial Sequence
  Description of Artificial Sequence: Synthetic peptide
  Seed: ANQRLNPMHQLLRHF
ANQRVNPIHSLLTHF

SEQ ID NO: 215200 - protein, 15 aa, Artificial Sequence
  Description of Artificial Sequence: Synthetic peptide
  Seed: ANQRLNPMHQLLRHF
ANQRVNPIHSLLVHF

SEQ ID NO: 215201 - protein, 15 aa, Artificial Sequence
  Description of Artificial Sequence: Synthetic peptide
  Seed: ANQRLNPMHQLLRHF
ANQRVNPLHALLAHF

SEQ ID NO: 215202 - protein, 15 aa, Artificial Sequence
  Description of Artificial Sequence: Synthetic peptide
  Seed: ANQRLNPMHQLLRHF
ANQRVNPLHALLGHF

SEQ ID NO: 215203 - protein, 15 aa, Artificial Sequence
  Description of Artificial Sequence: Synthetic peptide
  Seed: ANQRLNPMHQLLRHF
ANQRVNPLHALLIHF

SEQ ID NO: 215204 - protein, 15 aa, Artificial Sequence
  Description of Artificial Sequence: Synthetic peptide
  Seed: ANQRLNPMHQLLRHF
ANQRVNPLHALLLHF

SEQ ID NO: 215205 - protein, 15 aa, Artificial Sequence
  Description of Artificial Sequence: Synthetic peptide
  Seed: ANQRLNPMHQLLRHF
ANQRVNPLHALLMHF

SEQ ID NO: 215206 - protein, 15 aa, Artificial Sequence
  Description of Artificial Sequence: Synthetic peptide
  Seed: ANQRLNPMHQLLRHF
ANQRVNPLHALLSHF

SEQ ID NO: 215207 - protein, 15 aa, Artificial Sequence
  Description of Artificial Sequence: Synthetic peptide
  Seed: ANQRLNPMHQLLRHF
ANQRVNPLHALLTHF

SEQ ID NO: 215208 - protein, 15 aa, Artificial Sequence
  Description of Artificial Sequence: Synthetic peptide
  Seed: ANQRLNPMHQLLRHF
ANQRVNPLHALLVHF

SEQ ID NO: 215209 - protein, 15 aa, Artificial Sequence
  Description of Artificial Sequence: Synthetic peptide
  Seed: ANQRLNPMHQLLRHF
ANQRVNPLHFLLFHF

SEQ ID NO: 215210 - protein, 15 aa, Artificial Sequence
  Description of Artificial Sequence: Synthetic peptide
  Seed: ANQRLNPMHQLLRHF
ANQRVNPLHFLLIHF

SEQ ID NO: 215211 - protein, 15 aa, Artificial Sequence
  Description of Artificial Sequence: Synthetic peptide
  Seed: ANQRLNPMHQLLRHF
ANQRVNPLHFLLLHF

SEQ ID NO: 215212 - protein, 15 aa, Artificial Sequence
  Description of Artificial Sequence: Synthetic peptide
  Seed: ANQRLNPMHQLLRHF
ANQRVNPLHFLLMHF

SEQ ID NO: 215213 - protein, 15 aa, Artificial Sequence
  Description of Artificial Sequence: Synthetic peptide
  Seed: ANQRLNPMHQLLRHF
ANQRVNPLHFLLVHF

SEQ ID NO: 215214 - protein, 15 aa, Artificial Sequence
  Description of Artificial Sequence: Synthetic peptide
  Seed: ANQRLNPMHQLLRHF
ANQRVNPLHGLLAHF

SEQ ID NO: 215215 - protein, 15 aa, Artificial Sequence
  Description of Artificial Sequence: Synthetic peptide
  Seed: ANQRLNPMHQLLRHF
ANQRVNPLHGLLGHF

SEQ ID NO: 215216 - protein, 15 aa, Artificial Sequence
  Description of Artificial Sequence: Synthetic peptide
  Seed: ANQRLNPMHQLLRHF
ANQRVNPLHGLLIHF

SEQ ID NO: 215217 - protein, 15 aa, Artificial Sequence
  Description of Artificial Sequence: Synthetic peptide
  Seed: ANQRLNPMHQLLRHF
ANQRVNPLHGLLLHF

SEQ ID NO: 215218 - protein, 15 aa, Artificial Sequence
  Description of Artificial Sequence: Synthetic peptide
  Seed: ANQRLNPMHQLLRHF
ANQRVNPLHGLLMHF

SEQ ID NO: 215219 - protein, 15 aa, Artificial Sequence
  Description of Artificial Sequence: Synthetic peptide
  Seed: ANQRLNPMHQLLRHF
ANQRVNPLHGLLSHF

SEQ ID NO: 215220 - protein, 15 aa, Artificial Sequence
  Description of Artificial Sequence: Synthetic peptide
  Seed: ANQRLNPMHQLLRHF
ANQRVNPLHGLLTHF

SEQ ID NO: 215221 - protein, 15 aa, Artificial Sequence
  Description of Artificial Sequence: Synthetic peptide
  Seed: ANQRLNPMHQLLRHF
ANQRVNPLHGLLVHF

SEQ ID NO: 215222 - protein, 15 aa, Artificial Sequence
  Description of Artificial Sequence: Synthetic peptide
  Seed: ANQRLNPMHQLLRHF
ANQRVNPLHKLLAHF

SEQ ID NO: 215223 - protein, 15 aa, Artificial Sequence
  Description of Artificial Sequence: Synthetic peptide
  Seed: ANQRLNPMHQLLRHF
ANQRVNPLHKLLGHF

SEQ ID NO: 215224 - protein, 15 aa, Artificial Sequence
  Description of Artificial Sequence: Synthetic peptide
  Seed: ANQRLNPMHQLLRHF
ANQRVNPLHKLLHHF

SEQ ID NO: 215225 - protein, 15 aa, Artificial Sequence
  Description of Artificial Sequence: Synthetic peptide
  Seed: ANQRLNPMHQLLRHF
ANQRVNPLHKLLKHF

SEQ ID NO: 215226 - protein, 15 aa, Artificial Sequence
  Description of Artificial Sequence: Synthetic peptide
  Seed: ANQRLNPMHQLLRHF
ANQRVNPLHKLLQHF

SEQ ID NO: 215227 - protein, 15 aa, Artificial Sequence
  Description of Artificial Sequence: Synthetic peptide
  Seed: ANQRLNPMHQLLRHF
ANQRVNPLHKLLSHF

SEQ ID NO: 215228 - protein, 15 aa, Artificial Sequence
  Description of Artificial Sequence: Synthetic peptide
  Seed: ANQRLNPMHQLLRHF
ANQRVNPLHKLLTHF

SEQ ID NO: 215229 - protein, 15 aa, Artificial Sequence
  Description of Artificial Sequence: Synthetic peptide
  Seed: ANQRLNPMHQLLRHF
ANQRVNPLHNLLAHF

SEQ ID NO: 215230 - protein, 15 aa, Artificial Sequence
  Description of Artificial Sequence: Synthetic peptide
  Seed: ANQRLNPMHQLLRHF
ANQRVNPLHNLLIHF

SEQ ID NO: 215231 - protein, 15 aa, Artificial Sequence
  Description of Artificial Sequence: Synthetic peptide
  Seed: ANQRLNPMHQLLRHF
ANQRVNPLHNLLLHF

SEQ ID NO: 215232 - protein, 15 aa, Artificial Sequence
  Description of Artificial Sequence: Synthetic peptide
  Seed: ANQRLNPMHQLLRHF
ANQRVNPLHNLLTHF

SEQ ID NO: 215233 - protein, 15 aa, Artificial Sequence
  Description of Artificial Sequence: Synthetic peptide
  Seed: ANQRLNPMHQLLRHF
ANQRVNPLHNLLVHF

SEQ ID NO: 215234 - protein, 15 aa, Artificial Sequence
  Description of Artificial Sequence: Synthetic peptide
  Seed: ANQRLNPMHQLLRHF
ANQRVNPLHPLLAHF

SEQ ID NO: 215235 - protein, 15 aa, Artificial Sequence
  Description of Artificial Sequence: Synthetic peptide
  Seed: ANQRLNPMHQLLRHF
ANQRVNPLHPLLIHF

SEQ ID NO: 215236 - protein, 15 aa, Artificial Sequence
  Description of Artificial Sequence: Synthetic peptide
  Seed: ANQRLNPMHQLLRHF
ANQRVNPLHPLLLHF

SEQ ID NO: 215237 - protein, 15 aa, Artificial Sequence
  Description of Artificial Sequence: Synthetic peptide
  Seed: ANQRLNPMHQLLRHF
ANQRVNPLHPLLMHF

SEQ ID NO: 215238 - protein, 15 aa, Artificial Sequence
  Description of Artificial Sequence: Synthetic peptide
  Seed: ANQRLNPMHQLLRHF
ANQRVNPLHPLLSHF

SEQ ID NO: 215239 - protein, 15 aa, Artificial Sequence
  Description of Artificial Sequence: Synthetic peptide
  Seed: ANQRLNPMHQLLRHF
ANQRVNPLHPLLTHF

SEQ ID NO: 215240 - protein, 15 aa, Artificial Sequence
  Description of Artificial Sequence: Synthetic peptide
  Seed: ANQRLNPMHQLLRHF
ANQRVNPLHPLLVHF

SEQ ID NO: 215241 - protein, 15 aa, Artificial Sequence
  Description of Artificial Sequence: Synthetic peptide
  Seed: ANQRLNPMHQLLRHF
ANQRVNPLHRLLAHF

SEQ ID NO: 215242 - protein, 15 aa, Artificial Sequence
  Description of Artificial Sequence: Synthetic peptide
  Seed: ANQRLNPMHQLLRHF
ANQRVNPLHRLLGHF

SEQ ID NO: 215243 - protein, 15 aa, Artificial Sequence
  Description of Artificial Sequence: Synthetic peptide
  Seed: ANQRLNPMHQLLRHF
ANQRVNPLHRLLHHF

SEQ ID NO: 215244 - protein, 15 aa, Artificial Sequence
  Description of Artificial Sequence: Synthetic peptide
  Seed: ANQRLNPMHQLLRHF
ANQRVNPLHRLLIHF

SEQ ID NO: 215245 - protein, 15 aa, Artificial Sequence
  Description of Artificial Sequence: Synthetic peptide
  Seed: ANQRLNPMHQLLRHF
ANQRVNPLHRLLKHF

SEQ ID NO: 215246 - protein, 15 aa, Artificial Sequence
  Description of Artificial Sequence: Synthetic peptide
  Seed: ANQRLNPMHQLLRHF
ANQRVNPLHRLLLHF

SEQ ID NO: 215247 - protein, 15 aa, Artificial Sequence
  Description of Artificial Sequence: Synthetic peptide
  Seed: ANQRLNPMHQLLRHF
ANQRVNPLHRLLMHF

SEQ ID NO: 215248 - protein, 15 aa, Artificial Sequence
  Description of Artificial Sequence: Synthetic peptide
  Seed: ANQRLNPMHQLLRHF
ANQRVNPLHRLLNHF

SEQ ID NO: 215249 - protein, 15 aa, Artificial Sequence
  Description of Artificial Sequence: Synthetic peptide
  Seed: ANQRLNPMHQLLRHF
ANQRVNPLHRLLPHF

SEQ ID NO: 215250 - protein, 15 aa, Artificial Sequence
  Description of Artificial Sequence: Synthetic peptide
  Seed: ANQRLNPMHQLLRHF
ANQRVNPLHRLLQHF

SEQ ID NO: 215251 - protein, 15 aa, Artificial Sequence
  Description of Artificial Sequence: Synthetic peptide
  Seed: ANQRLNPMHQLLRHF
ANQRVNPLHRLLRHF

SEQ ID NO: 215252 - protein, 15 aa, Artificial Sequence
  Description of Artificial Sequence: Synthetic peptide
  Seed: ANQRLNPMHQLLRHF
ANQRVNPLHRLLSHF

SEQ ID NO: 215253 - protein, 15 aa, Artificial Sequence
  Description of Artificial Sequence: Synthetic peptide
  Seed: ANQRLNPMHQLLRHF
ANQRVNPLHRLLTHF

SEQ ID NO: 215254 - protein, 15 aa, Artificial Sequence
  Description of Artificial Sequence: Synthetic peptide
  Seed: ANQRLNPMHQLLRHF
ANQRVNPLHRLLVHF

SEQ ID NO: 215255 - protein, 15 aa, Artificial Sequence
  Description of Artificial Sequence: Synthetic peptide
  Seed: ANQRLNPMHQLLRHF
ANQRVNPLHSLLAHF

SEQ ID NO: 215256 - protein, 15 aa, Artificial Sequence
  Description of Artificial Sequence: Synthetic peptide
  Seed: ANQRLNPMHQLLRHF
ANQRVNPLHSLLIHF

SEQ ID NO: 215257 - protein, 15 aa, Artificial Sequence
  Description of Artificial Sequence: Synthetic peptide
  Seed: ANQRLNPMHQLLRHF
ANQRVNPLHSLLLHF

SEQ ID NO: 215258 - protein, 15 aa, Artificial Sequence
  Description of Artificial Sequence: Synthetic peptide
  Seed: ANQRLNPMHQLLRHF
ANQRVNPLHSLLMHF

SEQ ID NO: 215259 - protein, 15 aa, Artificial Sequence
  Description of Artificial Sequence: Synthetic peptide
  Seed: ANQRLNPMHQLLRHF
ANQRVNPLHSLLSHF

SEQ ID NO: 215260 - protein, 15 aa, Artificial Sequence
  Description of Artificial Sequence: Synthetic peptide
  Seed: ANQRLNPMHQLLRHF
ANQRVNPLHSLLTHF

SEQ ID NO: 215261 - protein, 15 aa, Artificial Sequence
  Description of Artificial Sequence: Synthetic peptide
  Seed: ANQRLNPMHQLLRHF
ANQRVNPLHSLLVHF

SEQ ID NO: 215262 - protein, 15 aa, Artificial Sequence
  Description of Artificial Sequence: Synthetic peptide
  Seed: ANQRLNPMHQLLRHF
ANQRVNPLHTLLAHF

SEQ ID NO: 215263 - protein, 15 aa, Artificial Sequence
  Description of Artificial Sequence: Synthetic peptide
  Seed: ANQRLNPMHQLLRHF
ANQRVNPLHTLLIHF

SEQ ID NO: 215264 - protein, 15 aa, Artificial Sequence
  Description of Artificial Sequence: Synthetic peptide
  Seed: ANQRLNPMHQLLRHF
ANQRVNPLHTLLLHF

SEQ ID NO: 215265 - protein, 15 aa, Artificial Sequence
  Description of Artificial Sequence: Synthetic peptide
  Seed: ANQRLNPMHQLLRHF
ANQRVNPLHTLLTHF

SEQ ID NO: 215266 - protein, 15 aa, Artificial Sequence
  Description of Artificial Sequence: Synthetic peptide
  Seed: ANQRLNPMHQLLRHF
ANQRVNPLHTLLVHF

SEQ ID NO: 215267 - protein, 15 aa, Artificial Sequence
  Description of Artificial Sequence: Synthetic peptide
  Seed: ANQRLNPMHQLLRHF
ANQRVNPLHVLLVHF

SEQ ID NO: 215268 - protein, 15 aa, Artificial Sequence
  Description of Artificial Sequence: Synthetic peptide
  Seed: ANQRLNPMHQLLRHF
ANQRVNPMHALLAHF

SEQ ID NO: 215269 - protein, 15 aa, Artificial Sequence
  Description of Artificial Sequence: Synthetic peptide
  Seed: ANQRLNPMHQLLRHF
ANQRVNPMHALLGHF

SEQ ID NO: 215270 - protein, 15 aa, Artificial Sequence
  Description of Artificial Sequence: Synthetic peptide
  Seed: ANQRLNPMHQLLRHF
ANQRVNPMHALLIHF

SEQ ID NO: 215271 - protein, 15 aa, Artificial Sequence
  Description of Artificial Sequence: Synthetic peptide
  Seed: ANQRLNPMHQLLRHF
ANQRVNPMHALLLHF

SEQ ID NO: 215272 - protein, 15 aa, Artificial Sequence
  Description of Artificial Sequence: Synthetic peptide
  Seed: ANQRLNPMHQLLRHF
ANQRVNPMHALLMHF

SEQ ID NO: 215273 - protein, 15 aa, Artificial Sequence
  Description of Artificial Sequence: Synthetic peptide
  Seed: ANQRLNPMHQLLRHF
ANQRVNPMHALLSHF

SEQ ID NO: 215274 - protein, 15 aa, Artificial Sequence
  Description of Artificial Sequence: Synthetic peptide
  Seed: ANQRLNPMHQLLRHF
ANQRVNPMHALLTHF

SEQ ID NO: 215275 - protein, 15 aa, Artificial Sequence
  Description of Artificial Sequence: Synthetic peptide
  Seed: ANQRLNPMHQLLRHF
ANQRVNPMHALLVHF

SEQ ID NO: 215276 - protein, 15 aa, Artificial Sequence
  Description of Artificial Sequence: Synthetic peptide
  Seed: ANQRLNPMHQLLRHF
ANQRVNPMHFLLIHF

SEQ ID NO: 215277 - protein, 15 aa, Artificial Sequence
  Description of Artificial Sequence: Synthetic peptide
  Seed: ANQRLNPMHQLLRHF
ANQRVNPMHFLLLHF

SEQ ID NO: 215278 - protein, 15 aa, Artificial Sequence
  Description of Artificial Sequence: Synthetic peptide
  Seed: ANQRLNPMHQLLRHF
ANQRVNPMHFLLVHF

SEQ ID NO: 215279 - protein, 15 aa, Artificial Sequence
  Description of Artificial Sequence: Synthetic peptide
  Seed: ANQRLNPMHQLLRHF
ANQRVNPMHGLLAHF

SEQ ID NO: 215280 - protein, 15 aa, Artificial Sequence
  Description of Artificial Sequence: Synthetic peptide
  Seed: ANQRLNPMHQLLRHF
ANQRVNPMHGLLIHF

SEQ ID NO: 215281 - protein, 15 aa, Artificial Sequence
  Description of Artificial Sequence: Synthetic peptide
  Seed: ANQRLNPMHQLLRHF
ANQRVNPMHGLLLHF

SEQ ID NO: 215282 - protein, 15 aa, Artificial Sequence
  Description of Artificial Sequence: Synthetic peptide
  Seed: ANQRLNPMHQLLRHF
ANQRVNPMHGLLMHF

SEQ ID NO: 215283 - protein, 15 aa, Artificial Sequence
  Description of Artificial Sequence: Synthetic peptide
  Seed: ANQRLNPMHQLLRHF
ANQRVNPMHGLLSHF

SEQ ID NO: 215284 - protein, 15 aa, Artificial Sequence
  Description of Artificial Sequence: Synthetic peptide
  Seed: ANQRLNPMHQLLRHF
ANQRVNPMHGLLTHF

SEQ ID NO: 215285 - protein, 15 aa, Artificial Sequence
  Description of Artificial Sequence: Synthetic peptide
  Seed: ANQRLNPMHQLLRHF
ANQRVNPMHGLLVHF

SEQ ID NO: 215286 - protein, 15 aa, Artificial Sequence
  Description of Artificial Sequence: Synthetic peptide
  Seed: ANQRLNPMHQLLRHF
ANQRVNPMHKLLAHF

SEQ ID NO: 215287 - protein, 15 aa, Artificial Sequence
  Description of Artificial Sequence: Synthetic peptide
  Seed: ANQRLNPMHQLLRHF
ANQRVNPMHKLLGHF

SEQ ID NO: 215288 - protein, 15 aa, Artificial Sequence
  Description of Artificial Sequence: Synthetic peptide
  Seed: ANQRLNPMHQLLRHF
ANQRVNPMHKLLHHF

SEQ ID NO: 215289 - protein, 15 aa, Artificial Sequence
  Description of Artificial Sequence: Synthetic peptide
  Seed: ANQRLNPMHQLLRHF
ANQRVNPMHKLLKHF

SEQ ID NO: 215290 - protein, 15 aa, Artificial Sequence
  Description of Artificial Sequence: Synthetic peptide
  Seed: ANQRLNPMHQLLRHF
ANQRVNPMHKLLQHF

SEQ ID NO: 215291 - protein, 15 aa, Artificial Sequence
  Description of Artificial Sequence: Synthetic peptide
  Seed: ANQRLNPMHQLLRHF
ANQRVNPMHKLLSHF

SEQ ID NO: 215292 - protein, 15 aa, Artificial Sequence
  Description of Artificial Sequence: Synthetic peptide
  Seed: ANQRLNPMHQLLRHF
ANQRVNPMHKLLTHF

SEQ ID NO: 215293 - protein, 15 aa, Artificial Sequence
  Description of Artificial Sequence: Synthetic peptide
  Seed: ANQRLNPMHQLLRHF
ANQRVNPMHKLLVHF

SEQ ID NO: 215294 - protein, 15 aa, Artificial Sequence
  Description of Artificial Sequence: Synthetic peptide
  Seed: ANQRLNPMHQLLRHF
ANQRVNPMHNLLAHF

SEQ ID NO: 215295 - protein, 15 aa, Artificial Sequence
  Description of Artificial Sequence: Synthetic peptide
  Seed: ANQRLNPMHQLLRHF
ANQRVNPMHNLLIHF

SEQ ID NO: 215296 - protein, 15 aa, Artificial Sequence
  Description of Artificial Sequence: Synthetic peptide
  Seed: ANQRLNPMHQLLRHF
ANQRVNPMHNLLLHF

SEQ ID NO: 215297 - protein, 15 aa, Artificial Sequence
  Description of Artificial Sequence: Synthetic peptide
  Seed: ANQRLNPMHQLLRHF
ANQRVNPMHNLLVHF

SEQ ID NO: 215298 - protein, 15 aa, Artificial Sequence
  Description of Artificial Sequence: Synthetic peptide
  Seed: ANQRLNPMHQLLRHF
ANQRVNPMHPLLAHF

SEQ ID NO: 215299 - protein, 15 aa, Artificial Sequence
  Description of Artificial Sequence: Synthetic peptide
  Seed: ANQRLNPMHQLLRHF
ANQRVNPMHPLLIHF

SEQ ID NO: 215300 - protein, 15 aa, Artificial Sequence
  Description of Artificial Sequence: Synthetic peptide
  Seed: ANQRLNPMHQLLRHF
ANQRVNPMHPLLLHF

SEQ ID NO: 215301 - protein, 15 aa, Artificial Sequence
  Description of Artificial Sequence: Synthetic peptide
  Seed: ANQRLNPMHQLLRHF
ANQRVNPMHPLLMHF

SEQ ID NO: 215302 - protein, 15 aa, Artificial Sequence
  Description of Artificial Sequence: Synthetic peptide
  Seed: ANQRLNPMHQLLRHF
ANQRVNPMHPLLSHF

SEQ ID NO: 215303 - protein, 15 aa, Artificial Sequence
  Description of Artificial Sequence: Synthetic peptide
  Seed: ANQRLNPMHQLLRHF
ANQRVNPMHPLLTHF

SEQ ID NO: 215304 - protein, 15 aa, Artificial Sequence
  Description of Artificial Sequence: Synthetic peptide
  Seed: ANQRLNPMHQLLRHF
ANQRVNPMHPLLVHF

SEQ ID NO: 215305 - protein, 15 aa, Artificial Sequence
  Description of Artificial Sequence: Synthetic peptide
  Seed: ANQRLNPMHQLLRHF
ANQRVNPMHRLLAHF

SEQ ID NO: 215306 - protein, 15 aa, Artificial Sequence
  Description of Artificial Sequence: Synthetic peptide
  Seed: ANQRLNPMHQLLRHF
ANQRVNPMHRLLGHF

SEQ ID NO: 215307 - protein, 15 aa, Artificial Sequence
  Description of Artificial Sequence: Synthetic peptide
  Seed: ANQRLNPMHQLLRHF
ANQRVNPMHRLLHHF

SEQ ID NO: 215308 - protein, 15 aa, Artificial Sequence
  Description of Artificial Sequence: Synthetic peptide
  Seed: ANQRLNPMHQLLRHF
ANQRVNPMHRLLIHF

SEQ ID NO: 215309 - protein, 15 aa, Artificial Sequence
  Description of Artificial Sequence: Synthetic peptide
  Seed: ANQRLNPMHQLLRHF
ANQRVNPMHRLLKHF

SEQ ID NO: 215310 - protein, 15 aa, Artificial Sequence
  Description of Artificial Sequence: Synthetic peptide
  Seed: ANQRLNPMHQLLRHF
ANQRVNPMHRLLLHF

SEQ ID NO: 215311 - protein, 15 aa, Artificial Sequence
  Description of Artificial Sequence: Synthetic peptide
  Seed: ANQRLNPMHQLLRHF
ANQRVNPMHRLLMHF

SEQ ID NO: 215312 - protein, 15 aa, Artificial Sequence
  Description of Artificial Sequence: Synthetic peptide
  Seed: ANQRLNPMHQLLRHF
ANQRVNPMHRLLNHF

SEQ ID NO: 215313 - protein, 15 aa, Artificial Sequence
  Description of Artificial Sequence: Synthetic peptide
  Seed: ANQRLNPMHQLLRHF
ANQRVNPMHRLLPHF

SEQ ID NO: 215314 - protein, 15 aa, Artificial Sequence
  Description of Artificial Sequence: Synthetic peptide
  Seed: ANQRLNPMHQLLRHF
ANQRVNPMHRLLQHF

SEQ ID NO: 215315 - protein, 15 aa, Artificial Sequence
  Description of Artificial Sequence: Synthetic peptide
  Seed: ANQRLNPMHQLLRHF
ANQRVNPMHRLLRHF

SEQ ID NO: 215316 - protein, 15 aa, Artificial Sequence
  Description of Artificial Sequence: Synthetic peptide
  Seed: ANQRLNPMHQLLRHF
ANQRVNPMHRLLSHF

SEQ ID NO: 215317 - protein, 15 aa, Artificial Sequence
  Description of Artificial Sequence: Synthetic peptide
  Seed: ANQRLNPMHQLLRHF
ANQRVNPMHRLLTHF

SEQ ID NO: 215318 - protein, 15 aa, Artificial Sequence
  Description of Artificial Sequence: Synthetic peptide
  Seed: ANQRLNPMHQLLRHF
ANQRVNPMHRLLVHF

SEQ ID NO: 215319 - protein, 15 aa, Artificial Sequence
  Description of Artificial Sequence: Synthetic peptide
  Seed: ANQRLNPMHQLLRHF
ANQRVNPMHRLLYHF

SEQ ID NO: 215320 - protein, 15 aa, Artificial Sequence
  Description of Artificial Sequence: Synthetic peptide
  Seed: ANQRLNPMHQLLRHF
ANQRVNPMHSLLAHF

SEQ ID NO: 215321 - protein, 15 aa, Artificial Sequence
  Description of Artificial Sequence: Synthetic peptide
  Seed: ANQRLNPMHQLLRHF
ANQRVNPMHSLLIHF

SEQ ID NO: 215322 - protein, 15 aa, Artificial Sequence
  Description of Artificial Sequence: Synthetic peptide
  Seed: ANQRLNPMHQLLRHF
ANQRVNPMHSLLLHF

SEQ ID NO: 215323 - protein, 15 aa, Artificial Sequence
  Description of Artificial Sequence: Synthetic peptide
  Seed: ANQRLNPMHQLLRHF
ANQRVNPMHSLLMHF

SEQ ID NO: 215324 - protein, 15 aa, Artificial Sequence
  Description of Artificial Sequence: Synthetic peptide
  Seed: ANQRLNPMHQLLRHF
ANQRVNPMHSLLSHF

SEQ ID NO: 215325 - protein, 15 aa, Artificial Sequence
  Description of Artificial Sequence: Synthetic peptide
  Seed: ANQRLNPMHQLLRHF
ANQRVNPMHSLLTHF

SEQ ID NO: 215326 - protein, 15 aa, Artificial Sequence
  Description of Artificial Sequence: Synthetic peptide
  Seed: ANQRLNPMHQLLRHF
ANQRVNPMHSLLVHF

SEQ ID NO: 215327 - protein, 15 aa, Artificial Sequence
  Description of Artificial Sequence: Synthetic peptide
  Seed: ANQRLNPMHQLLRHF
ANQRVNPMHTLLAHF

SEQ ID NO: 215328 - protein, 15 aa, Artificial Sequence
  Description of Artificial Sequence: Synthetic peptide
  Seed: ANQRLNPMHQLLRHF
ANQRVNPMHTLLIHF

SEQ ID NO: 215329 - protein, 15 aa, Artificial Sequence
  Description of Artificial Sequence: Synthetic peptide
  Seed: ANQRLNPMHQLLRHF
ANQRVNPMHTLLLHF

SEQ ID NO: 215330 - protein, 15 aa, Artificial Sequence
  Description of Artificial Sequence: Synthetic peptide
  Seed: ANQRLNPMHQLLRHF
ANQRVNPMHTLLTHF

SEQ ID NO: 215331 - protein, 15 aa, Artificial Sequence
  Description of Artificial Sequence: Synthetic peptide
  Seed: ANQRLNPMHQLLRHF
ANQRVNPMHTLLVHF

SEQ ID NO: 215332 - protein, 15 aa, Artificial Sequence
  Description of Artificial Sequence: Synthetic peptide
  Seed: ANQRLNPMHQLLRHF
ANQRVNPNHALLAHF

SEQ ID NO: 215333 - protein, 15 aa, Artificial Sequence
  Description of Artificial Sequence: Synthetic peptide
  Seed: ANQRLNPMHQLLRHF
ANQRVNPNHALLFHF

SEQ ID NO: 215334 - protein, 15 aa, Artificial Sequence
  Description of Artificial Sequence: Synthetic peptide
  Seed: ANQRLNPMHQLLRHF
ANQRVNPNHALLIHF

SEQ ID NO: 215335 - protein, 15 aa, Artificial Sequence
  Description of Artificial Sequence: Synthetic peptide
  Seed: ANQRLNPMHQLLRHF
ANQRVNPNHALLLHF

SEQ ID NO: 215336 - protein, 15 aa, Artificial Sequence
  Description of Artificial Sequence: Synthetic peptide
  Seed: ANQRLNPMHQLLRHF
ANQRVNPNHALLMHF

SEQ ID NO: 215337 - protein, 15 aa, Artificial Sequence
  Description of Artificial Sequence: Synthetic peptide
  Seed: ANQRLNPMHQLLRHF
ANQRVNPNHALLVHF

SEQ ID NO: 215338 - protein, 15 aa, Artificial Sequence
  Description of Artificial Sequence: Synthetic peptide
  Seed: ANQRLNPMHQLLRHF
ANQRVNPNHALLYHF

SEQ ID NO: 215339 - protein, 15 aa, Artificial Sequence
  Description of Artificial Sequence: Synthetic peptide
  Seed: ANQRLNPMHQLLRHF
ANQRVNPNHGLLFHF

SEQ ID NO: 215340 - protein, 15 aa, Artificial Sequence
  Description of Artificial Sequence: Synthetic peptide
  Seed: ANQRLNPMHQLLRHF
ANQRVNPNHGLLIHF

SEQ ID NO: 215341 - protein, 15 aa, Artificial Sequence
  Description of Artificial Sequence: Synthetic peptide
  Seed: ANQRLNPMHQLLRHF
ANQRVNPNHGLLLHF

SEQ ID NO: 215342 - protein, 15 aa, Artificial Sequence
  Description of Artificial Sequence: Synthetic peptide
  Seed: ANQRLNPMHQLLRHF
ANQRVNPNHGLLMHF

SEQ ID NO: 215343 - protein, 15 aa, Artificial Sequence
  Description of Artificial Sequence: Synthetic peptide
  Seed: ANQRLNPMHQLLRHF
ANQRVNPNHGLLVHF

SEQ ID NO: 215344 - protein, 15 aa, Artificial Sequence
  Description of Artificial Sequence: Synthetic peptide
  Seed: ANQRLNPMHQLLRHF
ANQRVNPNHILLFHF

SEQ ID NO: 215345 - protein, 15 aa, Artificial Sequence
  Description of Artificial Sequence: Synthetic peptide
  Seed: ANQRLNPMHQLLRHF
ANQRVNPNHILLIHF

SEQ ID NO: 215346 - protein, 15 aa, Artificial Sequence
  Description of Artificial Sequence: Synthetic peptide
  Seed: ANQRLNPMHQLLRHF
ANQRVNPNHILLLHF

SEQ ID NO: 215347 - protein, 15 aa, Artificial Sequence
  Description of Artificial Sequence: Synthetic peptide
  Seed: ANQRLNPMHQLLRHF
ANQRVNPNHILLMHF

SEQ ID NO: 215348 - protein, 15 aa, Artificial Sequence
  Description of Artificial Sequence: Synthetic peptide
  Seed: ANQRLNPMHQLLRHF
ANQRVNPNHILLVHF

SEQ ID NO: 215349 - protein, 15 aa, Artificial Sequence
  Description of Artificial Sequence: Synthetic peptide
  Seed: ANQRLNPMHQLLRHF
ANQRVNPNHILLYHF

SEQ ID NO: 215350 - protein, 15 aa, Artificial Sequence
  Description of Artificial Sequence: Synthetic peptide
  Seed: ANQRLNPMHQLLRHF
ANQRVNPNHLLLIHF

SEQ ID NO: 215351 - protein, 15 aa, Artificial Sequence
  Description of Artificial Sequence: Synthetic peptide
  Seed: ANQRLNPMHQLLRHF
ANQRVNPNHLLLLHF

SEQ ID NO: 215352 - protein, 15 aa, Artificial Sequence
  Description of Artificial Sequence: Synthetic peptide
  Seed: ANQRLNPMHQLLRHF
ANQRVNPNHLLLVHF

SEQ ID NO: 215353 - protein, 15 aa, Artificial Sequence
  Description of Artificial Sequence: Synthetic peptide
  Seed: ANQRLNPMHQLLRHF
ANQRVNPNHMLLIHF

SEQ ID NO: 215354 - protein, 15 aa, Artificial Sequence
  Description of Artificial Sequence: Synthetic peptide
  Seed: ANQRLNPMHQLLRHF
ANQRVNPNHMLLVHF

SEQ ID NO: 215355 - protein, 15 aa, Artificial Sequence
  Description of Artificial Sequence: Synthetic peptide
  Seed: ANQRLNPMHQLLRHF
ANQRVNPNHNLLFHF

SEQ ID NO: 215356 - protein, 15 aa, Artificial Sequence
  Description of Artificial Sequence: Synthetic peptide
  Seed: ANQRLNPMHQLLRHF
ANQRVNPNHNLLIHF

SEQ ID NO: 215357 - protein, 15 aa, Artificial Sequence
  Description of Artificial Sequence: Synthetic peptide
  Seed: ANQRLNPMHQLLRHF
ANQRVNPNHNLLLHF

SEQ ID NO: 215358 - protein, 15 aa, Artificial Sequence
  Description of Artificial Sequence: Synthetic peptide
  Seed: ANQRLNPMHQLLRHF
ANQRVNPNHNLLMHF

SEQ ID NO: 215359 - protein, 15 aa, Artificial Sequence
  Description of Artificial Sequence: Synthetic peptide
  Seed: ANQRLNPMHQLLRHF
ANQRVNPNHNLLVHF

SEQ ID NO: 215360 - protein, 15 aa, Artificial Sequence
  Description of Artificial Sequence: Synthetic peptide
  Seed: ANQRLNPMHQLLRHF
ANQRVNPNHNLLYHF

SEQ ID NO: 215361 - protein, 15 aa, Artificial Sequence
  Description of Artificial Sequence: Synthetic peptide
  Seed: ANQRLNPMHQLLRHF
ANQRVNPNHPLLFHF

SEQ ID NO: 215362 - protein, 15 aa, Artificial Sequence
  Description of Artificial Sequence: Synthetic peptide
  Seed: ANQRLNPMHQLLRHF
ANQRVNPNHPLLIHF

SEQ ID NO: 215363 - protein, 15 aa, Artificial Sequence
  Description of Artificial Sequence: Synthetic peptide
  Seed: ANQRLNPMHQLLRHF
ANQRVNPNHPLLLHF

SEQ ID NO: 215364 - protein, 15 aa, Artificial Sequence
  Description of Artificial Sequence: Synthetic peptide
  Seed: ANQRLNPMHQLLRHF
ANQRVNPNHPLLMHF

SEQ ID NO: 215365 - protein, 15 aa, Artificial Sequence
  Description of Artificial Sequence: Synthetic peptide
  Seed: ANQRLNPMHQLLRHF
ANQRVNPNHPLLVHF

SEQ ID NO: 215366 - protein, 15 aa, Artificial Sequence
  Description of Artificial Sequence: Synthetic peptide
  Seed: ANQRLNPMHQLLRHF
ANQRVNPNHSLLFHF

SEQ ID NO: 215367 - protein, 15 aa, Artificial Sequence
  Description of Artificial Sequence: Synthetic peptide
  Seed: ANQRLNPMHQLLRHF
ANQRVNPNHSLLIHF

SEQ ID NO: 215368 - protein, 15 aa, Artificial Sequence
  Description of Artificial Sequence: Synthetic peptide
  Seed: ANQRLNPMHQLLRHF
ANQRVNPNHSLLLHF

SEQ ID NO: 215369 - protein, 15 aa, Artificial Sequence
  Description of Artificial Sequence: Synthetic peptide
  Seed: ANQRLNPMHQLLRHF
ANQRVNPNHSLLMHF

SEQ ID NO: 215370 - protein, 15 aa, Artificial Sequence
  Description of Artificial Sequence: Synthetic peptide
  Seed: ANQRLNPMHQLLRHF
ANQRVNPNHSLLVHF

SEQ ID NO: 215371 - protein, 15 aa, Artificial Sequence
  Description of Artificial Sequence: Synthetic peptide
  Seed: ANQRLNPMHQLLRHF
ANQRVNPNHSLLYHF

SEQ ID NO: 215372 - protein, 15 aa, Artificial Sequence
  Description of Artificial Sequence: Synthetic peptide
  Seed: ANQRLNPMHQLLRHF
ANQRVNPNHTLLFHF

SEQ ID NO: 215373 - protein, 15 aa, Artificial Sequence
  Description of Artificial Sequence: Synthetic peptide
  Seed: ANQRLNPMHQLLRHF
ANQRVNPNHTLLIHF

SEQ ID NO: 215374 - protein, 15 aa, Artificial Sequence
  Description of Artificial Sequence: Synthetic peptide
  Seed: ANQRLNPMHQLLRHF
ANQRVNPNHTLLLHF

SEQ ID NO: 215375 - protein, 15 aa, Artificial Sequence
  Description of Artificial Sequence: Synthetic peptide
  Seed: ANQRLNPMHQLLRHF
ANQRVNPNHTLLMHF

SEQ ID NO: 215376 - protein, 15 aa, Artificial Sequence
  Description of Artificial Sequence: Synthetic peptide
  Seed: ANQRLNPMHQLLRHF
ANQRVNPNHTLLVHF

SEQ ID NO: 215377 - protein, 15 aa, Artificial Sequence
  Description of Artificial Sequence: Synthetic peptide
  Seed: ANQRLNPMHQLLRHF
ANQRVNPNHVLLFHF

SEQ ID NO: 215378 - protein, 15 aa, Artificial Sequence
  Description of Artificial Sequence: Synthetic peptide
  Seed: ANQRLNPMHQLLRHF
ANQRVNPNHVLLIHF

SEQ ID NO: 215379 - protein, 15 aa, Artificial Sequence
  Description of Artificial Sequence: Synthetic peptide
  Seed: ANQRLNPMHQLLRHF
ANQRVNPNHVLLLHF

SEQ ID NO: 215380 - protein, 15 aa, Artificial Sequence
  Description of Artificial Sequence: Synthetic peptide
  Seed: ANQRLNPMHQLLRHF
ANQRVNPNHVLLMHF

SEQ ID NO: 215381 - protein, 15 aa, Artificial Sequence
  Description of Artificial Sequence: Synthetic peptide
  Seed: ANQRLNPMHQLLRHF
ANQRVNPNHVLLVHF

SEQ ID NO: 215382 - protein, 15 aa, Artificial Sequence
  Description of Artificial Sequence: Synthetic peptide
  Seed: ANQRLNPMHQLLRHF
ANQRVNPQHALLAHF

SEQ ID NO: 215383 - protein, 15 aa, Artificial Sequence
  Description of Artificial Sequence: Synthetic peptide
  Seed: ANQRLNPMHQLLRHF
ANQRVNPQHALLIHF

SEQ ID NO: 215384 - protein, 15 aa, Artificial Sequence
  Description of Artificial Sequence: Synthetic peptide
  Seed: ANQRLNPMHQLLRHF
ANQRVNPQHALLLHF

SEQ ID NO: 215385 - protein, 15 aa, Artificial Sequence
  Description of Artificial Sequence: Synthetic peptide
  Seed: ANQRLNPMHQLLRHF
ANQRVNPQHALLVHF

SEQ ID NO: 215386 - protein, 15 aa, Artificial Sequence
  Description of Artificial Sequence: Synthetic peptide
  Seed: ANQRLNPMHQLLRHF
ANQRVNPQHFLLLHF

SEQ ID NO: 215387 - protein, 15 aa, Artificial Sequence
  Description of Artificial Sequence: Synthetic peptide
  Seed: ANQRLNPMHQLLRHF
ANQRVNPQHGLLAHF

SEQ ID NO: 215388 - protein, 15 aa, Artificial Sequence
  Description of Artificial Sequence: Synthetic peptide
  Seed: ANQRLNPMHQLLRHF
ANQRVNPQHGLLIHF

SEQ ID NO: 215389 - protein, 15 aa, Artificial Sequence
  Description of Artificial Sequence: Synthetic peptide
  Seed: ANQRLNPMHQLLRHF
ANQRVNPQHGLLLHF

SEQ ID NO: 215390 - protein, 15 aa, Artificial Sequence
  Description of Artificial Sequence: Synthetic peptide
  Seed: ANQRLNPMHQLLRHF
ANQRVNPQHGLLVHF

SEQ ID NO: 215391 - protein, 15 aa, Artificial Sequence
  Description of Artificial Sequence: Synthetic peptide
  Seed: ANQRLNPMHQLLRHF
ANQRVNPQHSLLLHF

SEQ ID NO: 215392 - protein, 15 aa, Artificial Sequence
  Description of Artificial Sequence: Synthetic peptide
  Seed: ANQRLNPMHQLLRHF
ANQRVNPQHSLLVHF

SEQ ID NO: 215393 - protein, 15 aa, Artificial Sequence
  Description of Artificial Sequence: Synthetic peptide
  Seed: ANQRLNPMHQLLRHF
ANQRVNPSHALLIHF

SEQ ID NO: 215394 - protein, 15 aa, Artificial Sequence
  Description of Artificial Sequence: Synthetic peptide
  Seed: ANQRLNPMHQLLRHF
ANQRVNPSHALLLHF

SEQ ID NO: 215395 - protein, 15 aa, Artificial Sequence
  Description of Artificial Sequence: Synthetic peptide
  Seed: ANQRLNPMHQLLRHF
ANQRVNPSHALLVHF

SEQ ID NO: 215396 - protein, 15 aa, Artificial Sequence
  Description of Artificial Sequence: Synthetic peptide
  Seed: ANQRLNPMHQLLRHF
ANQRVNPSHFLLIHF

SEQ ID NO: 215397 - protein, 15 aa, Artificial Sequence
  Description of Artificial Sequence: Synthetic peptide
  Seed: ANQRLNPMHQLLRHF
ANQRVNPSHFLLLHF

SEQ ID NO: 215398 - protein, 15 aa, Artificial Sequence
  Description of Artificial Sequence: Synthetic peptide
  Seed: ANQRLNPMHQLLRHF
ANQRVNPSHFLLVHF

SEQ ID NO: 215399 - protein, 15 aa, Artificial Sequence
  Description of Artificial Sequence: Synthetic peptide
  Seed: ANQRLNPMHQLLRHF
ANQRVNPSHNLLIHF

SEQ ID NO: 215400 - protein, 15 aa, Artificial Sequence
  Description of Artificial Sequence: Synthetic peptide
  Seed: ANQRLNPMHQLLRHF
ANQRVNPSHRLLRHF

SEQ ID NO: 215401 - protein, 15 aa, Artificial Sequence
  Description of Artificial Sequence: Synthetic peptide
  Seed: ANQRLNPMHQLLRHF
ANQRVNPSHSLLIHF

SEQ ID NO: 215402 - protein, 15 aa, Artificial Sequence
  Description of Artificial Sequence: Synthetic peptide
  Seed: ANQRLNPMHQLLRHF
ANQRVNPTHFLLFHF

SEQ ID NO: 215403 - protein, 15 aa, Artificial Sequence
  Description of Artificial Sequence: Synthetic peptide
  Seed: ANQRLNPMHQLLRHF
ANQRVNPTHFLLIHF

SEQ ID NO: 215404 - protein, 15 aa, Artificial Sequence
  Description of Artificial Sequence: Synthetic peptide
  Seed: ANQRLNPMHQLLRHF
ANQRVNPTHFLLLHF

SEQ ID NO: 215405 - protein, 15 aa, Artificial Sequence
  Description of Artificial Sequence: Synthetic peptide
  Seed: ANQRLNPMHQLLRHF
ANQRVNPTHFLLMHF

SEQ ID NO: 215406 - protein, 15 aa, Artificial Sequence
  Description of Artificial Sequence: Synthetic peptide
  Seed: ANQRLNPMHQLLRHF
ANQRVNPTHFLLVHF

SEQ ID NO: 215407 - protein, 15 aa, Artificial Sequence
  Description of Artificial Sequence: Synthetic peptide
  Seed: ANQRLNPMHQLLRHF
ANQRVNPVHALLAHF

SEQ ID NO: 215408 - protein, 15 aa, Artificial Sequence
  Description of Artificial Sequence: Synthetic peptide
  Seed: ANQRLNPMHQLLRHF
ANQRVNPVHALLIHF

SEQ ID NO: 215409 - protein, 15 aa, Artificial Sequence
  Description of Artificial Sequence: Synthetic peptide
  Seed: ANQRLNPMHQLLRHF
ANQRVNPVHALLLHF

SEQ ID NO: 215410 - protein, 15 aa, Artificial Sequence
  Description of Artificial Sequence: Synthetic peptide
  Seed: ANQRLNPMHQLLRHF
ANQRVNPVHALLVHF

SEQ ID NO: 215411 - protein, 15 aa, Artificial Sequence
  Description of Artificial Sequence: Synthetic peptide
  Seed: ANQRLNPMHQLLRHF
ANQRVNPVHFLLIHF

SEQ ID NO: 215412 - protein, 15 aa, Artificial Sequence
  Description of Artificial Sequence: Synthetic peptide
  Seed: ANQRLNPMHQLLRHF
ANQRVNPVHFLLLHF

SEQ ID NO: 215413 - protein, 15 aa, Artificial Sequence
  Description of Artificial Sequence: Synthetic peptide
  Seed: ANQRLNPMHQLLRHF
ANQRVNPVHFLLMHF

SEQ ID NO: 215414 - protein, 15 aa, Artificial Sequence
  Description of Artificial Sequence: Synthetic peptide
  Seed: ANQRLNPMHQLLRHF
ANQRVNPVHFLLVHF

SEQ ID NO: 215415 - protein, 15 aa, Artificial Sequence
  Description of Artificial Sequence: Synthetic peptide
  Seed: ANQRLNPMHQLLRHF
ANQRVNPVHGLLAHF

SEQ ID NO: 215416 - protein, 15 aa, Artificial Sequence
  Description of Artificial Sequence: Synthetic peptide
  Seed: ANQRLNPMHQLLRHF
ANQRVNPVHGLLIHF

SEQ ID NO: 215417 - protein, 15 aa, Artificial Sequence
  Description of Artificial Sequence: Synthetic peptide
  Seed: ANQRLNPMHQLLRHF
ANQRVNPVHGLLLHF

SEQ ID NO: 215418 - protein, 15 aa, Artificial Sequence
  Description of Artificial Sequence: Synthetic peptide
  Seed: ANQRLNPMHQLLRHF
ANQRVNPVHGLLVHF

SEQ ID NO: 215419 - protein, 15 aa, Artificial Sequence
  Description of Artificial Sequence: Synthetic peptide
  Seed: ANQRLNPMHQLLRHF
ANQRVNPVHKLLAHF

SEQ ID NO: 215420 - protein, 15 aa, Artificial Sequence
  Description of Artificial Sequence: Synthetic peptide
  Seed: ANQRLNPMHQLLRHF
ANQRVNPVHKLLSHF

SEQ ID NO: 215421 - protein, 15 aa, Artificial Sequence
  Description of Artificial Sequence: Synthetic peptide
  Seed: ANQRLNPMHQLLRHF
ANQRVNPVHRLLAHF

SEQ ID NO: 215422 - protein, 15 aa, Artificial Sequence
  Description of Artificial Sequence: Synthetic peptide
  Seed: ANQRLNPMHQLLRHF
ANQRVNPVHRLLGHF

SEQ ID NO: 215423 - protein, 15 aa, Artificial Sequence
  Description of Artificial Sequence: Synthetic peptide
  Seed: ANQRLNPMHQLLRHF
ANQRVNPVHRLLHHF

SEQ ID NO: 215424 - protein, 15 aa, Artificial Sequence
  Description of Artificial Sequence: Synthetic peptide
  Seed: ANQRLNPMHQLLRHF
ANQRVNPVHRLLKHF

SEQ ID NO: 215425 - protein, 15 aa, Artificial Sequence
  Description of Artificial Sequence: Synthetic peptide
  Seed: ANQRLNPMHQLLRHF
ANQRVNPVHRLLLHF

SEQ ID NO: 215426 - protein, 15 aa, Artificial Sequence
  Description of Artificial Sequence: Synthetic peptide
  Seed: ANQRLNPMHQLLRHF
ANQRVNPVHRLLQHF

SEQ ID NO: 215427 - protein, 15 aa, Artificial Sequence
  Description of Artificial Sequence: Synthetic peptide
  Seed: ANQRLNPMHQLLRHF
ANQRVNPVHRLLRHF

SEQ ID NO: 215428 - protein, 15 aa, Artificial Sequence
  Description of Artificial Sequence: Synthetic peptide
  Seed: ANQRLNPMHQLLRHF
ANQRVNPVHRLLSHF

SEQ ID NO: 215429 - protein, 15 aa, Artificial Sequence
  Description of Artificial Sequence: Synthetic peptide
  Seed: ANQRLNPMHQLLRHF
ANQRVNPVHRLLTHF

SEQ ID NO: 215430 - protein, 15 aa, Artificial Sequence
  Description of Artificial Sequence: Synthetic peptide
  Seed: ANQRLNPMHQLLRHF
ANQRVNPVHRLLVHF

SEQ ID NO: 215431 - protein, 15 aa, Artificial Sequence
  Description of Artificial Sequence: Synthetic peptide
  Seed: ANQRLNPMHQLLRHF
ANQRVNPVHSLLLHF

SEQ ID NO: 215432 - protein, 15 aa, Artificial Sequence
  Description of Artificial Sequence: Synthetic peptide
  Seed: ANQRLNPMHQLLRHF
ANQRVNPVHSLLVHF

SEQ ID NO: 215433 - protein, 15 aa, Artificial Sequence
  Description of Artificial Sequence: Synthetic peptide
  Seed: ANQRLNPMHQLLRHF
ANQRVNPWHNLLIHF

SEQ ID NO: 215434 - protein, 15 aa, Artificial Sequence
  Description of Artificial Sequence: Synthetic peptide
  Seed: ANQRLNPMHQLLRHF
ANQRVNPWHNLLLHF

SEQ ID NO: 215435 - protein, 15 aa, Artificial Sequence
  Description of Artificial Sequence: Synthetic peptide
  Seed: ANQRLNPMHQLLRHF
ANQRVNPWHNLLVHF

SEQ ID NO: 215436 - protein, 15 aa, Artificial Sequence
  Description of Artificial Sequence: Synthetic peptide
  Seed: ANQRLNPMHQLLRHF
ANQRVNPWHSLLAHF

SEQ ID NO: 215437 - protein, 15 aa, Artificial Sequence
  Description of Artificial Sequence: Synthetic peptide
  Seed: ANQRLNPMHQLLRHF
ANQRVNPWHSLLIHF

SEQ ID NO: 215438 - protein, 15 aa, Artificial Sequence
  Description of Artificial Sequence: Synthetic peptide
  Seed: ANQRLNPMHQLLRHF
ANQRVNPWHSLLLHF

SEQ ID NO: 215439 - protein, 15 aa, Artificial Sequence
  Description of Artificial Sequence: Synthetic peptide
  Seed: ANQRLNPMHQLLRHF
ANQRVNPWHSLLVHF

SEQ ID NO: 215440 - protein, 15 aa, Artificial Sequence
  Description of Artificial Sequence: Synthetic peptide
  Seed: ANQRLNPMHQLLRHF
ANQRVNPYHALLAHF

SEQ ID NO: 215441 - protein, 15 aa, Artificial Sequence
  Description of Artificial Sequence: Synthetic peptide
  Seed: ANQRLNPMHQLLRHF
ANQRVNPYHALLIHF

SEQ ID NO: 215442 - protein, 15 aa, Artificial Sequence
  Description of Artificial Sequence: Synthetic peptide
  Seed: ANQRLNPMHQLLRHF
ANQRVNPYHALLLHF

SEQ ID NO: 215443 - protein, 15 aa, Artificial Sequence
  Description of Artificial Sequence: Synthetic peptide
  Seed: ANQRLNPMHQLLRHF
ANQRVNPYHALLVHF

SEQ ID NO: 215444 - protein, 15 aa, Artificial Sequence
  Description of Artificial Sequence: Synthetic peptide
  Seed: ANQRLNPMHQLLRHF
ANQRVNPYHGLLAHF

SEQ ID NO: 215445 - protein, 15 aa, Artificial Sequence
  Description of Artificial Sequence: Synthetic peptide
  Seed: ANQRLNPMHQLLRHF
ANQRVNPYHGLLIHF

SEQ ID NO: 215446 - protein, 15 aa, Artificial Sequence
  Description of Artificial Sequence: Synthetic peptide
  Seed: ANQRLNPMHQLLRHF
ANQRVNPYHGLLLHF

SEQ ID NO: 215447 - protein, 15 aa, Artificial Sequence
  Description of Artificial Sequence: Synthetic peptide
  Seed: ANQRLNPMHQLLRHF
ANQRVNPYHGLLVHF

SEQ ID NO: 215448 - protein, 15 aa, Artificial Sequence
  Description of Artificial Sequence: Synthetic peptide
  Seed: ANQRLNPMHQLLRHF
ANQRVNPYHNLLAHF

SEQ ID NO: 215449 - protein, 15 aa, Artificial Sequence
  Description of Artificial Sequence: Synthetic peptide
  Seed: ANQRLNPMHQLLRHF
ANQRVNPYHNLLIHF

SEQ ID NO: 215450 - protein, 15 aa, Artificial Sequence
  Description of Artificial Sequence: Synthetic peptide
  Seed: ANQRLNPMHQLLRHF
ANQRVNPYHNLLLHF

SEQ ID NO: 215451 - protein, 15 aa, Artificial Sequence
  Description of Artificial Sequence: Synthetic peptide
  Seed: ANQRLNPMHQLLRHF
ANQRVNPYHNLLMHF

SEQ ID NO: 215452 - protein, 15 aa, Artificial Sequence
  Description of Artificial Sequence: Synthetic peptide
  Seed: ANQRLNPMHQLLRHF
ANQRVNPYHNLLTHF

SEQ ID NO: 215453 - protein, 15 aa, Artificial Sequence
  Description of Artificial Sequence: Synthetic peptide
  Seed: ANQRLNPMHQLLRHF
ANQRVNPYHNLLVHF

SEQ ID NO: 215454 - protein, 15 aa, Artificial Sequence
  Description of Artificial Sequence: Synthetic peptide
  Seed: ANQRLNPMHQLLRHF
ANQRVNPYHSLLAHF

SEQ ID NO: 215455 - protein, 15 aa, Artificial Sequence
  Description of Artificial Sequence: Synthetic peptide
  Seed: ANQRLNPMHQLLRHF
ANQRVNPYHSLLIHF

SEQ ID NO: 215456 - protein, 15 aa, Artificial Sequence
  Description of Artificial Sequence: Synthetic peptide
  Seed: ANQRLNPMHQLLRHF
ANQRVNPYHSLLLHF

SEQ ID NO: 215457 - protein, 15 aa, Artificial Sequence
  Description of Artificial Sequence: Synthetic peptide
  Seed: ANQRLNPMHQLLRHF
ANQRVNPYHSLLMHF

SEQ ID NO: 215458 - protein, 15 aa, Artificial Sequence
  Description of Artificial Sequence: Synthetic peptide
  Seed: ANQRLNPMHQLLRHF
ANQRVNPYHSLLSHF

SEQ ID NO: 215459 - protein, 15 aa, Artificial Sequence
  Description of Artificial Sequence: Synthetic peptide
  Seed: ANQRLNPMHQLLRHF
ANQRVNPYHSLLTHF

SEQ ID NO: 215460 - protein, 15 aa, Artificial Sequence
  Description of Artificial Sequence: Synthetic peptide
  Seed: ANQRLNPMHQLLRHF
ANQRVNPYHSLLVHF

SEQ ID NO: 215461 - protein, 15 aa, Artificial Sequence
  Description of Artificial Sequence: Synthetic peptide
  Seed: ANQRLNPMHQLLRHF
ANQRVNPYHTLLIHF

SEQ ID NO: 215462 - protein, 15 aa, Artificial Sequence
  Description of Artificial Sequence: Synthetic peptide
  Seed: ANQRLNPMHQLLRHF
ANQRVNPYHTLLLHF

SEQ ID NO: 215463 - protein, 15 aa, Artificial Sequence
  Description of Artificial Sequence: Synthetic peptide
  Seed: ANQRLNPMHQLLRHF
ANQRVNPYHTLLVHF

SEQ ID NO: 215464 - protein, 15 aa, Artificial Sequence
  Description of Artificial Sequence: Synthetic peptide
  Seed: ANQRLNPMHQLLRHF
ANQRWNPAHALLAHF

SEQ ID NO: 215465 - protein, 15 aa, Artificial Sequence
  Description of Artificial Sequence: Synthetic peptide
  Seed: ANQRLNPMHQLLRHF
ANQRWNPAHALLCHF

SEQ ID NO: 215466 - protein, 15 aa, Artificial Sequence
  Description of Artificial Sequence: Synthetic peptide
  Seed: ANQRLNPMHQLLRHF
ANQRWNPAHALLFHF

SEQ ID NO: 215467 - protein, 15 aa, Artificial Sequence
  Description of Artificial Sequence: Synthetic peptide
  Seed: ANQRLNPMHQLLRHF
ANQRWNPAHALLGHF

SEQ ID NO: 215468 - protein, 15 aa, Artificial Sequence
  Description of Artificial Sequence: Synthetic peptide
  Seed: ANQRLNPMHQLLRHF
ANQRWNPAHALLIHF

SEQ ID NO: 215469 - protein, 15 aa, Artificial Sequence
  Description of Artificial Sequence: Synthetic peptide
  Seed: ANQRLNPMHQLLRHF
ANQRWNPAHALLLHF

SEQ ID NO: 215470 - protein, 15 aa, Artificial Sequence
  Description of Artificial Sequence: Synthetic peptide
  Seed: ANQRLNPMHQLLRHF
ANQRWNPAHALLMHF

SEQ ID NO: 215471 - protein, 15 aa, Artificial Sequence
  Description of Artificial Sequence: Synthetic peptide
  Seed: ANQRLNPMHQLLRHF
ANQRWNPAHALLNHF

SEQ ID NO: 215472 - protein, 15 aa, Artificial Sequence
  Description of Artificial Sequence: Synthetic peptide
  Seed: ANQRLNPMHQLLRHF
ANQRWNPAHALLSHF

SEQ ID NO: 215473 - protein, 15 aa, Artificial Sequence
  Description of Artificial Sequence: Synthetic peptide
  Seed: ANQRLNPMHQLLRHF
ANQRWNPAHALLTHF

SEQ ID NO: 215474 - protein, 15 aa, Artificial Sequence
  Description of Artificial Sequence: Synthetic peptide
  Seed: ANQRLNPMHQLLRHF
ANQRWNPAHALLVHF

SEQ ID NO: 215475 - protein, 15 aa, Artificial Sequence
  Description of Artificial Sequence: Synthetic peptide
  Seed: ANQRLNPMHQLLRHF
ANQRWNPAHFLLIHF

SEQ ID NO: 215476 - protein, 15 aa, Artificial Sequence
  Description of Artificial Sequence: Synthetic peptide
  Seed: ANQRLNPMHQLLRHF
ANQRWNPAHFLLLHF

SEQ ID NO: 215477 - protein, 15 aa, Artificial Sequence
  Description of Artificial Sequence: Synthetic peptide
  Seed: ANQRLNPMHQLLRHF
ANQRWNPAHFLLVHF

SEQ ID NO: 215478 - protein, 15 aa, Artificial Sequence
  Description of Artificial Sequence: Synthetic peptide
  Seed: ANQRLNPMHQLLRHF
ANQRWNPAHGLLAHF

SEQ ID NO: 215479 - protein, 15 aa, Artificial Sequence
  Description of Artificial Sequence: Synthetic peptide
  Seed: ANQRLNPMHQLLRHF
ANQRWNPAHGLLGHF

SEQ ID NO: 215480 - protein, 15 aa, Artificial Sequence
  Description of Artificial Sequence: Synthetic peptide
  Seed: ANQRLNPMHQLLRHF
ANQRWNPAHGLLIHF

SEQ ID NO: 215481 - protein, 15 aa, Artificial Sequence
  Description of Artificial Sequence: Synthetic peptide
  Seed: ANQRLNPMHQLLRHF
ANQRWNPAHGLLLHF

SEQ ID NO: 215482 - protein, 15 aa, Artificial Sequence
  Description of Artificial Sequence: Synthetic peptide
  Seed: ANQRLNPMHQLLRHF
ANQRWNPAHGLLMHF

SEQ ID NO: 215483 - protein, 15 aa, Artificial Sequence
  Description of Artificial Sequence: Synthetic peptide
  Seed: ANQRLNPMHQLLRHF
ANQRWNPAHGLLSHF

SEQ ID NO: 215484 - protein, 15 aa, Artificial Sequence
  Description of Artificial Sequence: Synthetic peptide
  Seed: ANQRLNPMHQLLRHF
ANQRWNPAHGLLTHF

SEQ ID NO: 215485 - protein, 15 aa, Artificial Sequence
  Description of Artificial Sequence: Synthetic peptide
  Seed: ANQRLNPMHQLLRHF
ANQRWNPAHGLLVHF

SEQ ID NO: 215486 - protein, 15 aa, Artificial Sequence
  Description of Artificial Sequence: Synthetic peptide
  Seed: ANQRLNPMHQLLRHF
ANQRWNPAHNLLAHF

SEQ ID NO: 215487 - protein, 15 aa, Artificial Sequence
  Description of Artificial Sequence: Synthetic peptide
  Seed: ANQRLNPMHQLLRHF
ANQRWNPAHNLLIHF

SEQ ID NO: 215488 - protein, 15 aa, Artificial Sequence
  Description of Artificial Sequence: Synthetic peptide
  Seed: ANQRLNPMHQLLRHF
ANQRWNPAHNLLLHF

SEQ ID NO: 215489 - protein, 15 aa, Artificial Sequence
  Description of Artificial Sequence: Synthetic peptide
  Seed: ANQRLNPMHQLLRHF
ANQRWNPAHNLLMHF

SEQ ID NO: 215490 - protein, 15 aa, Artificial Sequence
  Description of Artificial Sequence: Synthetic peptide
  Seed: ANQRLNPMHQLLRHF
ANQRWNPAHNLLTHF

SEQ ID NO: 215491 - protein, 15 aa, Artificial Sequence
  Description of Artificial Sequence: Synthetic peptide
  Seed: ANQRLNPMHQLLRHF
ANQRWNPAHNLLVHF

SEQ ID NO: 215492 - protein, 15 aa, Artificial Sequence
  Description of Artificial Sequence: Synthetic peptide
  Seed: ANQRLNPMHQLLRHF
ANQRWNPAHPLLAHF

SEQ ID NO: 215493 - protein, 15 aa, Artificial Sequence
  Description of Artificial Sequence: Synthetic peptide
  Seed: ANQRLNPMHQLLRHF
ANQRWNPAHPLLIHF

SEQ ID NO: 215494 - protein, 15 aa, Artificial Sequence
  Description of Artificial Sequence: Synthetic peptide
  Seed: ANQRLNPMHQLLRHF
ANQRWNPAHPLLLHF

SEQ ID NO: 215495 - protein, 15 aa, Artificial Sequence
  Description of Artificial Sequence: Synthetic peptide
  Seed: ANQRLNPMHQLLRHF
ANQRWNPAHPLLMHF

SEQ ID NO: 215496 - protein, 15 aa, Artificial Sequence
  Description of Artificial Sequence: Synthetic peptide
  Seed: ANQRLNPMHQLLRHF
ANQRWNPAHPLLNHF

SEQ ID NO: 215497 - protein, 15 aa, Artificial Sequence
  Description of Artificial Sequence: Synthetic peptide
  Seed: ANQRLNPMHQLLRHF
ANQRWNPAHPLLSHF

SEQ ID NO: 215498 - protein, 15 aa, Artificial Sequence
  Description of Artificial Sequence: Synthetic peptide
  Seed: ANQRLNPMHQLLRHF
ANQRWNPAHPLLTHF

SEQ ID NO: 215499 - protein, 15 aa, Artificial Sequence
  Description of Artificial Sequence: Synthetic peptide
  Seed: ANQRLNPMHQLLRHF
ANQRWNPAHPLLVHF

SEQ ID NO: 215500 - protein, 15 aa, Artificial Sequence
  Description of Artificial Sequence: Synthetic peptide
  Seed: ANQRLNPMHQLLRHF
ANQRWNPAHRLLAHF

SEQ ID NO: 215501 - protein, 15 aa, Artificial Sequence
  Description of Artificial Sequence: Synthetic peptide
  Seed: ANQRLNPMHQLLRHF
ANQRWNPAHRLLSHF

SEQ ID NO: 215502 - protein, 15 aa, Artificial Sequence
  Description of Artificial Sequence: Synthetic peptide
  Seed: ANQRLNPMHQLLRHF
ANQRWNPAHSLLAHF

SEQ ID NO: 215503 - protein, 15 aa, Artificial Sequence
  Description of Artificial Sequence: Synthetic peptide
  Seed: ANQRLNPMHQLLRHF
ANQRWNPAHSLLGHF

SEQ ID NO: 215504 - protein, 15 aa, Artificial Sequence
  Description of Artificial Sequence: Synthetic peptide
  Seed: ANQRLNPMHQLLRHF
ANQRWNPAHSLLIHF

SEQ ID NO: 215505 - protein, 15 aa, Artificial Sequence
  Description of Artificial Sequence: Synthetic peptide
  Seed: ANQRLNPMHQLLRHF
ANQRWNPAHSLLLHF

SEQ ID NO: 215506 - protein, 15 aa, Artificial Sequence
  Description of Artificial Sequence: Synthetic peptide
  Seed: ANQRLNPMHQLLRHF
ANQRWNPAHSLLMHF

SEQ ID NO: 215507 - protein, 15 aa, Artificial Sequence
  Description of Artificial Sequence: Synthetic peptide
  Seed: ANQRLNPMHQLLRHF
ANQRWNPAHSLLNHF

SEQ ID NO: 215508 - protein, 15 aa, Artificial Sequence
  Description of Artificial Sequence: Synthetic peptide
  Seed: ANQRLNPMHQLLRHF
ANQRWNPAHSLLSHF

SEQ ID NO: 215509 - protein, 15 aa, Artificial Sequence
  Description of Artificial Sequence: Synthetic peptide
  Seed: ANQRLNPMHQLLRHF
ANQRWNPAHSLLTHF

SEQ ID NO: 215510 - protein, 15 aa, Artificial Sequence
  Description of Artificial Sequence: Synthetic peptide
  Seed: ANQRLNPMHQLLRHF
ANQRWNPAHSLLVHF

SEQ ID NO: 215511 - protein, 15 aa, Artificial Sequence
  Description of Artificial Sequence: Synthetic peptide
  Seed: ANQRLNPMHQLLRHF
ANQRWNPAHTLLAHF

SEQ ID NO: 215512 - protein, 15 aa, Artificial Sequence
  Description of Artificial Sequence: Synthetic peptide
  Seed: ANQRLNPMHQLLRHF
ANQRWNPAHTLLIHF

SEQ ID NO: 215513 - protein, 15 aa, Artificial Sequence
  Description of Artificial Sequence: Synthetic peptide
  Seed: ANQRLNPMHQLLRHF
ANQRWNPAHTLLLHF

SEQ ID NO: 215514 - protein, 15 aa, Artificial Sequence
  Description of Artificial Sequence: Synthetic peptide
  Seed: ANQRLNPMHQLLRHF
ANQRWNPAHTLLMHF

SEQ ID NO: 215515 - protein, 15 aa, Artificial Sequence
  Description of Artificial Sequence: Synthetic peptide
  Seed: ANQRLNPMHQLLRHF
ANQRWNPAHTLLNHF

SEQ ID NO: 215516 - protein, 15 aa, Artificial Sequence
  Description of Artificial Sequence: Synthetic peptide
  Seed: ANQRLNPMHQLLRHF
ANQRWNPAHTLLSHF

SEQ ID NO: 215517 - protein, 15 aa, Artificial Sequence
  Description of Artificial Sequence: Synthetic peptide
  Seed: ANQRLNPMHQLLRHF
ANQRWNPAHTLLTHF

SEQ ID NO: 215518 - protein, 15 aa, Artificial Sequence
  Description of Artificial Sequence: Synthetic peptide
  Seed: ANQRLNPMHQLLRHF
ANQRWNPAHTLLVHF

SEQ ID NO: 215519 - protein, 15 aa, Artificial Sequence
  Description of Artificial Sequence: Synthetic peptide
  Seed: ANQRLNPMHQLLRHF
ANQRWNPAHVLLAHF

SEQ ID NO: 215520 - protein, 15 aa, Artificial Sequence
  Description of Artificial Sequence: Synthetic peptide
  Seed: ANQRLNPMHQLLRHF
ANQRWNPAHVLLIHF

SEQ ID NO: 215521 - protein, 15 aa, Artificial Sequence
  Description of Artificial Sequence: Synthetic peptide
  Seed: ANQRLNPMHQLLRHF
ANQRWNPAHVLLLHF

SEQ ID NO: 215522 - protein, 15 aa, Artificial Sequence
  Description of Artificial Sequence: Synthetic peptide
  Seed: ANQRLNPMHQLLRHF
ANQRWNPAHVLLNHF

SEQ ID NO: 215523 - protein, 15 aa, Artificial Sequence
  Description of Artificial Sequence: Synthetic peptide
  Seed: ANQRLNPMHQLLRHF
ANQRWNPAHVLLSHF

SEQ ID NO: 215524 - protein, 15 aa, Artificial Sequence
  Description of Artificial Sequence: Synthetic peptide
  Seed: ANQRLNPMHQLLRHF
ANQRWNPAHVLLVHF

SEQ ID NO: 215525 - protein, 15 aa, Artificial Sequence
  Description of Artificial Sequence: Synthetic peptide
  Seed: ANQRLNPMHQLLRHF
ANQRWNPCHALLIHF

SEQ ID NO: 215526 - protein, 15 aa, Artificial Sequence
  Description of Artificial Sequence: Synthetic peptide
  Seed: ANQRLNPMHQLLRHF
ANQRWNPCHALLLHF

SEQ ID NO: 215527 - protein, 15 aa, Artificial Sequence
  Description of Artificial Sequence: Synthetic peptide
  Seed: ANQRLNPMHQLLRHF
ANQRWNPCHALLVHF

SEQ ID NO: 215528 - protein, 15 aa, Artificial Sequence
  Description of Artificial Sequence: Synthetic peptide
  Seed: ANQRLNPMHQLLRHF
ANQRWNPEHALLAHF

SEQ ID NO: 215529 - protein, 15 aa, Artificial Sequence
  Description of Artificial Sequence: Synthetic peptide
  Seed: ANQRLNPMHQLLRHF
ANQRWNPEHALLIHF

SEQ ID NO: 215530 - protein, 15 aa, Artificial Sequence
  Description of Artificial Sequence: Synthetic peptide
  Seed: ANQRLNPMHQLLRHF
ANQRWNPEHALLLHF

SEQ ID NO: 215531 - protein, 15 aa, Artificial Sequence
  Description of Artificial Sequence: Synthetic peptide
  Seed: ANQRLNPMHQLLRHF
ANQRWNPEHALLVHF

SEQ ID NO: 215532 - protein, 15 aa, Artificial Sequence
  Description of Artificial Sequence: Synthetic peptide
  Seed: ANQRLNPMHQLLRHF
ANQRWNPEHFLLIHF

SEQ ID NO: 215533 - protein, 15 aa, Artificial Sequence
  Description of Artificial Sequence: Synthetic peptide
  Seed: ANQRLNPMHQLLRHF
ANQRWNPEHFLLLHF

SEQ ID NO: 215534 - protein, 15 aa, Artificial Sequence
  Description of Artificial Sequence: Synthetic peptide
  Seed: ANQRLNPMHQLLRHF
ANQRWNPEHFLLVHF

SEQ ID NO: 215535 - protein, 15 aa, Artificial Sequence
  Description of Artificial Sequence: Synthetic peptide
  Seed: ANQRLNPMHQLLRHF
ANQRWNPEHGLLAHF

SEQ ID NO: 215536 - protein, 15 aa, Artificial Sequence
  Description of Artificial Sequence: Synthetic peptide
  Seed: ANQRLNPMHQLLRHF
ANQRWNPEHGLLIHF

SEQ ID NO: 215537 - protein, 15 aa, Artificial Sequence
  Description of Artificial Sequence: Synthetic peptide
  Seed: ANQRLNPMHQLLRHF
ANQRWNPEHGLLLHF

SEQ ID NO: 215538 - protein, 15 aa, Artificial Sequence
  Description of Artificial Sequence: Synthetic peptide
  Seed: ANQRLNPMHQLLRHF
ANQRWNPEHGLLVHF

SEQ ID NO: 215539 - protein, 15 aa, Artificial Sequence
  Description of Artificial Sequence: Synthetic peptide
  Seed: ANQRLNPMHQLLRHF
ANQRWNPEHSLLAHF

SEQ ID NO: 215540 - protein, 15 aa, Artificial Sequence
  Description of Artificial Sequence: Synthetic peptide
  Seed: ANQRLNPMHQLLRHF
ANQRWNPEHSLLIHF

SEQ ID NO: 215541 - protein, 15 aa, Artificial Sequence
  Description of Artificial Sequence: Synthetic peptide
  Seed: ANQRLNPMHQLLRHF
ANQRWNPEHSLLLHF

SEQ ID NO: 215542 - protein, 15 aa, Artificial Sequence
  Description of Artificial Sequence: Synthetic peptide
  Seed: ANQRLNPMHQLLRHF
ANQRWNPEHSLLVHF

SEQ ID NO: 215543 - protein, 15 aa, Artificial Sequence
  Description of Artificial Sequence: Synthetic peptide
  Seed: ANQRLNPMHQLLRHF
ANQRWNPFHALLAHF

SEQ ID NO: 215544 - protein, 15 aa, Artificial Sequence
  Description of Artificial Sequence: Synthetic peptide
  Seed: ANQRLNPMHQLLRHF
ANQRWNPFHALLIHF

SEQ ID NO: 215545 - protein, 15 aa, Artificial Sequence
  Description of Artificial Sequence: Synthetic peptide
  Seed: ANQRLNPMHQLLRHF
ANQRWNPFHALLLHF

SEQ ID NO: 215546 - protein, 15 aa, Artificial Sequence
  Description of Artificial Sequence: Synthetic peptide
  Seed: ANQRLNPMHQLLRHF
ANQRWNPFHALLVHF

SEQ ID NO: 215547 - protein, 15 aa, Artificial Sequence
  Description of Artificial Sequence: Synthetic peptide
  Seed: ANQRLNPMHQLLRHF
ANQRWNPFHFLLFHF

SEQ ID NO: 215548 - protein, 15 aa, Artificial Sequence
  Description of Artificial Sequence: Synthetic peptide
  Seed: ANQRLNPMHQLLRHF
ANQRWNPFHFLLIHF

SEQ ID NO: 215549 - protein, 15 aa, Artificial Sequence
  Description of Artificial Sequence: Synthetic peptide
  Seed: ANQRLNPMHQLLRHF
ANQRWNPFHFLLLHF

SEQ ID NO: 215550 - protein, 15 aa, Artificial Sequence
  Description of Artificial Sequence: Synthetic peptide
  Seed: ANQRLNPMHQLLRHF
ANQRWNPFHFLLVHF

SEQ ID NO: 215551 - protein, 15 aa, Artificial Sequence
  Description of Artificial Sequence: Synthetic peptide
  Seed: ANQRLNPMHQLLRHF
ANQRWNPFHGLLVHF

SEQ ID NO: 215552 - protein, 15 aa, Artificial Sequence
  Description of Artificial Sequence: Synthetic peptide
  Seed: ANQRLNPMHQLLRHF
ANQRWNPFHSLLVHF

SEQ ID NO: 215553 - protein, 15 aa, Artificial Sequence
  Description of Artificial Sequence: Synthetic peptide
  Seed: ANQRLNPMHQLLRHF
ANQRWNPGHALLAHF

SEQ ID NO: 215554 - protein, 15 aa, Artificial Sequence
  Description of Artificial Sequence: Synthetic peptide
  Seed: ANQRLNPMHQLLRHF
ANQRWNPGHALLIHF

SEQ ID NO: 215555 - protein, 15 aa, Artificial Sequence
  Description of Artificial Sequence: Synthetic peptide
  Seed: ANQRLNPMHQLLRHF
ANQRWNPGHALLLHF

SEQ ID NO: 215556 - protein, 15 aa, Artificial Sequence
  Description of Artificial Sequence: Synthetic peptide
  Seed: ANQRLNPMHQLLRHF
ANQRWNPGHALLMHF

SEQ ID NO: 215557 - protein, 15 aa, Artificial Sequence
  Description of Artificial Sequence: Synthetic peptide
  Seed: ANQRLNPMHQLLRHF
ANQRWNPGHALLVHF

SEQ ID NO: 215558 - protein, 15 aa, Artificial Sequence
  Description of Artificial Sequence: Synthetic peptide
  Seed: ANQRLNPMHQLLRHF
ANQRWNPGHGLLLHF

SEQ ID NO: 215559 - protein, 15 aa, Artificial Sequence
  Description of Artificial Sequence: Synthetic peptide
  Seed: ANQRLNPMHQLLRHF
ANQRWNPGHGLLVHF

SEQ ID NO: 215560 - protein, 15 aa, Artificial Sequence
  Description of Artificial Sequence: Synthetic peptide
  Seed: ANQRLNPMHQLLRHF
ANQRWNPGHSLLAHF

SEQ ID NO: 215561 - protein, 15 aa, Artificial Sequence
  Description of Artificial Sequence: Synthetic peptide
  Seed: ANQRLNPMHQLLRHF
ANQRWNPGHSLLIHF

SEQ ID NO: 215562 - protein, 15 aa, Artificial Sequence
  Description of Artificial Sequence: Synthetic peptide
  Seed: ANQRLNPMHQLLRHF
ANQRWNPGHSLLLHF

SEQ ID NO: 215563 - protein, 15 aa, Artificial Sequence
  Description of Artificial Sequence: Synthetic peptide
  Seed: ANQRLNPMHQLLRHF
ANQRWNPGHSLLVHF

SEQ ID NO: 215564 - protein, 15 aa, Artificial Sequence
  Description of Artificial Sequence: Synthetic peptide
  Seed: ANQRLNPMHQLLRHF
ANQRWNPHHALLLHF

SEQ ID NO: 215565 - protein, 15 aa, Artificial Sequence
  Description of Artificial Sequence: Synthetic peptide
  Seed: ANQRLNPMHQLLRHF
ANQRWNPHHALLVHF

SEQ ID NO: 215566 - protein, 15 aa, Artificial Sequence
  Description of Artificial Sequence: Synthetic peptide
  Seed: ANQRLNPMHQLLRHF
ANQRWNPIHALLAHF

SEQ ID NO: 215567 - protein, 15 aa, Artificial Sequence
  Description of Artificial Sequence: Synthetic peptide
  Seed: ANQRLNPMHQLLRHF
ANQRWNPIHALLCHF

SEQ ID NO: 215568 - protein, 15 aa, Artificial Sequence
  Description of Artificial Sequence: Synthetic peptide
  Seed: ANQRLNPMHQLLRHF
ANQRWNPIHALLGHF

SEQ ID NO: 215569 - protein, 15 aa, Artificial Sequence
  Description of Artificial Sequence: Synthetic peptide
  Seed: ANQRLNPMHQLLRHF
ANQRWNPIHALLIHF

SEQ ID NO: 215570 - protein, 15 aa, Artificial Sequence
  Description of Artificial Sequence: Synthetic peptide
  Seed: ANQRLNPMHQLLRHF
ANQRWNPIHALLLHF

SEQ ID NO: 215571 - protein, 15 aa, Artificial Sequence
  Description of Artificial Sequence: Synthetic peptide
  Seed: ANQRLNPMHQLLRHF
ANQRWNPIHALLMHF

SEQ ID NO: 215572 - protein, 15 aa, Artificial Sequence
  Description of Artificial Sequence: Synthetic peptide
  Seed: ANQRLNPMHQLLRHF
ANQRWNPIHALLNHF

SEQ ID NO: 215573 - protein, 15 aa, Artificial Sequence
  Description of Artificial Sequence: Synthetic peptide
  Seed: ANQRLNPMHQLLRHF
ANQRWNPIHALLSHF

SEQ ID NO: 215574 - protein, 15 aa, Artificial Sequence
  Description of Artificial Sequence: Synthetic peptide
  Seed: ANQRLNPMHQLLRHF
ANQRWNPIHALLTHF

SEQ ID NO: 215575 - protein, 15 aa, Artificial Sequence
  Description of Artificial Sequence: Synthetic peptide
  Seed: ANQRLNPMHQLLRHF
ANQRWNPIHALLVHF

SEQ ID NO: 215576 - protein, 15 aa, Artificial Sequence
  Description of Artificial Sequence: Synthetic peptide
  Seed: ANQRLNPMHQLLRHF
ANQRWNPIHFLLFHF

SEQ ID NO: 215577 - protein, 15 aa, Artificial Sequence
  Description of Artificial Sequence: Synthetic peptide
  Seed: ANQRLNPMHQLLRHF
ANQRWNPIHFLLIHF

SEQ ID NO: 215578 - protein, 15 aa, Artificial Sequence
  Description of Artificial Sequence: Synthetic peptide
  Seed: ANQRLNPMHQLLRHF
ANQRWNPIHFLLLHF

SEQ ID NO: 215579 - protein, 15 aa, Artificial Sequence
  Description of Artificial Sequence: Synthetic peptide
  Seed: ANQRLNPMHQLLRHF
ANQRWNPIHFLLMHF

SEQ ID NO: 215580 - protein, 15 aa, Artificial Sequence
  Description of Artificial Sequence: Synthetic peptide
  Seed: ANQRLNPMHQLLRHF
ANQRWNPIHFLLVHF

SEQ ID NO: 215581 - protein, 15 aa, Artificial Sequence
  Description of Artificial Sequence: Synthetic peptide
  Seed: ANQRLNPMHQLLRHF
ANQRWNPIHGLLAHF

SEQ ID NO: 215582 - protein, 15 aa, Artificial Sequence
  Description of Artificial Sequence: Synthetic peptide
  Seed: ANQRLNPMHQLLRHF
ANQRWNPIHGLLCHF

SEQ ID NO: 215583 - protein, 15 aa, Artificial Sequence
  Description of Artificial Sequence: Synthetic peptide
  Seed: ANQRLNPMHQLLRHF
ANQRWNPIHGLLGHF

SEQ ID NO: 215584 - protein, 15 aa, Artificial Sequence
  Description of Artificial Sequence: Synthetic peptide
  Seed: ANQRLNPMHQLLRHF
ANQRWNPIHGLLIHF

SEQ ID NO: 215585 - protein, 15 aa, Artificial Sequence
  Description of Artificial Sequence: Synthetic peptide
  Seed: ANQRLNPMHQLLRHF
ANQRWNPIHGLLLHF

SEQ ID NO: 215586 - protein, 15 aa, Artificial Sequence
  Description of Artificial Sequence: Synthetic peptide
  Seed: ANQRLNPMHQLLRHF
ANQRWNPIHGLLMHF

SEQ ID NO: 215587 - protein, 15 aa, Artificial Sequence
  Description of Artificial Sequence: Synthetic peptide
  Seed: ANQRLNPMHQLLRHF
ANQRWNPIHGLLSHF

SEQ ID NO: 215588 - protein, 15 aa, Artificial Sequence
  Description of Artificial Sequence: Synthetic peptide
  Seed: ANQRLNPMHQLLRHF
ANQRWNPIHGLLTHF

SEQ ID NO: 215589 - protein, 15 aa, Artificial Sequence
  Description of Artificial Sequence: Synthetic peptide
  Seed: ANQRLNPMHQLLRHF
ANQRWNPIHGLLVHF

SEQ ID NO: 215590 - protein, 15 aa, Artificial Sequence
  Description of Artificial Sequence: Synthetic peptide
  Seed: ANQRLNPMHQLLRHF
ANQRWNPIHKLLAHF

SEQ ID NO: 215591 - protein, 15 aa, Artificial Sequence
  Description of Artificial Sequence: Synthetic peptide
  Seed: ANQRLNPMHQLLRHF
ANQRWNPIHKLLGHF

SEQ ID NO: 215592 - protein, 15 aa, Artificial Sequence
  Description of Artificial Sequence: Synthetic peptide
  Seed: ANQRLNPMHQLLRHF
ANQRWNPIHKLLHHF

SEQ ID NO: 215593 - protein, 15 aa, Artificial Sequence
  Description of Artificial Sequence: Synthetic peptide
  Seed: ANQRLNPMHQLLRHF
ANQRWNPIHKLLSHF

SEQ ID NO: 215594 - protein, 15 aa, Artificial Sequence
  Description of Artificial Sequence: Synthetic peptide
  Seed: ANQRLNPMHQLLRHF
ANQRWNPIHKLLTHF

SEQ ID NO: 215595 - protein, 15 aa, Artificial Sequence
  Description of Artificial Sequence: Synthetic peptide
  Seed: ANQRLNPMHQLLRHF
ANQRWNPIHNLLAHF

SEQ ID NO: 215596 - protein, 15 aa, Artificial Sequence
  Description of Artificial Sequence: Synthetic peptide
  Seed: ANQRLNPMHQLLRHF
ANQRWNPIHNLLIHF

SEQ ID NO: 215597 - protein, 15 aa, Artificial Sequence
  Description of Artificial Sequence: Synthetic peptide
  Seed: ANQRLNPMHQLLRHF
ANQRWNPIHNLLLHF

SEQ ID NO: 215598 - protein, 15 aa, Artificial Sequence
  Description of Artificial Sequence: Synthetic peptide
  Seed: ANQRLNPMHQLLRHF
ANQRWNPIHNLLMHF

SEQ ID NO: 215599 - protein, 15 aa, Artificial Sequence
  Description of Artificial Sequence: Synthetic peptide
  Seed: ANQRLNPMHQLLRHF
ANQRWNPIHNLLTHF

SEQ ID NO: 215600 - protein, 15 aa, Artificial Sequence
  Description of Artificial Sequence: Synthetic peptide
  Seed: ANQRLNPMHQLLRHF
ANQRWNPIHNLLVHF

SEQ ID NO: 215601 - protein, 15 aa, Artificial Sequence
  Description of Artificial Sequence: Synthetic peptide
  Seed: ANQRLNPMHQLLRHF
ANQRWNPIHPLLAHF

SEQ ID NO: 215602 - protein, 15 aa, Artificial Sequence
  Description of Artificial Sequence: Synthetic peptide
  Seed: ANQRLNPMHQLLRHF
ANQRWNPIHPLLIHF

SEQ ID NO: 215603 - protein, 15 aa, Artificial Sequence
  Description of Artificial Sequence: Synthetic peptide
  Seed: ANQRLNPMHQLLRHF
ANQRWNPIHPLLLHF

SEQ ID NO: 215604 - protein, 15 aa, Artificial Sequence
  Description of Artificial Sequence: Synthetic peptide
  Seed: ANQRLNPMHQLLRHF
ANQRWNPIHPLLMHF

SEQ ID NO: 215605 - protein, 15 aa, Artificial Sequence
  Description of Artificial Sequence: Synthetic peptide
  Seed: ANQRLNPMHQLLRHF
ANQRWNPIHPLLNHF

SEQ ID NO: 215606 - protein, 15 aa, Artificial Sequence
  Description of Artificial Sequence: Synthetic peptide
  Seed: ANQRLNPMHQLLRHF
ANQRWNPIHPLLSHF

SEQ ID NO: 215607 - protein, 15 aa, Artificial Sequence
  Description of Artificial Sequence: Synthetic peptide
  Seed: ANQRLNPMHQLLRHF
ANQRWNPIHPLLTHF

SEQ ID NO: 215608 - protein, 15 aa, Artificial Sequence
  Description of Artificial Sequence: Synthetic peptide
  Seed: ANQRLNPMHQLLRHF
ANQRWNPIHPLLVHF

SEQ ID NO: 215609 - protein, 15 aa, Artificial Sequence
  Description of Artificial Sequence: Synthetic peptide
  Seed: ANQRLNPMHQLLRHF
ANQRWNPIHRLLAHF

SEQ ID NO: 215610 - protein, 15 aa, Artificial Sequence
  Description of Artificial Sequence: Synthetic peptide
  Seed: ANQRLNPMHQLLRHF
ANQRWNPIHRLLGHF

SEQ ID NO: 215611 - protein, 15 aa, Artificial Sequence
  Description of Artificial Sequence: Synthetic peptide
  Seed: ANQRLNPMHQLLRHF
ANQRWNPIHRLLHHF

SEQ ID NO: 215612 - protein, 15 aa, Artificial Sequence
  Description of Artificial Sequence: Synthetic peptide
  Seed: ANQRLNPMHQLLRHF
ANQRWNPIHRLLQHF

SEQ ID NO: 215613 - protein, 15 aa, Artificial Sequence
  Description of Artificial Sequence: Synthetic peptide
  Seed: ANQRLNPMHQLLRHF
ANQRWNPIHRLLSHF

SEQ ID NO: 215614 - protein, 15 aa, Artificial Sequence
  Description of Artificial Sequence: Synthetic peptide
  Seed: ANQRLNPMHQLLRHF
ANQRWNPIHRLLTHF

SEQ ID NO: 215615 - protein, 15 aa, Artificial Sequence
  Description of Artificial Sequence: Synthetic peptide
  Seed: ANQRLNPMHQLLRHF
ANQRWNPIHSLLAHF

SEQ ID NO: 215616 - protein, 15 aa, Artificial Sequence
  Description of Artificial Sequence: Synthetic peptide
  Seed: ANQRLNPMHQLLRHF
ANQRWNPIHSLLGHF

SEQ ID NO: 215617 - protein, 15 aa, Artificial Sequence
  Description of Artificial Sequence: Synthetic peptide
  Seed: ANQRLNPMHQLLRHF
ANQRWNPIHSLLIHF

SEQ ID NO: 215618 - protein, 15 aa, Artificial Sequence
  Description of Artificial Sequence: Synthetic peptide
  Seed: ANQRLNPMHQLLRHF
ANQRWNPIHSLLLHF

SEQ ID NO: 215619 - protein, 15 aa, Artificial Sequence
  Description of Artificial Sequence: Synthetic peptide
  Seed: ANQRLNPMHQLLRHF
ANQRWNPIHSLLMHF

SEQ ID NO: 215620 - protein, 15 aa, Artificial Sequence
  Description of Artificial Sequence: Synthetic peptide
  Seed: ANQRLNPMHQLLRHF
ANQRWNPIHSLLNHF

SEQ ID NO: 215621 - protein, 15 aa, Artificial Sequence
  Description of Artificial Sequence: Synthetic peptide
  Seed: ANQRLNPMHQLLRHF
ANQRWNPIHSLLSHF

SEQ ID NO: 215622 - protein, 15 aa, Artificial Sequence
  Description of Artificial Sequence: Synthetic peptide
  Seed: ANQRLNPMHQLLRHF
ANQRWNPIHSLLTHF

SEQ ID NO: 215623 - protein, 15 aa, Artificial Sequence
  Description of Artificial Sequence: Synthetic peptide
  Seed: ANQRLNPMHQLLRHF
ANQRWNPIHSLLVHF

SEQ ID NO: 215624 - protein, 15 aa, Artificial Sequence
  Description of Artificial Sequence: Synthetic peptide
  Seed: ANQRLNPMHQLLRHF
ANQRWNPIHTLLAHF

SEQ ID NO: 215625 - protein, 15 aa, Artificial Sequence
  Description of Artificial Sequence: Synthetic peptide
  Seed: ANQRLNPMHQLLRHF
ANQRWNPIHTLLIHF

SEQ ID NO: 215626 - protein, 15 aa, Artificial Sequence
  Description of Artificial Sequence: Synthetic peptide
  Seed: ANQRLNPMHQLLRHF
ANQRWNPIHTLLLHF

SEQ ID NO: 215627 - protein, 15 aa, Artificial Sequence
  Description of Artificial Sequence: Synthetic peptide
  Seed: ANQRLNPMHQLLRHF
ANQRWNPIHTLLMHF

SEQ ID NO: 215628 - protein, 15 aa, Artificial Sequence
  Description of Artificial Sequence: Synthetic peptide
  Seed: ANQRLNPMHQLLRHF
ANQRWNPIHTLLNHF

SEQ ID NO: 215629 - protein, 15 aa, Artificial Sequence
  Description of Artificial Sequence: Synthetic peptide
  Seed: ANQRLNPMHQLLRHF
ANQRWNPIHTLLSHF

SEQ ID NO: 215630 - protein, 15 aa, Artificial Sequence
  Description of Artificial Sequence: Synthetic peptide
  Seed: ANQRLNPMHQLLRHF
ANQRWNPIHTLLTHF

SEQ ID NO: 215631 - protein, 15 aa, Artificial Sequence
  Description of Artificial Sequence: Synthetic peptide
  Seed: ANQRLNPMHQLLRHF
ANQRWNPIHTLLVHF

SEQ ID NO: 215632 - protein, 15 aa, Artificial Sequence
  Description of Artificial Sequence: Synthetic peptide
  Seed: ANQRLNPMHQLLRHF
ANQRWNPIHVLLAHF

SEQ ID NO: 215633 - protein, 15 aa, Artificial Sequence
  Description of Artificial Sequence: Synthetic peptide
  Seed: ANQRLNPMHQLLRHF
ANQRWNPIHVLLNHF

SEQ ID NO: 215634 - protein, 15 aa, Artificial Sequence
  Description of Artificial Sequence: Synthetic peptide
  Seed: ANQRLNPMHQLLRHF
ANQRWNPIHVLLSHF

SEQ ID NO: 215635 - protein, 15 aa, Artificial Sequence
  Description of Artificial Sequence: Synthetic peptide
  Seed: ANQRLNPMHQLLRHF
ANQRWNPIHVLLVHF

SEQ ID NO: 215636 - protein, 15 aa, Artificial Sequence
  Description of Artificial Sequence: Synthetic peptide
  Seed: ANQRLNPMHQLLRHF
ANQRWNPLHALLAHF

SEQ ID NO: 215637 - protein, 15 aa, Artificial Sequence
  Description of Artificial Sequence: Synthetic peptide
  Seed: ANQRLNPMHQLLRHF
ANQRWNPLHALLCHF

SEQ ID NO: 215638 - protein, 15 aa, Artificial Sequence
  Description of Artificial Sequence: Synthetic peptide
  Seed: ANQRLNPMHQLLRHF
ANQRWNPLHALLFHF

SEQ ID NO: 215639 - protein, 15 aa, Artificial Sequence
  Description of Artificial Sequence: Synthetic peptide
  Seed: ANQRLNPMHQLLRHF
ANQRWNPLHALLGHF

SEQ ID NO: 215640 - protein, 15 aa, Artificial Sequence
  Description of Artificial Sequence: Synthetic peptide
  Seed: ANQRLNPMHQLLRHF
ANQRWNPLHALLHHF

SEQ ID NO: 215641 - protein, 15 aa, Artificial Sequence
  Description of Artificial Sequence: Synthetic peptide
  Seed: ANQRLNPMHQLLRHF
ANQRWNPLHALLIHF

SEQ ID NO: 215642 - protein, 15 aa, Artificial Sequence
  Description of Artificial Sequence: Synthetic peptide
  Seed: ANQRLNPMHQLLRHF
ANQRWNPLHALLKHF

SEQ ID NO: 215643 - protein, 15 aa, Artificial Sequence
  Description of Artificial Sequence: Synthetic peptide
  Seed: ANQRLNPMHQLLRHF
ANQRWNPLHALLLHF

SEQ ID NO: 215644 - protein, 15 aa, Artificial Sequence
  Description of Artificial Sequence: Synthetic peptide
  Seed: ANQRLNPMHQLLRHF
ANQRWNPLHALLMHF

SEQ ID NO: 215645 - protein, 15 aa, Artificial Sequence
  Description of Artificial Sequence: Synthetic peptide
  Seed: ANQRLNPMHQLLRHF
ANQRWNPLHALLNHF

SEQ ID NO: 215646 - protein, 15 aa, Artificial Sequence
  Description of Artificial Sequence: Synthetic peptide
  Seed: ANQRLNPMHQLLRHF
ANQRWNPLHALLPHF

SEQ ID NO: 215647 - protein, 15 aa, Artificial Sequence
  Description of Artificial Sequence: Synthetic peptide
  Seed: ANQRLNPMHQLLRHF
ANQRWNPLHALLQHF

SEQ ID NO: 215648 - protein, 15 aa, Artificial Sequence
  Description of Artificial Sequence: Synthetic peptide
  Seed: ANQRLNPMHQLLRHF
ANQRWNPLHALLRHF

SEQ ID NO: 215649 - protein, 15 aa, Artificial Sequence
  Description of Artificial Sequence: Synthetic peptide
  Seed: ANQRLNPMHQLLRHF
ANQRWNPLHALLSHF

SEQ ID NO: 215650 - protein, 15 aa, Artificial Sequence
  Description of Artificial Sequence: Synthetic peptide
  Seed: ANQRLNPMHQLLRHF
ANQRWNPLHALLTHF

SEQ ID NO: 215651 - protein, 15 aa, Artificial Sequence
  Description of Artificial Sequence: Synthetic peptide
  Seed: ANQRLNPMHQLLRHF
ANQRWNPLHALLVHF

SEQ ID NO: 215652 - protein, 15 aa, Artificial Sequence
  Description of Artificial Sequence: Synthetic peptide
  Seed: ANQRLNPMHQLLRHF
ANQRWNPLHFLLFHF

SEQ ID NO: 215653 - protein, 15 aa, Artificial Sequence
  Description of Artificial Sequence: Synthetic peptide
  Seed: ANQRLNPMHQLLRHF
ANQRWNPLHFLLIHF

SEQ ID NO: 215654 - protein, 15 aa, Artificial Sequence
  Description of Artificial Sequence: Synthetic peptide
  Seed: ANQRLNPMHQLLRHF
ANQRWNPLHFLLLHF

SEQ ID NO: 215655 - protein, 15 aa, Artificial Sequence
  Description of Artificial Sequence: Synthetic peptide
  Seed: ANQRLNPMHQLLRHF
ANQRWNPLHFLLMHF

SEQ ID NO: 215656 - protein, 15 aa, Artificial Sequence
  Description of Artificial Sequence: Synthetic peptide
  Seed: ANQRLNPMHQLLRHF
ANQRWNPLHFLLVHF

SEQ ID NO: 215657 - protein, 15 aa, Artificial Sequence
  Description of Artificial Sequence: Synthetic peptide
  Seed: ANQRLNPMHQLLRHF
ANQRWNPLHGLLAHF

SEQ ID NO: 215658 - protein, 15 aa, Artificial Sequence
  Description of Artificial Sequence: Synthetic peptide
  Seed: ANQRLNPMHQLLRHF
ANQRWNPLHGLLCHF

SEQ ID NO: 215659 - protein, 15 aa, Artificial Sequence
  Description of Artificial Sequence: Synthetic peptide
  Seed: ANQRLNPMHQLLRHF
ANQRWNPLHGLLFHF

SEQ ID NO: 215660 - protein, 15 aa, Artificial Sequence
  Description of Artificial Sequence: Synthetic peptide
  Seed: ANQRLNPMHQLLRHF
ANQRWNPLHGLLGHF

SEQ ID NO: 215661 - protein, 15 aa, Artificial Sequence
  Description of Artificial Sequence: Synthetic peptide
  Seed: ANQRLNPMHQLLRHF
ANQRWNPLHGLLHHF

SEQ ID NO: 215662 - protein, 15 aa, Artificial Sequence
  Description of Artificial Sequence: Synthetic peptide
  Seed: ANQRLNPMHQLLRHF
ANQRWNPLHGLLIHF

SEQ ID NO: 215663 - protein, 15 aa, Artificial Sequence
  Description of Artificial Sequence: Synthetic peptide
  Seed: ANQRLNPMHQLLRHF
ANQRWNPLHGLLLHF

SEQ ID NO: 215664 - protein, 15 aa, Artificial Sequence
  Description of Artificial Sequence: Synthetic peptide
  Seed: ANQRLNPMHQLLRHF
ANQRWNPLHGLLMHF

SEQ ID NO: 215665 - protein, 15 aa, Artificial Sequence
  Description of Artificial Sequence: Synthetic peptide
  Seed: ANQRLNPMHQLLRHF
ANQRWNPLHGLLNHF

SEQ ID NO: 215666 - protein, 15 aa, Artificial Sequence
  Description of Artificial Sequence: Synthetic peptide
  Seed: ANQRLNPMHQLLRHF
ANQRWNPLHGLLSHF

SEQ ID NO: 215667 - protein, 15 aa, Artificial Sequence
  Description of Artificial Sequence: Synthetic peptide
  Seed: ANQRLNPMHQLLRHF
ANQRWNPLHGLLTHF

SEQ ID NO: 215668 - protein, 15 aa, Artificial Sequence
  Description of Artificial Sequence: Synthetic peptide
  Seed: ANQRLNPMHQLLRHF
ANQRWNPLHGLLVHF

SEQ ID NO: 215669 - protein, 15 aa, Artificial Sequence
  Description of Artificial Sequence: Synthetic peptide
  Seed: ANQRLNPMHQLLRHF
ANQRWNPLHILLAHF

SEQ ID NO: 215670 - protein, 15 aa, Artificial Sequence
  Description of Artificial Sequence: Synthetic peptide
  Seed: ANQRLNPMHQLLRHF
ANQRWNPLHILLNHF

SEQ ID NO: 215671 - protein, 15 aa, Artificial Sequence
  Description of Artificial Sequence: Synthetic peptide
  Seed: ANQRLNPMHQLLRHF
ANQRWNPLHILLSHF

SEQ ID NO: 215672 - protein, 15 aa, Artificial Sequence
  Description of Artificial Sequence: Synthetic peptide
  Seed: ANQRLNPMHQLLRHF
ANQRWNPLHILLVHF

SEQ ID NO: 215673 - protein, 15 aa, Artificial Sequence
  Description of Artificial Sequence: Synthetic peptide
  Seed: ANQRLNPMHQLLRHF
ANQRWNPLHKLLAHF

SEQ ID NO: 215674 - protein, 15 aa, Artificial Sequence
  Description of Artificial Sequence: Synthetic peptide
  Seed: ANQRLNPMHQLLRHF
ANQRWNPLHKLLGHF

SEQ ID NO: 215675 - protein, 15 aa, Artificial Sequence
  Description of Artificial Sequence: Synthetic peptide
  Seed: ANQRLNPMHQLLRHF
ANQRWNPLHKLLSHF

SEQ ID NO: 215676 - protein, 15 aa, Artificial Sequence
  Description of Artificial Sequence: Synthetic peptide
  Seed: ANQRLNPMHQLLRHF
ANQRWNPLHKLLTHF

SEQ ID NO: 215677 - protein, 15 aa, Artificial Sequence
  Description of Artificial Sequence: Synthetic peptide
  Seed: ANQRLNPMHQLLRHF
ANQRWNPLHNLLAHF

SEQ ID NO: 215678 - protein, 15 aa, Artificial Sequence
  Description of Artificial Sequence: Synthetic peptide
  Seed: ANQRLNPMHQLLRHF
ANQRWNPLHNLLGHF

SEQ ID NO: 215679 - protein, 15 aa, Artificial Sequence
  Description of Artificial Sequence: Synthetic peptide
  Seed: ANQRLNPMHQLLRHF
ANQRWNPLHNLLIHF

SEQ ID NO: 215680 - protein, 15 aa, Artificial Sequence
  Description of Artificial Sequence: Synthetic peptide
  Seed: ANQRLNPMHQLLRHF
ANQRWNPLHNLLLHF

SEQ ID NO: 215681 - protein, 15 aa, Artificial Sequence
  Description of Artificial Sequence: Synthetic peptide
  Seed: ANQRLNPMHQLLRHF
ANQRWNPLHNLLMHF

SEQ ID NO: 215682 - protein, 15 aa, Artificial Sequence
  Description of Artificial Sequence: Synthetic peptide
  Seed: ANQRLNPMHQLLRHF
ANQRWNPLHNLLNHF

SEQ ID NO: 215683 - protein, 15 aa, Artificial Sequence
  Description of Artificial Sequence: Synthetic peptide
  Seed: ANQRLNPMHQLLRHF
ANQRWNPLHNLLSHF

SEQ ID NO: 215684 - protein, 15 aa, Artificial Sequence
  Description of Artificial Sequence: Synthetic peptide
  Seed: ANQRLNPMHQLLRHF
ANQRWNPLHNLLTHF

SEQ ID NO: 215685 - protein, 15 aa, Artificial Sequence
  Description of Artificial Sequence: Synthetic peptide
  Seed: ANQRLNPMHQLLRHF
ANQRWNPLHNLLVHF

SEQ ID NO: 215686 - protein, 15 aa, Artificial Sequence
  Description of Artificial Sequence: Synthetic peptide
  Seed: ANQRLNPMHQLLRHF
ANQRWNPLHPLLAHF

SEQ ID NO: 215687 - protein, 15 aa, Artificial Sequence
  Description of Artificial Sequence: Synthetic peptide
  Seed: ANQRLNPMHQLLRHF
ANQRWNPLHPLLGHF

SEQ ID NO: 215688 - protein, 15 aa, Artificial Sequence
  Description of Artificial Sequence: Synthetic peptide
  Seed: ANQRLNPMHQLLRHF
ANQRWNPLHPLLIHF

SEQ ID NO: 215689 - protein, 15 aa, Artificial Sequence
  Description of Artificial Sequence: Synthetic peptide
  Seed: ANQRLNPMHQLLRHF
ANQRWNPLHPLLLHF

SEQ ID NO: 215690 - protein, 15 aa, Artificial Sequence
  Description of Artificial Sequence: Synthetic peptide
  Seed: ANQRLNPMHQLLRHF
ANQRWNPLHPLLMHF

SEQ ID NO: 215691 - protein, 15 aa, Artificial Sequence
  Description of Artificial Sequence: Synthetic peptide
  Seed: ANQRLNPMHQLLRHF
ANQRWNPLHPLLNHF

SEQ ID NO: 215692 - protein, 15 aa, Artificial Sequence
  Description of Artificial Sequence: Synthetic peptide
  Seed: ANQRLNPMHQLLRHF
ANQRWNPLHPLLSHF

SEQ ID NO: 215693 - protein, 15 aa, Artificial Sequence
  Description of Artificial Sequence: Synthetic peptide
  Seed: ANQRLNPMHQLLRHF
ANQRWNPLHPLLTHF

SEQ ID NO: 215694 - protein, 15 aa, Artificial Sequence
  Description of Artificial Sequence: Synthetic peptide
  Seed: ANQRLNPMHQLLRHF
ANQRWNPLHPLLVHF

SEQ ID NO: 215695 - protein, 15 aa, Artificial Sequence
  Description of Artificial Sequence: Synthetic peptide
  Seed: ANQRLNPMHQLLRHF
ANQRWNPLHRLLAHF

SEQ ID NO: 215696 - protein, 15 aa, Artificial Sequence
  Description of Artificial Sequence: Synthetic peptide
  Seed: ANQRLNPMHQLLRHF
ANQRWNPLHRLLGHF

SEQ ID NO: 215697 - protein, 15 aa, Artificial Sequence
  Description of Artificial Sequence: Synthetic peptide
  Seed: ANQRLNPMHQLLRHF
ANQRWNPLHRLLHHF

SEQ ID NO: 215698 - protein, 15 aa, Artificial Sequence
  Description of Artificial Sequence: Synthetic peptide
  Seed: ANQRLNPMHQLLRHF
ANQRWNPLHRLLNHF

SEQ ID NO: 215699 - protein, 15 aa, Artificial Sequence
  Description of Artificial Sequence: Synthetic peptide
  Seed: ANQRLNPMHQLLRHF
ANQRWNPLHRLLQHF

SEQ ID NO: 215700 - protein, 15 aa, Artificial Sequence
  Description of Artificial Sequence: Synthetic peptide
  Seed: ANQRLNPMHQLLRHF
ANQRWNPLHRLLSHF

SEQ ID NO: 215701 - protein, 15 aa, Artificial Sequence
  Description of Artificial Sequence: Synthetic peptide
  Seed: ANQRLNPMHQLLRHF
ANQRWNPLHRLLTHF

SEQ ID NO: 215702 - protein, 15 aa, Artificial Sequence
  Description of Artificial Sequence: Synthetic peptide
  Seed: ANQRLNPMHQLLRHF
ANQRWNPLHSLLAHF

SEQ ID NO: 215703 - protein, 15 aa, Artificial Sequence
  Description of Artificial Sequence: Synthetic peptide
  Seed: ANQRLNPMHQLLRHF
ANQRWNPLHSLLCHF

SEQ ID NO: 215704 - protein, 15 aa, Artificial Sequence
  Description of Artificial Sequence: Synthetic peptide
  Seed: ANQRLNPMHQLLRHF
ANQRWNPLHSLLFHF

SEQ ID NO: 215705 - protein, 15 aa, Artificial Sequence
  Description of Artificial Sequence: Synthetic peptide
  Seed: ANQRLNPMHQLLRHF
ANQRWNPLHSLLGHF

SEQ ID NO: 215706 - protein, 15 aa, Artificial Sequence
  Description of Artificial Sequence: Synthetic peptide
  Seed: ANQRLNPMHQLLRHF
ANQRWNPLHSLLHHF

SEQ ID NO: 215707 - protein, 15 aa, Artificial Sequence
  Description of Artificial Sequence: Synthetic peptide
  Seed: ANQRLNPMHQLLRHF
ANQRWNPLHSLLIHF

SEQ ID NO: 215708 - protein, 15 aa, Artificial Sequence
  Description of Artificial Sequence: Synthetic peptide
  Seed: ANQRLNPMHQLLRHF
ANQRWNPLHSLLLHF

SEQ ID NO: 215709 - protein, 15 aa, Artificial Sequence
  Description of Artificial Sequence: Synthetic peptide
  Seed: ANQRLNPMHQLLRHF
ANQRWNPLHSLLMHF

SEQ ID NO: 215710 - protein, 15 aa, Artificial Sequence
  Description of Artificial Sequence: Synthetic peptide
  Seed: ANQRLNPMHQLLRHF
ANQRWNPLHSLLNHF

SEQ ID NO: 215711 - protein, 15 aa, Artificial Sequence
  Description of Artificial Sequence: Synthetic peptide
  Seed: ANQRLNPMHQLLRHF
ANQRWNPLHSLLSHF

SEQ ID NO: 215712 - protein, 15 aa, Artificial Sequence
  Description of Artificial Sequence: Synthetic peptide
  Seed: ANQRLNPMHQLLRHF
ANQRWNPLHSLLTHF

SEQ ID NO: 215713 - protein, 15 aa, Artificial Sequence
  Description of Artificial Sequence: Synthetic peptide
  Seed: ANQRLNPMHQLLRHF
ANQRWNPLHSLLVHF

SEQ ID NO: 215714 - protein, 15 aa, Artificial Sequence
  Description of Artificial Sequence: Synthetic peptide
  Seed: ANQRLNPMHQLLRHF
ANQRWNPLHTLLAHF

SEQ ID NO: 215715 - protein, 15 aa, Artificial Sequence
  Description of Artificial Sequence: Synthetic peptide
  Seed: ANQRLNPMHQLLRHF
ANQRWNPLHTLLGHF

SEQ ID NO: 215716 - protein, 15 aa, Artificial Sequence
  Description of Artificial Sequence: Synthetic peptide
  Seed: ANQRLNPMHQLLRHF
ANQRWNPLHTLLIHF

SEQ ID NO: 215717 - protein, 15 aa, Artificial Sequence
  Description of Artificial Sequence: Synthetic peptide
  Seed: ANQRLNPMHQLLRHF
ANQRWNPLHTLLLHF

SEQ ID NO: 215718 - protein, 15 aa, Artificial Sequence
  Description of Artificial Sequence: Synthetic peptide
  Seed: ANQRLNPMHQLLRHF
ANQRWNPLHTLLMHF

SEQ ID NO: 215719 - protein, 15 aa, Artificial Sequence
  Description of Artificial Sequence: Synthetic peptide
  Seed: ANQRLNPMHQLLRHF
ANQRWNPLHTLLNHF

SEQ ID NO: 215720 - protein, 15 aa, Artificial Sequence
  Description of Artificial Sequence: Synthetic peptide
  Seed: ANQRLNPMHQLLRHF
ANQRWNPLHTLLSHF

SEQ ID NO: 215721 - protein, 15 aa, Artificial Sequence
  Description of Artificial Sequence: Synthetic peptide
  Seed: ANQRLNPMHQLLRHF
ANQRWNPLHTLLTHF

SEQ ID NO: 215722 - protein, 15 aa, Artificial Sequence
  Description of Artificial Sequence: Synthetic peptide
  Seed: ANQRLNPMHQLLRHF
ANQRWNPLHTLLVHF

SEQ ID NO: 215723 - protein, 15 aa, Artificial Sequence
  Description of Artificial Sequence: Synthetic peptide
  Seed: ANQRLNPMHQLLRHF
ANQRWNPLHVLLAHF

SEQ ID NO: 215724 - protein, 15 aa, Artificial Sequence
  Description of Artificial Sequence: Synthetic peptide
  Seed: ANQRLNPMHQLLRHF
ANQRWNPLHVLLIHF

SEQ ID NO: 215725 - protein, 15 aa, Artificial Sequence
  Description of Artificial Sequence: Synthetic peptide
  Seed: ANQRLNPMHQLLRHF
ANQRWNPLHVLLLHF

SEQ ID NO: 215726 - protein, 15 aa, Artificial Sequence
  Description of Artificial Sequence: Synthetic peptide
  Seed: ANQRLNPMHQLLRHF
ANQRWNPLHVLLMHF

SEQ ID NO: 215727 - protein, 15 aa, Artificial Sequence
  Description of Artificial Sequence: Synthetic peptide
  Seed: ANQRLNPMHQLLRHF
ANQRWNPLHVLLNHF

SEQ ID NO: 215728 - protein, 15 aa, Artificial Sequence
  Description of Artificial Sequence: Synthetic peptide
  Seed: ANQRLNPMHQLLRHF
ANQRWNPLHVLLSHF

SEQ ID NO: 215729 - protein, 15 aa, Artificial Sequence
  Description of Artificial Sequence: Synthetic peptide
  Seed: ANQRLNPMHQLLRHF
ANQRWNPLHVLLTHF

SEQ ID NO: 215730 - protein, 15 aa, Artificial Sequence
  Description of Artificial Sequence: Synthetic peptide
  Seed: ANQRLNPMHQLLRHF
ANQRWNPLHVLLVHF

SEQ ID NO: 215731 - protein, 15 aa, Artificial Sequence
  Description of Artificial Sequence: Synthetic peptide
  Seed: ANQRLNPMHQLLRHF
ANQRWNPMHALLAHF

SEQ ID NO: 215732 - protein, 15 aa, Artificial Sequence
  Description of Artificial Sequence: Synthetic peptide
  Seed: ANQRLNPMHQLLRHF
ANQRWNPMHALLCHF

SEQ ID NO: 215733 - protein, 15 aa, Artificial Sequence
  Description of Artificial Sequence: Synthetic peptide
  Seed: ANQRLNPMHQLLRHF
ANQRWNPMHALLFHF

SEQ ID NO: 215734 - protein, 15 aa, Artificial Sequence
  Description of Artificial Sequence: Synthetic peptide
  Seed: ANQRLNPMHQLLRHF
ANQRWNPMHALLGHF

SEQ ID NO: 215735 - protein, 15 aa, Artificial Sequence
  Description of Artificial Sequence: Synthetic peptide
  Seed: ANQRLNPMHQLLRHF
ANQRWNPMHALLHHF

SEQ ID NO: 215736 - protein, 15 aa, Artificial Sequence
  Description of Artificial Sequence: Synthetic peptide
  Seed: ANQRLNPMHQLLRHF
ANQRWNPMHALLIHF

SEQ ID NO: 215737 - protein, 15 aa, Artificial Sequence
  Description of Artificial Sequence: Synthetic peptide
  Seed: ANQRLNPMHQLLRHF
ANQRWNPMHALLKHF

SEQ ID NO: 215738 - protein, 15 aa, Artificial Sequence
  Description of Artificial Sequence: Synthetic peptide
  Seed: ANQRLNPMHQLLRHF
ANQRWNPMHALLLHF

SEQ ID NO: 215739 - protein, 15 aa, Artificial Sequence
  Description of Artificial Sequence: Synthetic peptide
  Seed: ANQRLNPMHQLLRHF
ANQRWNPMHALLMHF

SEQ ID NO: 215740 - protein, 15 aa, Artificial Sequence
  Description of Artificial Sequence: Synthetic peptide
  Seed: ANQRLNPMHQLLRHF
ANQRWNPMHALLNHF

SEQ ID NO: 215741 - protein, 15 aa, Artificial Sequence
  Description of Artificial Sequence: Synthetic peptide
  Seed: ANQRLNPMHQLLRHF
ANQRWNPMHALLPHF

SEQ ID NO: 215742 - protein, 15 aa, Artificial Sequence
  Description of Artificial Sequence: Synthetic peptide
  Seed: ANQRLNPMHQLLRHF
ANQRWNPMHALLQHF

SEQ ID NO: 215743 - protein, 15 aa, Artificial Sequence
  Description of Artificial Sequence: Synthetic peptide
  Seed: ANQRLNPMHQLLRHF
ANQRWNPMHALLRHF

SEQ ID NO: 215744 - protein, 15 aa, Artificial Sequence
  Description of Artificial Sequence: Synthetic peptide
  Seed: ANQRLNPMHQLLRHF
ANQRWNPMHALLSHF

SEQ ID NO: 215745 - protein, 15 aa, Artificial Sequence
  Description of Artificial Sequence: Synthetic peptide
  Seed: ANQRLNPMHQLLRHF
ANQRWNPMHALLTHF

SEQ ID NO: 215746 - protein, 15 aa, Artificial Sequence
  Description of Artificial Sequence: Synthetic peptide
  Seed: ANQRLNPMHQLLRHF
ANQRWNPMHALLVHF

SEQ ID NO: 215747 - protein, 15 aa, Artificial Sequence
  Description of Artificial Sequence: Synthetic peptide
  Seed: ANQRLNPMHQLLRHF
ANQRWNPMHFLLIHF

SEQ ID NO: 215748 - protein, 15 aa, Artificial Sequence
  Description of Artificial Sequence: Synthetic peptide
  Seed: ANQRLNPMHQLLRHF
ANQRWNPMHFLLLHF

SEQ ID NO: 215749 - protein, 15 aa, Artificial Sequence
  Description of Artificial Sequence: Synthetic peptide
  Seed: ANQRLNPMHQLLRHF
ANQRWNPMHFLLVHF

SEQ ID NO: 215750 - protein, 15 aa, Artificial Sequence
  Description of Artificial Sequence: Synthetic peptide
  Seed: ANQRLNPMHQLLRHF
ANQRWNPMHGLLAHF

SEQ ID NO: 215751 - protein, 15 aa, Artificial Sequence
  Description of Artificial Sequence: Synthetic peptide
  Seed: ANQRLNPMHQLLRHF
ANQRWNPMHGLLCHF

SEQ ID NO: 215752 - protein, 15 aa, Artificial Sequence
  Description of Artificial Sequence: Synthetic peptide
  Seed: ANQRLNPMHQLLRHF
ANQRWNPMHGLLFHF

SEQ ID NO: 215753 - protein, 15 aa, Artificial Sequence
  Description of Artificial Sequence: Synthetic peptide
  Seed: ANQRLNPMHQLLRHF
ANQRWNPMHGLLGHF

SEQ ID NO: 215754 - protein, 15 aa, Artificial Sequence
  Description of Artificial Sequence: Synthetic peptide
  Seed: ANQRLNPMHQLLRHF
ANQRWNPMHGLLHHF

SEQ ID NO: 215755 - protein, 15 aa, Artificial Sequence
  Description of Artificial Sequence: Synthetic peptide
  Seed: ANQRLNPMHQLLRHF
ANQRWNPMHGLLIHF

SEQ ID NO: 215756 - protein, 15 aa, Artificial Sequence
  Description of Artificial Sequence: Synthetic peptide
  Seed: ANQRLNPMHQLLRHF
ANQRWNPMHGLLLHF

SEQ ID NO: 215757 - protein, 15 aa, Artificial Sequence
  Description of Artificial Sequence: Synthetic peptide
  Seed: ANQRLNPMHQLLRHF
ANQRWNPMHGLLMHF

SEQ ID NO: 215758 - protein, 15 aa, Artificial Sequence
  Description of Artificial Sequence: Synthetic peptide
  Seed: ANQRLNPMHQLLRHF
ANQRWNPMHGLLNHF

SEQ ID NO: 215759 - protein, 15 aa, Artificial Sequence
  Description of Artificial Sequence: Synthetic peptide
  Seed: ANQRLNPMHQLLRHF
ANQRWNPMHGLLSHF

SEQ ID NO: 215760 - protein, 15 aa, Artificial Sequence
  Description of Artificial Sequence: Synthetic peptide
  Seed: ANQRLNPMHQLLRHF
ANQRWNPMHGLLTHF

SEQ ID NO: 215761 - protein, 15 aa, Artificial Sequence
  Description of Artificial Sequence: Synthetic peptide
  Seed: ANQRLNPMHQLLRHF
ANQRWNPMHGLLVHF

SEQ ID NO: 215762 - protein, 15 aa, Artificial Sequence
  Description of Artificial Sequence: Synthetic peptide
  Seed: ANQRLNPMHQLLRHF
ANQRWNPMHILLAHF

SEQ ID NO: 215763 - protein, 15 aa, Artificial Sequence
  Description of Artificial Sequence: Synthetic peptide
  Seed: ANQRLNPMHQLLRHF
ANQRWNPMHILLNHF

SEQ ID NO: 215764 - protein, 15 aa, Artificial Sequence
  Description of Artificial Sequence: Synthetic peptide
  Seed: ANQRLNPMHQLLRHF
ANQRWNPMHILLSHF

SEQ ID NO: 215765 - protein, 15 aa, Artificial Sequence
  Description of Artificial Sequence: Synthetic peptide
  Seed: ANQRLNPMHQLLRHF
ANQRWNPMHILLVHF

SEQ ID NO: 215766 - protein, 15 aa, Artificial Sequence
  Description of Artificial Sequence: Synthetic peptide
  Seed: ANQRLNPMHQLLRHF
ANQRWNPMHKLLAHF

SEQ ID NO: 215767 - protein, 15 aa, Artificial Sequence
  Description of Artificial Sequence: Synthetic peptide
  Seed: ANQRLNPMHQLLRHF
ANQRWNPMHKLLHHF

SEQ ID NO: 215768 - protein, 15 aa, Artificial Sequence
  Description of Artificial Sequence: Synthetic peptide
  Seed: ANQRLNPMHQLLRHF
ANQRWNPMHKLLSHF

SEQ ID NO: 215769 - protein, 15 aa, Artificial Sequence
  Description of Artificial Sequence: Synthetic peptide
  Seed: ANQRLNPMHQLLRHF
ANQRWNPMHKLLTHF

SEQ ID NO: 215770 - protein, 15 aa, Artificial Sequence
  Description of Artificial Sequence: Synthetic peptide
  Seed: ANQRLNPMHQLLRHF
ANQRWNPMHNLLAHF

SEQ ID NO: 215771 - protein, 15 aa, Artificial Sequence
  Description of Artificial Sequence: Synthetic peptide
  Seed: ANQRLNPMHQLLRHF
ANQRWNPMHNLLIHF

SEQ ID NO: 215772 - protein, 15 aa, Artificial Sequence
  Description of Artificial Sequence: Synthetic peptide
  Seed: ANQRLNPMHQLLRHF
ANQRWNPMHNLLLHF

SEQ ID NO: 215773 - protein, 15 aa, Artificial Sequence
  Description of Artificial Sequence: Synthetic peptide
  Seed: ANQRLNPMHQLLRHF
ANQRWNPMHNLLMHF

SEQ ID NO: 215774 - protein, 15 aa, Artificial Sequence
  Description of Artificial Sequence: Synthetic peptide
  Seed: ANQRLNPMHQLLRHF
ANQRWNPMHNLLNHF

SEQ ID NO: 215775 - protein, 15 aa, Artificial Sequence
  Description of Artificial Sequence: Synthetic peptide
  Seed: ANQRLNPMHQLLRHF
ANQRWNPMHNLLSHF

SEQ ID NO: 215776 - protein, 15 aa, Artificial Sequence
  Description of Artificial Sequence: Synthetic peptide
  Seed: ANQRLNPMHQLLRHF
ANQRWNPMHNLLTHF

SEQ ID NO: 215777 - protein, 15 aa, Artificial Sequence
  Description of Artificial Sequence: Synthetic peptide
  Seed: ANQRLNPMHQLLRHF
ANQRWNPMHNLLVHF

SEQ ID NO: 215778 - protein, 15 aa, Artificial Sequence
  Description of Artificial Sequence: Synthetic peptide
  Seed: ANQRLNPMHQLLRHF
ANQRWNPMHPLLAHF

SEQ ID NO: 215779 - protein, 15 aa, Artificial Sequence
  Description of Artificial Sequence: Synthetic peptide
  Seed: ANQRLNPMHQLLRHF
ANQRWNPMHPLLGHF

SEQ ID NO: 215780 - protein, 15 aa, Artificial Sequence
  Description of Artificial Sequence: Synthetic peptide
  Seed: ANQRLNPMHQLLRHF
ANQRWNPMHPLLIHF

SEQ ID NO: 215781 - protein, 15 aa, Artificial Sequence
  Description of Artificial Sequence: Synthetic peptide
  Seed: ANQRLNPMHQLLRHF
ANQRWNPMHPLLLHF

SEQ ID NO: 215782 - protein, 15 aa, Artificial Sequence
  Description of Artificial Sequence: Synthetic peptide
  Seed: ANQRLNPMHQLLRHF
ANQRWNPMHPLLMHF

SEQ ID NO: 215783 - protein, 15 aa, Artificial Sequence
  Description of Artificial Sequence: Synthetic peptide
  Seed: ANQRLNPMHQLLRHF
ANQRWNPMHPLLNHF

SEQ ID NO: 215784 - protein, 15 aa, Artificial Sequence
  Description of Artificial Sequence: Synthetic peptide
  Seed: ANQRLNPMHQLLRHF
ANQRWNPMHPLLSHF

SEQ ID NO: 215785 - protein, 15 aa, Artificial Sequence
  Description of Artificial Sequence: Synthetic peptide
  Seed: ANQRLNPMHQLLRHF
ANQRWNPMHPLLTHF

SEQ ID NO: 215786 - protein, 15 aa, Artificial Sequence
  Description of Artificial Sequence: Synthetic peptide
  Seed: ANQRLNPMHQLLRHF
ANQRWNPMHPLLVHF

SEQ ID NO: 215787 - protein, 15 aa, Artificial Sequence
  Description of Artificial Sequence: Synthetic peptide
  Seed: ANQRLNPMHQLLRHF
ANQRWNPMHRLLAHF

SEQ ID NO: 215788 - protein, 15 aa, Artificial Sequence
  Description of Artificial Sequence: Synthetic peptide
  Seed: ANQRLNPMHQLLRHF
ANQRWNPMHRLLGHF

SEQ ID NO: 215789 - protein, 15 aa, Artificial Sequence
  Description of Artificial Sequence: Synthetic peptide
  Seed: ANQRLNPMHQLLRHF
ANQRWNPMHRLLHHF

SEQ ID NO: 215790 - protein, 15 aa, Artificial Sequence
  Description of Artificial Sequence: Synthetic peptide
  Seed: ANQRLNPMHQLLRHF
ANQRWNPMHRLLKHF

SEQ ID NO: 215791 - protein, 15 aa, Artificial Sequence
  Description of Artificial Sequence: Synthetic peptide
  Seed: ANQRLNPMHQLLRHF
ANQRWNPMHRLLNHF

SEQ ID NO: 215792 - protein, 15 aa, Artificial Sequence
  Description of Artificial Sequence: Synthetic peptide
  Seed: ANQRLNPMHQLLRHF
ANQRWNPMHRLLQHF

SEQ ID NO: 215793 - protein, 15 aa, Artificial Sequence
  Description of Artificial Sequence: Synthetic peptide
  Seed: ANQRLNPMHQLLRHF
ANQRWNPMHRLLSHF

SEQ ID NO: 215794 - protein, 15 aa, Artificial Sequence
  Description of Artificial Sequence: Synthetic peptide
  Seed: ANQRLNPMHQLLRHF
ANQRWNPMHRLLTHF

SEQ ID NO: 215795 - protein, 15 aa, Artificial Sequence
  Description of Artificial Sequence: Synthetic peptide
  Seed: ANQRLNPMHQLLRHF
ANQRWNPMHSLLAHF

SEQ ID NO: 215796 - protein, 15 aa, Artificial Sequence
  Description of Artificial Sequence: Synthetic peptide
  Seed: ANQRLNPMHQLLRHF
ANQRWNPMHSLLCHF

SEQ ID NO: 215797 - protein, 15 aa, Artificial Sequence
  Description of Artificial Sequence: Synthetic peptide
  Seed: ANQRLNPMHQLLRHF
ANQRWNPMHSLLFHF

SEQ ID NO: 215798 - protein, 15 aa, Artificial Sequence
  Description of Artificial Sequence: Synthetic peptide
  Seed: ANQRLNPMHQLLRHF
ANQRWNPMHSLLGHF

SEQ ID NO: 215799 - protein, 15 aa, Artificial Sequence
  Description of Artificial Sequence: Synthetic peptide
  Seed: ANQRLNPMHQLLRHF
ANQRWNPMHSLLHHF

SEQ ID NO: 215800 - protein, 15 aa, Artificial Sequence
  Description of Artificial Sequence: Synthetic peptide
  Seed: ANQRLNPMHQLLRHF
ANQRWNPMHSLLIHF

SEQ ID NO: 215801 - protein, 15 aa, Artificial Sequence
  Description of Artificial Sequence: Synthetic peptide
  Seed: ANQRLNPMHQLLRHF
ANQRWNPMHSLLLHF

SEQ ID NO: 215802 - protein, 15 aa, Artificial Sequence
  Description of Artificial Sequence: Synthetic peptide
  Seed: ANQRLNPMHQLLRHF
ANQRWNPMHSLLMHF

SEQ ID NO: 215803 - protein, 15 aa, Artificial Sequence
  Description of Artificial Sequence: Synthetic peptide
  Seed: ANQRLNPMHQLLRHF
ANQRWNPMHSLLNHF

SEQ ID NO: 215804 - protein, 15 aa, Artificial Sequence
  Description of Artificial Sequence: Synthetic peptide
  Seed: ANQRLNPMHQLLRHF
ANQRWNPMHSLLSHF

SEQ ID NO: 215805 - protein, 15 aa, Artificial Sequence
  Description of Artificial Sequence: Synthetic peptide
  Seed: ANQRLNPMHQLLRHF
ANQRWNPMHSLLTHF

SEQ ID NO: 215806 - protein, 15 aa, Artificial Sequence
  Description of Artificial Sequence: Synthetic peptide
  Seed: ANQRLNPMHQLLRHF
ANQRWNPMHSLLVHF

SEQ ID NO: 215807 - protein, 15 aa, Artificial Sequence
  Description of Artificial Sequence: Synthetic peptide
  Seed: ANQRLNPMHQLLRHF
ANQRWNPMHTLLAHF

SEQ ID NO: 215808 - protein, 15 aa, Artificial Sequence
  Description of Artificial Sequence: Synthetic peptide
  Seed: ANQRLNPMHQLLRHF
ANQRWNPMHTLLHHF

SEQ ID NO: 215809 - protein, 15 aa, Artificial Sequence
  Description of Artificial Sequence: Synthetic peptide
  Seed: ANQRLNPMHQLLRHF
ANQRWNPMHTLLIHF

SEQ ID NO: 215810 - protein, 15 aa, Artificial Sequence
  Description of Artificial Sequence: Synthetic peptide
  Seed: ANQRLNPMHQLLRHF
ANQRWNPMHTLLLHF

SEQ ID NO: 215811 - protein, 15 aa, Artificial Sequence
  Description of Artificial Sequence: Synthetic peptide
  Seed: ANQRLNPMHQLLRHF
ANQRWNPMHTLLMHF

SEQ ID NO: 215812 - protein, 15 aa, Artificial Sequence
  Description of Artificial Sequence: Synthetic peptide
  Seed: ANQRLNPMHQLLRHF
ANQRWNPMHTLLNHF

SEQ ID NO: 215813 - protein, 15 aa, Artificial Sequence
  Description of Artificial Sequence: Synthetic peptide
  Seed: ANQRLNPMHQLLRHF
ANQRWNPMHTLLSHF

SEQ ID NO: 215814 - protein, 15 aa, Artificial Sequence
  Description of Artificial Sequence: Synthetic peptide
  Seed: ANQRLNPMHQLLRHF
ANQRWNPMHTLLTHF

SEQ ID NO: 215815 - protein, 15 aa, Artificial Sequence
  Description of Artificial Sequence: Synthetic peptide
  Seed: ANQRLNPMHQLLRHF
ANQRWNPMHTLLVHF

SEQ ID NO: 215816 - protein, 15 aa, Artificial Sequence
  Description of Artificial Sequence: Synthetic peptide
  Seed: ANQRLNPMHQLLRHF
ANQRWNPMHVLLAHF

SEQ ID NO: 215817 - protein, 15 aa, Artificial Sequence
  Description of Artificial Sequence: Synthetic peptide
  Seed: ANQRLNPMHQLLRHF
ANQRWNPMHVLLHHF

SEQ ID NO: 215818 - protein, 15 aa, Artificial Sequence
  Description of Artificial Sequence: Synthetic peptide
  Seed: ANQRLNPMHQLLRHF
ANQRWNPMHVLLIHF

SEQ ID NO: 215819 - protein, 15 aa, Artificial Sequence
  Description of Artificial Sequence: Synthetic peptide
  Seed: ANQRLNPMHQLLRHF
ANQRWNPMHVLLLHF

SEQ ID NO: 215820 - protein, 15 aa, Artificial Sequence
  Description of Artificial Sequence: Synthetic peptide
  Seed: ANQRLNPMHQLLRHF
ANQRWNPMHVLLMHF

SEQ ID NO: 215821 - protein, 15 aa, Artificial Sequence
  Description of Artificial Sequence: Synthetic peptide
  Seed: ANQRLNPMHQLLRHF
ANQRWNPMHVLLNHF

SEQ ID NO: 215822 - protein, 15 aa, Artificial Sequence
  Description of Artificial Sequence: Synthetic peptide
  Seed: ANQRLNPMHQLLRHF
ANQRWNPMHVLLSHF

SEQ ID NO: 215823 - protein, 15 aa, Artificial Sequence
  Description of Artificial Sequence: Synthetic peptide
  Seed: ANQRLNPMHQLLRHF
ANQRWNPMHVLLTHF

SEQ ID NO: 215824 - protein, 15 aa, Artificial Sequence
  Description of Artificial Sequence: Synthetic peptide
  Seed: ANQRLNPMHQLLRHF
ANQRWNPMHVLLVHF

SEQ ID NO: 215825 - protein, 15 aa, Artificial Sequence
  Description of Artificial Sequence: Synthetic peptide
  Seed: ANQRLNPMHQLLRHF
ANQRWNPNHALLFHF

SEQ ID NO: 215826 - protein, 15 aa, Artificial Sequence
  Description of Artificial Sequence: Synthetic peptide
  Seed: ANQRLNPMHQLLRHF
ANQRWNPNHALLIHF

SEQ ID NO: 215827 - protein, 15 aa, Artificial Sequence
  Description of Artificial Sequence: Synthetic peptide
  Seed: ANQRLNPMHQLLRHF
ANQRWNPNHALLLHF

SEQ ID NO: 215828 - protein, 15 aa, Artificial Sequence
  Description of Artificial Sequence: Synthetic peptide
  Seed: ANQRLNPMHQLLRHF
ANQRWNPNHALLMHF

SEQ ID NO: 215829 - protein, 15 aa, Artificial Sequence
  Description of Artificial Sequence: Synthetic peptide
  Seed: ANQRLNPMHQLLRHF
ANQRWNPNHALLVHF

SEQ ID NO: 215830 - protein, 15 aa, Artificial Sequence
  Description of Artificial Sequence: Synthetic peptide
  Seed: ANQRLNPMHQLLRHF
ANQRWNPNHALLYHF

SEQ ID NO: 215831 - protein, 15 aa, Artificial Sequence
  Description of Artificial Sequence: Synthetic peptide
  Seed: ANQRLNPMHQLLRHF
ANQRWNPNHGLLIHF

SEQ ID NO: 215832 - protein, 15 aa, Artificial Sequence
  Description of Artificial Sequence: Synthetic peptide
  Seed: ANQRLNPMHQLLRHF
ANQRWNPNHILLIHF

SEQ ID NO: 215833 - protein, 15 aa, Artificial Sequence
  Description of Artificial Sequence: Synthetic peptide
  Seed: ANQRLNPMHQLLRHF
ANQRWNPNHILLVHF

SEQ ID NO: 215834 - protein, 15 aa, Artificial Sequence
  Description of Artificial Sequence: Synthetic peptide
  Seed: ANQRLNPMHQLLRHF
ANQRWNPNHNLLFHF

SEQ ID NO: 215835 - protein, 15 aa, Artificial Sequence
  Description of Artificial Sequence: Synthetic peptide
  Seed: ANQRLNPMHQLLRHF
ANQRWNPNHNLLIHF

SEQ ID NO: 215836 - protein, 15 aa, Artificial Sequence
  Description of Artificial Sequence: Synthetic peptide
  Seed: ANQRLNPMHQLLRHF
ANQRWNPNHNLLLHF

SEQ ID NO: 215837 - protein, 15 aa, Artificial Sequence
  Description of Artificial Sequence: Synthetic peptide
  Seed: ANQRLNPMHQLLRHF
ANQRWNPNHNLLVHF

SEQ ID NO: 215838 - protein, 15 aa, Artificial Sequence
  Description of Artificial Sequence: Synthetic peptide
  Seed: ANQRLNPMHQLLRHF
ANQRWNPNHPLLIHF

SEQ ID NO: 215839 - protein, 15 aa, Artificial Sequence
  Description of Artificial Sequence: Synthetic peptide
  Seed: ANQRLNPMHQLLRHF
ANQRWNPNHSLLIHF

SEQ ID NO: 215840 - protein, 15 aa, Artificial Sequence
  Description of Artificial Sequence: Synthetic peptide
  Seed: ANQRLNPMHQLLRHF
ANQRWNPNHSLLLHF

SEQ ID NO: 215841 - protein, 15 aa, Artificial Sequence
  Description of Artificial Sequence: Synthetic peptide
  Seed: ANQRLNPMHQLLRHF
ANQRWNPNHSLLVHF

SEQ ID NO: 215842 - protein, 15 aa, Artificial Sequence
  Description of Artificial Sequence: Synthetic peptide
  Seed: ANQRLNPMHQLLRHF
ANQRWNPNHTLLIHF

SEQ ID NO: 215843 - protein, 15 aa, Artificial Sequence
  Description of Artificial Sequence: Synthetic peptide
  Seed: ANQRLNPMHQLLRHF
ANQRWNPNHTLLVHF

SEQ ID NO: 215844 - protein, 15 aa, Artificial Sequence
  Description of Artificial Sequence: Synthetic peptide
  Seed: ANQRLNPMHQLLRHF
ANQRWNPNHVLLIHF

SEQ ID NO: 215845 - protein, 15 aa, Artificial Sequence
  Description of Artificial Sequence: Synthetic peptide
  Seed: ANQRLNPMHQLLRHF
ANQRWNPNHVLLVHF

SEQ ID NO: 215846 - protein, 15 aa, Artificial Sequence
  Description of Artificial Sequence: Synthetic peptide
  Seed: ANQRLNPMHQLLRHF
ANQRWNPQHALLAHF

SEQ ID NO: 215847 - protein, 15 aa, Artificial Sequence
  Description of Artificial Sequence: Synthetic peptide
  Seed: ANQRLNPMHQLLRHF
ANQRWNPQHALLIHF

SEQ ID NO: 215848 - protein, 15 aa, Artificial Sequence
  Description of Artificial Sequence: Synthetic peptide
  Seed: ANQRLNPMHQLLRHF
ANQRWNPQHALLLHF

SEQ ID NO: 215849 - protein, 15 aa, Artificial Sequence
  Description of Artificial Sequence: Synthetic peptide
  Seed: ANQRLNPMHQLLRHF
ANQRWNPQHALLMHF

SEQ ID NO: 215850 - protein, 15 aa, Artificial Sequence
  Description of Artificial Sequence: Synthetic peptide
  Seed: ANQRLNPMHQLLRHF
ANQRWNPQHALLSHF

SEQ ID NO: 215851 - protein, 15 aa, Artificial Sequence
  Description of Artificial Sequence: Synthetic peptide
  Seed: ANQRLNPMHQLLRHF
ANQRWNPQHALLTHF

SEQ ID NO: 215852 - protein, 15 aa, Artificial Sequence
  Description of Artificial Sequence: Synthetic peptide
  Seed: ANQRLNPMHQLLRHF
ANQRWNPQHALLVHF

SEQ ID NO: 215853 - protein, 15 aa, Artificial Sequence
  Description of Artificial Sequence: Synthetic peptide
  Seed: ANQRLNPMHQLLRHF
ANQRWNPQHFLLLHF

SEQ ID NO: 215854 - protein, 15 aa, Artificial Sequence
  Description of Artificial Sequence: Synthetic peptide
  Seed: ANQRLNPMHQLLRHF
ANQRWNPQHGLLAHF

SEQ ID NO: 215855 - protein, 15 aa, Artificial Sequence
  Description of Artificial Sequence: Synthetic peptide
  Seed: ANQRLNPMHQLLRHF
ANQRWNPQHGLLIHF

SEQ ID NO: 215856 - protein, 15 aa, Artificial Sequence
  Description of Artificial Sequence: Synthetic peptide
  Seed: ANQRLNPMHQLLRHF
ANQRWNPQHGLLLHF

SEQ ID NO: 215857 - protein, 15 aa, Artificial Sequence
  Description of Artificial Sequence: Synthetic peptide
  Seed: ANQRLNPMHQLLRHF
ANQRWNPQHGLLMHF

SEQ ID NO: 215858 - protein, 15 aa, Artificial Sequence
  Description of Artificial Sequence: Synthetic peptide
  Seed: ANQRLNPMHQLLRHF
ANQRWNPQHGLLSHF

SEQ ID NO: 215859 - protein, 15 aa, Artificial Sequence
  Description of Artificial Sequence: Synthetic peptide
  Seed: ANQRLNPMHQLLRHF
ANQRWNPQHGLLTHF

SEQ ID NO: 215860 - protein, 15 aa, Artificial Sequence
  Description of Artificial Sequence: Synthetic peptide
  Seed: ANQRLNPMHQLLRHF
ANQRWNPQHGLLVHF

SEQ ID NO: 215861 - protein, 15 aa, Artificial Sequence
  Description of Artificial Sequence: Synthetic peptide
  Seed: ANQRLNPMHQLLRHF
ANQRWNPQHNLLAHF

SEQ ID NO: 215862 - protein, 15 aa, Artificial Sequence
  Description of Artificial Sequence: Synthetic peptide
  Seed: ANQRLNPMHQLLRHF
ANQRWNPQHNLLIHF

SEQ ID NO: 215863 - protein, 15 aa, Artificial Sequence
  Description of Artificial Sequence: Synthetic peptide
  Seed: ANQRLNPMHQLLRHF
ANQRWNPQHNLLLHF

SEQ ID NO: 215864 - protein, 15 aa, Artificial Sequence
  Description of Artificial Sequence: Synthetic peptide
  Seed: ANQRLNPMHQLLRHF
ANQRWNPQHNLLVHF

SEQ ID NO: 215865 - protein, 15 aa, Artificial Sequence
  Description of Artificial Sequence: Synthetic peptide
  Seed: ANQRLNPMHQLLRHF
ANQRWNPQHPLLAHF

SEQ ID NO: 215866 - protein, 15 aa, Artificial Sequence
  Description of Artificial Sequence: Synthetic peptide
  Seed: ANQRLNPMHQLLRHF
ANQRWNPQHPLLIHF

SEQ ID NO: 215867 - protein, 15 aa, Artificial Sequence
  Description of Artificial Sequence: Synthetic peptide
  Seed: ANQRLNPMHQLLRHF
ANQRWNPQHPLLLHF

SEQ ID NO: 215868 - protein, 15 aa, Artificial Sequence
  Description of Artificial Sequence: Synthetic peptide
  Seed: ANQRLNPMHQLLRHF
ANQRWNPQHPLLVHF

SEQ ID NO: 215869 - protein, 15 aa, Artificial Sequence
  Description of Artificial Sequence: Synthetic peptide
  Seed: ANQRLNPMHQLLRHF
ANQRWNPQHSLLAHF

SEQ ID NO: 215870 - protein, 15 aa, Artificial Sequence
  Description of Artificial Sequence: Synthetic peptide
  Seed: ANQRLNPMHQLLRHF
ANQRWNPQHSLLIHF

SEQ ID NO: 215871 - protein, 15 aa, Artificial Sequence
  Description of Artificial Sequence: Synthetic peptide
  Seed: ANQRLNPMHQLLRHF
ANQRWNPQHSLLLHF

SEQ ID NO: 215872 - protein, 15 aa, Artificial Sequence
  Description of Artificial Sequence: Synthetic peptide
  Seed: ANQRLNPMHQLLRHF
ANQRWNPQHSLLMHF

SEQ ID NO: 215873 - protein, 15 aa, Artificial Sequence
  Description of Artificial Sequence: Synthetic peptide
  Seed: ANQRLNPMHQLLRHF
ANQRWNPQHSLLSHF

SEQ ID NO: 215874 - protein, 15 aa, Artificial Sequence
  Description of Artificial Sequence: Synthetic peptide
  Seed: ANQRLNPMHQLLRHF
ANQRWNPQHSLLTHF

SEQ ID NO: 215875 - protein, 15 aa, Artificial Sequence
  Description of Artificial Sequence: Synthetic peptide
  Seed: ANQRLNPMHQLLRHF
ANQRWNPQHSLLVHF

SEQ ID NO: 215876 - protein, 15 aa, Artificial Sequence
  Description of Artificial Sequence: Synthetic peptide
  Seed: ANQRLNPMHQLLRHF
ANQRWNPQHTLLIHF

SEQ ID NO: 215877 - protein, 15 aa, Artificial Sequence
  Description of Artificial Sequence: Synthetic peptide
  Seed: ANQRLNPMHQLLRHF
ANQRWNPQHTLLLHF

SEQ ID NO: 215878 - protein, 15 aa, Artificial Sequence
  Description of Artificial Sequence: Synthetic peptide
  Seed: ANQRLNPMHQLLRHF
ANQRWNPQHTLLVHF

SEQ ID NO: 215879 - protein, 15 aa, Artificial Sequence
  Description of Artificial Sequence: Synthetic peptide
  Seed: ANQRLNPMHQLLRHF
ANQRWNPSHALLAHF

SEQ ID NO: 215880 - protein, 15 aa, Artificial Sequence
  Description of Artificial Sequence: Synthetic peptide
  Seed: ANQRLNPMHQLLRHF
ANQRWNPSHALLIHF

SEQ ID NO: 215881 - protein, 15 aa, Artificial Sequence
  Description of Artificial Sequence: Synthetic peptide
  Seed: ANQRLNPMHQLLRHF
ANQRWNPSHALLLHF

SEQ ID NO: 215882 - protein, 15 aa, Artificial Sequence
  Description of Artificial Sequence: Synthetic peptide
  Seed: ANQRLNPMHQLLRHF
ANQRWNPSHALLMHF

SEQ ID NO: 215883 - protein, 15 aa, Artificial Sequence
  Description of Artificial Sequence: Synthetic peptide
  Seed: ANQRLNPMHQLLRHF
ANQRWNPSHALLSHF

SEQ ID NO: 215884 - protein, 15 aa, Artificial Sequence
  Description of Artificial Sequence: Synthetic peptide
  Seed: ANQRLNPMHQLLRHF
ANQRWNPSHALLTHF

SEQ ID NO: 215885 - protein, 15 aa, Artificial Sequence
  Description of Artificial Sequence: Synthetic peptide
  Seed: ANQRLNPMHQLLRHF
ANQRWNPSHALLVHF

SEQ ID NO: 215886 - protein, 15 aa, Artificial Sequence
  Description of Artificial Sequence: Synthetic peptide
  Seed: ANQRLNPMHQLLRHF
ANQRWNPSHFLLIHF

SEQ ID NO: 215887 - protein, 15 aa, Artificial Sequence
  Description of Artificial Sequence: Synthetic peptide
  Seed: ANQRLNPMHQLLRHF
ANQRWNPSHFLLLHF

SEQ ID NO: 215888 - protein, 15 aa, Artificial Sequence
  Description of Artificial Sequence: Synthetic peptide
  Seed: ANQRLNPMHQLLRHF
ANQRWNPSHFLLVHF

SEQ ID NO: 215889 - protein, 15 aa, Artificial Sequence
  Description of Artificial Sequence: Synthetic peptide
  Seed: ANQRLNPMHQLLRHF
ANQRWNPSHGLLAHF

SEQ ID NO: 215890 - protein, 15 aa, Artificial Sequence
  Description of Artificial Sequence: Synthetic peptide
  Seed: ANQRLNPMHQLLRHF
ANQRWNPSHGLLIHF

SEQ ID NO: 215891 - protein, 15 aa, Artificial Sequence
  Description of Artificial Sequence: Synthetic peptide
  Seed: ANQRLNPMHQLLRHF
ANQRWNPSHGLLLHF

SEQ ID NO: 215892 - protein, 15 aa, Artificial Sequence
  Description of Artificial Sequence: Synthetic peptide
  Seed: ANQRLNPMHQLLRHF
ANQRWNPSHGLLVHF

SEQ ID NO: 215893 - protein, 15 aa, Artificial Sequence
  Description of Artificial Sequence: Synthetic peptide
  Seed: ANQRLNPMHQLLRHF
ANQRWNPSHPLLIHF

SEQ ID NO: 215894 - protein, 15 aa, Artificial Sequence
  Description of Artificial Sequence: Synthetic peptide
  Seed: ANQRLNPMHQLLRHF
ANQRWNPSHPLLLHF

SEQ ID NO: 215895 - protein, 15 aa, Artificial Sequence
  Description of Artificial Sequence: Synthetic peptide
  Seed: ANQRLNPMHQLLRHF
ANQRWNPSHPLLVHF

SEQ ID NO: 215896 - protein, 15 aa, Artificial Sequence
  Description of Artificial Sequence: Synthetic peptide
  Seed: ANQRLNPMHQLLRHF
ANQRWNPSHSLLAHF

SEQ ID NO: 215897 - protein, 15 aa, Artificial Sequence
  Description of Artificial Sequence: Synthetic peptide
  Seed: ANQRLNPMHQLLRHF
ANQRWNPSHSLLIHF

SEQ ID NO: 215898 - protein, 15 aa, Artificial Sequence
  Description of Artificial Sequence: Synthetic peptide
  Seed: ANQRLNPMHQLLRHF
ANQRWNPSHSLLLHF

SEQ ID NO: 215899 - protein, 15 aa, Artificial Sequence
  Description of Artificial Sequence: Synthetic peptide
  Seed: ANQRLNPMHQLLRHF
ANQRWNPSHSLLVHF

SEQ ID NO: 215900 - protein, 15 aa, Artificial Sequence
  Description of Artificial Sequence: Synthetic peptide
  Seed: ANQRLNPMHQLLRHF
ANQRWNPTHALLAHF

SEQ ID NO: 215901 - protein, 15 aa, Artificial Sequence
  Description of Artificial Sequence: Synthetic peptide
  Seed: ANQRLNPMHQLLRHF
ANQRWNPTHALLIHF

SEQ ID NO: 215902 - protein, 15 aa, Artificial Sequence
  Description of Artificial Sequence: Synthetic peptide
  Seed: ANQRLNPMHQLLRHF
ANQRWNPTHALLLHF

SEQ ID NO: 215903 - protein, 15 aa, Artificial Sequence
  Description of Artificial Sequence: Synthetic peptide
  Seed: ANQRLNPMHQLLRHF
ANQRWNPTHALLVHF

SEQ ID NO: 215904 - protein, 15 aa, Artificial Sequence
  Description of Artificial Sequence: Synthetic peptide
  Seed: ANQRLNPMHQLLRHF
ANQRWNPTHFLLFHF

SEQ ID NO: 215905 - protein, 15 aa, Artificial Sequence
  Description of Artificial Sequence: Synthetic peptide
  Seed: ANQRLNPMHQLLRHF
ANQRWNPTHFLLIHF

SEQ ID NO: 215906 - protein, 15 aa, Artificial Sequence
  Description of Artificial Sequence: Synthetic peptide
  Seed: ANQRLNPMHQLLRHF
ANQRWNPTHFLLLHF

SEQ ID NO: 215907 - protein, 15 aa, Artificial Sequence
  Description of Artificial Sequence: Synthetic peptide
  Seed: ANQRLNPMHQLLRHF
ANQRWNPTHFLLMHF

SEQ ID NO: 215908 - protein, 15 aa, Artificial Sequence
  Description of Artificial Sequence: Synthetic peptide
  Seed: ANQRLNPMHQLLRHF
ANQRWNPTHFLLVHF

SEQ ID NO: 215909 - protein, 15 aa, Artificial Sequence
  Description of Artificial Sequence: Synthetic peptide
  Seed: ANQRLNPMHQLLRHF
ANQRWNPTHGLLVHF

SEQ ID NO: 215910 - protein, 15 aa, Artificial Sequence
  Description of Artificial Sequence: Synthetic peptide
  Seed: ANQRLNPMHQLLRHF
ANQRWNPTHSLLVHF

SEQ ID NO: 215911 - protein, 15 aa, Artificial Sequence
  Description of Artificial Sequence: Synthetic peptide
  Seed: ANQRLNPMHQLLRHF
ANQRWNPVHALLAHF

SEQ ID NO: 215912 - protein, 15 aa, Artificial Sequence
  Description of Artificial Sequence: Synthetic peptide
  Seed: ANQRLNPMHQLLRHF
ANQRWNPVHALLIHF

SEQ ID NO: 215913 - protein, 15 aa, Artificial Sequence
  Description of Artificial Sequence: Synthetic peptide
  Seed: ANQRLNPMHQLLRHF
ANQRWNPVHALLLHF

SEQ ID NO: 215914 - protein, 15 aa, Artificial Sequence
  Description of Artificial Sequence: Synthetic peptide
  Seed: ANQRLNPMHQLLRHF
ANQRWNPVHALLMHF

SEQ ID NO: 215915 - protein, 15 aa, Artificial Sequence
  Description of Artificial Sequence: Synthetic peptide
  Seed: ANQRLNPMHQLLRHF
ANQRWNPVHALLNHF

SEQ ID NO: 215916 - protein, 15 aa, Artificial Sequence
  Description of Artificial Sequence: Synthetic peptide
  Seed: ANQRLNPMHQLLRHF
ANQRWNPVHALLSHF

SEQ ID NO: 215917 - protein, 15 aa, Artificial Sequence
  Description of Artificial Sequence: Synthetic peptide
  Seed: ANQRLNPMHQLLRHF
ANQRWNPVHALLTHF

SEQ ID NO: 215918 - protein, 15 aa, Artificial Sequence
  Description of Artificial Sequence: Synthetic peptide
  Seed: ANQRLNPMHQLLRHF
ANQRWNPVHALLVHF

SEQ ID NO: 215919 - protein, 15 aa, Artificial Sequence
  Description of Artificial Sequence: Synthetic peptide
  Seed: ANQRLNPMHQLLRHF
ANQRWNPVHFLLFHF

SEQ ID NO: 215920 - protein, 15 aa, Artificial Sequence
  Description of Artificial Sequence: Synthetic peptide
  Seed: ANQRLNPMHQLLRHF
ANQRWNPVHFLLIHF

SEQ ID NO: 215921 - protein, 15 aa, Artificial Sequence
  Description of Artificial Sequence: Synthetic peptide
  Seed: ANQRLNPMHQLLRHF
ANQRWNPVHFLLLHF

SEQ ID NO: 215922 - protein, 15 aa, Artificial Sequence
  Description of Artificial Sequence: Synthetic peptide
  Seed: ANQRLNPMHQLLRHF
ANQRWNPVHFLLMHF

SEQ ID NO: 215923 - protein, 15 aa, Artificial Sequence
  Description of Artificial Sequence: Synthetic peptide
  Seed: ANQRLNPMHQLLRHF
ANQRWNPVHFLLVHF

SEQ ID NO: 215924 - protein, 15 aa, Artificial Sequence
  Description of Artificial Sequence: Synthetic peptide
  Seed: ANQRLNPMHQLLRHF
ANQRWNPVHGLLAHF

SEQ ID NO: 215925 - protein, 15 aa, Artificial Sequence
  Description of Artificial Sequence: Synthetic peptide
  Seed: ANQRLNPMHQLLRHF
ANQRWNPVHGLLIHF

SEQ ID NO: 215926 - protein, 15 aa, Artificial Sequence
  Description of Artificial Sequence: Synthetic peptide
  Seed: ANQRLNPMHQLLRHF
ANQRWNPVHGLLLHF

SEQ ID NO: 215927 - protein, 15 aa, Artificial Sequence
  Description of Artificial Sequence: Synthetic peptide
  Seed: ANQRLNPMHQLLRHF
ANQRWNPVHGLLMHF

SEQ ID NO: 215928 - protein, 15 aa, Artificial Sequence
  Description of Artificial Sequence: Synthetic peptide
  Seed: ANQRLNPMHQLLRHF
ANQRWNPVHGLLSHF

SEQ ID NO: 215929 - protein, 15 aa, Artificial Sequence
  Description of Artificial Sequence: Synthetic peptide
  Seed: ANQRLNPMHQLLRHF
ANQRWNPVHGLLTHF

SEQ ID NO: 215930 - protein, 15 aa, Artificial Sequence
  Description of Artificial Sequence: Synthetic peptide
  Seed: ANQRLNPMHQLLRHF
ANQRWNPVHGLLVHF

SEQ ID NO: 215931 - protein, 15 aa, Artificial Sequence
  Description of Artificial Sequence: Synthetic peptide
  Seed: ANQRLNPMHQLLRHF
ANQRWNPVHKLLAHF

SEQ ID NO: 215932 - protein, 15 aa, Artificial Sequence
  Description of Artificial Sequence: Synthetic peptide
  Seed: ANQRLNPMHQLLRHF
ANQRWNPVHKLLSHF

SEQ ID NO: 215933 - protein, 15 aa, Artificial Sequence
  Description of Artificial Sequence: Synthetic peptide
  Seed: ANQRLNPMHQLLRHF
ANQRWNPVHNLLAHF

SEQ ID NO: 215934 - protein, 15 aa, Artificial Sequence
  Description of Artificial Sequence: Synthetic peptide
  Seed: ANQRLNPMHQLLRHF
ANQRWNPVHNLLIHF

SEQ ID NO: 215935 - protein, 15 aa, Artificial Sequence
  Description of Artificial Sequence: Synthetic peptide
  Seed: ANQRLNPMHQLLRHF
ANQRWNPVHNLLLHF

SEQ ID NO: 215936 - protein, 15 aa, Artificial Sequence
  Description of Artificial Sequence: Synthetic peptide
  Seed: ANQRLNPMHQLLRHF
ANQRWNPVHNLLVHF

SEQ ID NO: 215937 - protein, 15 aa, Artificial Sequence
  Description of Artificial Sequence: Synthetic peptide
  Seed: ANQRLNPMHQLLRHF
ANQRWNPVHPLLAHF

SEQ ID NO: 215938 - protein, 15 aa, Artificial Sequence
  Description of Artificial Sequence: Synthetic peptide
  Seed: ANQRLNPMHQLLRHF
ANQRWNPVHPLLIHF

SEQ ID NO: 215939 - protein, 15 aa, Artificial Sequence
  Description of Artificial Sequence: Synthetic peptide
  Seed: ANQRLNPMHQLLRHF
ANQRWNPVHPLLLHF

SEQ ID NO: 215940 - protein, 15 aa, Artificial Sequence
  Description of Artificial Sequence: Synthetic peptide
  Seed: ANQRLNPMHQLLRHF
ANQRWNPVHPLLTHF

SEQ ID NO: 215941 - protein, 15 aa, Artificial Sequence
  Description of Artificial Sequence: Synthetic peptide
  Seed: ANQRLNPMHQLLRHF
ANQRWNPVHPLLVHF

SEQ ID NO: 215942 - protein, 15 aa, Artificial Sequence
  Description of Artificial Sequence: Synthetic peptide
  Seed: ANQRLNPMHQLLRHF
ANQRWNPVHRLLAHF

SEQ ID NO: 215943 - protein, 15 aa, Artificial Sequence
  Description of Artificial Sequence: Synthetic peptide
  Seed: ANQRLNPMHQLLRHF
ANQRWNPVHRLLHHF

SEQ ID NO: 215944 - protein, 15 aa, Artificial Sequence
  Description of Artificial Sequence: Synthetic peptide
  Seed: ANQRLNPMHQLLRHF
ANQRWNPVHRLLSHF

SEQ ID NO: 215945 - protein, 15 aa, Artificial Sequence
  Description of Artificial Sequence: Synthetic peptide
  Seed: ANQRLNPMHQLLRHF
ANQRWNPVHSLLAHF

SEQ ID NO: 215946 - protein, 15 aa, Artificial Sequence
  Description of Artificial Sequence: Synthetic peptide
  Seed: ANQRLNPMHQLLRHF
ANQRWNPVHSLLIHF

SEQ ID NO: 215947 - protein, 15 aa, Artificial Sequence
  Description of Artificial Sequence: Synthetic peptide
  Seed: ANQRLNPMHQLLRHF
ANQRWNPVHSLLLHF

SEQ ID NO: 215948 - protein, 15 aa, Artificial Sequence
  Description of Artificial Sequence: Synthetic peptide
  Seed: ANQRLNPMHQLLRHF
ANQRWNPVHSLLMHF

SEQ ID NO: 215949 - protein, 15 aa, Artificial Sequence
  Description of Artificial Sequence: Synthetic peptide
  Seed: ANQRLNPMHQLLRHF
ANQRWNPVHSLLSHF

SEQ ID NO: 215950 - protein, 15 aa, Artificial Sequence
  Description of Artificial Sequence: Synthetic peptide
  Seed: ANQRLNPMHQLLRHF
ANQRWNPVHSLLTHF

SEQ ID NO: 215951 - protein, 15 aa, Artificial Sequence
  Description of Artificial Sequence: Synthetic peptide
  Seed: ANQRLNPMHQLLRHF
ANQRWNPVHSLLVHF

SEQ ID NO: 215952 - protein, 15 aa, Artificial Sequence
  Description of Artificial Sequence: Synthetic peptide
  Seed: ANQRLNPMHQLLRHF
ANQRWNPVHTLLAHF

SEQ ID NO: 215953 - protein, 15 aa, Artificial Sequence
  Description of Artificial Sequence: Synthetic peptide
  Seed: ANQRLNPMHQLLRHF
ANQRWNPVHTLLIHF

SEQ ID NO: 215954 - protein, 15 aa, Artificial Sequence
  Description of Artificial Sequence: Synthetic peptide
  Seed: ANQRLNPMHQLLRHF
ANQRWNPVHTLLLHF

SEQ ID NO: 215955 - protein, 15 aa, Artificial Sequence
  Description of Artificial Sequence: Synthetic peptide
  Seed: ANQRLNPMHQLLRHF
ANQRWNPVHTLLNHF

SEQ ID NO: 215956 - protein, 15 aa, Artificial Sequence
  Description of Artificial Sequence: Synthetic peptide
  Seed: ANQRLNPMHQLLRHF
ANQRWNPVHTLLVHF

SEQ ID NO: 215957 - protein, 15 aa, Artificial Sequence
  Description of Artificial Sequence: Synthetic peptide
  Seed: ANQRLNPMHQLLRHF
ANQRYNPAHALLAHF

SEQ ID NO: 215958 - protein, 15 aa, Artificial Sequence
  Description of Artificial Sequence: Synthetic peptide
  Seed: ANQRLNPMHQLLRHF
ANQRYNPAHALLCHF

SEQ ID NO: 215959 - protein, 15 aa, Artificial Sequence
  Description of Artificial Sequence: Synthetic peptide
  Seed: ANQRLNPMHQLLRHF
ANQRYNPAHALLFHF

SEQ ID NO: 215960 - protein, 15 aa, Artificial Sequence
  Description of Artificial Sequence: Synthetic peptide
  Seed: ANQRLNPMHQLLRHF
ANQRYNPAHALLGHF

SEQ ID NO: 215961 - protein, 15 aa, Artificial Sequence
  Description of Artificial Sequence: Synthetic peptide
  Seed: ANQRLNPMHQLLRHF
ANQRYNPAHALLHHF

SEQ ID NO: 215962 - protein, 15 aa, Artificial Sequence
  Description of Artificial Sequence: Synthetic peptide
  Seed: ANQRLNPMHQLLRHF
ANQRYNPAHALLIHF

SEQ ID NO: 215963 - protein, 15 aa, Artificial Sequence
  Description of Artificial Sequence: Synthetic peptide
  Seed: ANQRLNPMHQLLRHF
ANQRYNPAHALLKHF

SEQ ID NO: 215964 - protein, 15 aa, Artificial Sequence
  Description of Artificial Sequence: Synthetic peptide
  Seed: ANQRLNPMHQLLRHF
ANQRYNPAHALLLHF

SEQ ID NO: 215965 - protein, 15 aa, Artificial Sequence
  Description of Artificial Sequence: Synthetic peptide
  Seed: ANQRLNPMHQLLRHF
ANQRYNPAHALLMHF

SEQ ID NO: 215966 - protein, 15 aa, Artificial Sequence
  Description of Artificial Sequence: Synthetic peptide
  Seed: ANQRLNPMHQLLRHF
ANQRYNPAHALLNHF

SEQ ID NO: 215967 - protein, 15 aa, Artificial Sequence
  Description of Artificial Sequence: Synthetic peptide
  Seed: ANQRLNPMHQLLRHF
ANQRYNPAHALLPHF

SEQ ID NO: 215968 - protein, 15 aa, Artificial Sequence
  Description of Artificial Sequence: Synthetic peptide
  Seed: ANQRLNPMHQLLRHF
ANQRYNPAHALLQHF

SEQ ID NO: 215969 - protein, 15 aa, Artificial Sequence
  Description of Artificial Sequence: Synthetic peptide
  Seed: ANQRLNPMHQLLRHF
ANQRYNPAHALLRHF

SEQ ID NO: 215970 - protein, 15 aa, Artificial Sequence
  Description of Artificial Sequence: Synthetic peptide
  Seed: ANQRLNPMHQLLRHF
ANQRYNPAHALLSHF

SEQ ID NO: 215971 - protein, 15 aa, Artificial Sequence
  Description of Artificial Sequence: Synthetic peptide
  Seed: ANQRLNPMHQLLRHF
ANQRYNPAHALLTHF

SEQ ID NO: 215972 - protein, 15 aa, Artificial Sequence
  Description of Artificial Sequence: Synthetic peptide
  Seed: ANQRLNPMHQLLRHF
ANQRYNPAHALLVHF

SEQ ID NO: 215973 - protein, 15 aa, Artificial Sequence
  Description of Artificial Sequence: Synthetic peptide
  Seed: ANQRLNPMHQLLRHF
ANQRYNPAHALLWHF

SEQ ID NO: 215974 - protein, 15 aa, Artificial Sequence
  Description of Artificial Sequence: Synthetic peptide
  Seed: ANQRLNPMHQLLRHF
ANQRYNPAHALLYHF

SEQ ID NO: 215975 - protein, 15 aa, Artificial Sequence
  Description of Artificial Sequence: Synthetic peptide
  Seed: ANQRLNPMHQLLRHF
ANQRYNPAHFLLFHF

SEQ ID NO: 215976 - protein, 15 aa, Artificial Sequence
  Description of Artificial Sequence: Synthetic peptide
  Seed: ANQRLNPMHQLLRHF
ANQRYNPAHFLLIHF

SEQ ID NO: 215977 - protein, 15 aa, Artificial Sequence
  Description of Artificial Sequence: Synthetic peptide
  Seed: ANQRLNPMHQLLRHF
ANQRYNPAHFLLLHF

SEQ ID NO: 215978 - protein, 15 aa, Artificial Sequence
  Description of Artificial Sequence: Synthetic peptide
  Seed: ANQRLNPMHQLLRHF
ANQRYNPAHFLLMHF

SEQ ID NO: 215979 - protein, 15 aa, Artificial Sequence
  Description of Artificial Sequence: Synthetic peptide
  Seed: ANQRLNPMHQLLRHF
ANQRYNPAHFLLVHF

SEQ ID NO: 215980 - protein, 15 aa, Artificial Sequence
  Description of Artificial Sequence: Synthetic peptide
  Seed: ANQRLNPMHQLLRHF
ANQRYNPAHGLLAHF

SEQ ID NO: 215981 - protein, 15 aa, Artificial Sequence
  Description of Artificial Sequence: Synthetic peptide
  Seed: ANQRLNPMHQLLRHF
ANQRYNPAHGLLCHF

SEQ ID NO: 215982 - protein, 15 aa, Artificial Sequence
  Description of Artificial Sequence: Synthetic peptide
  Seed: ANQRLNPMHQLLRHF
ANQRYNPAHGLLFHF

SEQ ID NO: 215983 - protein, 15 aa, Artificial Sequence
  Description of Artificial Sequence: Synthetic peptide
  Seed: ANQRLNPMHQLLRHF
ANQRYNPAHGLLGHF

SEQ ID NO: 215984 - protein, 15 aa, Artificial Sequence
  Description of Artificial Sequence: Synthetic peptide
  Seed: ANQRLNPMHQLLRHF
ANQRYNPAHGLLIHF

SEQ ID NO: 215985 - protein, 15 aa, Artificial Sequence
  Description of Artificial Sequence: Synthetic peptide
  Seed: ANQRLNPMHQLLRHF
ANQRYNPAHGLLLHF

SEQ ID NO: 215986 - protein, 15 aa, Artificial Sequence
  Description of Artificial Sequence: Synthetic peptide
  Seed: ANQRLNPMHQLLRHF
ANQRYNPAHGLLMHF

SEQ ID NO: 215987 - protein, 15 aa, Artificial Sequence
  Description of Artificial Sequence: Synthetic peptide
  Seed: ANQRLNPMHQLLRHF
ANQRYNPAHGLLNHF

SEQ ID NO: 215988 - protein, 15 aa, Artificial Sequence
  Description of Artificial Sequence: Synthetic peptide
  Seed: ANQRLNPMHQLLRHF
ANQRYNPAHGLLSHF

SEQ ID NO: 215989 - protein, 15 aa, Artificial Sequence
  Description of Artificial Sequence: Synthetic peptide
  Seed: ANQRLNPMHQLLRHF
ANQRYNPAHGLLTHF

SEQ ID NO: 215990 - protein, 15 aa, Artificial Sequence
  Description of Artificial Sequence: Synthetic peptide
  Seed: ANQRLNPMHQLLRHF
ANQRYNPAHGLLVHF

SEQ ID NO: 215991 - protein, 15 aa, Artificial Sequence
  Description of Artificial Sequence: Synthetic peptide
  Seed: ANQRLNPMHQLLRHF
ANQRYNPAHHLLLHF

SEQ ID NO: 215992 - protein, 15 aa, Artificial Sequence
  Description of Artificial Sequence: Synthetic peptide
  Seed: ANQRLNPMHQLLRHF
ANQRYNPAHILLAHF

SEQ ID NO: 215993 - protein, 15 aa, Artificial Sequence
  Description of Artificial Sequence: Synthetic peptide
  Seed: ANQRLNPMHQLLRHF
ANQRYNPAHILLIHF

SEQ ID NO: 215994 - protein, 15 aa, Artificial Sequence
  Description of Artificial Sequence: Synthetic peptide
  Seed: ANQRLNPMHQLLRHF
ANQRYNPAHILLLHF

SEQ ID NO: 215995 - protein, 15 aa, Artificial Sequence
  Description of Artificial Sequence: Synthetic peptide
  Seed: ANQRLNPMHQLLRHF
ANQRYNPAHILLMHF

SEQ ID NO: 215996 - protein, 15 aa, Artificial Sequence
  Description of Artificial Sequence: Synthetic peptide
  Seed: ANQRLNPMHQLLRHF
ANQRYNPAHILLNHF

SEQ ID NO: 215997 - protein, 15 aa, Artificial Sequence
  Description of Artificial Sequence: Synthetic peptide
  Seed: ANQRLNPMHQLLRHF
ANQRYNPAHILLSHF

SEQ ID NO: 215998 - protein, 15 aa, Artificial Sequence
  Description of Artificial Sequence: Synthetic peptide
  Seed: ANQRLNPMHQLLRHF
ANQRYNPAHILLTHF

SEQ ID NO: 215999 - protein, 15 aa, Artificial Sequence
  Description of Artificial Sequence: Synthetic peptide
  Seed: ANQRLNPMHQLLRHF
ANQRYNPAHILLVHF

SEQ ID NO: 216000 - protein, 15 aa, Artificial Sequence
  Description of Artificial Sequence: Synthetic peptide
  Seed: ANQRLNPMHQLLRHF
ANQRYNPAHKLLAHF

SEQ ID NO: 216001 - protein, 15 aa, Artificial Sequence
  Description of Artificial Sequence: Synthetic peptide
  Seed: ANQRLNPMHQLLRHF
ANQRYNPAHKLLSHF

SEQ ID NO: 216002 - protein, 15 aa, Artificial Sequence
  Description of Artificial Sequence: Synthetic peptide
  Seed: ANQRLNPMHQLLRHF
ANQRYNPAHKLLTHF

SEQ ID NO: 216003 - protein, 15 aa, Artificial Sequence
  Description of Artificial Sequence: Synthetic peptide
  Seed: ANQRLNPMHQLLRHF
ANQRYNPAHMLLIHF

SEQ ID NO: 216004 - protein, 15 aa, Artificial Sequence
  Description of Artificial Sequence: Synthetic peptide
  Seed: ANQRLNPMHQLLRHF
ANQRYNPAHMLLLHF

SEQ ID NO: 216005 - protein, 15 aa, Artificial Sequence
  Description of Artificial Sequence: Synthetic peptide
  Seed: ANQRLNPMHQLLRHF
ANQRYNPAHMLLVHF

SEQ ID NO: 216006 - protein, 15 aa, Artificial Sequence
  Description of Artificial Sequence: Synthetic peptide
  Seed: ANQRLNPMHQLLRHF
ANQRYNPAHNLLAHF

SEQ ID NO: 216007 - protein, 15 aa, Artificial Sequence
  Description of Artificial Sequence: Synthetic peptide
  Seed: ANQRLNPMHQLLRHF
ANQRYNPAHNLLGHF

SEQ ID NO: 216008 - protein, 15 aa, Artificial Sequence
  Description of Artificial Sequence: Synthetic peptide
  Seed: ANQRLNPMHQLLRHF
ANQRYNPAHNLLIHF

SEQ ID NO: 216009 - protein, 15 aa, Artificial Sequence
  Description of Artificial Sequence: Synthetic peptide
  Seed: ANQRLNPMHQLLRHF
ANQRYNPAHNLLLHF

SEQ ID NO: 216010 - protein, 15 aa, Artificial Sequence
  Description of Artificial Sequence: Synthetic peptide
  Seed: ANQRLNPMHQLLRHF
ANQRYNPAHNLLMHF

SEQ ID NO: 216011 - protein, 15 aa, Artificial Sequence
  Description of Artificial Sequence: Synthetic peptide
  Seed: ANQRLNPMHQLLRHF
ANQRYNPAHNLLNHF

SEQ ID NO: 216012 - protein, 15 aa, Artificial Sequence
  Description of Artificial Sequence: Synthetic peptide
  Seed: ANQRLNPMHQLLRHF
ANQRYNPAHNLLSHF

SEQ ID NO: 216013 - protein, 15 aa, Artificial Sequence
  Description of Artificial Sequence: Synthetic peptide
  Seed: ANQRLNPMHQLLRHF
ANQRYNPAHNLLTHF

SEQ ID NO: 216014 - protein, 15 aa, Artificial Sequence
  Description of Artificial Sequence: Synthetic peptide
  Seed: ANQRLNPMHQLLRHF
ANQRYNPAHNLLVHF

SEQ ID NO: 216015 - protein, 15 aa, Artificial Sequence
  Description of Artificial Sequence: Synthetic peptide
  Seed: ANQRLNPMHQLLRHF
ANQRYNPAHPLLAHF

SEQ ID NO: 216016 - protein, 15 aa, Artificial Sequence
  Description of Artificial Sequence: Synthetic peptide
  Seed: ANQRLNPMHQLLRHF
ANQRYNPAHPLLFHF

SEQ ID NO: 216017 - protein, 15 aa, Artificial Sequence
  Description of Artificial Sequence: Synthetic peptide
  Seed: ANQRLNPMHQLLRHF
ANQRYNPAHPLLGHF

SEQ ID NO: 216018 - protein, 15 aa, Artificial Sequence
  Description of Artificial Sequence: Synthetic peptide
  Seed: ANQRLNPMHQLLRHF
ANQRYNPAHPLLHHF

SEQ ID NO: 216019 - protein, 15 aa, Artificial Sequence
  Description of Artificial Sequence: Synthetic peptide
  Seed: ANQRLNPMHQLLRHF
ANQRYNPAHPLLIHF

SEQ ID NO: 216020 - protein, 15 aa, Artificial Sequence
  Description of Artificial Sequence: Synthetic peptide
  Seed: ANQRLNPMHQLLRHF
ANQRYNPAHPLLLHF

SEQ ID NO: 216021 - protein, 15 aa, Artificial Sequence
  Description of Artificial Sequence: Synthetic peptide
  Seed: ANQRLNPMHQLLRHF
ANQRYNPAHPLLMHF

SEQ ID NO: 216022 - protein, 15 aa, Artificial Sequence
  Description of Artificial Sequence: Synthetic peptide
  Seed: ANQRLNPMHQLLRHF
ANQRYNPAHPLLNHF

SEQ ID NO: 216023 - protein, 15 aa, Artificial Sequence
  Description of Artificial Sequence: Synthetic peptide
  Seed: ANQRLNPMHQLLRHF
ANQRYNPAHPLLQHF

SEQ ID NO: 216024 - protein, 15 aa, Artificial Sequence
  Description of Artificial Sequence: Synthetic peptide
  Seed: ANQRLNPMHQLLRHF
ANQRYNPAHPLLSHF

SEQ ID NO: 216025 - protein, 15 aa, Artificial Sequence
  Description of Artificial Sequence: Synthetic peptide
  Seed: ANQRLNPMHQLLRHF
ANQRYNPAHPLLTHF

SEQ ID NO: 216026 - protein, 15 aa, Artificial Sequence
  Description of Artificial Sequence: Synthetic peptide
  Seed: ANQRLNPMHQLLRHF
ANQRYNPAHPLLVHF

SEQ ID NO: 216027 - protein, 15 aa, Artificial Sequence
  Description of Artificial Sequence: Synthetic peptide
  Seed: ANQRLNPMHQLLRHF
ANQRYNPAHQLLLHF

SEQ ID NO: 216028 - protein, 15 aa, Artificial Sequence
  Description of Artificial Sequence: Synthetic peptide
  Seed: ANQRLNPMHQLLRHF
ANQRYNPAHRLLAHF

SEQ ID NO: 216029 - protein, 15 aa, Artificial Sequence
  Description of Artificial Sequence: Synthetic peptide
  Seed: ANQRLNPMHQLLRHF
ANQRYNPAHRLLGHF

SEQ ID NO: 216030 - protein, 15 aa, Artificial Sequence
  Description of Artificial Sequence: Synthetic peptide
  Seed: ANQRLNPMHQLLRHF
ANQRYNPAHRLLHHF

SEQ ID NO: 216031 - protein, 15 aa, Artificial Sequence
  Description of Artificial Sequence: Synthetic peptide
  Seed: ANQRLNPMHQLLRHF
ANQRYNPAHRLLQHF

SEQ ID NO: 216032 - protein, 15 aa, Artificial Sequence
  Description of Artificial Sequence: Synthetic peptide
  Seed: ANQRLNPMHQLLRHF
ANQRYNPAHRLLSHF

SEQ ID NO: 216033 - protein, 15 aa, Artificial Sequence
  Description of Artificial Sequence: Synthetic peptide
  Seed: ANQRLNPMHQLLRHF
ANQRYNPAHRLLTHF

SEQ ID NO: 216034 - protein, 15 aa, Artificial Sequence
  Description of Artificial Sequence: Synthetic peptide
  Seed: ANQRLNPMHQLLRHF
ANQRYNPAHSLLAHF

SEQ ID NO: 216035 - protein, 15 aa, Artificial Sequence
  Description of Artificial Sequence: Synthetic peptide
  Seed: ANQRLNPMHQLLRHF
ANQRYNPAHSLLCHF

SEQ ID NO: 216036 - protein, 15 aa, Artificial Sequence
  Description of Artificial Sequence: Synthetic peptide
  Seed: ANQRLNPMHQLLRHF
ANQRYNPAHSLLFHF

SEQ ID NO: 216037 - protein, 15 aa, Artificial Sequence
  Description of Artificial Sequence: Synthetic peptide
  Seed: ANQRLNPMHQLLRHF
ANQRYNPAHSLLGHF

SEQ ID NO: 216038 - protein, 15 aa, Artificial Sequence
  Description of Artificial Sequence: Synthetic peptide
  Seed: ANQRLNPMHQLLRHF
ANQRYNPAHSLLHHF

SEQ ID NO: 216039 - protein, 15 aa, Artificial Sequence
  Description of Artificial Sequence: Synthetic peptide
  Seed: ANQRLNPMHQLLRHF
ANQRYNPAHSLLIHF

SEQ ID NO: 216040 - protein, 15 aa, Artificial Sequence
  Description of Artificial Sequence: Synthetic peptide
  Seed: ANQRLNPMHQLLRHF
ANQRYNPAHSLLLHF

SEQ ID NO: 216041 - protein, 15 aa, Artificial Sequence
  Description of Artificial Sequence: Synthetic peptide
  Seed: ANQRLNPMHQLLRHF
ANQRYNPAHSLLMHF

SEQ ID NO: 216042 - protein, 15 aa, Artificial Sequence
  Description of Artificial Sequence: Synthetic peptide
  Seed: ANQRLNPMHQLLRHF
ANQRYNPAHSLLNHF

SEQ ID NO: 216043 - protein, 15 aa, Artificial Sequence
  Description of Artificial Sequence: Synthetic peptide
  Seed: ANQRLNPMHQLLRHF
ANQRYNPAHSLLPHF

SEQ ID NO: 216044 - protein, 15 aa, Artificial Sequence
  Description of Artificial Sequence: Synthetic peptide
  Seed: ANQRLNPMHQLLRHF
ANQRYNPAHSLLSHF

SEQ ID NO: 216045 - protein, 15 aa, Artificial Sequence
  Description of Artificial Sequence: Synthetic peptide
  Seed: ANQRLNPMHQLLRHF
ANQRYNPAHSLLTHF

SEQ ID NO: 216046 - protein, 15 aa, Artificial Sequence
  Description of Artificial Sequence: Synthetic peptide
  Seed: ANQRLNPMHQLLRHF
ANQRYNPAHSLLVHF

SEQ ID NO: 216047 - protein, 15 aa, Artificial Sequence
  Description of Artificial Sequence: Synthetic peptide
  Seed: ANQRLNPMHQLLRHF
ANQRYNPAHTLLAHF

SEQ ID NO: 216048 - protein, 15 aa, Artificial Sequence
  Description of Artificial Sequence: Synthetic peptide
  Seed: ANQRLNPMHQLLRHF
ANQRYNPAHTLLGHF

SEQ ID NO: 216049 - protein, 15 aa, Artificial Sequence
  Description of Artificial Sequence: Synthetic peptide
  Seed: ANQRLNPMHQLLRHF
ANQRYNPAHTLLIHF

SEQ ID NO: 216050 - protein, 15 aa, Artificial Sequence
  Description of Artificial Sequence: Synthetic peptide
  Seed: ANQRLNPMHQLLRHF
ANQRYNPAHTLLLHF

SEQ ID NO: 216051 - protein, 15 aa, Artificial Sequence
  Description of Artificial Sequence: Synthetic peptide
  Seed: ANQRLNPMHQLLRHF
ANQRYNPAHTLLMHF

SEQ ID NO: 216052 - protein, 15 aa, Artificial Sequence
  Description of Artificial Sequence: Synthetic peptide
  Seed: ANQRLNPMHQLLRHF
ANQRYNPAHTLLNHF

SEQ ID NO: 216053 - protein, 15 aa, Artificial Sequence
  Description of Artificial Sequence: Synthetic peptide
  Seed: ANQRLNPMHQLLRHF
ANQRYNPAHTLLSHF

SEQ ID NO: 216054 - protein, 15 aa, Artificial Sequence
  Description of Artificial Sequence: Synthetic peptide
  Seed: ANQRLNPMHQLLRHF
ANQRYNPAHTLLTHF

SEQ ID NO: 216055 - protein, 15 aa, Artificial Sequence
  Description of Artificial Sequence: Synthetic peptide
  Seed: ANQRLNPMHQLLRHF
ANQRYNPAHTLLVHF

SEQ ID NO: 216056 - protein, 15 aa, Artificial Sequence
  Description of Artificial Sequence: Synthetic peptide
  Seed: ANQRLNPMHQLLRHF
ANQRYNPAHVLLAHF

SEQ ID NO: 216057 - protein, 15 aa, Artificial Sequence
  Description of Artificial Sequence: Synthetic peptide
  Seed: ANQRLNPMHQLLRHF
ANQRYNPAHVLLGHF

SEQ ID NO: 216058 - protein, 15 aa, Artificial Sequence
  Description of Artificial Sequence: Synthetic peptide
  Seed: ANQRLNPMHQLLRHF
ANQRYNPAHVLLHHF

SEQ ID NO: 216059 - protein, 15 aa, Artificial Sequence
  Description of Artificial Sequence: Synthetic peptide
  Seed: ANQRLNPMHQLLRHF
ANQRYNPAHVLLIHF

SEQ ID NO: 216060 - protein, 15 aa, Artificial Sequence
  Description of Artificial Sequence: Synthetic peptide
  Seed: ANQRLNPMHQLLRHF
ANQRYNPAHVLLLHF

SEQ ID NO: 216061 - protein, 15 aa, Artificial Sequence
  Description of Artificial Sequence: Synthetic peptide
  Seed: ANQRLNPMHQLLRHF
ANQRYNPAHVLLMHF

SEQ ID NO: 216062 - protein, 15 aa, Artificial Sequence
  Description of Artificial Sequence: Synthetic peptide
  Seed: ANQRLNPMHQLLRHF
ANQRYNPAHVLLNHF

SEQ ID NO: 216063 - protein, 15 aa, Artificial Sequence
  Description of Artificial Sequence: Synthetic peptide
  Seed: ANQRLNPMHQLLRHF
ANQRYNPAHVLLSHF

SEQ ID NO: 216064 - protein, 15 aa, Artificial Sequence
  Description of Artificial Sequence: Synthetic peptide
  Seed: ANQRLNPMHQLLRHF
ANQRYNPAHVLLTHF

SEQ ID NO: 216065 - protein, 15 aa, Artificial Sequence
  Description of Artificial Sequence: Synthetic peptide
  Seed: ANQRLNPMHQLLRHF
ANQRYNPAHVLLVHF

SEQ ID NO: 216066 - protein, 15 aa, Artificial Sequence
  Description of Artificial Sequence: Synthetic peptide
  Seed: ANQRLNPMHQLLRHF
ANQRYNPCHALLAHF

SEQ ID NO: 216067 - protein, 15 aa, Artificial Sequence
  Description of Artificial Sequence: Synthetic peptide
  Seed: ANQRLNPMHQLLRHF
ANQRYNPCHALLIHF

SEQ ID NO: 216068 - protein, 15 aa, Artificial Sequence
  Description of Artificial Sequence: Synthetic peptide
  Seed: ANQRLNPMHQLLRHF
ANQRYNPCHALLLHF

SEQ ID NO: 216069 - protein, 15 aa, Artificial Sequence
  Description of Artificial Sequence: Synthetic peptide
  Seed: ANQRLNPMHQLLRHF
ANQRYNPCHALLVHF

SEQ ID NO: 216070 - protein, 15 aa, Artificial Sequence
  Description of Artificial Sequence: Synthetic peptide
  Seed: ANQRLNPMHQLLRHF
ANQRYNPCHGLLIHF

SEQ ID NO: 216071 - protein, 15 aa, Artificial Sequence
  Description of Artificial Sequence: Synthetic peptide
  Seed: ANQRLNPMHQLLRHF
ANQRYNPCHGLLLHF

SEQ ID NO: 216072 - protein, 15 aa, Artificial Sequence
  Description of Artificial Sequence: Synthetic peptide
  Seed: ANQRLNPMHQLLRHF
ANQRYNPCHGLLVHF

SEQ ID NO: 216073 - protein, 15 aa, Artificial Sequence
  Description of Artificial Sequence: Synthetic peptide
  Seed: ANQRLNPMHQLLRHF
ANQRYNPCHSLLAHF

SEQ ID NO: 216074 - protein, 15 aa, Artificial Sequence
  Description of Artificial Sequence: Synthetic peptide
  Seed: ANQRLNPMHQLLRHF
ANQRYNPCHSLLIHF

SEQ ID NO: 216075 - protein, 15 aa, Artificial Sequence
  Description of Artificial Sequence: Synthetic peptide
  Seed: ANQRLNPMHQLLRHF
ANQRYNPCHSLLLHF

SEQ ID NO: 216076 - protein, 15 aa, Artificial Sequence
  Description of Artificial Sequence: Synthetic peptide
  Seed: ANQRLNPMHQLLRHF
ANQRYNPCHSLLVHF

SEQ ID NO: 216077 - protein, 15 aa, Artificial Sequence
  Description of Artificial Sequence: Synthetic peptide
  Seed: ANQRLNPMHQLLRHF
ANQRYNPEHALLAHF

SEQ ID NO: 216078 - protein, 15 aa, Artificial Sequence
  Description of Artificial Sequence: Synthetic peptide
  Seed: ANQRLNPMHQLLRHF
ANQRYNPEHALLIHF

SEQ ID NO: 216079 - protein, 15 aa, Artificial Sequence
  Description of Artificial Sequence: Synthetic peptide
  Seed: ANQRLNPMHQLLRHF
ANQRYNPEHALLLHF

SEQ ID NO: 216080 - protein, 15 aa, Artificial Sequence
  Description of Artificial Sequence: Synthetic peptide
  Seed: ANQRLNPMHQLLRHF
ANQRYNPEHALLMHF

SEQ ID NO: 216081 - protein, 15 aa, Artificial Sequence
  Description of Artificial Sequence: Synthetic peptide
  Seed: ANQRLNPMHQLLRHF
ANQRYNPEHALLSHF

SEQ ID NO: 216082 - protein, 15 aa, Artificial Sequence
  Description of Artificial Sequence: Synthetic peptide
  Seed: ANQRLNPMHQLLRHF
ANQRYNPEHALLTHF

SEQ ID NO: 216083 - protein, 15 aa, Artificial Sequence
  Description of Artificial Sequence: Synthetic peptide
  Seed: ANQRLNPMHQLLRHF
ANQRYNPEHALLVHF

SEQ ID NO: 216084 - protein, 15 aa, Artificial Sequence
  Description of Artificial Sequence: Synthetic peptide
  Seed: ANQRLNPMHQLLRHF
ANQRYNPEHFLLFHF

SEQ ID NO: 216085 - protein, 15 aa, Artificial Sequence
  Description of Artificial Sequence: Synthetic peptide
  Seed: ANQRLNPMHQLLRHF
ANQRYNPEHFLLIHF

SEQ ID NO: 216086 - protein, 15 aa, Artificial Sequence
  Description of Artificial Sequence: Synthetic peptide
  Seed: ANQRLNPMHQLLRHF
ANQRYNPEHFLLLHF

SEQ ID NO: 216087 - protein, 15 aa, Artificial Sequence
  Description of Artificial Sequence: Synthetic peptide
  Seed: ANQRLNPMHQLLRHF
ANQRYNPEHFLLVHF

SEQ ID NO: 216088 - protein, 15 aa, Artificial Sequence
  Description of Artificial Sequence: Synthetic peptide
  Seed: ANQRLNPMHQLLRHF
ANQRYNPEHGLLAHF

SEQ ID NO: 216089 - protein, 15 aa, Artificial Sequence
  Description of Artificial Sequence: Synthetic peptide
  Seed: ANQRLNPMHQLLRHF
ANQRYNPEHGLLIHF

SEQ ID NO: 216090 - protein, 15 aa, Artificial Sequence
  Description of Artificial Sequence: Synthetic peptide
  Seed: ANQRLNPMHQLLRHF
ANQRYNPEHGLLLHF

SEQ ID NO: 216091 - protein, 15 aa, Artificial Sequence
  Description of Artificial Sequence: Synthetic peptide
  Seed: ANQRLNPMHQLLRHF
ANQRYNPEHGLLMHF

SEQ ID NO: 216092 - protein, 15 aa, Artificial Sequence
  Description of Artificial Sequence: Synthetic peptide
  Seed: ANQRLNPMHQLLRHF
ANQRYNPEHGLLTHF

SEQ ID NO: 216093 - protein, 15 aa, Artificial Sequence
  Description of Artificial Sequence: Synthetic peptide
  Seed: ANQRLNPMHQLLRHF
ANQRYNPEHGLLVHF

SEQ ID NO: 216094 - protein, 15 aa, Artificial Sequence
  Description of Artificial Sequence: Synthetic peptide
  Seed: ANQRLNPMHQLLRHF
ANQRYNPEHPLLAHF

SEQ ID NO: 216095 - protein, 15 aa, Artificial Sequence
  Description of Artificial Sequence: Synthetic peptide
  Seed: ANQRLNPMHQLLRHF
ANQRYNPEHPLLIHF

SEQ ID NO: 216096 - protein, 15 aa, Artificial Sequence
  Description of Artificial Sequence: Synthetic peptide
  Seed: ANQRLNPMHQLLRHF
ANQRYNPEHPLLLHF

SEQ ID NO: 216097 - protein, 15 aa, Artificial Sequence
  Description of Artificial Sequence: Synthetic peptide
  Seed: ANQRLNPMHQLLRHF
ANQRYNPEHPLLVHF

SEQ ID NO: 216098 - protein, 15 aa, Artificial Sequence
  Description of Artificial Sequence: Synthetic peptide
  Seed: ANQRLNPMHQLLRHF
ANQRYNPEHSLLAHF

SEQ ID NO: 216099 - protein, 15 aa, Artificial Sequence
  Description of Artificial Sequence: Synthetic peptide
  Seed: ANQRLNPMHQLLRHF
ANQRYNPEHSLLIHF

SEQ ID NO: 216100 - protein, 15 aa, Artificial Sequence
  Description of Artificial Sequence: Synthetic peptide
  Seed: ANQRLNPMHQLLRHF
ANQRYNPEHSLLLHF

SEQ ID NO: 216101 - protein, 15 aa, Artificial Sequence
  Description of Artificial Sequence: Synthetic peptide
  Seed: ANQRLNPMHQLLRHF
ANQRYNPEHSLLTHF

SEQ ID NO: 216102 - protein, 15 aa, Artificial Sequence
  Description of Artificial Sequence: Synthetic peptide
  Seed: ANQRLNPMHQLLRHF
ANQRYNPEHSLLVHF

SEQ ID NO: 216103 - protein, 15 aa, Artificial Sequence
  Description of Artificial Sequence: Synthetic peptide
  Seed: ANQRLNPMHQLLRHF
ANQRYNPEHTLLLHF

SEQ ID NO: 216104 - protein, 15 aa, Artificial Sequence
  Description of Artificial Sequence: Synthetic peptide
  Seed: ANQRLNPMHQLLRHF
ANQRYNPEHTLLVHF

SEQ ID NO: 216105 - protein, 15 aa, Artificial Sequence
  Description of Artificial Sequence: Synthetic peptide
  Seed: ANQRLNPMHQLLRHF
ANQRYNPFHALLAHF

SEQ ID NO: 216106 - protein, 15 aa, Artificial Sequence
  Description of Artificial Sequence: Synthetic peptide
  Seed: ANQRLNPMHQLLRHF
ANQRYNPFHALLIHF

SEQ ID NO: 216107 - protein, 15 aa, Artificial Sequence
  Description of Artificial Sequence: Synthetic peptide
  Seed: ANQRLNPMHQLLRHF
ANQRYNPFHALLLHF

SEQ ID NO: 216108 - protein, 15 aa, Artificial Sequence
  Description of Artificial Sequence: Synthetic peptide
  Seed: ANQRLNPMHQLLRHF
ANQRYNPFHALLMHF

SEQ ID NO: 216109 - protein, 15 aa, Artificial Sequence
  Description of Artificial Sequence: Synthetic peptide
  Seed: ANQRLNPMHQLLRHF
ANQRYNPFHALLNHF

SEQ ID NO: 216110 - protein, 15 aa, Artificial Sequence
  Description of Artificial Sequence: Synthetic peptide
  Seed: ANQRLNPMHQLLRHF
ANQRYNPFHALLSHF

SEQ ID NO: 216111 - protein, 15 aa, Artificial Sequence
  Description of Artificial Sequence: Synthetic peptide
  Seed: ANQRLNPMHQLLRHF
ANQRYNPFHALLTHF

SEQ ID NO: 216112 - protein, 15 aa, Artificial Sequence
  Description of Artificial Sequence: Synthetic peptide
  Seed: ANQRLNPMHQLLRHF
ANQRYNPFHALLVHF

SEQ ID NO: 216113 - protein, 15 aa, Artificial Sequence
  Description of Artificial Sequence: Synthetic peptide
  Seed: ANQRLNPMHQLLRHF
ANQRYNPFHFLLFHF

SEQ ID NO: 216114 - protein, 15 aa, Artificial Sequence
  Description of Artificial Sequence: Synthetic peptide
  Seed: ANQRLNPMHQLLRHF
ANQRYNPFHFLLIHF

SEQ ID NO: 216115 - protein, 15 aa, Artificial Sequence
  Description of Artificial Sequence: Synthetic peptide
  Seed: ANQRLNPMHQLLRHF
ANQRYNPFHFLLLHF

SEQ ID NO: 216116 - protein, 15 aa, Artificial Sequence
  Description of Artificial Sequence: Synthetic peptide
  Seed: ANQRLNPMHQLLRHF
ANQRYNPFHFLLMHF

SEQ ID NO: 216117 - protein, 15 aa, Artificial Sequence
  Description of Artificial Sequence: Synthetic peptide
  Seed: ANQRLNPMHQLLRHF
ANQRYNPFHFLLVHF

SEQ ID NO: 216118 - protein, 15 aa, Artificial Sequence
  Description of Artificial Sequence: Synthetic peptide
  Seed: ANQRLNPMHQLLRHF
ANQRYNPFHGLLAHF

SEQ ID NO: 216119 - protein, 15 aa, Artificial Sequence
  Description of Artificial Sequence: Synthetic peptide
  Seed: ANQRLNPMHQLLRHF
ANQRYNPFHGLLIHF

SEQ ID NO: 216120 - protein, 15 aa, Artificial Sequence
  Description of Artificial Sequence: Synthetic peptide
  Seed: ANQRLNPMHQLLRHF
ANQRYNPFHGLLLHF

SEQ ID NO: 216121 - protein, 15 aa, Artificial Sequence
  Description of Artificial Sequence: Synthetic peptide
  Seed: ANQRLNPMHQLLRHF
ANQRYNPFHGLLMHF

SEQ ID NO: 216122 - protein, 15 aa, Artificial Sequence
  Description of Artificial Sequence: Synthetic peptide
  Seed: ANQRLNPMHQLLRHF
ANQRYNPFHGLLVHF

SEQ ID NO: 216123 - protein, 15 aa, Artificial Sequence
  Description of Artificial Sequence: Synthetic peptide
  Seed: ANQRLNPMHQLLRHF
ANQRYNPFHPLLAHF

SEQ ID NO: 216124 - protein, 15 aa, Artificial Sequence
  Description of Artificial Sequence: Synthetic peptide
  Seed: ANQRLNPMHQLLRHF
ANQRYNPFHPLLIHF

SEQ ID NO: 216125 - protein, 15 aa, Artificial Sequence
  Description of Artificial Sequence: Synthetic peptide
  Seed: ANQRLNPMHQLLRHF
ANQRYNPFHPLLLHF

SEQ ID NO: 216126 - protein, 15 aa, Artificial Sequence
  Description of Artificial Sequence: Synthetic peptide
  Seed: ANQRLNPMHQLLRHF
ANQRYNPFHPLLVHF

SEQ ID NO: 216127 - protein, 15 aa, Artificial Sequence
  Description of Artificial Sequence: Synthetic peptide
  Seed: ANQRLNPMHQLLRHF
ANQRYNPFHRLLSHF

SEQ ID NO: 216128 - protein, 15 aa, Artificial Sequence
  Description of Artificial Sequence: Synthetic peptide
  Seed: ANQRLNPMHQLLRHF
ANQRYNPFHSLLAHF

SEQ ID NO: 216129 - protein, 15 aa, Artificial Sequence
  Description of Artificial Sequence: Synthetic peptide
  Seed: ANQRLNPMHQLLRHF
ANQRYNPFHSLLIHF

SEQ ID NO: 216130 - protein, 15 aa, Artificial Sequence
  Description of Artificial Sequence: Synthetic peptide
  Seed: ANQRLNPMHQLLRHF
ANQRYNPFHSLLLHF

SEQ ID NO: 216131 - protein, 15 aa, Artificial Sequence
  Description of Artificial Sequence: Synthetic peptide
  Seed: ANQRLNPMHQLLRHF
ANQRYNPFHSLLMHF

SEQ ID NO: 216132 - protein, 15 aa, Artificial Sequence
  Description of Artificial Sequence: Synthetic peptide
  Seed: ANQRLNPMHQLLRHF
ANQRYNPFHSLLTHF

SEQ ID NO: 216133 - protein, 15 aa, Artificial Sequence
  Description of Artificial Sequence: Synthetic peptide
  Seed: ANQRLNPMHQLLRHF
ANQRYNPFHSLLVHF

SEQ ID NO: 216134 - protein, 15 aa, Artificial Sequence
  Description of Artificial Sequence: Synthetic peptide
  Seed: ANQRLNPMHQLLRHF
ANQRYNPFHTLLAHF

SEQ ID NO: 216135 - protein, 15 aa, Artificial Sequence
  Description of Artificial Sequence: Synthetic peptide
  Seed: ANQRLNPMHQLLRHF
ANQRYNPFHTLLIHF

SEQ ID NO: 216136 - protein, 15 aa, Artificial Sequence
  Description of Artificial Sequence: Synthetic peptide
  Seed: ANQRLNPMHQLLRHF
ANQRYNPFHTLLLHF

SEQ ID NO: 216137 - protein, 15 aa, Artificial Sequence
  Description of Artificial Sequence: Synthetic peptide
  Seed: ANQRLNPMHQLLRHF
ANQRYNPFHTLLVHF

SEQ ID NO: 216138 - protein, 15 aa, Artificial Sequence
  Description of Artificial Sequence: Synthetic peptide
  Seed: ANQRLNPMHQLLRHF
ANQRYNPGHALLAHF

SEQ ID NO: 216139 - protein, 15 aa, Artificial Sequence
  Description of Artificial Sequence: Synthetic peptide
  Seed: ANQRLNPMHQLLRHF
ANQRYNPGHALLIHF

SEQ ID NO: 216140 - protein, 15 aa, Artificial Sequence
  Description of Artificial Sequence: Synthetic peptide
  Seed: ANQRLNPMHQLLRHF
ANQRYNPGHALLLHF

SEQ ID NO: 216141 - protein, 15 aa, Artificial Sequence
  Description of Artificial Sequence: Synthetic peptide
  Seed: ANQRLNPMHQLLRHF
ANQRYNPGHALLMHF

SEQ ID NO: 216142 - protein, 15 aa, Artificial Sequence
  Description of Artificial Sequence: Synthetic peptide
  Seed: ANQRLNPMHQLLRHF
ANQRYNPGHALLSHF

SEQ ID NO: 216143 - protein, 15 aa, Artificial Sequence
  Description of Artificial Sequence: Synthetic peptide
  Seed: ANQRLNPMHQLLRHF
ANQRYNPGHALLTHF

SEQ ID NO: 216144 - protein, 15 aa, Artificial Sequence
  Description of Artificial Sequence: Synthetic peptide
  Seed: ANQRLNPMHQLLRHF
ANQRYNPGHALLVHF

SEQ ID NO: 216145 - protein, 15 aa, Artificial Sequence
  Description of Artificial Sequence: Synthetic peptide
  Seed: ANQRLNPMHQLLRHF
ANQRYNPGHGLLAHF

SEQ ID NO: 216146 - protein, 15 aa, Artificial Sequence
  Description of Artificial Sequence: Synthetic peptide
  Seed: ANQRLNPMHQLLRHF
ANQRYNPGHGLLIHF

SEQ ID NO: 216147 - protein, 15 aa, Artificial Sequence
  Description of Artificial Sequence: Synthetic peptide
  Seed: ANQRLNPMHQLLRHF
ANQRYNPGHGLLLHF

SEQ ID NO: 216148 - protein, 15 aa, Artificial Sequence
  Description of Artificial Sequence: Synthetic peptide
  Seed: ANQRLNPMHQLLRHF
ANQRYNPGHGLLMHF

SEQ ID NO: 216149 - protein, 15 aa, Artificial Sequence
  Description of Artificial Sequence: Synthetic peptide
  Seed: ANQRLNPMHQLLRHF
ANQRYNPGHGLLVHF

SEQ ID NO: 216150 - protein, 15 aa, Artificial Sequence
  Description of Artificial Sequence: Synthetic peptide
  Seed: ANQRLNPMHQLLRHF
ANQRYNPGHNLLAHF

SEQ ID NO: 216151 - protein, 15 aa, Artificial Sequence
  Description of Artificial Sequence: Synthetic peptide
  Seed: ANQRLNPMHQLLRHF
ANQRYNPGHNLLIHF

SEQ ID NO: 216152 - protein, 15 aa, Artificial Sequence
  Description of Artificial Sequence: Synthetic peptide
  Seed: ANQRLNPMHQLLRHF
ANQRYNPGHNLLLHF

SEQ ID NO: 216153 - protein, 15 aa, Artificial Sequence
  Description of Artificial Sequence: Synthetic peptide
  Seed: ANQRLNPMHQLLRHF
ANQRYNPGHNLLVHF

SEQ ID NO: 216154 - protein, 15 aa, Artificial Sequence
  Description of Artificial Sequence: Synthetic peptide
  Seed: ANQRLNPMHQLLRHF
ANQRYNPGHPLLAHF

SEQ ID NO: 216155 - protein, 15 aa, Artificial Sequence
  Description of Artificial Sequence: Synthetic peptide
  Seed: ANQRLNPMHQLLRHF
ANQRYNPGHPLLIHF

SEQ ID NO: 216156 - protein, 15 aa, Artificial Sequence
  Description of Artificial Sequence: Synthetic peptide
  Seed: ANQRLNPMHQLLRHF
ANQRYNPGHPLLLHF

SEQ ID NO: 216157 - protein, 15 aa, Artificial Sequence
  Description of Artificial Sequence: Synthetic peptide
  Seed: ANQRLNPMHQLLRHF
ANQRYNPGHPLLMHF

SEQ ID NO: 216158 - protein, 15 aa, Artificial Sequence
  Description of Artificial Sequence: Synthetic peptide
  Seed: ANQRLNPMHQLLRHF
ANQRYNPGHPLLVHF

SEQ ID NO: 216159 - protein, 15 aa, Artificial Sequence
  Description of Artificial Sequence: Synthetic peptide
  Seed: ANQRLNPMHQLLRHF
ANQRYNPGHSLLAHF

SEQ ID NO: 216160 - protein, 15 aa, Artificial Sequence
  Description of Artificial Sequence: Synthetic peptide
  Seed: ANQRLNPMHQLLRHF
ANQRYNPGHSLLIHF

SEQ ID NO: 216161 - protein, 15 aa, Artificial Sequence
  Description of Artificial Sequence: Synthetic peptide
  Seed: ANQRLNPMHQLLRHF
ANQRYNPGHSLLLHF

SEQ ID NO: 216162 - protein, 15 aa, Artificial Sequence
  Description of Artificial Sequence: Synthetic peptide
  Seed: ANQRLNPMHQLLRHF
ANQRYNPGHSLLMHF

SEQ ID NO: 216163 - protein, 15 aa, Artificial Sequence
  Description of Artificial Sequence: Synthetic peptide
  Seed: ANQRLNPMHQLLRHF
ANQRYNPGHSLLSHF

SEQ ID NO: 216164 - protein, 15 aa, Artificial Sequence
  Description of Artificial Sequence: Synthetic peptide
  Seed: ANQRLNPMHQLLRHF
ANQRYNPGHSLLTHF

SEQ ID NO: 216165 - protein, 15 aa, Artificial Sequence
  Description of Artificial Sequence: Synthetic peptide
  Seed: ANQRLNPMHQLLRHF
ANQRYNPGHSLLVHF

SEQ ID NO: 216166 - protein, 15 aa, Artificial Sequence
  Description of Artificial Sequence: Synthetic peptide
  Seed: ANQRLNPMHQLLRHF
ANQRYNPGHTLLAHF

SEQ ID NO: 216167 - protein, 15 aa, Artificial Sequence
  Description of Artificial Sequence: Synthetic peptide
  Seed: ANQRLNPMHQLLRHF
ANQRYNPGHTLLIHF

SEQ ID NO: 216168 - protein, 15 aa, Artificial Sequence
  Description of Artificial Sequence: Synthetic peptide
  Seed: ANQRLNPMHQLLRHF
ANQRYNPGHTLLLHF

SEQ ID NO: 216169 - protein, 15 aa, Artificial Sequence
  Description of Artificial Sequence: Synthetic peptide
  Seed: ANQRLNPMHQLLRHF
ANQRYNPGHTLLVHF

SEQ ID NO: 216170 - protein, 15 aa, Artificial Sequence
  Description of Artificial Sequence: Synthetic peptide
  Seed: ANQRLNPMHQLLRHF
ANQRYNPGHVLLIHF

SEQ ID NO: 216171 - protein, 15 aa, Artificial Sequence
  Description of Artificial Sequence: Synthetic peptide
  Seed: ANQRLNPMHQLLRHF
ANQRYNPGHVLLLHF

SEQ ID NO: 216172 - protein, 15 aa, Artificial Sequence
  Description of Artificial Sequence: Synthetic peptide
  Seed: ANQRLNPMHQLLRHF
ANQRYNPGHVLLVHF

SEQ ID NO: 216173 - protein, 15 aa, Artificial Sequence
  Description of Artificial Sequence: Synthetic peptide
  Seed: ANQRLNPMHQLLRHF
ANQRYNPHHALLAHF

SEQ ID NO: 216174 - protein, 15 aa, Artificial Sequence
  Description of Artificial Sequence: Synthetic peptide
  Seed: ANQRLNPMHQLLRHF
ANQRYNPHHALLIHF

SEQ ID NO: 216175 - protein, 15 aa, Artificial Sequence
  Description of Artificial Sequence: Synthetic peptide
  Seed: ANQRLNPMHQLLRHF
ANQRYNPHHALLLHF

SEQ ID NO: 216176 - protein, 15 aa, Artificial Sequence
  Description of Artificial Sequence: Synthetic peptide
  Seed: ANQRLNPMHQLLRHF
ANQRYNPHHALLVHF

SEQ ID NO: 216177 - protein, 15 aa, Artificial Sequence
  Description of Artificial Sequence: Synthetic peptide
  Seed: ANQRLNPMHQLLRHF
ANQRYNPHHGLLAHF

SEQ ID NO: 216178 - protein, 15 aa, Artificial Sequence
  Description of Artificial Sequence: Synthetic peptide
  Seed: ANQRLNPMHQLLRHF
ANQRYNPHHGLLIHF

SEQ ID NO: 216179 - protein, 15 aa, Artificial Sequence
  Description of Artificial Sequence: Synthetic peptide
  Seed: ANQRLNPMHQLLRHF
ANQRYNPHHGLLLHF

SEQ ID NO: 216180 - protein, 15 aa, Artificial Sequence
  Description of Artificial Sequence: Synthetic peptide
  Seed: ANQRLNPMHQLLRHF
ANQRYNPHHGLLVHF

SEQ ID NO: 216181 - protein, 15 aa, Artificial Sequence
  Description of Artificial Sequence: Synthetic peptide
  Seed: ANQRLNPMHQLLRHF
ANQRYNPHHSLLAHF

SEQ ID NO: 216182 - protein, 15 aa, Artificial Sequence
  Description of Artificial Sequence: Synthetic peptide
  Seed: ANQRLNPMHQLLRHF
ANQRYNPHHSLLIHF

SEQ ID NO: 216183 - protein, 15 aa, Artificial Sequence
  Description of Artificial Sequence: Synthetic peptide
  Seed: ANQRLNPMHQLLRHF
ANQRYNPHHSLLLHF

SEQ ID NO: 216184 - protein, 15 aa, Artificial Sequence
  Description of Artificial Sequence: Synthetic peptide
  Seed: ANQRLNPMHQLLRHF
ANQRYNPHHSLLVHF

SEQ ID NO: 216185 - protein, 15 aa, Artificial Sequence
  Description of Artificial Sequence: Synthetic peptide
  Seed: ANQRLNPMHQLLRHF
ANQRYNPIHALLAHF

SEQ ID NO: 216186 - protein, 15 aa, Artificial Sequence
  Description of Artificial Sequence: Synthetic peptide
  Seed: ANQRLNPMHQLLRHF
ANQRYNPIHALLCHF

SEQ ID NO: 216187 - protein, 15 aa, Artificial Sequence
  Description of Artificial Sequence: Synthetic peptide
  Seed: ANQRLNPMHQLLRHF
ANQRYNPIHALLFHF

SEQ ID NO: 216188 - protein, 15 aa, Artificial Sequence
  Description of Artificial Sequence: Synthetic peptide
  Seed: ANQRLNPMHQLLRHF
ANQRYNPIHALLGHF

SEQ ID NO: 216189 - protein, 15 aa, Artificial Sequence
  Description of Artificial Sequence: Synthetic peptide
  Seed: ANQRLNPMHQLLRHF
ANQRYNPIHALLHHF

SEQ ID NO: 216190 - protein, 15 aa, Artificial Sequence
  Description of Artificial Sequence: Synthetic peptide
  Seed: ANQRLNPMHQLLRHF
ANQRYNPIHALLIHF

SEQ ID NO: 216191 - protein, 15 aa, Artificial Sequence
  Description of Artificial Sequence: Synthetic peptide
  Seed: ANQRLNPMHQLLRHF
ANQRYNPIHALLKHF

SEQ ID NO: 216192 - protein, 15 aa, Artificial Sequence
  Description of Artificial Sequence: Synthetic peptide
  Seed: ANQRLNPMHQLLRHF
ANQRYNPIHALLLHF

SEQ ID NO: 216193 - protein, 15 aa, Artificial Sequence
  Description of Artificial Sequence: Synthetic peptide
  Seed: ANQRLNPMHQLLRHF
ANQRYNPIHALLMHF

SEQ ID NO: 216194 - protein, 15 aa, Artificial Sequence
  Description of Artificial Sequence: Synthetic peptide
  Seed: ANQRLNPMHQLLRHF
ANQRYNPIHALLNHF

SEQ ID NO: 216195 - protein, 15 aa, Artificial Sequence
  Description of Artificial Sequence: Synthetic peptide
  Seed: ANQRLNPMHQLLRHF
ANQRYNPIHALLPHF

SEQ ID NO: 216196 - protein, 15 aa, Artificial Sequence
  Description of Artificial Sequence: Synthetic peptide
  Seed: ANQRLNPMHQLLRHF
ANQRYNPIHALLQHF

SEQ ID NO: 216197 - protein, 15 aa, Artificial Sequence
  Description of Artificial Sequence: Synthetic peptide
  Seed: ANQRLNPMHQLLRHF
ANQRYNPIHALLRHF

SEQ ID NO: 216198 - protein, 15 aa, Artificial Sequence
  Description of Artificial Sequence: Synthetic peptide
  Seed: ANQRLNPMHQLLRHF
ANQRYNPIHALLSHF

SEQ ID NO: 216199 - protein, 15 aa, Artificial Sequence
  Description of Artificial Sequence: Synthetic peptide
  Seed: ANQRLNPMHQLLRHF
ANQRYNPIHALLTHF

SEQ ID NO: 216200 - protein, 15 aa, Artificial Sequence
  Description of Artificial Sequence: Synthetic peptide
  Seed: ANQRLNPMHQLLRHF
ANQRYNPIHALLVHF

SEQ ID NO: 216201 - protein, 15 aa, Artificial Sequence
  Description of Artificial Sequence: Synthetic peptide
  Seed: ANQRLNPMHQLLRHF
ANQRYNPIHFLLFHF

SEQ ID NO: 216202 - protein, 15 aa, Artificial Sequence
  Description of Artificial Sequence: Synthetic peptide
  Seed: ANQRLNPMHQLLRHF
ANQRYNPIHFLLIHF

SEQ ID NO: 216203 - protein, 15 aa, Artificial Sequence
  Description of Artificial Sequence: Synthetic peptide
  Seed: ANQRLNPMHQLLRHF
ANQRYNPIHFLLLHF

SEQ ID NO: 216204 - protein, 15 aa, Artificial Sequence
  Description of Artificial Sequence: Synthetic peptide
  Seed: ANQRLNPMHQLLRHF
ANQRYNPIHFLLMHF

SEQ ID NO: 216205 - protein, 15 aa, Artificial Sequence
  Description of Artificial Sequence: Synthetic peptide
  Seed: ANQRLNPMHQLLRHF
ANQRYNPIHFLLTHF

SEQ ID NO: 216206 - protein, 15 aa, Artificial Sequence
  Description of Artificial Sequence: Synthetic peptide
  Seed: ANQRLNPMHQLLRHF
ANQRYNPIHFLLVHF

SEQ ID NO: 216207 - protein, 15 aa, Artificial Sequence
  Description of Artificial Sequence: Synthetic peptide
  Seed: ANQRLNPMHQLLRHF
ANQRYNPIHGLLAHF

SEQ ID NO: 216208 - protein, 15 aa, Artificial Sequence
  Description of Artificial Sequence: Synthetic peptide
  Seed: ANQRLNPMHQLLRHF
ANQRYNPIHGLLCHF

SEQ ID NO: 216209 - protein, 15 aa, Artificial Sequence
  Description of Artificial Sequence: Synthetic peptide
  Seed: ANQRLNPMHQLLRHF
ANQRYNPIHGLLFHF

SEQ ID NO: 216210 - protein, 15 aa, Artificial Sequence
  Description of Artificial Sequence: Synthetic peptide
  Seed: ANQRLNPMHQLLRHF
ANQRYNPIHGLLGHF

SEQ ID NO: 216211 - protein, 15 aa, Artificial Sequence
  Description of Artificial Sequence: Synthetic peptide
  Seed: ANQRLNPMHQLLRHF
ANQRYNPIHGLLHHF

SEQ ID NO: 216212 - protein, 15 aa, Artificial Sequence
  Description of Artificial Sequence: Synthetic peptide
  Seed: ANQRLNPMHQLLRHF
ANQRYNPIHGLLIHF

SEQ ID NO: 216213 - protein, 15 aa, Artificial Sequence
  Description of Artificial Sequence: Synthetic peptide
  Seed: ANQRLNPMHQLLRHF
ANQRYNPIHGLLLHF

SEQ ID NO: 216214 - protein, 15 aa, Artificial Sequence
  Description of Artificial Sequence: Synthetic peptide
  Seed: ANQRLNPMHQLLRHF
ANQRYNPIHGLLMHF

SEQ ID NO: 216215 - protein, 15 aa, Artificial Sequence
  Description of Artificial Sequence: Synthetic peptide
  Seed: ANQRLNPMHQLLRHF
ANQRYNPIHGLLNHF

SEQ ID NO: 216216 - protein, 15 aa, Artificial Sequence
  Description of Artificial Sequence: Synthetic peptide
  Seed: ANQRLNPMHQLLRHF
ANQRYNPIHGLLPHF

SEQ ID NO: 216217 - protein, 15 aa, Artificial Sequence
  Description of Artificial Sequence: Synthetic peptide
  Seed: ANQRLNPMHQLLRHF
ANQRYNPIHGLLSHF

SEQ ID NO: 216218 - protein, 15 aa, Artificial Sequence
  Description of Artificial Sequence: Synthetic peptide
  Seed: ANQRLNPMHQLLRHF
ANQRYNPIHGLLTHF

SEQ ID NO: 216219 - protein, 15 aa, Artificial Sequence
  Description of Artificial Sequence: Synthetic peptide
  Seed: ANQRLNPMHQLLRHF
ANQRYNPIHGLLVHF

SEQ ID NO: 216220 - protein, 15 aa, Artificial Sequence
  Description of Artificial Sequence: Synthetic peptide
  Seed: ANQRLNPMHQLLRHF
ANQRYNPIHILLAHF

SEQ ID NO: 216221 - protein, 15 aa, Artificial Sequence
  Description of Artificial Sequence: Synthetic peptide
  Seed: ANQRLNPMHQLLRHF
ANQRYNPIHILLIHF

SEQ ID NO: 216222 - protein, 15 aa, Artificial Sequence
  Description of Artificial Sequence: Synthetic peptide
  Seed: ANQRLNPMHQLLRHF
ANQRYNPIHILLLHF

SEQ ID NO: 216223 - protein, 15 aa, Artificial Sequence
  Description of Artificial Sequence: Synthetic peptide
  Seed: ANQRLNPMHQLLRHF
ANQRYNPIHILLNHF

SEQ ID NO: 216224 - protein, 15 aa, Artificial Sequence
  Description of Artificial Sequence: Synthetic peptide
  Seed: ANQRLNPMHQLLRHF
ANQRYNPIHILLSHF

SEQ ID NO: 216225 - protein, 15 aa, Artificial Sequence
  Description of Artificial Sequence: Synthetic peptide
  Seed: ANQRLNPMHQLLRHF
ANQRYNPIHILLTHF

SEQ ID NO: 216226 - protein, 15 aa, Artificial Sequence
  Description of Artificial Sequence: Synthetic peptide
  Seed: ANQRLNPMHQLLRHF
ANQRYNPIHILLVHF

SEQ ID NO: 216227 - protein, 15 aa, Artificial Sequence
  Description of Artificial Sequence: Synthetic peptide
  Seed: ANQRLNPMHQLLRHF
ANQRYNPIHKLLAHF

SEQ ID NO: 216228 - protein, 15 aa, Artificial Sequence
  Description of Artificial Sequence: Synthetic peptide
  Seed: ANQRLNPMHQLLRHF
ANQRYNPIHKLLGHF

SEQ ID NO: 216229 - protein, 15 aa, Artificial Sequence
  Description of Artificial Sequence: Synthetic peptide
  Seed: ANQRLNPMHQLLRHF
ANQRYNPIHKLLHHF

SEQ ID NO: 216230 - protein, 15 aa, Artificial Sequence
  Description of Artificial Sequence: Synthetic peptide
  Seed: ANQRLNPMHQLLRHF
ANQRYNPIHKLLNHF

SEQ ID NO: 216231 - protein, 15 aa, Artificial Sequence
  Description of Artificial Sequence: Synthetic peptide
  Seed: ANQRLNPMHQLLRHF
ANQRYNPIHKLLSHF

SEQ ID NO: 216232 - protein, 15 aa, Artificial Sequence
  Description of Artificial Sequence: Synthetic peptide
  Seed: ANQRLNPMHQLLRHF
ANQRYNPIHKLLTHF

SEQ ID NO: 216233 - protein, 15 aa, Artificial Sequence
  Description of Artificial Sequence: Synthetic peptide
  Seed: ANQRLNPMHQLLRHF
ANQRYNPIHKLLVHF

SEQ ID NO: 216234 - protein, 15 aa, Artificial Sequence
  Description of Artificial Sequence: Synthetic peptide
  Seed: ANQRLNPMHQLLRHF
ANQRYNPIHMLLAHF

SEQ ID NO: 216235 - protein, 15 aa, Artificial Sequence
  Description of Artificial Sequence: Synthetic peptide
  Seed: ANQRLNPMHQLLRHF
ANQRYNPIHNLLAHF

SEQ ID NO: 216236 - protein, 15 aa, Artificial Sequence
  Description of Artificial Sequence: Synthetic peptide
  Seed: ANQRLNPMHQLLRHF
ANQRYNPIHNLLGHF

SEQ ID NO: 216237 - protein, 15 aa, Artificial Sequence
  Description of Artificial Sequence: Synthetic peptide
  Seed: ANQRLNPMHQLLRHF
ANQRYNPIHNLLIHF

SEQ ID NO: 216238 - protein, 15 aa, Artificial Sequence
  Description of Artificial Sequence: Synthetic peptide
  Seed: ANQRLNPMHQLLRHF
ANQRYNPIHNLLLHF

SEQ ID NO: 216239 - protein, 15 aa, Artificial Sequence
  Description of Artificial Sequence: Synthetic peptide
  Seed: ANQRLNPMHQLLRHF
ANQRYNPIHNLLMHF

SEQ ID NO: 216240 - protein, 15 aa, Artificial Sequence
  Description of Artificial Sequence: Synthetic peptide
  Seed: ANQRLNPMHQLLRHF
ANQRYNPIHNLLNHF

SEQ ID NO: 216241 - protein, 15 aa, Artificial Sequence
  Description of Artificial Sequence: Synthetic peptide
  Seed: ANQRLNPMHQLLRHF
ANQRYNPIHNLLSHF

SEQ ID NO: 216242 - protein, 15 aa, Artificial Sequence
  Description of Artificial Sequence: Synthetic peptide
  Seed: ANQRLNPMHQLLRHF
ANQRYNPIHNLLTHF

SEQ ID NO: 216243 - protein, 15 aa, Artificial Sequence
  Description of Artificial Sequence: Synthetic peptide
  Seed: ANQRLNPMHQLLRHF
ANQRYNPIHNLLVHF

SEQ ID NO: 216244 - protein, 15 aa, Artificial Sequence
  Description of Artificial Sequence: Synthetic peptide
  Seed: ANQRLNPMHQLLRHF
ANQRYNPIHPLLAHF

SEQ ID NO: 216245 - protein, 15 aa, Artificial Sequence
  Description of Artificial Sequence: Synthetic peptide
  Seed: ANQRLNPMHQLLRHF
ANQRYNPIHPLLCHF

SEQ ID NO: 216246 - protein, 15 aa, Artificial Sequence
  Description of Artificial Sequence: Synthetic peptide
  Seed: ANQRLNPMHQLLRHF
ANQRYNPIHPLLFHF

SEQ ID NO: 216247 - protein, 15 aa, Artificial Sequence
  Description of Artificial Sequence: Synthetic peptide
  Seed: ANQRLNPMHQLLRHF
ANQRYNPIHPLLGHF

SEQ ID NO: 216248 - protein, 15 aa, Artificial Sequence
  Description of Artificial Sequence: Synthetic peptide
  Seed: ANQRLNPMHQLLRHF
ANQRYNPIHPLLHHF

SEQ ID NO: 216249 - protein, 15 aa, Artificial Sequence
  Description of Artificial Sequence: Synthetic peptide
  Seed: ANQRLNPMHQLLRHF
ANQRYNPIHPLLIHF

SEQ ID NO: 216250 - protein, 15 aa, Artificial Sequence
  Description of Artificial Sequence: Synthetic peptide
  Seed: ANQRLNPMHQLLRHF
ANQRYNPIHPLLLHF

SEQ ID NO: 216251 - protein, 15 aa, Artificial Sequence
  Description of Artificial Sequence: Synthetic peptide
  Seed: ANQRLNPMHQLLRHF
ANQRYNPIHPLLMHF

SEQ ID NO: 216252 - protein, 15 aa, Artificial Sequence
  Description of Artificial Sequence: Synthetic peptide
  Seed: ANQRLNPMHQLLRHF
ANQRYNPIHPLLNHF

SEQ ID NO: 216253 - protein, 15 aa, Artificial Sequence
  Description of Artificial Sequence: Synthetic peptide
  Seed: ANQRLNPMHQLLRHF
ANQRYNPIHPLLPHF

SEQ ID NO: 216254 - protein, 15 aa, Artificial Sequence
  Description of Artificial Sequence: Synthetic peptide
  Seed: ANQRLNPMHQLLRHF
ANQRYNPIHPLLQHF

SEQ ID NO: 216255 - protein, 15 aa, Artificial Sequence
  Description of Artificial Sequence: Synthetic peptide
  Seed: ANQRLNPMHQLLRHF
ANQRYNPIHPLLSHF

SEQ ID NO: 216256 - protein, 15 aa, Artificial Sequence
  Description of Artificial Sequence: Synthetic peptide
  Seed: ANQRLNPMHQLLRHF
ANQRYNPIHPLLTHF

SEQ ID NO: 216257 - protein, 15 aa, Artificial Sequence
  Description of Artificial Sequence: Synthetic peptide
  Seed: ANQRLNPMHQLLRHF
ANQRYNPIHPLLVHF

SEQ ID NO: 216258 - protein, 15 aa, Artificial Sequence
  Description of Artificial Sequence: Synthetic peptide
  Seed: ANQRLNPMHQLLRHF
ANQRYNPIHRLLAHF

SEQ ID NO: 216259 - protein, 15 aa, Artificial Sequence
  Description of Artificial Sequence: Synthetic peptide
  Seed: ANQRLNPMHQLLRHF
ANQRYNPIHRLLGHF

SEQ ID NO: 216260 - protein, 15 aa, Artificial Sequence
  Description of Artificial Sequence: Synthetic peptide
  Seed: ANQRLNPMHQLLRHF
ANQRYNPIHRLLHHF

SEQ ID NO: 216261 - protein, 15 aa, Artificial Sequence
  Description of Artificial Sequence: Synthetic peptide
  Seed: ANQRLNPMHQLLRHF
ANQRYNPIHRLLIHF

SEQ ID NO: 216262 - protein, 15 aa, Artificial Sequence
  Description of Artificial Sequence: Synthetic peptide
  Seed: ANQRLNPMHQLLRHF
ANQRYNPIHRLLKHF

SEQ ID NO: 216263 - protein, 15 aa, Artificial Sequence
  Description of Artificial Sequence: Synthetic peptide
  Seed: ANQRLNPMHQLLRHF
ANQRYNPIHRLLLHF

SEQ ID NO: 216264 - protein, 15 aa, Artificial Sequence
  Description of Artificial Sequence: Synthetic peptide
  Seed: ANQRLNPMHQLLRHF
ANQRYNPIHRLLMHF

SEQ ID NO: 216265 - protein, 15 aa, Artificial Sequence
  Description of Artificial Sequence: Synthetic peptide
  Seed: ANQRLNPMHQLLRHF
ANQRYNPIHRLLNHF

SEQ ID NO: 216266 - protein, 15 aa, Artificial Sequence
  Description of Artificial Sequence: Synthetic peptide
  Seed: ANQRLNPMHQLLRHF
ANQRYNPIHRLLPHF

SEQ ID NO: 216267 - protein, 15 aa, Artificial Sequence
  Description of Artificial Sequence: Synthetic peptide
  Seed: ANQRLNPMHQLLRHF
ANQRYNPIHRLLQHF

SEQ ID NO: 216268 - protein, 15 aa, Artificial Sequence
  Description of Artificial Sequence: Synthetic peptide
  Seed: ANQRLNPMHQLLRHF
ANQRYNPIHRLLSHF

SEQ ID NO: 216269 - protein, 15 aa, Artificial Sequence
  Description of Artificial Sequence: Synthetic peptide
  Seed: ANQRLNPMHQLLRHF
ANQRYNPIHRLLTHF

SEQ ID NO: 216270 - protein, 15 aa, Artificial Sequence
  Description of Artificial Sequence: Synthetic peptide
  Seed: ANQRLNPMHQLLRHF
ANQRYNPIHRLLVHF

SEQ ID NO: 216271 - protein, 15 aa, Artificial Sequence
  Description of Artificial Sequence: Synthetic peptide
  Seed: ANQRLNPMHQLLRHF
ANQRYNPIHSLLAHF

SEQ ID NO: 216272 - protein, 15 aa, Artificial Sequence
  Description of Artificial Sequence: Synthetic peptide
  Seed: ANQRLNPMHQLLRHF
ANQRYNPIHSLLCHF

SEQ ID NO: 216273 - protein, 15 aa, Artificial Sequence
  Description of Artificial Sequence: Synthetic peptide
  Seed: ANQRLNPMHQLLRHF
ANQRYNPIHSLLFHF

SEQ ID NO: 216274 - protein, 15 aa, Artificial Sequence
  Description of Artificial Sequence: Synthetic peptide
  Seed: ANQRLNPMHQLLRHF
ANQRYNPIHSLLGHF

SEQ ID NO: 216275 - protein, 15 aa, Artificial Sequence
  Description of Artificial Sequence: Synthetic peptide
  Seed: ANQRLNPMHQLLRHF
ANQRYNPIHSLLHHF

SEQ ID NO: 216276 - protein, 15 aa, Artificial Sequence
  Description of Artificial Sequence: Synthetic peptide
  Seed: ANQRLNPMHQLLRHF
ANQRYNPIHSLLIHF

SEQ ID NO: 216277 - protein, 15 aa, Artificial Sequence
  Description of Artificial Sequence: Synthetic peptide
  Seed: ANQRLNPMHQLLRHF
ANQRYNPIHSLLLHF

SEQ ID NO: 216278 - protein, 15 aa, Artificial Sequence
  Description of Artificial Sequence: Synthetic peptide
  Seed: ANQRLNPMHQLLRHF
ANQRYNPIHSLLMHF

SEQ ID NO: 216279 - protein, 15 aa, Artificial Sequence
  Description of Artificial Sequence: Synthetic peptide
  Seed: ANQRLNPMHQLLRHF
ANQRYNPIHSLLNHF

SEQ ID NO: 216280 - protein, 15 aa, Artificial Sequence
  Description of Artificial Sequence: Synthetic peptide
  Seed: ANQRLNPMHQLLRHF
ANQRYNPIHSLLQHF

SEQ ID NO: 216281 - protein, 15 aa, Artificial Sequence
  Description of Artificial Sequence: Synthetic peptide
  Seed: ANQRLNPMHQLLRHF
ANQRYNPIHSLLSHF

SEQ ID NO: 216282 - protein, 15 aa, Artificial Sequence
  Description of Artificial Sequence: Synthetic peptide
  Seed: ANQRLNPMHQLLRHF
ANQRYNPIHSLLTHF

SEQ ID NO: 216283 - protein, 15 aa, Artificial Sequence
  Description of Artificial Sequence: Synthetic peptide
  Seed: ANQRLNPMHQLLRHF
ANQRYNPIHSLLVHF

SEQ ID NO: 216284 - protein, 15 aa, Artificial Sequence
  Description of Artificial Sequence: Synthetic peptide
  Seed: ANQRLNPMHQLLRHF
ANQRYNPIHTLLAHF

SEQ ID NO: 216285 - protein, 15 aa, Artificial Sequence
  Description of Artificial Sequence: Synthetic peptide
  Seed: ANQRLNPMHQLLRHF
ANQRYNPIHTLLGHF

SEQ ID NO: 216286 - protein, 15 aa, Artificial Sequence
  Description of Artificial Sequence: Synthetic peptide
  Seed: ANQRLNPMHQLLRHF
ANQRYNPIHTLLHHF

SEQ ID NO: 216287 - protein, 15 aa, Artificial Sequence
  Description of Artificial Sequence: Synthetic peptide
  Seed: ANQRLNPMHQLLRHF
ANQRYNPIHTLLIHF

SEQ ID NO: 216288 - protein, 15 aa, Artificial Sequence
  Description of Artificial Sequence: Synthetic peptide
  Seed: ANQRLNPMHQLLRHF
ANQRYNPIHTLLLHF

SEQ ID NO: 216289 - protein, 15 aa, Artificial Sequence
  Description of Artificial Sequence: Synthetic peptide
  Seed: ANQRLNPMHQLLRHF
ANQRYNPIHTLLMHF

SEQ ID NO: 216290 - protein, 15 aa, Artificial Sequence
  Description of Artificial Sequence: Synthetic peptide
  Seed: ANQRLNPMHQLLRHF
ANQRYNPIHTLLNHF

SEQ ID NO: 216291 - protein, 15 aa, Artificial Sequence
  Description of Artificial Sequence: Synthetic peptide
  Seed: ANQRLNPMHQLLRHF
ANQRYNPIHTLLSHF

SEQ ID NO: 216292 - protein, 15 aa, Artificial Sequence
  Description of Artificial Sequence: Synthetic peptide
  Seed: ANQRLNPMHQLLRHF
ANQRYNPIHTLLTHF

SEQ ID NO: 216293 - protein, 15 aa, Artificial Sequence
  Description of Artificial Sequence: Synthetic peptide
  Seed: ANQRLNPMHQLLRHF
ANQRYNPIHTLLVHF

SEQ ID NO: 216294 - protein, 15 aa, Artificial Sequence
  Description of Artificial Sequence: Synthetic peptide
  Seed: ANQRLNPMHQLLRHF
ANQRYNPIHVLLAHF

SEQ ID NO: 216295 - protein, 15 aa, Artificial Sequence
  Description of Artificial Sequence: Synthetic peptide
  Seed: ANQRLNPMHQLLRHF
ANQRYNPIHVLLGHF

SEQ ID NO: 216296 - protein, 15 aa, Artificial Sequence
  Description of Artificial Sequence: Synthetic peptide
  Seed: ANQRLNPMHQLLRHF
ANQRYNPIHVLLHHF

SEQ ID NO: 216297 - protein, 15 aa, Artificial Sequence
  Description of Artificial Sequence: Synthetic peptide
  Seed: ANQRLNPMHQLLRHF
ANQRYNPIHVLLIHF

SEQ ID NO: 216298 - protein, 15 aa, Artificial Sequence
  Description of Artificial Sequence: Synthetic peptide
  Seed: ANQRLNPMHQLLRHF
ANQRYNPIHVLLLHF

SEQ ID NO: 216299 - protein, 15 aa, Artificial Sequence
  Description of Artificial Sequence: Synthetic peptide
  Seed: ANQRLNPMHQLLRHF
ANQRYNPIHVLLMHF

SEQ ID NO: 216300 - protein, 15 aa, Artificial Sequence
  Description of Artificial Sequence: Synthetic peptide
  Seed: ANQRLNPMHQLLRHF
ANQRYNPIHVLLNHF

SEQ ID NO: 216301 - protein, 15 aa, Artificial Sequence
  Description of Artificial Sequence: Synthetic peptide
  Seed: ANQRLNPMHQLLRHF
ANQRYNPIHVLLSHF

SEQ ID NO: 216302 - protein, 15 aa, Artificial Sequence
  Description of Artificial Sequence: Synthetic peptide
  Seed: ANQRLNPMHQLLRHF
ANQRYNPIHVLLTHF

SEQ ID NO: 216303 - protein, 15 aa, Artificial Sequence
  Description of Artificial Sequence: Synthetic peptide
  Seed: ANQRLNPMHQLLRHF
ANQRYNPIHVLLVHF

SEQ ID NO: 216304 - protein, 15 aa, Artificial Sequence
  Description of Artificial Sequence: Synthetic peptide
  Seed: ANQRLNPMHQLLRHF
ANQRYNPKHALLLHF

SEQ ID NO: 216305 - protein, 15 aa, Artificial Sequence
  Description of Artificial Sequence: Synthetic peptide
  Seed: ANQRLNPMHQLLRHF
ANQRYNPKHALLVHF

SEQ ID NO: 216306 - protein, 15 aa, Artificial Sequence
  Description of Artificial Sequence: Synthetic peptide
  Seed: ANQRLNPMHQLLRHF
ANQRYNPLHALLAHF

SEQ ID NO: 216307 - protein, 15 aa, Artificial Sequence
  Description of Artificial Sequence: Synthetic peptide
  Seed: ANQRLNPMHQLLRHF
ANQRYNPLHALLCHF

SEQ ID NO: 216308 - protein, 15 aa, Artificial Sequence
  Description of Artificial Sequence: Synthetic peptide
  Seed: ANQRLNPMHQLLRHF
ANQRYNPLHALLDHF

SEQ ID NO: 216309 - protein, 15 aa, Artificial Sequence
  Description of Artificial Sequence: Synthetic peptide
  Seed: ANQRLNPMHQLLRHF
ANQRYNPLHALLEHF

SEQ ID NO: 216310 - protein, 15 aa, Artificial Sequence
  Description of Artificial Sequence: Synthetic peptide
  Seed: ANQRLNPMHQLLRHF
ANQRYNPLHALLFHF

SEQ ID NO: 216311 - protein, 15 aa, Artificial Sequence
  Description of Artificial Sequence: Synthetic peptide
  Seed: ANQRLNPMHQLLRHF
ANQRYNPLHALLGHF

SEQ ID NO: 216312 - protein, 15 aa, Artificial Sequence
  Description of Artificial Sequence: Synthetic peptide
  Seed: ANQRLNPMHQLLRHF
ANQRYNPLHALLHHF

SEQ ID NO: 216313 - protein, 15 aa, Artificial Sequence
  Description of Artificial Sequence: Synthetic peptide
  Seed: ANQRLNPMHQLLRHF
ANQRYNPLHALLIHF

SEQ ID NO: 216314 - protein, 15 aa, Artificial Sequence
  Description of Artificial Sequence: Synthetic peptide
  Seed: ANQRLNPMHQLLRHF
ANQRYNPLHALLKHF

SEQ ID NO: 216315 - protein, 15 aa, Artificial Sequence
  Description of Artificial Sequence: Synthetic peptide
  Seed: ANQRLNPMHQLLRHF
ANQRYNPLHALLLHF

SEQ ID NO: 216316 - protein, 15 aa, Artificial Sequence
  Description of Artificial Sequence: Synthetic peptide
  Seed: ANQRLNPMHQLLRHF
ANQRYNPLHALLMHF

SEQ ID NO: 216317 - protein, 15 aa, Artificial Sequence
  Description of Artificial Sequence: Synthetic peptide
  Seed: ANQRLNPMHQLLRHF
ANQRYNPLHALLNHF

SEQ ID NO: 216318 - protein, 15 aa, Artificial Sequence
  Description of Artificial Sequence: Synthetic peptide
  Seed: ANQRLNPMHQLLRHF
ANQRYNPLHALLPHF

SEQ ID NO: 216319 - protein, 15 aa, Artificial Sequence
  Description of Artificial Sequence: Synthetic peptide
  Seed: ANQRLNPMHQLLRHF
ANQRYNPLHALLQHF

SEQ ID NO: 216320 - protein, 15 aa, Artificial Sequence
  Description of Artificial Sequence: Synthetic peptide
  Seed: ANQRLNPMHQLLRHF
ANQRYNPLHALLRHF

SEQ ID NO: 216321 - protein, 15 aa, Artificial Sequence
  Description of Artificial Sequence: Synthetic peptide
  Seed: ANQRLNPMHQLLRHF
ANQRYNPLHALLSHF

SEQ ID NO: 216322 - protein, 15 aa, Artificial Sequence
  Description of Artificial Sequence: Synthetic peptide
  Seed: ANQRLNPMHQLLRHF
ANQRYNPLHALLTHF

SEQ ID NO: 216323 - protein, 15 aa, Artificial Sequence
  Description of Artificial Sequence: Synthetic peptide
  Seed: ANQRLNPMHQLLRHF
ANQRYNPLHALLVHF

SEQ ID NO: 216324 - protein, 15 aa, Artificial Sequence
  Description of Artificial Sequence: Synthetic peptide
  Seed: ANQRLNPMHQLLRHF
ANQRYNPLHALLWHF

SEQ ID NO: 216325 - protein, 15 aa, Artificial Sequence
  Description of Artificial Sequence: Synthetic peptide
  Seed: ANQRLNPMHQLLRHF
ANQRYNPLHALLYHF

SEQ ID NO: 216326 - protein, 15 aa, Artificial Sequence
  Description of Artificial Sequence: Synthetic peptide
  Seed: ANQRLNPMHQLLRHF
ANQRYNPLHCLLAHF

SEQ ID NO: 216327 - protein, 15 aa, Artificial Sequence
  Description of Artificial Sequence: Synthetic peptide
  Seed: ANQRLNPMHQLLRHF
ANQRYNPLHCLLIHF

SEQ ID NO: 216328 - protein, 15 aa, Artificial Sequence
  Description of Artificial Sequence: Synthetic peptide
  Seed: ANQRLNPMHQLLRHF
ANQRYNPLHCLLLHF

SEQ ID NO: 216329 - protein, 15 aa, Artificial Sequence
  Description of Artificial Sequence: Synthetic peptide
  Seed: ANQRLNPMHQLLRHF
ANQRYNPLHCLLVHF

SEQ ID NO: 216330 - protein, 15 aa, Artificial Sequence
  Description of Artificial Sequence: Synthetic peptide
  Seed: ANQRLNPMHQLLRHF
ANQRYNPLHELLLHF

SEQ ID NO: 216331 - protein, 15 aa, Artificial Sequence
  Description of Artificial Sequence: Synthetic peptide
  Seed: ANQRLNPMHQLLRHF
ANQRYNPLHELLVHF

SEQ ID NO: 216332 - protein, 15 aa, Artificial Sequence
  Description of Artificial Sequence: Synthetic peptide
  Seed: ANQRLNPMHQLLRHF
ANQRYNPLHFLLFHF

SEQ ID NO: 216333 - protein, 15 aa, Artificial Sequence
  Description of Artificial Sequence: Synthetic peptide
  Seed: ANQRLNPMHQLLRHF
ANQRYNPLHFLLIHF

SEQ ID NO: 216334 - protein, 15 aa, Artificial Sequence
  Description of Artificial Sequence: Synthetic peptide
  Seed: ANQRLNPMHQLLRHF
ANQRYNPLHFLLLHF

SEQ ID NO: 216335 - protein, 15 aa, Artificial Sequence
  Description of Artificial Sequence: Synthetic peptide
  Seed: ANQRLNPMHQLLRHF
ANQRYNPLHFLLMHF

SEQ ID NO: 216336 - protein, 15 aa, Artificial Sequence
  Description of Artificial Sequence: Synthetic peptide
  Seed: ANQRLNPMHQLLRHF
ANQRYNPLHFLLVHF

SEQ ID NO: 216337 - protein, 15 aa, Artificial Sequence
  Description of Artificial Sequence: Synthetic peptide
  Seed: ANQRLNPMHQLLRHF
ANQRYNPLHGLLAHF

SEQ ID NO: 216338 - protein, 15 aa, Artificial Sequence
  Description of Artificial Sequence: Synthetic peptide
  Seed: ANQRLNPMHQLLRHF
ANQRYNPLHGLLCHF

SEQ ID NO: 216339 - protein, 15 aa, Artificial Sequence
  Description of Artificial Sequence: Synthetic peptide
  Seed: ANQRLNPMHQLLRHF
ANQRYNPLHGLLFHF

SEQ ID NO: 216340 - protein, 15 aa, Artificial Sequence
  Description of Artificial Sequence: Synthetic peptide
  Seed: ANQRLNPMHQLLRHF
ANQRYNPLHGLLGHF

SEQ ID NO: 216341 - protein, 15 aa, Artificial Sequence
  Description of Artificial Sequence: Synthetic peptide
  Seed: ANQRLNPMHQLLRHF
ANQRYNPLHGLLHHF

SEQ ID NO: 216342 - protein, 15 aa, Artificial Sequence
  Description of Artificial Sequence: Synthetic peptide
  Seed: ANQRLNPMHQLLRHF
ANQRYNPLHGLLIHF

SEQ ID NO: 216343 - protein, 15 aa, Artificial Sequence
  Description of Artificial Sequence: Synthetic peptide
  Seed: ANQRLNPMHQLLRHF
ANQRYNPLHGLLKHF

SEQ ID NO: 216344 - protein, 15 aa, Artificial Sequence
  Description of Artificial Sequence: Synthetic peptide
  Seed: ANQRLNPMHQLLRHF
ANQRYNPLHGLLLHF

SEQ ID NO: 216345 - protein, 15 aa, Artificial Sequence
  Description of Artificial Sequence: Synthetic peptide
  Seed: ANQRLNPMHQLLRHF
ANQRYNPLHGLLMHF

SEQ ID NO: 216346 - protein, 15 aa, Artificial Sequence
  Description of Artificial Sequence: Synthetic peptide
  Seed: ANQRLNPMHQLLRHF
ANQRYNPLHGLLNHF

SEQ ID NO: 216347 - protein, 15 aa, Artificial Sequence
  Description of Artificial Sequence: Synthetic peptide
  Seed: ANQRLNPMHQLLRHF
ANQRYNPLHGLLPHF

SEQ ID NO: 216348 - protein, 15 aa, Artificial Sequence
  Description of Artificial Sequence: Synthetic peptide
  Seed: ANQRLNPMHQLLRHF
ANQRYNPLHGLLQHF

SEQ ID NO: 216349 - protein, 15 aa, Artificial Sequence
  Description of Artificial Sequence: Synthetic peptide
  Seed: ANQRLNPMHQLLRHF
ANQRYNPLHGLLRHF

SEQ ID NO: 216350 - protein, 15 aa, Artificial Sequence
  Description of Artificial Sequence: Synthetic peptide
  Seed: ANQRLNPMHQLLRHF
ANQRYNPLHGLLSHF

SEQ ID NO: 216351 - protein, 15 aa, Artificial Sequence
  Description of Artificial Sequence: Synthetic peptide
  Seed: ANQRLNPMHQLLRHF
ANQRYNPLHGLLTHF

SEQ ID NO: 216352 - protein, 15 aa, Artificial Sequence
  Description of Artificial Sequence: Synthetic peptide
  Seed: ANQRLNPMHQLLRHF
ANQRYNPLHGLLVHF

SEQ ID NO: 216353 - protein, 15 aa, Artificial Sequence
  Description of Artificial Sequence: Synthetic peptide
  Seed: ANQRLNPMHQLLRHF
ANQRYNPLHGLLYHF

SEQ ID NO: 216354 - protein, 15 aa, Artificial Sequence
  Description of Artificial Sequence: Synthetic peptide
  Seed: ANQRLNPMHQLLRHF
ANQRYNPLHHLLAHF

SEQ ID NO: 216355 - protein, 15 aa, Artificial Sequence
  Description of Artificial Sequence: Synthetic peptide
  Seed: ANQRLNPMHQLLRHF
ANQRYNPLHHLLIHF

SEQ ID NO: 216356 - protein, 15 aa, Artificial Sequence
  Description of Artificial Sequence: Synthetic peptide
  Seed: ANQRLNPMHQLLRHF
ANQRYNPLHHLLLHF

SEQ ID NO: 216357 - protein, 15 aa, Artificial Sequence
  Description of Artificial Sequence: Synthetic peptide
  Seed: ANQRLNPMHQLLRHF
ANQRYNPLHHLLVHF

SEQ ID NO: 216358 - protein, 15 aa, Artificial Sequence
  Description of Artificial Sequence: Synthetic peptide
  Seed: ANQRLNPMHQLLRHF
ANQRYNPLHILLAHF

SEQ ID NO: 216359 - protein, 15 aa, Artificial Sequence
  Description of Artificial Sequence: Synthetic peptide
  Seed: ANQRLNPMHQLLRHF
ANQRYNPLHILLGHF

SEQ ID NO: 216360 - protein, 15 aa, Artificial Sequence
  Description of Artificial Sequence: Synthetic peptide
  Seed: ANQRLNPMHQLLRHF
ANQRYNPLHILLHHF

SEQ ID NO: 216361 - protein, 15 aa, Artificial Sequence
  Description of Artificial Sequence: Synthetic peptide
  Seed: ANQRLNPMHQLLRHF
ANQRYNPLHILLIHF

SEQ ID NO: 216362 - protein, 15 aa, Artificial Sequence
  Description of Artificial Sequence: Synthetic peptide
  Seed: ANQRLNPMHQLLRHF
ANQRYNPLHILLLHF

SEQ ID NO: 216363 - protein, 15 aa, Artificial Sequence
  Description of Artificial Sequence: Synthetic peptide
  Seed: ANQRLNPMHQLLRHF
ANQRYNPLHILLMHF

SEQ ID NO: 216364 - protein, 15 aa, Artificial Sequence
  Description of Artificial Sequence: Synthetic peptide
  Seed: ANQRLNPMHQLLRHF
ANQRYNPLHILLNHF

SEQ ID NO: 216365 - protein, 15 aa, Artificial Sequence
  Description of Artificial Sequence: Synthetic peptide
  Seed: ANQRLNPMHQLLRHF
ANQRYNPLHILLSHF

SEQ ID NO: 216366 - protein, 15 aa, Artificial Sequence
  Description of Artificial Sequence: Synthetic peptide
  Seed: ANQRLNPMHQLLRHF
ANQRYNPLHILLTHF

SEQ ID NO: 216367 - protein, 15 aa, Artificial Sequence
  Description of Artificial Sequence: Synthetic peptide
  Seed: ANQRLNPMHQLLRHF
ANQRYNPLHILLVHF

SEQ ID NO: 216368 - protein, 15 aa, Artificial Sequence
  Description of Artificial Sequence: Synthetic peptide
  Seed: ANQRLNPMHQLLRHF
ANQRYNPLHKLLAHF

SEQ ID NO: 216369 - protein, 15 aa, Artificial Sequence
  Description of Artificial Sequence: Synthetic peptide
  Seed: ANQRLNPMHQLLRHF
ANQRYNPLHKLLGHF

SEQ ID NO: 216370 - protein, 15 aa, Artificial Sequence
  Description of Artificial Sequence: Synthetic peptide
  Seed: ANQRLNPMHQLLRHF
ANQRYNPLHKLLHHF

SEQ ID NO: 216371 - protein, 15 aa, Artificial Sequence
  Description of Artificial Sequence: Synthetic peptide
  Seed: ANQRLNPMHQLLRHF
ANQRYNPLHKLLNHF

SEQ ID NO: 216372 - protein, 15 aa, Artificial Sequence
  Description of Artificial Sequence: Synthetic peptide
  Seed: ANQRLNPMHQLLRHF
ANQRYNPLHKLLSHF

SEQ ID NO: 216373 - protein, 15 aa, Artificial Sequence
  Description of Artificial Sequence: Synthetic peptide
  Seed: ANQRLNPMHQLLRHF
ANQRYNPLHKLLTHF

SEQ ID NO: 216374 - protein, 15 aa, Artificial Sequence
  Description of Artificial Sequence: Synthetic peptide
  Seed: ANQRLNPMHQLLRHF
ANQRYNPLHKLLVHF

SEQ ID NO: 216375 - protein, 15 aa, Artificial Sequence
  Description of Artificial Sequence: Synthetic peptide
  Seed: ANQRLNPMHQLLRHF
ANQRYNPLHLLLAHF

SEQ ID NO: 216376 - protein, 15 aa, Artificial Sequence
  Description of Artificial Sequence: Synthetic peptide
  Seed: ANQRLNPMHQLLRHF
ANQRYNPLHLLLNHF

SEQ ID NO: 216377 - protein, 15 aa, Artificial Sequence
  Description of Artificial Sequence: Synthetic peptide
  Seed: ANQRLNPMHQLLRHF
ANQRYNPLHLLLSHF

SEQ ID NO: 216378 - protein, 15 aa, Artificial Sequence
  Description of Artificial Sequence: Synthetic peptide
  Seed: ANQRLNPMHQLLRHF
ANQRYNPLHLLLVHF

SEQ ID NO: 216379 - protein, 15 aa, Artificial Sequence
  Description of Artificial Sequence: Synthetic peptide
  Seed: ANQRLNPMHQLLRHF
ANQRYNPLHMLLAHF

SEQ ID NO: 216380 - protein, 15 aa, Artificial Sequence
  Description of Artificial Sequence: Synthetic peptide
  Seed: ANQRLNPMHQLLRHF
ANQRYNPLHMLLIHF

SEQ ID NO: 216381 - protein, 15 aa, Artificial Sequence
  Description of Artificial Sequence: Synthetic peptide
  Seed: ANQRLNPMHQLLRHF
ANQRYNPLHMLLLHF

SEQ ID NO: 216382 - protein, 15 aa, Artificial Sequence
  Description of Artificial Sequence: Synthetic peptide
  Seed: ANQRLNPMHQLLRHF
ANQRYNPLHMLLNHF

SEQ ID NO: 216383 - protein, 15 aa, Artificial Sequence
  Description of Artificial Sequence: Synthetic peptide
  Seed: ANQRLNPMHQLLRHF
ANQRYNPLHMLLSHF

SEQ ID NO: 216384 - protein, 15 aa, Artificial Sequence
  Description of Artificial Sequence: Synthetic peptide
  Seed: ANQRLNPMHQLLRHF
ANQRYNPLHMLLVHF

SEQ ID NO: 216385 - protein, 15 aa, Artificial Sequence
  Description of Artificial Sequence: Synthetic peptide
  Seed: ANQRLNPMHQLLRHF
ANQRYNPLHNLLAHF

SEQ ID NO: 216386 - protein, 15 aa, Artificial Sequence
  Description of Artificial Sequence: Synthetic peptide
  Seed: ANQRLNPMHQLLRHF
ANQRYNPLHNLLCHF

SEQ ID NO: 216387 - protein, 15 aa, Artificial Sequence
  Description of Artificial Sequence: Synthetic peptide
  Seed: ANQRLNPMHQLLRHF
ANQRYNPLHNLLFHF

SEQ ID NO: 216388 - protein, 15 aa, Artificial Sequence
  Description of Artificial Sequence: Synthetic peptide
  Seed: ANQRLNPMHQLLRHF
ANQRYNPLHNLLGHF

SEQ ID NO: 216389 - protein, 15 aa, Artificial Sequence
  Description of Artificial Sequence: Synthetic peptide
  Seed: ANQRLNPMHQLLRHF
ANQRYNPLHNLLHHF

SEQ ID NO: 216390 - protein, 15 aa, Artificial Sequence
  Description of Artificial Sequence: Synthetic peptide
  Seed: ANQRLNPMHQLLRHF
ANQRYNPLHNLLIHF

SEQ ID NO: 216391 - protein, 15 aa, Artificial Sequence
  Description of Artificial Sequence: Synthetic peptide
  Seed: ANQRLNPMHQLLRHF
ANQRYNPLHNLLLHF

SEQ ID NO: 216392 - protein, 15 aa, Artificial Sequence
  Description of Artificial Sequence: Synthetic peptide
  Seed: ANQRLNPMHQLLRHF
ANQRYNPLHNLLMHF

SEQ ID NO: 216393 - protein, 15 aa, Artificial Sequence
  Description of Artificial Sequence: Synthetic peptide
  Seed: ANQRLNPMHQLLRHF
ANQRYNPLHNLLNHF

SEQ ID NO: 216394 - protein, 15 aa, Artificial Sequence
  Description of Artificial Sequence: Synthetic peptide
  Seed: ANQRLNPMHQLLRHF
ANQRYNPLHNLLSHF

SEQ ID NO: 216395 - protein, 15 aa, Artificial Sequence
  Description of Artificial Sequence: Synthetic peptide
  Seed: ANQRLNPMHQLLRHF
ANQRYNPLHNLLTHF

SEQ ID NO: 216396 - protein, 15 aa, Artificial Sequence
  Description of Artificial Sequence: Synthetic peptide
  Seed: ANQRLNPMHQLLRHF
ANQRYNPLHNLLVHF

SEQ ID NO: 216397 - protein, 15 aa, Artificial Sequence
  Description of Artificial Sequence: Synthetic peptide
  Seed: ANQRLNPMHQLLRHF
ANQRYNPLHPLLAHF

SEQ ID NO: 216398 - protein, 15 aa, Artificial Sequence
  Description of Artificial Sequence: Synthetic peptide
  Seed: ANQRLNPMHQLLRHF
ANQRYNPLHPLLCHF

SEQ ID NO: 216399 - protein, 15 aa, Artificial Sequence
  Description of Artificial Sequence: Synthetic peptide
  Seed: ANQRLNPMHQLLRHF
ANQRYNPLHPLLFHF

SEQ ID NO: 216400 - protein, 15 aa, Artificial Sequence
  Description of Artificial Sequence: Synthetic peptide
  Seed: ANQRLNPMHQLLRHF
ANQRYNPLHPLLGHF

SEQ ID NO: 216401 - protein, 15 aa, Artificial Sequence
  Description of Artificial Sequence: Synthetic peptide
  Seed: ANQRLNPMHQLLRHF
ANQRYNPLHPLLHHF

SEQ ID NO: 216402 - protein, 15 aa, Artificial Sequence
  Description of Artificial Sequence: Synthetic peptide
  Seed: ANQRLNPMHQLLRHF
ANQRYNPLHPLLIHF

SEQ ID NO: 216403 - protein, 15 aa, Artificial Sequence
  Description of Artificial Sequence: Synthetic peptide
  Seed: ANQRLNPMHQLLRHF
ANQRYNPLHPLLLHF

SEQ ID NO: 216404 - protein, 15 aa, Artificial Sequence
  Description of Artificial Sequence: Synthetic peptide
  Seed: ANQRLNPMHQLLRHF
ANQRYNPLHPLLMHF

SEQ ID NO: 216405 - protein, 15 aa, Artificial Sequence
  Description of Artificial Sequence: Synthetic peptide
  Seed: ANQRLNPMHQLLRHF
ANQRYNPLHPLLNHF

SEQ ID NO: 216406 - protein, 15 aa, Artificial Sequence
  Description of Artificial Sequence: Synthetic peptide
  Seed: ANQRLNPMHQLLRHF
ANQRYNPLHPLLPHF

SEQ ID NO: 216407 - protein, 15 aa, Artificial Sequence
  Description of Artificial Sequence: Synthetic peptide
  Seed: ANQRLNPMHQLLRHF
ANQRYNPLHPLLQHF

SEQ ID NO: 216408 - protein, 15 aa, Artificial Sequence
  Description of Artificial Sequence: Synthetic peptide
  Seed: ANQRLNPMHQLLRHF
ANQRYNPLHPLLSHF

SEQ ID NO: 216409 - protein, 15 aa, Artificial Sequence
  Description of Artificial Sequence: Synthetic peptide
  Seed: ANQRLNPMHQLLRHF
ANQRYNPLHPLLTHF

SEQ ID NO: 216410 - protein, 15 aa, Artificial Sequence
  Description of Artificial Sequence: Synthetic peptide
  Seed: ANQRLNPMHQLLRHF
ANQRYNPLHPLLVHF

SEQ ID NO: 216411 - protein, 15 aa, Artificial Sequence
  Description of Artificial Sequence: Synthetic peptide
  Seed: ANQRLNPMHQLLRHF
ANQRYNPLHPLLWHF

SEQ ID NO: 216412 - protein, 15 aa, Artificial Sequence
  Description of Artificial Sequence: Synthetic peptide
  Seed: ANQRLNPMHQLLRHF
ANQRYNPLHPLLYHF

SEQ ID NO: 216413 - protein, 15 aa, Artificial Sequence
  Description of Artificial Sequence: Synthetic peptide
  Seed: ANQRLNPMHQLLRHF
ANQRYNPLHQLLAHF

SEQ ID NO: 216414 - protein, 15 aa, Artificial Sequence
  Description of Artificial Sequence: Synthetic peptide
  Seed: ANQRLNPMHQLLRHF
ANQRYNPLHQLLIHF

SEQ ID NO: 216415 - protein, 15 aa, Artificial Sequence
  Description of Artificial Sequence: Synthetic peptide
  Seed: ANQRLNPMHQLLRHF
ANQRYNPLHQLLLHF

SEQ ID NO: 216416 - protein, 15 aa, Artificial Sequence
  Description of Artificial Sequence: Synthetic peptide
  Seed: ANQRLNPMHQLLRHF
ANQRYNPLHQLLVHF

SEQ ID NO: 216417 - protein, 15 aa, Artificial Sequence
  Description of Artificial Sequence: Synthetic peptide
  Seed: ANQRLNPMHQLLRHF
ANQRYNPLHRLLAHF

SEQ ID NO: 216418 - protein, 15 aa, Artificial Sequence
  Description of Artificial Sequence: Synthetic peptide
  Seed: ANQRLNPMHQLLRHF
ANQRYNPLHRLLGHF

SEQ ID NO: 216419 - protein, 15 aa, Artificial Sequence
  Description of Artificial Sequence: Synthetic peptide
  Seed: ANQRLNPMHQLLRHF
ANQRYNPLHRLLHHF

SEQ ID NO: 216420 - protein, 15 aa, Artificial Sequence
  Description of Artificial Sequence: Synthetic peptide
  Seed: ANQRLNPMHQLLRHF
ANQRYNPLHRLLIHF

SEQ ID NO: 216421 - protein, 15 aa, Artificial Sequence
  Description of Artificial Sequence: Synthetic peptide
  Seed: ANQRLNPMHQLLRHF
ANQRYNPLHRLLKHF

SEQ ID NO: 216422 - protein, 15 aa, Artificial Sequence
  Description of Artificial Sequence: Synthetic peptide
  Seed: ANQRLNPMHQLLRHF
ANQRYNPLHRLLLHF

SEQ ID NO: 216423 - protein, 15 aa, Artificial Sequence
  Description of Artificial Sequence: Synthetic peptide
  Seed: ANQRLNPMHQLLRHF
ANQRYNPLHRLLMHF

SEQ ID NO: 216424 - protein, 15 aa, Artificial Sequence
  Description of Artificial Sequence: Synthetic peptide
  Seed: ANQRLNPMHQLLRHF
ANQRYNPLHRLLNHF

SEQ ID NO: 216425 - protein, 15 aa, Artificial Sequence
  Description of Artificial Sequence: Synthetic peptide
  Seed: ANQRLNPMHQLLRHF
ANQRYNPLHRLLPHF

SEQ ID NO: 216426 - protein, 15 aa, Artificial Sequence
  Description of Artificial Sequence: Synthetic peptide
  Seed: ANQRLNPMHQLLRHF
ANQRYNPLHRLLQHF

SEQ ID NO: 216427 - protein, 15 aa, Artificial Sequence
  Description of Artificial Sequence: Synthetic peptide
  Seed: ANQRLNPMHQLLRHF
ANQRYNPLHRLLSHF

SEQ ID NO: 216428 - protein, 15 aa, Artificial Sequence
  Description of Artificial Sequence: Synthetic peptide
  Seed: ANQRLNPMHQLLRHF
ANQRYNPLHRLLTHF

SEQ ID NO: 216429 - protein, 15 aa, Artificial Sequence
  Description of Artificial Sequence: Synthetic peptide
  Seed: ANQRLNPMHQLLRHF
ANQRYNPLHRLLVHF

SEQ ID NO: 216430 - protein, 15 aa, Artificial Sequence
  Description of Artificial Sequence: Synthetic peptide
  Seed: ANQRLNPMHQLLRHF
ANQRYNPLHSLLAHF

SEQ ID NO: 216431 - protein, 15 aa, Artificial Sequence
  Description of Artificial Sequence: Synthetic peptide
  Seed: ANQRLNPMHQLLRHF
ANQRYNPLHSLLCHF

SEQ ID NO: 216432 - protein, 15 aa, Artificial Sequence
  Description of Artificial Sequence: Synthetic peptide
  Seed: ANQRLNPMHQLLRHF
ANQRYNPLHSLLFHF

SEQ ID NO: 216433 - protein, 15 aa, Artificial Sequence
  Description of Artificial Sequence: Synthetic peptide
  Seed: ANQRLNPMHQLLRHF
ANQRYNPLHSLLGHF

SEQ ID NO: 216434 - protein, 15 aa, Artificial Sequence
  Description of Artificial Sequence: Synthetic peptide
  Seed: ANQRLNPMHQLLRHF
ANQRYNPLHSLLHHF

SEQ ID NO: 216435 - protein, 15 aa, Artificial Sequence
  Description of Artificial Sequence: Synthetic peptide
  Seed: ANQRLNPMHQLLRHF
ANQRYNPLHSLLIHF

SEQ ID NO: 216436 - protein, 15 aa, Artificial Sequence
  Description of Artificial Sequence: Synthetic peptide
  Seed: ANQRLNPMHQLLRHF
ANQRYNPLHSLLKHF

SEQ ID NO: 216437 - protein, 15 aa, Artificial Sequence
  Description of Artificial Sequence: Synthetic peptide
  Seed: ANQRLNPMHQLLRHF
ANQRYNPLHSLLLHF

SEQ ID NO: 216438 - protein, 15 aa, Artificial Sequence
  Description of Artificial Sequence: Synthetic peptide
  Seed: ANQRLNPMHQLLRHF
ANQRYNPLHSLLMHF

SEQ ID NO: 216439 - protein, 15 aa, Artificial Sequence
  Description of Artificial Sequence: Synthetic peptide
  Seed: ANQRLNPMHQLLRHF
ANQRYNPLHSLLNHF

SEQ ID NO: 216440 - protein, 15 aa, Artificial Sequence
  Description of Artificial Sequence: Synthetic peptide
  Seed: ANQRLNPMHQLLRHF
ANQRYNPLHSLLPHF

SEQ ID NO: 216441 - protein, 15 aa, Artificial Sequence
  Description of Artificial Sequence: Synthetic peptide
  Seed: ANQRLNPMHQLLRHF
ANQRYNPLHSLLQHF

SEQ ID NO: 216442 - protein, 15 aa, Artificial Sequence
  Description of Artificial Sequence: Synthetic peptide
  Seed: ANQRLNPMHQLLRHF
ANQRYNPLHSLLRHF

SEQ ID NO: 216443 - protein, 15 aa, Artificial Sequence
  Description of Artificial Sequence: Synthetic peptide
  Seed: ANQRLNPMHQLLRHF
ANQRYNPLHSLLSHF

SEQ ID NO: 216444 - protein, 15 aa, Artificial Sequence
  Description of Artificial Sequence: Synthetic peptide
  Seed: ANQRLNPMHQLLRHF
ANQRYNPLHSLLTHF

SEQ ID NO: 216445 - protein, 15 aa, Artificial Sequence
  Description of Artificial Sequence: Synthetic peptide
  Seed: ANQRLNPMHQLLRHF
ANQRYNPLHSLLVHF

SEQ ID NO: 216446 - protein, 15 aa, Artificial Sequence
  Description of Artificial Sequence: Synthetic peptide
  Seed: ANQRLNPMHQLLRHF
ANQRYNPLHSLLWHF

SEQ ID NO: 216447 - protein, 15 aa, Artificial Sequence
  Description of Artificial Sequence: Synthetic peptide
  Seed: ANQRLNPMHQLLRHF
ANQRYNPLHSLLYHF

SEQ ID NO: 216448 - protein, 15 aa, Artificial Sequence
  Description of Artificial Sequence: Synthetic peptide
  Seed: ANQRLNPMHQLLRHF
ANQRYNPLHTLLAHF

SEQ ID NO: 216449 - protein, 15 aa, Artificial Sequence
  Description of Artificial Sequence: Synthetic peptide
  Seed: ANQRLNPMHQLLRHF
ANQRYNPLHTLLCHF

SEQ ID NO: 216450 - protein, 15 aa, Artificial Sequence
  Description of Artificial Sequence: Synthetic peptide
  Seed: ANQRLNPMHQLLRHF
ANQRYNPLHTLLFHF

SEQ ID NO: 216451 - protein, 15 aa, Artificial Sequence
  Description of Artificial Sequence: Synthetic peptide
  Seed: ANQRLNPMHQLLRHF
ANQRYNPLHTLLGHF

SEQ ID NO: 216452 - protein, 15 aa, Artificial Sequence
  Description of Artificial Sequence: Synthetic peptide
  Seed: ANQRLNPMHQLLRHF
ANQRYNPLHTLLHHF

SEQ ID NO: 216453 - protein, 15 aa, Artificial Sequence
  Description of Artificial Sequence: Synthetic peptide
  Seed: ANQRLNPMHQLLRHF
ANQRYNPLHTLLIHF

SEQ ID NO: 216454 - protein, 15 aa, Artificial Sequence
  Description of Artificial Sequence: Synthetic peptide
  Seed: ANQRLNPMHQLLRHF
ANQRYNPLHTLLLHF

SEQ ID NO: 216455 - protein, 15 aa, Artificial Sequence
  Description of Artificial Sequence: Synthetic peptide
  Seed: ANQRLNPMHQLLRHF
ANQRYNPLHTLLMHF

SEQ ID NO: 216456 - protein, 15 aa, Artificial Sequence
  Description of Artificial Sequence: Synthetic peptide
  Seed: ANQRLNPMHQLLRHF
ANQRYNPLHTLLNHF

SEQ ID NO: 216457 - protein, 15 aa, Artificial Sequence
  Description of Artificial Sequence: Synthetic peptide
  Seed: ANQRLNPMHQLLRHF
ANQRYNPLHTLLPHF

SEQ ID NO: 216458 - protein, 15 aa, Artificial Sequence
  Description of Artificial Sequence: Synthetic peptide
  Seed: ANQRLNPMHQLLRHF
ANQRYNPLHTLLQHF

SEQ ID NO: 216459 - protein, 15 aa, Artificial Sequence
  Description of Artificial Sequence: Synthetic peptide
  Seed: ANQRLNPMHQLLRHF
ANQRYNPLHTLLSHF

SEQ ID NO: 216460 - protein, 15 aa, Artificial Sequence
  Description of Artificial Sequence: Synthetic peptide
  Seed: ANQRLNPMHQLLRHF
ANQRYNPLHTLLTHF

SEQ ID NO: 216461 - protein, 15 aa, Artificial Sequence
  Description of Artificial Sequence: Synthetic peptide
  Seed: ANQRLNPMHQLLRHF
ANQRYNPLHTLLVHF

SEQ ID NO: 216462 - protein, 15 aa, Artificial Sequence
  Description of Artificial Sequence: Synthetic peptide
  Seed: ANQRLNPMHQLLRHF
ANQRYNPLHVLLAHF

SEQ ID NO: 216463 - protein, 15 aa, Artificial Sequence
  Description of Artificial Sequence: Synthetic peptide
  Seed: ANQRLNPMHQLLRHF
ANQRYNPLHVLLGHF

SEQ ID NO: 216464 - protein, 15 aa, Artificial Sequence
  Description of Artificial Sequence: Synthetic peptide
  Seed: ANQRLNPMHQLLRHF
ANQRYNPLHVLLHHF

SEQ ID NO: 216465 - protein, 15 aa, Artificial Sequence
  Description of Artificial Sequence: Synthetic peptide
  Seed: ANQRLNPMHQLLRHF
ANQRYNPLHVLLIHF

SEQ ID NO: 216466 - protein, 15 aa, Artificial Sequence
  Description of Artificial Sequence: Synthetic peptide
  Seed: ANQRLNPMHQLLRHF
ANQRYNPLHVLLLHF

SEQ ID NO: 216467 - protein, 15 aa, Artificial Sequence
  Description of Artificial Sequence: Synthetic peptide
  Seed: ANQRLNPMHQLLRHF
ANQRYNPLHVLLMHF

SEQ ID NO: 216468 - protein, 15 aa, Artificial Sequence
  Description of Artificial Sequence: Synthetic peptide
  Seed: ANQRLNPMHQLLRHF
ANQRYNPLHVLLNHF

SEQ ID NO: 216469 - protein, 15 aa, Artificial Sequence
  Description of Artificial Sequence: Synthetic peptide
  Seed: ANQRLNPMHQLLRHF
ANQRYNPLHVLLPHF

SEQ ID NO: 216470 - protein, 15 aa, Artificial Sequence
  Description of Artificial Sequence: Synthetic peptide
  Seed: ANQRLNPMHQLLRHF
ANQRYNPLHVLLQHF

SEQ ID NO: 216471 - protein, 15 aa, Artificial Sequence
  Description of Artificial Sequence: Synthetic peptide
  Seed: ANQRLNPMHQLLRHF
ANQRYNPLHVLLSHF

SEQ ID NO: 216472 - protein, 15 aa, Artificial Sequence
  Description of Artificial Sequence: Synthetic peptide
  Seed: ANQRLNPMHQLLRHF
ANQRYNPLHVLLTHF

SEQ ID NO: 216473 - protein, 15 aa, Artificial Sequence
  Description of Artificial Sequence: Synthetic peptide
  Seed: ANQRLNPMHQLLRHF
ANQRYNPLHVLLVHF

SEQ ID NO: 216474 - protein, 15 aa, Artificial Sequence
  Description of Artificial Sequence: Synthetic peptide
  Seed: ANQRLNPMHQLLRHF
ANQRYNPMHALLAHF

SEQ ID NO: 216475 - protein, 15 aa, Artificial Sequence
  Description of Artificial Sequence: Synthetic peptide
  Seed: ANQRLNPMHQLLRHF
ANQRYNPMHALLCHF

SEQ ID NO: 216476 - protein, 15 aa, Artificial Sequence
  Description of Artificial Sequence: Synthetic peptide
  Seed: ANQRLNPMHQLLRHF
ANQRYNPMHALLDHF

SEQ ID NO: 216477 - protein, 15 aa, Artificial Sequence
  Description of Artificial Sequence: Synthetic peptide
  Seed: ANQRLNPMHQLLRHF
ANQRYNPMHALLEHF

SEQ ID NO: 216478 - protein, 15 aa, Artificial Sequence
  Description of Artificial Sequence: Synthetic peptide
  Seed: ANQRLNPMHQLLRHF
ANQRYNPMHALLFHF

SEQ ID NO: 216479 - protein, 15 aa, Artificial Sequence
  Description of Artificial Sequence: Synthetic peptide
  Seed: ANQRLNPMHQLLRHF
ANQRYNPMHALLGHF

SEQ ID NO: 216480 - protein, 15 aa, Artificial Sequence
  Description of Artificial Sequence: Synthetic peptide
  Seed: ANQRLNPMHQLLRHF
ANQRYNPMHALLHHF

SEQ ID NO: 216481 - protein, 15 aa, Artificial Sequence
  Description of Artificial Sequence: Synthetic peptide
  Seed: ANQRLNPMHQLLRHF
ANQRYNPMHALLIHF

SEQ ID NO: 216482 - protein, 15 aa, Artificial Sequence
  Description of Artificial Sequence: Synthetic peptide
  Seed: ANQRLNPMHQLLRHF
ANQRYNPMHALLKHF

SEQ ID NO: 216483 - protein, 15 aa, Artificial Sequence
  Description of Artificial Sequence: Synthetic peptide
  Seed: ANQRLNPMHQLLRHF
ANQRYNPMHALLLHF

SEQ ID NO: 216484 - protein, 15 aa, Artificial Sequence
  Description of Artificial Sequence: Synthetic peptide
  Seed: ANQRLNPMHQLLRHF
ANQRYNPMHALLMHF

SEQ ID NO: 216485 - protein, 15 aa, Artificial Sequence
  Description of Artificial Sequence: Synthetic peptide
  Seed: ANQRLNPMHQLLRHF
ANQRYNPMHALLNHF

SEQ ID NO: 216486 - protein, 15 aa, Artificial Sequence
  Description of Artificial Sequence: Synthetic peptide
  Seed: ANQRLNPMHQLLRHF
ANQRYNPMHALLPHF

SEQ ID NO: 216487 - protein, 15 aa, Artificial Sequence
  Description of Artificial Sequence: Synthetic peptide
  Seed: ANQRLNPMHQLLRHF
ANQRYNPMHALLQHF

SEQ ID NO: 216488 - protein, 15 aa, Artificial Sequence
  Description of Artificial Sequence: Synthetic peptide
  Seed: ANQRLNPMHQLLRHF
ANQRYNPMHALLRHF

SEQ ID NO: 216489 - protein, 15 aa, Artificial Sequence
  Description of Artificial Sequence: Synthetic peptide
  Seed: ANQRLNPMHQLLRHF
ANQRYNPMHALLSHF

SEQ ID NO: 216490 - protein, 15 aa, Artificial Sequence
  Description of Artificial Sequence: Synthetic peptide
  Seed: ANQRLNPMHQLLRHF
ANQRYNPMHALLTHF

SEQ ID NO: 216491 - protein, 15 aa, Artificial Sequence
  Description of Artificial Sequence: Synthetic peptide
  Seed: ANQRLNPMHQLLRHF
ANQRYNPMHALLVHF

SEQ ID NO: 216492 - protein, 15 aa, Artificial Sequence
  Description of Artificial Sequence: Synthetic peptide
  Seed: ANQRLNPMHQLLRHF
ANQRYNPMHALLWHF

SEQ ID NO: 216493 - protein, 15 aa, Artificial Sequence
  Description of Artificial Sequence: Synthetic peptide
  Seed: ANQRLNPMHQLLRHF
ANQRYNPMHALLYHF

SEQ ID NO: 216494 - protein, 15 aa, Artificial Sequence
  Description of Artificial Sequence: Synthetic peptide
  Seed: ANQRLNPMHQLLRHF
ANQRYNPMHCLLAHF

SEQ ID NO: 216495 - protein, 15 aa, Artificial Sequence
  Description of Artificial Sequence: Synthetic peptide
  Seed: ANQRLNPMHQLLRHF
ANQRYNPMHCLLIHF

SEQ ID NO: 216496 - protein, 15 aa, Artificial Sequence
  Description of Artificial Sequence: Synthetic peptide
  Seed: ANQRLNPMHQLLRHF
ANQRYNPMHCLLLHF

SEQ ID NO: 216497 - protein, 15 aa, Artificial Sequence
  Description of Artificial Sequence: Synthetic peptide
  Seed: ANQRLNPMHQLLRHF
ANQRYNPMHCLLVHF

SEQ ID NO: 216498 - protein, 15 aa, Artificial Sequence
  Description of Artificial Sequence: Synthetic peptide
  Seed: ANQRLNPMHQLLRHF
ANQRYNPMHELLLHF

SEQ ID NO: 216499 - protein, 15 aa, Artificial Sequence
  Description of Artificial Sequence: Synthetic peptide
  Seed: ANQRLNPMHQLLRHF
ANQRYNPMHELLVHF

SEQ ID NO: 216500 - protein, 15 aa, Artificial Sequence
  Description of Artificial Sequence: Synthetic peptide
  Seed: ANQRLNPMHQLLRHF
ANQRYNPMHFLLIHF

SEQ ID NO: 216501 - protein, 15 aa, Artificial Sequence
  Description of Artificial Sequence: Synthetic peptide
  Seed: ANQRLNPMHQLLRHF
ANQRYNPMHFLLLHF

SEQ ID NO: 216502 - protein, 15 aa, Artificial Sequence
  Description of Artificial Sequence: Synthetic peptide
  Seed: ANQRLNPMHQLLRHF
ANQRYNPMHFLLVHF

SEQ ID NO: 216503 - protein, 15 aa, Artificial Sequence
  Description of Artificial Sequence: Synthetic peptide
  Seed: ANQRLNPMHQLLRHF
ANQRYNPMHGLLAHF

SEQ ID NO: 216504 - protein, 15 aa, Artificial Sequence
  Description of Artificial Sequence: Synthetic peptide
  Seed: ANQRLNPMHQLLRHF
ANQRYNPMHGLLCHF

SEQ ID NO: 216505 - protein, 15 aa, Artificial Sequence
  Description of Artificial Sequence: Synthetic peptide
  Seed: ANQRLNPMHQLLRHF
ANQRYNPMHGLLFHF

SEQ ID NO: 216506 - protein, 15 aa, Artificial Sequence
  Description of Artificial Sequence: Synthetic peptide
  Seed: ANQRLNPMHQLLRHF
ANQRYNPMHGLLGHF

SEQ ID NO: 216507 - protein, 15 aa, Artificial Sequence
  Description of Artificial Sequence: Synthetic peptide
  Seed: ANQRLNPMHQLLRHF
ANQRYNPMHGLLHHF

SEQ ID NO: 216508 - protein, 15 aa, Artificial Sequence
  Description of Artificial Sequence: Synthetic peptide
  Seed: ANQRLNPMHQLLRHF
ANQRYNPMHGLLIHF

SEQ ID NO: 216509 - protein, 15 aa, Artificial Sequence
  Description of Artificial Sequence: Synthetic peptide
  Seed: ANQRLNPMHQLLRHF
ANQRYNPMHGLLKHF

SEQ ID NO: 216510 - protein, 15 aa, Artificial Sequence
  Description of Artificial Sequence: Synthetic peptide
  Seed: ANQRLNPMHQLLRHF
ANQRYNPMHGLLLHF

SEQ ID NO: 216511 - protein, 15 aa, Artificial Sequence
  Description of Artificial Sequence: Synthetic peptide
  Seed: ANQRLNPMHQLLRHF
ANQRYNPMHGLLMHF

SEQ ID NO: 216512 - protein, 15 aa, Artificial Sequence
  Description of Artificial Sequence: Synthetic peptide
  Seed: ANQRLNPMHQLLRHF
ANQRYNPMHGLLNHF

SEQ ID NO: 216513 - protein, 15 aa, Artificial Sequence
  Description of Artificial Sequence: Synthetic peptide
  Seed: ANQRLNPMHQLLRHF
ANQRYNPMHGLLPHF

SEQ ID NO: 216514 - protein, 15 aa, Artificial Sequence
  Description of Artificial Sequence: Synthetic peptide
  Seed: ANQRLNPMHQLLRHF
ANQRYNPMHGLLQHF

SEQ ID NO: 216515 - protein, 15 aa, Artificial Sequence
  Description of Artificial Sequence: Synthetic peptide
  Seed: ANQRLNPMHQLLRHF
ANQRYNPMHGLLRHF

SEQ ID NO: 216516 - protein, 15 aa, Artificial Sequence
  Description of Artificial Sequence: Synthetic peptide
  Seed: ANQRLNPMHQLLRHF
ANQRYNPMHGLLSHF

SEQ ID NO: 216517 - protein, 15 aa, Artificial Sequence
  Description of Artificial Sequence: Synthetic peptide
  Seed: ANQRLNPMHQLLRHF
ANQRYNPMHGLLTHF

SEQ ID NO: 216518 - protein, 15 aa, Artificial Sequence
  Description of Artificial Sequence: Synthetic peptide
  Seed: ANQRLNPMHQLLRHF
ANQRYNPMHGLLVHF

SEQ ID NO: 216519 - protein, 15 aa, Artificial Sequence
  Description of Artificial Sequence: Synthetic peptide
  Seed: ANQRLNPMHQLLRHF
ANQRYNPMHGLLYHF

SEQ ID NO: 216520 - protein, 15 aa, Artificial Sequence
  Description of Artificial Sequence: Synthetic peptide
  Seed: ANQRLNPMHQLLRHF
ANQRYNPMHHLLAHF

SEQ ID NO: 216521 - protein, 15 aa, Artificial Sequence
  Description of Artificial Sequence: Synthetic peptide
  Seed: ANQRLNPMHQLLRHF
ANQRYNPMHHLLIHF

SEQ ID NO: 216522 - protein, 15 aa, Artificial Sequence
  Description of Artificial Sequence: Synthetic peptide
  Seed: ANQRLNPMHQLLRHF
ANQRYNPMHHLLLHF

SEQ ID NO: 216523 - protein, 15 aa, Artificial Sequence
  Description of Artificial Sequence: Synthetic peptide
  Seed: ANQRLNPMHQLLRHF
ANQRYNPMHHLLVHF

SEQ ID NO: 216524 - protein, 15 aa, Artificial Sequence
  Description of Artificial Sequence: Synthetic peptide
  Seed: ANQRLNPMHQLLRHF
ANQRYNPMHILLAHF

SEQ ID NO: 216525 - protein, 15 aa, Artificial Sequence
  Description of Artificial Sequence: Synthetic peptide
  Seed: ANQRLNPMHQLLRHF
ANQRYNPMHILLGHF

SEQ ID NO: 216526 - protein, 15 aa, Artificial Sequence
  Description of Artificial Sequence: Synthetic peptide
  Seed: ANQRLNPMHQLLRHF
ANQRYNPMHILLHHF

SEQ ID NO: 216527 - protein, 15 aa, Artificial Sequence
  Description of Artificial Sequence: Synthetic peptide
  Seed: ANQRLNPMHQLLRHF
ANQRYNPMHILLIHF

SEQ ID NO: 216528 - protein, 15 aa, Artificial Sequence
  Description of Artificial Sequence: Synthetic peptide
  Seed: ANQRLNPMHQLLRHF
ANQRYNPMHILLLHF

SEQ ID NO: 216529 - protein, 15 aa, Artificial Sequence
  Description of Artificial Sequence: Synthetic peptide
  Seed: ANQRLNPMHQLLRHF
ANQRYNPMHILLMHF

SEQ ID NO: 216530 - protein, 15 aa, Artificial Sequence
  Description of Artificial Sequence: Synthetic peptide
  Seed: ANQRLNPMHQLLRHF
ANQRYNPMHILLNHF

SEQ ID NO: 216531 - protein, 15 aa, Artificial Sequence
  Description of Artificial Sequence: Synthetic peptide
  Seed: ANQRLNPMHQLLRHF
ANQRYNPMHILLSHF

SEQ ID NO: 216532 - protein, 15 aa, Artificial Sequence
  Description of Artificial Sequence: Synthetic peptide
  Seed: ANQRLNPMHQLLRHF
ANQRYNPMHILLTHF

SEQ ID NO: 216533 - protein, 15 aa, Artificial Sequence
  Description of Artificial Sequence: Synthetic peptide
  Seed: ANQRLNPMHQLLRHF
ANQRYNPMHILLVHF

SEQ ID NO: 216534 - protein, 15 aa, Artificial Sequence
  Description of Artificial Sequence: Synthetic peptide
  Seed: ANQRLNPMHQLLRHF
ANQRYNPMHKLLAHF

SEQ ID NO: 216535 - protein, 15 aa, Artificial Sequence
  Description of Artificial Sequence: Synthetic peptide
  Seed: ANQRLNPMHQLLRHF
ANQRYNPMHKLLGHF

SEQ ID NO: 216536 - protein, 15 aa, Artificial Sequence
  Description of Artificial Sequence: Synthetic peptide
  Seed: ANQRLNPMHQLLRHF
ANQRYNPMHKLLHHF

SEQ ID NO: 216537 - protein, 15 aa, Artificial Sequence
  Description of Artificial Sequence: Synthetic peptide
  Seed: ANQRLNPMHQLLRHF
ANQRYNPMHKLLMHF

SEQ ID NO: 216538 - protein, 15 aa, Artificial Sequence
  Description of Artificial Sequence: Synthetic peptide
  Seed: ANQRLNPMHQLLRHF
ANQRYNPMHKLLNHF

SEQ ID NO: 216539 - protein, 15 aa, Artificial Sequence
  Description of Artificial Sequence: Synthetic peptide
  Seed: ANQRLNPMHQLLRHF
ANQRYNPMHKLLSHF

SEQ ID NO: 216540 - protein, 15 aa, Artificial Sequence
  Description of Artificial Sequence: Synthetic peptide
  Seed: ANQRLNPMHQLLRHF
ANQRYNPMHKLLTHF

SEQ ID NO: 216541 - protein, 15 aa, Artificial Sequence
  Description of Artificial Sequence: Synthetic peptide
  Seed: ANQRLNPMHQLLRHF
ANQRYNPMHKLLVHF

SEQ ID NO: 216542 - protein, 15 aa, Artificial Sequence
  Description of Artificial Sequence: Synthetic peptide
  Seed: ANQRLNPMHQLLRHF
ANQRYNPMHLLLAHF

SEQ ID NO: 216543 - protein, 15 aa, Artificial Sequence
  Description of Artificial Sequence: Synthetic peptide
  Seed: ANQRLNPMHQLLRHF
ANQRYNPMHLLLLHF

SEQ ID NO: 216544 - protein, 15 aa, Artificial Sequence
  Description of Artificial Sequence: Synthetic peptide
  Seed: ANQRLNPMHQLLRHF
ANQRYNPMHLLLNHF

SEQ ID NO: 216545 - protein, 15 aa, Artificial Sequence
  Description of Artificial Sequence: Synthetic peptide
  Seed: ANQRLNPMHQLLRHF
ANQRYNPMHLLLSHF

SEQ ID NO: 216546 - protein, 15 aa, Artificial Sequence
  Description of Artificial Sequence: Synthetic peptide
  Seed: ANQRLNPMHQLLRHF
ANQRYNPMHLLLTHF

SEQ ID NO: 216547 - protein, 15 aa, Artificial Sequence
  Description of Artificial Sequence: Synthetic peptide
  Seed: ANQRLNPMHQLLRHF
ANQRYNPMHLLLVHF

SEQ ID NO: 216548 - protein, 15 aa, Artificial Sequence
  Description of Artificial Sequence: Synthetic peptide
  Seed: ANQRLNPMHQLLRHF
ANQRYNPMHMLLAHF

SEQ ID NO: 216549 - protein, 15 aa, Artificial Sequence
  Description of Artificial Sequence: Synthetic peptide
  Seed: ANQRLNPMHQLLRHF
ANQRYNPMHMLLIHF

SEQ ID NO: 216550 - protein, 15 aa, Artificial Sequence
  Description of Artificial Sequence: Synthetic peptide
  Seed: ANQRLNPMHQLLRHF
ANQRYNPMHMLLLHF

SEQ ID NO: 216551 - protein, 15 aa, Artificial Sequence
  Description of Artificial Sequence: Synthetic peptide
  Seed: ANQRLNPMHQLLRHF
ANQRYNPMHMLLNHF

SEQ ID NO: 216552 - protein, 15 aa, Artificial Sequence
  Description of Artificial Sequence: Synthetic peptide
  Seed: ANQRLNPMHQLLRHF
ANQRYNPMHMLLSHF

SEQ ID NO: 216553 - protein, 15 aa, Artificial Sequence
  Description of Artificial Sequence: Synthetic peptide
  Seed: ANQRLNPMHQLLRHF
ANQRYNPMHMLLTHF

SEQ ID NO: 216554 - protein, 15 aa, Artificial Sequence
  Description of Artificial Sequence: Synthetic peptide
  Seed: ANQRLNPMHQLLRHF
ANQRYNPMHMLLVHF

SEQ ID NO: 216555 - protein, 15 aa, Artificial Sequence
  Description of Artificial Sequence: Synthetic peptide
  Seed: ANQRLNPMHQLLRHF
ANQRYNPMHNLLAHF

SEQ ID NO: 216556 - protein, 15 aa, Artificial Sequence
  Description of Artificial Sequence: Synthetic peptide
  Seed: ANQRLNPMHQLLRHF
ANQRYNPMHNLLCHF

SEQ ID NO: 216557 - protein, 15 aa, Artificial Sequence
  Description of Artificial Sequence: Synthetic peptide
  Seed: ANQRLNPMHQLLRHF
ANQRYNPMHNLLFHF

SEQ ID NO: 216558 - protein, 15 aa, Artificial Sequence
  Description of Artificial Sequence: Synthetic peptide
  Seed: ANQRLNPMHQLLRHF
ANQRYNPMHNLLGHF

SEQ ID NO: 216559 - protein, 15 aa, Artificial Sequence
  Description of Artificial Sequence: Synthetic peptide
  Seed: ANQRLNPMHQLLRHF
ANQRYNPMHNLLHHF

SEQ ID NO: 216560 - protein, 15 aa, Artificial Sequence
  Description of Artificial Sequence: Synthetic peptide
  Seed: ANQRLNPMHQLLRHF
ANQRYNPMHNLLIHF

SEQ ID NO: 216561 - protein, 15 aa, Artificial Sequence
  Description of Artificial Sequence: Synthetic peptide
  Seed: ANQRLNPMHQLLRHF
ANQRYNPMHNLLLHF

SEQ ID NO: 216562 - protein, 15 aa, Artificial Sequence
  Description of Artificial Sequence: Synthetic peptide
  Seed: ANQRLNPMHQLLRHF
ANQRYNPMHNLLMHF

SEQ ID NO: 216563 - protein, 15 aa, Artificial Sequence
  Description of Artificial Sequence: Synthetic peptide
  Seed: ANQRLNPMHQLLRHF
ANQRYNPMHNLLNHF

SEQ ID NO: 216564 - protein, 15 aa, Artificial Sequence
  Description of Artificial Sequence: Synthetic peptide
  Seed: ANQRLNPMHQLLRHF
ANQRYNPMHNLLSHF

SEQ ID NO: 216565 - protein, 15 aa, Artificial Sequence
  Description of Artificial Sequence: Synthetic peptide
  Seed: ANQRLNPMHQLLRHF
ANQRYNPMHNLLTHF

SEQ ID NO: 216566 - protein, 15 aa, Artificial Sequence
  Description of Artificial Sequence: Synthetic peptide
  Seed: ANQRLNPMHQLLRHF
ANQRYNPMHNLLVHF

SEQ ID NO: 216567 - protein, 15 aa, Artificial Sequence
  Description of Artificial Sequence: Synthetic peptide
  Seed: ANQRLNPMHQLLRHF
ANQRYNPMHPLLAHF

SEQ ID NO: 216568 - protein, 15 aa, Artificial Sequence
  Description of Artificial Sequence: Synthetic peptide
  Seed: ANQRLNPMHQLLRHF
ANQRYNPMHPLLCHF

SEQ ID NO: 216569 - protein, 15 aa, Artificial Sequence
  Description of Artificial Sequence: Synthetic peptide
  Seed: ANQRLNPMHQLLRHF
ANQRYNPMHPLLFHF

SEQ ID NO: 216570 - protein, 15 aa, Artificial Sequence
  Description of Artificial Sequence: Synthetic peptide
  Seed: ANQRLNPMHQLLRHF
ANQRYNPMHPLLGHF

SEQ ID NO: 216571 - protein, 15 aa, Artificial Sequence
  Description of Artificial Sequence: Synthetic peptide
  Seed: ANQRLNPMHQLLRHF
ANQRYNPMHPLLHHF

SEQ ID NO: 216572 - protein, 15 aa, Artificial Sequence
  Description of Artificial Sequence: Synthetic peptide
  Seed: ANQRLNPMHQLLRHF
ANQRYNPMHPLLIHF

SEQ ID NO: 216573 - protein, 15 aa, Artificial Sequence
  Description of Artificial Sequence: Synthetic peptide
  Seed: ANQRLNPMHQLLRHF
ANQRYNPMHPLLLHF

SEQ ID NO: 216574 - protein, 15 aa, Artificial Sequence
  Description of Artificial Sequence: Synthetic peptide
  Seed: ANQRLNPMHQLLRHF
ANQRYNPMHPLLMHF

SEQ ID NO: 216575 - protein, 15 aa, Artificial Sequence
  Description of Artificial Sequence: Synthetic peptide
  Seed: ANQRLNPMHQLLRHF
ANQRYNPMHPLLNHF

SEQ ID NO: 216576 - protein, 15 aa, Artificial Sequence
  Description of Artificial Sequence: Synthetic peptide
  Seed: ANQRLNPMHQLLRHF
ANQRYNPMHPLLPHF

SEQ ID NO: 216577 - protein, 15 aa, Artificial Sequence
  Description of Artificial Sequence: Synthetic peptide
  Seed: ANQRLNPMHQLLRHF
ANQRYNPMHPLLQHF

SEQ ID NO: 216578 - protein, 15 aa, Artificial Sequence
  Description of Artificial Sequence: Synthetic peptide
  Seed: ANQRLNPMHQLLRHF
ANQRYNPMHPLLRHF

SEQ ID NO: 216579 - protein, 15 aa, Artificial Sequence
  Description of Artificial Sequence: Synthetic peptide
  Seed: ANQRLNPMHQLLRHF
ANQRYNPMHPLLSHF

SEQ ID NO: 216580 - protein, 15 aa, Artificial Sequence
  Description of Artificial Sequence: Synthetic peptide
  Seed: ANQRLNPMHQLLRHF
ANQRYNPMHPLLTHF

SEQ ID NO: 216581 - protein, 15 aa, Artificial Sequence
  Description of Artificial Sequence: Synthetic peptide
  Seed: ANQRLNPMHQLLRHF
ANQRYNPMHPLLVHF

SEQ ID NO: 216582 - protein, 15 aa, Artificial Sequence
  Description of Artificial Sequence: Synthetic peptide
  Seed: ANQRLNPMHQLLRHF
ANQRYNPMHPLLWHF

SEQ ID NO: 216583 - protein, 15 aa, Artificial Sequence
  Description of Artificial Sequence: Synthetic peptide
  Seed: ANQRLNPMHQLLRHF
ANQRYNPMHPLLYHF

SEQ ID NO: 216584 - protein, 15 aa, Artificial Sequence
  Description of Artificial Sequence: Synthetic peptide
  Seed: ANQRLNPMHQLLRHF
ANQRYNPMHQLLAHF

SEQ ID NO: 216585 - protein, 15 aa, Artificial Sequence
  Description of Artificial Sequence: Synthetic peptide
  Seed: ANQRLNPMHQLLRHF
ANQRYNPMHQLLIHF

SEQ ID NO: 216586 - protein, 15 aa, Artificial Sequence
  Description of Artificial Sequence: Synthetic peptide
  Seed: ANQRLNPMHQLLRHF
ANQRYNPMHQLLLHF

SEQ ID NO: 216587 - protein, 15 aa, Artificial Sequence
  Description of Artificial Sequence: Synthetic peptide
  Seed: ANQRLNPMHQLLRHF
ANQRYNPMHQLLVHF

SEQ ID NO: 216588 - protein, 15 aa, Artificial Sequence
  Description of Artificial Sequence: Synthetic peptide
  Seed: ANQRLNPMHQLLRHF
ANQRYNPMHRLLAHF

SEQ ID NO: 216589 - protein, 15 aa, Artificial Sequence
  Description of Artificial Sequence: Synthetic peptide
  Seed: ANQRLNPMHQLLRHF
ANQRYNPMHRLLGHF

SEQ ID NO: 216590 - protein, 15 aa, Artificial Sequence
  Description of Artificial Sequence: Synthetic peptide
  Seed: ANQRLNPMHQLLRHF
ANQRYNPMHRLLHHF

SEQ ID NO: 216591 - protein, 15 aa, Artificial Sequence
  Description of Artificial Sequence: Synthetic peptide
  Seed: ANQRLNPMHQLLRHF
ANQRYNPMHRLLIHF

SEQ ID NO: 216592 - protein, 15 aa, Artificial Sequence
  Description of Artificial Sequence: Synthetic peptide
  Seed: ANQRLNPMHQLLRHF
ANQRYNPMHRLLKHF

SEQ ID NO: 216593 - protein, 15 aa, Artificial Sequence
  Description of Artificial Sequence: Synthetic peptide
  Seed: ANQRLNPMHQLLRHF
ANQRYNPMHRLLLHF

SEQ ID NO: 216594 - protein, 15 aa, Artificial Sequence
  Description of Artificial Sequence: Synthetic peptide
  Seed: ANQRLNPMHQLLRHF
ANQRYNPMHRLLMHF

SEQ ID NO: 216595 - protein, 15 aa, Artificial Sequence
  Description of Artificial Sequence: Synthetic peptide
  Seed: ANQRLNPMHQLLRHF
ANQRYNPMHRLLNHF

SEQ ID NO: 216596 - protein, 15 aa, Artificial Sequence
  Description of Artificial Sequence: Synthetic peptide
  Seed: ANQRLNPMHQLLRHF
ANQRYNPMHRLLPHF

SEQ ID NO: 216597 - protein, 15 aa, Artificial Sequence
  Description of Artificial Sequence: Synthetic peptide
  Seed: ANQRLNPMHQLLRHF
ANQRYNPMHRLLQHF

SEQ ID NO: 216598 - protein, 15 aa, Artificial Sequence
  Description of Artificial Sequence: Synthetic peptide
  Seed: ANQRLNPMHQLLRHF
ANQRYNPMHRLLRHF

SEQ ID NO: 216599 - protein, 15 aa, Artificial Sequence
  Description of Artificial Sequence: Synthetic peptide
  Seed: ANQRLNPMHQLLRHF
ANQRYNPMHRLLSHF

SEQ ID NO: 216600 - protein, 15 aa, Artificial Sequence
  Description of Artificial Sequence: Synthetic peptide
  Seed: ANQRLNPMHQLLRHF
ANQRYNPMHRLLTHF

SEQ ID NO: 216601 - protein, 15 aa, Artificial Sequence
  Description of Artificial Sequence: Synthetic peptide
  Seed: ANQRLNPMHQLLRHF
ANQRYNPMHRLLVHF

SEQ ID NO: 216602 - protein, 15 aa, Artificial Sequence
  Description of Artificial Sequence: Synthetic peptide
  Seed: ANQRLNPMHQLLRHF
ANQRYNPMHSLLAHF

SEQ ID NO: 216603 - protein, 15 aa, Artificial Sequence
  Description of Artificial Sequence: Synthetic peptide
  Seed: ANQRLNPMHQLLRHF
ANQRYNPMHSLLCHF

SEQ ID NO: 216604 - protein, 15 aa, Artificial Sequence
  Description of Artificial Sequence: Synthetic peptide
  Seed: ANQRLNPMHQLLRHF
ANQRYNPMHSLLFHF

SEQ ID NO: 216605 - protein, 15 aa, Artificial Sequence
  Description of Artificial Sequence: Synthetic peptide
  Seed: ANQRLNPMHQLLRHF
ANQRYNPMHSLLGHF

SEQ ID NO: 216606 - protein, 15 aa, Artificial Sequence
  Description of Artificial Sequence: Synthetic peptide
  Seed: ANQRLNPMHQLLRHF
ANQRYNPMHSLLHHF

SEQ ID NO: 216607 - protein, 15 aa, Artificial Sequence
  Description of Artificial Sequence: Synthetic peptide
  Seed: ANQRLNPMHQLLRHF
ANQRYNPMHSLLIHF

SEQ ID NO: 216608 - protein, 15 aa, Artificial Sequence
  Description of Artificial Sequence: Synthetic peptide
  Seed: ANQRLNPMHQLLRHF
ANQRYNPMHSLLKHF

SEQ ID NO: 216609 - protein, 15 aa, Artificial Sequence
  Description of Artificial Sequence: Synthetic peptide
  Seed: ANQRLNPMHQLLRHF
ANQRYNPMHSLLLHF

SEQ ID NO: 216610 - protein, 15 aa, Artificial Sequence
  Description of Artificial Sequence: Synthetic peptide
  Seed: ANQRLNPMHQLLRHF
ANQRYNPMHSLLMHF

SEQ ID NO: 216611 - protein, 15 aa, Artificial Sequence
  Description of Artificial Sequence: Synthetic peptide
  Seed: ANQRLNPMHQLLRHF
ANQRYNPMHSLLNHF

SEQ ID NO: 216612 - protein, 15 aa, Artificial Sequence
  Description of Artificial Sequence: Synthetic peptide
  Seed: ANQRLNPMHQLLRHF
ANQRYNPMHSLLPHF

SEQ ID NO: 216613 - protein, 15 aa, Artificial Sequence
  Description of Artificial Sequence: Synthetic peptide
  Seed: ANQRLNPMHQLLRHF
ANQRYNPMHSLLQHF

SEQ ID NO: 216614 - protein, 15 aa, Artificial Sequence
  Description of Artificial Sequence: Synthetic peptide
  Seed: ANQRLNPMHQLLRHF
ANQRYNPMHSLLRHF

SEQ ID NO: 216615 - protein, 15 aa, Artificial Sequence
  Description of Artificial Sequence: Synthetic peptide
  Seed: ANQRLNPMHQLLRHF
ANQRYNPMHSLLSHF

SEQ ID NO: 216616 - protein, 15 aa, Artificial Sequence
  Description of Artificial Sequence: Synthetic peptide
  Seed: ANQRLNPMHQLLRHF
ANQRYNPMHSLLTHF

SEQ ID NO: 216617 - protein, 15 aa, Artificial Sequence
  Description of Artificial Sequence: Synthetic peptide
  Seed: ANQRLNPMHQLLRHF
ANQRYNPMHSLLVHF

SEQ ID NO: 216618 - protein, 15 aa, Artificial Sequence
  Description of Artificial Sequence: Synthetic peptide
  Seed: ANQRLNPMHQLLRHF
ANQRYNPMHSLLWHF

SEQ ID NO: 216619 - protein, 15 aa, Artificial Sequence
  Description of Artificial Sequence: Synthetic peptide
  Seed: ANQRLNPMHQLLRHF
ANQRYNPMHSLLYHF

SEQ ID NO: 216620 - protein, 15 aa, Artificial Sequence
  Description of Artificial Sequence: Synthetic peptide
  Seed: ANQRLNPMHQLLRHF
ANQRYNPMHTLLAHF

SEQ ID NO: 216621 - protein, 15 aa, Artificial Sequence
  Description of Artificial Sequence: Synthetic peptide
  Seed: ANQRLNPMHQLLRHF
ANQRYNPMHTLLCHF

SEQ ID NO: 216622 - protein, 15 aa, Artificial Sequence
  Description of Artificial Sequence: Synthetic peptide
  Seed: ANQRLNPMHQLLRHF
ANQRYNPMHTLLFHF

SEQ ID NO: 216623 - protein, 15 aa, Artificial Sequence
  Description of Artificial Sequence: Synthetic peptide
  Seed: ANQRLNPMHQLLRHF
ANQRYNPMHTLLGHF

SEQ ID NO: 216624 - protein, 15 aa, Artificial Sequence
  Description of Artificial Sequence: Synthetic peptide
  Seed: ANQRLNPMHQLLRHF
ANQRYNPMHTLLHHF

SEQ ID NO: 216625 - protein, 15 aa, Artificial Sequence
  Description of Artificial Sequence: Synthetic peptide
  Seed: ANQRLNPMHQLLRHF
ANQRYNPMHTLLIHF

SEQ ID NO: 216626 - protein, 15 aa, Artificial Sequence
  Description of Artificial Sequence: Synthetic peptide
  Seed: ANQRLNPMHQLLRHF
ANQRYNPMHTLLLHF

SEQ ID NO: 216627 - protein, 15 aa, Artificial Sequence
  Description of Artificial Sequence: Synthetic peptide
  Seed: ANQRLNPMHQLLRHF
ANQRYNPMHTLLMHF

SEQ ID NO: 216628 - protein, 15 aa, Artificial Sequence
  Description of Artificial Sequence: Synthetic peptide
  Seed: ANQRLNPMHQLLRHF
ANQRYNPMHTLLNHF

SEQ ID NO: 216629 - protein, 15 aa, Artificial Sequence
  Description of Artificial Sequence: Synthetic peptide
  Seed: ANQRLNPMHQLLRHF
ANQRYNPMHTLLPHF

SEQ ID NO: 216630 - protein, 15 aa, Artificial Sequence
  Description of Artificial Sequence: Synthetic peptide
  Seed: ANQRLNPMHQLLRHF
ANQRYNPMHTLLQHF

SEQ ID NO: 216631 - protein, 15 aa, Artificial Sequence
  Description of Artificial Sequence: Synthetic peptide
  Seed: ANQRLNPMHQLLRHF
ANQRYNPMHTLLSHF

SEQ ID NO: 216632 - protein, 15 aa, Artificial Sequence
  Description of Artificial Sequence: Synthetic peptide
  Seed: ANQRLNPMHQLLRHF
ANQRYNPMHTLLTHF

SEQ ID NO: 216633 - protein, 15 aa, Artificial Sequence
  Description of Artificial Sequence: Synthetic peptide
  Seed: ANQRLNPMHQLLRHF
ANQRYNPMHTLLVHF

SEQ ID NO: 216634 - protein, 15 aa, Artificial Sequence
  Description of Artificial Sequence: Synthetic peptide
  Seed: ANQRLNPMHQLLRHF
ANQRYNPMHVLLAHF

SEQ ID NO: 216635 - protein, 15 aa, Artificial Sequence
  Description of Artificial Sequence: Synthetic peptide
  Seed: ANQRLNPMHQLLRHF
ANQRYNPMHVLLGHF

SEQ ID NO: 216636 - protein, 15 aa, Artificial Sequence
  Description of Artificial Sequence: Synthetic peptide
  Seed: ANQRLNPMHQLLRHF
ANQRYNPMHVLLHHF

SEQ ID NO: 216637 - protein, 15 aa, Artificial Sequence
  Description of Artificial Sequence: Synthetic peptide
  Seed: ANQRLNPMHQLLRHF
ANQRYNPMHVLLIHF

SEQ ID NO: 216638 - protein, 15 aa, Artificial Sequence
  Description of Artificial Sequence: Synthetic peptide
  Seed: ANQRLNPMHQLLRHF
ANQRYNPMHVLLLHF

SEQ ID NO: 216639 - protein, 15 aa, Artificial Sequence
  Description of Artificial Sequence: Synthetic peptide
  Seed: ANQRLNPMHQLLRHF
ANQRYNPMHVLLMHF

SEQ ID NO: 216640 - protein, 15 aa, Artificial Sequence
  Description of Artificial Sequence: Synthetic peptide
  Seed: ANQRLNPMHQLLRHF
ANQRYNPMHVLLNHF

SEQ ID NO: 216641 - protein, 15 aa, Artificial Sequence
  Description of Artificial Sequence: Synthetic peptide
  Seed: ANQRLNPMHQLLRHF
ANQRYNPMHVLLPHF

SEQ ID NO: 216642 - protein, 15 aa, Artificial Sequence
  Description of Artificial Sequence: Synthetic peptide
  Seed: ANQRLNPMHQLLRHF
ANQRYNPMHVLLQHF

SEQ ID NO: 216643 - protein, 15 aa, Artificial Sequence
  Description of Artificial Sequence: Synthetic peptide
  Seed: ANQRLNPMHQLLRHF
ANQRYNPMHVLLSHF

SEQ ID NO: 216644 - protein, 15 aa, Artificial Sequence
  Description of Artificial Sequence: Synthetic peptide
  Seed: ANQRLNPMHQLLRHF
ANQRYNPMHVLLTHF

SEQ ID NO: 216645 - protein, 15 aa, Artificial Sequence
  Description of Artificial Sequence: Synthetic peptide
  Seed: ANQRLNPMHQLLRHF
ANQRYNPMHVLLVHF

SEQ ID NO: 216646 - protein, 15 aa, Artificial Sequence
  Description of Artificial Sequence: Synthetic peptide
  Seed: ANQRLNPMHQLLRHF
ANQRYNPNHALLAHF

SEQ ID NO: 216647 - protein, 15 aa, Artificial Sequence
  Description of Artificial Sequence: Synthetic peptide
  Seed: ANQRLNPMHQLLRHF
ANQRYNPNHALLFHF

SEQ ID NO: 216648 - protein, 15 aa, Artificial Sequence
  Description of Artificial Sequence: Synthetic peptide
  Seed: ANQRLNPMHQLLRHF
ANQRYNPNHALLIHF

SEQ ID NO: 216649 - protein, 15 aa, Artificial Sequence
  Description of Artificial Sequence: Synthetic peptide
  Seed: ANQRLNPMHQLLRHF
ANQRYNPNHALLLHF

SEQ ID NO: 216650 - protein, 15 aa, Artificial Sequence
  Description of Artificial Sequence: Synthetic peptide
  Seed: ANQRLNPMHQLLRHF
ANQRYNPNHALLMHF

SEQ ID NO: 216651 - protein, 15 aa, Artificial Sequence
  Description of Artificial Sequence: Synthetic peptide
  Seed: ANQRLNPMHQLLRHF
ANQRYNPNHALLTHF

SEQ ID NO: 216652 - protein, 15 aa, Artificial Sequence
  Description of Artificial Sequence: Synthetic peptide
  Seed: ANQRLNPMHQLLRHF
ANQRYNPNHALLVHF

SEQ ID NO: 216653 - protein, 15 aa, Artificial Sequence
  Description of Artificial Sequence: Synthetic peptide
  Seed: ANQRLNPMHQLLRHF
ANQRYNPNHALLYHF

SEQ ID NO: 216654 - protein, 15 aa, Artificial Sequence
  Description of Artificial Sequence: Synthetic peptide
  Seed: ANQRLNPMHQLLRHF
ANQRYNPNHGLLIHF

SEQ ID NO: 216655 - protein, 15 aa, Artificial Sequence
  Description of Artificial Sequence: Synthetic peptide
  Seed: ANQRLNPMHQLLRHF
ANQRYNPNHGLLLHF

SEQ ID NO: 216656 - protein, 15 aa, Artificial Sequence
  Description of Artificial Sequence: Synthetic peptide
  Seed: ANQRLNPMHQLLRHF
ANQRYNPNHGLLVHF

SEQ ID NO: 216657 - protein, 15 aa, Artificial Sequence
  Description of Artificial Sequence: Synthetic peptide
  Seed: ANQRLNPMHQLLRHF
ANQRYNPNHILLIHF

SEQ ID NO: 216658 - protein, 15 aa, Artificial Sequence
  Description of Artificial Sequence: Synthetic peptide
  Seed: ANQRLNPMHQLLRHF
ANQRYNPNHILLVHF

SEQ ID NO: 216659 - protein, 15 aa, Artificial Sequence
  Description of Artificial Sequence: Synthetic peptide
  Seed: ANQRLNPMHQLLRHF
ANQRYNPNHNLLFHF

SEQ ID NO: 216660 - protein, 15 aa, Artificial Sequence
  Description of Artificial Sequence: Synthetic peptide
  Seed: ANQRLNPMHQLLRHF
ANQRYNPNHNLLIHF

SEQ ID NO: 216661 - protein, 15 aa, Artificial Sequence
  Description of Artificial Sequence: Synthetic peptide
  Seed: ANQRLNPMHQLLRHF
ANQRYNPNHNLLLHF

SEQ ID NO: 216662 - protein, 15 aa, Artificial Sequence
  Description of Artificial Sequence: Synthetic peptide
  Seed: ANQRLNPMHQLLRHF
ANQRYNPNHNLLVHF

SEQ ID NO: 216663 - protein, 15 aa, Artificial Sequence
  Description of Artificial Sequence: Synthetic peptide
  Seed: ANQRLNPMHQLLRHF
ANQRYNPNHPLLIHF

SEQ ID NO: 216664 - protein, 15 aa, Artificial Sequence
  Description of Artificial Sequence: Synthetic peptide
  Seed: ANQRLNPMHQLLRHF
ANQRYNPNHPLLLHF

SEQ ID NO: 216665 - protein, 15 aa, Artificial Sequence
  Description of Artificial Sequence: Synthetic peptide
  Seed: ANQRLNPMHQLLRHF
ANQRYNPNHPLLVHF

SEQ ID NO: 216666 - protein, 15 aa, Artificial Sequence
  Description of Artificial Sequence: Synthetic peptide
  Seed: ANQRLNPMHQLLRHF
ANQRYNPNHSLLAHF

SEQ ID NO: 216667 - protein, 15 aa, Artificial Sequence
  Description of Artificial Sequence: Synthetic peptide
  Seed: ANQRLNPMHQLLRHF
ANQRYNPNHSLLFHF

SEQ ID NO: 216668 - protein, 15 aa, Artificial Sequence
  Description of Artificial Sequence: Synthetic peptide
  Seed: ANQRLNPMHQLLRHF
ANQRYNPNHSLLIHF

SEQ ID NO: 216669 - protein, 15 aa, Artificial Sequence
  Description of Artificial Sequence: Synthetic peptide
  Seed: ANQRLNPMHQLLRHF
ANQRYNPNHSLLLHF

SEQ ID NO: 216670 - protein, 15 aa, Artificial Sequence
  Description of Artificial Sequence: Synthetic peptide
  Seed: ANQRLNPMHQLLRHF
ANQRYNPNHSLLVHF

SEQ ID NO: 216671 - protein, 15 aa, Artificial Sequence
  Description of Artificial Sequence: Synthetic peptide
  Seed: ANQRLNPMHQLLRHF
ANQRYNPNHTLLIHF

SEQ ID NO: 216672 - protein, 15 aa, Artificial Sequence
  Description of Artificial Sequence: Synthetic peptide
  Seed: ANQRLNPMHQLLRHF
ANQRYNPNHTLLLHF

SEQ ID NO: 216673 - protein, 15 aa, Artificial Sequence
  Description of Artificial Sequence: Synthetic peptide
  Seed: ANQRLNPMHQLLRHF
ANQRYNPNHTLLVHF

SEQ ID NO: 216674 - protein, 15 aa, Artificial Sequence
  Description of Artificial Sequence: Synthetic peptide
  Seed: ANQRLNPMHQLLRHF
ANQRYNPNHVLLIHF

SEQ ID NO: 216675 - protein, 15 aa, Artificial Sequence
  Description of Artificial Sequence: Synthetic peptide
  Seed: ANQRLNPMHQLLRHF
ANQRYNPNHVLLLHF

SEQ ID NO: 216676 - protein, 15 aa, Artificial Sequence
  Description of Artificial Sequence: Synthetic peptide
  Seed: ANQRLNPMHQLLRHF
ANQRYNPNHVLLVHF

SEQ ID NO: 216677 - protein, 15 aa, Artificial Sequence
  Description of Artificial Sequence: Synthetic peptide
  Seed: ANQRLNPMHQLLRHF
ANQRYNPQHALLAHF

SEQ ID NO: 216678 - protein, 15 aa, Artificial Sequence
  Description of Artificial Sequence: Synthetic peptide
  Seed: ANQRLNPMHQLLRHF
ANQRYNPQHALLCHF

SEQ ID NO: 216679 - protein, 15 aa, Artificial Sequence
  Description of Artificial Sequence: Synthetic peptide
  Seed: ANQRLNPMHQLLRHF
ANQRYNPQHALLFHF

SEQ ID NO: 216680 - protein, 15 aa, Artificial Sequence
  Description of Artificial Sequence: Synthetic peptide
  Seed: ANQRLNPMHQLLRHF
ANQRYNPQHALLGHF

SEQ ID NO: 216681 - protein, 15 aa, Artificial Sequence
  Description of Artificial Sequence: Synthetic peptide
  Seed: ANQRLNPMHQLLRHF
ANQRYNPQHALLIHF

SEQ ID NO: 216682 - protein, 15 aa, Artificial Sequence
  Description of Artificial Sequence: Synthetic peptide
  Seed: ANQRLNPMHQLLRHF
ANQRYNPQHALLLHF

SEQ ID NO: 216683 - protein, 15 aa, Artificial Sequence
  Description of Artificial Sequence: Synthetic peptide
  Seed: ANQRLNPMHQLLRHF
ANQRYNPQHALLMHF

SEQ ID NO: 216684 - protein, 15 aa, Artificial Sequence
  Description of Artificial Sequence: Synthetic peptide
  Seed: ANQRLNPMHQLLRHF
ANQRYNPQHALLNHF

SEQ ID NO: 216685 - protein, 15 aa, Artificial Sequence
  Description of Artificial Sequence: Synthetic peptide
  Seed: ANQRLNPMHQLLRHF
ANQRYNPQHALLSHF

SEQ ID NO: 216686 - protein, 15 aa, Artificial Sequence
  Description of Artificial Sequence: Synthetic peptide
  Seed: ANQRLNPMHQLLRHF
ANQRYNPQHALLTHF

SEQ ID NO: 216687 - protein, 15 aa, Artificial Sequence
  Description of Artificial Sequence: Synthetic peptide
  Seed: ANQRLNPMHQLLRHF
ANQRYNPQHALLVHF

SEQ ID NO: 216688 - protein, 15 aa, Artificial Sequence
  Description of Artificial Sequence: Synthetic peptide
  Seed: ANQRLNPMHQLLRHF
ANQRYNPQHFLLLHF

SEQ ID NO: 216689 - protein, 15 aa, Artificial Sequence
  Description of Artificial Sequence: Synthetic peptide
  Seed: ANQRLNPMHQLLRHF
ANQRYNPQHGLLAHF

SEQ ID NO: 216690 - protein, 15 aa, Artificial Sequence
  Description of Artificial Sequence: Synthetic peptide
  Seed: ANQRLNPMHQLLRHF
ANQRYNPQHGLLGHF

SEQ ID NO: 216691 - protein, 15 aa, Artificial Sequence
  Description of Artificial Sequence: Synthetic peptide
  Seed: ANQRLNPMHQLLRHF
ANQRYNPQHGLLIHF

SEQ ID NO: 216692 - protein, 15 aa, Artificial Sequence
  Description of Artificial Sequence: Synthetic peptide
  Seed: ANQRLNPMHQLLRHF
ANQRYNPQHGLLLHF

SEQ ID NO: 216693 - protein, 15 aa, Artificial Sequence
  Description of Artificial Sequence: Synthetic peptide
  Seed: ANQRLNPMHQLLRHF
ANQRYNPQHGLLMHF

SEQ ID NO: 216694 - protein, 15 aa, Artificial Sequence
  Description of Artificial Sequence: Synthetic peptide
  Seed: ANQRLNPMHQLLRHF
ANQRYNPQHGLLSHF

SEQ ID NO: 216695 - protein, 15 aa, Artificial Sequence
  Description of Artificial Sequence: Synthetic peptide
  Seed: ANQRLNPMHQLLRHF
ANQRYNPQHGLLTHF

SEQ ID NO: 216696 - protein, 15 aa, Artificial Sequence
  Description of Artificial Sequence: Synthetic peptide
  Seed: ANQRLNPMHQLLRHF
ANQRYNPQHGLLVHF

SEQ ID NO: 216697 - protein, 15 aa, Artificial Sequence
  Description of Artificial Sequence: Synthetic peptide
  Seed: ANQRLNPMHQLLRHF
ANQRYNPQHNLLAHF

SEQ ID NO: 216698 - protein, 15 aa, Artificial Sequence
  Description of Artificial Sequence: Synthetic peptide
  Seed: ANQRLNPMHQLLRHF
ANQRYNPQHNLLIHF

SEQ ID NO: 216699 - protein, 15 aa, Artificial Sequence
  Description of Artificial Sequence: Synthetic peptide
  Seed: ANQRLNPMHQLLRHF
ANQRYNPQHNLLLHF

SEQ ID NO: 216700 - protein, 15 aa, Artificial Sequence
  Description of Artificial Sequence: Synthetic peptide
  Seed: ANQRLNPMHQLLRHF
ANQRYNPQHNLLTHF

SEQ ID NO: 216701 - protein, 15 aa, Artificial Sequence
  Description of Artificial Sequence: Synthetic peptide
  Seed: ANQRLNPMHQLLRHF
ANQRYNPQHNLLVHF

SEQ ID NO: 216702 - protein, 15 aa, Artificial Sequence
  Description of Artificial Sequence: Synthetic peptide
  Seed: ANQRLNPMHQLLRHF
ANQRYNPQHPLLAHF

SEQ ID NO: 216703 - protein, 15 aa, Artificial Sequence
  Description of Artificial Sequence: Synthetic peptide
  Seed: ANQRLNPMHQLLRHF
ANQRYNPQHPLLIHF

SEQ ID NO: 216704 - protein, 15 aa, Artificial Sequence
  Description of Artificial Sequence: Synthetic peptide
  Seed: ANQRLNPMHQLLRHF
ANQRYNPQHPLLLHF

SEQ ID NO: 216705 - protein, 15 aa, Artificial Sequence
  Description of Artificial Sequence: Synthetic peptide
  Seed: ANQRLNPMHQLLRHF
ANQRYNPQHPLLMHF

SEQ ID NO: 216706 - protein, 15 aa, Artificial Sequence
  Description of Artificial Sequence: Synthetic peptide
  Seed: ANQRLNPMHQLLRHF
ANQRYNPQHPLLSHF

SEQ ID NO: 216707 - protein, 15 aa, Artificial Sequence
  Description of Artificial Sequence: Synthetic peptide
  Seed: ANQRLNPMHQLLRHF
ANQRYNPQHPLLTHF

SEQ ID NO: 216708 - protein, 15 aa, Artificial Sequence
  Description of Artificial Sequence: Synthetic peptide
  Seed: ANQRLNPMHQLLRHF
ANQRYNPQHPLLVHF

SEQ ID NO: 216709 - protein, 15 aa, Artificial Sequence
  Description of Artificial Sequence: Synthetic peptide
  Seed: ANQRLNPMHQLLRHF
ANQRYNPQHSLLAHF

SEQ ID NO: 216710 - protein, 15 aa, Artificial Sequence
  Description of Artificial Sequence: Synthetic peptide
  Seed: ANQRLNPMHQLLRHF
ANQRYNPQHSLLGHF

SEQ ID NO: 216711 - protein, 15 aa, Artificial Sequence
  Description of Artificial Sequence: Synthetic peptide
  Seed: ANQRLNPMHQLLRHF
ANQRYNPQHSLLIHF

SEQ ID NO: 216712 - protein, 15 aa, Artificial Sequence
  Description of Artificial Sequence: Synthetic peptide
  Seed: ANQRLNPMHQLLRHF
ANQRYNPQHSLLLHF

SEQ ID NO: 216713 - protein, 15 aa, Artificial Sequence
  Description of Artificial Sequence: Synthetic peptide
  Seed: ANQRLNPMHQLLRHF
ANQRYNPQHSLLMHF

SEQ ID NO: 216714 - protein, 15 aa, Artificial Sequence
  Description of Artificial Sequence: Synthetic peptide
  Seed: ANQRLNPMHQLLRHF
ANQRYNPQHSLLNHF

SEQ ID NO: 216715 - protein, 15 aa, Artificial Sequence
  Description of Artificial Sequence: Synthetic peptide
  Seed: ANQRLNPMHQLLRHF
ANQRYNPQHSLLSHF

SEQ ID NO: 216716 - protein, 15 aa, Artificial Sequence
  Description of Artificial Sequence: Synthetic peptide
  Seed: ANQRLNPMHQLLRHF
ANQRYNPQHSLLTHF

SEQ ID NO: 216717 - protein, 15 aa, Artificial Sequence
  Description of Artificial Sequence: Synthetic peptide
  Seed: ANQRLNPMHQLLRHF
ANQRYNPQHSLLVHF

SEQ ID NO: 216718 - protein, 15 aa, Artificial Sequence
  Description of Artificial Sequence: Synthetic peptide
  Seed: ANQRLNPMHQLLRHF
ANQRYNPQHTLLAHF

SEQ ID NO: 216719 - protein, 15 aa, Artificial Sequence
  Description of Artificial Sequence: Synthetic peptide
  Seed: ANQRLNPMHQLLRHF
ANQRYNPQHTLLIHF

SEQ ID NO: 216720 - protein, 15 aa, Artificial Sequence
  Description of Artificial Sequence: Synthetic peptide
  Seed: ANQRLNPMHQLLRHF
ANQRYNPQHTLLLHF

SEQ ID NO: 216721 - protein, 15 aa, Artificial Sequence
  Description of Artificial Sequence: Synthetic peptide
  Seed: ANQRLNPMHQLLRHF
ANQRYNPQHTLLMHF

SEQ ID NO: 216722 - protein, 15 aa, Artificial Sequence
  Description of Artificial Sequence: Synthetic peptide
  Seed: ANQRLNPMHQLLRHF
ANQRYNPQHTLLSHF

SEQ ID NO: 216723 - protein, 15 aa, Artificial Sequence
  Description of Artificial Sequence: Synthetic peptide
  Seed: ANQRLNPMHQLLRHF
ANQRYNPQHTLLTHF

SEQ ID NO: 216724 - protein, 15 aa, Artificial Sequence
  Description of Artificial Sequence: Synthetic peptide
  Seed: ANQRLNPMHQLLRHF
ANQRYNPQHTLLVHF

SEQ ID NO: 216725 - protein, 15 aa, Artificial Sequence
  Description of Artificial Sequence: Synthetic peptide
  Seed: ANQRLNPMHQLLRHF
ANQRYNPQHVLLAHF

SEQ ID NO: 216726 - protein, 15 aa, Artificial Sequence
  Description of Artificial Sequence: Synthetic peptide
  Seed: ANQRLNPMHQLLRHF
ANQRYNPQHVLLIHF

SEQ ID NO: 216727 - protein, 15 aa, Artificial Sequence
  Description of Artificial Sequence: Synthetic peptide
  Seed: ANQRLNPMHQLLRHF
ANQRYNPQHVLLLHF

SEQ ID NO: 216728 - protein, 15 aa, Artificial Sequence
  Description of Artificial Sequence: Synthetic peptide
  Seed: ANQRLNPMHQLLRHF
ANQRYNPQHVLLNHF

SEQ ID NO: 216729 - protein, 15 aa, Artificial Sequence
  Description of Artificial Sequence: Synthetic peptide
  Seed: ANQRLNPMHQLLRHF
ANQRYNPQHVLLVHF

SEQ ID NO: 216730 - protein, 15 aa, Artificial Sequence
  Description of Artificial Sequence: Synthetic peptide
  Seed: ANQRLNPMHQLLRHF
ANQRYNPSHALLAHF

SEQ ID NO: 216731 - protein, 15 aa, Artificial Sequence
  Description of Artificial Sequence: Synthetic peptide
  Seed: ANQRLNPMHQLLRHF
ANQRYNPSHALLFHF

SEQ ID NO: 216732 - protein, 15 aa, Artificial Sequence
  Description of Artificial Sequence: Synthetic peptide
  Seed: ANQRLNPMHQLLRHF
ANQRYNPSHALLGHF

SEQ ID NO: 216733 - protein, 15 aa, Artificial Sequence
  Description of Artificial Sequence: Synthetic peptide
  Seed: ANQRLNPMHQLLRHF
ANQRYNPSHALLIHF

SEQ ID NO: 216734 - protein, 15 aa, Artificial Sequence
  Description of Artificial Sequence: Synthetic peptide
  Seed: ANQRLNPMHQLLRHF
ANQRYNPSHALLLHF

SEQ ID NO: 216735 - protein, 15 aa, Artificial Sequence
  Description of Artificial Sequence: Synthetic peptide
  Seed: ANQRLNPMHQLLRHF
ANQRYNPSHALLMHF

SEQ ID NO: 216736 - protein, 15 aa, Artificial Sequence
  Description of Artificial Sequence: Synthetic peptide
  Seed: ANQRLNPMHQLLRHF
ANQRYNPSHALLNHF

SEQ ID NO: 216737 - protein, 15 aa, Artificial Sequence
  Description of Artificial Sequence: Synthetic peptide
  Seed: ANQRLNPMHQLLRHF
ANQRYNPSHALLSHF

SEQ ID NO: 216738 - protein, 15 aa, Artificial Sequence
  Description of Artificial Sequence: Synthetic peptide
  Seed: ANQRLNPMHQLLRHF
ANQRYNPSHALLTHF

SEQ ID NO: 216739 - protein, 15 aa, Artificial Sequence
  Description of Artificial Sequence: Synthetic peptide
  Seed: ANQRLNPMHQLLRHF
ANQRYNPSHALLVHF

SEQ ID NO: 216740 - protein, 15 aa, Artificial Sequence
  Description of Artificial Sequence: Synthetic peptide
  Seed: ANQRLNPMHQLLRHF
ANQRYNPSHFLLFHF

SEQ ID NO: 216741 - protein, 15 aa, Artificial Sequence
  Description of Artificial Sequence: Synthetic peptide
  Seed: ANQRLNPMHQLLRHF
ANQRYNPSHFLLIHF

SEQ ID NO: 216742 - protein, 15 aa, Artificial Sequence
  Description of Artificial Sequence: Synthetic peptide
  Seed: ANQRLNPMHQLLRHF
ANQRYNPSHFLLLHF

SEQ ID NO: 216743 - protein, 15 aa, Artificial Sequence
  Description of Artificial Sequence: Synthetic peptide
  Seed: ANQRLNPMHQLLRHF
ANQRYNPSHFLLMHF

SEQ ID NO: 216744 - protein, 15 aa, Artificial Sequence
  Description of Artificial Sequence: Synthetic peptide
  Seed: ANQRLNPMHQLLRHF
ANQRYNPSHFLLVHF

SEQ ID NO: 216745 - protein, 15 aa, Artificial Sequence
  Description of Artificial Sequence: Synthetic peptide
  Seed: ANQRLNPMHQLLRHF
ANQRYNPSHGLLAHF

SEQ ID NO: 216746 - protein, 15 aa, Artificial Sequence
  Description of Artificial Sequence: Synthetic peptide
  Seed: ANQRLNPMHQLLRHF
ANQRYNPSHGLLIHF

SEQ ID NO: 216747 - protein, 15 aa, Artificial Sequence
  Description of Artificial Sequence: Synthetic peptide
  Seed: ANQRLNPMHQLLRHF
ANQRYNPSHGLLLHF

SEQ ID NO: 216748 - protein, 15 aa, Artificial Sequence
  Description of Artificial Sequence: Synthetic peptide
  Seed: ANQRLNPMHQLLRHF
ANQRYNPSHGLLMHF

SEQ ID NO: 216749 - protein, 15 aa, Artificial Sequence
  Description of Artificial Sequence: Synthetic peptide
  Seed: ANQRLNPMHQLLRHF
ANQRYNPSHGLLSHF

SEQ ID NO: 216750 - protein, 15 aa, Artificial Sequence
  Description of Artificial Sequence: Synthetic peptide
  Seed: ANQRLNPMHQLLRHF
ANQRYNPSHGLLTHF

SEQ ID NO: 216751 - protein, 15 aa, Artificial Sequence
  Description of Artificial Sequence: Synthetic peptide
  Seed: ANQRLNPMHQLLRHF
ANQRYNPSHGLLVHF

SEQ ID NO: 216752 - protein, 15 aa, Artificial Sequence
  Description of Artificial Sequence: Synthetic peptide
  Seed: ANQRLNPMHQLLRHF
ANQRYNPSHNLLAHF

SEQ ID NO: 216753 - protein, 15 aa, Artificial Sequence
  Description of Artificial Sequence: Synthetic peptide
  Seed: ANQRLNPMHQLLRHF
ANQRYNPSHNLLIHF

SEQ ID NO: 216754 - protein, 15 aa, Artificial Sequence
  Description of Artificial Sequence: Synthetic peptide
  Seed: ANQRLNPMHQLLRHF
ANQRYNPSHNLLLHF

SEQ ID NO: 216755 - protein, 15 aa, Artificial Sequence
  Description of Artificial Sequence: Synthetic peptide
  Seed: ANQRLNPMHQLLRHF
ANQRYNPSHNLLVHF

SEQ ID NO: 216756 - protein, 15 aa, Artificial Sequence
  Description of Artificial Sequence: Synthetic peptide
  Seed: ANQRLNPMHQLLRHF
ANQRYNPSHPLLAHF

SEQ ID NO: 216757 - protein, 15 aa, Artificial Sequence
  Description of Artificial Sequence: Synthetic peptide
  Seed: ANQRLNPMHQLLRHF
ANQRYNPSHPLLIHF

SEQ ID NO: 216758 - protein, 15 aa, Artificial Sequence
  Description of Artificial Sequence: Synthetic peptide
  Seed: ANQRLNPMHQLLRHF
ANQRYNPSHPLLLHF

SEQ ID NO: 216759 - protein, 15 aa, Artificial Sequence
  Description of Artificial Sequence: Synthetic peptide
  Seed: ANQRLNPMHQLLRHF
ANQRYNPSHPLLMHF

SEQ ID NO: 216760 - protein, 15 aa, Artificial Sequence
  Description of Artificial Sequence: Synthetic peptide
  Seed: ANQRLNPMHQLLRHF
ANQRYNPSHPLLSHF

SEQ ID NO: 216761 - protein, 15 aa, Artificial Sequence
  Description of Artificial Sequence: Synthetic peptide
  Seed: ANQRLNPMHQLLRHF
ANQRYNPSHPLLTHF

SEQ ID NO: 216762 - protein, 15 aa, Artificial Sequence
  Description of Artificial Sequence: Synthetic peptide
  Seed: ANQRLNPMHQLLRHF
ANQRYNPSHPLLVHF

SEQ ID NO: 216763 - protein, 15 aa, Artificial Sequence
  Description of Artificial Sequence: Synthetic peptide
  Seed: ANQRLNPMHQLLRHF
ANQRYNPSHRLLAHF

SEQ ID NO: 216764 - protein, 15 aa, Artificial Sequence
  Description of Artificial Sequence: Synthetic peptide
  Seed: ANQRLNPMHQLLRHF
ANQRYNPSHRLLSHF

SEQ ID NO: 216765 - protein, 15 aa, Artificial Sequence
  Description of Artificial Sequence: Synthetic peptide
  Seed: ANQRLNPMHQLLRHF
ANQRYNPSHSLLAHF

SEQ ID NO: 216766 - protein, 15 aa, Artificial Sequence
  Description of Artificial Sequence: Synthetic peptide
  Seed: ANQRLNPMHQLLRHF
ANQRYNPSHSLLIHF

SEQ ID NO: 216767 - protein, 15 aa, Artificial Sequence
  Description of Artificial Sequence: Synthetic peptide
  Seed: ANQRLNPMHQLLRHF
ANQRYNPSHSLLLHF

SEQ ID NO: 216768 - protein, 15 aa, Artificial Sequence
  Description of Artificial Sequence: Synthetic peptide
  Seed: ANQRLNPMHQLLRHF
ANQRYNPSHSLLMHF

SEQ ID NO: 216769 - protein, 15 aa, Artificial Sequence
  Description of Artificial Sequence: Synthetic peptide
  Seed: ANQRLNPMHQLLRHF
ANQRYNPSHSLLSHF

SEQ ID NO: 216770 - protein, 15 aa, Artificial Sequence
  Description of Artificial Sequence: Synthetic peptide
  Seed: ANQRLNPMHQLLRHF
ANQRYNPSHSLLTHF

SEQ ID NO: 216771 - protein, 15 aa, Artificial Sequence
  Description of Artificial Sequence: Synthetic peptide
  Seed: ANQRLNPMHQLLRHF
ANQRYNPSHSLLVHF

SEQ ID NO: 216772 - protein, 15 aa, Artificial Sequence
  Description of Artificial Sequence: Synthetic peptide
  Seed: ANQRLNPMHQLLRHF
ANQRYNPSHTLLAHF

SEQ ID NO: 216773 - protein, 15 aa, Artificial Sequence
  Description of Artificial Sequence: Synthetic peptide
  Seed: ANQRLNPMHQLLRHF
ANQRYNPSHTLLIHF

SEQ ID NO: 216774 - protein, 15 aa, Artificial Sequence
  Description of Artificial Sequence: Synthetic peptide
  Seed: ANQRLNPMHQLLRHF
ANQRYNPSHTLLLHF

SEQ ID NO: 216775 - protein, 15 aa, Artificial Sequence
  Description of Artificial Sequence: Synthetic peptide
  Seed: ANQRLNPMHQLLRHF
ANQRYNPSHTLLVHF

SEQ ID NO: 216776 - protein, 15 aa, Artificial Sequence
  Description of Artificial Sequence: Synthetic peptide
  Seed: ANQRLNPMHQLLRHF
ANQRYNPSHVLLAHF

SEQ ID NO: 216777 - protein, 15 aa, Artificial Sequence
  Description of Artificial Sequence: Synthetic peptide
  Seed: ANQRLNPMHQLLRHF
ANQRYNPSHVLLIHF

SEQ ID NO: 216778 - protein, 15 aa, Artificial Sequence
  Description of Artificial Sequence: Synthetic peptide
  Seed: ANQRLNPMHQLLRHF
ANQRYNPSHVLLLHF

SEQ ID NO: 216779 - protein, 15 aa, Artificial Sequence
  Description of Artificial Sequence: Synthetic peptide
  Seed: ANQRLNPMHQLLRHF
ANQRYNPSHVLLVHF

SEQ ID NO: 216780 - protein, 15 aa, Artificial Sequence
  Description of Artificial Sequence: Synthetic peptide
  Seed: ANQRLNPMHQLLRHF
ANQRYNPTHALLAHF

SEQ ID NO: 216781 - protein, 15 aa, Artificial Sequence
  Description of Artificial Sequence: Synthetic peptide
  Seed: ANQRLNPMHQLLRHF
ANQRYNPTHALLIHF

SEQ ID NO: 216782 - protein, 15 aa, Artificial Sequence
  Description of Artificial Sequence: Synthetic peptide
  Seed: ANQRLNPMHQLLRHF
ANQRYNPTHALLLHF

SEQ ID NO: 216783 - protein, 15 aa, Artificial Sequence
  Description of Artificial Sequence: Synthetic peptide
  Seed: ANQRLNPMHQLLRHF
ANQRYNPTHALLMHF

SEQ ID NO: 216784 - protein, 15 aa, Artificial Sequence
  Description of Artificial Sequence: Synthetic peptide
  Seed: ANQRLNPMHQLLRHF
ANQRYNPTHALLSHF

SEQ ID NO: 216785 - protein, 15 aa, Artificial Sequence
  Description of Artificial Sequence: Synthetic peptide
  Seed: ANQRLNPMHQLLRHF
ANQRYNPTHALLTHF

SEQ ID NO: 216786 - protein, 15 aa, Artificial Sequence
  Description of Artificial Sequence: Synthetic peptide
  Seed: ANQRLNPMHQLLRHF
ANQRYNPTHALLVHF

SEQ ID NO: 216787 - protein, 15 aa, Artificial Sequence
  Description of Artificial Sequence: Synthetic peptide
  Seed: ANQRLNPMHQLLRHF
ANQRYNPTHFLLAHF

SEQ ID NO: 216788 - protein, 15 aa, Artificial Sequence
  Description of Artificial Sequence: Synthetic peptide
  Seed: ANQRLNPMHQLLRHF
ANQRYNPTHFLLFHF

SEQ ID NO: 216789 - protein, 15 aa, Artificial Sequence
  Description of Artificial Sequence: Synthetic peptide
  Seed: ANQRLNPMHQLLRHF
ANQRYNPTHFLLIHF

SEQ ID NO: 216790 - protein, 15 aa, Artificial Sequence
  Description of Artificial Sequence: Synthetic peptide
  Seed: ANQRLNPMHQLLRHF
ANQRYNPTHFLLLHF

SEQ ID NO: 216791 - protein, 15 aa, Artificial Sequence
  Description of Artificial Sequence: Synthetic peptide
  Seed: ANQRLNPMHQLLRHF
ANQRYNPTHFLLMHF

SEQ ID NO: 216792 - protein, 15 aa, Artificial Sequence
  Description of Artificial Sequence: Synthetic peptide
  Seed: ANQRLNPMHQLLRHF
ANQRYNPTHFLLVHF

SEQ ID NO: 216793 - protein, 15 aa, Artificial Sequence
  Description of Artificial Sequence: Synthetic peptide
  Seed: ANQRLNPMHQLLRHF
ANQRYNPTHGLLAHF

SEQ ID NO: 216794 - protein, 15 aa, Artificial Sequence
  Description of Artificial Sequence: Synthetic peptide
  Seed: ANQRLNPMHQLLRHF
ANQRYNPTHGLLIHF

SEQ ID NO: 216795 - protein, 15 aa, Artificial Sequence
  Description of Artificial Sequence: Synthetic peptide
  Seed: ANQRLNPMHQLLRHF
ANQRYNPTHGLLLHF

SEQ ID NO: 216796 - protein, 15 aa, Artificial Sequence
  Description of Artificial Sequence: Synthetic peptide
  Seed: ANQRLNPMHQLLRHF
ANQRYNPTHGLLMHF

SEQ ID NO: 216797 - protein, 15 aa, Artificial Sequence
  Description of Artificial Sequence: Synthetic peptide
  Seed: ANQRLNPMHQLLRHF
ANQRYNPTHGLLVHF

SEQ ID NO: 216798 - protein, 15 aa, Artificial Sequence
  Description of Artificial Sequence: Synthetic peptide
  Seed: ANQRLNPMHQLLRHF
ANQRYNPTHPLLAHF

SEQ ID NO: 216799 - protein, 15 aa, Artificial Sequence
  Description of Artificial Sequence: Synthetic peptide
  Seed: ANQRLNPMHQLLRHF
ANQRYNPTHPLLIHF

SEQ ID NO: 216800 - protein, 15 aa, Artificial Sequence
  Description of Artificial Sequence: Synthetic peptide
  Seed: ANQRLNPMHQLLRHF
ANQRYNPTHPLLLHF

SEQ ID NO: 216801 - protein, 15 aa, Artificial Sequence
  Description of Artificial Sequence: Synthetic peptide
  Seed: ANQRLNPMHQLLRHF
ANQRYNPTHPLLVHF

SEQ ID NO: 216802 - protein, 15 aa, Artificial Sequence
  Description of Artificial Sequence: Synthetic peptide
  Seed: ANQRLNPMHQLLRHF
ANQRYNPTHSLLAHF

SEQ ID NO: 216803 - protein, 15 aa, Artificial Sequence
  Description of Artificial Sequence: Synthetic peptide
  Seed: ANQRLNPMHQLLRHF
ANQRYNPTHSLLIHF

SEQ ID NO: 216804 - protein, 15 aa, Artificial Sequence
  Description of Artificial Sequence: Synthetic peptide
  Seed: ANQRLNPMHQLLRHF
ANQRYNPTHSLLLHF

SEQ ID NO: 216805 - protein, 15 aa, Artificial Sequence
  Description of Artificial Sequence: Synthetic peptide
  Seed: ANQRLNPMHQLLRHF
ANQRYNPTHSLLMHF

SEQ ID NO: 216806 - protein, 15 aa, Artificial Sequence
  Description of Artificial Sequence: Synthetic peptide
  Seed: ANQRLNPMHQLLRHF
ANQRYNPTHSLLTHF

SEQ ID NO: 216807 - protein, 15 aa, Artificial Sequence
  Description of Artificial Sequence: Synthetic peptide
  Seed: ANQRLNPMHQLLRHF
ANQRYNPTHSLLVHF

SEQ ID NO: 216808 - protein, 15 aa, Artificial Sequence
  Description of Artificial Sequence: Synthetic peptide
  Seed: ANQRLNPMHQLLRHF
ANQRYNPTHTLLIHF

SEQ ID NO: 216809 - protein, 15 aa, Artificial Sequence
  Description of Artificial Sequence: Synthetic peptide
  Seed: ANQRLNPMHQLLRHF
ANQRYNPTHTLLLHF

SEQ ID NO: 216810 - protein, 15 aa, Artificial Sequence
  Description of Artificial Sequence: Synthetic peptide
  Seed: ANQRLNPMHQLLRHF
ANQRYNPTHTLLVHF

SEQ ID NO: 216811 - protein, 15 aa, Artificial Sequence
  Description of Artificial Sequence: Synthetic peptide
  Seed: ANQRLNPMHQLLRHF
ANQRYNPVHALLAHF

SEQ ID NO: 216812 - protein, 15 aa, Artificial Sequence
  Description of Artificial Sequence: Synthetic peptide
  Seed: ANQRLNPMHQLLRHF
ANQRYNPVHALLCHF

SEQ ID NO: 216813 - protein, 15 aa, Artificial Sequence
  Description of Artificial Sequence: Synthetic peptide
  Seed: ANQRLNPMHQLLRHF
ANQRYNPVHALLFHF

SEQ ID NO: 216814 - protein, 15 aa, Artificial Sequence
  Description of Artificial Sequence: Synthetic peptide
  Seed: ANQRLNPMHQLLRHF
ANQRYNPVHALLGHF

SEQ ID NO: 216815 - protein, 15 aa, Artificial Sequence
  Description of Artificial Sequence: Synthetic peptide
  Seed: ANQRLNPMHQLLRHF
ANQRYNPVHALLHHF

SEQ ID NO: 216816 - protein, 15 aa, Artificial Sequence
  Description of Artificial Sequence: Synthetic peptide
  Seed: ANQRLNPMHQLLRHF
ANQRYNPVHALLIHF

SEQ ID NO: 216817 - protein, 15 aa, Artificial Sequence
  Description of Artificial Sequence: Synthetic peptide
  Seed: ANQRLNPMHQLLRHF
ANQRYNPVHALLLHF

SEQ ID NO: 216818 - protein, 15 aa, Artificial Sequence
  Description of Artificial Sequence: Synthetic peptide
  Seed: ANQRLNPMHQLLRHF
ANQRYNPVHALLMHF

SEQ ID NO: 216819 - protein, 15 aa, Artificial Sequence
  Description of Artificial Sequence: Synthetic peptide
  Seed: ANQRLNPMHQLLRHF
ANQRYNPVHALLNHF

SEQ ID NO: 216820 - protein, 15 aa, Artificial Sequence
  Description of Artificial Sequence: Synthetic peptide
  Seed: ANQRLNPMHQLLRHF
ANQRYNPVHALLSHF

SEQ ID NO: 216821 - protein, 15 aa, Artificial Sequence
  Description of Artificial Sequence: Synthetic peptide
  Seed: ANQRLNPMHQLLRHF
ANQRYNPVHALLTHF

SEQ ID NO: 216822 - protein, 15 aa, Artificial Sequence
  Description of Artificial Sequence: Synthetic peptide
  Seed: ANQRLNPMHQLLRHF
ANQRYNPVHALLVHF

SEQ ID NO: 216823 - protein, 15 aa, Artificial Sequence
  Description of Artificial Sequence: Synthetic peptide
  Seed: ANQRLNPMHQLLRHF
ANQRYNPVHFLLAHF

SEQ ID NO: 216824 - protein, 15 aa, Artificial Sequence
  Description of Artificial Sequence: Synthetic peptide
  Seed: ANQRLNPMHQLLRHF
ANQRYNPVHFLLFHF

SEQ ID NO: 216825 - protein, 15 aa, Artificial Sequence
  Description of Artificial Sequence: Synthetic peptide
  Seed: ANQRLNPMHQLLRHF
ANQRYNPVHFLLIHF

SEQ ID NO: 216826 - protein, 15 aa, Artificial Sequence
  Description of Artificial Sequence: Synthetic peptide
  Seed: ANQRLNPMHQLLRHF
ANQRYNPVHFLLLHF

SEQ ID NO: 216827 - protein, 15 aa, Artificial Sequence
  Description of Artificial Sequence: Synthetic peptide
  Seed: ANQRLNPMHQLLRHF
ANQRYNPVHFLLMHF

SEQ ID NO: 216828 - protein, 15 aa, Artificial Sequence
  Description of Artificial Sequence: Synthetic peptide
  Seed: ANQRLNPMHQLLRHF
ANQRYNPVHFLLTHF

SEQ ID NO: 216829 - protein, 15 aa, Artificial Sequence
  Description of Artificial Sequence: Synthetic peptide
  Seed: ANQRLNPMHQLLRHF
ANQRYNPVHFLLVHF

SEQ ID NO: 216830 - protein, 15 aa, Artificial Sequence
  Description of Artificial Sequence: Synthetic peptide
  Seed: ANQRLNPMHQLLRHF
ANQRYNPVHGLLAHF

SEQ ID NO: 216831 - protein, 15 aa, Artificial Sequence
  Description of Artificial Sequence: Synthetic peptide
  Seed: ANQRLNPMHQLLRHF
ANQRYNPVHGLLCHF

SEQ ID NO: 216832 - protein, 15 aa, Artificial Sequence
  Description of Artificial Sequence: Synthetic peptide
  Seed: ANQRLNPMHQLLRHF
ANQRYNPVHGLLGHF

SEQ ID NO: 216833 - protein, 15 aa, Artificial Sequence
  Description of Artificial Sequence: Synthetic peptide
  Seed: ANQRLNPMHQLLRHF
ANQRYNPVHGLLIHF

SEQ ID NO: 216834 - protein, 15 aa, Artificial Sequence
  Description of Artificial Sequence: Synthetic peptide
  Seed: ANQRLNPMHQLLRHF
ANQRYNPVHGLLLHF

SEQ ID NO: 216835 - protein, 15 aa, Artificial Sequence
  Description of Artificial Sequence: Synthetic peptide
  Seed: ANQRLNPMHQLLRHF
ANQRYNPVHGLLMHF

SEQ ID NO: 216836 - protein, 15 aa, Artificial Sequence
  Description of Artificial Sequence: Synthetic peptide
  Seed: ANQRLNPMHQLLRHF
ANQRYNPVHGLLNHF

SEQ ID NO: 216837 - protein, 15 aa, Artificial Sequence
  Description of Artificial Sequence: Synthetic peptide
  Seed: ANQRLNPMHQLLRHF
ANQRYNPVHGLLSHF

SEQ ID NO: 216838 - protein, 15 aa, Artificial Sequence
  Description of Artificial Sequence: Synthetic peptide
  Seed: ANQRLNPMHQLLRHF
ANQRYNPVHGLLTHF

SEQ ID NO: 216839 - protein, 15 aa, Artificial Sequence
  Description of Artificial Sequence: Synthetic peptide
  Seed: ANQRLNPMHQLLRHF
ANQRYNPVHGLLVHF

SEQ ID NO: 216840 - protein, 15 aa, Artificial Sequence
  Description of Artificial Sequence: Synthetic peptide
  Seed: ANQRLNPMHQLLRHF
ANQRYNPVHILLAHF

SEQ ID NO: 216841 - protein, 15 aa, Artificial Sequence
  Description of Artificial Sequence: Synthetic peptide
  Seed: ANQRLNPMHQLLRHF
ANQRYNPVHILLNHF

SEQ ID NO: 216842 - protein, 15 aa, Artificial Sequence
  Description of Artificial Sequence: Synthetic peptide
  Seed: ANQRLNPMHQLLRHF
ANQRYNPVHILLSHF

SEQ ID NO: 216843 - protein, 15 aa, Artificial Sequence
  Description of Artificial Sequence: Synthetic peptide
  Seed: ANQRLNPMHQLLRHF
ANQRYNPVHKLLAHF

SEQ ID NO: 216844 - protein, 15 aa, Artificial Sequence
  Description of Artificial Sequence: Synthetic peptide
  Seed: ANQRLNPMHQLLRHF
ANQRYNPVHKLLHHF

SEQ ID NO: 216845 - protein, 15 aa, Artificial Sequence
  Description of Artificial Sequence: Synthetic peptide
  Seed: ANQRLNPMHQLLRHF
ANQRYNPVHKLLSHF

SEQ ID NO: 216846 - protein, 15 aa, Artificial Sequence
  Description of Artificial Sequence: Synthetic peptide
  Seed: ANQRLNPMHQLLRHF
ANQRYNPVHKLLTHF

SEQ ID NO: 216847 - protein, 15 aa, Artificial Sequence
  Description of Artificial Sequence: Synthetic peptide
  Seed: ANQRLNPMHQLLRHF
ANQRYNPVHNLLAHF

SEQ ID NO: 216848 - protein, 15 aa, Artificial Sequence
  Description of Artificial Sequence: Synthetic peptide
  Seed: ANQRLNPMHQLLRHF
ANQRYNPVHNLLIHF

SEQ ID NO: 216849 - protein, 15 aa, Artificial Sequence
  Description of Artificial Sequence: Synthetic peptide
  Seed: ANQRLNPMHQLLRHF
ANQRYNPVHNLLLHF

SEQ ID NO: 216850 - protein, 15 aa, Artificial Sequence
  Description of Artificial Sequence: Synthetic peptide
  Seed: ANQRLNPMHQLLRHF
ANQRYNPVHNLLMHF

SEQ ID NO: 216851 - protein, 15 aa, Artificial Sequence
  Description of Artificial Sequence: Synthetic peptide
  Seed: ANQRLNPMHQLLRHF
ANQRYNPVHNLLSHF

SEQ ID NO: 216852 - protein, 15 aa, Artificial Sequence
  Description of Artificial Sequence: Synthetic peptide
  Seed: ANQRLNPMHQLLRHF
ANQRYNPVHNLLTHF

SEQ ID NO: 216853 - protein, 15 aa, Artificial Sequence
  Description of Artificial Sequence: Synthetic peptide
  Seed: ANQRLNPMHQLLRHF
ANQRYNPVHNLLVHF

SEQ ID NO: 216854 - protein, 15 aa, Artificial Sequence
  Description of Artificial Sequence: Synthetic peptide
  Seed: ANQRLNPMHQLLRHF
ANQRYNPVHPLLAHF

SEQ ID NO: 216855 - protein, 15 aa, Artificial Sequence
  Description of Artificial Sequence: Synthetic peptide
  Seed: ANQRLNPMHQLLRHF
ANQRYNPVHPLLGHF

SEQ ID NO: 216856 - protein, 15 aa, Artificial Sequence
  Description of Artificial Sequence: Synthetic peptide
  Seed: ANQRLNPMHQLLRHF
ANQRYNPVHPLLIHF

SEQ ID NO: 216857 - protein, 15 aa, Artificial Sequence
  Description of Artificial Sequence: Synthetic peptide
  Seed: ANQRLNPMHQLLRHF
ANQRYNPVHPLLLHF

SEQ ID NO: 216858 - protein, 15 aa, Artificial Sequence
  Description of Artificial Sequence: Synthetic peptide
  Seed: ANQRLNPMHQLLRHF
ANQRYNPVHPLLMHF

SEQ ID NO: 216859 - protein, 15 aa, Artificial Sequence
  Description of Artificial Sequence: Synthetic peptide
  Seed: ANQRLNPMHQLLRHF
ANQRYNPVHPLLNHF

SEQ ID NO: 216860 - protein, 15 aa, Artificial Sequence
  Description of Artificial Sequence: Synthetic peptide
  Seed: ANQRLNPMHQLLRHF
ANQRYNPVHPLLSHF

SEQ ID NO: 216861 - protein, 15 aa, Artificial Sequence
  Description of Artificial Sequence: Synthetic peptide
  Seed: ANQRLNPMHQLLRHF
ANQRYNPVHPLLTHF

SEQ ID NO: 216862 - protein, 15 aa, Artificial Sequence
  Description of Artificial Sequence: Synthetic peptide
  Seed: ANQRLNPMHQLLRHF
ANQRYNPVHPLLVHF

SEQ ID NO: 216863 - protein, 15 aa, Artificial Sequence
  Description of Artificial Sequence: Synthetic peptide
  Seed: ANQRLNPMHQLLRHF
ANQRYNPVHRLLAHF

SEQ ID NO: 216864 - protein, 15 aa, Artificial Sequence
  Description of Artificial Sequence: Synthetic peptide
  Seed: ANQRLNPMHQLLRHF
ANQRYNPVHRLLGHF

SEQ ID NO: 216865 - protein, 15 aa, Artificial Sequence
  Description of Artificial Sequence: Synthetic peptide
  Seed: ANQRLNPMHQLLRHF
ANQRYNPVHRLLHHF

SEQ ID NO: 216866 - protein, 15 aa, Artificial Sequence
  Description of Artificial Sequence: Synthetic peptide
  Seed: ANQRLNPMHQLLRHF
ANQRYNPVHRLLKHF

SEQ ID NO: 216867 - protein, 15 aa, Artificial Sequence
  Description of Artificial Sequence: Synthetic peptide
  Seed: ANQRLNPMHQLLRHF
ANQRYNPVHRLLMHF

SEQ ID NO: 216868 - protein, 15 aa, Artificial Sequence
  Description of Artificial Sequence: Synthetic peptide
  Seed: ANQRLNPMHQLLRHF
ANQRYNPVHRLLNHF

SEQ ID NO: 216869 - protein, 15 aa, Artificial Sequence
  Description of Artificial Sequence: Synthetic peptide
  Seed: ANQRLNPMHQLLRHF
ANQRYNPVHRLLQHF

SEQ ID NO: 216870 - protein, 15 aa, Artificial Sequence
  Description of Artificial Sequence: Synthetic peptide
  Seed: ANQRLNPMHQLLRHF
ANQRYNPVHRLLSHF

SEQ ID NO: 216871 - protein, 15 aa, Artificial Sequence
  Description of Artificial Sequence: Synthetic peptide
  Seed: ANQRLNPMHQLLRHF
ANQRYNPVHRLLTHF

SEQ ID NO: 216872 - protein, 15 aa, Artificial Sequence
  Description of Artificial Sequence: Synthetic peptide
  Seed: ANQRLNPMHQLLRHF
ANQRYNPVHRLLVHF

SEQ ID NO: 216873 - protein, 15 aa, Artificial Sequence
  Description of Artificial Sequence: Synthetic peptide
  Seed: ANQRLNPMHQLLRHF
ANQRYNPVHSLLAHF

SEQ ID NO: 216874 - protein, 15 aa, Artificial Sequence
  Description of Artificial Sequence: Synthetic peptide
  Seed: ANQRLNPMHQLLRHF
ANQRYNPVHSLLCHF

SEQ ID NO: 216875 - protein, 15 aa, Artificial Sequence
  Description of Artificial Sequence: Synthetic peptide
  Seed: ANQRLNPMHQLLRHF
ANQRYNPVHSLLGHF

SEQ ID NO: 216876 - protein, 15 aa, Artificial Sequence
  Description of Artificial Sequence: Synthetic peptide
  Seed: ANQRLNPMHQLLRHF
ANQRYNPVHSLLIHF

SEQ ID NO: 216877 - protein, 15 aa, Artificial Sequence
  Description of Artificial Sequence: Synthetic peptide
  Seed: ANQRLNPMHQLLRHF
ANQRYNPVHSLLLHF

SEQ ID NO: 216878 - protein, 15 aa, Artificial Sequence
  Description of Artificial Sequence: Synthetic peptide
  Seed: ANQRLNPMHQLLRHF
ANQRYNPVHSLLMHF

SEQ ID NO: 216879 - protein, 15 aa, Artificial Sequence
  Description of Artificial Sequence: Synthetic peptide
  Seed: ANQRLNPMHQLLRHF
ANQRYNPVHSLLNHF

SEQ ID NO: 216880 - protein, 15 aa, Artificial Sequence
  Description of Artificial Sequence: Synthetic peptide
  Seed: ANQRLNPMHQLLRHF
ANQRYNPVHSLLSHF

SEQ ID NO: 216881 - protein, 15 aa, Artificial Sequence
  Description of Artificial Sequence: Synthetic peptide
  Seed: ANQRLNPMHQLLRHF
ANQRYNPVHSLLTHF

SEQ ID NO: 216882 - protein, 15 aa, Artificial Sequence
  Description of Artificial Sequence: Synthetic peptide
  Seed: ANQRLNPMHQLLRHF
ANQRYNPVHSLLVHF

SEQ ID NO: 216883 - protein, 15 aa, Artificial Sequence
  Description of Artificial Sequence: Synthetic peptide
  Seed: ANQRLNPMHQLLRHF
ANQRYNPVHTLLAHF

SEQ ID NO: 216884 - protein, 15 aa, Artificial Sequence
  Description of Artificial Sequence: Synthetic peptide
  Seed: ANQRLNPMHQLLRHF
ANQRYNPVHTLLIHF

SEQ ID NO: 216885 - protein, 15 aa, Artificial Sequence
  Description of Artificial Sequence: Synthetic peptide
  Seed: ANQRLNPMHQLLRHF
ANQRYNPVHTLLLHF

SEQ ID NO: 216886 - protein, 15 aa, Artificial Sequence
  Description of Artificial Sequence: Synthetic peptide
  Seed: ANQRLNPMHQLLRHF
ANQRYNPVHTLLMHF

SEQ ID NO: 216887 - protein, 15 aa, Artificial Sequence
  Description of Artificial Sequence: Synthetic peptide
  Seed: ANQRLNPMHQLLRHF
ANQRYNPVHTLLNHF

SEQ ID NO: 216888 - protein, 15 aa, Artificial Sequence
  Description of Artificial Sequence: Synthetic peptide
  Seed: ANQRLNPMHQLLRHF
ANQRYNPVHTLLSHF

SEQ ID NO: 216889 - protein, 15 aa, Artificial Sequence
  Description of Artificial Sequence: Synthetic peptide
  Seed: ANQRLNPMHQLLRHF
ANQRYNPVHTLLTHF

SEQ ID NO: 216890 - protein, 15 aa, Artificial Sequence
  Description of Artificial Sequence: Synthetic peptide
  Seed: ANQRLNPMHQLLRHF
ANQRYNPVHTLLVHF

SEQ ID NO: 216891 - protein, 15 aa, Artificial Sequence
  Description of Artificial Sequence: Synthetic peptide
  Seed: ANQRLNPMHQLLRHF
ANQRYNPVHVLLAHF

SEQ ID NO: 216892 - protein, 15 aa, Artificial Sequence
  Description of Artificial Sequence: Synthetic peptide
  Seed: ANQRLNPMHQLLRHF
ANQRYNPVHVLLIHF

SEQ ID NO: 216893 - protein, 15 aa, Artificial Sequence
  Description of Artificial Sequence: Synthetic peptide
  Seed: ANQRLNPMHQLLRHF
ANQRYNPVHVLLLHF

SEQ ID NO: 216894 - protein, 15 aa, Artificial Sequence
  Description of Artificial Sequence: Synthetic peptide
  Seed: ANQRLNPMHQLLRHF
ANQRYNPVHVLLNHF

SEQ ID NO: 216895 - protein, 15 aa, Artificial Sequence
  Description of Artificial Sequence: Synthetic peptide
  Seed: ANQRLNPMHQLLRHF
ANQRYNPVHVLLSHF

SEQ ID NO: 216896 - protein, 15 aa, Artificial Sequence
  Description of Artificial Sequence: Synthetic peptide
  Seed: ANQRLNPMHQLLRHF
ANQRYNPVHVLLTHF

SEQ ID NO: 216897 - protein, 15 aa, Artificial Sequence
  Description of Artificial Sequence: Synthetic peptide
  Seed: ANQRLNPMHQLLRHF
ANQRYNPVHVLLVHF

SEQ ID NO: 216898 - protein, 15 aa, Artificial Sequence
  Description of Artificial Sequence: Synthetic peptide
  Seed: ANQRLNPMHQLLRHF
ANQRYNPWHALLIHF

SEQ ID NO: 216899 - protein, 15 aa, Artificial Sequence
  Description of Artificial Sequence: Synthetic peptide
  Seed: ANQRLNPMHQLLRHF
ANQRYNPWHALLLHF

SEQ ID NO: 216900 - protein, 15 aa, Artificial Sequence
  Description of Artificial Sequence: Synthetic peptide
  Seed: ANQRLNPMHQLLRHF
ANQRYNPWHALLVHF

SEQ ID NO: 216901 - protein, 15 aa, Artificial Sequence
  Description of Artificial Sequence: Synthetic peptide
  Seed: ANQRLNPMHQLLRHF
ANFRLFPFHQLLRHF

SEQ ID NO: 216902 - protein, 15 aa, Artificial Sequence
  Description of Artificial Sequence: Synthetic peptide
  Seed: ANQRLNPMHQLLRHF
ANFRLIPFHQLLRHF

SEQ ID NO: 216903 - protein, 13 aa, Artificial Sequence
  Description of Artificial Sequence: Synthetic peptide
  Seed: ERELVRKTRFLPV
ERELFRKARALPF

SEQ ID NO: 216904 - protein, 13 aa, Artificial Sequence
  Description of Artificial Sequence: Synthetic peptide
  Seed: ERELVRKTRFLPV
ERELFRKARALPI

SEQ ID NO: 216905 - protein, 13 aa, Artificial Sequence
  Description of Artificial Sequence: Synthetic peptide
  Seed: ERELVRKTRFLPV
ERELFRKARALPL

SEQ ID NO: 216906 - protein, 13 aa, Artificial Sequence
  Description of Artificial Sequence: Synthetic peptide
  Seed: ERELVRKTRFLPV
ERELFRKARALPM

SEQ ID NO: 216907 - protein, 13 aa, Artificial Sequence
  Description of Artificial Sequence: Synthetic peptide
  Seed: ERELVRKTRFLPV
ERELFRKARALPV

SEQ ID NO: 216908 - protein, 13 aa, Artificial Sequence
  Description of Artificial Sequence: Synthetic peptide
  Seed: ERELVRKTRFLPV
ERELFRKARFLPA

SEQ ID NO: 216909 - protein, 13 aa, Artificial Sequence
  Description of Artificial Sequence: Synthetic peptide
  Seed: ERELVRKTRFLPV
ERELFRKARFLPF

SEQ ID NO: 216910 - protein, 13 aa, Artificial Sequence
  Description of Artificial Sequence: Synthetic peptide
  Seed: ERELVRKTRFLPV
ERELFRKARFLPI

SEQ ID NO: 216911 - protein, 13 aa, Artificial Sequence
  Description of Artificial Sequence: Synthetic peptide
  Seed: ERELVRKTRFLPV
ERELFRKARFLPL

SEQ ID NO: 216912 - protein, 13 aa, Artificial Sequence
  Description of Artificial Sequence: Synthetic peptide
  Seed: ERELVRKTRFLPV
ERELFRKARFLPM

SEQ ID NO: 216913 - protein, 13 aa, Artificial Sequence
  Description of Artificial Sequence: Synthetic peptide
  Seed: ERELVRKTRFLPV
ERELFRKARFLPT

SEQ ID NO: 216914 - protein, 13 aa, Artificial Sequence
  Description of Artificial Sequence: Synthetic peptide
  Seed: ERELVRKTRFLPV
ERELFRKARFLPV

SEQ ID NO: 216915 - protein, 13 aa, Artificial Sequence
  Description of Artificial Sequence: Synthetic peptide
  Seed: ERELVRKTRFLPV
ERELFRKARGLPF

SEQ ID NO: 216916 - protein, 13 aa, Artificial Sequence
  Description of Artificial Sequence: Synthetic peptide
  Seed: ERELVRKTRFLPV
ERELFRKARGLPI

SEQ ID NO: 216917 - protein, 13 aa, Artificial Sequence
  Description of Artificial Sequence: Synthetic peptide
  Seed: ERELVRKTRFLPV
ERELFRKARGLPL

SEQ ID NO: 216918 - protein, 13 aa, Artificial Sequence
  Description of Artificial Sequence: Synthetic peptide
  Seed: ERELVRKTRFLPV
ERELFRKARGLPV

SEQ ID NO: 216919 - protein, 13 aa, Artificial Sequence
  Description of Artificial Sequence: Synthetic peptide
  Seed: ERELVRKTRFLPV
ERELFRKARILPI

SEQ ID NO: 216920 - protein, 13 aa, Artificial Sequence
  Description of Artificial Sequence: Synthetic peptide
  Seed: ERELVRKTRFLPV
ERELFRKARILPL

SEQ ID NO: 216921 - protein, 13 aa, Artificial Sequence
  Description of Artificial Sequence: Synthetic peptide
  Seed: ERELVRKTRFLPV
ERELFRKARNLPI

SEQ ID NO: 216922 - protein, 13 aa, Artificial Sequence
  Description of Artificial Sequence: Synthetic peptide
  Seed: ERELVRKTRFLPV
ERELFRKARNLPL

SEQ ID NO: 216923 - protein, 13 aa, Artificial Sequence
  Description of Artificial Sequence: Synthetic peptide
  Seed: ERELVRKTRFLPV
ERELFRKARNLPV

SEQ ID NO: 216924 - protein, 13 aa, Artificial Sequence
  Description of Artificial Sequence: Synthetic peptide
  Seed: ERELVRKTRFLPV
ERELFRKARPLPI

SEQ ID NO: 216925 - protein, 13 aa, Artificial Sequence
  Description of Artificial Sequence: Synthetic peptide
  Seed: ERELVRKTRFLPV
ERELFRKARPLPL

SEQ ID NO: 216926 - protein, 13 aa, Artificial Sequence
  Description of Artificial Sequence: Synthetic peptide
  Seed: ERELVRKTRFLPV
ERELFRKARPLPV

SEQ ID NO: 216927 - protein, 13 aa, Artificial Sequence
  Description of Artificial Sequence: Synthetic peptide
  Seed: ERELVRKTRFLPV
ERELFRKARSLPF

SEQ ID NO: 216928 - protein, 13 aa, Artificial Sequence
  Description of Artificial Sequence: Synthetic peptide
  Seed: ERELVRKTRFLPV
ERELFRKARSLPI

SEQ ID NO: 216929 - protein, 13 aa, Artificial Sequence
  Description of Artificial Sequence: Synthetic peptide
  Seed: ERELVRKTRFLPV
ERELFRKARSLPL

SEQ ID NO: 216930 - protein, 13 aa, Artificial Sequence
  Description of Artificial Sequence: Synthetic peptide
  Seed: ERELVRKTRFLPV
ERELFRKARSLPM

SEQ ID NO: 216931 - protein, 13 aa, Artificial Sequence
  Description of Artificial Sequence: Synthetic peptide
  Seed: ERELVRKTRFLPV
ERELFRKARSLPV

SEQ ID NO: 216932 - protein, 13 aa, Artificial Sequence
  Description of Artificial Sequence: Synthetic peptide
  Seed: ERELVRKTRFLPV
ERELFRKARTLPF

SEQ ID NO: 216933 - protein, 13 aa, Artificial Sequence
  Description of Artificial Sequence: Synthetic peptide
  Seed: ERELVRKTRFLPV
ERELFRKARTLPI

SEQ ID NO: 216934 - protein, 13 aa, Artificial Sequence
  Description of Artificial Sequence: Synthetic peptide
  Seed: ERELVRKTRFLPV
ERELFRKARTLPL

SEQ ID NO: 216935 - protein, 13 aa, Artificial Sequence
  Description of Artificial Sequence: Synthetic peptide
  Seed: ERELVRKTRFLPV
ERELFRKARTLPV

SEQ ID NO: 216936 - protein, 13 aa, Artificial Sequence
  Description of Artificial Sequence: Synthetic peptide
  Seed: ERELVRKTRFLPV
ERELFRKARVLPI

SEQ ID NO: 216937 - protein, 13 aa, Artificial Sequence
  Description of Artificial Sequence: Synthetic peptide
  Seed: ERELVRKTRFLPV
ERELFRKARVLPL

SEQ ID NO: 216938 - protein, 13 aa, Artificial Sequence
  Description of Artificial Sequence: Synthetic peptide
  Seed: ERELVRKTRFLPV
ERELFRKARVLPV

SEQ ID NO: 216939 - protein, 13 aa, Artificial Sequence
  Description of Artificial Sequence: Synthetic peptide
  Seed: ERELVRKTRFLPV
ERELFRKCRFLPI

SEQ ID NO: 216940 - protein, 13 aa, Artificial Sequence
  Description of Artificial Sequence: Synthetic peptide
  Seed: ERELVRKTRFLPV
ERELFRKCRFLPL

SEQ ID NO: 216941 - protein, 13 aa, Artificial Sequence
  Description of Artificial Sequence: Synthetic peptide
  Seed: ERELVRKTRFLPV
ERELFRKDRFLPI

SEQ ID NO: 216942 - protein, 13 aa, Artificial Sequence
  Description of Artificial Sequence: Synthetic peptide
  Seed: ERELVRKTRFLPV
ERELFRKDRFLPL

SEQ ID NO: 216943 - protein, 13 aa, Artificial Sequence
  Description of Artificial Sequence: Synthetic peptide
  Seed: ERELVRKTRFLPV
ERELFRKDRFLPV

SEQ ID NO: 216944 - protein, 13 aa, Artificial Sequence
  Description of Artificial Sequence: Synthetic peptide
  Seed: ERELVRKTRFLPV
ERELFRKERFLPF

SEQ ID NO: 216945 - protein, 13 aa, Artificial Sequence
  Description of Artificial Sequence: Synthetic peptide
  Seed: ERELVRKTRFLPV
ERELFRKERFLPI

SEQ ID NO: 216946 - protein, 13 aa, Artificial Sequence
  Description of Artificial Sequence: Synthetic peptide
  Seed: ERELVRKTRFLPV
ERELFRKERFLPL

SEQ ID NO: 216947 - protein, 13 aa, Artificial Sequence
  Description of Artificial Sequence: Synthetic peptide
  Seed: ERELVRKTRFLPV
ERELFRKERFLPM

SEQ ID NO: 216948 - protein, 13 aa, Artificial Sequence
  Description of Artificial Sequence: Synthetic peptide
  Seed: ERELVRKTRFLPV
ERELFRKERFLPT

SEQ ID NO: 216949 - protein, 13 aa, Artificial Sequence
  Description of Artificial Sequence: Synthetic peptide
  Seed: ERELVRKTRFLPV
ERELFRKERFLPV

SEQ ID NO: 216950 - protein, 13 aa, Artificial Sequence
  Description of Artificial Sequence: Synthetic peptide
  Seed: ERELVRKTRFLPV
ERELFRKFRALPI

SEQ ID NO: 216951 - protein, 13 aa, Artificial Sequence
  Description of Artificial Sequence: Synthetic peptide
  Seed: ERELVRKTRFLPV
ERELFRKFRALPL

SEQ ID NO: 216952 - protein, 13 aa, Artificial Sequence
  Description of Artificial Sequence: Synthetic peptide
  Seed: ERELVRKTRFLPV
ERELFRKFRALPV

SEQ ID NO: 216953 - protein, 13 aa, Artificial Sequence
  Description of Artificial Sequence: Synthetic peptide
  Seed: ERELVRKTRFLPV
ERELFRKFRFLPA

SEQ ID NO: 216954 - protein, 13 aa, Artificial Sequence
  Description of Artificial Sequence: Synthetic peptide
  Seed: ERELVRKTRFLPV
ERELFRKFRFLPF

SEQ ID NO: 216955 - protein, 13 aa, Artificial Sequence
  Description of Artificial Sequence: Synthetic peptide
  Seed: ERELVRKTRFLPV
ERELFRKFRFLPI

SEQ ID NO: 216956 - protein, 13 aa, Artificial Sequence
  Description of Artificial Sequence: Synthetic peptide
  Seed: ERELVRKTRFLPV
ERELFRKFRFLPL

SEQ ID NO: 216957 - protein, 13 aa, Artificial Sequence
  Description of Artificial Sequence: Synthetic peptide
  Seed: ERELVRKTRFLPV
ERELFRKFRFLPM

SEQ ID NO: 216958 - protein, 13 aa, Artificial Sequence
  Description of Artificial Sequence: Synthetic peptide
  Seed: ERELVRKTRFLPV
ERELFRKFRFLPT

SEQ ID NO: 216959 - protein, 13 aa, Artificial Sequence
  Description of Artificial Sequence: Synthetic peptide
  Seed: ERELVRKTRFLPV
ERELFRKFRFLPV

SEQ ID NO: 216960 - protein, 13 aa, Artificial Sequence
  Description of Artificial Sequence: Synthetic peptide
  Seed: ERELVRKTRFLPV
ERELFRKFRFLPY

SEQ ID NO: 216961 - protein, 13 aa, Artificial Sequence
  Description of Artificial Sequence: Synthetic peptide
  Seed: ERELVRKTRFLPV
ERELFRKFRILPI

SEQ ID NO: 216962 - protein, 13 aa, Artificial Sequence
  Description of Artificial Sequence: Synthetic peptide
  Seed: ERELVRKTRFLPV
ERELFRKFRILPL

SEQ ID NO: 216963 - protein, 13 aa, Artificial Sequence
  Description of Artificial Sequence: Synthetic peptide
  Seed: ERELVRKTRFLPV
ERELFRKFRILPV

SEQ ID NO: 216964 - protein, 13 aa, Artificial Sequence
  Description of Artificial Sequence: Synthetic peptide
  Seed: ERELVRKTRFLPV
ERELFRKFRLLPI

SEQ ID NO: 216965 - protein, 13 aa, Artificial Sequence
  Description of Artificial Sequence: Synthetic peptide
  Seed: ERELVRKTRFLPV
ERELFRKFRLLPL

SEQ ID NO: 216966 - protein, 13 aa, Artificial Sequence
  Description of Artificial Sequence: Synthetic peptide
  Seed: ERELVRKTRFLPV
ERELFRKFRLLPV

SEQ ID NO: 216967 - protein, 13 aa, Artificial Sequence
  Description of Artificial Sequence: Synthetic peptide
  Seed: ERELVRKTRFLPV
ERELFRKFRMLPI

SEQ ID NO: 216968 - protein, 13 aa, Artificial Sequence
  Description of Artificial Sequence: Synthetic peptide
  Seed: ERELVRKTRFLPV
ERELFRKFRMLPL

SEQ ID NO: 216969 - protein, 13 aa, Artificial Sequence
  Description of Artificial Sequence: Synthetic peptide
  Seed: ERELVRKTRFLPV
ERELFRKFRSLPI

SEQ ID NO: 216970 - protein, 13 aa, Artificial Sequence
  Description of Artificial Sequence: Synthetic peptide
  Seed: ERELVRKTRFLPV
ERELFRKFRSLPL

SEQ ID NO: 216971 - protein, 13 aa, Artificial Sequence
  Description of Artificial Sequence: Synthetic peptide
  Seed: ERELVRKTRFLPV
ERELFRKFRSLPV

SEQ ID NO: 216972 - protein, 13 aa, Artificial Sequence
  Description of Artificial Sequence: Synthetic peptide
  Seed: ERELVRKTRFLPV
ERELFRKFRWLPI

SEQ ID NO: 216973 - protein, 13 aa, Artificial Sequence
  Description of Artificial Sequence: Synthetic peptide
  Seed: ERELVRKTRFLPV
ERELFRKFRWLPL

SEQ ID NO: 216974 - protein, 13 aa, Artificial Sequence
  Description of Artificial Sequence: Synthetic peptide
  Seed: ERELVRKTRFLPV
ERELFRKFRWLPV

SEQ ID NO: 216975 - protein, 13 aa, Artificial Sequence
  Description of Artificial Sequence: Synthetic peptide
  Seed: ERELVRKTRFLPV
ERELFRKFRYLPI

SEQ ID NO: 216976 - protein, 13 aa, Artificial Sequence
  Description of Artificial Sequence: Synthetic peptide
  Seed: ERELVRKTRFLPV
ERELFRKFRYLPL

SEQ ID NO: 216977 - protein, 13 aa, Artificial Sequence
  Description of Artificial Sequence: Synthetic peptide
  Seed: ERELVRKTRFLPV
ERELFRKGRFLPI

SEQ ID NO: 216978 - protein, 13 aa, Artificial Sequence
  Description of Artificial Sequence: Synthetic peptide
  Seed: ERELVRKTRFLPV
ERELFRKGRFLPL

SEQ ID NO: 216979 - protein, 13 aa, Artificial Sequence
  Description of Artificial Sequence: Synthetic peptide
  Seed: ERELVRKTRFLPV
ERELFRKGRFLPV

SEQ ID NO: 216980 - protein, 13 aa, Artificial Sequence
  Description of Artificial Sequence: Synthetic peptide
  Seed: ERELVRKTRFLPV
ERELFRKHRALPI

SEQ ID NO: 216981 - protein, 13 aa, Artificial Sequence
  Description of Artificial Sequence: Synthetic peptide
  Seed: ERELVRKTRFLPV
ERELFRKHRALPL

SEQ ID NO: 216982 - protein, 13 aa, Artificial Sequence
  Description of Artificial Sequence: Synthetic peptide
  Seed: ERELVRKTRFLPV
ERELFRKHRFLPF

SEQ ID NO: 216983 - protein, 13 aa, Artificial Sequence
  Description of Artificial Sequence: Synthetic peptide
  Seed: ERELVRKTRFLPV
ERELFRKHRFLPI

SEQ ID NO: 216984 - protein, 13 aa, Artificial Sequence
  Description of Artificial Sequence: Synthetic peptide
  Seed: ERELVRKTRFLPV
ERELFRKHRFLPL

SEQ ID NO: 216985 - protein, 13 aa, Artificial Sequence
  Description of Artificial Sequence: Synthetic peptide
  Seed: ERELVRKTRFLPV
ERELFRKHRFLPM

SEQ ID NO: 216986 - protein, 13 aa, Artificial Sequence
  Description of Artificial Sequence: Synthetic peptide
  Seed: ERELVRKTRFLPV
ERELFRKHRFLPT

SEQ ID NO: 216987 - protein, 13 aa, Artificial Sequence
  Description of Artificial Sequence: Synthetic peptide
  Seed: ERELVRKTRFLPV
ERELFRKHRFLPV

SEQ ID NO: 216988 - protein, 13 aa, Artificial Sequence
  Description of Artificial Sequence: Synthetic peptide
  Seed: ERELVRKTRFLPV
ERELFRKHRSLPI

SEQ ID NO: 216989 - protein, 13 aa, Artificial Sequence
  Description of Artificial Sequence: Synthetic peptide
  Seed: ERELVRKTRFLPV
ERELFRKHRSLPL

SEQ ID NO: 216990 - protein, 13 aa, Artificial Sequence
  Description of Artificial Sequence: Synthetic peptide
  Seed: ERELVRKTRFLPV
ERELFRKIRALPF

SEQ ID NO: 216991 - protein, 13 aa, Artificial Sequence
  Description of Artificial Sequence: Synthetic peptide
  Seed: ERELVRKTRFLPV
ERELFRKIRALPI

SEQ ID NO: 216992 - protein, 13 aa, Artificial Sequence
  Description of Artificial Sequence: Synthetic peptide
  Seed: ERELVRKTRFLPV
ERELFRKIRALPL

SEQ ID NO: 216993 - protein, 13 aa, Artificial Sequence
  Description of Artificial Sequence: Synthetic peptide
  Seed: ERELVRKTRFLPV
ERELFRKIRALPM

SEQ ID NO: 216994 - protein, 13 aa, Artificial Sequence
  Description of Artificial Sequence: Synthetic peptide
  Seed: ERELVRKTRFLPV
ERELFRKIRALPV

SEQ ID NO: 216995 - protein, 13 aa, Artificial Sequence
  Description of Artificial Sequence: Synthetic peptide
  Seed: ERELVRKTRFLPV
ERELFRKIRFLPA

SEQ ID NO: 216996 - protein, 13 aa, Artificial Sequence
  Description of Artificial Sequence: Synthetic peptide
  Seed: ERELVRKTRFLPV
ERELFRKIRFLPF

SEQ ID NO: 216997 - protein, 13 aa, Artificial Sequence
  Description of Artificial Sequence: Synthetic peptide
  Seed: ERELVRKTRFLPV
ERELFRKIRFLPI

SEQ ID NO: 216998 - protein, 13 aa, Artificial Sequence
  Description of Artificial Sequence: Synthetic peptide
  Seed: ERELVRKTRFLPV
ERELFRKIRFLPL

SEQ ID NO: 216999 - protein, 13 aa, Artificial Sequence
  Description of Artificial Sequence: Synthetic peptide
  Seed: ERELVRKTRFLPV
ERELFRKIRFLPM

SEQ ID NO: 217000 - protein, 13 aa, Artificial Sequence
  Description of Artificial Sequence: Synthetic peptide
  Seed: ERELVRKTRFLPV
ERELFRKIRFLPS

SEQ ID NO: 217001 - protein, 13 aa, Artificial Sequence
  Description of Artificial Sequence: Synthetic peptide
  Seed: ERELVRKTRFLPV
ERELFRKIRFLPT

SEQ ID NO: 217002 - protein, 13 aa, Artificial Sequence
  Description of Artificial Sequence: Synthetic peptide
  Seed: ERELVRKTRFLPV
ERELFRKIRFLPV

SEQ ID NO: 217003 - protein, 13 aa, Artificial Sequence
  Description of Artificial Sequence: Synthetic peptide
  Seed: ERELVRKTRFLPV
ERELFRKIRFLPW

SEQ ID NO: 217004 - protein, 13 aa, Artificial Sequence
  Description of Artificial Sequence: Synthetic peptide
  Seed: ERELVRKTRFLPV
ERELFRKIRFLPY

SEQ ID NO: 217005 - protein, 13 aa, Artificial Sequence
  Description of Artificial Sequence: Synthetic peptide
  Seed: ERELVRKTRFLPV
ERELFRKIRGLPI

SEQ ID NO: 217006 - protein, 13 aa, Artificial Sequence
  Description of Artificial Sequence: Synthetic peptide
  Seed: ERELVRKTRFLPV
ERELFRKIRGLPL

SEQ ID NO: 217007 - protein, 13 aa, Artificial Sequence
  Description of Artificial Sequence: Synthetic peptide
  Seed: ERELVRKTRFLPV
ERELFRKIRGLPV

SEQ ID NO: 217008 - protein, 13 aa, Artificial Sequence
  Description of Artificial Sequence: Synthetic peptide
  Seed: ERELVRKTRFLPV
ERELFRKIRILPI

SEQ ID NO: 217009 - protein, 13 aa, Artificial Sequence
  Description of Artificial Sequence: Synthetic peptide
  Seed: ERELVRKTRFLPV
ERELFRKIRILPL

SEQ ID NO: 217010 - protein, 13 aa, Artificial Sequence
  Description of Artificial Sequence: Synthetic peptide
  Seed: ERELVRKTRFLPV
ERELFRKIRILPV

SEQ ID NO: 217011 - protein, 13 aa, Artificial Sequence
  Description of Artificial Sequence: Synthetic peptide
  Seed: ERELVRKTRFLPV
ERELFRKIRLLPI

SEQ ID NO: 217012 - protein, 13 aa, Artificial Sequence
  Description of Artificial Sequence: Synthetic peptide
  Seed: ERELVRKTRFLPV
ERELFRKIRLLPL

SEQ ID NO: 217013 - protein, 13 aa, Artificial Sequence
  Description of Artificial Sequence: Synthetic peptide
  Seed: ERELVRKTRFLPV
ERELFRKIRLLPV

SEQ ID NO: 217014 - protein, 13 aa, Artificial Sequence
  Description of Artificial Sequence: Synthetic peptide
  Seed: ERELVRKTRFLPV
ERELFRKIRMLPI

SEQ ID NO: 217015 - protein, 13 aa, Artificial Sequence
  Description of Artificial Sequence: Synthetic peptide
  Seed: ERELVRKTRFLPV
ERELFRKIRMLPL

SEQ ID NO: 217016 - protein, 13 aa, Artificial Sequence
  Description of Artificial Sequence: Synthetic peptide
  Seed: ERELVRKTRFLPV
ERELFRKIRMLPV

SEQ ID NO: 217017 - protein, 13 aa, Artificial Sequence
  Description of Artificial Sequence: Synthetic peptide
  Seed: ERELVRKTRFLPV
ERELFRKIRNLPI

SEQ ID NO: 217018 - protein, 13 aa, Artificial Sequence
  Description of Artificial Sequence: Synthetic peptide
  Seed: ERELVRKTRFLPV
ERELFRKIRPLPI

SEQ ID NO: 217019 - protein, 13 aa, Artificial Sequence
  Description of Artificial Sequence: Synthetic peptide
  Seed: ERELVRKTRFLPV
ERELFRKIRPLPL

SEQ ID NO: 217020 - protein, 13 aa, Artificial Sequence
  Description of Artificial Sequence: Synthetic peptide
  Seed: ERELVRKTRFLPV
ERELFRKIRPLPV

SEQ ID NO: 217021 - protein, 13 aa, Artificial Sequence
  Description of Artificial Sequence: Synthetic peptide
  Seed: ERELVRKTRFLPV
ERELFRKIRSLPF

SEQ ID NO: 217022 - protein, 13 aa, Artificial Sequence
  Description of Artificial Sequence: Synthetic peptide
  Seed: ERELVRKTRFLPV
ERELFRKIRSLPI

SEQ ID NO: 217023 - protein, 13 aa, Artificial Sequence
  Description of Artificial Sequence: Synthetic peptide
  Seed: ERELVRKTRFLPV
ERELFRKIRSLPL

SEQ ID NO: 217024 - protein, 13 aa, Artificial Sequence
  Description of Artificial Sequence: Synthetic peptide
  Seed: ERELVRKTRFLPV
ERELFRKIRSLPM

SEQ ID NO: 217025 - protein, 13 aa, Artificial Sequence
  Description of Artificial Sequence: Synthetic peptide
  Seed: ERELVRKTRFLPV
ERELFRKIRSLPV

SEQ ID NO: 217026 - protein, 13 aa, Artificial Sequence
  Description of Artificial Sequence: Synthetic peptide
  Seed: ERELVRKTRFLPV
ERELFRKIRTLPI

SEQ ID NO: 217027 - protein, 13 aa, Artificial Sequence
  Description of Artificial Sequence: Synthetic peptide
  Seed: ERELVRKTRFLPV
ERELFRKIRTLPL

SEQ ID NO: 217028 - protein, 13 aa, Artificial Sequence
  Description of Artificial Sequence: Synthetic peptide
  Seed: ERELVRKTRFLPV
ERELFRKIRTLPV

SEQ ID NO: 217029 - protein, 13 aa, Artificial Sequence
  Description of Artificial Sequence: Synthetic peptide
  Seed: ERELVRKTRFLPV
ERELFRKIRVLPI

SEQ ID NO: 217030 - protein, 13 aa, Artificial Sequence
  Description of Artificial Sequence: Synthetic peptide
  Seed: ERELVRKTRFLPV
ERELFRKIRVLPL

SEQ ID NO: 217031 - protein, 13 aa, Artificial Sequence
  Description of Artificial Sequence: Synthetic peptide
  Seed: ERELVRKTRFLPV
ERELFRKIRVLPV

SEQ ID NO: 217032 - protein, 13 aa, Artificial Sequence
  Description of Artificial Sequence: Synthetic peptide
  Seed: ERELVRKTRFLPV
ERELFRKIRWLPI

SEQ ID NO: 217033 - protein, 13 aa, Artificial Sequence
  Description of Artificial Sequence: Synthetic peptide
  Seed: ERELVRKTRFLPV
ERELFRKIRWLPL

SEQ ID NO: 217034 - protein, 13 aa, Artificial Sequence
  Description of Artificial Sequence: Synthetic peptide
  Seed: ERELVRKTRFLPV
ERELFRKIRWLPV

SEQ ID NO: 217035 - protein, 13 aa, Artificial Sequence
  Description of Artificial Sequence: Synthetic peptide
  Seed: ERELVRKTRFLPV
ERELFRKIRYLPI

SEQ ID NO: 217036 - protein, 13 aa, Artificial Sequence
  Description of Artificial Sequence: Synthetic peptide
  Seed: ERELVRKTRFLPV
ERELFRKIRYLPL

SEQ ID NO: 217037 - protein, 13 aa, Artificial Sequence
  Description of Artificial Sequence: Synthetic peptide
  Seed: ERELVRKTRFLPV
ERELFRKIRYLPV

SEQ ID NO: 217038 - protein, 13 aa, Artificial Sequence
  Description of Artificial Sequence: Synthetic peptide
  Seed: ERELVRKTRFLPV
ERELFRKKRFLPI

SEQ ID NO: 217039 - protein, 13 aa, Artificial Sequence
  Description of Artificial Sequence: Synthetic peptide
  Seed: ERELVRKTRFLPV
ERELFRKKRFLPL

SEQ ID NO: 217040 - protein, 13 aa, Artificial Sequence
  Description of Artificial Sequence: Synthetic peptide
  Seed: ERELVRKTRFLPV
ERELFRKKRFLPV

SEQ ID NO: 217041 - protein, 13 aa, Artificial Sequence
  Description of Artificial Sequence: Synthetic peptide
  Seed: ERELVRKTRFLPV
ERELFRKLRALPI

SEQ ID NO: 217042 - protein, 13 aa, Artificial Sequence
  Description of Artificial Sequence: Synthetic peptide
  Seed: ERELVRKTRFLPV
ERELFRKLRALPL

SEQ ID NO: 217043 - protein, 13 aa, Artificial Sequence
  Description of Artificial Sequence: Synthetic peptide
  Seed: ERELVRKTRFLPV
ERELFRKLRALPV

SEQ ID NO: 217044 - protein, 13 aa, Artificial Sequence
  Description of Artificial Sequence: Synthetic peptide
  Seed: ERELVRKTRFLPV
ERELFRKLRFLPF

SEQ ID NO: 217045 - protein, 13 aa, Artificial Sequence
  Description of Artificial Sequence: Synthetic peptide
  Seed: ERELVRKTRFLPV
ERELFRKLRFLPI

SEQ ID NO: 217046 - protein, 13 aa, Artificial Sequence
  Description of Artificial Sequence: Synthetic peptide
  Seed: ERELVRKTRFLPV
ERELFRKLRFLPL

SEQ ID NO: 217047 - protein, 13 aa, Artificial Sequence
  Description of Artificial Sequence: Synthetic peptide
  Seed: ERELVRKTRFLPV
ERELFRKLRFLPM

SEQ ID NO: 217048 - protein, 13 aa, Artificial Sequence
  Description of Artificial Sequence: Synthetic peptide
  Seed: ERELVRKTRFLPV
ERELFRKLRFLPT

SEQ ID NO: 217049 - protein, 13 aa, Artificial Sequence
  Description of Artificial Sequence: Synthetic peptide
  Seed: ERELVRKTRFLPV
ERELFRKLRFLPV

SEQ ID NO: 217050 - protein, 13 aa, Artificial Sequence
  Description of Artificial Sequence: Synthetic peptide
  Seed: ERELVRKTRFLPV
ERELFRKLRLLPI

SEQ ID NO: 217051 - protein, 13 aa, Artificial Sequence
  Description of Artificial Sequence: Synthetic peptide
  Seed: ERELVRKTRFLPV
ERELFRKLRLLPL

SEQ ID NO: 217052 - protein, 13 aa, Artificial Sequence
  Description of Artificial Sequence: Synthetic peptide
  Seed: ERELVRKTRFLPV
ERELFRKLRSLPI

SEQ ID NO: 217053 - protein, 13 aa, Artificial Sequence
  Description of Artificial Sequence: Synthetic peptide
  Seed: ERELVRKTRFLPV
ERELFRKLRSLPL

SEQ ID NO: 217054 - protein, 13 aa, Artificial Sequence
  Description of Artificial Sequence: Synthetic peptide
  Seed: ERELVRKTRFLPV
ERELFRKLRSLPV

SEQ ID NO: 217055 - protein, 13 aa, Artificial Sequence
  Description of Artificial Sequence: Synthetic peptide
  Seed: ERELVRKTRFLPV
ERELFRKMRALPI

SEQ ID NO: 217056 - protein, 13 aa, Artificial Sequence
  Description of Artificial Sequence: Synthetic peptide
  Seed: ERELVRKTRFLPV
ERELFRKMRALPL

SEQ ID NO: 217057 - protein, 13 aa, Artificial Sequence
  Description of Artificial Sequence: Synthetic peptide
  Seed: ERELVRKTRFLPV
ERELFRKMRALPV

SEQ ID NO: 217058 - protein, 13 aa, Artificial Sequence
  Description of Artificial Sequence: Synthetic peptide
  Seed: ERELVRKTRFLPV
ERELFRKMRFLPF

SEQ ID NO: 217059 - protein, 13 aa, Artificial Sequence
  Description of Artificial Sequence: Synthetic peptide
  Seed: ERELVRKTRFLPV
ERELFRKMRFLPI

SEQ ID NO: 217060 - protein, 13 aa, Artificial Sequence
  Description of Artificial Sequence: Synthetic peptide
  Seed: ERELVRKTRFLPV
ERELFRKMRFLPL

SEQ ID NO: 217061 - protein, 13 aa, Artificial Sequence
  Description of Artificial Sequence: Synthetic peptide
  Seed: ERELVRKTRFLPV
ERELFRKMRFLPM

SEQ ID NO: 217062 - protein, 13 aa, Artificial Sequence
  Description of Artificial Sequence: Synthetic peptide
  Seed: ERELVRKTRFLPV
ERELFRKMRFLPV

SEQ ID NO: 217063 - protein, 13 aa, Artificial Sequence
  Description of Artificial Sequence: Synthetic peptide
  Seed: ERELVRKTRFLPV
ERELFRKMRLLPI

SEQ ID NO: 217064 - protein, 13 aa, Artificial Sequence
  Description of Artificial Sequence: Synthetic peptide
  Seed: ERELVRKTRFLPV
ERELFRKMRLLPL

SEQ ID NO: 217065 - protein, 13 aa, Artificial Sequence
  Description of Artificial Sequence: Synthetic peptide
  Seed: ERELVRKTRFLPV
ERELFRKMRSLPI

SEQ ID NO: 217066 - protein, 13 aa, Artificial Sequence
  Description of Artificial Sequence: Synthetic peptide
  Seed: ERELVRKTRFLPV
ERELFRKMRSLPL

SEQ ID NO: 217067 - protein, 13 aa, Artificial Sequence
  Description of Artificial Sequence: Synthetic peptide
  Seed: ERELVRKTRFLPV
ERELFRKMRSLPV

SEQ ID NO: 217068 - protein, 13 aa, Artificial Sequence
  Description of Artificial Sequence: Synthetic peptide
  Seed: ERELVRKTRFLPV
ERELFRKNRFLPI

SEQ ID NO: 217069 - protein, 13 aa, Artificial Sequence
  Description of Artificial Sequence: Synthetic peptide
  Seed: ERELVRKTRFLPV
ERELFRKNRFLPL

SEQ ID NO: 217070 - protein, 13 aa, Artificial Sequence
  Description of Artificial Sequence: Synthetic peptide
  Seed: ERELVRKTRFLPV
ERELFRKNRFLPV

SEQ ID NO: 217071 - protein, 13 aa, Artificial Sequence
  Description of Artificial Sequence: Synthetic peptide
  Seed: ERELVRKTRFLPV
ERELFRKQRFLPF

SEQ ID NO: 217072 - protein, 13 aa, Artificial Sequence
  Description of Artificial Sequence: Synthetic peptide
  Seed: ERELVRKTRFLPV
ERELFRKQRFLPI

SEQ ID NO: 217073 - protein, 13 aa, Artificial Sequence
  Description of Artificial Sequence: Synthetic peptide
  Seed: ERELVRKTRFLPV
ERELFRKQRFLPL

SEQ ID NO: 217074 - protein, 13 aa, Artificial Sequence
  Description of Artificial Sequence: Synthetic peptide
  Seed: ERELVRKTRFLPV
ERELFRKQRFLPV

SEQ ID NO: 217075 - protein, 13 aa, Artificial Sequence
  Description of Artificial Sequence: Synthetic peptide
  Seed: ERELVRKTRFLPV
ERELFRKSRALPF

SEQ ID NO: 217076 - protein, 13 aa, Artificial Sequence
  Description of Artificial Sequence: Synthetic peptide
  Seed: ERELVRKTRFLPV
ERELFRKSRALPI

SEQ ID NO: 217077 - protein, 13 aa, Artificial Sequence
  Description of Artificial Sequence: Synthetic peptide
  Seed: ERELVRKTRFLPV
ERELFRKSRALPL

SEQ ID NO: 217078 - protein, 13 aa, Artificial Sequence
  Description of Artificial Sequence: Synthetic peptide
  Seed: ERELVRKTRFLPV
ERELFRKSRALPM

SEQ ID NO: 217079 - protein, 13 aa, Artificial Sequence
  Description of Artificial Sequence: Synthetic peptide
  Seed: ERELVRKTRFLPV
ERELFRKSRALPV

SEQ ID NO: 217080 - protein, 13 aa, Artificial Sequence
  Description of Artificial Sequence: Synthetic peptide
  Seed: ERELVRKTRFLPV
ERELFRKSRFLPA

SEQ ID NO: 217081 - protein, 13 aa, Artificial Sequence
  Description of Artificial Sequence: Synthetic peptide
  Seed: ERELVRKTRFLPV
ERELFRKSRFLPF

SEQ ID NO: 217082 - protein, 13 aa, Artificial Sequence
  Description of Artificial Sequence: Synthetic peptide
  Seed: ERELVRKTRFLPV
ERELFRKSRFLPI

SEQ ID NO: 217083 - protein, 13 aa, Artificial Sequence
  Description of Artificial Sequence: Synthetic peptide
  Seed: ERELVRKTRFLPV
ERELFRKSRFLPM

SEQ ID NO: 217084 - protein, 13 aa, Artificial Sequence
  Description of Artificial Sequence: Synthetic peptide
  Seed: ERELVRKTRFLPV
ERELFRKSRFLPT

SEQ ID NO: 217085 - protein, 13 aa, Artificial Sequence
  Description of Artificial Sequence: Synthetic peptide
  Seed: ERELVRKTRFLPV
ERELFRKSRFLPV

SEQ ID NO: 217086 - protein, 13 aa, Artificial Sequence
  Description of Artificial Sequence: Synthetic peptide
  Seed: ERELVRKTRFLPV
ERELFRKSRGLPF

SEQ ID NO: 217087 - protein, 13 aa, Artificial Sequence
  Description of Artificial Sequence: Synthetic peptide
  Seed: ERELVRKTRFLPV
ERELFRKSRGLPI

SEQ ID NO: 217088 - protein, 13 aa, Artificial Sequence
  Description of Artificial Sequence: Synthetic peptide
  Seed: ERELVRKTRFLPV
ERELFRKSRGLPL

SEQ ID NO: 217089 - protein, 13 aa, Artificial Sequence
  Description of Artificial Sequence: Synthetic peptide
  Seed: ERELVRKTRFLPV
ERELFRKSRGLPM

SEQ ID NO: 217090 - protein, 13 aa, Artificial Sequence
  Description of Artificial Sequence: Synthetic peptide
  Seed: ERELVRKTRFLPV
ERELFRKSRGLPV

SEQ ID NO: 217091 - protein, 13 aa, Artificial Sequence
  Description of Artificial Sequence: Synthetic peptide
  Seed: ERELVRKTRFLPV
ERELFRKSRILPI

SEQ ID NO: 217092 - protein, 13 aa, Artificial Sequence
  Description of Artificial Sequence: Synthetic peptide
  Seed: ERELVRKTRFLPV
ERELFRKSRILPL

SEQ ID NO: 217093 - protein, 13 aa, Artificial Sequence
  Description of Artificial Sequence: Synthetic peptide
  Seed: ERELVRKTRFLPV
ERELFRKSRLLPL

SEQ ID NO: 217094 - protein, 13 aa, Artificial Sequence
  Description of Artificial Sequence: Synthetic peptide
  Seed: ERELVRKTRFLPV
ERELFRKSRNLPI

SEQ ID NO: 217095 - protein, 13 aa, Artificial Sequence
  Description of Artificial Sequence: Synthetic peptide
  Seed: ERELVRKTRFLPV
ERELFRKSRNLPL

SEQ ID NO: 217096 - protein, 13 aa, Artificial Sequence
  Description of Artificial Sequence: Synthetic peptide
  Seed: ERELVRKTRFLPV
ERELFRKSRPLPI

SEQ ID NO: 217097 - protein, 13 aa, Artificial Sequence
  Description of Artificial Sequence: Synthetic peptide
  Seed: ERELVRKTRFLPV
ERELFRKSRPLPL

SEQ ID NO: 217098 - protein, 13 aa, Artificial Sequence
  Description of Artificial Sequence: Synthetic peptide
  Seed: ERELVRKTRFLPV
ERELFRKSRPLPV

SEQ ID NO: 217099 - protein, 13 aa, Artificial Sequence
  Description of Artificial Sequence: Synthetic peptide
  Seed: ERELVRKTRFLPV
ERELFRKSRSLPF

SEQ ID NO: 217100 - protein, 13 aa, Artificial Sequence
  Description of Artificial Sequence: Synthetic peptide
  Seed: ERELVRKTRFLPV
ERELFRKSRSLPI

SEQ ID NO: 217101 - protein, 13 aa, Artificial Sequence
  Description of Artificial Sequence: Synthetic peptide
  Seed: ERELVRKTRFLPV
ERELFRKSRSLPL

SEQ ID NO: 217102 - protein, 13 aa, Artificial Sequence
  Description of Artificial Sequence: Synthetic peptide
  Seed: ERELVRKTRFLPV
ERELFRKSRSLPM

SEQ ID NO: 217103 - protein, 13 aa, Artificial Sequence
  Description of Artificial Sequence: Synthetic peptide
  Seed: ERELVRKTRFLPV
ERELFRKSRSLPV

SEQ ID NO: 217104 - protein, 13 aa, Artificial Sequence
  Description of Artificial Sequence: Synthetic peptide
  Seed: ERELVRKTRFLPV
ERELFRKSRTLPF

SEQ ID NO: 217105 - protein, 13 aa, Artificial Sequence
  Description of Artificial Sequence: Synthetic peptide
  Seed: ERELVRKTRFLPV
ERELFRKSRTLPI

SEQ ID NO: 217106 - protein, 13 aa, Artificial Sequence
  Description of Artificial Sequence: Synthetic peptide
  Seed: ERELVRKTRFLPV
ERELFRKSRTLPL

SEQ ID NO: 217107 - protein, 13 aa, Artificial Sequence
  Description of Artificial Sequence: Synthetic peptide
  Seed: ERELVRKTRFLPV
ERELFRKSRTLPV

SEQ ID NO: 217108 - protein, 13 aa, Artificial Sequence
  Description of Artificial Sequence: Synthetic peptide
  Seed: ERELVRKTRFLPV
ERELFRKSRVLPI

SEQ ID NO: 217109 - protein, 13 aa, Artificial Sequence
  Description of Artificial Sequence: Synthetic peptide
  Seed: ERELVRKTRFLPV
ERELFRKSRVLPL

SEQ ID NO: 217110 - protein, 13 aa, Artificial Sequence
  Description of Artificial Sequence: Synthetic peptide
  Seed: ERELVRKTRFLPV
ERELFRKSRVLPV

SEQ ID NO: 217111 - protein, 13 aa, Artificial Sequence
  Description of Artificial Sequence: Synthetic peptide
  Seed: ERELVRKTRFLPV
ERELFRKTRALPF

SEQ ID NO: 217112 - protein, 13 aa, Artificial Sequence
  Description of Artificial Sequence: Synthetic peptide
  Seed: ERELVRKTRFLPV
ERELFRKTRALPI

SEQ ID NO: 217113 - protein, 13 aa, Artificial Sequence
  Description of Artificial Sequence: Synthetic peptide
  Seed: ERELVRKTRFLPV
ERELFRKTRALPL

SEQ ID NO: 217114 - protein, 13 aa, Artificial Sequence
  Description of Artificial Sequence: Synthetic peptide
  Seed: ERELVRKTRFLPV
ERELFRKTRALPM

SEQ ID NO: 217115 - protein, 13 aa, Artificial Sequence
  Description of Artificial Sequence: Synthetic peptide
  Seed: ERELVRKTRFLPV
ERELFRKTRALPV

SEQ ID NO: 217116 - protein, 13 aa, Artificial Sequence
  Description of Artificial Sequence: Synthetic peptide
  Seed: ERELVRKTRFLPV
ERELFRKTRFLPA

SEQ ID NO: 217117 - protein, 13 aa, Artificial Sequence
  Description of Artificial Sequence: Synthetic peptide
  Seed: ERELVRKTRFLPV
ERELFRKTRFLPF

SEQ ID NO: 217118 - protein, 13 aa, Artificial Sequence
  Description of Artificial Sequence: Synthetic peptide
  Seed: ERELVRKTRFLPV
ERELFRKTRFLPM

SEQ ID NO: 217119 - protein, 13 aa, Artificial Sequence
  Description of Artificial Sequence: Synthetic peptide
  Seed: ERELVRKTRFLPV
ERELFRKTRFLPS

SEQ ID NO: 217120 - protein, 13 aa, Artificial Sequence
  Description of Artificial Sequence: Synthetic peptide
  Seed: ERELVRKTRFLPV
ERELFRKTRFLPT

SEQ ID NO: 217121 - protein, 13 aa, Artificial Sequence
  Description of Artificial Sequence: Synthetic peptide
  Seed: ERELVRKTRFLPV
ERELFRKTRFLPV

SEQ ID NO: 217122 - protein, 13 aa, Artificial Sequence
  Description of Artificial Sequence: Synthetic peptide
  Seed: ERELVRKTRFLPV
ERELFRKTRFLPW

SEQ ID NO: 217123 - protein, 13 aa, Artificial Sequence
  Description of Artificial Sequence: Synthetic peptide
  Seed: ERELVRKTRFLPV
ERELFRKTRFLPY

SEQ ID NO: 217124 - protein, 13 aa, Artificial Sequence
  Description of Artificial Sequence: Synthetic peptide
  Seed: ERELVRKTRFLPV
ERELFRKTRGLPF

SEQ ID NO: 217125 - protein, 13 aa, Artificial Sequence
  Description of Artificial Sequence: Synthetic peptide
  Seed: ERELVRKTRFLPV
ERELFRKTRGLPI

SEQ ID NO: 217126 - protein, 13 aa, Artificial Sequence
  Description of Artificial Sequence: Synthetic peptide
  Seed: ERELVRKTRFLPV
ERELFRKTRGLPL

SEQ ID NO: 217127 - protein, 13 aa, Artificial Sequence
  Description of Artificial Sequence: Synthetic peptide
  Seed: ERELVRKTRFLPV
ERELFRKTRGLPM

SEQ ID NO: 217128 - protein, 13 aa, Artificial Sequence
  Description of Artificial Sequence: Synthetic peptide
  Seed: ERELVRKTRFLPV
ERELFRKTRGLPV

SEQ ID NO: 217129 - protein, 13 aa, Artificial Sequence
  Description of Artificial Sequence: Synthetic peptide
  Seed: ERELVRKTRFLPV
ERELFRKTRILPI

SEQ ID NO: 217130 - protein, 13 aa, Artificial Sequence
  Description of Artificial Sequence: Synthetic peptide
  Seed: ERELVRKTRFLPV
ERELFRKTRILPL

SEQ ID NO: 217131 - protein, 13 aa, Artificial Sequence
  Description of Artificial Sequence: Synthetic peptide
  Seed: ERELVRKTRFLPV
ERELFRKTRILPV

SEQ ID NO: 217132 - protein, 13 aa, Artificial Sequence
  Description of Artificial Sequence: Synthetic peptide
  Seed: ERELVRKTRFLPV
ERELFRKTRLLPI

SEQ ID NO: 217133 - protein, 13 aa, Artificial Sequence
  Description of Artificial Sequence: Synthetic peptide
  Seed: ERELVRKTRFLPV
ERELFRKTRLLPL

SEQ ID NO: 217134 - protein, 13 aa, Artificial Sequence
  Description of Artificial Sequence: Synthetic peptide
  Seed: ERELVRKTRFLPV
ERELFRKTRLLPV

SEQ ID NO: 217135 - protein, 13 aa, Artificial Sequence
  Description of Artificial Sequence: Synthetic peptide
  Seed: ERELVRKTRFLPV
ERELFRKTRNLPI

SEQ ID NO: 217136 - protein, 13 aa, Artificial Sequence
  Description of Artificial Sequence: Synthetic peptide
  Seed: ERELVRKTRFLPV
ERELFRKTRNLPL

SEQ ID NO: 217137 - protein, 13 aa, Artificial Sequence
  Description of Artificial Sequence: Synthetic peptide
  Seed: ERELVRKTRFLPV
ERELFRKTRNLPV

SEQ ID NO: 217138 - protein, 13 aa, Artificial Sequence
  Description of Artificial Sequence: Synthetic peptide
  Seed: ERELVRKTRFLPV
ERELFRKTRPLPI

SEQ ID NO: 217139 - protein, 13 aa, Artificial Sequence
  Description of Artificial Sequence: Synthetic peptide
  Seed: ERELVRKTRFLPV
ERELFRKTRPLPL

SEQ ID NO: 217140 - protein, 13 aa, Artificial Sequence
  Description of Artificial Sequence: Synthetic peptide
  Seed: ERELVRKTRFLPV
ERELFRKTRPLPV

SEQ ID NO: 217141 - protein, 13 aa, Artificial Sequence
  Description of Artificial Sequence: Synthetic peptide
  Seed: ERELVRKTRFLPV
ERELFRKTRSLPA

SEQ ID NO: 217142 - protein, 13 aa, Artificial Sequence
  Description of Artificial Sequence: Synthetic peptide
  Seed: ERELVRKTRFLPV
ERELFRKTRSLPF

SEQ ID NO: 217143 - protein, 13 aa, Artificial Sequence
  Description of Artificial Sequence: Synthetic peptide
  Seed: ERELVRKTRFLPV
ERELFRKTRSLPI

SEQ ID NO: 217144 - protein, 13 aa, Artificial Sequence
  Description of Artificial Sequence: Synthetic peptide
  Seed: ERELVRKTRFLPV
ERELFRKTRSLPL

SEQ ID NO: 217145 - protein, 13 aa, Artificial Sequence
  Description of Artificial Sequence: Synthetic peptide
  Seed: ERELVRKTRFLPV
ERELFRKTRSLPM

SEQ ID NO: 217146 - protein, 13 aa, Artificial Sequence
  Description of Artificial Sequence: Synthetic peptide
  Seed: ERELVRKTRFLPV
ERELFRKTRSLPV

SEQ ID NO: 217147 - protein, 13 aa, Artificial Sequence
  Description of Artificial Sequence: Synthetic peptide
  Seed: ERELVRKTRFLPV
ERELFRKTRTLPF

SEQ ID NO: 217148 - protein, 13 aa, Artificial Sequence
  Description of Artificial Sequence: Synthetic peptide
  Seed: ERELVRKTRFLPV
ERELFRKTRTLPI

SEQ ID NO: 217149 - protein, 13 aa, Artificial Sequence
  Description of Artificial Sequence: Synthetic peptide
  Seed: ERELVRKTRFLPV
ERELFRKTRTLPL

SEQ ID NO: 217150 - protein, 13 aa, Artificial Sequence
  Description of Artificial Sequence: Synthetic peptide
  Seed: ERELVRKTRFLPV
ERELFRKTRTLPM

SEQ ID NO: 217151 - protein, 13 aa, Artificial Sequence
  Description of Artificial Sequence: Synthetic peptide
  Seed: ERELVRKTRFLPV
ERELFRKTRTLPV

SEQ ID NO: 217152 - protein, 13 aa, Artificial Sequence
  Description of Artificial Sequence: Synthetic peptide
  Seed: ERELVRKTRFLPV
ERELFRKTRVLPI

SEQ ID NO: 217153 - protein, 13 aa, Artificial Sequence
  Description of Artificial Sequence: Synthetic peptide
  Seed: ERELVRKTRFLPV
ERELFRKTRVLPL

SEQ ID NO: 217154 - protein, 13 aa, Artificial Sequence
  Description of Artificial Sequence: Synthetic peptide
  Seed: ERELVRKTRFLPV
ERELFRKTRVLPV

SEQ ID NO: 217155 - protein, 13 aa, Artificial Sequence
  Description of Artificial Sequence: Synthetic peptide
  Seed: ERELVRKTRFLPV
ERELFRKTRWLPL

SEQ ID NO: 217156 - protein, 13 aa, Artificial Sequence
  Description of Artificial Sequence: Synthetic peptide
  Seed: ERELVRKTRFLPV
ERELFRKTRYLPI

SEQ ID NO: 217157 - protein, 13 aa, Artificial Sequence
  Description of Artificial Sequence: Synthetic peptide
  Seed: ERELVRKTRFLPV
ERELFRKTRYLPL

SEQ ID NO: 217158 - protein, 13 aa, Artificial Sequence
  Description of Artificial Sequence: Synthetic peptide
  Seed: ERELVRKTRFLPV
ERELFRKVRALPA

SEQ ID NO: 217159 - protein, 13 aa, Artificial Sequence
  Description of Artificial Sequence: Synthetic peptide
  Seed: ERELVRKTRFLPV
ERELFRKVRALPF

SEQ ID NO: 217160 - protein, 13 aa, Artificial Sequence
  Description of Artificial Sequence: Synthetic peptide
  Seed: ERELVRKTRFLPV
ERELFRKVRALPI

SEQ ID NO: 217161 - protein, 13 aa, Artificial Sequence
  Description of Artificial Sequence: Synthetic peptide
  Seed: ERELVRKTRFLPV
ERELFRKVRALPL

SEQ ID NO: 217162 - protein, 13 aa, Artificial Sequence
  Description of Artificial Sequence: Synthetic peptide
  Seed: ERELVRKTRFLPV
ERELFRKVRALPM

SEQ ID NO: 217163 - protein, 13 aa, Artificial Sequence
  Description of Artificial Sequence: Synthetic peptide
  Seed: ERELVRKTRFLPV
ERELFRKVRALPV

SEQ ID NO: 217164 - protein, 13 aa, Artificial Sequence
  Description of Artificial Sequence: Synthetic peptide
  Seed: ERELVRKTRFLPV
ERELFRKVRFLPA

SEQ ID NO: 217165 - protein, 13 aa, Artificial Sequence
  Description of Artificial Sequence: Synthetic peptide
  Seed: ERELVRKTRFLPV
ERELFRKVRFLPF

SEQ ID NO: 217166 - protein, 13 aa, Artificial Sequence
  Description of Artificial Sequence: Synthetic peptide
  Seed: ERELVRKTRFLPV
ERELFRKVRFLPI

SEQ ID NO: 217167 - protein, 13 aa, Artificial Sequence
  Description of Artificial Sequence: Synthetic peptide
  Seed: ERELVRKTRFLPV
ERELFRKVRFLPL

SEQ ID NO: 217168 - protein, 13 aa, Artificial Sequence
  Description of Artificial Sequence: Synthetic peptide
  Seed: ERELVRKTRFLPV
ERELFRKVRFLPM

SEQ ID NO: 217169 - protein, 13 aa, Artificial Sequence
  Description of Artificial Sequence: Synthetic peptide
  Seed: ERELVRKTRFLPV
ERELFRKVRFLPS

SEQ ID NO: 217170 - protein, 13 aa, Artificial Sequence
  Description of Artificial Sequence: Synthetic peptide
  Seed: ERELVRKTRFLPV
ERELFRKVRFLPT

SEQ ID NO: 217171 - protein, 13 aa, Artificial Sequence
  Description of Artificial Sequence: Synthetic peptide
  Seed: ERELVRKTRFLPV
ERELFRKVRFLPV

SEQ ID NO: 217172 - protein, 13 aa, Artificial Sequence
  Description of Artificial Sequence: Synthetic peptide
  Seed: ERELVRKTRFLPV
ERELFRKVRFLPW

SEQ ID NO: 217173 - protein, 13 aa, Artificial Sequence
  Description of Artificial Sequence: Synthetic peptide
  Seed: ERELVRKTRFLPV
ERELFRKVRFLPY

SEQ ID NO: 217174 - protein, 13 aa, Artificial Sequence
  Description of Artificial Sequence: Synthetic peptide
  Seed: ERELVRKTRFLPV
ERELFRKVRGLPF

SEQ ID NO: 217175 - protein, 13 aa, Artificial Sequence
  Description of Artificial Sequence: Synthetic peptide
  Seed: ERELVRKTRFLPV
ERELFRKVRGLPI

SEQ ID NO: 217176 - protein, 13 aa, Artificial Sequence
  Description of Artificial Sequence: Synthetic peptide
  Seed: ERELVRKTRFLPV
ERELFRKVRGLPL

SEQ ID NO: 217177 - protein, 13 aa, Artificial Sequence
  Description of Artificial Sequence: Synthetic peptide
  Seed: ERELVRKTRFLPV
ERELFRKVRGLPM

SEQ ID NO: 217178 - protein, 13 aa, Artificial Sequence
  Description of Artificial Sequence: Synthetic peptide
  Seed: ERELVRKTRFLPV
ERELFRKVRGLPV

SEQ ID NO: 217179 - protein, 13 aa, Artificial Sequence
  Description of Artificial Sequence: Synthetic peptide
  Seed: ERELVRKTRFLPV
ERELFRKVRILPI

SEQ ID NO: 217180 - protein, 13 aa, Artificial Sequence
  Description of Artificial Sequence: Synthetic peptide
  Seed: ERELVRKTRFLPV
ERELFRKVRILPL

SEQ ID NO: 217181 - protein, 13 aa, Artificial Sequence
  Description of Artificial Sequence: Synthetic peptide
  Seed: ERELVRKTRFLPV
ERELFRKVRILPV

SEQ ID NO: 217182 - protein, 13 aa, Artificial Sequence
  Description of Artificial Sequence: Synthetic peptide
  Seed: ERELVRKTRFLPV
ERELFRKVRLLPI

SEQ ID NO: 217183 - protein, 13 aa, Artificial Sequence
  Description of Artificial Sequence: Synthetic peptide
  Seed: ERELVRKTRFLPV
ERELFRKVRLLPL

SEQ ID NO: 217184 - protein, 13 aa, Artificial Sequence
  Description of Artificial Sequence: Synthetic peptide
  Seed: ERELVRKTRFLPV
ERELFRKVRLLPV

SEQ ID NO: 217185 - protein, 13 aa, Artificial Sequence
  Description of Artificial Sequence: Synthetic peptide
  Seed: ERELVRKTRFLPV
ERELFRKVRMLPI

SEQ ID NO: 217186 - protein, 13 aa, Artificial Sequence
  Description of Artificial Sequence: Synthetic peptide
  Seed: ERELVRKTRFLPV
ERELFRKVRMLPL

SEQ ID NO: 217187 - protein, 13 aa, Artificial Sequence
  Description of Artificial Sequence: Synthetic peptide
  Seed: ERELVRKTRFLPV
ERELFRKVRNLPI

SEQ ID NO: 217188 - protein, 13 aa, Artificial Sequence
  Description of Artificial Sequence: Synthetic peptide
  Seed: ERELVRKTRFLPV
ERELFRKVRNLPL

SEQ ID NO: 217189 - protein, 13 aa, Artificial Sequence
  Description of Artificial Sequence: Synthetic peptide
  Seed: ERELVRKTRFLPV
ERELFRKVRNLPV

SEQ ID NO: 217190 - protein, 13 aa, Artificial Sequence
  Description of Artificial Sequence: Synthetic peptide
  Seed: ERELVRKTRFLPV
ERELFRKVRPLPI

SEQ ID NO: 217191 - protein, 13 aa, Artificial Sequence
  Description of Artificial Sequence: Synthetic peptide
  Seed: ERELVRKTRFLPV
ERELFRKVRPLPL

SEQ ID NO: 217192 - protein, 13 aa, Artificial Sequence
  Description of Artificial Sequence: Synthetic peptide
  Seed: ERELVRKTRFLPV
ERELFRKVRPLPV

SEQ ID NO: 217193 - protein, 13 aa, Artificial Sequence
  Description of Artificial Sequence: Synthetic peptide
  Seed: ERELVRKTRFLPV
ERELFRKVRSLPA

SEQ ID NO: 217194 - protein, 13 aa, Artificial Sequence
  Description of Artificial Sequence: Synthetic peptide
  Seed: ERELVRKTRFLPV
ERELFRKVRSLPF

SEQ ID NO: 217195 - protein, 13 aa, Artificial Sequence
  Description of Artificial Sequence: Synthetic peptide
  Seed: ERELVRKTRFLPV
ERELFRKVRSLPI

SEQ ID NO: 217196 - protein, 13 aa, Artificial Sequence
  Description of Artificial Sequence: Synthetic peptide
  Seed: ERELVRKTRFLPV
ERELFRKVRSLPL

SEQ ID NO: 217197 - protein, 13 aa, Artificial Sequence
  Description of Artificial Sequence: Synthetic peptide
  Seed: ERELVRKTRFLPV
ERELFRKVRSLPM

SEQ ID NO: 217198 - protein, 13 aa, Artificial Sequence
  Description of Artificial Sequence: Synthetic peptide
  Seed: ERELVRKTRFLPV
ERELFRKVRSLPT

SEQ ID NO: 217199 - protein, 13 aa, Artificial Sequence
  Description of Artificial Sequence: Synthetic peptide
  Seed: ERELVRKTRFLPV
ERELFRKVRSLPV

SEQ ID NO: 217200 - protein, 13 aa, Artificial Sequence
  Description of Artificial Sequence: Synthetic peptide
  Seed: ERELVRKTRFLPV
ERELFRKVRTLPF

SEQ ID NO: 217201 - protein, 13 aa, Artificial Sequence
  Description of Artificial Sequence: Synthetic peptide
  Seed: ERELVRKTRFLPV
ERELFRKVRTLPI

SEQ ID NO: 217202 - protein, 13 aa, Artificial Sequence
  Description of Artificial Sequence: Synthetic peptide
  Seed: ERELVRKTRFLPV
ERELFRKVRTLPL

SEQ ID NO: 217203 - protein, 13 aa, Artificial Sequence
  Description of Artificial Sequence: Synthetic peptide
  Seed: ERELVRKTRFLPV
ERELFRKVRTLPM

SEQ ID NO: 217204 - protein, 13 aa, Artificial Sequence
  Description of Artificial Sequence: Synthetic peptide
  Seed: ERELVRKTRFLPV
ERELFRKVRTLPV

SEQ ID NO: 217205 - protein, 13 aa, Artificial Sequence
  Description of Artificial Sequence: Synthetic peptide
  Seed: ERELVRKTRFLPV
ERELFRKVRVLPI

SEQ ID NO: 217206 - protein, 13 aa, Artificial Sequence
  Description of Artificial Sequence: Synthetic peptide
  Seed: ERELVRKTRFLPV
ERELFRKVRVLPL

SEQ ID NO: 217207 - protein, 13 aa, Artificial Sequence
  Description of Artificial Sequence: Synthetic peptide
  Seed: ERELVRKTRFLPV
ERELFRKVRVLPV

SEQ ID NO: 217208 - protein, 13 aa, Artificial Sequence
  Description of Artificial Sequence: Synthetic peptide
  Seed: ERELVRKTRFLPV
ERELFRKVRWLPI

SEQ ID NO: 217209 - protein, 13 aa, Artificial Sequence
  Description of Artificial Sequence: Synthetic peptide
  Seed: ERELVRKTRFLPV
ERELFRKVRWLPL

SEQ ID NO: 217210 - protein, 13 aa, Artificial Sequence
  Description of Artificial Sequence: Synthetic peptide
  Seed: ERELVRKTRFLPV
ERELFRKVRWLPV

SEQ ID NO: 217211 - protein, 13 aa, Artificial Sequence
  Description of Artificial Sequence: Synthetic peptide
  Seed: ERELVRKTRFLPV
ERELFRKVRYLPI

SEQ ID NO: 217212 - protein, 13 aa, Artificial Sequence
  Description of Artificial Sequence: Synthetic peptide
  Seed: ERELVRKTRFLPV
ERELFRKVRYLPL

SEQ ID NO: 217213 - protein, 13 aa, Artificial Sequence
  Description of Artificial Sequence: Synthetic peptide
  Seed: ERELVRKTRFLPV
ERELFRKVRYLPV

SEQ ID NO: 217214 - protein, 13 aa, Artificial Sequence
  Description of Artificial Sequence: Synthetic peptide
  Seed: ERELVRKTRFLPV
ERELFRKWRFLPI

SEQ ID NO: 217215 - protein, 13 aa, Artificial Sequence
  Description of Artificial Sequence: Synthetic peptide
  Seed: ERELVRKTRFLPV
ERELFRKWRFLPL

SEQ ID NO: 217216 - protein, 13 aa, Artificial Sequence
  Description of Artificial Sequence: Synthetic peptide
  Seed: ERELVRKTRFLPV
ERELFRKWRFLPV

SEQ ID NO: 217217 - protein, 13 aa, Artificial Sequence
  Description of Artificial Sequence: Synthetic peptide
  Seed: ERELVRKTRFLPV
ERELFRKYRFLPI

SEQ ID NO: 217218 - protein, 13 aa, Artificial Sequence
  Description of Artificial Sequence: Synthetic peptide
  Seed: ERELVRKTRFLPV
ERELFRKYRFLPL

SEQ ID NO: 217219 - protein, 13 aa, Artificial Sequence
  Description of Artificial Sequence: Synthetic peptide
  Seed: ERELVRKTRFLPV
ERELFRKYRFLPM

SEQ ID NO: 217220 - protein, 13 aa, Artificial Sequence
  Description of Artificial Sequence: Synthetic peptide
  Seed: ERELVRKTRFLPV
ERELFRKYRFLPV

SEQ ID NO: 217221 - protein, 13 aa, Artificial Sequence
  Description of Artificial Sequence: Synthetic peptide
  Seed: ERELVRKTRFLPV
ERELIRKARALPI

SEQ ID NO: 217222 - protein, 13 aa, Artificial Sequence
  Description of Artificial Sequence: Synthetic peptide
  Seed: ERELVRKTRFLPV
ERELIRKARALPL

SEQ ID NO: 217223 - protein, 13 aa, Artificial Sequence
  Description of Artificial Sequence: Synthetic peptide
  Seed: ERELVRKTRFLPV
ERELIRKARALPV

SEQ ID NO: 217224 - protein, 13 aa, Artificial Sequence
  Description of Artificial Sequence: Synthetic peptide
  Seed: ERELVRKTRFLPV
ERELIRKARFLPI

SEQ ID NO: 217225 - protein, 13 aa, Artificial Sequence
  Description of Artificial Sequence: Synthetic peptide
  Seed: ERELVRKTRFLPV
ERELIRKARFLPL

SEQ ID NO: 217226 - protein, 13 aa, Artificial Sequence
  Description of Artificial Sequence: Synthetic peptide
  Seed: ERELVRKTRFLPV
ERELIRKARFLPV

SEQ ID NO: 217227 - protein, 13 aa, Artificial Sequence
  Description of Artificial Sequence: Synthetic peptide
  Seed: ERELVRKTRFLPV
ERELIRKARSLPI

SEQ ID NO: 217228 - protein, 13 aa, Artificial Sequence
  Description of Artificial Sequence: Synthetic peptide
  Seed: ERELVRKTRFLPV
ERELIRKARSLPL

SEQ ID NO: 217229 - protein, 13 aa, Artificial Sequence
  Description of Artificial Sequence: Synthetic peptide
  Seed: ERELVRKTRFLPV
ERELIRKARSLPV

SEQ ID NO: 217230 - protein, 13 aa, Artificial Sequence
  Description of Artificial Sequence: Synthetic peptide
  Seed: ERELVRKTRFLPV
ERELIRKERFLPI

SEQ ID NO: 217231 - protein, 13 aa, Artificial Sequence
  Description of Artificial Sequence: Synthetic peptide
  Seed: ERELVRKTRFLPV
ERELIRKERFLPL

SEQ ID NO: 217232 - protein, 13 aa, Artificial Sequence
  Description of Artificial Sequence: Synthetic peptide
  Seed: ERELVRKTRFLPV
ERELIRKERFLPV

SEQ ID NO: 217233 - protein, 13 aa, Artificial Sequence
  Description of Artificial Sequence: Synthetic peptide
  Seed: ERELVRKTRFLPV
ERELIRKFRFLPI

SEQ ID NO: 217234 - protein, 13 aa, Artificial Sequence
  Description of Artificial Sequence: Synthetic peptide
  Seed: ERELVRKTRFLPV
ERELIRKFRFLPL

SEQ ID NO: 217235 - protein, 13 aa, Artificial Sequence
  Description of Artificial Sequence: Synthetic peptide
  Seed: ERELVRKTRFLPV
ERELIRKFRFLPM

SEQ ID NO: 217236 - protein, 13 aa, Artificial Sequence
  Description of Artificial Sequence: Synthetic peptide
  Seed: ERELVRKTRFLPV
ERELIRKFRFLPV

SEQ ID NO: 217237 - protein, 13 aa, Artificial Sequence
  Description of Artificial Sequence: Synthetic peptide
  Seed: ERELVRKTRFLPV
ERELIRKHRFLPI

SEQ ID NO: 217238 - protein, 13 aa, Artificial Sequence
  Description of Artificial Sequence: Synthetic peptide
  Seed: ERELVRKTRFLPV
ERELIRKHRFLPL

SEQ ID NO: 217239 - protein, 13 aa, Artificial Sequence
  Description of Artificial Sequence: Synthetic peptide
  Seed: ERELVRKTRFLPV
ERELIRKIRALPI

SEQ ID NO: 217240 - protein, 13 aa, Artificial Sequence
  Description of Artificial Sequence: Synthetic peptide
  Seed: ERELVRKTRFLPV
ERELIRKIRALPL

SEQ ID NO: 217241 - protein, 13 aa, Artificial Sequence
  Description of Artificial Sequence: Synthetic peptide
  Seed: ERELVRKTRFLPV
ERELIRKIRALPV

SEQ ID NO: 217242 - protein, 13 aa, Artificial Sequence
  Description of Artificial Sequence: Synthetic peptide
  Seed: ERELVRKTRFLPV
ERELIRKIRFLPF

SEQ ID NO: 217243 - protein, 13 aa, Artificial Sequence
  Description of Artificial Sequence: Synthetic peptide
  Seed: ERELVRKTRFLPV
ERELIRKIRFLPI

SEQ ID NO: 217244 - protein, 13 aa, Artificial Sequence
  Description of Artificial Sequence: Synthetic peptide
  Seed: ERELVRKTRFLPV
ERELIRKIRFLPL

SEQ ID NO: 217245 - protein, 13 aa, Artificial Sequence
  Description of Artificial Sequence: Synthetic peptide
  Seed: ERELVRKTRFLPV
ERELIRKIRFLPM

SEQ ID NO: 217246 - protein, 13 aa, Artificial Sequence
  Description of Artificial Sequence: Synthetic peptide
  Seed: ERELVRKTRFLPV
ERELIRKIRFLPV

SEQ ID NO: 217247 - protein, 13 aa, Artificial Sequence
  Description of Artificial Sequence: Synthetic peptide
  Seed: ERELVRKTRFLPV
ERELIRKIRSLPI

SEQ ID NO: 217248 - protein, 13 aa, Artificial Sequence
  Description of Artificial Sequence: Synthetic peptide
  Seed: ERELVRKTRFLPV
ERELIRKIRSLPL

SEQ ID NO: 217249 - protein, 13 aa, Artificial Sequence
  Description of Artificial Sequence: Synthetic peptide
  Seed: ERELVRKTRFLPV
ERELIRKIRSLPV

SEQ ID NO: 217250 - protein, 13 aa, Artificial Sequence
  Description of Artificial Sequence: Synthetic peptide
  Seed: ERELVRKTRFLPV
ERELIRKLRFLPI

SEQ ID NO: 217251 - protein, 13 aa, Artificial Sequence
  Description of Artificial Sequence: Synthetic peptide
  Seed: ERELVRKTRFLPV
ERELIRKLRFLPL

SEQ ID NO: 217252 - protein, 13 aa, Artificial Sequence
  Description of Artificial Sequence: Synthetic peptide
  Seed: ERELVRKTRFLPV
ERELIRKLRFLPV

SEQ ID NO: 217253 - protein, 13 aa, Artificial Sequence
  Description of Artificial Sequence: Synthetic peptide
  Seed: ERELVRKTRFLPV
ERELIRKMRFLPI

SEQ ID NO: 217254 - protein, 13 aa, Artificial Sequence
  Description of Artificial Sequence: Synthetic peptide
  Seed: ERELVRKTRFLPV
ERELIRKMRFLPL

SEQ ID NO: 217255 - protein, 13 aa, Artificial Sequence
  Description of Artificial Sequence: Synthetic peptide
  Seed: ERELVRKTRFLPV
ERELIRKMRFLPV

SEQ ID NO: 217256 - protein, 13 aa, Artificial Sequence
  Description of Artificial Sequence: Synthetic peptide
  Seed: ERELVRKTRFLPV
ERELIRKQRFLPL

SEQ ID NO: 217257 - protein, 13 aa, Artificial Sequence
  Description of Artificial Sequence: Synthetic peptide
  Seed: ERELVRKTRFLPV
ERELIRKSRALPI

SEQ ID NO: 217258 - protein, 13 aa, Artificial Sequence
  Description of Artificial Sequence: Synthetic peptide
  Seed: ERELVRKTRFLPV
ERELIRKSRALPL

SEQ ID NO: 217259 - protein, 13 aa, Artificial Sequence
  Description of Artificial Sequence: Synthetic peptide
  Seed: ERELVRKTRFLPV
ERELIRKSRALPV

SEQ ID NO: 217260 - protein, 13 aa, Artificial Sequence
  Description of Artificial Sequence: Synthetic peptide
  Seed: ERELVRKTRFLPV
ERELIRKSRFLPI

SEQ ID NO: 217261 - protein, 13 aa, Artificial Sequence
  Description of Artificial Sequence: Synthetic peptide
  Seed: ERELVRKTRFLPV
ERELIRKSRFLPL

SEQ ID NO: 217262 - protein, 13 aa, Artificial Sequence
  Description of Artificial Sequence: Synthetic peptide
  Seed: ERELVRKTRFLPV
ERELIRKSRFLPV

SEQ ID NO: 217263 - protein, 13 aa, Artificial Sequence
  Description of Artificial Sequence: Synthetic peptide
  Seed: ERELVRKTRFLPV
ERELIRKSRGLPI

SEQ ID NO: 217264 - protein, 13 aa, Artificial Sequence
  Description of Artificial Sequence: Synthetic peptide
  Seed: ERELVRKTRFLPV
ERELIRKSRSLPI

SEQ ID NO: 217265 - protein, 13 aa, Artificial Sequence
  Description of Artificial Sequence: Synthetic peptide
  Seed: ERELVRKTRFLPV
ERELIRKSRSLPL

SEQ ID NO: 217266 - protein, 13 aa, Artificial Sequence
  Description of Artificial Sequence: Synthetic peptide
  Seed: ERELVRKTRFLPV
ERELIRKSRSLPV

SEQ ID NO: 217267 - protein, 13 aa, Artificial Sequence
  Description of Artificial Sequence: Synthetic peptide
  Seed: ERELVRKTRFLPV
ERELIRKTRALPI

SEQ ID NO: 217268 - protein, 13 aa, Artificial Sequence
  Description of Artificial Sequence: Synthetic peptide
  Seed: ERELVRKTRFLPV
ERELIRKTRALPL

SEQ ID NO: 217269 - protein, 13 aa, Artificial Sequence
  Description of Artificial Sequence: Synthetic peptide
  Seed: ERELVRKTRFLPV
ERELIRKTRALPV

SEQ ID NO: 217270 - protein, 13 aa, Artificial Sequence
  Description of Artificial Sequence: Synthetic peptide
  Seed: ERELVRKTRFLPV
ERELIRKTRFLPF

SEQ ID NO: 217271 - protein, 13 aa, Artificial Sequence
  Description of Artificial Sequence: Synthetic peptide
  Seed: ERELVRKTRFLPV
ERELIRKTRFLPI

SEQ ID NO: 217272 - protein, 13 aa, Artificial Sequence
  Description of Artificial Sequence: Synthetic peptide
  Seed: ERELVRKTRFLPV
ERELIRKTRFLPL

SEQ ID NO: 217273 - protein, 13 aa, Artificial Sequence
  Description of Artificial Sequence: Synthetic peptide
  Seed: ERELVRKTRFLPV
ERELIRKTRFLPM

SEQ ID NO: 217274 - protein, 13 aa, Artificial Sequence
  Description of Artificial Sequence: Synthetic peptide
  Seed: ERELVRKTRFLPV
ERELIRKTRFLPV

SEQ ID NO: 217275 - protein, 13 aa, Artificial Sequence
  Description of Artificial Sequence: Synthetic peptide
  Seed: ERELVRKTRFLPV
ERELIRKTRGLPI

SEQ ID NO: 217276 - protein, 13 aa, Artificial Sequence
  Description of Artificial Sequence: Synthetic peptide
  Seed: ERELVRKTRFLPV
ERELIRKTRGLPL

SEQ ID NO: 217277 - protein, 13 aa, Artificial Sequence
  Description of Artificial Sequence: Synthetic peptide
  Seed: ERELVRKTRFLPV
ERELIRKTRSLPI

SEQ ID NO: 217278 - protein, 13 aa, Artificial Sequence
  Description of Artificial Sequence: Synthetic peptide
  Seed: ERELVRKTRFLPV
ERELIRKTRSLPL

SEQ ID NO: 217279 - protein, 13 aa, Artificial Sequence
  Description of Artificial Sequence: Synthetic peptide
  Seed: ERELVRKTRFLPV
ERELIRKTRSLPV

SEQ ID NO: 217280 - protein, 13 aa, Artificial Sequence
  Description of Artificial Sequence: Synthetic peptide
  Seed: ERELVRKTRFLPV
ERELIRKVRALPI

SEQ ID NO: 217281 - protein, 13 aa, Artificial Sequence
  Description of Artificial Sequence: Synthetic peptide
  Seed: ERELVRKTRFLPV
ERELIRKVRALPL

SEQ ID NO: 217282 - protein, 13 aa, Artificial Sequence
  Description of Artificial Sequence: Synthetic peptide
  Seed: ERELVRKTRFLPV
ERELIRKVRALPV

SEQ ID NO: 217283 - protein, 13 aa, Artificial Sequence
  Description of Artificial Sequence: Synthetic peptide
  Seed: ERELVRKTRFLPV
ERELIRKVRFLPF

SEQ ID NO: 217284 - protein, 13 aa, Artificial Sequence
  Description of Artificial Sequence: Synthetic peptide
  Seed: ERELVRKTRFLPV
ERELIRKVRFLPI

SEQ ID NO: 217285 - protein, 13 aa, Artificial Sequence
  Description of Artificial Sequence: Synthetic peptide
  Seed: ERELVRKTRFLPV
ERELIRKVRFLPL

SEQ ID NO: 217286 - protein, 13 aa, Artificial Sequence
  Description of Artificial Sequence: Synthetic peptide
  Seed: ERELVRKTRFLPV
ERELIRKVRFLPM

SEQ ID NO: 217287 - protein, 13 aa, Artificial Sequence
  Description of Artificial Sequence: Synthetic peptide
  Seed: ERELVRKTRFLPV
ERELIRKVRFLPV

SEQ ID NO: 217288 - protein, 13 aa, Artificial Sequence
  Description of Artificial Sequence: Synthetic peptide
  Seed: ERELVRKTRFLPV
ERELIRKVRGLPI

SEQ ID NO: 217289 - protein, 13 aa, Artificial Sequence
  Description of Artificial Sequence: Synthetic peptide
  Seed: ERELVRKTRFLPV
ERELIRKVRSLPI

SEQ ID NO: 217290 - protein, 13 aa, Artificial Sequence
  Description of Artificial Sequence: Synthetic peptide
  Seed: ERELVRKTRFLPV
ERELIRKVRSLPL

SEQ ID NO: 217291 - protein, 13 aa, Artificial Sequence
  Description of Artificial Sequence: Synthetic peptide
  Seed: ERELVRKTRFLPV
ERELIRKVRSLPV

SEQ ID NO: 217292 - protein, 13 aa, Artificial Sequence
  Description of Artificial Sequence: Synthetic peptide
  Seed: ERELVRKTRFLPV
ERELLRKARALPI

SEQ ID NO: 217293 - protein, 13 aa, Artificial Sequence
  Description of Artificial Sequence: Synthetic peptide
  Seed: ERELVRKTRFLPV
ERELLRKARALPL

SEQ ID NO: 217294 - protein, 13 aa, Artificial Sequence
  Description of Artificial Sequence: Synthetic peptide
  Seed: ERELVRKTRFLPV
ERELLRKARALPV

SEQ ID NO: 217295 - protein, 13 aa, Artificial Sequence
  Description of Artificial Sequence: Synthetic peptide
  Seed: ERELVRKTRFLPV
ERELLRKARFLPI

SEQ ID NO: 217296 - protein, 13 aa, Artificial Sequence
  Description of Artificial Sequence: Synthetic peptide
  Seed: ERELVRKTRFLPV
ERELLRKARFLPL

SEQ ID NO: 217297 - protein, 13 aa, Artificial Sequence
  Description of Artificial Sequence: Synthetic peptide
  Seed: ERELVRKTRFLPV
ERELLRKARFLPV

SEQ ID NO: 217298 - protein, 13 aa, Artificial Sequence
  Description of Artificial Sequence: Synthetic peptide
  Seed: ERELVRKTRFLPV
ERELLRKARSLPI

SEQ ID NO: 217299 - protein, 13 aa, Artificial Sequence
  Description of Artificial Sequence: Synthetic peptide
  Seed: ERELVRKTRFLPV
ERELLRKARSLPL

SEQ ID NO: 217300 - protein, 13 aa, Artificial Sequence
  Description of Artificial Sequence: Synthetic peptide
  Seed: ERELVRKTRFLPV
ERELLRKARSLPV

SEQ ID NO: 217301 - protein, 13 aa, Artificial Sequence
  Description of Artificial Sequence: Synthetic peptide
  Seed: ERELVRKTRFLPV
ERELLRKERFLPI

SEQ ID NO: 217302 - protein, 13 aa, Artificial Sequence
  Description of Artificial Sequence: Synthetic peptide
  Seed: ERELVRKTRFLPV
ERELLRKERFLPL

SEQ ID NO: 217303 - protein, 13 aa, Artificial Sequence
  Description of Artificial Sequence: Synthetic peptide
  Seed: ERELVRKTRFLPV
ERELLRKERFLPV

SEQ ID NO: 217304 - protein, 13 aa, Artificial Sequence
  Description of Artificial Sequence: Synthetic peptide
  Seed: ERELVRKTRFLPV
ERELLRKFRFLPI

SEQ ID NO: 217305 - protein, 13 aa, Artificial Sequence
  Description of Artificial Sequence: Synthetic peptide
  Seed: ERELVRKTRFLPV
ERELLRKFRFLPL

SEQ ID NO: 217306 - protein, 13 aa, Artificial Sequence
  Description of Artificial Sequence: Synthetic peptide
  Seed: ERELVRKTRFLPV
ERELLRKFRFLPM

SEQ ID NO: 217307 - protein, 13 aa, Artificial Sequence
  Description of Artificial Sequence: Synthetic peptide
  Seed: ERELVRKTRFLPV
ERELLRKFRFLPV

SEQ ID NO: 217308 - protein, 13 aa, Artificial Sequence
  Description of Artificial Sequence: Synthetic peptide
  Seed: ERELVRKTRFLPV
ERELLRKHRFLPI

SEQ ID NO: 217309 - protein, 13 aa, Artificial Sequence
  Description of Artificial Sequence: Synthetic peptide
  Seed: ERELVRKTRFLPV
ERELLRKHRFLPL

SEQ ID NO: 217310 - protein, 13 aa, Artificial Sequence
  Description of Artificial Sequence: Synthetic peptide
  Seed: ERELVRKTRFLPV
ERELLRKHRFLPV

SEQ ID NO: 217311 - protein, 13 aa, Artificial Sequence
  Description of Artificial Sequence: Synthetic peptide
  Seed: ERELVRKTRFLPV
ERELLRKIRALPI

SEQ ID NO: 217312 - protein, 13 aa, Artificial Sequence
  Description of Artificial Sequence: Synthetic peptide
  Seed: ERELVRKTRFLPV
ERELLRKIRALPL

SEQ ID NO: 217313 - protein, 13 aa, Artificial Sequence
  Description of Artificial Sequence: Synthetic peptide
  Seed: ERELVRKTRFLPV
ERELLRKIRALPV

SEQ ID NO: 217314 - protein, 13 aa, Artificial Sequence
  Description of Artificial Sequence: Synthetic peptide
  Seed: ERELVRKTRFLPV
ERELLRKIRFLPF

SEQ ID NO: 217315 - protein, 13 aa, Artificial Sequence
  Description of Artificial Sequence: Synthetic peptide
  Seed: ERELVRKTRFLPV
ERELLRKIRFLPI

SEQ ID NO: 217316 - protein, 13 aa, Artificial Sequence
  Description of Artificial Sequence: Synthetic peptide
  Seed: ERELVRKTRFLPV
ERELLRKIRFLPL

SEQ ID NO: 217317 - protein, 13 aa, Artificial Sequence
  Description of Artificial Sequence: Synthetic peptide
  Seed: ERELVRKTRFLPV
ERELLRKIRFLPM

SEQ ID NO: 217318 - protein, 13 aa, Artificial Sequence
  Description of Artificial Sequence: Synthetic peptide
  Seed: ERELVRKTRFLPV
ERELLRKIRFLPV

SEQ ID NO: 217319 - protein, 13 aa, Artificial Sequence
  Description of Artificial Sequence: Synthetic peptide
  Seed: ERELVRKTRFLPV
ERELLRKIRSLPI

SEQ ID NO: 217320 - protein, 13 aa, Artificial Sequence
  Description of Artificial Sequence: Synthetic peptide
  Seed: ERELVRKTRFLPV
ERELLRKIRSLPL

SEQ ID NO: 217321 - protein, 13 aa, Artificial Sequence
  Description of Artificial Sequence: Synthetic peptide
  Seed: ERELVRKTRFLPV
ERELLRKIRSLPV

SEQ ID NO: 217322 - protein, 13 aa, Artificial Sequence
  Description of Artificial Sequence: Synthetic peptide
  Seed: ERELVRKTRFLPV
ERELLRKLRFLPI

SEQ ID NO: 217323 - protein, 13 aa, Artificial Sequence
  Description of Artificial Sequence: Synthetic peptide
  Seed: ERELVRKTRFLPV
ERELLRKLRFLPL

SEQ ID NO: 217324 - protein, 13 aa, Artificial Sequence
  Description of Artificial Sequence: Synthetic peptide
  Seed: ERELVRKTRFLPV
ERELLRKLRFLPV

SEQ ID NO: 217325 - protein, 13 aa, Artificial Sequence
  Description of Artificial Sequence: Synthetic peptide
  Seed: ERELVRKTRFLPV
ERELLRKMRFLPI

SEQ ID NO: 217326 - protein, 13 aa, Artificial Sequence
  Description of Artificial Sequence: Synthetic peptide
  Seed: ERELVRKTRFLPV
ERELLRKMRFLPL

SEQ ID NO: 217327 - protein, 13 aa, Artificial Sequence
  Description of Artificial Sequence: Synthetic peptide
  Seed: ERELVRKTRFLPV
ERELLRKMRFLPV

SEQ ID NO: 217328 - protein, 13 aa, Artificial Sequence
  Description of Artificial Sequence: Synthetic peptide
  Seed: ERELVRKTRFLPV
ERELLRKSRALPI

SEQ ID NO: 217329 - protein, 13 aa, Artificial Sequence
  Description of Artificial Sequence: Synthetic peptide
  Seed: ERELVRKTRFLPV
ERELLRKSRALPL

SEQ ID NO: 217330 - protein, 13 aa, Artificial Sequence
  Description of Artificial Sequence: Synthetic peptide
  Seed: ERELVRKTRFLPV
ERELLRKSRALPV

SEQ ID NO: 217331 - protein, 13 aa, Artificial Sequence
  Description of Artificial Sequence: Synthetic peptide
  Seed: ERELVRKTRFLPV
ERELLRKSRFLPI

SEQ ID NO: 217332 - protein, 13 aa, Artificial Sequence
  Description of Artificial Sequence: Synthetic peptide
  Seed: ERELVRKTRFLPV
ERELLRKSRFLPL

SEQ ID NO: 217333 - protein, 13 aa, Artificial Sequence
  Description of Artificial Sequence: Synthetic peptide
  Seed: ERELVRKTRFLPV
ERELLRKSRFLPV

SEQ ID NO: 217334 - protein, 13 aa, Artificial Sequence
  Description of Artificial Sequence: Synthetic peptide
  Seed: ERELVRKTRFLPV
ERELLRKSRSLPI

SEQ ID NO: 217335 - protein, 13 aa, Artificial Sequence
  Description of Artificial Sequence: Synthetic peptide
  Seed: ERELVRKTRFLPV
ERELLRKSRSLPL

SEQ ID NO: 217336 - protein, 13 aa, Artificial Sequence
  Description of Artificial Sequence: Synthetic peptide
  Seed: ERELVRKTRFLPV
ERELLRKSRSLPV

SEQ ID NO: 217337 - protein, 13 aa, Artificial Sequence
  Description of Artificial Sequence: Synthetic peptide
  Seed: ERELVRKTRFLPV
ERELLRKTRALPI

SEQ ID NO: 217338 - protein, 13 aa, Artificial Sequence
  Description of Artificial Sequence: Synthetic peptide
  Seed: ERELVRKTRFLPV
ERELLRKTRALPL

SEQ ID NO: 217339 - protein, 13 aa, Artificial Sequence
  Description of Artificial Sequence: Synthetic peptide
  Seed: ERELVRKTRFLPV
ERELLRKTRALPV

SEQ ID NO: 217340 - protein, 13 aa, Artificial Sequence
  Description of Artificial Sequence: Synthetic peptide
  Seed: ERELVRKTRFLPV
ERELLRKTRFLPF

SEQ ID NO: 217341 - protein, 13 aa, Artificial Sequence
  Description of Artificial Sequence: Synthetic peptide
  Seed: ERELVRKTRFLPV
ERELLRKTRFLPI

SEQ ID NO: 217342 - protein, 13 aa, Artificial Sequence
  Description of Artificial Sequence: Synthetic peptide
  Seed: ERELVRKTRFLPV
ERELLRKTRFLPL

SEQ ID NO: 217343 - protein, 13 aa, Artificial Sequence
  Description of Artificial Sequence: Synthetic peptide
  Seed: ERELVRKTRFLPV
ERELLRKTRFLPM

SEQ ID NO: 217344 - protein, 13 aa, Artificial Sequence
  Description of Artificial Sequence: Synthetic peptide
  Seed: ERELVRKTRFLPV
ERELLRKTRFLPV

SEQ ID NO: 217345 - protein, 13 aa, Artificial Sequence
  Description of Artificial Sequence: Synthetic peptide
  Seed: ERELVRKTRFLPV
ERELLRKTRGLPI

SEQ ID NO: 217346 - protein, 13 aa, Artificial Sequence
  Description of Artificial Sequence: Synthetic peptide
  Seed: ERELVRKTRFLPV
ERELLRKTRSLPI

SEQ ID NO: 217347 - protein, 13 aa, Artificial Sequence
  Description of Artificial Sequence: Synthetic peptide
  Seed: ERELVRKTRFLPV
ERELLRKTRSLPL

SEQ ID NO: 217348 - protein, 13 aa, Artificial Sequence
  Description of Artificial Sequence: Synthetic peptide
  Seed: ERELVRKTRFLPV
ERELLRKTRSLPV

SEQ ID NO: 217349 - protein, 13 aa, Artificial Sequence
  Description of Artificial Sequence: Synthetic peptide
  Seed: ERELVRKTRFLPV
ERELLRKVRALPI

SEQ ID NO: 217350 - protein, 13 aa, Artificial Sequence
  Description of Artificial Sequence: Synthetic peptide
  Seed: ERELVRKTRFLPV
ERELLRKVRALPL

SEQ ID NO: 217351 - protein, 13 aa, Artificial Sequence
  Description of Artificial Sequence: Synthetic peptide
  Seed: ERELVRKTRFLPV
ERELLRKVRALPV

SEQ ID NO: 217352 - protein, 13 aa, Artificial Sequence
  Description of Artificial Sequence: Synthetic peptide
  Seed: ERELVRKTRFLPV
ERELLRKVRFLPF

SEQ ID NO: 217353 - protein, 13 aa, Artificial Sequence
  Description of Artificial Sequence: Synthetic peptide
  Seed: ERELVRKTRFLPV
ERELLRKVRFLPI

SEQ ID NO: 217354 - protein, 13 aa, Artificial Sequence
  Description of Artificial Sequence: Synthetic peptide
  Seed: ERELVRKTRFLPV
ERELLRKVRFLPL

SEQ ID NO: 217355 - protein, 13 aa, Artificial Sequence
  Description of Artificial Sequence: Synthetic peptide
  Seed: ERELVRKTRFLPV
ERELLRKVRFLPM

SEQ ID NO: 217356 - protein, 13 aa, Artificial Sequence
  Description of Artificial Sequence: Synthetic peptide
  Seed: ERELVRKTRFLPV
ERELLRKVRFLPV

SEQ ID NO: 217357 - protein, 13 aa, Artificial Sequence
  Description of Artificial Sequence: Synthetic peptide
  Seed: ERELVRKTRFLPV
ERELLRKVRGLPI

SEQ ID NO: 217358 - protein, 13 aa, Artificial Sequence
  Description of Artificial Sequence: Synthetic peptide
  Seed: ERELVRKTRFLPV
ERELLRKVRSLPI

SEQ ID NO: 217359 - protein, 13 aa, Artificial Sequence
  Description of Artificial Sequence: Synthetic peptide
  Seed: ERELVRKTRFLPV
ERELLRKVRSLPL

SEQ ID NO: 217360 - protein, 13 aa, Artificial Sequence
  Description of Artificial Sequence: Synthetic peptide
  Seed: ERELVRKTRFLPV
ERELLRKVRSLPV

SEQ ID NO: 217361 - protein, 13 aa, Artificial Sequence
  Description of Artificial Sequence: Synthetic peptide
  Seed: ERELVRKTRFLPV
ERELMRKIRFLPI

SEQ ID NO: 217362 - protein, 13 aa, Artificial Sequence
  Description of Artificial Sequence: Synthetic peptide
  Seed: ERELVRKTRFLPV
ERELMRKIRFLPL

SEQ ID NO: 217363 - protein, 13 aa, Artificial Sequence
  Description of Artificial Sequence: Synthetic peptide
  Seed: ERELVRKTRFLPV
ERELMRKIRFLPV

SEQ ID NO: 217364 - protein, 13 aa, Artificial Sequence
  Description of Artificial Sequence: Synthetic peptide
  Seed: ERELVRKTRFLPV
ERELMRKIRSLPI

SEQ ID NO: 217365 - protein, 13 aa, Artificial Sequence
  Description of Artificial Sequence: Synthetic peptide
  Seed: ERELVRKTRFLPV
ERELMRKSRSLPI

SEQ ID NO: 217366 - protein, 13 aa, Artificial Sequence
  Description of Artificial Sequence: Synthetic peptide
  Seed: ERELVRKTRFLPV
ERELMRKSRSLPL

SEQ ID NO: 217367 - protein, 13 aa, Artificial Sequence
  Description of Artificial Sequence: Synthetic peptide
  Seed: ERELVRKTRFLPV
ERELMRKTRFLPI

SEQ ID NO: 217368 - protein, 13 aa, Artificial Sequence
  Description of Artificial Sequence: Synthetic peptide
  Seed: ERELVRKTRFLPV
ERELMRKTRFLPL

SEQ ID NO: 217369 - protein, 13 aa, Artificial Sequence
  Description of Artificial Sequence: Synthetic peptide
  Seed: ERELVRKTRFLPV
ERELMRKTRFLPV

SEQ ID NO: 217370 - protein, 13 aa, Artificial Sequence
  Description of Artificial Sequence: Synthetic peptide
  Seed: ERELVRKTRFLPV
ERELMRKTRSLPI

SEQ ID NO: 217371 - protein, 13 aa, Artificial Sequence
  Description of Artificial Sequence: Synthetic peptide
  Seed: ERELVRKTRFLPV
ERELMRKTRSLPL

SEQ ID NO: 217372 - protein, 13 aa, Artificial Sequence
  Description of Artificial Sequence: Synthetic peptide
  Seed: ERELVRKTRFLPV
ERELMRKVRALPI

SEQ ID NO: 217373 - protein, 13 aa, Artificial Sequence
  Description of Artificial Sequence: Synthetic peptide
  Seed: ERELVRKTRFLPV
ERELMRKVRFLPI

SEQ ID NO: 217374 - protein, 13 aa, Artificial Sequence
  Description of Artificial Sequence: Synthetic peptide
  Seed: ERELVRKTRFLPV
ERELMRKVRFLPL

SEQ ID NO: 217375 - protein, 13 aa, Artificial Sequence
  Description of Artificial Sequence: Synthetic peptide
  Seed: ERELVRKTRFLPV
ERELMRKVRFLPV

SEQ ID NO: 217376 - protein, 13 aa, Artificial Sequence
  Description of Artificial Sequence: Synthetic peptide
  Seed: ERELVRKTRFLPV
ERELMRKVRSLPI

SEQ ID NO: 217377 - protein, 13 aa, Artificial Sequence
  Description of Artificial Sequence: Synthetic peptide
  Seed: ERELVRKTRFLPV
ERELMRKVRSLPL

SEQ ID NO: 217378 - protein, 13 aa, Artificial Sequence
  Description of Artificial Sequence: Synthetic peptide
  Seed: ERELVRKTRFLPV
ERELVRKARFLPL

SEQ ID NO: 217379 - protein, 13 aa, Artificial Sequence
  Description of Artificial Sequence: Synthetic peptide
  Seed: ERELVRKTRFLPV
ERELVRKARSLPI

SEQ ID NO: 217380 - protein, 13 aa, Artificial Sequence
  Description of Artificial Sequence: Synthetic peptide
  Seed: ERELVRKTRFLPV
ERELVRKIRFLPI

SEQ ID NO: 217381 - protein, 13 aa, Artificial Sequence
  Description of Artificial Sequence: Synthetic peptide
  Seed: ERELVRKTRFLPV
ERELVRKIRFLPL

SEQ ID NO: 217382 - protein, 13 aa, Artificial Sequence
  Description of Artificial Sequence: Synthetic peptide
  Seed: ERELVRKTRFLPV
ERELVRKIRFLPV

SEQ ID NO: 217383 - protein, 13 aa, Artificial Sequence
  Description of Artificial Sequence: Synthetic peptide
  Seed: ERELVRKTRFLPV
ERELVRKIRSLPI

SEQ ID NO: 217384 - protein, 13 aa, Artificial Sequence
  Description of Artificial Sequence: Synthetic peptide
  Seed: ERELVRKTRFLPV
ERELVRKLRFLPI

SEQ ID NO: 217385 - protein, 13 aa, Artificial Sequence
  Description of Artificial Sequence: Synthetic peptide
  Seed: ERELVRKTRFLPV
ERELVRKLRFLPL

SEQ ID NO: 217386 - protein, 13 aa, Artificial Sequence
  Description of Artificial Sequence: Synthetic peptide
  Seed: ERELVRKTRFLPV
ERELVRKLRFLPV

SEQ ID NO: 217387 - protein, 13 aa, Artificial Sequence
  Description of Artificial Sequence: Synthetic peptide
  Seed: ERELVRKTRFLPV
ERELVRKMRFLPL

SEQ ID NO: 217388 - protein, 13 aa, Artificial Sequence
  Description of Artificial Sequence: Synthetic peptide
  Seed: ERELVRKTRFLPV
ERELVRKSRFLPL

SEQ ID NO: 217389 - protein, 13 aa, Artificial Sequence
  Description of Artificial Sequence: Synthetic peptide
  Seed: ERELVRKTRFLPV
ERELVRKSRSLPI

SEQ ID NO: 217390 - protein, 13 aa, Artificial Sequence
  Description of Artificial Sequence: Synthetic peptide
  Seed: ERELVRKTRFLPV
ERELVRKTRALPI

SEQ ID NO: 217391 - protein, 13 aa, Artificial Sequence
  Description of Artificial Sequence: Synthetic peptide
  Seed: ERELVRKTRFLPV
ERELVRKTRFLPI

SEQ ID NO: 217392 - protein, 13 aa, Artificial Sequence
  Description of Artificial Sequence: Synthetic peptide
  Seed: ERELVRKTRFLPV
ERELVRKTRFLPL

SEQ ID NO: 217393 - protein, 13 aa, Artificial Sequence
  Description of Artificial Sequence: Synthetic peptide
  Seed: ERELVRKTRFLPV
ERELVRKTRSLPI

SEQ ID NO: 217394 - protein, 13 aa, Artificial Sequence
  Description of Artificial Sequence: Synthetic peptide
  Seed: ERELVRKTRFLPV
ERELVRKTRSLPL

SEQ ID NO: 217395 - protein, 13 aa, Artificial Sequence
  Description of Artificial Sequence: Synthetic peptide
  Seed: ERELVRKTRFLPV
ERELVRKVRALPI

SEQ ID NO: 217396 - protein, 13 aa, Artificial Sequence
  Description of Artificial Sequence: Synthetic peptide
  Seed: ERELVRKTRFLPV
ERELVRKVRFLPI

SEQ ID NO: 217397 - protein, 13 aa, Artificial Sequence
  Description of Artificial Sequence: Synthetic peptide
  Seed: ERELVRKTRFLPV
ERELVRKVRFLPL

SEQ ID NO: 217398 - protein, 13 aa, Artificial Sequence
  Description of Artificial Sequence: Synthetic peptide
  Seed: ERELVRKTRFLPV
ERELVRKVRFLPV

SEQ ID NO: 217399 - protein, 13 aa, Artificial Sequence
  Description of Artificial Sequence: Synthetic peptide
  Seed: ERELVRKTRFLPV
ERELVRKVRSLPI

SEQ ID NO: 217400 - protein, 13 aa, Artificial Sequence
  Description of Artificial Sequence: Synthetic peptide
  Seed: ERELVRKTRFLPV
ERELVRKVRSLPL

SEQ ID NO: 217401 - protein, 13 aa, Artificial Sequence
  Description of Artificial Sequence: Synthetic peptide
  Seed: ERELVRKTRFLPV
ERELVRKVRSLPV

SEQ ID NO: 217402 - protein, 13 aa, Artificial Sequence
  Description of Artificial Sequence: Synthetic peptide
  Seed: ERELVRKTRFLPV
ERELWRKARALPI

SEQ ID NO: 217403 - protein, 13 aa, Artificial Sequence
  Description of Artificial Sequence: Synthetic peptide
  Seed: ERELVRKTRFLPV
ERELWRKARALPL

SEQ ID NO: 217404 - protein, 13 aa, Artificial Sequence
  Description of Artificial Sequence: Synthetic peptide
  Seed: ERELVRKTRFLPV
ERELWRKARALPV

SEQ ID NO: 217405 - protein, 13 aa, Artificial Sequence
  Description of Artificial Sequence: Synthetic peptide
  Seed: ERELVRKTRFLPV
ERELWRKARFLPI

SEQ ID NO: 217406 - protein, 13 aa, Artificial Sequence
  Description of Artificial Sequence: Synthetic peptide
  Seed: ERELVRKTRFLPV
ERELWRKARFLPL

SEQ ID NO: 217407 - protein, 13 aa, Artificial Sequence
  Description of Artificial Sequence: Synthetic peptide
  Seed: ERELVRKTRFLPV
ERELWRKARFLPV

SEQ ID NO: 217408 - protein, 13 aa, Artificial Sequence
  Description of Artificial Sequence: Synthetic peptide
  Seed: ERELVRKTRFLPV
ERELWRKARSLPI

SEQ ID NO: 217409 - protein, 13 aa, Artificial Sequence
  Description of Artificial Sequence: Synthetic peptide
  Seed: ERELVRKTRFLPV
ERELWRKARSLPL

SEQ ID NO: 217410 - protein, 13 aa, Artificial Sequence
  Description of Artificial Sequence: Synthetic peptide
  Seed: ERELVRKTRFLPV
ERELWRKARSLPV

SEQ ID NO: 217411 - protein, 13 aa, Artificial Sequence
  Description of Artificial Sequence: Synthetic peptide
  Seed: ERELVRKTRFLPV
ERELWRKERFLPI

SEQ ID NO: 217412 - protein, 13 aa, Artificial Sequence
  Description of Artificial Sequence: Synthetic peptide
  Seed: ERELVRKTRFLPV
ERELWRKERFLPL

SEQ ID NO: 217413 - protein, 13 aa, Artificial Sequence
  Description of Artificial Sequence: Synthetic peptide
  Seed: ERELVRKTRFLPV
ERELWRKERFLPV

SEQ ID NO: 217414 - protein, 13 aa, Artificial Sequence
  Description of Artificial Sequence: Synthetic peptide
  Seed: ERELVRKTRFLPV
ERELWRKFRFLPI

SEQ ID NO: 217415 - protein, 13 aa, Artificial Sequence
  Description of Artificial Sequence: Synthetic peptide
  Seed: ERELVRKTRFLPV
ERELWRKFRFLPL

SEQ ID NO: 217416 - protein, 13 aa, Artificial Sequence
  Description of Artificial Sequence: Synthetic peptide
  Seed: ERELVRKTRFLPV
ERELWRKFRFLPV

SEQ ID NO: 217417 - protein, 13 aa, Artificial Sequence
  Description of Artificial Sequence: Synthetic peptide
  Seed: ERELVRKTRFLPV
ERELWRKIRALPI

SEQ ID NO: 217418 - protein, 13 aa, Artificial Sequence
  Description of Artificial Sequence: Synthetic peptide
  Seed: ERELVRKTRFLPV
ERELWRKIRALPL

SEQ ID NO: 217419 - protein, 13 aa, Artificial Sequence
  Description of Artificial Sequence: Synthetic peptide
  Seed: ERELVRKTRFLPV
ERELWRKIRALPV

SEQ ID NO: 217420 - protein, 13 aa, Artificial Sequence
  Description of Artificial Sequence: Synthetic peptide
  Seed: ERELVRKTRFLPV
ERELWRKIRFLPI

SEQ ID NO: 217421 - protein, 13 aa, Artificial Sequence
  Description of Artificial Sequence: Synthetic peptide
  Seed: ERELVRKTRFLPV
ERELWRKIRFLPL

SEQ ID NO: 217422 - protein, 13 aa, Artificial Sequence
  Description of Artificial Sequence: Synthetic peptide
  Seed: ERELVRKTRFLPV
ERELWRKIRFLPM

SEQ ID NO: 217423 - protein, 13 aa, Artificial Sequence
  Description of Artificial Sequence: Synthetic peptide
  Seed: ERELVRKTRFLPV
ERELWRKIRFLPV

SEQ ID NO: 217424 - protein, 13 aa, Artificial Sequence
  Description of Artificial Sequence: Synthetic peptide
  Seed: ERELVRKTRFLPV
ERELWRKIRSLPI

SEQ ID NO: 217425 - protein, 13 aa, Artificial Sequence
  Description of Artificial Sequence: Synthetic peptide
  Seed: ERELVRKTRFLPV
ERELWRKIRSLPL

SEQ ID NO: 217426 - protein, 13 aa, Artificial Sequence
  Description of Artificial Sequence: Synthetic peptide
  Seed: ERELVRKTRFLPV
ERELWRKIRSLPV

SEQ ID NO: 217427 - protein, 13 aa, Artificial Sequence
  Description of Artificial Sequence: Synthetic peptide
  Seed: ERELVRKTRFLPV
ERELWRKLRFLPI

SEQ ID NO: 217428 - protein, 13 aa, Artificial Sequence
  Description of Artificial Sequence: Synthetic peptide
  Seed: ERELVRKTRFLPV
ERELWRKLRFLPL

SEQ ID NO: 217429 - protein, 13 aa, Artificial Sequence
  Description of Artificial Sequence: Synthetic peptide
  Seed: ERELVRKTRFLPV
ERELWRKLRFLPV

SEQ ID NO: 217430 - protein, 13 aa, Artificial Sequence
  Description of Artificial Sequence: Synthetic peptide
  Seed: ERELVRKTRFLPV
ERELWRKMRFLPI

SEQ ID NO: 217431 - protein, 13 aa, Artificial Sequence
  Description of Artificial Sequence: Synthetic peptide
  Seed: ERELVRKTRFLPV
ERELWRKMRFLPL

SEQ ID NO: 217432 - protein, 13 aa, Artificial Sequence
  Description of Artificial Sequence: Synthetic peptide
  Seed: ERELVRKTRFLPV
ERELWRKMRFLPV

SEQ ID NO: 217433 - protein, 13 aa, Artificial Sequence
  Description of Artificial Sequence: Synthetic peptide
  Seed: ERELVRKTRFLPV
ERELWRKSRALPI

SEQ ID NO: 217434 - protein, 13 aa, Artificial Sequence
  Description of Artificial Sequence: Synthetic peptide
  Seed: ERELVRKTRFLPV
ERELWRKSRALPL

SEQ ID NO: 217435 - protein, 13 aa, Artificial Sequence
  Description of Artificial Sequence: Synthetic peptide
  Seed: ERELVRKTRFLPV
ERELWRKSRALPV

SEQ ID NO: 217436 - protein, 13 aa, Artificial Sequence
  Description of Artificial Sequence: Synthetic peptide
  Seed: ERELVRKTRFLPV
ERELWRKSRFLPI

SEQ ID NO: 217437 - protein, 13 aa, Artificial Sequence
  Description of Artificial Sequence: Synthetic peptide
  Seed: ERELVRKTRFLPV
ERELWRKSRFLPL

SEQ ID NO: 217438 - protein, 13 aa, Artificial Sequence
  Description of Artificial Sequence: Synthetic peptide
  Seed: ERELVRKTRFLPV
ERELWRKSRFLPV

SEQ ID NO: 217439 - protein, 13 aa, Artificial Sequence
  Description of Artificial Sequence: Synthetic peptide
  Seed: ERELVRKTRFLPV
ERELWRKSRSLPI

SEQ ID NO: 217440 - protein, 13 aa, Artificial Sequence
  Description of Artificial Sequence: Synthetic peptide
  Seed: ERELVRKTRFLPV
ERELWRKSRSLPL

SEQ ID NO: 217441 - protein, 13 aa, Artificial Sequence
  Description of Artificial Sequence: Synthetic peptide
  Seed: ERELVRKTRFLPV
ERELWRKSRSLPV

SEQ ID NO: 217442 - protein, 13 aa, Artificial Sequence
  Description of Artificial Sequence: Synthetic peptide
  Seed: ERELVRKTRFLPV
ERELWRKTRALPI

SEQ ID NO: 217443 - protein, 13 aa, Artificial Sequence
  Description of Artificial Sequence: Synthetic peptide
  Seed: ERELVRKTRFLPV
ERELWRKTRALPL

SEQ ID NO: 217444 - protein, 13 aa, Artificial Sequence
  Description of Artificial Sequence: Synthetic peptide
  Seed: ERELVRKTRFLPV
ERELWRKTRALPV

SEQ ID NO: 217445 - protein, 13 aa, Artificial Sequence
  Description of Artificial Sequence: Synthetic peptide
  Seed: ERELVRKTRFLPV
ERELWRKTRFLPI

SEQ ID NO: 217446 - protein, 13 aa, Artificial Sequence
  Description of Artificial Sequence: Synthetic peptide
  Seed: ERELVRKTRFLPV
ERELWRKTRFLPL

SEQ ID NO: 217447 - protein, 13 aa, Artificial Sequence
  Description of Artificial Sequence: Synthetic peptide
  Seed: ERELVRKTRFLPV
ERELWRKTRFLPM

SEQ ID NO: 217448 - protein, 13 aa, Artificial Sequence
  Description of Artificial Sequence: Synthetic peptide
  Seed: ERELVRKTRFLPV
ERELWRKTRFLPV

SEQ ID NO: 217449 - protein, 13 aa, Artificial Sequence
  Description of Artificial Sequence: Synthetic peptide
  Seed: ERELVRKTRFLPV
ERELWRKTRSLPI

SEQ ID NO: 217450 - protein, 13 aa, Artificial Sequence
  Description of Artificial Sequence: Synthetic peptide
  Seed: ERELVRKTRFLPV
ERELWRKTRSLPL

SEQ ID NO: 217451 - protein, 13 aa, Artificial Sequence
  Description of Artificial Sequence: Synthetic peptide
  Seed: ERELVRKTRFLPV
ERELWRKTRSLPV

SEQ ID NO: 217452 - protein, 13 aa, Artificial Sequence
  Description of Artificial Sequence: Synthetic peptide
  Seed: ERELVRKTRFLPV
ERELWRKVRALPI

SEQ ID NO: 217453 - protein, 13 aa, Artificial Sequence
  Description of Artificial Sequence: Synthetic peptide
  Seed: ERELVRKTRFLPV
ERELWRKVRALPL

SEQ ID NO: 217454 - protein, 13 aa, Artificial Sequence
  Description of Artificial Sequence: Synthetic peptide
  Seed: ERELVRKTRFLPV
ERELWRKVRALPV

SEQ ID NO: 217455 - protein, 13 aa, Artificial Sequence
  Description of Artificial Sequence: Synthetic peptide
  Seed: ERELVRKTRFLPV
ERELWRKVRFLPI

SEQ ID NO: 217456 - protein, 13 aa, Artificial Sequence
  Description of Artificial Sequence: Synthetic peptide
  Seed: ERELVRKTRFLPV
ERELWRKVRFLPL

SEQ ID NO: 217457 - protein, 13 aa, Artificial Sequence
  Description of Artificial Sequence: Synthetic peptide
  Seed: ERELVRKTRFLPV
ERELWRKVRFLPM

SEQ ID NO: 217458 - protein, 13 aa, Artificial Sequence
  Description of Artificial Sequence: Synthetic peptide
  Seed: ERELVRKTRFLPV
ERELWRKVRFLPV

SEQ ID NO: 217459 - protein, 13 aa, Artificial Sequence
  Description of Artificial Sequence: Synthetic peptide
  Seed: ERELVRKTRFLPV
ERELWRKVRGLPI

SEQ ID NO: 217460 - protein, 13 aa, Artificial Sequence
  Description of Artificial Sequence: Synthetic peptide
  Seed: ERELVRKTRFLPV
ERELWRKVRSLPI

SEQ ID NO: 217461 - protein, 13 aa, Artificial Sequence
  Description of Artificial Sequence: Synthetic peptide
  Seed: ERELVRKTRFLPV
ERELWRKVRSLPL

SEQ ID NO: 217462 - protein, 13 aa, Artificial Sequence
  Description of Artificial Sequence: Synthetic peptide
  Seed: ERELVRKTRFLPV
ERELWRKVRSLPV

SEQ ID NO: 217463 - protein, 13 aa, Artificial Sequence
  Description of Artificial Sequence: Synthetic peptide
  Seed: ERELVRKTRFLPV
ERELWRKVRTLPI

SEQ ID NO: 217464 - protein, 13 aa, Artificial Sequence
  Description of Artificial Sequence: Synthetic peptide
  Seed: ERELVRKTRFLPV
ERELYRKARALPI

SEQ ID NO: 217465 - protein, 13 aa, Artificial Sequence
  Description of Artificial Sequence: Synthetic peptide
  Seed: ERELVRKTRFLPV
ERELYRKARALPL

SEQ ID NO: 217466 - protein, 13 aa, Artificial Sequence
  Description of Artificial Sequence: Synthetic peptide
  Seed: ERELVRKTRFLPV
ERELYRKARALPV

SEQ ID NO: 217467 - protein, 13 aa, Artificial Sequence
  Description of Artificial Sequence: Synthetic peptide
  Seed: ERELVRKTRFLPV
ERELYRKARFLPI

SEQ ID NO: 217468 - protein, 13 aa, Artificial Sequence
  Description of Artificial Sequence: Synthetic peptide
  Seed: ERELVRKTRFLPV
ERELYRKARFLPL

SEQ ID NO: 217469 - protein, 13 aa, Artificial Sequence
  Description of Artificial Sequence: Synthetic peptide
  Seed: ERELVRKTRFLPV
ERELYRKARFLPV

SEQ ID NO: 217470 - protein, 13 aa, Artificial Sequence
  Description of Artificial Sequence: Synthetic peptide
  Seed: ERELVRKTRFLPV
ERELYRKARGLPI

SEQ ID NO: 217471 - protein, 13 aa, Artificial Sequence
  Description of Artificial Sequence: Synthetic peptide
  Seed: ERELVRKTRFLPV
ERELYRKARGLPL

SEQ ID NO: 217472 - protein, 13 aa, Artificial Sequence
  Description of Artificial Sequence: Synthetic peptide
  Seed: ERELVRKTRFLPV
ERELYRKARSLPF

SEQ ID NO: 217473 - protein, 13 aa, Artificial Sequence
  Description of Artificial Sequence: Synthetic peptide
  Seed: ERELVRKTRFLPV
ERELYRKARSLPI

SEQ ID NO: 217474 - protein, 13 aa, Artificial Sequence
  Description of Artificial Sequence: Synthetic peptide
  Seed: ERELVRKTRFLPV
ERELYRKARSLPL

SEQ ID NO: 217475 - protein, 13 aa, Artificial Sequence
  Description of Artificial Sequence: Synthetic peptide
  Seed: ERELVRKTRFLPV
ERELYRKARSLPM

SEQ ID NO: 217476 - protein, 13 aa, Artificial Sequence
  Description of Artificial Sequence: Synthetic peptide
  Seed: ERELVRKTRFLPV
ERELYRKARSLPV

SEQ ID NO: 217477 - protein, 13 aa, Artificial Sequence
  Description of Artificial Sequence: Synthetic peptide
  Seed: ERELVRKTRFLPV
ERELYRKARTLPI

SEQ ID NO: 217478 - protein, 13 aa, Artificial Sequence
  Description of Artificial Sequence: Synthetic peptide
  Seed: ERELVRKTRFLPV
ERELYRKARTLPL

SEQ ID NO: 217479 - protein, 13 aa, Artificial Sequence
  Description of Artificial Sequence: Synthetic peptide
  Seed: ERELVRKTRFLPV
ERELYRKARVLPI

SEQ ID NO: 217480 - protein, 13 aa, Artificial Sequence
  Description of Artificial Sequence: Synthetic peptide
  Seed: ERELVRKTRFLPV
ERELYRKERFLPI

SEQ ID NO: 217481 - protein, 13 aa, Artificial Sequence
  Description of Artificial Sequence: Synthetic peptide
  Seed: ERELVRKTRFLPV
ERELYRKERFLPL

SEQ ID NO: 217482 - protein, 13 aa, Artificial Sequence
  Description of Artificial Sequence: Synthetic peptide
  Seed: ERELVRKTRFLPV
ERELYRKERFLPV

SEQ ID NO: 217483 - protein, 13 aa, Artificial Sequence
  Description of Artificial Sequence: Synthetic peptide
  Seed: ERELVRKTRFLPV
ERELYRKFRALPI

SEQ ID NO: 217484 - protein, 13 aa, Artificial Sequence
  Description of Artificial Sequence: Synthetic peptide
  Seed: ERELVRKTRFLPV
ERELYRKFRALPL

SEQ ID NO: 217485 - protein, 13 aa, Artificial Sequence
  Description of Artificial Sequence: Synthetic peptide
  Seed: ERELVRKTRFLPV
ERELYRKFRFLPI

SEQ ID NO: 217486 - protein, 13 aa, Artificial Sequence
  Description of Artificial Sequence: Synthetic peptide
  Seed: ERELVRKTRFLPV
ERELYRKFRFLPL

SEQ ID NO: 217487 - protein, 13 aa, Artificial Sequence
  Description of Artificial Sequence: Synthetic peptide
  Seed: ERELVRKTRFLPV
ERELYRKFRFLPM

SEQ ID NO: 217488 - protein, 13 aa, Artificial Sequence
  Description of Artificial Sequence: Synthetic peptide
  Seed: ERELVRKTRFLPV
ERELYRKFRFLPV

SEQ ID NO: 217489 - protein, 13 aa, Artificial Sequence
  Description of Artificial Sequence: Synthetic peptide
  Seed: ERELVRKTRFLPV
ERELYRKFRSLPI

SEQ ID NO: 217490 - protein, 13 aa, Artificial Sequence
  Description of Artificial Sequence: Synthetic peptide
  Seed: ERELVRKTRFLPV
ERELYRKHRFLPI

SEQ ID NO: 217491 - protein, 13 aa, Artificial Sequence
  Description of Artificial Sequence: Synthetic peptide
  Seed: ERELVRKTRFLPV
ERELYRKHRFLPL

SEQ ID NO: 217492 - protein, 13 aa, Artificial Sequence
  Description of Artificial Sequence: Synthetic peptide
  Seed: ERELVRKTRFLPV
ERELYRKHRFLPV

SEQ ID NO: 217493 - protein, 13 aa, Artificial Sequence
  Description of Artificial Sequence: Synthetic peptide
  Seed: ERELVRKTRFLPV
ERELYRKIRALPI

SEQ ID NO: 217494 - protein, 13 aa, Artificial Sequence
  Description of Artificial Sequence: Synthetic peptide
  Seed: ERELVRKTRFLPV
ERELYRKIRALPL

SEQ ID NO: 217495 - protein, 13 aa, Artificial Sequence
  Description of Artificial Sequence: Synthetic peptide
  Seed: ERELVRKTRFLPV
ERELYRKIRALPV

SEQ ID NO: 217496 - protein, 13 aa, Artificial Sequence
  Description of Artificial Sequence: Synthetic peptide
  Seed: ERELVRKTRFLPV
ERELYRKIRFLPF

SEQ ID NO: 217497 - protein, 13 aa, Artificial Sequence
  Description of Artificial Sequence: Synthetic peptide
  Seed: ERELVRKTRFLPV
ERELYRKIRFLPI

SEQ ID NO: 217498 - protein, 13 aa, Artificial Sequence
  Description of Artificial Sequence: Synthetic peptide
  Seed: ERELVRKTRFLPV
ERELYRKIRFLPL

SEQ ID NO: 217499 - protein, 13 aa, Artificial Sequence
  Description of Artificial Sequence: Synthetic peptide
  Seed: ERELVRKTRFLPV
ERELYRKIRFLPM

SEQ ID NO: 217500 - protein, 13 aa, Artificial Sequence
  Description of Artificial Sequence: Synthetic peptide
  Seed: ERELVRKTRFLPV
ERELYRKIRFLPV

SEQ ID NO: 217501 - protein, 13 aa, Artificial Sequence
  Description of Artificial Sequence: Synthetic peptide
  Seed: ERELVRKTRFLPV
ERELYRKIRGLPI

SEQ ID NO: 217502 - protein, 13 aa, Artificial Sequence
  Description of Artificial Sequence: Synthetic peptide
  Seed: ERELVRKTRFLPV
ERELYRKIRGLPL

SEQ ID NO: 217503 - protein, 13 aa, Artificial Sequence
  Description of Artificial Sequence: Synthetic peptide
  Seed: ERELVRKTRFLPV
ERELYRKIRGLPV

SEQ ID NO: 217504 - protein, 13 aa, Artificial Sequence
  Description of Artificial Sequence: Synthetic peptide
  Seed: ERELVRKTRFLPV
ERELYRKIRPLPI

SEQ ID NO: 217505 - protein, 13 aa, Artificial Sequence
  Description of Artificial Sequence: Synthetic peptide
  Seed: ERELVRKTRFLPV
ERELYRKIRSLPF

SEQ ID NO: 217506 - protein, 13 aa, Artificial Sequence
  Description of Artificial Sequence: Synthetic peptide
  Seed: ERELVRKTRFLPV
ERELYRKIRSLPI

SEQ ID NO: 217507 - protein, 13 aa, Artificial Sequence
  Description of Artificial Sequence: Synthetic peptide
  Seed: ERELVRKTRFLPV
ERELYRKIRSLPL

SEQ ID NO: 217508 - protein, 13 aa, Artificial Sequence
  Description of Artificial Sequence: Synthetic peptide
  Seed: ERELVRKTRFLPV
ERELYRKIRSLPM

SEQ ID NO: 217509 - protein, 13 aa, Artificial Sequence
  Description of Artificial Sequence: Synthetic peptide
  Seed: ERELVRKTRFLPV
ERELYRKIRSLPV

SEQ ID NO: 217510 - protein, 13 aa, Artificial Sequence
  Description of Artificial Sequence: Synthetic peptide
  Seed: ERELVRKTRFLPV
ERELYRKIRTLPI

SEQ ID NO: 217511 - protein, 13 aa, Artificial Sequence
  Description of Artificial Sequence: Synthetic peptide
  Seed: ERELVRKTRFLPV
ERELYRKIRTLPL

SEQ ID NO: 217512 - protein, 13 aa, Artificial Sequence
  Description of Artificial Sequence: Synthetic peptide
  Seed: ERELVRKTRFLPV
ERELYRKIRTLPV

SEQ ID NO: 217513 - protein, 13 aa, Artificial Sequence
  Description of Artificial Sequence: Synthetic peptide
  Seed: ERELVRKTRFLPV
ERELYRKIRVLPI

SEQ ID NO: 217514 - protein, 13 aa, Artificial Sequence
  Description of Artificial Sequence: Synthetic peptide
  Seed: ERELVRKTRFLPV
ERELYRKIRVLPL

SEQ ID NO: 217515 - protein, 13 aa, Artificial Sequence
  Description of Artificial Sequence: Synthetic peptide
  Seed: ERELVRKTRFLPV
ERELYRKLRFLPI

SEQ ID NO: 217516 - protein, 13 aa, Artificial Sequence
  Description of Artificial Sequence: Synthetic peptide
  Seed: ERELVRKTRFLPV
ERELYRKLRFLPL

SEQ ID NO: 217517 - protein, 13 aa, Artificial Sequence
  Description of Artificial Sequence: Synthetic peptide
  Seed: ERELVRKTRFLPV
ERELYRKLRFLPV

SEQ ID NO: 217518 - protein, 13 aa, Artificial Sequence
  Description of Artificial Sequence: Synthetic peptide
  Seed: ERELVRKTRFLPV
ERELYRKMRFLPI

SEQ ID NO: 217519 - protein, 13 aa, Artificial Sequence
  Description of Artificial Sequence: Synthetic peptide
  Seed: ERELVRKTRFLPV
ERELYRKMRFLPL

SEQ ID NO: 217520 - protein, 13 aa, Artificial Sequence
  Description of Artificial Sequence: Synthetic peptide
  Seed: ERELVRKTRFLPV
ERELYRKMRFLPV

SEQ ID NO: 217521 - protein, 13 aa, Artificial Sequence
  Description of Artificial Sequence: Synthetic peptide
  Seed: ERELVRKTRFLPV
ERELYRKMRSLPI

SEQ ID NO: 217522 - protein, 13 aa, Artificial Sequence
  Description of Artificial Sequence: Synthetic peptide
  Seed: ERELVRKTRFLPV
ERELYRKSRALPF

SEQ ID NO: 217523 - protein, 13 aa, Artificial Sequence
  Description of Artificial Sequence: Synthetic peptide
  Seed: ERELVRKTRFLPV
ERELYRKSRALPI

SEQ ID NO: 217524 - protein, 13 aa, Artificial Sequence
  Description of Artificial Sequence: Synthetic peptide
  Seed: ERELVRKTRFLPV
ERELYRKSRALPL

SEQ ID NO: 217525 - protein, 13 aa, Artificial Sequence
  Description of Artificial Sequence: Synthetic peptide
  Seed: ERELVRKTRFLPV
ERELYRKSRALPM

SEQ ID NO: 217526 - protein, 13 aa, Artificial Sequence
  Description of Artificial Sequence: Synthetic peptide
  Seed: ERELVRKTRFLPV
ERELYRKSRALPV

SEQ ID NO: 217527 - protein, 13 aa, Artificial Sequence
  Description of Artificial Sequence: Synthetic peptide
  Seed: ERELVRKTRFLPV
ERELYRKSRFLPI

SEQ ID NO: 217528 - protein, 13 aa, Artificial Sequence
  Description of Artificial Sequence: Synthetic peptide
  Seed: ERELVRKTRFLPV
ERELYRKSRFLPL

SEQ ID NO: 217529 - protein, 13 aa, Artificial Sequence
  Description of Artificial Sequence: Synthetic peptide
  Seed: ERELVRKTRFLPV
ERELYRKSRFLPV

SEQ ID NO: 217530 - protein, 13 aa, Artificial Sequence
  Description of Artificial Sequence: Synthetic peptide
  Seed: ERELVRKTRFLPV
ERELYRKSRGLPI

SEQ ID NO: 217531 - protein, 13 aa, Artificial Sequence
  Description of Artificial Sequence: Synthetic peptide
  Seed: ERELVRKTRFLPV
ERELYRKSRGLPL

SEQ ID NO: 217532 - protein, 13 aa, Artificial Sequence
  Description of Artificial Sequence: Synthetic peptide
  Seed: ERELVRKTRFLPV
ERELYRKSRGLPV

SEQ ID NO: 217533 - protein, 13 aa, Artificial Sequence
  Description of Artificial Sequence: Synthetic peptide
  Seed: ERELVRKTRFLPV
ERELYRKSRSLPF

SEQ ID NO: 217534 - protein, 13 aa, Artificial Sequence
  Description of Artificial Sequence: Synthetic peptide
  Seed: ERELVRKTRFLPV
ERELYRKSRSLPI

SEQ ID NO: 217535 - protein, 13 aa, Artificial Sequence
  Description of Artificial Sequence: Synthetic peptide
  Seed: ERELVRKTRFLPV
ERELYRKSRSLPL

SEQ ID NO: 217536 - protein, 13 aa, Artificial Sequence
  Description of Artificial Sequence: Synthetic peptide
  Seed: ERELVRKTRFLPV
ERELYRKSRSLPM

SEQ ID NO: 217537 - protein, 13 aa, Artificial Sequence
  Description of Artificial Sequence: Synthetic peptide
  Seed: ERELVRKTRFLPV
ERELYRKSRSLPV

SEQ ID NO: 217538 - protein, 13 aa, Artificial Sequence
  Description of Artificial Sequence: Synthetic peptide
  Seed: ERELVRKTRFLPV
ERELYRKSRTLPI

SEQ ID NO: 217539 - protein, 13 aa, Artificial Sequence
  Description of Artificial Sequence: Synthetic peptide
  Seed: ERELVRKTRFLPV
ERELYRKSRTLPL

SEQ ID NO: 217540 - protein, 13 aa, Artificial Sequence
  Description of Artificial Sequence: Synthetic peptide
  Seed: ERELVRKTRFLPV
ERELYRKSRVLPI

SEQ ID NO: 217541 - protein, 13 aa, Artificial Sequence
  Description of Artificial Sequence: Synthetic peptide
  Seed: ERELVRKTRFLPV
ERELYRKTRALPF

SEQ ID NO: 217542 - protein, 13 aa, Artificial Sequence
  Description of Artificial Sequence: Synthetic peptide
  Seed: ERELVRKTRFLPV
ERELYRKTRALPI

SEQ ID NO: 217543 - protein, 13 aa, Artificial Sequence
  Description of Artificial Sequence: Synthetic peptide
  Seed: ERELVRKTRFLPV
ERELYRKTRALPL

SEQ ID NO: 217544 - protein, 13 aa, Artificial Sequence
  Description of Artificial Sequence: Synthetic peptide
  Seed: ERELVRKTRFLPV
ERELYRKTRALPV

SEQ ID NO: 217545 - protein, 13 aa, Artificial Sequence
  Description of Artificial Sequence: Synthetic peptide
  Seed: ERELVRKTRFLPV
ERELYRKTRFLPF

SEQ ID NO: 217546 - protein, 13 aa, Artificial Sequence
  Description of Artificial Sequence: Synthetic peptide
  Seed: ERELVRKTRFLPV
ERELYRKTRFLPI

SEQ ID NO: 217547 - protein, 13 aa, Artificial Sequence
  Description of Artificial Sequence: Synthetic peptide
  Seed: ERELVRKTRFLPV
ERELYRKTRFLPL

SEQ ID NO: 217548 - protein, 13 aa, Artificial Sequence
  Description of Artificial Sequence: Synthetic peptide
  Seed: ERELVRKTRFLPV
ERELYRKTRFLPM

SEQ ID NO: 217549 - protein, 13 aa, Artificial Sequence
  Description of Artificial Sequence: Synthetic peptide
  Seed: ERELVRKTRFLPV
ERELYRKTRFLPV

SEQ ID NO: 217550 - protein, 13 aa, Artificial Sequence
  Description of Artificial Sequence: Synthetic peptide
  Seed: ERELVRKTRFLPV
ERELYRKTRGLPI

SEQ ID NO: 217551 - protein, 13 aa, Artificial Sequence
  Description of Artificial Sequence: Synthetic peptide
  Seed: ERELVRKTRFLPV
ERELYRKTRGLPL

SEQ ID NO: 217552 - protein, 13 aa, Artificial Sequence
  Description of Artificial Sequence: Synthetic peptide
  Seed: ERELVRKTRFLPV
ERELYRKTRGLPV

SEQ ID NO: 217553 - protein, 13 aa, Artificial Sequence
  Description of Artificial Sequence: Synthetic peptide
  Seed: ERELVRKTRFLPV
ERELYRKTRSLPF

SEQ ID NO: 217554 - protein, 13 aa, Artificial Sequence
  Description of Artificial Sequence: Synthetic peptide
  Seed: ERELVRKTRFLPV
ERELYRKTRSLPI

SEQ ID NO: 217555 - protein, 13 aa, Artificial Sequence
  Description of Artificial Sequence: Synthetic peptide
  Seed: ERELVRKTRFLPV
ERELYRKTRSLPL

SEQ ID NO: 217556 - protein, 13 aa, Artificial Sequence
  Description of Artificial Sequence: Synthetic peptide
  Seed: ERELVRKTRFLPV
ERELYRKTRSLPM

SEQ ID NO: 217557 - protein, 13 aa, Artificial Sequence
  Description of Artificial Sequence: Synthetic peptide
  Seed: ERELVRKTRFLPV
ERELYRKTRSLPV

SEQ ID NO: 217558 - protein, 13 aa, Artificial Sequence
  Description of Artificial Sequence: Synthetic peptide
  Seed: ERELVRKTRFLPV
ERELYRKTRTLPI

SEQ ID NO: 217559 - protein, 13 aa, Artificial Sequence
  Description of Artificial Sequence: Synthetic peptide
  Seed: ERELVRKTRFLPV
ERELYRKTRTLPL

SEQ ID NO: 217560 - protein, 13 aa, Artificial Sequence
  Description of Artificial Sequence: Synthetic peptide
  Seed: ERELVRKTRFLPV
ERELYRKTRVLPI

SEQ ID NO: 217561 - protein, 13 aa, Artificial Sequence
  Description of Artificial Sequence: Synthetic peptide
  Seed: ERELVRKTRFLPV
ERELYRKTRVLPL

SEQ ID NO: 217562 - protein, 13 aa, Artificial Sequence
  Description of Artificial Sequence: Synthetic peptide
  Seed: ERELVRKTRFLPV
ERELYRKVRALPF

SEQ ID NO: 217563 - protein, 13 aa, Artificial Sequence
  Description of Artificial Sequence: Synthetic peptide
  Seed: ERELVRKTRFLPV
ERELYRKVRALPI

SEQ ID NO: 217564 - protein, 13 aa, Artificial Sequence
  Description of Artificial Sequence: Synthetic peptide
  Seed: ERELVRKTRFLPV
ERELYRKVRALPL

SEQ ID NO: 217565 - protein, 13 aa, Artificial Sequence
  Description of Artificial Sequence: Synthetic peptide
  Seed: ERELVRKTRFLPV
ERELYRKVRALPM

SEQ ID NO: 217566 - protein, 13 aa, Artificial Sequence
  Description of Artificial Sequence: Synthetic peptide
  Seed: ERELVRKTRFLPV
ERELYRKVRALPV

SEQ ID NO: 217567 - protein, 13 aa, Artificial Sequence
  Description of Artificial Sequence: Synthetic peptide
  Seed: ERELVRKTRFLPV
ERELYRKVRFLPF

SEQ ID NO: 217568 - protein, 13 aa, Artificial Sequence
  Description of Artificial Sequence: Synthetic peptide
  Seed: ERELVRKTRFLPV
ERELYRKVRFLPI

SEQ ID NO: 217569 - protein, 13 aa, Artificial Sequence
  Description of Artificial Sequence: Synthetic peptide
  Seed: ERELVRKTRFLPV
ERELYRKVRFLPL

SEQ ID NO: 217570 - protein, 13 aa, Artificial Sequence
  Description of Artificial Sequence: Synthetic peptide
  Seed: ERELVRKTRFLPV
ERELYRKVRFLPM

SEQ ID NO: 217571 - protein, 13 aa, Artificial Sequence
  Description of Artificial Sequence: Synthetic peptide
  Seed: ERELVRKTRFLPV
ERELYRKVRFLPV

SEQ ID NO: 217572 - protein, 13 aa, Artificial Sequence
  Description of Artificial Sequence: Synthetic peptide
  Seed: ERELVRKTRFLPV
ERELYRKVRGLPI

SEQ ID NO: 217573 - protein, 13 aa, Artificial Sequence
  Description of Artificial Sequence: Synthetic peptide
  Seed: ERELVRKTRFLPV
ERELYRKVRGLPL

SEQ ID NO: 217574 - protein, 13 aa, Artificial Sequence
  Description of Artificial Sequence: Synthetic peptide
  Seed: ERELVRKTRFLPV
ERELYRKVRGLPV

SEQ ID NO: 217575 - protein, 13 aa, Artificial Sequence
  Description of Artificial Sequence: Synthetic peptide
  Seed: ERELVRKTRFLPV
ERELYRKVRPLPI

SEQ ID NO: 217576 - protein, 13 aa, Artificial Sequence
  Description of Artificial Sequence: Synthetic peptide
  Seed: ERELVRKTRFLPV
ERELYRKVRPLPL

SEQ ID NO: 217577 - protein, 13 aa, Artificial Sequence
  Description of Artificial Sequence: Synthetic peptide
  Seed: ERELVRKTRFLPV
ERELYRKVRPLPV

SEQ ID NO: 217578 - protein, 13 aa, Artificial Sequence
  Description of Artificial Sequence: Synthetic peptide
  Seed: ERELVRKTRFLPV
ERELYRKVRSLPF

SEQ ID NO: 217579 - protein, 13 aa, Artificial Sequence
  Description of Artificial Sequence: Synthetic peptide
  Seed: ERELVRKTRFLPV
ERELYRKVRSLPI

SEQ ID NO: 217580 - protein, 13 aa, Artificial Sequence
  Description of Artificial Sequence: Synthetic peptide
  Seed: ERELVRKTRFLPV
ERELYRKVRSLPL

SEQ ID NO: 217581 - protein, 13 aa, Artificial Sequence
  Description of Artificial Sequence: Synthetic peptide
  Seed: ERELVRKTRFLPV
ERELYRKVRSLPM

SEQ ID NO: 217582 - protein, 13 aa, Artificial Sequence
  Description of Artificial Sequence: Synthetic peptide
  Seed: ERELVRKTRFLPV
ERELYRKVRSLPV

SEQ ID NO: 217583 - protein, 13 aa, Artificial Sequence
  Description of Artificial Sequence: Synthetic peptide
  Seed: ERELVRKTRFLPV
ERELYRKVRTLPI

SEQ ID NO: 217584 - protein, 13 aa, Artificial Sequence
  Description of Artificial Sequence: Synthetic peptide
  Seed: ERELVRKTRFLPV
ERELYRKVRTLPL

SEQ ID NO: 217585 - protein, 13 aa, Artificial Sequence
  Description of Artificial Sequence: Synthetic peptide
  Seed: ERELVRKTRFLPV
ERELYRKVRTLPV

SEQ ID NO: 217586 - protein, 13 aa, Artificial Sequence
  Description of Artificial Sequence: Synthetic peptide
  Seed: ERELVRKTRFLPV
ERELYRKVRVLPI

SEQ ID NO: 217587 - protein, 13 aa, Artificial Sequence
  Description of Artificial Sequence: Synthetic peptide
  Seed: ERELVRKTRFLPV
ERELYRKVRVLPL

SEQ ID NO: 217588 - protein, 13 aa, Artificial Sequence
  Description of Artificial Sequence: Synthetic peptide
  Seed: ERELVRKTRFLPV
ERELYRKVRVLPV

SEQ ID NO: 217589 - protein, 15 aa, Artificial Sequence
  Description of Artificial Sequence: Synthetic peptide
  Seed: LRMKWMMAMKYPITA
LRMKWMMAMAYPITA

SEQ ID NO: 217590 - protein, 15 aa, Artificial Sequence
  Description of Artificial Sequence: Synthetic peptide
  Seed: LRMKWMMAMKYPITA
LRMKWMMAMCYPITA

SEQ ID NO: 217591 - protein, 15 aa, Artificial Sequence
  Description of Artificial Sequence: Synthetic peptide
  Seed: LRMKWMMAMKYPITA
LRMKWMMAMDYPITA

SEQ ID NO: 217592 - protein, 15 aa, Artificial Sequence
  Description of Artificial Sequence: Synthetic peptide
  Seed: LRMKWMMAMKYPITA
LRMKWMMAMEYPITA

SEQ ID NO: 217593 - protein, 15 aa, Artificial Sequence
  Description of Artificial Sequence: Synthetic peptide
  Seed: LRMKWMMAMKYPITA
LRMKWMMAMFYPITA

SEQ ID NO: 217594 - protein, 15 aa, Artificial Sequence
  Description of Artificial Sequence: Synthetic peptide
  Seed: LRMKWMMAMKYPITA
LRMKWMMAMGYPITA

SEQ ID NO: 217595 - protein, 15 aa, Artificial Sequence
  Description of Artificial Sequence: Synthetic peptide
  Seed: LRMKWMMAMKYPITA
LRMKWMMAMHYPITA

SEQ ID NO: 217596 - protein, 15 aa, Artificial Sequence
  Description of Artificial Sequence: Synthetic peptide
  Seed: LRMKWMMAMKYPITA
LRMKWMMAMIYPITA

SEQ ID NO: 217597 - protein, 15 aa, Artificial Sequence
  Description of Artificial Sequence: Synthetic peptide
  Seed: LRMKWMMAMKYPITA
LRMKWMMAMLYPITA

SEQ ID NO: 217598 - protein, 15 aa, Artificial Sequence
  Description of Artificial Sequence: Synthetic peptide
  Seed: LRMKWMMAMKYPITA
LRMKWMMAMMYPITA

SEQ ID NO: 217599 - protein, 15 aa, Artificial Sequence
  Description of Artificial Sequence: Synthetic peptide
  Seed: LRMKWMMAMKYPITA
LRMKWMMAMNYPITA

SEQ ID NO: 217600 - protein, 15 aa, Artificial Sequence
  Description of Artificial Sequence: Synthetic peptide
  Seed: LRMKWMMAMKYPITA
LRMKWMMAMPYPITA

SEQ ID NO: 217601 - protein, 15 aa, Artificial Sequence
  Description of Artificial Sequence: Synthetic peptide
  Seed: LRMKWMMAMKYPITA
LRMKWMMAMQYPITA

SEQ ID NO: 217602 - protein, 15 aa, Artificial Sequence
  Description of Artificial Sequence: Synthetic peptide
  Seed: LRMKWMMAMKYPITA
LRMKWMMAMRYPITA

SEQ ID NO: 217603 - protein, 15 aa, Artificial Sequence
  Description of Artificial Sequence: Synthetic peptide
  Seed: LRMKWMMAMKYPITA
LRMKWMMAMSYPITA

SEQ ID NO: 217604 - protein, 15 aa, Artificial Sequence
  Description of Artificial Sequence: Synthetic peptide
  Seed: LRMKWMMAMKYPITA
LRMKWMMAMTYPITA

SEQ ID NO: 217605 - protein, 15 aa, Artificial Sequence
  Description of Artificial Sequence: Synthetic peptide
  Seed: LRMKWMMAMKYPITA
LRMKWMMAMVYPITA

SEQ ID NO: 217606 - protein, 15 aa, Artificial Sequence
  Description of Artificial Sequence: Synthetic peptide
  Seed: LRMKWMMAMKYPITA
LRMKWMMAMWYPITA

SEQ ID NO: 217607 - protein, 15 aa, Artificial Sequence
  Description of Artificial Sequence: Synthetic peptide
  Seed: LRMKWMMAMKYPITA
LRMKWMMAMYYPITA

SEQ ID NO: 217608 - protein, 15 aa, Artificial Sequence
  Description of Artificial Sequence: Synthetic peptide
  Seed: LRMKWMMAMKYPITA
LRFKWAMAMKAPITA

SEQ ID NO: 217609 - protein, 15 aa, Artificial Sequence
  Description of Artificial Sequence: Synthetic peptide
  Seed: LRMKWMMAMKYPITA
LRFKWAMAMKIPITA

SEQ ID NO: 217610 - protein, 15 aa, Artificial Sequence
  Description of Artificial Sequence: Synthetic peptide
  Seed: LRMKWMMAMKYPITA
LRFKWAMAMKLPITA

SEQ ID NO: 217611 - protein, 15 aa, Artificial Sequence
  Description of Artificial Sequence: Synthetic peptide
  Seed: LRMKWMMAMKYPITA
LRFKWAMAMKMPITA

SEQ ID NO: 217612 - protein, 15 aa, Artificial Sequence
  Description of Artificial Sequence: Synthetic peptide
  Seed: LRMKWMMAMKYPITA
LRFKWAMFMKAPITA

SEQ ID NO: 217613 - protein, 15 aa, Artificial Sequence
  Description of Artificial Sequence: Synthetic peptide
  Seed: LRMKWMMAMKYPITA
LRFKWAMFMKDPITA

SEQ ID NO: 217614 - protein, 15 aa, Artificial Sequence
  Description of Artificial Sequence: Synthetic peptide
  Seed: LRMKWMMAMKYPITA
LRFKWAMFMKEPITA

SEQ ID NO: 217615 - protein, 15 aa, Artificial Sequence
  Description of Artificial Sequence: Synthetic peptide
  Seed: LRMKWMMAMKYPITA
LRFKWAMFMKFPITA

SEQ ID NO: 217616 - protein, 15 aa, Artificial Sequence
  Description of Artificial Sequence: Synthetic peptide
  Seed: LRMKWMMAMKYPITA
LRFKWAMFMKHPITA

SEQ ID NO: 217617 - protein, 15 aa, Artificial Sequence
  Description of Artificial Sequence: Synthetic peptide
  Seed: LRMKWMMAMKYPITA
LRFKWAMFMKIPITA

SEQ ID NO: 217618 - protein, 15 aa, Artificial Sequence
  Description of Artificial Sequence: Synthetic peptide
  Seed: LRMKWMMAMKYPITA
LRFKWAMFMKLPITA

SEQ ID NO: 217619 - protein, 15 aa, Artificial Sequence
  Description of Artificial Sequence: Synthetic peptide
  Seed: LRMKWMMAMKYPITA
LRFKWAMFMKMPITA

SEQ ID NO: 217620 - protein, 15 aa, Artificial Sequence
  Description of Artificial Sequence: Synthetic peptide
  Seed: LRMKWMMAMKYPITA
LRFKWAMFMKNPITA

SEQ ID NO: 217621 - protein, 15 aa, Artificial Sequence
  Description of Artificial Sequence: Synthetic peptide
  Seed: LRMKWMMAMKYPITA
LRFKWAMFMKSPITA

SEQ ID NO: 217622 - protein, 15 aa, Artificial Sequence
  Description of Artificial Sequence: Synthetic peptide
  Seed: LRMKWMMAMKYPITA
LRFKWAMFMKTPITA

SEQ ID NO: 217623 - protein, 15 aa, Artificial Sequence
  Description of Artificial Sequence: Synthetic peptide
  Seed: LRMKWMMAMKYPITA
LRFKWAMFMKVPITA

SEQ ID NO: 217624 - protein, 15 aa, Artificial Sequence
  Description of Artificial Sequence: Synthetic peptide
  Seed: LRMKWMMAMKYPITA
LRFKWAMFMKYPITA

SEQ ID NO: 217625 - protein, 15 aa, Artificial Sequence
  Description of Artificial Sequence: Synthetic peptide
  Seed: LRMKWMMAMKYPITA
LRFKWAMGMKVPITA

SEQ ID NO: 217626 - protein, 15 aa, Artificial Sequence
  Description of Artificial Sequence: Synthetic peptide
  Seed: LRMKWMMAMKYPITA
LRFKWAMIMKLPITA

SEQ ID NO: 217627 - protein, 15 aa, Artificial Sequence
  Description of Artificial Sequence: Synthetic peptide
  Seed: LRMKWMMAMKYPITA
LRFKWAMIMKMPITA

SEQ ID NO: 217628 - protein, 15 aa, Artificial Sequence
  Description of Artificial Sequence: Synthetic peptide
  Seed: LRMKWMMAMKYPITA
LRFKWAMIMKVPITA

SEQ ID NO: 217629 - protein, 15 aa, Artificial Sequence
  Description of Artificial Sequence: Synthetic peptide
  Seed: LRMKWMMAMKYPITA
LRFKWAMLMKEPITA

SEQ ID NO: 217630 - protein, 15 aa, Artificial Sequence
  Description of Artificial Sequence: Synthetic peptide
  Seed: LRMKWMMAMKYPITA
LRFKWAMLMKFPITA

SEQ ID NO: 217631 - protein, 15 aa, Artificial Sequence
  Description of Artificial Sequence: Synthetic peptide
  Seed: LRMKWMMAMKYPITA
LRFKWAMLMKIPITA

SEQ ID NO: 217632 - protein, 15 aa, Artificial Sequence
  Description of Artificial Sequence: Synthetic peptide
  Seed: LRMKWMMAMKYPITA
LRFKWAMLMKLPITA

SEQ ID NO: 217633 - protein, 15 aa, Artificial Sequence
  Description of Artificial Sequence: Synthetic peptide
  Seed: LRMKWMMAMKYPITA
LRFKWAMLMKMPITA

SEQ ID NO: 217634 - protein, 15 aa, Artificial Sequence
  Description of Artificial Sequence: Synthetic peptide
  Seed: LRMKWMMAMKYPITA
LRFKWAMLMKVPITA

SEQ ID NO: 217635 - protein, 15 aa, Artificial Sequence
  Description of Artificial Sequence: Synthetic peptide
  Seed: LRMKWMMAMKYPITA
LRFKWAMLMKYPITA

SEQ ID NO: 217636 - protein, 15 aa, Artificial Sequence
  Description of Artificial Sequence: Synthetic peptide
  Seed: LRMKWMMAMKYPITA
LRFKWAMMMKFPITA

SEQ ID NO: 217637 - protein, 15 aa, Artificial Sequence
  Description of Artificial Sequence: Synthetic peptide
  Seed: LRMKWMMAMKYPITA
LRFKWAMMMKLPITA

SEQ ID NO: 217638 - protein, 15 aa, Artificial Sequence
  Description of Artificial Sequence: Synthetic peptide
  Seed: LRMKWMMAMKYPITA
LRFKWAMMMKMPITA

SEQ ID NO: 217639 - protein, 15 aa, Artificial Sequence
  Description of Artificial Sequence: Synthetic peptide
  Seed: LRMKWMMAMKYPITA
LRFKWAMSMKAPITA

SEQ ID NO: 217640 - protein, 15 aa, Artificial Sequence
  Description of Artificial Sequence: Synthetic peptide
  Seed: LRMKWMMAMKYPITA
LRFKWAMSMKLPITA

SEQ ID NO: 217641 - protein, 15 aa, Artificial Sequence
  Description of Artificial Sequence: Synthetic peptide
  Seed: LRMKWMMAMKYPITA
LRFKWAMSMKVPITA

SEQ ID NO: 217642 - protein, 15 aa, Artificial Sequence
  Description of Artificial Sequence: Synthetic peptide
  Seed: LRMKWMMAMKYPITA
LRFKWAMWMKLPITA

SEQ ID NO: 217643 - protein, 15 aa, Artificial Sequence
  Description of Artificial Sequence: Synthetic peptide
  Seed: LRMKWMMAMKYPITA
LRFKWAMYMKIPITA

SEQ ID NO: 217644 - protein, 15 aa, Artificial Sequence
  Description of Artificial Sequence: Synthetic peptide
  Seed: LRMKWMMAMKYPITA
LRFKWAMYMKLPITA

SEQ ID NO: 217645 - protein, 15 aa, Artificial Sequence
  Description of Artificial Sequence: Synthetic peptide
  Seed: LRMKWMMAMKYPITA
LRFKWAMYMKVPITA

SEQ ID NO: 217646 - protein, 15 aa, Artificial Sequence
  Description of Artificial Sequence: Synthetic peptide
  Seed: LRMKWMMAMKYPITA
LRFKWDMFMKAPITA

SEQ ID NO: 217647 - protein, 15 aa, Artificial Sequence
  Description of Artificial Sequence: Synthetic peptide
  Seed: LRMKWMMAMKYPITA
LRFKWDMFMKFPITA

SEQ ID NO: 217648 - protein, 15 aa, Artificial Sequence
  Description of Artificial Sequence: Synthetic peptide
  Seed: LRMKWMMAMKYPITA
LRFKWDMFMKIPITA

SEQ ID NO: 217649 - protein, 15 aa, Artificial Sequence
  Description of Artificial Sequence: Synthetic peptide
  Seed: LRMKWMMAMKYPITA
LRFKWDMFMKLPITA

SEQ ID NO: 217650 - protein, 15 aa, Artificial Sequence
  Description of Artificial Sequence: Synthetic peptide
  Seed: LRMKWMMAMKYPITA
LRFKWDMFMKMPITA

SEQ ID NO: 217651 - protein, 15 aa, Artificial Sequence
  Description of Artificial Sequence: Synthetic peptide
  Seed: LRMKWMMAMKYPITA
LRFKWDMFMKNPITA

SEQ ID NO: 217652 - protein, 15 aa, Artificial Sequence
  Description of Artificial Sequence: Synthetic peptide
  Seed: LRMKWMMAMKYPITA
LRFKWDMFMKSPITA

SEQ ID NO: 217653 - protein, 15 aa, Artificial Sequence
  Description of Artificial Sequence: Synthetic peptide
  Seed: LRMKWMMAMKYPITA
LRFKWDMFMKTPITA

SEQ ID NO: 217654 - protein, 15 aa, Artificial Sequence
  Description of Artificial Sequence: Synthetic peptide
  Seed: LRMKWMMAMKYPITA
LRFKWDMFMKVPITA

SEQ ID NO: 217655 - protein, 15 aa, Artificial Sequence
  Description of Artificial Sequence: Synthetic peptide
  Seed: LRMKWMMAMKYPITA
LRFKWEMFMKAPITA

SEQ ID NO: 217656 - protein, 15 aa, Artificial Sequence
  Description of Artificial Sequence: Synthetic peptide
  Seed: LRMKWMMAMKYPITA
LRFKWEMFMKDPITA

SEQ ID NO: 217657 - protein, 15 aa, Artificial Sequence
  Description of Artificial Sequence: Synthetic peptide
  Seed: LRMKWMMAMKYPITA
LRFKWEMFMKEPITA

SEQ ID NO: 217658 - protein, 15 aa, Artificial Sequence
  Description of Artificial Sequence: Synthetic peptide
  Seed: LRMKWMMAMKYPITA
LRFKWEMFMKFPITA

SEQ ID NO: 217659 - protein, 15 aa, Artificial Sequence
  Description of Artificial Sequence: Synthetic peptide
  Seed: LRMKWMMAMKYPITA
LRFKWEMFMKIPITA

SEQ ID NO: 217660 - protein, 15 aa, Artificial Sequence
  Description of Artificial Sequence: Synthetic peptide
  Seed: LRMKWMMAMKYPITA
LRFKWEMFMKLPITA

SEQ ID NO: 217661 - protein, 15 aa, Artificial Sequence
  Description of Artificial Sequence: Synthetic peptide
  Seed: LRMKWMMAMKYPITA
LRFKWEMFMKMPITA

SEQ ID NO: 217662 - protein, 15 aa, Artificial Sequence
  Description of Artificial Sequence: Synthetic peptide
  Seed: LRMKWMMAMKYPITA
LRFKWEMFMKNPITA

SEQ ID NO: 217663 - protein, 15 aa, Artificial Sequence
  Description of Artificial Sequence: Synthetic peptide
  Seed: LRMKWMMAMKYPITA
LRFKWEMFMKPPITA

SEQ ID NO: 217664 - protein, 15 aa, Artificial Sequence
  Description of Artificial Sequence: Synthetic peptide
  Seed: LRMKWMMAMKYPITA
LRFKWEMFMKQPITA

SEQ ID NO: 217665 - protein, 15 aa, Artificial Sequence
  Description of Artificial Sequence: Synthetic peptide
  Seed: LRMKWMMAMKYPITA
LRFKWEMFMKSPITA

SEQ ID NO: 217666 - protein, 15 aa, Artificial Sequence
  Description of Artificial Sequence: Synthetic peptide
  Seed: LRMKWMMAMKYPITA
LRFKWEMFMKTPITA

SEQ ID NO: 217667 - protein, 15 aa, Artificial Sequence
  Description of Artificial Sequence: Synthetic peptide
  Seed: LRMKWMMAMKYPITA
LRFKWEMFMKVPITA

SEQ ID NO: 217668 - protein, 15 aa, Artificial Sequence
  Description of Artificial Sequence: Synthetic peptide
  Seed: LRMKWMMAMKYPITA
LRFKWEMFMKYPITA

SEQ ID NO: 217669 - protein, 15 aa, Artificial Sequence
  Description of Artificial Sequence: Synthetic peptide
  Seed: LRMKWMMAMKYPITA
LRFKWEMIMKFPITA

SEQ ID NO: 217670 - protein, 15 aa, Artificial Sequence
  Description of Artificial Sequence: Synthetic peptide
  Seed: LRMKWMMAMKYPITA
LRFKWEMIMKIPITA

SEQ ID NO: 217671 - protein, 15 aa, Artificial Sequence
  Description of Artificial Sequence: Synthetic peptide
  Seed: LRMKWMMAMKYPITA
LRFKWEMIMKLPITA

SEQ ID NO: 217672 - protein, 15 aa, Artificial Sequence
  Description of Artificial Sequence: Synthetic peptide
  Seed: LRMKWMMAMKYPITA
LRFKWEMIMKMPITA

SEQ ID NO: 217673 - protein, 15 aa, Artificial Sequence
  Description of Artificial Sequence: Synthetic peptide
  Seed: LRMKWMMAMKYPITA
LRFKWEMIMKVPITA

SEQ ID NO: 217674 - protein, 15 aa, Artificial Sequence
  Description of Artificial Sequence: Synthetic peptide
  Seed: LRMKWMMAMKYPITA
LRFKWEMLMKFPITA

SEQ ID NO: 217675 - protein, 15 aa, Artificial Sequence
  Description of Artificial Sequence: Synthetic peptide
  Seed: LRMKWMMAMKYPITA
LRFKWEMLMKIPITA

SEQ ID NO: 217676 - protein, 15 aa, Artificial Sequence
  Description of Artificial Sequence: Synthetic peptide
  Seed: LRMKWMMAMKYPITA
LRFKWEMLMKLPITA

SEQ ID NO: 217677 - protein, 15 aa, Artificial Sequence
  Description of Artificial Sequence: Synthetic peptide
  Seed: LRMKWMMAMKYPITA
LRFKWEMLMKMPITA

SEQ ID NO: 217678 - protein, 15 aa, Artificial Sequence
  Description of Artificial Sequence: Synthetic peptide
  Seed: LRMKWMMAMKYPITA
LRFKWEMLMKVPITA

SEQ ID NO: 217679 - protein, 15 aa, Artificial Sequence
  Description of Artificial Sequence: Synthetic peptide
  Seed: LRMKWMMAMKYPITA
LRFKWEMMMKIPITA

SEQ ID NO: 217680 - protein, 15 aa, Artificial Sequence
  Description of Artificial Sequence: Synthetic peptide
  Seed: LRMKWMMAMKYPITA
LRFKWEMMMKLPITA

SEQ ID NO: 217681 - protein, 15 aa, Artificial Sequence
  Description of Artificial Sequence: Synthetic peptide
  Seed: LRMKWMMAMKYPITA
LRFKWEMMMKVPITA

SEQ ID NO: 217682 - protein, 15 aa, Artificial Sequence
  Description of Artificial Sequence: Synthetic peptide
  Seed: LRMKWMMAMKYPITA
LRFKWEMWMKIPITA

SEQ ID NO: 217683 - protein, 15 aa, Artificial Sequence
  Description of Artificial Sequence: Synthetic peptide
  Seed: LRMKWMMAMKYPITA
LRFKWEMWMKLPITA

SEQ ID NO: 217684 - protein, 15 aa, Artificial Sequence
  Description of Artificial Sequence: Synthetic peptide
  Seed: LRMKWMMAMKYPITA
LRFKWEMWMKVPITA

SEQ ID NO: 217685 - protein, 15 aa, Artificial Sequence
  Description of Artificial Sequence: Synthetic peptide
  Seed: LRMKWMMAMKYPITA
LRFKWEMYMKFPITA

SEQ ID NO: 217686 - protein, 15 aa, Artificial Sequence
  Description of Artificial Sequence: Synthetic peptide
  Seed: LRMKWMMAMKYPITA
LRFKWEMYMKIPITA

SEQ ID NO: 217687 - protein, 15 aa, Artificial Sequence
  Description of Artificial Sequence: Synthetic peptide
  Seed: LRMKWMMAMKYPITA
LRFKWEMYMKLPITA

SEQ ID NO: 217688 - protein, 15 aa, Artificial Sequence
  Description of Artificial Sequence: Synthetic peptide
  Seed: LRMKWMMAMKYPITA
LRFKWEMYMKMPITA

SEQ ID NO: 217689 - protein, 15 aa, Artificial Sequence
  Description of Artificial Sequence: Synthetic peptide
  Seed: LRMKWMMAMKYPITA
LRFKWEMYMKVPITA

SEQ ID NO: 217690 - protein, 15 aa, Artificial Sequence
  Description of Artificial Sequence: Synthetic peptide
  Seed: LRMKWMMAMKYPITA
LRFKWFMAMKAPITA

SEQ ID NO: 217691 - protein, 15 aa, Artificial Sequence
  Description of Artificial Sequence: Synthetic peptide
  Seed: LRMKWMMAMKYPITA
LRFKWFMAMKSPITA

SEQ ID NO: 217692 - protein, 15 aa, Artificial Sequence
  Description of Artificial Sequence: Synthetic peptide
  Seed: LRMKWMMAMKYPITA
LRFKWFMAMKVPITA

SEQ ID NO: 217693 - protein, 15 aa, Artificial Sequence
  Description of Artificial Sequence: Synthetic peptide
  Seed: LRMKWMMAMKYPITA
LRFKWFMFMKMPITA

SEQ ID NO: 217694 - protein, 15 aa, Artificial Sequence
  Description of Artificial Sequence: Synthetic peptide
  Seed: LRMKWMMAMKYPITA
LRFKWFMGMKAPITA

SEQ ID NO: 217695 - protein, 15 aa, Artificial Sequence
  Description of Artificial Sequence: Synthetic peptide
  Seed: LRMKWMMAMKYPITA
LRFKWFMGMKVPITA

SEQ ID NO: 217696 - protein, 15 aa, Artificial Sequence
  Description of Artificial Sequence: Synthetic peptide
  Seed: LRMKWMMAMKYPITA
LRFKWFMNMKAPITA

SEQ ID NO: 217697 - protein, 15 aa, Artificial Sequence
  Description of Artificial Sequence: Synthetic peptide
  Seed: LRMKWMMAMKYPITA
LRFKWFMNMKIPITA

SEQ ID NO: 217698 - protein, 15 aa, Artificial Sequence
  Description of Artificial Sequence: Synthetic peptide
  Seed: LRMKWMMAMKYPITA
LRFKWFMNMKLPITA

SEQ ID NO: 217699 - protein, 15 aa, Artificial Sequence
  Description of Artificial Sequence: Synthetic peptide
  Seed: LRMKWMMAMKYPITA
LRFKWFMNMKMPITA

SEQ ID NO: 217700 - protein, 15 aa, Artificial Sequence
  Description of Artificial Sequence: Synthetic peptide
  Seed: LRMKWMMAMKYPITA
LRFKWFMNMKSPITA

SEQ ID NO: 217701 - protein, 15 aa, Artificial Sequence
  Description of Artificial Sequence: Synthetic peptide
  Seed: LRMKWMMAMKYPITA
LRFKWFMNMKTPITA

SEQ ID NO: 217702 - protein, 15 aa, Artificial Sequence
  Description of Artificial Sequence: Synthetic peptide
  Seed: LRMKWMMAMKYPITA
LRFKWFMNMKVPITA

SEQ ID NO: 217703 - protein, 15 aa, Artificial Sequence
  Description of Artificial Sequence: Synthetic peptide
  Seed: LRMKWMMAMKYPITA
LRFKWFMSMKAPITA

SEQ ID NO: 217704 - protein, 15 aa, Artificial Sequence
  Description of Artificial Sequence: Synthetic peptide
  Seed: LRMKWMMAMKYPITA
LRFKWFMSMKGPITA

SEQ ID NO: 217705 - protein, 15 aa, Artificial Sequence
  Description of Artificial Sequence: Synthetic peptide
  Seed: LRMKWMMAMKYPITA
LRFKWFMSMKIPITA

SEQ ID NO: 217706 - protein, 15 aa, Artificial Sequence
  Description of Artificial Sequence: Synthetic peptide
  Seed: LRMKWMMAMKYPITA
LRFKWFMSMKLPITA

SEQ ID NO: 217707 - protein, 15 aa, Artificial Sequence
  Description of Artificial Sequence: Synthetic peptide
  Seed: LRMKWMMAMKYPITA
LRFKWFMSMKMPITA

SEQ ID NO: 217708 - protein, 15 aa, Artificial Sequence
  Description of Artificial Sequence: Synthetic peptide
  Seed: LRMKWMMAMKYPITA
LRFKWFMSMKSPITA

SEQ ID NO: 217709 - protein, 15 aa, Artificial Sequence
  Description of Artificial Sequence: Synthetic peptide
  Seed: LRMKWMMAMKYPITA
LRFKWFMSMKTPITA

SEQ ID NO: 217710 - protein, 15 aa, Artificial Sequence
  Description of Artificial Sequence: Synthetic peptide
  Seed: LRMKWMMAMKYPITA
LRFKWFMSMKVPITA

SEQ ID NO: 217711 - protein, 15 aa, Artificial Sequence
  Description of Artificial Sequence: Synthetic peptide
  Seed: LRMKWMMAMKYPITA
LRFKWFMTMKAPITA

SEQ ID NO: 217712 - protein, 15 aa, Artificial Sequence
  Description of Artificial Sequence: Synthetic peptide
  Seed: LRMKWMMAMKYPITA
LRFKWFMTMKSPITA

SEQ ID NO: 217713 - protein, 15 aa, Artificial Sequence
  Description of Artificial Sequence: Synthetic peptide
  Seed: LRMKWMMAMKYPITA
LRFKWFMTMKVPITA

SEQ ID NO: 217714 - protein, 15 aa, Artificial Sequence
  Description of Artificial Sequence: Synthetic peptide
  Seed: LRMKWMMAMKYPITA
LRFKWGMFMKIPITA

SEQ ID NO: 217715 - protein, 15 aa, Artificial Sequence
  Description of Artificial Sequence: Synthetic peptide
  Seed: LRMKWMMAMKYPITA
LRFKWGMFMKLPITA

SEQ ID NO: 217716 - protein, 15 aa, Artificial Sequence
  Description of Artificial Sequence: Synthetic peptide
  Seed: LRMKWMMAMKYPITA
LRFKWGMFMKVPITA

SEQ ID NO: 217717 - protein, 15 aa, Artificial Sequence
  Description of Artificial Sequence: Synthetic peptide
  Seed: LRMKWMMAMKYPITA
LRFKWHMFMKAPITA

SEQ ID NO: 217718 - protein, 15 aa, Artificial Sequence
  Description of Artificial Sequence: Synthetic peptide
  Seed: LRMKWMMAMKYPITA
LRFKWHMFMKEPITA

SEQ ID NO: 217719 - protein, 15 aa, Artificial Sequence
  Description of Artificial Sequence: Synthetic peptide
  Seed: LRMKWMMAMKYPITA
LRFKWHMFMKFPITA

SEQ ID NO: 217720 - protein, 15 aa, Artificial Sequence
  Description of Artificial Sequence: Synthetic peptide
  Seed: LRMKWMMAMKYPITA
LRFKWHMFMKIPITA

SEQ ID NO: 217721 - protein, 15 aa, Artificial Sequence
  Description of Artificial Sequence: Synthetic peptide
  Seed: LRMKWMMAMKYPITA
LRFKWHMFMKLPITA

SEQ ID NO: 217722 - protein, 15 aa, Artificial Sequence
  Description of Artificial Sequence: Synthetic peptide
  Seed: LRMKWMMAMKYPITA
LRFKWHMFMKMPITA

SEQ ID NO: 217723 - protein, 15 aa, Artificial Sequence
  Description of Artificial Sequence: Synthetic peptide
  Seed: LRMKWMMAMKYPITA
LRFKWHMFMKNPITA

SEQ ID NO: 217724 - protein, 15 aa, Artificial Sequence
  Description of Artificial Sequence: Synthetic peptide
  Seed: LRMKWMMAMKYPITA
LRFKWHMFMKSPITA

SEQ ID NO: 217725 - protein, 15 aa, Artificial Sequence
  Description of Artificial Sequence: Synthetic peptide
  Seed: LRMKWMMAMKYPITA
LRFKWHMFMKTPITA

SEQ ID NO: 217726 - protein, 15 aa, Artificial Sequence
  Description of Artificial Sequence: Synthetic peptide
  Seed: LRMKWMMAMKYPITA
LRFKWHMFMKVPITA

SEQ ID NO: 217727 - protein, 15 aa, Artificial Sequence
  Description of Artificial Sequence: Synthetic peptide
  Seed: LRMKWMMAMKYPITA
LRFKWHMFMKYPITA

SEQ ID NO: 217728 - protein, 15 aa, Artificial Sequence
  Description of Artificial Sequence: Synthetic peptide
  Seed: LRMKWMMAMKYPITA
LRFKWHMIMKIPITA

SEQ ID NO: 217729 - protein, 15 aa, Artificial Sequence
  Description of Artificial Sequence: Synthetic peptide
  Seed: LRMKWMMAMKYPITA
LRFKWHMIMKLPITA

SEQ ID NO: 217730 - protein, 15 aa, Artificial Sequence
  Description of Artificial Sequence: Synthetic peptide
  Seed: LRMKWMMAMKYPITA
LRFKWHMIMKVPITA

SEQ ID NO: 217731 - protein, 15 aa, Artificial Sequence
  Description of Artificial Sequence: Synthetic peptide
  Seed: LRMKWMMAMKYPITA
LRFKWHMLMKFPITA

SEQ ID NO: 217732 - protein, 15 aa, Artificial Sequence
  Description of Artificial Sequence: Synthetic peptide
  Seed: LRMKWMMAMKYPITA
LRFKWHMLMKIPITA

SEQ ID NO: 217733 - protein, 15 aa, Artificial Sequence
  Description of Artificial Sequence: Synthetic peptide
  Seed: LRMKWMMAMKYPITA
LRFKWHMLMKLPITA

SEQ ID NO: 217734 - protein, 15 aa, Artificial Sequence
  Description of Artificial Sequence: Synthetic peptide
  Seed: LRMKWMMAMKYPITA
LRFKWHMLMKMPITA

SEQ ID NO: 217735 - protein, 15 aa, Artificial Sequence
  Description of Artificial Sequence: Synthetic peptide
  Seed: LRMKWMMAMKYPITA
LRFKWHMLMKVPITA

SEQ ID NO: 217736 - protein, 15 aa, Artificial Sequence
  Description of Artificial Sequence: Synthetic peptide
  Seed: LRMKWMMAMKYPITA
LRFKWHMMMKLPITA

SEQ ID NO: 217737 - protein, 15 aa, Artificial Sequence
  Description of Artificial Sequence: Synthetic peptide
  Seed: LRMKWMMAMKYPITA
LRFKWHMMMKVPITA

SEQ ID NO: 217738 - protein, 15 aa, Artificial Sequence
  Description of Artificial Sequence: Synthetic peptide
  Seed: LRMKWMMAMKYPITA
LRFKWHMWMKVPITA

SEQ ID NO: 217739 - protein, 15 aa, Artificial Sequence
  Description of Artificial Sequence: Synthetic peptide
  Seed: LRMKWMMAMKYPITA
LRFKWHMYMKIPITA

SEQ ID NO: 217740 - protein, 15 aa, Artificial Sequence
  Description of Artificial Sequence: Synthetic peptide
  Seed: LRMKWMMAMKYPITA
LRFKWHMYMKLPITA

SEQ ID NO: 217741 - protein, 15 aa, Artificial Sequence
  Description of Artificial Sequence: Synthetic peptide
  Seed: LRMKWMMAMKYPITA
LRFKWHMYMKVPITA

SEQ ID NO: 217742 - protein, 15 aa, Artificial Sequence
  Description of Artificial Sequence: Synthetic peptide
  Seed: LRMKWMMAMKYPITA
LRFKWIMAMKIPITA

SEQ ID NO: 217743 - protein, 15 aa, Artificial Sequence
  Description of Artificial Sequence: Synthetic peptide
  Seed: LRMKWMMAMKYPITA
LRFKWIMAMKLPITA

SEQ ID NO: 217744 - protein, 15 aa, Artificial Sequence
  Description of Artificial Sequence: Synthetic peptide
  Seed: LRMKWMMAMKYPITA
LRFKWIMAMKMPITA

SEQ ID NO: 217745 - protein, 15 aa, Artificial Sequence
  Description of Artificial Sequence: Synthetic peptide
  Seed: LRMKWMMAMKYPITA
LRFKWIMAMKVPITA

SEQ ID NO: 217746 - protein, 15 aa, Artificial Sequence
  Description of Artificial Sequence: Synthetic peptide
  Seed: LRMKWMMAMKYPITA
LRFKWIMFMKDPITA

SEQ ID NO: 217747 - protein, 15 aa, Artificial Sequence
  Description of Artificial Sequence: Synthetic peptide
  Seed: LRMKWMMAMKYPITA
LRFKWIMFMKEPITA

SEQ ID NO: 217748 - protein, 15 aa, Artificial Sequence
  Description of Artificial Sequence: Synthetic peptide
  Seed: LRMKWMMAMKYPITA
LRFKWIMFMKLPITA

SEQ ID NO: 217749 - protein, 15 aa, Artificial Sequence
  Description of Artificial Sequence: Synthetic peptide
  Seed: LRMKWMMAMKYPITA
LRFKWIMFMKMPITA

SEQ ID NO: 217750 - protein, 15 aa, Artificial Sequence
  Description of Artificial Sequence: Synthetic peptide
  Seed: LRMKWMMAMKYPITA
LRFKWIMFMKNPITA

SEQ ID NO: 217751 - protein, 15 aa, Artificial Sequence
  Description of Artificial Sequence: Synthetic peptide
  Seed: LRMKWMMAMKYPITA
LRFKWIMGMKVPITA

SEQ ID NO: 217752 - protein, 15 aa, Artificial Sequence
  Description of Artificial Sequence: Synthetic peptide
  Seed: LRMKWMMAMKYPITA
LRFKWIMLMKEPITA

SEQ ID NO: 217753 - protein, 15 aa, Artificial Sequence
  Description of Artificial Sequence: Synthetic peptide
  Seed: LRMKWMMAMKYPITA
LRFKWIMNMKAPITA

SEQ ID NO: 217754 - protein, 15 aa, Artificial Sequence
  Description of Artificial Sequence: Synthetic peptide
  Seed: LRMKWMMAMKYPITA
LRFKWIMPMKIPITA

SEQ ID NO: 217755 - protein, 15 aa, Artificial Sequence
  Description of Artificial Sequence: Synthetic peptide
  Seed: LRMKWMMAMKYPITA
LRFKWIMPMKVPITA

SEQ ID NO: 217756 - protein, 15 aa, Artificial Sequence
  Description of Artificial Sequence: Synthetic peptide
  Seed: LRMKWMMAMKYPITA
LRFKWIMSMKAPITA

SEQ ID NO: 217757 - protein, 15 aa, Artificial Sequence
  Description of Artificial Sequence: Synthetic peptide
  Seed: LRMKWMMAMKYPITA
LRFKWIMSMKIPITA

SEQ ID NO: 217758 - protein, 15 aa, Artificial Sequence
  Description of Artificial Sequence: Synthetic peptide
  Seed: LRMKWMMAMKYPITA
LRFKWIMSMKVPITA

SEQ ID NO: 217759 - protein, 15 aa, Artificial Sequence
  Description of Artificial Sequence: Synthetic peptide
  Seed: LRMKWMMAMKYPITA
LRFKWIMTMKAPITA

SEQ ID NO: 217760 - protein, 15 aa, Artificial Sequence
  Description of Artificial Sequence: Synthetic peptide
  Seed: LRMKWMMAMKYPITA
LRFKWLMAMKIPITA

SEQ ID NO: 217761 - protein, 15 aa, Artificial Sequence
  Description of Artificial Sequence: Synthetic peptide
  Seed: LRMKWMMAMKYPITA
LRFKWLMAMKLPITA

SEQ ID NO: 217762 - protein, 15 aa, Artificial Sequence
  Description of Artificial Sequence: Synthetic peptide
  Seed: LRMKWMMAMKYPITA
LRFKWLMAMKMPITA

SEQ ID NO: 217763 - protein, 15 aa, Artificial Sequence
  Description of Artificial Sequence: Synthetic peptide
  Seed: LRMKWMMAMKYPITA
LRFKWLMAMKTPITA

SEQ ID NO: 217764 - protein, 15 aa, Artificial Sequence
  Description of Artificial Sequence: Synthetic peptide
  Seed: LRMKWMMAMKYPITA
LRFKWLMAMKVPITA

SEQ ID NO: 217765 - protein, 15 aa, Artificial Sequence
  Description of Artificial Sequence: Synthetic peptide
  Seed: LRMKWMMAMKYPITA
LRFKWLMFMKEPITA

SEQ ID NO: 217766 - protein, 15 aa, Artificial Sequence
  Description of Artificial Sequence: Synthetic peptide
  Seed: LRMKWMMAMKYPITA
LRFKWLMGMKAPITA

SEQ ID NO: 217767 - protein, 15 aa, Artificial Sequence
  Description of Artificial Sequence: Synthetic peptide
  Seed: LRMKWMMAMKYPITA
LRFKWLMGMKGPITA

SEQ ID NO: 217768 - protein, 15 aa, Artificial Sequence
  Description of Artificial Sequence: Synthetic peptide
  Seed: LRMKWMMAMKYPITA
LRFKWLMGMKIPITA

SEQ ID NO: 217769 - protein, 15 aa, Artificial Sequence
  Description of Artificial Sequence: Synthetic peptide
  Seed: LRMKWMMAMKYPITA
LRFKWLMGMKLPITA

SEQ ID NO: 217770 - protein, 15 aa, Artificial Sequence
  Description of Artificial Sequence: Synthetic peptide
  Seed: LRMKWMMAMKYPITA
LRFKWLMGMKMPITA

SEQ ID NO: 217771 - protein, 15 aa, Artificial Sequence
  Description of Artificial Sequence: Synthetic peptide
  Seed: LRMKWMMAMKYPITA
LRFKWLMGMKSPITA

SEQ ID NO: 217772 - protein, 15 aa, Artificial Sequence
  Description of Artificial Sequence: Synthetic peptide
  Seed: LRMKWMMAMKYPITA
LRFKWLMGMKTPITA

SEQ ID NO: 217773 - protein, 15 aa, Artificial Sequence
  Description of Artificial Sequence: Synthetic peptide
  Seed: LRMKWMMAMKYPITA
LRFKWLMGMKVPITA

SEQ ID NO: 217774 - protein, 15 aa, Artificial Sequence
  Description of Artificial Sequence: Synthetic peptide
  Seed: LRMKWMMAMKYPITA
LRFKWLMNMKSPITA

SEQ ID NO: 217775 - protein, 15 aa, Artificial Sequence
  Description of Artificial Sequence: Synthetic peptide
  Seed: LRMKWMMAMKYPITA
LRFKWLMPMKIPITA

SEQ ID NO: 217776 - protein, 15 aa, Artificial Sequence
  Description of Artificial Sequence: Synthetic peptide
  Seed: LRMKWMMAMKYPITA
LRFKWLMPMKLPITA

SEQ ID NO: 217777 - protein, 15 aa, Artificial Sequence
  Description of Artificial Sequence: Synthetic peptide
  Seed: LRMKWMMAMKYPITA
LRFKWLMPMKMPITA

SEQ ID NO: 217778 - protein, 15 aa, Artificial Sequence
  Description of Artificial Sequence: Synthetic peptide
  Seed: LRMKWMMAMKYPITA
LRFKWLMPMKTPITA

SEQ ID NO: 217779 - protein, 15 aa, Artificial Sequence
  Description of Artificial Sequence: Synthetic peptide
  Seed: LRMKWMMAMKYPITA
LRFKWLMPMKVPITA

SEQ ID NO: 217780 - protein, 15 aa, Artificial Sequence
  Description of Artificial Sequence: Synthetic peptide
  Seed: LRMKWMMAMKYPITA
LRFKWLMSMKAPITA

SEQ ID NO: 217781 - protein, 15 aa, Artificial Sequence
  Description of Artificial Sequence: Synthetic peptide
  Seed: LRMKWMMAMKYPITA
LRFKWLMSMKIPITA

SEQ ID NO: 217782 - protein, 15 aa, Artificial Sequence
  Description of Artificial Sequence: Synthetic peptide
  Seed: LRMKWMMAMKYPITA
LRFKWLMSMKLPITA

SEQ ID NO: 217783 - protein, 15 aa, Artificial Sequence
  Description of Artificial Sequence: Synthetic peptide
  Seed: LRMKWMMAMKYPITA
LRFKWLMSMKMPITA

SEQ ID NO: 217784 - protein, 15 aa, Artificial Sequence
  Description of Artificial Sequence: Synthetic peptide
  Seed: LRMKWMMAMKYPITA
LRFKWLMSMKTPITA

SEQ ID NO: 217785 - protein, 15 aa, Artificial Sequence
  Description of Artificial Sequence: Synthetic peptide
  Seed: LRMKWMMAMKYPITA
LRFKWLMSMKVPITA

SEQ ID NO: 217786 - protein, 15 aa, Artificial Sequence
  Description of Artificial Sequence: Synthetic peptide
  Seed: LRMKWMMAMKYPITA
LRFKWLMTMKAPITA

SEQ ID NO: 217787 - protein, 15 aa, Artificial Sequence
  Description of Artificial Sequence: Synthetic peptide
  Seed: LRMKWMMAMKYPITA
LRFKWLMTMKSPITA

SEQ ID NO: 217788 - protein, 15 aa, Artificial Sequence
  Description of Artificial Sequence: Synthetic peptide
  Seed: LRMKWMMAMKYPITA
LRFKWLMTMKTPITA

SEQ ID NO: 217789 - protein, 15 aa, Artificial Sequence
  Description of Artificial Sequence: Synthetic peptide
  Seed: LRMKWMMAMKYPITA
LRFKWMMAMKAPITA

SEQ ID NO: 217790 - protein, 15 aa, Artificial Sequence
  Description of Artificial Sequence: Synthetic peptide
  Seed: LRMKWMMAMKYPITA
LRFKWMMAMKIPITA

SEQ ID NO: 217791 - protein, 15 aa, Artificial Sequence
  Description of Artificial Sequence: Synthetic peptide
  Seed: LRMKWMMAMKYPITA
LRFKWMMAMKLPITA

SEQ ID NO: 217792 - protein, 15 aa, Artificial Sequence
  Description of Artificial Sequence: Synthetic peptide
  Seed: LRMKWMMAMKYPITA
LRFKWMMAMKMPITA

SEQ ID NO: 217793 - protein, 15 aa, Artificial Sequence
  Description of Artificial Sequence: Synthetic peptide
  Seed: LRMKWMMAMKYPITA
LRFKWMMAMKSPITA

SEQ ID NO: 217794 - protein, 15 aa, Artificial Sequence
  Description of Artificial Sequence: Synthetic peptide
  Seed: LRMKWMMAMKYPITA
LRFKWMMAMKTPITA

SEQ ID NO: 217795 - protein, 15 aa, Artificial Sequence
  Description of Artificial Sequence: Synthetic peptide
  Seed: LRMKWMMAMKYPITA
LRFKWMMAMKVPITA

SEQ ID NO: 217796 - protein, 15 aa, Artificial Sequence
  Description of Artificial Sequence: Synthetic peptide
  Seed: LRMKWMMAMKYPITA
LRFKWMMFMKEPITA

SEQ ID NO: 217797 - protein, 15 aa, Artificial Sequence
  Description of Artificial Sequence: Synthetic peptide
  Seed: LRMKWMMAMKYPITA
LRFKWMMFMKLPITA

SEQ ID NO: 217798 - protein, 15 aa, Artificial Sequence
  Description of Artificial Sequence: Synthetic peptide
  Seed: LRMKWMMAMKYPITA
LRFKWMMFMKMPITA

SEQ ID NO: 217799 - protein, 15 aa, Artificial Sequence
  Description of Artificial Sequence: Synthetic peptide
  Seed: LRMKWMMAMKYPITA
LRFKWMMGMKAPITA

SEQ ID NO: 217800 - protein, 15 aa, Artificial Sequence
  Description of Artificial Sequence: Synthetic peptide
  Seed: LRMKWMMAMKYPITA
LRFKWMMGMKIPITA

SEQ ID NO: 217801 - protein, 15 aa, Artificial Sequence
  Description of Artificial Sequence: Synthetic peptide
  Seed: LRMKWMMAMKYPITA
LRFKWMMGMKLPITA

SEQ ID NO: 217802 - protein, 15 aa, Artificial Sequence
  Description of Artificial Sequence: Synthetic peptide
  Seed: LRMKWMMAMKYPITA
LRFKWMMGMKMPITA

SEQ ID NO: 217803 - protein, 15 aa, Artificial Sequence
  Description of Artificial Sequence: Synthetic peptide
  Seed: LRMKWMMAMKYPITA
LRFKWMMGMKSPITA

SEQ ID NO: 217804 - protein, 15 aa, Artificial Sequence
  Description of Artificial Sequence: Synthetic peptide
  Seed: LRMKWMMAMKYPITA
LRFKWMMGMKTPITA

SEQ ID NO: 217805 - protein, 15 aa, Artificial Sequence
  Description of Artificial Sequence: Synthetic peptide
  Seed: LRMKWMMAMKYPITA
LRFKWMMGMKVPITA

SEQ ID NO: 217806 - protein, 15 aa, Artificial Sequence
  Description of Artificial Sequence: Synthetic peptide
  Seed: LRMKWMMAMKYPITA
LRFKWMMNMKAPITA

SEQ ID NO: 217807 - protein, 15 aa, Artificial Sequence
  Description of Artificial Sequence: Synthetic peptide
  Seed: LRMKWMMAMKYPITA
LRFKWMMNMKSPITA

SEQ ID NO: 217808 - protein, 15 aa, Artificial Sequence
  Description of Artificial Sequence: Synthetic peptide
  Seed: LRMKWMMAMKYPITA
LRFKWMMPMKAPITA

SEQ ID NO: 217809 - protein, 15 aa, Artificial Sequence
  Description of Artificial Sequence: Synthetic peptide
  Seed: LRMKWMMAMKYPITA
LRFKWMMPMKIPITA

SEQ ID NO: 217810 - protein, 15 aa, Artificial Sequence
  Description of Artificial Sequence: Synthetic peptide
  Seed: LRMKWMMAMKYPITA
LRFKWMMPMKLPITA

SEQ ID NO: 217811 - protein, 15 aa, Artificial Sequence
  Description of Artificial Sequence: Synthetic peptide
  Seed: LRMKWMMAMKYPITA
LRFKWMMPMKSPITA

SEQ ID NO: 217812 - protein, 15 aa, Artificial Sequence
  Description of Artificial Sequence: Synthetic peptide
  Seed: LRMKWMMAMKYPITA
LRFKWMMPMKTPITA

SEQ ID NO: 217813 - protein, 15 aa, Artificial Sequence
  Description of Artificial Sequence: Synthetic peptide
  Seed: LRMKWMMAMKYPITA
LRFKWMMPMKVPITA

SEQ ID NO: 217814 - protein, 15 aa, Artificial Sequence
  Description of Artificial Sequence: Synthetic peptide
  Seed: LRMKWMMAMKYPITA
LRFKWMMSMKAPITA

SEQ ID NO: 217815 - protein, 15 aa, Artificial Sequence
  Description of Artificial Sequence: Synthetic peptide
  Seed: LRMKWMMAMKYPITA
LRFKWMMSMKIPITA

SEQ ID NO: 217816 - protein, 15 aa, Artificial Sequence
  Description of Artificial Sequence: Synthetic peptide
  Seed: LRMKWMMAMKYPITA
LRFKWMMSMKLPITA

SEQ ID NO: 217817 - protein, 15 aa, Artificial Sequence
  Description of Artificial Sequence: Synthetic peptide
  Seed: LRMKWMMAMKYPITA
LRFKWMMSMKMPITA

SEQ ID NO: 217818 - protein, 15 aa, Artificial Sequence
  Description of Artificial Sequence: Synthetic peptide
  Seed: LRMKWMMAMKYPITA
LRFKWMMSMKSPITA

SEQ ID NO: 217819 - protein, 15 aa, Artificial Sequence
  Description of Artificial Sequence: Synthetic peptide
  Seed: LRMKWMMAMKYPITA
LRFKWMMSMKTPITA

SEQ ID NO: 217820 - protein, 15 aa, Artificial Sequence
  Description of Artificial Sequence: Synthetic peptide
  Seed: LRMKWMMAMKYPITA
LRFKWMMSMKVPITA

SEQ ID NO: 217821 - protein, 15 aa, Artificial Sequence
  Description of Artificial Sequence: Synthetic peptide
  Seed: LRMKWMMAMKYPITA
LRFKWMMTMKAPITA

SEQ ID NO: 217822 - protein, 15 aa, Artificial Sequence
  Description of Artificial Sequence: Synthetic peptide
  Seed: LRMKWMMAMKYPITA
LRFKWMMTMKSPITA

SEQ ID NO: 217823 - protein, 15 aa, Artificial Sequence
  Description of Artificial Sequence: Synthetic peptide
  Seed: LRMKWMMAMKYPITA
LRFKWMMTMKVPITA

SEQ ID NO: 217824 - protein, 15 aa, Artificial Sequence
  Description of Artificial Sequence: Synthetic peptide
  Seed: LRMKWMMAMKYPITA
LRFKWNMFMKAPITA

SEQ ID NO: 217825 - protein, 15 aa, Artificial Sequence
  Description of Artificial Sequence: Synthetic peptide
  Seed: LRMKWMMAMKYPITA
LRFKWNMFMKFPITA

SEQ ID NO: 217826 - protein, 15 aa, Artificial Sequence
  Description of Artificial Sequence: Synthetic peptide
  Seed: LRMKWMMAMKYPITA
LRFKWNMFMKIPITA

SEQ ID NO: 217827 - protein, 15 aa, Artificial Sequence
  Description of Artificial Sequence: Synthetic peptide
  Seed: LRMKWMMAMKYPITA
LRFKWNMFMKLPITA

SEQ ID NO: 217828 - protein, 15 aa, Artificial Sequence
  Description of Artificial Sequence: Synthetic peptide
  Seed: LRMKWMMAMKYPITA
LRFKWNMFMKMPITA

SEQ ID NO: 217829 - protein, 15 aa, Artificial Sequence
  Description of Artificial Sequence: Synthetic peptide
  Seed: LRMKWMMAMKYPITA
LRFKWQMAMKAPITA

SEQ ID NO: 217830 - protein, 15 aa, Artificial Sequence
  Description of Artificial Sequence: Synthetic peptide
  Seed: LRMKWMMAMKYPITA
LRFKWQMAMKIPITA

SEQ ID NO: 217831 - protein, 15 aa, Artificial Sequence
  Description of Artificial Sequence: Synthetic peptide
  Seed: LRMKWMMAMKYPITA
LRFKWQMAMKLPITA

SEQ ID NO: 217832 - protein, 15 aa, Artificial Sequence
  Description of Artificial Sequence: Synthetic peptide
  Seed: LRMKWMMAMKYPITA
LRFKWQMAMKVPITA

SEQ ID NO: 217833 - protein, 15 aa, Artificial Sequence
  Description of Artificial Sequence: Synthetic peptide
  Seed: LRMKWMMAMKYPITA
LRFKWQMFMKAPITA

SEQ ID NO: 217834 - protein, 15 aa, Artificial Sequence
  Description of Artificial Sequence: Synthetic peptide
  Seed: LRMKWMMAMKYPITA
LRFKWQMFMKEPITA

SEQ ID NO: 217835 - protein, 15 aa, Artificial Sequence
  Description of Artificial Sequence: Synthetic peptide
  Seed: LRMKWMMAMKYPITA
LRFKWQMFMKFPITA

SEQ ID NO: 217836 - protein, 15 aa, Artificial Sequence
  Description of Artificial Sequence: Synthetic peptide
  Seed: LRMKWMMAMKYPITA
LRFKWQMFMKIPITA

SEQ ID NO: 217837 - protein, 15 aa, Artificial Sequence
  Description of Artificial Sequence: Synthetic peptide
  Seed: LRMKWMMAMKYPITA
LRFKWQMFMKLPITA

SEQ ID NO: 217838 - protein, 15 aa, Artificial Sequence
  Description of Artificial Sequence: Synthetic peptide
  Seed: LRMKWMMAMKYPITA
LRFKWQMFMKMPITA

SEQ ID NO: 217839 - protein, 15 aa, Artificial Sequence
  Description of Artificial Sequence: Synthetic peptide
  Seed: LRMKWMMAMKYPITA
LRFKWQMFMKTPITA

SEQ ID NO: 217840 - protein, 15 aa, Artificial Sequence
  Description of Artificial Sequence: Synthetic peptide
  Seed: LRMKWMMAMKYPITA
LRFKWQMFMKVPITA

SEQ ID NO: 217841 - protein, 15 aa, Artificial Sequence
  Description of Artificial Sequence: Synthetic peptide
  Seed: LRMKWMMAMKYPITA
LRFKWQMIMKLPITA

SEQ ID NO: 217842 - protein, 15 aa, Artificial Sequence
  Description of Artificial Sequence: Synthetic peptide
  Seed: LRMKWMMAMKYPITA
LRFKWQMIMKVPITA

SEQ ID NO: 217843 - protein, 15 aa, Artificial Sequence
  Description of Artificial Sequence: Synthetic peptide
  Seed: LRMKWMMAMKYPITA
LRFKWQMLMKFPITA

SEQ ID NO: 217844 - protein, 15 aa, Artificial Sequence
  Description of Artificial Sequence: Synthetic peptide
  Seed: LRMKWMMAMKYPITA
LRFKWQMLMKIPITA

SEQ ID NO: 217845 - protein, 15 aa, Artificial Sequence
  Description of Artificial Sequence: Synthetic peptide
  Seed: LRMKWMMAMKYPITA
LRFKWQMLMKLPITA

SEQ ID NO: 217846 - protein, 15 aa, Artificial Sequence
  Description of Artificial Sequence: Synthetic peptide
  Seed: LRMKWMMAMKYPITA
LRFKWQMLMKMPITA

SEQ ID NO: 217847 - protein, 15 aa, Artificial Sequence
  Description of Artificial Sequence: Synthetic peptide
  Seed: LRMKWMMAMKYPITA
LRFKWQMLMKVPITA

SEQ ID NO: 217848 - protein, 15 aa, Artificial Sequence
  Description of Artificial Sequence: Synthetic peptide
  Seed: LRMKWMMAMKYPITA
LRFKWQMMMKLPITA

SEQ ID NO: 217849 - protein, 15 aa, Artificial Sequence
  Description of Artificial Sequence: Synthetic peptide
  Seed: LRMKWMMAMKYPITA
LRFKWQMSMKVPITA

SEQ ID NO: 217850 - protein, 15 aa, Artificial Sequence
  Description of Artificial Sequence: Synthetic peptide
  Seed: LRMKWMMAMKYPITA
LRFKWSMAMKIPITA

SEQ ID NO: 217851 - protein, 15 aa, Artificial Sequence
  Description of Artificial Sequence: Synthetic peptide
  Seed: LRMKWMMAMKYPITA
LRFKWSMAMKLPITA

SEQ ID NO: 217852 - protein, 15 aa, Artificial Sequence
  Description of Artificial Sequence: Synthetic peptide
  Seed: LRMKWMMAMKYPITA
LRFKWSMAMKVPITA

SEQ ID NO: 217853 - protein, 15 aa, Artificial Sequence
  Description of Artificial Sequence: Synthetic peptide
  Seed: LRMKWMMAMKYPITA
LRFKWSMFMKAPITA

SEQ ID NO: 217854 - protein, 15 aa, Artificial Sequence
  Description of Artificial Sequence: Synthetic peptide
  Seed: LRMKWMMAMKYPITA
LRFKWSMFMKDPITA

SEQ ID NO: 217855 - protein, 15 aa, Artificial Sequence
  Description of Artificial Sequence: Synthetic peptide
  Seed: LRMKWMMAMKYPITA
LRFKWSMFMKEPITA

SEQ ID NO: 217856 - protein, 15 aa, Artificial Sequence
  Description of Artificial Sequence: Synthetic peptide
  Seed: LRMKWMMAMKYPITA
LRFKWSMFMKFPITA

SEQ ID NO: 217857 - protein, 15 aa, Artificial Sequence
  Description of Artificial Sequence: Synthetic peptide
  Seed: LRMKWMMAMKYPITA
LRFKWSMFMKHPITA

SEQ ID NO: 217858 - protein, 15 aa, Artificial Sequence
  Description of Artificial Sequence: Synthetic peptide
  Seed: LRMKWMMAMKYPITA
LRFKWSMFMKIPITA

SEQ ID NO: 217859 - protein, 15 aa, Artificial Sequence
  Description of Artificial Sequence: Synthetic peptide
  Seed: LRMKWMMAMKYPITA
LRFKWSMFMKLPITA

SEQ ID NO: 217860 - protein, 15 aa, Artificial Sequence
  Description of Artificial Sequence: Synthetic peptide
  Seed: LRMKWMMAMKYPITA
LRFKWSMFMKMPITA

SEQ ID NO: 217861 - protein, 15 aa, Artificial Sequence
  Description of Artificial Sequence: Synthetic peptide
  Seed: LRMKWMMAMKYPITA
LRFKWSMFMKNPITA

SEQ ID NO: 217862 - protein, 15 aa, Artificial Sequence
  Description of Artificial Sequence: Synthetic peptide
  Seed: LRMKWMMAMKYPITA
LRFKWSMFMKPPITA

SEQ ID NO: 217863 - protein, 15 aa, Artificial Sequence
  Description of Artificial Sequence: Synthetic peptide
  Seed: LRMKWMMAMKYPITA
LRFKWSMFMKQPITA

SEQ ID NO: 217864 - protein, 15 aa, Artificial Sequence
  Description of Artificial Sequence: Synthetic peptide
  Seed: LRMKWMMAMKYPITA
LRFKWSMFMKSPITA

SEQ ID NO: 217865 - protein, 15 aa, Artificial Sequence
  Description of Artificial Sequence: Synthetic peptide
  Seed: LRMKWMMAMKYPITA
LRFKWSMFMKTPITA

SEQ ID NO: 217866 - protein, 15 aa, Artificial Sequence
  Description of Artificial Sequence: Synthetic peptide
  Seed: LRMKWMMAMKYPITA
LRFKWSMFMKYPITA

SEQ ID NO: 217867 - protein, 15 aa, Artificial Sequence
  Description of Artificial Sequence: Synthetic peptide
  Seed: LRMKWMMAMKYPITA
LRFKWSMIMKFPITA

SEQ ID NO: 217868 - protein, 15 aa, Artificial Sequence
  Description of Artificial Sequence: Synthetic peptide
  Seed: LRMKWMMAMKYPITA
LRFKWSMIMKIPITA

SEQ ID NO: 217869 - protein, 15 aa, Artificial Sequence
  Description of Artificial Sequence: Synthetic peptide
  Seed: LRMKWMMAMKYPITA
LRFKWSMIMKLPITA

SEQ ID NO: 217870 - protein, 15 aa, Artificial Sequence
  Description of Artificial Sequence: Synthetic peptide
  Seed: LRMKWMMAMKYPITA
LRFKWSMIMKMPITA

SEQ ID NO: 217871 - protein, 15 aa, Artificial Sequence
  Description of Artificial Sequence: Synthetic peptide
  Seed: LRMKWMMAMKYPITA
LRFKWSMIMKVPITA

SEQ ID NO: 217872 - protein, 15 aa, Artificial Sequence
  Description of Artificial Sequence: Synthetic peptide
  Seed: LRMKWMMAMKYPITA
LRFKWSMIMKYPITA

SEQ ID NO: 217873 - protein, 15 aa, Artificial Sequence
  Description of Artificial Sequence: Synthetic peptide
  Seed: LRMKWMMAMKYPITA
LRFKWSMLMKEPITA

SEQ ID NO: 217874 - protein, 15 aa, Artificial Sequence
  Description of Artificial Sequence: Synthetic peptide
  Seed: LRMKWMMAMKYPITA
LRFKWSMLMKFPITA

SEQ ID NO: 217875 - protein, 15 aa, Artificial Sequence
  Description of Artificial Sequence: Synthetic peptide
  Seed: LRMKWMMAMKYPITA
LRFKWSMLMKIPITA

SEQ ID NO: 217876 - protein, 15 aa, Artificial Sequence
  Description of Artificial Sequence: Synthetic peptide
  Seed: LRMKWMMAMKYPITA
LRFKWSMLMKLPITA

SEQ ID NO: 217877 - protein, 15 aa, Artificial Sequence
  Description of Artificial Sequence: Synthetic peptide
  Seed: LRMKWMMAMKYPITA
LRFKWSMLMKMPITA

SEQ ID NO: 217878 - protein, 15 aa, Artificial Sequence
  Description of Artificial Sequence: Synthetic peptide
  Seed: LRMKWMMAMKYPITA
LRFKWSMLMKVPITA

SEQ ID NO: 217879 - protein, 15 aa, Artificial Sequence
  Description of Artificial Sequence: Synthetic peptide
  Seed: LRMKWMMAMKYPITA
LRFKWSMLMKYPITA

SEQ ID NO: 217880 - protein, 15 aa, Artificial Sequence
  Description of Artificial Sequence: Synthetic peptide
  Seed: LRMKWMMAMKYPITA
LRFKWSMMMKFPITA

SEQ ID NO: 217881 - protein, 15 aa, Artificial Sequence
  Description of Artificial Sequence: Synthetic peptide
  Seed: LRMKWMMAMKYPITA
LRFKWSMMMKIPITA

SEQ ID NO: 217882 - protein, 15 aa, Artificial Sequence
  Description of Artificial Sequence: Synthetic peptide
  Seed: LRMKWMMAMKYPITA
LRFKWSMMMKLPITA

SEQ ID NO: 217883 - protein, 15 aa, Artificial Sequence
  Description of Artificial Sequence: Synthetic peptide
  Seed: LRMKWMMAMKYPITA
LRFKWSMMMKMPITA

SEQ ID NO: 217884 - protein, 15 aa, Artificial Sequence
  Description of Artificial Sequence: Synthetic peptide
  Seed: LRMKWMMAMKYPITA
LRFKWSMMMKVPITA

SEQ ID NO: 217885 - protein, 15 aa, Artificial Sequence
  Description of Artificial Sequence: Synthetic peptide
  Seed: LRMKWMMAMKYPITA
LRFKWSMVMKLPITA

SEQ ID NO: 217886 - protein, 15 aa, Artificial Sequence
  Description of Artificial Sequence: Synthetic peptide
  Seed: LRMKWMMAMKYPITA
LRFKWSMWMKFPITA

SEQ ID NO: 217887 - protein, 15 aa, Artificial Sequence
  Description of Artificial Sequence: Synthetic peptide
  Seed: LRMKWMMAMKYPITA
LRFKWSMWMKIPITA

SEQ ID NO: 217888 - protein, 15 aa, Artificial Sequence
  Description of Artificial Sequence: Synthetic peptide
  Seed: LRMKWMMAMKYPITA
LRFKWSMWMKLPITA

SEQ ID NO: 217889 - protein, 15 aa, Artificial Sequence
  Description of Artificial Sequence: Synthetic peptide
  Seed: LRMKWMMAMKYPITA
LRFKWSMWMKMPITA

SEQ ID NO: 217890 - protein, 15 aa, Artificial Sequence
  Description of Artificial Sequence: Synthetic peptide
  Seed: LRMKWMMAMKYPITA
LRFKWSMWMKVPITA

SEQ ID NO: 217891 - protein, 15 aa, Artificial Sequence
  Description of Artificial Sequence: Synthetic peptide
  Seed: LRMKWMMAMKYPITA
LRFKWSMYMKFPITA

SEQ ID NO: 217892 - protein, 15 aa, Artificial Sequence
  Description of Artificial Sequence: Synthetic peptide
  Seed: LRMKWMMAMKYPITA
LRFKWSMYMKIPITA

SEQ ID NO: 217893 - protein, 15 aa, Artificial Sequence
  Description of Artificial Sequence: Synthetic peptide
  Seed: LRMKWMMAMKYPITA
LRFKWSMYMKLPITA

SEQ ID NO: 217894 - protein, 15 aa, Artificial Sequence
  Description of Artificial Sequence: Synthetic peptide
  Seed: LRMKWMMAMKYPITA
LRFKWSMYMKMPITA

SEQ ID NO: 217895 - protein, 15 aa, Artificial Sequence
  Description of Artificial Sequence: Synthetic peptide
  Seed: LRMKWMMAMKYPITA
LRFKWSMYMKVPITA

SEQ ID NO: 217896 - protein, 15 aa, Artificial Sequence
  Description of Artificial Sequence: Synthetic peptide
  Seed: LRMKWMMAMKYPITA
LRFKWTMFMKAPITA

SEQ ID NO: 217897 - protein, 15 aa, Artificial Sequence
  Description of Artificial Sequence: Synthetic peptide
  Seed: LRMKWMMAMKYPITA
LRFKWTMFMKDPITA

SEQ ID NO: 217898 - protein, 15 aa, Artificial Sequence
  Description of Artificial Sequence: Synthetic peptide
  Seed: LRMKWMMAMKYPITA
LRFKWTMFMKEPITA

SEQ ID NO: 217899 - protein, 15 aa, Artificial Sequence
  Description of Artificial Sequence: Synthetic peptide
  Seed: LRMKWMMAMKYPITA
LRFKWTMFMKFPITA

SEQ ID NO: 217900 - protein, 15 aa, Artificial Sequence
  Description of Artificial Sequence: Synthetic peptide
  Seed: LRMKWMMAMKYPITA
LRFKWTMFMKHPITA

SEQ ID NO: 217901 - protein, 15 aa, Artificial Sequence
  Description of Artificial Sequence: Synthetic peptide
  Seed: LRMKWMMAMKYPITA
LRFKWTMFMKIPITA

SEQ ID NO: 217902 - protein, 15 aa, Artificial Sequence
  Description of Artificial Sequence: Synthetic peptide
  Seed: LRMKWMMAMKYPITA
LRFKWTMFMKLPITA

SEQ ID NO: 217903 - protein, 15 aa, Artificial Sequence
  Description of Artificial Sequence: Synthetic peptide
  Seed: LRMKWMMAMKYPITA
LRFKWTMFMKMPITA

SEQ ID NO: 217904 - protein, 15 aa, Artificial Sequence
  Description of Artificial Sequence: Synthetic peptide
  Seed: LRMKWMMAMKYPITA
LRFKWTMFMKNPITA

SEQ ID NO: 217905 - protein, 15 aa, Artificial Sequence
  Description of Artificial Sequence: Synthetic peptide
  Seed: LRMKWMMAMKYPITA
LRFKWTMFMKPPITA

SEQ ID NO: 217906 - protein, 15 aa, Artificial Sequence
  Description of Artificial Sequence: Synthetic peptide
  Seed: LRMKWMMAMKYPITA
LRFKWTMFMKQPITA

SEQ ID NO: 217907 - protein, 15 aa, Artificial Sequence
  Description of Artificial Sequence: Synthetic peptide
  Seed: LRMKWMMAMKYPITA
LRFKWTMFMKRPITA

SEQ ID NO: 217908 - protein, 15 aa, Artificial Sequence
  Description of Artificial Sequence: Synthetic peptide
  Seed: LRMKWMMAMKYPITA
LRFKWTMFMKSPITA

SEQ ID NO: 217909 - protein, 15 aa, Artificial Sequence
  Description of Artificial Sequence: Synthetic peptide
  Seed: LRMKWMMAMKYPITA
LRFKWTMFMKTPITA

SEQ ID NO: 217910 - protein, 15 aa, Artificial Sequence
  Description of Artificial Sequence: Synthetic peptide
  Seed: LRMKWMMAMKYPITA
LRFKWTMFMKVPITA

SEQ ID NO: 217911 - protein, 15 aa, Artificial Sequence
  Description of Artificial Sequence: Synthetic peptide
  Seed: LRMKWMMAMKYPITA
LRFKWTMFMKYPITA

SEQ ID NO: 217912 - protein, 15 aa, Artificial Sequence
  Description of Artificial Sequence: Synthetic peptide
  Seed: LRMKWMMAMKYPITA
LRFKWTMIMKEPITA

SEQ ID NO: 217913 - protein, 15 aa, Artificial Sequence
  Description of Artificial Sequence: Synthetic peptide
  Seed: LRMKWMMAMKYPITA
LRFKWTMIMKFPITA

SEQ ID NO: 217914 - protein, 15 aa, Artificial Sequence
  Description of Artificial Sequence: Synthetic peptide
  Seed: LRMKWMMAMKYPITA
LRFKWTMIMKIPITA

SEQ ID NO: 217915 - protein, 15 aa, Artificial Sequence
  Description of Artificial Sequence: Synthetic peptide
  Seed: LRMKWMMAMKYPITA
LRFKWTMIMKLPITA

SEQ ID NO: 217916 - protein, 15 aa, Artificial Sequence
  Description of Artificial Sequence: Synthetic peptide
  Seed: LRMKWMMAMKYPITA
LRFKWTMIMKMPITA

SEQ ID NO: 217917 - protein, 15 aa, Artificial Sequence
  Description of Artificial Sequence: Synthetic peptide
  Seed: LRMKWMMAMKYPITA
LRFKWTMIMKNPITA

SEQ ID NO: 217918 - protein, 15 aa, Artificial Sequence
  Description of Artificial Sequence: Synthetic peptide
  Seed: LRMKWMMAMKYPITA
LRFKWTMIMKVPITA

SEQ ID NO: 217919 - protein, 15 aa, Artificial Sequence
  Description of Artificial Sequence: Synthetic peptide
  Seed: LRMKWMMAMKYPITA
LRFKWTMIMKYPITA

SEQ ID NO: 217920 - protein, 15 aa, Artificial Sequence
  Description of Artificial Sequence: Synthetic peptide
  Seed: LRMKWMMAMKYPITA
LRFKWTMLMKAPITA

SEQ ID NO: 217921 - protein, 15 aa, Artificial Sequence
  Description of Artificial Sequence: Synthetic peptide
  Seed: LRMKWMMAMKYPITA
LRFKWTMLMKDPITA

SEQ ID NO: 217922 - protein, 15 aa, Artificial Sequence
  Description of Artificial Sequence: Synthetic peptide
  Seed: LRMKWMMAMKYPITA
LRFKWTMLMKEPITA

SEQ ID NO: 217923 - protein, 15 aa, Artificial Sequence
  Description of Artificial Sequence: Synthetic peptide
  Seed: LRMKWMMAMKYPITA
LRFKWTMLMKFPITA

SEQ ID NO: 217924 - protein, 15 aa, Artificial Sequence
  Description of Artificial Sequence: Synthetic peptide
  Seed: LRMKWMMAMKYPITA
LRFKWTMLMKIPITA

SEQ ID NO: 217925 - protein, 15 aa, Artificial Sequence
  Description of Artificial Sequence: Synthetic peptide
  Seed: LRMKWMMAMKYPITA
LRFKWTMLMKLPITA

SEQ ID NO: 217926 - protein, 15 aa, Artificial Sequence
  Description of Artificial Sequence: Synthetic peptide
  Seed: LRMKWMMAMKYPITA
LRFKWTMLMKMPITA

SEQ ID NO: 217927 - protein, 15 aa, Artificial Sequence
  Description of Artificial Sequence: Synthetic peptide
  Seed: LRMKWMMAMKYPITA
LRFKWTMLMKNPITA

SEQ ID NO: 217928 - protein, 15 aa, Artificial Sequence
  Description of Artificial Sequence: Synthetic peptide
  Seed: LRMKWMMAMKYPITA
LRFKWTMLMKSPITA

SEQ ID NO: 217929 - protein, 15 aa, Artificial Sequence
  Description of Artificial Sequence: Synthetic peptide
  Seed: LRMKWMMAMKYPITA
LRFKWTMLMKTPITA

SEQ ID NO: 217930 - protein, 15 aa, Artificial Sequence
  Description of Artificial Sequence: Synthetic peptide
  Seed: LRMKWMMAMKYPITA
LRFKWTMLMKVPITA

SEQ ID NO: 217931 - protein, 15 aa, Artificial Sequence
  Description of Artificial Sequence: Synthetic peptide
  Seed: LRMKWMMAMKYPITA
LRFKWTMLMKYPITA

SEQ ID NO: 217932 - protein, 15 aa, Artificial Sequence
  Description of Artificial Sequence: Synthetic peptide
  Seed: LRMKWMMAMKYPITA
LRFKWTMMMKFPITA

SEQ ID NO: 217933 - protein, 15 aa, Artificial Sequence
  Description of Artificial Sequence: Synthetic peptide
  Seed: LRMKWMMAMKYPITA
LRFKWTMMMKIPITA

SEQ ID NO: 217934 - protein, 15 aa, Artificial Sequence
  Description of Artificial Sequence: Synthetic peptide
  Seed: LRMKWMMAMKYPITA
LRFKWTMMMKLPITA

SEQ ID NO: 217935 - protein, 15 aa, Artificial Sequence
  Description of Artificial Sequence: Synthetic peptide
  Seed: LRMKWMMAMKYPITA
LRFKWTMMMKMPITA

SEQ ID NO: 217936 - protein, 15 aa, Artificial Sequence
  Description of Artificial Sequence: Synthetic peptide
  Seed: LRMKWMMAMKYPITA
LRFKWTMMMKVPITA

SEQ ID NO: 217937 - protein, 15 aa, Artificial Sequence
  Description of Artificial Sequence: Synthetic peptide
  Seed: LRMKWMMAMKYPITA
LRFKWTMMMKYPITA

SEQ ID NO: 217938 - protein, 15 aa, Artificial Sequence
  Description of Artificial Sequence: Synthetic peptide
  Seed: LRMKWMMAMKYPITA
LRFKWTMVMKIPITA

SEQ ID NO: 217939 - protein, 15 aa, Artificial Sequence
  Description of Artificial Sequence: Synthetic peptide
  Seed: LRMKWMMAMKYPITA
LRFKWTMVMKLPITA

SEQ ID NO: 217940 - protein, 15 aa, Artificial Sequence
  Description of Artificial Sequence: Synthetic peptide
  Seed: LRMKWMMAMKYPITA
LRFKWTMVMKMPITA

SEQ ID NO: 217941 - protein, 15 aa, Artificial Sequence
  Description of Artificial Sequence: Synthetic peptide
  Seed: LRMKWMMAMKYPITA
LRFKWTMVMKVPITA

SEQ ID NO: 217942 - protein, 15 aa, Artificial Sequence
  Description of Artificial Sequence: Synthetic peptide
  Seed: LRMKWMMAMKYPITA
LRFKWTMWMKFPITA

SEQ ID NO: 217943 - protein, 15 aa, Artificial Sequence
  Description of Artificial Sequence: Synthetic peptide
  Seed: LRMKWMMAMKYPITA
LRFKWTMWMKIPITA

SEQ ID NO: 217944 - protein, 15 aa, Artificial Sequence
  Description of Artificial Sequence: Synthetic peptide
  Seed: LRMKWMMAMKYPITA
LRFKWTMWMKLPITA

SEQ ID NO: 217945 - protein, 15 aa, Artificial Sequence
  Description of Artificial Sequence: Synthetic peptide
  Seed: LRMKWMMAMKYPITA
LRFKWTMWMKMPITA

SEQ ID NO: 217946 - protein, 15 aa, Artificial Sequence
  Description of Artificial Sequence: Synthetic peptide
  Seed: LRMKWMMAMKYPITA
LRFKWTMWMKVPITA

SEQ ID NO: 217947 - protein, 15 aa, Artificial Sequence
  Description of Artificial Sequence: Synthetic peptide
  Seed: LRMKWMMAMKYPITA
LRFKWTMYMKFPITA

SEQ ID NO: 217948 - protein, 15 aa, Artificial Sequence
  Description of Artificial Sequence: Synthetic peptide
  Seed: LRMKWMMAMKYPITA
LRFKWTMYMKIPITA

SEQ ID NO: 217949 - protein, 15 aa, Artificial Sequence
  Description of Artificial Sequence: Synthetic peptide
  Seed: LRMKWMMAMKYPITA
LRFKWTMYMKLPITA

SEQ ID NO: 217950 - protein, 15 aa, Artificial Sequence
  Description of Artificial Sequence: Synthetic peptide
  Seed: LRMKWMMAMKYPITA
LRFKWTMYMKMPITA

SEQ ID NO: 217951 - protein, 15 aa, Artificial Sequence
  Description of Artificial Sequence: Synthetic peptide
  Seed: LRMKWMMAMKYPITA
LRFKWTMYMKVPITA

SEQ ID NO: 217952 - protein, 15 aa, Artificial Sequence
  Description of Artificial Sequence: Synthetic peptide
  Seed: LRMKWMMAMKYPITA
LRFKWVMAMKVPITA

SEQ ID NO: 217953 - protein, 15 aa, Artificial Sequence
  Description of Artificial Sequence: Synthetic peptide
  Seed: LRMKWMMAMKYPITA
LRFKWVMFMKDPITA

SEQ ID NO: 217954 - protein, 15 aa, Artificial Sequence
  Description of Artificial Sequence: Synthetic peptide
  Seed: LRMKWMMAMKYPITA
LRFKWVMFMKEPITA

SEQ ID NO: 217955 - protein, 15 aa, Artificial Sequence
  Description of Artificial Sequence: Synthetic peptide
  Seed: LRMKWMMAMKYPITA
LRFKWVMFMKHPITA

SEQ ID NO: 217956 - protein, 15 aa, Artificial Sequence
  Description of Artificial Sequence: Synthetic peptide
  Seed: LRMKWMMAMKYPITA
LRFKWVMFMKLPITA

SEQ ID NO: 217957 - protein, 15 aa, Artificial Sequence
  Description of Artificial Sequence: Synthetic peptide
  Seed: LRMKWMMAMKYPITA
LRFKWVMFMKMPITA

SEQ ID NO: 217958 - protein, 15 aa, Artificial Sequence
  Description of Artificial Sequence: Synthetic peptide
  Seed: LRMKWMMAMKYPITA
LRFKWVMFMKNPITA

SEQ ID NO: 217959 - protein, 15 aa, Artificial Sequence
  Description of Artificial Sequence: Synthetic peptide
  Seed: LRMKWMMAMKYPITA
LRFKWVMFMKVPITA

SEQ ID NO: 217960 - protein, 15 aa, Artificial Sequence
  Description of Artificial Sequence: Synthetic peptide
  Seed: LRMKWMMAMKYPITA
LRFKWVMFMKYPITA

SEQ ID NO: 217961 - protein, 15 aa, Artificial Sequence
  Description of Artificial Sequence: Synthetic peptide
  Seed: LRMKWMMAMKYPITA
LRFKWVMLMKEPITA

SEQ ID NO: 217962 - protein, 15 aa, Artificial Sequence
  Description of Artificial Sequence: Synthetic peptide
  Seed: LRMKWMMAMKYPITA
LRFKWVMTMKSPITA

SEQ ID NO: 217963 - protein, 15 aa, Artificial Sequence
  Description of Artificial Sequence: Synthetic peptide
  Seed: LRMKWMMAMKYPITA
LRFKWVMYMKLPITA

SEQ ID NO: 217964 - protein, 15 aa, Artificial Sequence
  Description of Artificial Sequence: Synthetic peptide
  Seed: LRMKWMMAMKYPITA
LRFKWWMAMKVPITA

SEQ ID NO: 217965 - protein, 15 aa, Artificial Sequence
  Description of Artificial Sequence: Synthetic peptide
  Seed: LRMKWMMAMKYPITA
LRFKWWMNMKAPITA

SEQ ID NO: 217966 - protein, 15 aa, Artificial Sequence
  Description of Artificial Sequence: Synthetic peptide
  Seed: LRMKWMMAMKYPITA
LRFKWWMNMKIPITA

SEQ ID NO: 217967 - protein, 15 aa, Artificial Sequence
  Description of Artificial Sequence: Synthetic peptide
  Seed: LRMKWMMAMKYPITA
LRFKWWMNMKLPITA

SEQ ID NO: 217968 - protein, 15 aa, Artificial Sequence
  Description of Artificial Sequence: Synthetic peptide
  Seed: LRMKWMMAMKYPITA
LRFKWWMNMKVPITA

SEQ ID NO: 217969 - protein, 15 aa, Artificial Sequence
  Description of Artificial Sequence: Synthetic peptide
  Seed: LRMKWMMAMKYPITA
LRFKWWMSMKAPITA

SEQ ID NO: 217970 - protein, 15 aa, Artificial Sequence
  Description of Artificial Sequence: Synthetic peptide
  Seed: LRMKWMMAMKYPITA
LRFKWWMSMKIPITA

SEQ ID NO: 217971 - protein, 15 aa, Artificial Sequence
  Description of Artificial Sequence: Synthetic peptide
  Seed: LRMKWMMAMKYPITA
LRFKWWMSMKLPITA

SEQ ID NO: 217972 - protein, 15 aa, Artificial Sequence
  Description of Artificial Sequence: Synthetic peptide
  Seed: LRMKWMMAMKYPITA
LRFKWWMSMKMPITA

SEQ ID NO: 217973 - protein, 15 aa, Artificial Sequence
  Description of Artificial Sequence: Synthetic peptide
  Seed: LRMKWMMAMKYPITA
LRFKWWMSMKVPITA

SEQ ID NO: 217974 - protein, 15 aa, Artificial Sequence
  Description of Artificial Sequence: Synthetic peptide
  Seed: LRMKWMMAMKYPITA
LRFKWYMAMKAPITA

SEQ ID NO: 217975 - protein, 15 aa, Artificial Sequence
  Description of Artificial Sequence: Synthetic peptide
  Seed: LRMKWMMAMKYPITA
LRFKWYMAMKIPITA

SEQ ID NO: 217976 - protein, 15 aa, Artificial Sequence
  Description of Artificial Sequence: Synthetic peptide
  Seed: LRMKWMMAMKYPITA
LRFKWYMAMKLPITA

SEQ ID NO: 217977 - protein, 15 aa, Artificial Sequence
  Description of Artificial Sequence: Synthetic peptide
  Seed: LRMKWMMAMKYPITA
LRFKWYMAMKMPITA

SEQ ID NO: 217978 - protein, 15 aa, Artificial Sequence
  Description of Artificial Sequence: Synthetic peptide
  Seed: LRMKWMMAMKYPITA
LRFKWYMAMKSPITA

SEQ ID NO: 217979 - protein, 15 aa, Artificial Sequence
  Description of Artificial Sequence: Synthetic peptide
  Seed: LRMKWMMAMKYPITA
LRFKWYMAMKTPITA

SEQ ID NO: 217980 - protein, 15 aa, Artificial Sequence
  Description of Artificial Sequence: Synthetic peptide
  Seed: LRMKWMMAMKYPITA
LRFKWYMAMKVPITA

SEQ ID NO: 217981 - protein, 15 aa, Artificial Sequence
  Description of Artificial Sequence: Synthetic peptide
  Seed: LRMKWMMAMKYPITA
LRFKWYMAMKYPITA

SEQ ID NO: 217982 - protein, 15 aa, Artificial Sequence
  Description of Artificial Sequence: Synthetic peptide
  Seed: LRMKWMMAMKYPITA
LRFKWYMGMKAPITA

SEQ ID NO: 217983 - protein, 15 aa, Artificial Sequence
  Description of Artificial Sequence: Synthetic peptide
  Seed: LRMKWMMAMKYPITA
LRFKWYMGMKIPITA

SEQ ID NO: 217984 - protein, 15 aa, Artificial Sequence
  Description of Artificial Sequence: Synthetic peptide
  Seed: LRMKWMMAMKYPITA
LRFKWYMGMKLPITA

SEQ ID NO: 217985 - protein, 15 aa, Artificial Sequence
  Description of Artificial Sequence: Synthetic peptide
  Seed: LRMKWMMAMKYPITA
LRFKWYMGMKMPITA

SEQ ID NO: 217986 - protein, 15 aa, Artificial Sequence
  Description of Artificial Sequence: Synthetic peptide
  Seed: LRMKWMMAMKYPITA
LRFKWYMGMKSPITA

SEQ ID NO: 217987 - protein, 15 aa, Artificial Sequence
  Description of Artificial Sequence: Synthetic peptide
  Seed: LRMKWMMAMKYPITA
LRFKWYMGMKTPITA

SEQ ID NO: 217988 - protein, 15 aa, Artificial Sequence
  Description of Artificial Sequence: Synthetic peptide
  Seed: LRMKWMMAMKYPITA
LRFKWYMGMKVPITA

SEQ ID NO: 217989 - protein, 15 aa, Artificial Sequence
  Description of Artificial Sequence: Synthetic peptide
  Seed: LRMKWMMAMKYPITA
LRFKWYMNMKAPITA

SEQ ID NO: 217990 - protein, 15 aa, Artificial Sequence
  Description of Artificial Sequence: Synthetic peptide
  Seed: LRMKWMMAMKYPITA
LRFKWYMNMKFPITA

SEQ ID NO: 217991 - protein, 15 aa, Artificial Sequence
  Description of Artificial Sequence: Synthetic peptide
  Seed: LRMKWMMAMKYPITA
LRFKWYMNMKGPITA

SEQ ID NO: 217992 - protein, 15 aa, Artificial Sequence
  Description of Artificial Sequence: Synthetic peptide
  Seed: LRMKWMMAMKYPITA
LRFKWYMNMKIPITA

SEQ ID NO: 217993 - protein, 15 aa, Artificial Sequence
  Description of Artificial Sequence: Synthetic peptide
  Seed: LRMKWMMAMKYPITA
LRFKWYMNMKLPITA

SEQ ID NO: 217994 - protein, 15 aa, Artificial Sequence
  Description of Artificial Sequence: Synthetic peptide
  Seed: LRMKWMMAMKYPITA
LRFKWYMNMKMPITA

SEQ ID NO: 217995 - protein, 15 aa, Artificial Sequence
  Description of Artificial Sequence: Synthetic peptide
  Seed: LRMKWMMAMKYPITA
LRFKWYMNMKSPITA

SEQ ID NO: 217996 - protein, 15 aa, Artificial Sequence
  Description of Artificial Sequence: Synthetic peptide
  Seed: LRMKWMMAMKYPITA
LRFKWYMNMKTPITA

SEQ ID NO: 217997 - protein, 15 aa, Artificial Sequence
  Description of Artificial Sequence: Synthetic peptide
  Seed: LRMKWMMAMKYPITA
LRFKWYMNMKVPITA

SEQ ID NO: 217998 - protein, 15 aa, Artificial Sequence
  Description of Artificial Sequence: Synthetic peptide
  Seed: LRMKWMMAMKYPITA
LRFKWYMNMKYPITA

SEQ ID NO: 217999 - protein, 15 aa, Artificial Sequence
  Description of Artificial Sequence: Synthetic peptide
  Seed: LRMKWMMAMKYPITA
LRFKWYMSMKAPITA

SEQ ID NO: 218000 - protein, 15 aa, Artificial Sequence
  Description of Artificial Sequence: Synthetic peptide
  Seed: LRMKWMMAMKYPITA
LRFKWYMSMKFPITA

SEQ ID NO: 218001 - protein, 15 aa, Artificial Sequence
  Description of Artificial Sequence: Synthetic peptide
  Seed: LRMKWMMAMKYPITA
LRFKWYMSMKGPITA

SEQ ID NO: 218002 - protein, 15 aa, Artificial Sequence
  Description of Artificial Sequence: Synthetic peptide
  Seed: LRMKWMMAMKYPITA
LRFKWYMSMKHPITA

SEQ ID NO: 218003 - protein, 15 aa, Artificial Sequence
  Description of Artificial Sequence: Synthetic peptide
  Seed: LRMKWMMAMKYPITA
LRFKWYMSMKIPITA

SEQ ID NO: 218004 - protein, 15 aa, Artificial Sequence
  Description of Artificial Sequence: Synthetic peptide
  Seed: LRMKWMMAMKYPITA
LRFKWYMSMKLPITA

SEQ ID NO: 218005 - protein, 15 aa, Artificial Sequence
  Description of Artificial Sequence: Synthetic peptide
  Seed: LRMKWMMAMKYPITA
LRFKWYMSMKMPITA

SEQ ID NO: 218006 - protein, 15 aa, Artificial Sequence
  Description of Artificial Sequence: Synthetic peptide
  Seed: LRMKWMMAMKYPITA
LRFKWYMSMKRPITA

SEQ ID NO: 218007 - protein, 15 aa, Artificial Sequence
  Description of Artificial Sequence: Synthetic peptide
  Seed: LRMKWMMAMKYPITA
LRFKWYMSMKSPITA

SEQ ID NO: 218008 - protein, 15 aa, Artificial Sequence
  Description of Artificial Sequence: Synthetic peptide
  Seed: LRMKWMMAMKYPITA
LRFKWYMSMKTPITA

SEQ ID NO: 218009 - protein, 15 aa, Artificial Sequence
  Description of Artificial Sequence: Synthetic peptide
  Seed: LRMKWMMAMKYPITA
LRFKWYMSMKVPITA

SEQ ID NO: 218010 - protein, 15 aa, Artificial Sequence
  Description of Artificial Sequence: Synthetic peptide
  Seed: LRMKWMMAMKYPITA
LRFKWYMSMKYPITA

SEQ ID NO: 218011 - protein, 15 aa, Artificial Sequence
  Description of Artificial Sequence: Synthetic peptide
  Seed: LRMKWMMAMKYPITA
LRFKWYMTMKAPITA

SEQ ID NO: 218012 - protein, 15 aa, Artificial Sequence
  Description of Artificial Sequence: Synthetic peptide
  Seed: LRMKWMMAMKYPITA
LRFKWYMTMKIPITA

SEQ ID NO: 218013 - protein, 15 aa, Artificial Sequence
  Description of Artificial Sequence: Synthetic peptide
  Seed: LRMKWMMAMKYPITA
LRFKWYMTMKLPITA

SEQ ID NO: 218014 - protein, 15 aa, Artificial Sequence
  Description of Artificial Sequence: Synthetic peptide
  Seed: LRMKWMMAMKYPITA
LRFKWYMTMKSPITA

SEQ ID NO: 218015 - protein, 15 aa, Artificial Sequence
  Description of Artificial Sequence: Synthetic peptide
  Seed: LRMKWMMAMKYPITA
LRFKWYMTMKVPITA

SEQ ID NO: 218016 - protein, 15 aa, Artificial Sequence
  Description of Artificial Sequence: Synthetic peptide
  Seed: LRMKWMMAMKYPITA
LRIKWAMAMKAPITA

SEQ ID NO: 218017 - protein, 15 aa, Artificial Sequence
  Description of Artificial Sequence: Synthetic peptide
  Seed: LRMKWMMAMKYPITA
LRIKWAMAMKIPITA

SEQ ID NO: 218018 - protein, 15 aa, Artificial Sequence
  Description of Artificial Sequence: Synthetic peptide
  Seed: LRMKWMMAMKYPITA
LRIKWAMAMKLPITA

SEQ ID NO: 218019 - protein, 15 aa, Artificial Sequence
  Description of Artificial Sequence: Synthetic peptide
  Seed: LRMKWMMAMKYPITA
LRIKWAMAMKMPITA

SEQ ID NO: 218020 - protein, 15 aa, Artificial Sequence
  Description of Artificial Sequence: Synthetic peptide
  Seed: LRMKWMMAMKYPITA
LRIKWAMAMKSPITA

SEQ ID NO: 218021 - protein, 15 aa, Artificial Sequence
  Description of Artificial Sequence: Synthetic peptide
  Seed: LRMKWMMAMKYPITA
LRIKWAMAMKTPITA

SEQ ID NO: 218022 - protein, 15 aa, Artificial Sequence
  Description of Artificial Sequence: Synthetic peptide
  Seed: LRMKWMMAMKYPITA
LRIKWAMAMKVPITA

SEQ ID NO: 218023 - protein, 15 aa, Artificial Sequence
  Description of Artificial Sequence: Synthetic peptide
  Seed: LRMKWMMAMKYPITA
LRIKWAMFMKDPITA

SEQ ID NO: 218024 - protein, 15 aa, Artificial Sequence
  Description of Artificial Sequence: Synthetic peptide
  Seed: LRMKWMMAMKYPITA
LRIKWAMFMKEPITA

SEQ ID NO: 218025 - protein, 15 aa, Artificial Sequence
  Description of Artificial Sequence: Synthetic peptide
  Seed: LRMKWMMAMKYPITA
LRIKWAMFMKFPITA

SEQ ID NO: 218026 - protein, 15 aa, Artificial Sequence
  Description of Artificial Sequence: Synthetic peptide
  Seed: LRMKWMMAMKYPITA
LRIKWAMFMKIPITA

SEQ ID NO: 218027 - protein, 15 aa, Artificial Sequence
  Description of Artificial Sequence: Synthetic peptide
  Seed: LRMKWMMAMKYPITA
LRIKWAMFMKLPITA

SEQ ID NO: 218028 - protein, 15 aa, Artificial Sequence
  Description of Artificial Sequence: Synthetic peptide
  Seed: LRMKWMMAMKYPITA
LRIKWAMFMKMPITA

SEQ ID NO: 218029 - protein, 15 aa, Artificial Sequence
  Description of Artificial Sequence: Synthetic peptide
  Seed: LRMKWMMAMKYPITA
LRIKWAMFMKNPITA

SEQ ID NO: 218030 - protein, 15 aa, Artificial Sequence
  Description of Artificial Sequence: Synthetic peptide
  Seed: LRMKWMMAMKYPITA
LRIKWAMFMKVPITA

SEQ ID NO: 218031 - protein, 15 aa, Artificial Sequence
  Description of Artificial Sequence: Synthetic peptide
  Seed: LRMKWMMAMKYPITA
LRIKWAMGMKAPITA

SEQ ID NO: 218032 - protein, 15 aa, Artificial Sequence
  Description of Artificial Sequence: Synthetic peptide
  Seed: LRMKWMMAMKYPITA
LRIKWAMGMKIPITA

SEQ ID NO: 218033 - protein, 15 aa, Artificial Sequence
  Description of Artificial Sequence: Synthetic peptide
  Seed: LRMKWMMAMKYPITA
LRIKWAMGMKLPITA

SEQ ID NO: 218034 - protein, 15 aa, Artificial Sequence
  Description of Artificial Sequence: Synthetic peptide
  Seed: LRMKWMMAMKYPITA
LRIKWAMGMKMPITA

SEQ ID NO: 218035 - protein, 15 aa, Artificial Sequence
  Description of Artificial Sequence: Synthetic peptide
  Seed: LRMKWMMAMKYPITA
LRIKWAMGMKVPITA

SEQ ID NO: 218036 - protein, 15 aa, Artificial Sequence
  Description of Artificial Sequence: Synthetic peptide
  Seed: LRMKWMMAMKYPITA
LRIKWAMNMKAPITA

SEQ ID NO: 218037 - protein, 15 aa, Artificial Sequence
  Description of Artificial Sequence: Synthetic peptide
  Seed: LRMKWMMAMKYPITA
LRIKWAMNMKGPITA

SEQ ID NO: 218038 - protein, 15 aa, Artificial Sequence
  Description of Artificial Sequence: Synthetic peptide
  Seed: LRMKWMMAMKYPITA
LRIKWAMNMKIPITA

SEQ ID NO: 218039 - protein, 15 aa, Artificial Sequence
  Description of Artificial Sequence: Synthetic peptide
  Seed: LRMKWMMAMKYPITA
LRIKWAMNMKLPITA

SEQ ID NO: 218040 - protein, 15 aa, Artificial Sequence
  Description of Artificial Sequence: Synthetic peptide
  Seed: LRMKWMMAMKYPITA
LRIKWAMNMKSPITA

SEQ ID NO: 218041 - protein, 15 aa, Artificial Sequence
  Description of Artificial Sequence: Synthetic peptide
  Seed: LRMKWMMAMKYPITA
LRIKWAMNMKVPITA

SEQ ID NO: 218042 - protein, 15 aa, Artificial Sequence
  Description of Artificial Sequence: Synthetic peptide
  Seed: LRMKWMMAMKYPITA
LRIKWAMPMKAPITA

SEQ ID NO: 218043 - protein, 15 aa, Artificial Sequence
  Description of Artificial Sequence: Synthetic peptide
  Seed: LRMKWMMAMKYPITA
LRIKWAMPMKIPITA

SEQ ID NO: 218044 - protein, 15 aa, Artificial Sequence
  Description of Artificial Sequence: Synthetic peptide
  Seed: LRMKWMMAMKYPITA
LRIKWAMPMKLPITA

SEQ ID NO: 218045 - protein, 15 aa, Artificial Sequence
  Description of Artificial Sequence: Synthetic peptide
  Seed: LRMKWMMAMKYPITA
LRIKWAMPMKVPITA

SEQ ID NO: 218046 - protein, 15 aa, Artificial Sequence
  Description of Artificial Sequence: Synthetic peptide
  Seed: LRMKWMMAMKYPITA
LRIKWAMSMKAPITA

SEQ ID NO: 218047 - protein, 15 aa, Artificial Sequence
  Description of Artificial Sequence: Synthetic peptide
  Seed: LRMKWMMAMKYPITA
LRIKWAMSMKIPITA

SEQ ID NO: 218048 - protein, 15 aa, Artificial Sequence
  Description of Artificial Sequence: Synthetic peptide
  Seed: LRMKWMMAMKYPITA
LRIKWAMSMKLPITA

SEQ ID NO: 218049 - protein, 15 aa, Artificial Sequence
  Description of Artificial Sequence: Synthetic peptide
  Seed: LRMKWMMAMKYPITA
LRIKWAMSMKMPITA

SEQ ID NO: 218050 - protein, 15 aa, Artificial Sequence
  Description of Artificial Sequence: Synthetic peptide
  Seed: LRMKWMMAMKYPITA
LRIKWAMSMKSPITA

SEQ ID NO: 218051 - protein, 15 aa, Artificial Sequence
  Description of Artificial Sequence: Synthetic peptide
  Seed: LRMKWMMAMKYPITA
LRIKWAMSMKVPITA

SEQ ID NO: 218052 - protein, 15 aa, Artificial Sequence
  Description of Artificial Sequence: Synthetic peptide
  Seed: LRMKWMMAMKYPITA
LRIKWAMTMKAPITA

SEQ ID NO: 218053 - protein, 15 aa, Artificial Sequence
  Description of Artificial Sequence: Synthetic peptide
  Seed: LRMKWMMAMKYPITA
LRIKWAMTMKGPITA

SEQ ID NO: 218054 - protein, 15 aa, Artificial Sequence
  Description of Artificial Sequence: Synthetic peptide
  Seed: LRMKWMMAMKYPITA
LRIKWAMTMKSPITA

SEQ ID NO: 218055 - protein, 15 aa, Artificial Sequence
  Description of Artificial Sequence: Synthetic peptide
  Seed: LRMKWMMAMKYPITA
LRIKWDMFMKLPITA

SEQ ID NO: 218056 - protein, 15 aa, Artificial Sequence
  Description of Artificial Sequence: Synthetic peptide
  Seed: LRMKWMMAMKYPITA
LRIKWDMFMKVPITA

SEQ ID NO: 218057 - protein, 15 aa, Artificial Sequence
  Description of Artificial Sequence: Synthetic peptide
  Seed: LRMKWMMAMKYPITA
LRIKWEMFMKAPITA

SEQ ID NO: 218058 - protein, 15 aa, Artificial Sequence
  Description of Artificial Sequence: Synthetic peptide
  Seed: LRMKWMMAMKYPITA
LRIKWEMFMKEPITA

SEQ ID NO: 218059 - protein, 15 aa, Artificial Sequence
  Description of Artificial Sequence: Synthetic peptide
  Seed: LRMKWMMAMKYPITA
LRIKWEMFMKFPITA

SEQ ID NO: 218060 - protein, 15 aa, Artificial Sequence
  Description of Artificial Sequence: Synthetic peptide
  Seed: LRMKWMMAMKYPITA
LRIKWEMFMKIPITA

SEQ ID NO: 218061 - protein, 15 aa, Artificial Sequence
  Description of Artificial Sequence: Synthetic peptide
  Seed: LRMKWMMAMKYPITA
LRIKWEMFMKLPITA

SEQ ID NO: 218062 - protein, 15 aa, Artificial Sequence
  Description of Artificial Sequence: Synthetic peptide
  Seed: LRMKWMMAMKYPITA
LRIKWEMFMKMPITA

SEQ ID NO: 218063 - protein, 15 aa, Artificial Sequence
  Description of Artificial Sequence: Synthetic peptide
  Seed: LRMKWMMAMKYPITA
LRIKWEMFMKNPITA

SEQ ID NO: 218064 - protein, 15 aa, Artificial Sequence
  Description of Artificial Sequence: Synthetic peptide
  Seed: LRMKWMMAMKYPITA
LRIKWEMFMKSPITA

SEQ ID NO: 218065 - protein, 15 aa, Artificial Sequence
  Description of Artificial Sequence: Synthetic peptide
  Seed: LRMKWMMAMKYPITA
LRIKWEMFMKTPITA

SEQ ID NO: 218066 - protein, 15 aa, Artificial Sequence
  Description of Artificial Sequence: Synthetic peptide
  Seed: LRMKWMMAMKYPITA
LRIKWEMFMKVPITA

SEQ ID NO: 218067 - protein, 15 aa, Artificial Sequence
  Description of Artificial Sequence: Synthetic peptide
  Seed: LRMKWMMAMKYPITA
LRIKWEMFMKYPITA

SEQ ID NO: 218068 - protein, 15 aa, Artificial Sequence
  Description of Artificial Sequence: Synthetic peptide
  Seed: LRMKWMMAMKYPITA
LRIKWEMIMKLPITA

SEQ ID NO: 218069 - protein, 15 aa, Artificial Sequence
  Description of Artificial Sequence: Synthetic peptide
  Seed: LRMKWMMAMKYPITA
LRIKWEMLMKLPITA

SEQ ID NO: 218070 - protein, 15 aa, Artificial Sequence
  Description of Artificial Sequence: Synthetic peptide
  Seed: LRMKWMMAMKYPITA
LRIKWFMAMKAPITA

SEQ ID NO: 218071 - protein, 15 aa, Artificial Sequence
  Description of Artificial Sequence: Synthetic peptide
  Seed: LRMKWMMAMKYPITA
LRIKWFMAMKFPITA

SEQ ID NO: 218072 - protein, 15 aa, Artificial Sequence
  Description of Artificial Sequence: Synthetic peptide
  Seed: LRMKWMMAMKYPITA
LRIKWFMAMKGPITA

SEQ ID NO: 218073 - protein, 15 aa, Artificial Sequence
  Description of Artificial Sequence: Synthetic peptide
  Seed: LRMKWMMAMKYPITA
LRIKWFMAMKHPITA

SEQ ID NO: 218074 - protein, 15 aa, Artificial Sequence
  Description of Artificial Sequence: Synthetic peptide
  Seed: LRMKWMMAMKYPITA
LRIKWFMAMKIPITA

SEQ ID NO: 218075 - protein, 15 aa, Artificial Sequence
  Description of Artificial Sequence: Synthetic peptide
  Seed: LRMKWMMAMKYPITA
LRIKWFMAMKLPITA

SEQ ID NO: 218076 - protein, 15 aa, Artificial Sequence
  Description of Artificial Sequence: Synthetic peptide
  Seed: LRMKWMMAMKYPITA
LRIKWFMAMKMPITA

SEQ ID NO: 218077 - protein, 15 aa, Artificial Sequence
  Description of Artificial Sequence: Synthetic peptide
  Seed: LRMKWMMAMKYPITA
LRIKWFMAMKRPITA

SEQ ID NO: 218078 - protein, 15 aa, Artificial Sequence
  Description of Artificial Sequence: Synthetic peptide
  Seed: LRMKWMMAMKYPITA
LRIKWFMAMKSPITA

SEQ ID NO: 218079 - protein, 15 aa, Artificial Sequence
  Description of Artificial Sequence: Synthetic peptide
  Seed: LRMKWMMAMKYPITA
LRIKWFMAMKTPITA

SEQ ID NO: 218080 - protein, 15 aa, Artificial Sequence
  Description of Artificial Sequence: Synthetic peptide
  Seed: LRMKWMMAMKYPITA
LRIKWFMAMKVPITA

SEQ ID NO: 218081 - protein, 15 aa, Artificial Sequence
  Description of Artificial Sequence: Synthetic peptide
  Seed: LRMKWMMAMKYPITA
LRIKWFMAMKYPITA

SEQ ID NO: 218082 - protein, 15 aa, Artificial Sequence
  Description of Artificial Sequence: Synthetic peptide
  Seed: LRMKWMMAMKYPITA
LRIKWFMDMKAPITA

SEQ ID NO: 218083 - protein, 15 aa, Artificial Sequence
  Description of Artificial Sequence: Synthetic peptide
  Seed: LRMKWMMAMKYPITA
LRIKWFMDMKIPITA

SEQ ID NO: 218084 - protein, 15 aa, Artificial Sequence
  Description of Artificial Sequence: Synthetic peptide
  Seed: LRMKWMMAMKYPITA
LRIKWFMDMKLPITA

SEQ ID NO: 218085 - protein, 15 aa, Artificial Sequence
  Description of Artificial Sequence: Synthetic peptide
  Seed: LRMKWMMAMKYPITA
LRIKWFMDMKMPITA

SEQ ID NO: 218086 - protein, 15 aa, Artificial Sequence
  Description of Artificial Sequence: Synthetic peptide
  Seed: LRMKWMMAMKYPITA
LRIKWFMDMKVPITA

SEQ ID NO: 218087 - protein, 15 aa, Artificial Sequence
  Description of Artificial Sequence: Synthetic peptide
  Seed: LRMKWMMAMKYPITA
LRIKWFMGMKAPITA

SEQ ID NO: 218088 - protein, 15 aa, Artificial Sequence
  Description of Artificial Sequence: Synthetic peptide
  Seed: LRMKWMMAMKYPITA
LRIKWFMGMKFPITA

SEQ ID NO: 218089 - protein, 15 aa, Artificial Sequence
  Description of Artificial Sequence: Synthetic peptide
  Seed: LRMKWMMAMKYPITA
LRIKWFMGMKGPITA

SEQ ID NO: 218090 - protein, 15 aa, Artificial Sequence
  Description of Artificial Sequence: Synthetic peptide
  Seed: LRMKWMMAMKYPITA
LRIKWFMGMKHPITA

SEQ ID NO: 218091 - protein, 15 aa, Artificial Sequence
  Description of Artificial Sequence: Synthetic peptide
  Seed: LRMKWMMAMKYPITA
LRIKWFMGMKIPITA

SEQ ID NO: 218092 - protein, 15 aa, Artificial Sequence
  Description of Artificial Sequence: Synthetic peptide
  Seed: LRMKWMMAMKYPITA
LRIKWFMGMKLPITA

SEQ ID NO: 218093 - protein, 15 aa, Artificial Sequence
  Description of Artificial Sequence: Synthetic peptide
  Seed: LRMKWMMAMKYPITA
LRIKWFMGMKMPITA

SEQ ID NO: 218094 - protein, 15 aa, Artificial Sequence
  Description of Artificial Sequence: Synthetic peptide
  Seed: LRMKWMMAMKYPITA
LRIKWFMGMKNPITA

SEQ ID NO: 218095 - protein, 15 aa, Artificial Sequence
  Description of Artificial Sequence: Synthetic peptide
  Seed: LRMKWMMAMKYPITA
LRIKWFMGMKRPITA

SEQ ID NO: 218096 - protein, 15 aa, Artificial Sequence
  Description of Artificial Sequence: Synthetic peptide
  Seed: LRMKWMMAMKYPITA
LRIKWFMGMKSPITA

SEQ ID NO: 218097 - protein, 15 aa, Artificial Sequence
  Description of Artificial Sequence: Synthetic peptide
  Seed: LRMKWMMAMKYPITA
LRIKWFMGMKTPITA

SEQ ID NO: 218098 - protein, 15 aa, Artificial Sequence
  Description of Artificial Sequence: Synthetic peptide
  Seed: LRMKWMMAMKYPITA
LRIKWFMGMKVPITA

SEQ ID NO: 218099 - protein, 15 aa, Artificial Sequence
  Description of Artificial Sequence: Synthetic peptide
  Seed: LRMKWMMAMKYPITA
LRIKWFMGMKYPITA

SEQ ID NO: 218100 - protein, 15 aa, Artificial Sequence
  Description of Artificial Sequence: Synthetic peptide
  Seed: LRMKWMMAMKYPITA
LRIKWFMNMKAPITA

SEQ ID NO: 218101 - protein, 15 aa, Artificial Sequence
  Description of Artificial Sequence: Synthetic peptide
  Seed: LRMKWMMAMKYPITA
LRIKWFMNMKFPITA

SEQ ID NO: 218102 - protein, 15 aa, Artificial Sequence
  Description of Artificial Sequence: Synthetic peptide
  Seed: LRMKWMMAMKYPITA
LRIKWFMNMKGPITA

SEQ ID NO: 218103 - protein, 15 aa, Artificial Sequence
  Description of Artificial Sequence: Synthetic peptide
  Seed: LRMKWMMAMKYPITA
LRIKWFMNMKHPITA

SEQ ID NO: 218104 - protein, 15 aa, Artificial Sequence
  Description of Artificial Sequence: Synthetic peptide
  Seed: LRMKWMMAMKYPITA
LRIKWFMNMKIPITA

SEQ ID NO: 218105 - protein, 15 aa, Artificial Sequence
  Description of Artificial Sequence: Synthetic peptide
  Seed: LRMKWMMAMKYPITA
LRIKWFMNMKLPITA

SEQ ID NO: 218106 - protein, 15 aa, Artificial Sequence
  Description of Artificial Sequence: Synthetic peptide
  Seed: LRMKWMMAMKYPITA
LRIKWFMNMKMPITA

SEQ ID NO: 218107 - protein, 15 aa, Artificial Sequence
  Description of Artificial Sequence: Synthetic peptide
  Seed: LRMKWMMAMKYPITA
LRIKWFMNMKNPITA

SEQ ID NO: 218108 - protein, 15 aa, Artificial Sequence
  Description of Artificial Sequence: Synthetic peptide
  Seed: LRMKWMMAMKYPITA
LRIKWFMNMKPPITA

SEQ ID NO: 218109 - protein, 15 aa, Artificial Sequence
  Description of Artificial Sequence: Synthetic peptide
  Seed: LRMKWMMAMKYPITA
LRIKWFMNMKRPITA

SEQ ID NO: 218110 - protein, 15 aa, Artificial Sequence
  Description of Artificial Sequence: Synthetic peptide
  Seed: LRMKWMMAMKYPITA
LRIKWFMNMKSPITA

SEQ ID NO: 218111 - protein, 15 aa, Artificial Sequence
  Description of Artificial Sequence: Synthetic peptide
  Seed: LRMKWMMAMKYPITA
LRIKWFMNMKTPITA

SEQ ID NO: 218112 - protein, 15 aa, Artificial Sequence
  Description of Artificial Sequence: Synthetic peptide
  Seed: LRMKWMMAMKYPITA
LRIKWFMNMKVPITA

SEQ ID NO: 218113 - protein, 15 aa, Artificial Sequence
  Description of Artificial Sequence: Synthetic peptide
  Seed: LRMKWMMAMKYPITA
LRIKWFMNMKYPITA

SEQ ID NO: 218114 - protein, 15 aa, Artificial Sequence
  Description of Artificial Sequence: Synthetic peptide
  Seed: LRMKWMMAMKYPITA
LRIKWFMPMKAPITA

SEQ ID NO: 218115 - protein, 15 aa, Artificial Sequence
  Description of Artificial Sequence: Synthetic peptide
  Seed: LRMKWMMAMKYPITA
LRIKWFMPMKIPITA

SEQ ID NO: 218116 - protein, 15 aa, Artificial Sequence
  Description of Artificial Sequence: Synthetic peptide
  Seed: LRMKWMMAMKYPITA
LRIKWFMPMKLPITA

SEQ ID NO: 218117 - protein, 15 aa, Artificial Sequence
  Description of Artificial Sequence: Synthetic peptide
  Seed: LRMKWMMAMKYPITA
LRIKWFMPMKMPITA

SEQ ID NO: 218118 - protein, 15 aa, Artificial Sequence
  Description of Artificial Sequence: Synthetic peptide
  Seed: LRMKWMMAMKYPITA
LRIKWFMPMKSPITA

SEQ ID NO: 218119 - protein, 15 aa, Artificial Sequence
  Description of Artificial Sequence: Synthetic peptide
  Seed: LRMKWMMAMKYPITA
LRIKWFMPMKTPITA

SEQ ID NO: 218120 - protein, 15 aa, Artificial Sequence
  Description of Artificial Sequence: Synthetic peptide
  Seed: LRMKWMMAMKYPITA
LRIKWFMPMKVPITA

SEQ ID NO: 218121 - protein, 15 aa, Artificial Sequence
  Description of Artificial Sequence: Synthetic peptide
  Seed: LRMKWMMAMKYPITA
LRIKWFMSMKAPITA

SEQ ID NO: 218122 - protein, 15 aa, Artificial Sequence
  Description of Artificial Sequence: Synthetic peptide
  Seed: LRMKWMMAMKYPITA
LRIKWFMSMKFPITA

SEQ ID NO: 218123 - protein, 15 aa, Artificial Sequence
  Description of Artificial Sequence: Synthetic peptide
  Seed: LRMKWMMAMKYPITA
LRIKWFMSMKGPITA

SEQ ID NO: 218124 - protein, 15 aa, Artificial Sequence
  Description of Artificial Sequence: Synthetic peptide
  Seed: LRMKWMMAMKYPITA
LRIKWFMSMKHPITA

SEQ ID NO: 218125 - protein, 15 aa, Artificial Sequence
  Description of Artificial Sequence: Synthetic peptide
  Seed: LRMKWMMAMKYPITA
LRIKWFMSMKIPITA

SEQ ID NO: 218126 - protein, 15 aa, Artificial Sequence
  Description of Artificial Sequence: Synthetic peptide
  Seed: LRMKWMMAMKYPITA
LRIKWFMSMKKPITA

SEQ ID NO: 218127 - protein, 15 aa, Artificial Sequence
  Description of Artificial Sequence: Synthetic peptide
  Seed: LRMKWMMAMKYPITA
LRIKWFMSMKLPITA

SEQ ID NO: 218128 - protein, 15 aa, Artificial Sequence
  Description of Artificial Sequence: Synthetic peptide
  Seed: LRMKWMMAMKYPITA
LRIKWFMSMKMPITA

SEQ ID NO: 218129 - protein, 15 aa, Artificial Sequence
  Description of Artificial Sequence: Synthetic peptide
  Seed: LRMKWMMAMKYPITA
LRIKWFMSMKNPITA

SEQ ID NO: 218130 - protein, 15 aa, Artificial Sequence
  Description of Artificial Sequence: Synthetic peptide
  Seed: LRMKWMMAMKYPITA
LRIKWFMSMKPPITA

SEQ ID NO: 218131 - protein, 15 aa, Artificial Sequence
  Description of Artificial Sequence: Synthetic peptide
  Seed: LRMKWMMAMKYPITA
LRIKWFMSMKQPITA

SEQ ID NO: 218132 - protein, 15 aa, Artificial Sequence
  Description of Artificial Sequence: Synthetic peptide
  Seed: LRMKWMMAMKYPITA
LRIKWFMSMKRPITA

SEQ ID NO: 218133 - protein, 15 aa, Artificial Sequence
  Description of Artificial Sequence: Synthetic peptide
  Seed: LRMKWMMAMKYPITA
LRIKWFMSMKSPITA

SEQ ID NO: 218134 - protein, 15 aa, Artificial Sequence
  Description of Artificial Sequence: Synthetic peptide
  Seed: LRMKWMMAMKYPITA
LRIKWFMSMKTPITA

SEQ ID NO: 218135 - protein, 15 aa, Artificial Sequence
  Description of Artificial Sequence: Synthetic peptide
  Seed: LRMKWMMAMKYPITA
LRIKWFMSMKVPITA

SEQ ID NO: 218136 - protein, 15 aa, Artificial Sequence
  Description of Artificial Sequence: Synthetic peptide
  Seed: LRMKWMMAMKYPITA
LRIKWFMSMKYPITA

SEQ ID NO: 218137 - protein, 15 aa, Artificial Sequence
  Description of Artificial Sequence: Synthetic peptide
  Seed: LRMKWMMAMKYPITA
LRIKWFMTMKAPITA

SEQ ID NO: 218138 - protein, 15 aa, Artificial Sequence
  Description of Artificial Sequence: Synthetic peptide
  Seed: LRMKWMMAMKYPITA
LRIKWFMTMKFPITA

SEQ ID NO: 218139 - protein, 15 aa, Artificial Sequence
  Description of Artificial Sequence: Synthetic peptide
  Seed: LRMKWMMAMKYPITA
LRIKWFMTMKGPITA

SEQ ID NO: 218140 - protein, 15 aa, Artificial Sequence
  Description of Artificial Sequence: Synthetic peptide
  Seed: LRMKWMMAMKYPITA
LRIKWFMTMKHPITA

SEQ ID NO: 218141 - protein, 15 aa, Artificial Sequence
  Description of Artificial Sequence: Synthetic peptide
  Seed: LRMKWMMAMKYPITA
LRIKWFMTMKIPITA

SEQ ID NO: 218142 - protein, 15 aa, Artificial Sequence
  Description of Artificial Sequence: Synthetic peptide
  Seed: LRMKWMMAMKYPITA
LRIKWFMTMKLPITA

SEQ ID NO: 218143 - protein, 15 aa, Artificial Sequence
  Description of Artificial Sequence: Synthetic peptide
  Seed: LRMKWMMAMKYPITA
LRIKWFMTMKMPITA

SEQ ID NO: 218144 - protein, 15 aa, Artificial Sequence
  Description of Artificial Sequence: Synthetic peptide
  Seed: LRMKWMMAMKYPITA
LRIKWFMTMKNPITA

SEQ ID NO: 218145 - protein, 15 aa, Artificial Sequence
  Description of Artificial Sequence: Synthetic peptide
  Seed: LRMKWMMAMKYPITA
LRIKWFMTMKRPITA

SEQ ID NO: 218146 - protein, 15 aa, Artificial Sequence
  Description of Artificial Sequence: Synthetic peptide
  Seed: LRMKWMMAMKYPITA
LRIKWFMTMKSPITA

SEQ ID NO: 218147 - protein, 15 aa, Artificial Sequence
  Description of Artificial Sequence: Synthetic peptide
  Seed: LRMKWMMAMKYPITA
LRIKWFMTMKTPITA

SEQ ID NO: 218148 - protein, 15 aa, Artificial Sequence
  Description of Artificial Sequence: Synthetic peptide
  Seed: LRMKWMMAMKYPITA
LRIKWFMTMKVPITA

SEQ ID NO: 218149 - protein, 15 aa, Artificial Sequence
  Description of Artificial Sequence: Synthetic peptide
  Seed: LRMKWMMAMKYPITA
LRIKWFMTMKYPITA

SEQ ID NO: 218150 - protein, 15 aa, Artificial Sequence
  Description of Artificial Sequence: Synthetic peptide
  Seed: LRMKWMMAMKYPITA
LRIKWFMVMKAPITA

SEQ ID NO: 218151 - protein, 15 aa, Artificial Sequence
  Description of Artificial Sequence: Synthetic peptide
  Seed: LRMKWMMAMKYPITA
LRIKWFMVMKTPITA

SEQ ID NO: 218152 - protein, 15 aa, Artificial Sequence
  Description of Artificial Sequence: Synthetic peptide
  Seed: LRMKWMMAMKYPITA
LRIKWGMAMKLPITA

SEQ ID NO: 218153 - protein, 15 aa, Artificial Sequence
  Description of Artificial Sequence: Synthetic peptide
  Seed: LRMKWMMAMKYPITA
LRIKWGMAMKVPITA

SEQ ID NO: 218154 - protein, 15 aa, Artificial Sequence
  Description of Artificial Sequence: Synthetic peptide
  Seed: LRMKWMMAMKYPITA
LRIKWHMAMKIPITA

SEQ ID NO: 218155 - protein, 15 aa, Artificial Sequence
  Description of Artificial Sequence: Synthetic peptide
  Seed: LRMKWMMAMKYPITA
LRIKWHMAMKLPITA

SEQ ID NO: 218156 - protein, 15 aa, Artificial Sequence
  Description of Artificial Sequence: Synthetic peptide
  Seed: LRMKWMMAMKYPITA
LRIKWHMAMKVPITA

SEQ ID NO: 218157 - protein, 15 aa, Artificial Sequence
  Description of Artificial Sequence: Synthetic peptide
  Seed: LRMKWMMAMKYPITA
LRIKWHMFMKFPITA

SEQ ID NO: 218158 - protein, 15 aa, Artificial Sequence
  Description of Artificial Sequence: Synthetic peptide
  Seed: LRMKWMMAMKYPITA
LRIKWHMFMKIPITA

SEQ ID NO: 218159 - protein, 15 aa, Artificial Sequence
  Description of Artificial Sequence: Synthetic peptide
  Seed: LRMKWMMAMKYPITA
LRIKWHMFMKLPITA

SEQ ID NO: 218160 - protein, 15 aa, Artificial Sequence
  Description of Artificial Sequence: Synthetic peptide
  Seed: LRMKWMMAMKYPITA
LRIKWHMFMKMPITA

SEQ ID NO: 218161 - protein, 15 aa, Artificial Sequence
  Description of Artificial Sequence: Synthetic peptide
  Seed: LRMKWMMAMKYPITA
LRIKWHMFMKVPITA

SEQ ID NO: 218162 - protein, 15 aa, Artificial Sequence
  Description of Artificial Sequence: Synthetic peptide
  Seed: LRMKWMMAMKYPITA
LRIKWHMGMKIPITA

SEQ ID NO: 218163 - protein, 15 aa, Artificial Sequence
  Description of Artificial Sequence: Synthetic peptide
  Seed: LRMKWMMAMKYPITA
LRIKWHMGMKLPITA

SEQ ID NO: 218164 - protein, 15 aa, Artificial Sequence
  Description of Artificial Sequence: Synthetic peptide
  Seed: LRMKWMMAMKYPITA
LRIKWHMGMKVPITA

SEQ ID NO: 218165 - protein, 15 aa, Artificial Sequence
  Description of Artificial Sequence: Synthetic peptide
  Seed: LRMKWMMAMKYPITA
LRIKWHMLMKLPITA

SEQ ID NO: 218166 - protein, 15 aa, Artificial Sequence
  Description of Artificial Sequence: Synthetic peptide
  Seed: LRMKWMMAMKYPITA
LRIKWHMNMKAPITA

SEQ ID NO: 218167 - protein, 15 aa, Artificial Sequence
  Description of Artificial Sequence: Synthetic peptide
  Seed: LRMKWMMAMKYPITA
LRIKWHMNMKIPITA

SEQ ID NO: 218168 - protein, 15 aa, Artificial Sequence
  Description of Artificial Sequence: Synthetic peptide
  Seed: LRMKWMMAMKYPITA
LRIKWHMNMKLPITA

SEQ ID NO: 218169 - protein, 15 aa, Artificial Sequence
  Description of Artificial Sequence: Synthetic peptide
  Seed: LRMKWMMAMKYPITA
LRIKWHMNMKVPITA

SEQ ID NO: 218170 - protein, 15 aa, Artificial Sequence
  Description of Artificial Sequence: Synthetic peptide
  Seed: LRMKWMMAMKYPITA
LRIKWHMSMKAPITA

SEQ ID NO: 218171 - protein, 15 aa, Artificial Sequence
  Description of Artificial Sequence: Synthetic peptide
  Seed: LRMKWMMAMKYPITA
LRIKWHMSMKFPITA

SEQ ID NO: 218172 - protein, 15 aa, Artificial Sequence
  Description of Artificial Sequence: Synthetic peptide
  Seed: LRMKWMMAMKYPITA
LRIKWHMSMKIPITA

SEQ ID NO: 218173 - protein, 15 aa, Artificial Sequence
  Description of Artificial Sequence: Synthetic peptide
  Seed: LRMKWMMAMKYPITA
LRIKWHMSMKLPITA

SEQ ID NO: 218174 - protein, 15 aa, Artificial Sequence
  Description of Artificial Sequence: Synthetic peptide
  Seed: LRMKWMMAMKYPITA
LRIKWHMSMKMPITA

SEQ ID NO: 218175 - protein, 15 aa, Artificial Sequence
  Description of Artificial Sequence: Synthetic peptide
  Seed: LRMKWMMAMKYPITA
LRIKWHMSMKVPITA

SEQ ID NO: 218176 - protein, 15 aa, Artificial Sequence
  Description of Artificial Sequence: Synthetic peptide
  Seed: LRMKWMMAMKYPITA
LRIKWHMTMKIPITA

SEQ ID NO: 218177 - protein, 15 aa, Artificial Sequence
  Description of Artificial Sequence: Synthetic peptide
  Seed: LRMKWMMAMKYPITA
LRIKWHMTMKLPITA

SEQ ID NO: 218178 - protein, 15 aa, Artificial Sequence
  Description of Artificial Sequence: Synthetic peptide
  Seed: LRMKWMMAMKYPITA
LRIKWHMTMKVPITA

SEQ ID NO: 218179 - protein, 15 aa, Artificial Sequence
  Description of Artificial Sequence: Synthetic peptide
  Seed: LRMKWMMAMKYPITA
LRIKWIMAMKIPITA

SEQ ID NO: 218180 - protein, 15 aa, Artificial Sequence
  Description of Artificial Sequence: Synthetic peptide
  Seed: LRMKWMMAMKYPITA
LRIKWIMAMKLPITA

SEQ ID NO: 218181 - protein, 15 aa, Artificial Sequence
  Description of Artificial Sequence: Synthetic peptide
  Seed: LRMKWMMAMKYPITA
LRIKWIMAMKMPITA

SEQ ID NO: 218182 - protein, 15 aa, Artificial Sequence
  Description of Artificial Sequence: Synthetic peptide
  Seed: LRMKWMMAMKYPITA
LRIKWIMAMKVPITA

SEQ ID NO: 218183 - protein, 15 aa, Artificial Sequence
  Description of Artificial Sequence: Synthetic peptide
  Seed: LRMKWMMAMKYPITA
LRIKWIMDMKAPITA

SEQ ID NO: 218184 - protein, 15 aa, Artificial Sequence
  Description of Artificial Sequence: Synthetic peptide
  Seed: LRMKWMMAMKYPITA
LRIKWIMDMKSPITA

SEQ ID NO: 218185 - protein, 15 aa, Artificial Sequence
  Description of Artificial Sequence: Synthetic peptide
  Seed: LRMKWMMAMKYPITA
LRIKWIMFMKEPITA

SEQ ID NO: 218186 - protein, 15 aa, Artificial Sequence
  Description of Artificial Sequence: Synthetic peptide
  Seed: LRMKWMMAMKYPITA
LRIKWIMGMKAPITA

SEQ ID NO: 218187 - protein, 15 aa, Artificial Sequence
  Description of Artificial Sequence: Synthetic peptide
  Seed: LRMKWMMAMKYPITA
LRIKWIMGMKIPITA

SEQ ID NO: 218188 - protein, 15 aa, Artificial Sequence
  Description of Artificial Sequence: Synthetic peptide
  Seed: LRMKWMMAMKYPITA
LRIKWIMGMKLPITA

SEQ ID NO: 218189 - protein, 15 aa, Artificial Sequence
  Description of Artificial Sequence: Synthetic peptide
  Seed: LRMKWMMAMKYPITA
LRIKWIMGMKTPITA

SEQ ID NO: 218190 - protein, 15 aa, Artificial Sequence
  Description of Artificial Sequence: Synthetic peptide
  Seed: LRMKWMMAMKYPITA
LRIKWIMGMKVPITA

SEQ ID NO: 218191 - protein, 15 aa, Artificial Sequence
  Description of Artificial Sequence: Synthetic peptide
  Seed: LRMKWMMAMKYPITA
LRIKWIMNMKAPITA

SEQ ID NO: 218192 - protein, 15 aa, Artificial Sequence
  Description of Artificial Sequence: Synthetic peptide
  Seed: LRMKWMMAMKYPITA
LRIKWIMNMKGPITA

SEQ ID NO: 218193 - protein, 15 aa, Artificial Sequence
  Description of Artificial Sequence: Synthetic peptide
  Seed: LRMKWMMAMKYPITA
LRIKWIMNMKIPITA

SEQ ID NO: 218194 - protein, 15 aa, Artificial Sequence
  Description of Artificial Sequence: Synthetic peptide
  Seed: LRMKWMMAMKYPITA
LRIKWIMNMKLPITA

SEQ ID NO: 218195 - protein, 15 aa, Artificial Sequence
  Description of Artificial Sequence: Synthetic peptide
  Seed: LRMKWMMAMKYPITA
LRIKWIMNMKMPITA

SEQ ID NO: 218196 - protein, 15 aa, Artificial Sequence
  Description of Artificial Sequence: Synthetic peptide
  Seed: LRMKWMMAMKYPITA
LRIKWIMNMKSPITA

SEQ ID NO: 218197 - protein, 15 aa, Artificial Sequence
  Description of Artificial Sequence: Synthetic peptide
  Seed: LRMKWMMAMKYPITA
LRIKWIMNMKTPITA

SEQ ID NO: 218198 - protein, 15 aa, Artificial Sequence
  Description of Artificial Sequence: Synthetic peptide
  Seed: LRMKWMMAMKYPITA
LRIKWIMNMKVPITA

SEQ ID NO: 218199 - protein, 15 aa, Artificial Sequence
  Description of Artificial Sequence: Synthetic peptide
  Seed: LRMKWMMAMKYPITA
LRIKWIMPMKIPITA

SEQ ID NO: 218200 - protein, 15 aa, Artificial Sequence
  Description of Artificial Sequence: Synthetic peptide
  Seed: LRMKWMMAMKYPITA
LRIKWIMPMKLPITA

SEQ ID NO: 218201 - protein, 15 aa, Artificial Sequence
  Description of Artificial Sequence: Synthetic peptide
  Seed: LRMKWMMAMKYPITA
LRIKWIMPMKVPITA

SEQ ID NO: 218202 - protein, 15 aa, Artificial Sequence
  Description of Artificial Sequence: Synthetic peptide
  Seed: LRMKWMMAMKYPITA
LRIKWIMSMKAPITA

SEQ ID NO: 218203 - protein, 15 aa, Artificial Sequence
  Description of Artificial Sequence: Synthetic peptide
  Seed: LRMKWMMAMKYPITA
LRIKWIMSMKGPITA

SEQ ID NO: 218204 - protein, 15 aa, Artificial Sequence
  Description of Artificial Sequence: Synthetic peptide
  Seed: LRMKWMMAMKYPITA
LRIKWIMSMKIPITA

SEQ ID NO: 218205 - protein, 15 aa, Artificial Sequence
  Description of Artificial Sequence: Synthetic peptide
  Seed: LRMKWMMAMKYPITA
LRIKWIMSMKLPITA

SEQ ID NO: 218206 - protein, 15 aa, Artificial Sequence
  Description of Artificial Sequence: Synthetic peptide
  Seed: LRMKWMMAMKYPITA
LRIKWIMSMKMPITA

SEQ ID NO: 218207 - protein, 15 aa, Artificial Sequence
  Description of Artificial Sequence: Synthetic peptide
  Seed: LRMKWMMAMKYPITA
LRIKWIMSMKTPITA

SEQ ID NO: 218208 - protein, 15 aa, Artificial Sequence
  Description of Artificial Sequence: Synthetic peptide
  Seed: LRMKWMMAMKYPITA
LRIKWIMSMKVPITA

SEQ ID NO: 218209 - protein, 15 aa, Artificial Sequence
  Description of Artificial Sequence: Synthetic peptide
  Seed: LRMKWMMAMKYPITA
LRIKWIMTMKAPITA

SEQ ID NO: 218210 - protein, 15 aa, Artificial Sequence
  Description of Artificial Sequence: Synthetic peptide
  Seed: LRMKWMMAMKYPITA
LRIKWIMTMKGPITA

SEQ ID NO: 218211 - protein, 15 aa, Artificial Sequence
  Description of Artificial Sequence: Synthetic peptide
  Seed: LRMKWMMAMKYPITA
LRIKWIMTMKHPITA

SEQ ID NO: 218212 - protein, 15 aa, Artificial Sequence
  Description of Artificial Sequence: Synthetic peptide
  Seed: LRMKWMMAMKYPITA
LRIKWIMTMKIPITA

SEQ ID NO: 218213 - protein, 15 aa, Artificial Sequence
  Description of Artificial Sequence: Synthetic peptide
  Seed: LRMKWMMAMKYPITA
LRIKWIMTMKLPITA

SEQ ID NO: 218214 - protein, 15 aa, Artificial Sequence
  Description of Artificial Sequence: Synthetic peptide
  Seed: LRMKWMMAMKYPITA
LRIKWIMTMKQPITA

SEQ ID NO: 218215 - protein, 15 aa, Artificial Sequence
  Description of Artificial Sequence: Synthetic peptide
  Seed: LRMKWMMAMKYPITA
LRIKWIMTMKSPITA

SEQ ID NO: 218216 - protein, 15 aa, Artificial Sequence
  Description of Artificial Sequence: Synthetic peptide
  Seed: LRMKWMMAMKYPITA
LRIKWIMTMKVPITA

SEQ ID NO: 218217 - protein, 15 aa, Artificial Sequence
  Description of Artificial Sequence: Synthetic peptide
  Seed: LRMKWMMAMKYPITA
LRIKWLMAMKAPITA

SEQ ID NO: 218218 - protein, 15 aa, Artificial Sequence
  Description of Artificial Sequence: Synthetic peptide
  Seed: LRMKWMMAMKYPITA
LRIKWLMAMKHPITA

SEQ ID NO: 218219 - protein, 15 aa, Artificial Sequence
  Description of Artificial Sequence: Synthetic peptide
  Seed: LRMKWMMAMKYPITA
LRIKWLMAMKIPITA

SEQ ID NO: 218220 - protein, 15 aa, Artificial Sequence
  Description of Artificial Sequence: Synthetic peptide
  Seed: LRMKWMMAMKYPITA
LRIKWLMAMKLPITA

SEQ ID NO: 218221 - protein, 15 aa, Artificial Sequence
  Description of Artificial Sequence: Synthetic peptide
  Seed: LRMKWMMAMKYPITA
LRIKWLMAMKMPITA

SEQ ID NO: 218222 - protein, 15 aa, Artificial Sequence
  Description of Artificial Sequence: Synthetic peptide
  Seed: LRMKWMMAMKYPITA
LRIKWLMAMKSPITA

SEQ ID NO: 218223 - protein, 15 aa, Artificial Sequence
  Description of Artificial Sequence: Synthetic peptide
  Seed: LRMKWMMAMKYPITA
LRIKWLMAMKTPITA

SEQ ID NO: 218224 - protein, 15 aa, Artificial Sequence
  Description of Artificial Sequence: Synthetic peptide
  Seed: LRMKWMMAMKYPITA
LRIKWLMAMKVPITA

SEQ ID NO: 218225 - protein, 15 aa, Artificial Sequence
  Description of Artificial Sequence: Synthetic peptide
  Seed: LRMKWMMAMKYPITA
LRIKWLMAMKYPITA

SEQ ID NO: 218226 - protein, 15 aa, Artificial Sequence
  Description of Artificial Sequence: Synthetic peptide
  Seed: LRMKWMMAMKYPITA
LRIKWLMFMKEPITA

SEQ ID NO: 218227 - protein, 15 aa, Artificial Sequence
  Description of Artificial Sequence: Synthetic peptide
  Seed: LRMKWMMAMKYPITA
LRIKWLMGMKAPITA

SEQ ID NO: 218228 - protein, 15 aa, Artificial Sequence
  Description of Artificial Sequence: Synthetic peptide
  Seed: LRMKWMMAMKYPITA
LRIKWLMGMKGPITA

SEQ ID NO: 218229 - protein, 15 aa, Artificial Sequence
  Description of Artificial Sequence: Synthetic peptide
  Seed: LRMKWMMAMKYPITA
LRIKWLMGMKIPITA

SEQ ID NO: 218230 - protein, 15 aa, Artificial Sequence
  Description of Artificial Sequence: Synthetic peptide
  Seed: LRMKWMMAMKYPITA
LRIKWLMGMKLPITA

SEQ ID NO: 218231 - protein, 15 aa, Artificial Sequence
  Description of Artificial Sequence: Synthetic peptide
  Seed: LRMKWMMAMKYPITA
LRIKWLMGMKMPITA

SEQ ID NO: 218232 - protein, 15 aa, Artificial Sequence
  Description of Artificial Sequence: Synthetic peptide
  Seed: LRMKWMMAMKYPITA
LRIKWLMGMKSPITA

SEQ ID NO: 218233 - protein, 15 aa, Artificial Sequence
  Description of Artificial Sequence: Synthetic peptide
  Seed: LRMKWMMAMKYPITA
LRIKWLMGMKTPITA

SEQ ID NO: 218234 - protein, 15 aa, Artificial Sequence
  Description of Artificial Sequence: Synthetic peptide
  Seed: LRMKWMMAMKYPITA
LRIKWLMGMKVPITA

SEQ ID NO: 218235 - protein, 15 aa, Artificial Sequence
  Description of Artificial Sequence: Synthetic peptide
  Seed: LRMKWMMAMKYPITA
LRIKWLMNMKAPITA

SEQ ID NO: 218236 - protein, 15 aa, Artificial Sequence
  Description of Artificial Sequence: Synthetic peptide
  Seed: LRMKWMMAMKYPITA
LRIKWLMNMKGPITA

SEQ ID NO: 218237 - protein, 15 aa, Artificial Sequence
  Description of Artificial Sequence: Synthetic peptide
  Seed: LRMKWMMAMKYPITA
LRIKWLMNMKIPITA

SEQ ID NO: 218238 - protein, 15 aa, Artificial Sequence
  Description of Artificial Sequence: Synthetic peptide
  Seed: LRMKWMMAMKYPITA
LRIKWLMNMKLPITA

SEQ ID NO: 218239 - protein, 15 aa, Artificial Sequence
  Description of Artificial Sequence: Synthetic peptide
  Seed: LRMKWMMAMKYPITA
LRIKWLMNMKSPITA

SEQ ID NO: 218240 - protein, 15 aa, Artificial Sequence
  Description of Artificial Sequence: Synthetic peptide
  Seed: LRMKWMMAMKYPITA
LRIKWLMNMKVPITA

SEQ ID NO: 218241 - protein, 15 aa, Artificial Sequence
  Description of Artificial Sequence: Synthetic peptide
  Seed: LRMKWMMAMKYPITA
LRIKWLMPMKAPITA

SEQ ID NO: 218242 - protein, 15 aa, Artificial Sequence
  Description of Artificial Sequence: Synthetic peptide
  Seed: LRMKWMMAMKYPITA
LRIKWLMPMKIPITA

SEQ ID NO: 218243 - protein, 15 aa, Artificial Sequence
  Description of Artificial Sequence: Synthetic peptide
  Seed: LRMKWMMAMKYPITA
LRIKWLMPMKLPITA

SEQ ID NO: 218244 - protein, 15 aa, Artificial Sequence
  Description of Artificial Sequence: Synthetic peptide
  Seed: LRMKWMMAMKYPITA
LRIKWLMPMKMPITA

SEQ ID NO: 218245 - protein, 15 aa, Artificial Sequence
  Description of Artificial Sequence: Synthetic peptide
  Seed: LRMKWMMAMKYPITA
LRIKWLMPMKSPITA

SEQ ID NO: 218246 - protein, 15 aa, Artificial Sequence
  Description of Artificial Sequence: Synthetic peptide
  Seed: LRMKWMMAMKYPITA
LRIKWLMPMKTPITA

SEQ ID NO: 218247 - protein, 15 aa, Artificial Sequence
  Description of Artificial Sequence: Synthetic peptide
  Seed: LRMKWMMAMKYPITA
LRIKWLMPMKVPITA

SEQ ID NO: 218248 - protein, 15 aa, Artificial Sequence
  Description of Artificial Sequence: Synthetic peptide
  Seed: LRMKWMMAMKYPITA
LRIKWLMPMKYPITA

SEQ ID NO: 218249 - protein, 15 aa, Artificial Sequence
  Description of Artificial Sequence: Synthetic peptide
  Seed: LRMKWMMAMKYPITA
LRIKWLMSMKAPITA

SEQ ID NO: 218250 - protein, 15 aa, Artificial Sequence
  Description of Artificial Sequence: Synthetic peptide
  Seed: LRMKWMMAMKYPITA
LRIKWLMSMKGPITA

SEQ ID NO: 218251 - protein, 15 aa, Artificial Sequence
  Description of Artificial Sequence: Synthetic peptide
  Seed: LRMKWMMAMKYPITA
LRIKWLMSMKIPITA

SEQ ID NO: 218252 - protein, 15 aa, Artificial Sequence
  Description of Artificial Sequence: Synthetic peptide
  Seed: LRMKWMMAMKYPITA
LRIKWLMSMKLPITA

SEQ ID NO: 218253 - protein, 15 aa, Artificial Sequence
  Description of Artificial Sequence: Synthetic peptide
  Seed: LRMKWMMAMKYPITA
LRIKWLMSMKMPITA

SEQ ID NO: 218254 - protein, 15 aa, Artificial Sequence
  Description of Artificial Sequence: Synthetic peptide
  Seed: LRMKWMMAMKYPITA
LRIKWLMSMKSPITA

SEQ ID NO: 218255 - protein, 15 aa, Artificial Sequence
  Description of Artificial Sequence: Synthetic peptide
  Seed: LRMKWMMAMKYPITA
LRIKWLMSMKTPITA

SEQ ID NO: 218256 - protein, 15 aa, Artificial Sequence
  Description of Artificial Sequence: Synthetic peptide
  Seed: LRMKWMMAMKYPITA
LRIKWLMSMKVPITA

SEQ ID NO: 218257 - protein, 15 aa, Artificial Sequence
  Description of Artificial Sequence: Synthetic peptide
  Seed: LRMKWMMAMKYPITA
LRIKWLMSMKYPITA

SEQ ID NO: 218258 - protein, 15 aa, Artificial Sequence
  Description of Artificial Sequence: Synthetic peptide
  Seed: LRMKWMMAMKYPITA
LRIKWLMTMKAPITA

SEQ ID NO: 218259 - protein, 15 aa, Artificial Sequence
  Description of Artificial Sequence: Synthetic peptide
  Seed: LRMKWMMAMKYPITA
LRIKWLMTMKGPITA

SEQ ID NO: 218260 - protein, 15 aa, Artificial Sequence
  Description of Artificial Sequence: Synthetic peptide
  Seed: LRMKWMMAMKYPITA
LRIKWLMTMKHPITA

SEQ ID NO: 218261 - protein, 15 aa, Artificial Sequence
  Description of Artificial Sequence: Synthetic peptide
  Seed: LRMKWMMAMKYPITA
LRIKWLMTMKQPITA

SEQ ID NO: 218262 - protein, 15 aa, Artificial Sequence
  Description of Artificial Sequence: Synthetic peptide
  Seed: LRMKWMMAMKYPITA
LRIKWLMTMKSPITA

SEQ ID NO: 218263 - protein, 15 aa, Artificial Sequence
  Description of Artificial Sequence: Synthetic peptide
  Seed: LRMKWMMAMKYPITA
LRIKWLMTMKTPITA

SEQ ID NO: 218264 - protein, 15 aa, Artificial Sequence
  Description of Artificial Sequence: Synthetic peptide
  Seed: LRMKWMMAMKYPITA
LRIKWLMTMKVPITA

SEQ ID NO: 218265 - protein, 15 aa, Artificial Sequence
  Description of Artificial Sequence: Synthetic peptide
  Seed: LRMKWMMAMKYPITA
LRIKWLMVMKAPITA

SEQ ID NO: 218266 - protein, 15 aa, Artificial Sequence
  Description of Artificial Sequence: Synthetic peptide
  Seed: LRMKWMMAMKYPITA
LRIKWMMAMKAPITA

SEQ ID NO: 218267 - protein, 15 aa, Artificial Sequence
  Description of Artificial Sequence: Synthetic peptide
  Seed: LRMKWMMAMKYPITA
LRIKWMMAMKGPITA

SEQ ID NO: 218268 - protein, 15 aa, Artificial Sequence
  Description of Artificial Sequence: Synthetic peptide
  Seed: LRMKWMMAMKYPITA
LRIKWMMAMKHPITA

SEQ ID NO: 218269 - protein, 15 aa, Artificial Sequence
  Description of Artificial Sequence: Synthetic peptide
  Seed: LRMKWMMAMKYPITA
LRIKWMMAMKIPITA

SEQ ID NO: 218270 - protein, 15 aa, Artificial Sequence
  Description of Artificial Sequence: Synthetic peptide
  Seed: LRMKWMMAMKYPITA
LRIKWMMAMKLPITA

SEQ ID NO: 218271 - protein, 15 aa, Artificial Sequence
  Description of Artificial Sequence: Synthetic peptide
  Seed: LRMKWMMAMKYPITA
LRIKWMMAMKNPITA

SEQ ID NO: 218272 - protein, 15 aa, Artificial Sequence
  Description of Artificial Sequence: Synthetic peptide
  Seed: LRMKWMMAMKYPITA
LRIKWMMAMKSPITA

SEQ ID NO: 218273 - protein, 15 aa, Artificial Sequence
  Description of Artificial Sequence: Synthetic peptide
  Seed: LRMKWMMAMKYPITA
LRIKWMMAMKTPITA

SEQ ID NO: 218274 - protein, 15 aa, Artificial Sequence
  Description of Artificial Sequence: Synthetic peptide
  Seed: LRMKWMMAMKYPITA
LRIKWMMAMKVPITA

SEQ ID NO: 218275 - protein, 15 aa, Artificial Sequence
  Description of Artificial Sequence: Synthetic peptide
  Seed: LRMKWMMAMKYPITA
LRIKWMMDMKAPITA

SEQ ID NO: 218276 - protein, 15 aa, Artificial Sequence
  Description of Artificial Sequence: Synthetic peptide
  Seed: LRMKWMMAMKYPITA
LRIKWMMDMKIPITA

SEQ ID NO: 218277 - protein, 15 aa, Artificial Sequence
  Description of Artificial Sequence: Synthetic peptide
  Seed: LRMKWMMAMKYPITA
LRIKWMMDMKSPITA

SEQ ID NO: 218278 - protein, 15 aa, Artificial Sequence
  Description of Artificial Sequence: Synthetic peptide
  Seed: LRMKWMMAMKYPITA
LRIKWMMDMKVPITA

SEQ ID NO: 218279 - protein, 15 aa, Artificial Sequence
  Description of Artificial Sequence: Synthetic peptide
  Seed: LRMKWMMAMKYPITA
LRIKWMMGMKAPITA

SEQ ID NO: 218280 - protein, 15 aa, Artificial Sequence
  Description of Artificial Sequence: Synthetic peptide
  Seed: LRMKWMMAMKYPITA
LRIKWMMGMKGPITA

SEQ ID NO: 218281 - protein, 15 aa, Artificial Sequence
  Description of Artificial Sequence: Synthetic peptide
  Seed: LRMKWMMAMKYPITA
LRIKWMMGMKIPITA

SEQ ID NO: 218282 - protein, 15 aa, Artificial Sequence
  Description of Artificial Sequence: Synthetic peptide
  Seed: LRMKWMMAMKYPITA
LRIKWMMGMKLPITA

SEQ ID NO: 218283 - protein, 15 aa, Artificial Sequence
  Description of Artificial Sequence: Synthetic peptide
  Seed: LRMKWMMAMKYPITA
LRIKWMMGMKMPITA

SEQ ID NO: 218284 - protein, 15 aa, Artificial Sequence
  Description of Artificial Sequence: Synthetic peptide
  Seed: LRMKWMMAMKYPITA
LRIKWMMGMKSPITA

SEQ ID NO: 218285 - protein, 15 aa, Artificial Sequence
  Description of Artificial Sequence: Synthetic peptide
  Seed: LRMKWMMAMKYPITA
LRIKWMMGMKTPITA

SEQ ID NO: 218286 - protein, 15 aa, Artificial Sequence
  Description of Artificial Sequence: Synthetic peptide
  Seed: LRMKWMMAMKYPITA
LRIKWMMGMKVPITA

SEQ ID NO: 218287 - protein, 15 aa, Artificial Sequence
  Description of Artificial Sequence: Synthetic peptide
  Seed: LRMKWMMAMKYPITA
LRIKWMMIMKAPITA

SEQ ID NO: 218288 - protein, 15 aa, Artificial Sequence
  Description of Artificial Sequence: Synthetic peptide
  Seed: LRMKWMMAMKYPITA
LRIKWMMNMKAPITA

SEQ ID NO: 218289 - protein, 15 aa, Artificial Sequence
  Description of Artificial Sequence: Synthetic peptide
  Seed: LRMKWMMAMKYPITA
LRIKWMMNMKGPITA

SEQ ID NO: 218290 - protein, 15 aa, Artificial Sequence
  Description of Artificial Sequence: Synthetic peptide
  Seed: LRMKWMMAMKYPITA
LRIKWMMNMKHPITA

SEQ ID NO: 218291 - protein, 15 aa, Artificial Sequence
  Description of Artificial Sequence: Synthetic peptide
  Seed: LRMKWMMAMKYPITA
LRIKWMMNMKIPITA

SEQ ID NO: 218292 - protein, 15 aa, Artificial Sequence
  Description of Artificial Sequence: Synthetic peptide
  Seed: LRMKWMMAMKYPITA
LRIKWMMNMKLPITA

SEQ ID NO: 218293 - protein, 15 aa, Artificial Sequence
  Description of Artificial Sequence: Synthetic peptide
  Seed: LRMKWMMAMKYPITA
LRIKWMMNMKMPITA

SEQ ID NO: 218294 - protein, 15 aa, Artificial Sequence
  Description of Artificial Sequence: Synthetic peptide
  Seed: LRMKWMMAMKYPITA
LRIKWMMNMKNPITA

SEQ ID NO: 218295 - protein, 15 aa, Artificial Sequence
  Description of Artificial Sequence: Synthetic peptide
  Seed: LRMKWMMAMKYPITA
LRIKWMMNMKQPITA

SEQ ID NO: 218296 - protein, 15 aa, Artificial Sequence
  Description of Artificial Sequence: Synthetic peptide
  Seed: LRMKWMMAMKYPITA
LRIKWMMNMKSPITA

SEQ ID NO: 218297 - protein, 15 aa, Artificial Sequence
  Description of Artificial Sequence: Synthetic peptide
  Seed: LRMKWMMAMKYPITA
LRIKWMMNMKTPITA

SEQ ID NO: 218298 - protein, 15 aa, Artificial Sequence
  Description of Artificial Sequence: Synthetic peptide
  Seed: LRMKWMMAMKYPITA
LRIKWMMNMKVPITA

SEQ ID NO: 218299 - protein, 15 aa, Artificial Sequence
  Description of Artificial Sequence: Synthetic peptide
  Seed: LRMKWMMAMKYPITA
LRIKWMMPMKAPITA

SEQ ID NO: 218300 - protein, 15 aa, Artificial Sequence
  Description of Artificial Sequence: Synthetic peptide
  Seed: LRMKWMMAMKYPITA
LRIKWMMPMKGPITA

SEQ ID NO: 218301 - protein, 15 aa, Artificial Sequence
  Description of Artificial Sequence: Synthetic peptide
  Seed: LRMKWMMAMKYPITA
LRIKWMMPMKIPITA

SEQ ID NO: 218302 - protein, 15 aa, Artificial Sequence
  Description of Artificial Sequence: Synthetic peptide
  Seed: LRMKWMMAMKYPITA
LRIKWMMPMKLPITA

SEQ ID NO: 218303 - protein, 15 aa, Artificial Sequence
  Description of Artificial Sequence: Synthetic peptide
  Seed: LRMKWMMAMKYPITA
LRIKWMMPMKMPITA

SEQ ID NO: 218304 - protein, 15 aa, Artificial Sequence
  Description of Artificial Sequence: Synthetic peptide
  Seed: LRMKWMMAMKYPITA
LRIKWMMPMKSPITA

SEQ ID NO: 218305 - protein, 15 aa, Artificial Sequence
  Description of Artificial Sequence: Synthetic peptide
  Seed: LRMKWMMAMKYPITA
LRIKWMMPMKTPITA

SEQ ID NO: 218306 - protein, 15 aa, Artificial Sequence
  Description of Artificial Sequence: Synthetic peptide
  Seed: LRMKWMMAMKYPITA
LRIKWMMPMKVPITA

SEQ ID NO: 218307 - protein, 15 aa, Artificial Sequence
  Description of Artificial Sequence: Synthetic peptide
  Seed: LRMKWMMAMKYPITA
LRIKWMMSMKAPITA

SEQ ID NO: 218308 - protein, 15 aa, Artificial Sequence
  Description of Artificial Sequence: Synthetic peptide
  Seed: LRMKWMMAMKYPITA
LRIKWMMSMKGPITA

SEQ ID NO: 218309 - protein, 15 aa, Artificial Sequence
  Description of Artificial Sequence: Synthetic peptide
  Seed: LRMKWMMAMKYPITA
LRIKWMMSMKHPITA

SEQ ID NO: 218310 - protein, 15 aa, Artificial Sequence
  Description of Artificial Sequence: Synthetic peptide
  Seed: LRMKWMMAMKYPITA
LRIKWMMSMKIPITA

SEQ ID NO: 218311 - protein, 15 aa, Artificial Sequence
  Description of Artificial Sequence: Synthetic peptide
  Seed: LRMKWMMAMKYPITA
LRIKWMMSMKLPITA

SEQ ID NO: 218312 - protein, 15 aa, Artificial Sequence
  Description of Artificial Sequence: Synthetic peptide
  Seed: LRMKWMMAMKYPITA
LRIKWMMSMKMPITA

SEQ ID NO: 218313 - protein, 15 aa, Artificial Sequence
  Description of Artificial Sequence: Synthetic peptide
  Seed: LRMKWMMAMKYPITA
LRIKWMMSMKQPITA

SEQ ID NO: 218314 - protein, 15 aa, Artificial Sequence
  Description of Artificial Sequence: Synthetic peptide
  Seed: LRMKWMMAMKYPITA
LRIKWMMSMKSPITA

SEQ ID NO: 218315 - protein, 15 aa, Artificial Sequence
  Description of Artificial Sequence: Synthetic peptide
  Seed: LRMKWMMAMKYPITA
LRIKWMMSMKTPITA

SEQ ID NO: 218316 - protein, 15 aa, Artificial Sequence
  Description of Artificial Sequence: Synthetic peptide
  Seed: LRMKWMMAMKYPITA
LRIKWMMSMKVPITA

SEQ ID NO: 218317 - protein, 15 aa, Artificial Sequence
  Description of Artificial Sequence: Synthetic peptide
  Seed: LRMKWMMAMKYPITA
LRIKWMMTMKAPITA

SEQ ID NO: 218318 - protein, 15 aa, Artificial Sequence
  Description of Artificial Sequence: Synthetic peptide
  Seed: LRMKWMMAMKYPITA
LRIKWMMTMKGPITA

SEQ ID NO: 218319 - protein, 15 aa, Artificial Sequence
  Description of Artificial Sequence: Synthetic peptide
  Seed: LRMKWMMAMKYPITA
LRIKWMMTMKHPITA

SEQ ID NO: 218320 - protein, 15 aa, Artificial Sequence
  Description of Artificial Sequence: Synthetic peptide
  Seed: LRMKWMMAMKYPITA
LRIKWMMTMKIPITA

SEQ ID NO: 218321 - protein, 15 aa, Artificial Sequence
  Description of Artificial Sequence: Synthetic peptide
  Seed: LRMKWMMAMKYPITA
LRIKWMMTMKLPITA

SEQ ID NO: 218322 - protein, 15 aa, Artificial Sequence
  Description of Artificial Sequence: Synthetic peptide
  Seed: LRMKWMMAMKYPITA
LRIKWMMTMKMPITA

SEQ ID NO: 218323 - protein, 15 aa, Artificial Sequence
  Description of Artificial Sequence: Synthetic peptide
  Seed: LRMKWMMAMKYPITA
LRIKWMMTMKNPITA

SEQ ID NO: 218324 - protein, 15 aa, Artificial Sequence
  Description of Artificial Sequence: Synthetic peptide
  Seed: LRMKWMMAMKYPITA
LRIKWMMTMKQPITA

SEQ ID NO: 218325 - protein, 15 aa, Artificial Sequence
  Description of Artificial Sequence: Synthetic peptide
  Seed: LRMKWMMAMKYPITA
LRIKWMMTMKSPITA

SEQ ID NO: 218326 - protein, 15 aa, Artificial Sequence
  Description of Artificial Sequence: Synthetic peptide
  Seed: LRMKWMMAMKYPITA
LRIKWMMTMKTPITA

SEQ ID NO: 218327 - protein, 15 aa, Artificial Sequence
  Description of Artificial Sequence: Synthetic peptide
  Seed: LRMKWMMAMKYPITA
LRIKWMMTMKVPITA

SEQ ID NO: 218328 - protein, 15 aa, Artificial Sequence
  Description of Artificial Sequence: Synthetic peptide
  Seed: LRMKWMMAMKYPITA
LRIKWMMVMKAPITA

SEQ ID NO: 218329 - protein, 15 aa, Artificial Sequence
  Description of Artificial Sequence: Synthetic peptide
  Seed: LRMKWMMAMKYPITA
LRIKWMMVMKGPITA

SEQ ID NO: 218330 - protein, 15 aa, Artificial Sequence
  Description of Artificial Sequence: Synthetic peptide
  Seed: LRMKWMMAMKYPITA
LRIKWMMVMKSPITA

SEQ ID NO: 218331 - protein, 15 aa, Artificial Sequence
  Description of Artificial Sequence: Synthetic peptide
  Seed: LRMKWMMAMKYPITA
LRIKWNMFMKIPITA

SEQ ID NO: 218332 - protein, 15 aa, Artificial Sequence
  Description of Artificial Sequence: Synthetic peptide
  Seed: LRMKWMMAMKYPITA
LRIKWNMFMKVPITA

SEQ ID NO: 218333 - protein, 15 aa, Artificial Sequence
  Description of Artificial Sequence: Synthetic peptide
  Seed: LRMKWMMAMKYPITA
LRIKWQMAMKAPITA

SEQ ID NO: 218334 - protein, 15 aa, Artificial Sequence
  Description of Artificial Sequence: Synthetic peptide
  Seed: LRMKWMMAMKYPITA
LRIKWQMAMKIPITA

SEQ ID NO: 218335 - protein, 15 aa, Artificial Sequence
  Description of Artificial Sequence: Synthetic peptide
  Seed: LRMKWMMAMKYPITA
LRIKWQMAMKLPITA

SEQ ID NO: 218336 - protein, 15 aa, Artificial Sequence
  Description of Artificial Sequence: Synthetic peptide
  Seed: LRMKWMMAMKYPITA
LRIKWQMAMKMPITA

SEQ ID NO: 218337 - protein, 15 aa, Artificial Sequence
  Description of Artificial Sequence: Synthetic peptide
  Seed: LRMKWMMAMKYPITA
LRIKWQMAMKSPITA

SEQ ID NO: 218338 - protein, 15 aa, Artificial Sequence
  Description of Artificial Sequence: Synthetic peptide
  Seed: LRMKWMMAMKYPITA
LRIKWQMAMKTPITA

SEQ ID NO: 218339 - protein, 15 aa, Artificial Sequence
  Description of Artificial Sequence: Synthetic peptide
  Seed: LRMKWMMAMKYPITA
LRIKWQMAMKVPITA

SEQ ID NO: 218340 - protein, 15 aa, Artificial Sequence
  Description of Artificial Sequence: Synthetic peptide
  Seed: LRMKWMMAMKYPITA
LRIKWQMFMKIPITA

SEQ ID NO: 218341 - protein, 15 aa, Artificial Sequence
  Description of Artificial Sequence: Synthetic peptide
  Seed: LRMKWMMAMKYPITA
LRIKWQMFMKLPITA

SEQ ID NO: 218342 - protein, 15 aa, Artificial Sequence
  Description of Artificial Sequence: Synthetic peptide
  Seed: LRMKWMMAMKYPITA
LRIKWQMFMKMPITA

SEQ ID NO: 218343 - protein, 15 aa, Artificial Sequence
  Description of Artificial Sequence: Synthetic peptide
  Seed: LRMKWMMAMKYPITA
LRIKWQMFMKVPITA

SEQ ID NO: 218344 - protein, 15 aa, Artificial Sequence
  Description of Artificial Sequence: Synthetic peptide
  Seed: LRMKWMMAMKYPITA
LRIKWQMGMKAPITA

SEQ ID NO: 218345 - protein, 15 aa, Artificial Sequence
  Description of Artificial Sequence: Synthetic peptide
  Seed: LRMKWMMAMKYPITA
LRIKWQMGMKIPITA

SEQ ID NO: 218346 - protein, 15 aa, Artificial Sequence
  Description of Artificial Sequence: Synthetic peptide
  Seed: LRMKWMMAMKYPITA
LRIKWQMGMKLPITA

SEQ ID NO: 218347 - protein, 15 aa, Artificial Sequence
  Description of Artificial Sequence: Synthetic peptide
  Seed: LRMKWMMAMKYPITA
LRIKWQMGMKVPITA

SEQ ID NO: 218348 - protein, 15 aa, Artificial Sequence
  Description of Artificial Sequence: Synthetic peptide
  Seed: LRMKWMMAMKYPITA
LRIKWQMLMKLPITA

SEQ ID NO: 218349 - protein, 15 aa, Artificial Sequence
  Description of Artificial Sequence: Synthetic peptide
  Seed: LRMKWMMAMKYPITA
LRIKWQMNMKAPITA

SEQ ID NO: 218350 - protein, 15 aa, Artificial Sequence
  Description of Artificial Sequence: Synthetic peptide
  Seed: LRMKWMMAMKYPITA
LRIKWQMNMKIPITA

SEQ ID NO: 218351 - protein, 15 aa, Artificial Sequence
  Description of Artificial Sequence: Synthetic peptide
  Seed: LRMKWMMAMKYPITA
LRIKWQMNMKLPITA

SEQ ID NO: 218352 - protein, 15 aa, Artificial Sequence
  Description of Artificial Sequence: Synthetic peptide
  Seed: LRMKWMMAMKYPITA
LRIKWQMNMKSPITA

SEQ ID NO: 218353 - protein, 15 aa, Artificial Sequence
  Description of Artificial Sequence: Synthetic peptide
  Seed: LRMKWMMAMKYPITA
LRIKWQMNMKVPITA

SEQ ID NO: 218354 - protein, 15 aa, Artificial Sequence
  Description of Artificial Sequence: Synthetic peptide
  Seed: LRMKWMMAMKYPITA
LRIKWQMPMKLPITA

SEQ ID NO: 218355 - protein, 15 aa, Artificial Sequence
  Description of Artificial Sequence: Synthetic peptide
  Seed: LRMKWMMAMKYPITA
LRIKWQMSMKAPITA

SEQ ID NO: 218356 - protein, 15 aa, Artificial Sequence
  Description of Artificial Sequence: Synthetic peptide
  Seed: LRMKWMMAMKYPITA
LRIKWQMSMKIPITA

SEQ ID NO: 218357 - protein, 15 aa, Artificial Sequence
  Description of Artificial Sequence: Synthetic peptide
  Seed: LRMKWMMAMKYPITA
LRIKWQMSMKLPITA

SEQ ID NO: 218358 - protein, 15 aa, Artificial Sequence
  Description of Artificial Sequence: Synthetic peptide
  Seed: LRMKWMMAMKYPITA
LRIKWQMSMKSPITA

SEQ ID NO: 218359 - protein, 15 aa, Artificial Sequence
  Description of Artificial Sequence: Synthetic peptide
  Seed: LRMKWMMAMKYPITA
LRIKWQMSMKVPITA

SEQ ID NO: 218360 - protein, 15 aa, Artificial Sequence
  Description of Artificial Sequence: Synthetic peptide
  Seed: LRMKWMMAMKYPITA
LRIKWQMTMKAPITA

SEQ ID NO: 218361 - protein, 15 aa, Artificial Sequence
  Description of Artificial Sequence: Synthetic peptide
  Seed: LRMKWMMAMKYPITA
LRIKWQMTMKSPITA

SEQ ID NO: 218362 - protein, 15 aa, Artificial Sequence
  Description of Artificial Sequence: Synthetic peptide
  Seed: LRMKWMMAMKYPITA
LRIKWSMAMKAPITA

SEQ ID NO: 218363 - protein, 15 aa, Artificial Sequence
  Description of Artificial Sequence: Synthetic peptide
  Seed: LRMKWMMAMKYPITA
LRIKWSMAMKIPITA

SEQ ID NO: 218364 - protein, 15 aa, Artificial Sequence
  Description of Artificial Sequence: Synthetic peptide
  Seed: LRMKWMMAMKYPITA
LRIKWSMAMKLPITA

SEQ ID NO: 218365 - protein, 15 aa, Artificial Sequence
  Description of Artificial Sequence: Synthetic peptide
  Seed: LRMKWMMAMKYPITA
LRIKWSMAMKMPITA

SEQ ID NO: 218366 - protein, 15 aa, Artificial Sequence
  Description of Artificial Sequence: Synthetic peptide
  Seed: LRMKWMMAMKYPITA
LRIKWSMAMKVPITA

SEQ ID NO: 218367 - protein, 15 aa, Artificial Sequence
  Description of Artificial Sequence: Synthetic peptide
  Seed: LRMKWMMAMKYPITA
LRIKWSMFMKAPITA

SEQ ID NO: 218368 - protein, 15 aa, Artificial Sequence
  Description of Artificial Sequence: Synthetic peptide
  Seed: LRMKWMMAMKYPITA
LRIKWSMFMKDPITA

SEQ ID NO: 218369 - protein, 15 aa, Artificial Sequence
  Description of Artificial Sequence: Synthetic peptide
  Seed: LRMKWMMAMKYPITA
LRIKWSMFMKEPITA

SEQ ID NO: 218370 - protein, 15 aa, Artificial Sequence
  Description of Artificial Sequence: Synthetic peptide
  Seed: LRMKWMMAMKYPITA
LRIKWSMFMKFPITA

SEQ ID NO: 218371 - protein, 15 aa, Artificial Sequence
  Description of Artificial Sequence: Synthetic peptide
  Seed: LRMKWMMAMKYPITA
LRIKWSMFMKIPITA

SEQ ID NO: 218372 - protein, 15 aa, Artificial Sequence
  Description of Artificial Sequence: Synthetic peptide
  Seed: LRMKWMMAMKYPITA
LRIKWSMFMKLPITA

SEQ ID NO: 218373 - protein, 15 aa, Artificial Sequence
  Description of Artificial Sequence: Synthetic peptide
  Seed: LRMKWMMAMKYPITA
LRIKWSMFMKMPITA

SEQ ID NO: 218374 - protein, 15 aa, Artificial Sequence
  Description of Artificial Sequence: Synthetic peptide
  Seed: LRMKWMMAMKYPITA
LRIKWSMFMKNPITA

SEQ ID NO: 218375 - protein, 15 aa, Artificial Sequence
  Description of Artificial Sequence: Synthetic peptide
  Seed: LRMKWMMAMKYPITA
LRIKWSMFMKSPITA

SEQ ID NO: 218376 - protein, 15 aa, Artificial Sequence
  Description of Artificial Sequence: Synthetic peptide
  Seed: LRMKWMMAMKYPITA
LRIKWSMFMKTPITA

SEQ ID NO: 218377 - protein, 15 aa, Artificial Sequence
  Description of Artificial Sequence: Synthetic peptide
  Seed: LRMKWMMAMKYPITA
LRIKWSMFMKVPITA

SEQ ID NO: 218378 - protein, 15 aa, Artificial Sequence
  Description of Artificial Sequence: Synthetic peptide
  Seed: LRMKWMMAMKYPITA
LRIKWSMFMKYPITA

SEQ ID NO: 218379 - protein, 15 aa, Artificial Sequence
  Description of Artificial Sequence: Synthetic peptide
  Seed: LRMKWMMAMKYPITA
LRIKWSMGMKIPITA

SEQ ID NO: 218380 - protein, 15 aa, Artificial Sequence
  Description of Artificial Sequence: Synthetic peptide
  Seed: LRMKWMMAMKYPITA
LRIKWSMGMKLPITA

SEQ ID NO: 218381 - protein, 15 aa, Artificial Sequence
  Description of Artificial Sequence: Synthetic peptide
  Seed: LRMKWMMAMKYPITA
LRIKWSMGMKVPITA

SEQ ID NO: 218382 - protein, 15 aa, Artificial Sequence
  Description of Artificial Sequence: Synthetic peptide
  Seed: LRMKWMMAMKYPITA
LRIKWSMIMKIPITA

SEQ ID NO: 218383 - protein, 15 aa, Artificial Sequence
  Description of Artificial Sequence: Synthetic peptide
  Seed: LRMKWMMAMKYPITA
LRIKWSMIMKLPITA

SEQ ID NO: 218384 - protein, 15 aa, Artificial Sequence
  Description of Artificial Sequence: Synthetic peptide
  Seed: LRMKWMMAMKYPITA
LRIKWSMIMKVPITA

SEQ ID NO: 218385 - protein, 15 aa, Artificial Sequence
  Description of Artificial Sequence: Synthetic peptide
  Seed: LRMKWMMAMKYPITA
LRIKWSMLMKFPITA

SEQ ID NO: 218386 - protein, 15 aa, Artificial Sequence
  Description of Artificial Sequence: Synthetic peptide
  Seed: LRMKWMMAMKYPITA
LRIKWSMLMKIPITA

SEQ ID NO: 218387 - protein, 15 aa, Artificial Sequence
  Description of Artificial Sequence: Synthetic peptide
  Seed: LRMKWMMAMKYPITA
LRIKWSMLMKLPITA

SEQ ID NO: 218388 - protein, 15 aa, Artificial Sequence
  Description of Artificial Sequence: Synthetic peptide
  Seed: LRMKWMMAMKYPITA
LRIKWSMLMKMPITA

SEQ ID NO: 218389 - protein, 15 aa, Artificial Sequence
  Description of Artificial Sequence: Synthetic peptide
  Seed: LRMKWMMAMKYPITA
LRIKWSMLMKVPITA

SEQ ID NO: 218390 - protein, 15 aa, Artificial Sequence
  Description of Artificial Sequence: Synthetic peptide
  Seed: LRMKWMMAMKYPITA
LRIKWSMMMKLPITA

SEQ ID NO: 218391 - protein, 15 aa, Artificial Sequence
  Description of Artificial Sequence: Synthetic peptide
  Seed: LRMKWMMAMKYPITA
LRIKWSMMMKVPITA

SEQ ID NO: 218392 - protein, 15 aa, Artificial Sequence
  Description of Artificial Sequence: Synthetic peptide
  Seed: LRMKWMMAMKYPITA
LRIKWSMNMKIPITA

SEQ ID NO: 218393 - protein, 15 aa, Artificial Sequence
  Description of Artificial Sequence: Synthetic peptide
  Seed: LRMKWMMAMKYPITA
LRIKWSMNMKLPITA

SEQ ID NO: 218394 - protein, 15 aa, Artificial Sequence
  Description of Artificial Sequence: Synthetic peptide
  Seed: LRMKWMMAMKYPITA
LRIKWSMNMKVPITA

SEQ ID NO: 218395 - protein, 15 aa, Artificial Sequence
  Description of Artificial Sequence: Synthetic peptide
  Seed: LRMKWMMAMKYPITA
LRIKWSMSMKIPITA

SEQ ID NO: 218396 - protein, 15 aa, Artificial Sequence
  Description of Artificial Sequence: Synthetic peptide
  Seed: LRMKWMMAMKYPITA
LRIKWSMSMKLPITA

SEQ ID NO: 218397 - protein, 15 aa, Artificial Sequence
  Description of Artificial Sequence: Synthetic peptide
  Seed: LRMKWMMAMKYPITA
LRIKWSMSMKVPITA

SEQ ID NO: 218398 - protein, 15 aa, Artificial Sequence
  Description of Artificial Sequence: Synthetic peptide
  Seed: LRMKWMMAMKYPITA
LRIKWSMTMKAPITA

SEQ ID NO: 218399 - protein, 15 aa, Artificial Sequence
  Description of Artificial Sequence: Synthetic peptide
  Seed: LRMKWMMAMKYPITA
LRIKWSMTMKSPITA

SEQ ID NO: 218400 - protein, 15 aa, Artificial Sequence
  Description of Artificial Sequence: Synthetic peptide
  Seed: LRMKWMMAMKYPITA
LRIKWSMWMKLPITA

SEQ ID NO: 218401 - protein, 15 aa, Artificial Sequence
  Description of Artificial Sequence: Synthetic peptide
  Seed: LRMKWMMAMKYPITA
LRIKWSMWMKVPITA

SEQ ID NO: 218402 - protein, 15 aa, Artificial Sequence
  Description of Artificial Sequence: Synthetic peptide
  Seed: LRMKWMMAMKYPITA
LRIKWSMYMKIPITA

SEQ ID NO: 218403 - protein, 15 aa, Artificial Sequence
  Description of Artificial Sequence: Synthetic peptide
  Seed: LRMKWMMAMKYPITA
LRIKWSMYMKLPITA

SEQ ID NO: 218404 - protein, 15 aa, Artificial Sequence
  Description of Artificial Sequence: Synthetic peptide
  Seed: LRMKWMMAMKYPITA
LRIKWSMYMKVPITA

SEQ ID NO: 218405 - protein, 15 aa, Artificial Sequence
  Description of Artificial Sequence: Synthetic peptide
  Seed: LRMKWMMAMKYPITA
LRIKWTMAMKIPITA

SEQ ID NO: 218406 - protein, 15 aa, Artificial Sequence
  Description of Artificial Sequence: Synthetic peptide
  Seed: LRMKWMMAMKYPITA
LRIKWTMAMKLPITA

SEQ ID NO: 218407 - protein, 15 aa, Artificial Sequence
  Description of Artificial Sequence: Synthetic peptide
  Seed: LRMKWMMAMKYPITA
LRIKWTMAMKVPITA

SEQ ID NO: 218408 - protein, 15 aa, Artificial Sequence
  Description of Artificial Sequence: Synthetic peptide
  Seed: LRMKWMMAMKYPITA
LRIKWTMFMKAPITA

SEQ ID NO: 218409 - protein, 15 aa, Artificial Sequence
  Description of Artificial Sequence: Synthetic peptide
  Seed: LRMKWMMAMKYPITA
LRIKWTMFMKDPITA

SEQ ID NO: 218410 - protein, 15 aa, Artificial Sequence
  Description of Artificial Sequence: Synthetic peptide
  Seed: LRMKWMMAMKYPITA
LRIKWTMFMKEPITA

SEQ ID NO: 218411 - protein, 15 aa, Artificial Sequence
  Description of Artificial Sequence: Synthetic peptide
  Seed: LRMKWMMAMKYPITA
LRIKWTMFMKFPITA

SEQ ID NO: 218412 - protein, 15 aa, Artificial Sequence
  Description of Artificial Sequence: Synthetic peptide
  Seed: LRMKWMMAMKYPITA
LRIKWTMFMKHPITA

SEQ ID NO: 218413 - protein, 15 aa, Artificial Sequence
  Description of Artificial Sequence: Synthetic peptide
  Seed: LRMKWMMAMKYPITA
LRIKWTMFMKIPITA

SEQ ID NO: 218414 - protein, 15 aa, Artificial Sequence
  Description of Artificial Sequence: Synthetic peptide
  Seed: LRMKWMMAMKYPITA
LRIKWTMFMKLPITA

SEQ ID NO: 218415 - protein, 15 aa, Artificial Sequence
  Description of Artificial Sequence: Synthetic peptide
  Seed: LRMKWMMAMKYPITA
LRIKWTMFMKMPITA

SEQ ID NO: 218416 - protein, 15 aa, Artificial Sequence
  Description of Artificial Sequence: Synthetic peptide
  Seed: LRMKWMMAMKYPITA
LRIKWTMFMKNPITA

SEQ ID NO: 218417 - protein, 15 aa, Artificial Sequence
  Description of Artificial Sequence: Synthetic peptide
  Seed: LRMKWMMAMKYPITA
LRIKWTMFMKQPITA

SEQ ID NO: 218418 - protein, 15 aa, Artificial Sequence
  Description of Artificial Sequence: Synthetic peptide
  Seed: LRMKWMMAMKYPITA
LRIKWTMFMKSPITA

SEQ ID NO: 218419 - protein, 15 aa, Artificial Sequence
  Description of Artificial Sequence: Synthetic peptide
  Seed: LRMKWMMAMKYPITA
LRIKWTMFMKTPITA

SEQ ID NO: 218420 - protein, 15 aa, Artificial Sequence
  Description of Artificial Sequence: Synthetic peptide
  Seed: LRMKWMMAMKYPITA
LRIKWTMFMKVPITA

SEQ ID NO: 218421 - protein, 15 aa, Artificial Sequence
  Description of Artificial Sequence: Synthetic peptide
  Seed: LRMKWMMAMKYPITA
LRIKWTMFMKYPITA

SEQ ID NO: 218422 - protein, 15 aa, Artificial Sequence
  Description of Artificial Sequence: Synthetic peptide
  Seed: LRMKWMMAMKYPITA
LRIKWTMGMKLPITA

SEQ ID NO: 218423 - protein, 15 aa, Artificial Sequence
  Description of Artificial Sequence: Synthetic peptide
  Seed: LRMKWMMAMKYPITA
LRIKWTMGMKVPITA

SEQ ID NO: 218424 - protein, 15 aa, Artificial Sequence
  Description of Artificial Sequence: Synthetic peptide
  Seed: LRMKWMMAMKYPITA
LRIKWTMIMKLPITA

SEQ ID NO: 218425 - protein, 15 aa, Artificial Sequence
  Description of Artificial Sequence: Synthetic peptide
  Seed: LRMKWMMAMKYPITA
LRIKWTMIMKMPITA

SEQ ID NO: 218426 - protein, 15 aa, Artificial Sequence
  Description of Artificial Sequence: Synthetic peptide
  Seed: LRMKWMMAMKYPITA
LRIKWTMIMKVPITA

SEQ ID NO: 218427 - protein, 15 aa, Artificial Sequence
  Description of Artificial Sequence: Synthetic peptide
  Seed: LRMKWMMAMKYPITA
LRIKWTMLMKFPITA

SEQ ID NO: 218428 - protein, 15 aa, Artificial Sequence
  Description of Artificial Sequence: Synthetic peptide
  Seed: LRMKWMMAMKYPITA
LRIKWTMLMKIPITA

SEQ ID NO: 218429 - protein, 15 aa, Artificial Sequence
  Description of Artificial Sequence: Synthetic peptide
  Seed: LRMKWMMAMKYPITA
LRIKWTMLMKLPITA

SEQ ID NO: 218430 - protein, 15 aa, Artificial Sequence
  Description of Artificial Sequence: Synthetic peptide
  Seed: LRMKWMMAMKYPITA
LRIKWTMLMKMPITA

SEQ ID NO: 218431 - protein, 15 aa, Artificial Sequence
  Description of Artificial Sequence: Synthetic peptide
  Seed: LRMKWMMAMKYPITA
LRIKWTMLMKNPITA

SEQ ID NO: 218432 - protein, 15 aa, Artificial Sequence
  Description of Artificial Sequence: Synthetic peptide
  Seed: LRMKWMMAMKYPITA
LRIKWTMLMKVPITA

SEQ ID NO: 218433 - protein, 15 aa, Artificial Sequence
  Description of Artificial Sequence: Synthetic peptide
  Seed: LRMKWMMAMKYPITA
LRIKWTMLMKYPITA

SEQ ID NO: 218434 - protein, 15 aa, Artificial Sequence
  Description of Artificial Sequence: Synthetic peptide
  Seed: LRMKWMMAMKYPITA
LRIKWTMMMKLPITA

SEQ ID NO: 218435 - protein, 15 aa, Artificial Sequence
  Description of Artificial Sequence: Synthetic peptide
  Seed: LRMKWMMAMKYPITA
LRIKWTMMMKMPITA

SEQ ID NO: 218436 - protein, 15 aa, Artificial Sequence
  Description of Artificial Sequence: Synthetic peptide
  Seed: LRMKWMMAMKYPITA
LRIKWTMMMKVPITA

SEQ ID NO: 218437 - protein, 15 aa, Artificial Sequence
  Description of Artificial Sequence: Synthetic peptide
  Seed: LRMKWMMAMKYPITA
LRIKWTMNMKIPITA

SEQ ID NO: 218438 - protein, 15 aa, Artificial Sequence
  Description of Artificial Sequence: Synthetic peptide
  Seed: LRMKWMMAMKYPITA
LRIKWTMNMKLPITA

SEQ ID NO: 218439 - protein, 15 aa, Artificial Sequence
  Description of Artificial Sequence: Synthetic peptide
  Seed: LRMKWMMAMKYPITA
LRIKWTMNMKVPITA

SEQ ID NO: 218440 - protein, 15 aa, Artificial Sequence
  Description of Artificial Sequence: Synthetic peptide
  Seed: LRMKWMMAMKYPITA
LRIKWTMSMKIPITA

SEQ ID NO: 218441 - protein, 15 aa, Artificial Sequence
  Description of Artificial Sequence: Synthetic peptide
  Seed: LRMKWMMAMKYPITA
LRIKWTMSMKLPITA

SEQ ID NO: 218442 - protein, 15 aa, Artificial Sequence
  Description of Artificial Sequence: Synthetic peptide
  Seed: LRMKWMMAMKYPITA
LRIKWTMSMKVPITA

SEQ ID NO: 218443 - protein, 15 aa, Artificial Sequence
  Description of Artificial Sequence: Synthetic peptide
  Seed: LRMKWMMAMKYPITA
LRIKWTMWMKLPITA

SEQ ID NO: 218444 - protein, 15 aa, Artificial Sequence
  Description of Artificial Sequence: Synthetic peptide
  Seed: LRMKWMMAMKYPITA
LRIKWTMYMKFPITA

SEQ ID NO: 218445 - protein, 15 aa, Artificial Sequence
  Description of Artificial Sequence: Synthetic peptide
  Seed: LRMKWMMAMKYPITA
LRIKWTMYMKIPITA

SEQ ID NO: 218446 - protein, 15 aa, Artificial Sequence
  Description of Artificial Sequence: Synthetic peptide
  Seed: LRMKWMMAMKYPITA
LRIKWTMYMKLPITA

SEQ ID NO: 218447 - protein, 15 aa, Artificial Sequence
  Description of Artificial Sequence: Synthetic peptide
  Seed: LRMKWMMAMKYPITA
LRIKWTMYMKVPITA

SEQ ID NO: 218448 - protein, 15 aa, Artificial Sequence
  Description of Artificial Sequence: Synthetic peptide
  Seed: LRMKWMMAMKYPITA
LRIKWVMAMKIPITA

SEQ ID NO: 218449 - protein, 15 aa, Artificial Sequence
  Description of Artificial Sequence: Synthetic peptide
  Seed: LRMKWMMAMKYPITA
LRIKWVMAMKLPITA

SEQ ID NO: 218450 - protein, 15 aa, Artificial Sequence
  Description of Artificial Sequence: Synthetic peptide
  Seed: LRMKWMMAMKYPITA
LRIKWVMAMKVPITA

SEQ ID NO: 218451 - protein, 15 aa, Artificial Sequence
  Description of Artificial Sequence: Synthetic peptide
  Seed: LRMKWMMAMKYPITA
LRIKWVMFMKEPITA

SEQ ID NO: 218452 - protein, 15 aa, Artificial Sequence
  Description of Artificial Sequence: Synthetic peptide
  Seed: LRMKWMMAMKYPITA
LRIKWVMFMKNPITA

SEQ ID NO: 218453 - protein, 15 aa, Artificial Sequence
  Description of Artificial Sequence: Synthetic peptide
  Seed: LRMKWMMAMKYPITA
LRIKWVMGMKIPITA

SEQ ID NO: 218454 - protein, 15 aa, Artificial Sequence
  Description of Artificial Sequence: Synthetic peptide
  Seed: LRMKWMMAMKYPITA
LRIKWVMGMKLPITA

SEQ ID NO: 218455 - protein, 15 aa, Artificial Sequence
  Description of Artificial Sequence: Synthetic peptide
  Seed: LRMKWMMAMKYPITA
LRIKWVMGMKVPITA

SEQ ID NO: 218456 - protein, 15 aa, Artificial Sequence
  Description of Artificial Sequence: Synthetic peptide
  Seed: LRMKWMMAMKYPITA
LRIKWVMNMKAPITA

SEQ ID NO: 218457 - protein, 15 aa, Artificial Sequence
  Description of Artificial Sequence: Synthetic peptide
  Seed: LRMKWMMAMKYPITA
LRIKWVMNMKGPITA

SEQ ID NO: 218458 - protein, 15 aa, Artificial Sequence
  Description of Artificial Sequence: Synthetic peptide
  Seed: LRMKWMMAMKYPITA
LRIKWVMNMKIPITA

SEQ ID NO: 218459 - protein, 15 aa, Artificial Sequence
  Description of Artificial Sequence: Synthetic peptide
  Seed: LRMKWMMAMKYPITA
LRIKWVMNMKLPITA

SEQ ID NO: 218460 - protein, 15 aa, Artificial Sequence
  Description of Artificial Sequence: Synthetic peptide
  Seed: LRMKWMMAMKYPITA
LRIKWVMNMKSPITA

SEQ ID NO: 218461 - protein, 15 aa, Artificial Sequence
  Description of Artificial Sequence: Synthetic peptide
  Seed: LRMKWMMAMKYPITA
LRIKWVMNMKVPITA

SEQ ID NO: 218462 - protein, 15 aa, Artificial Sequence
  Description of Artificial Sequence: Synthetic peptide
  Seed: LRMKWMMAMKYPITA
LRIKWVMSMKAPITA

SEQ ID NO: 218463 - protein, 15 aa, Artificial Sequence
  Description of Artificial Sequence: Synthetic peptide
  Seed: LRMKWMMAMKYPITA
LRIKWVMSMKGPITA

SEQ ID NO: 218464 - protein, 15 aa, Artificial Sequence
  Description of Artificial Sequence: Synthetic peptide
  Seed: LRMKWMMAMKYPITA
LRIKWVMSMKIPITA

SEQ ID NO: 218465 - protein, 15 aa, Artificial Sequence
  Description of Artificial Sequence: Synthetic peptide
  Seed: LRMKWMMAMKYPITA
LRIKWVMSMKLPITA

SEQ ID NO: 218466 - protein, 15 aa, Artificial Sequence
  Description of Artificial Sequence: Synthetic peptide
  Seed: LRMKWMMAMKYPITA
LRIKWVMSMKMPITA

SEQ ID NO: 218467 - protein, 15 aa, Artificial Sequence
  Description of Artificial Sequence: Synthetic peptide
  Seed: LRMKWMMAMKYPITA
LRIKWVMSMKSPITA

SEQ ID NO: 218468 - protein, 15 aa, Artificial Sequence
  Description of Artificial Sequence: Synthetic peptide
  Seed: LRMKWMMAMKYPITA
LRIKWVMSMKTPITA

SEQ ID NO: 218469 - protein, 15 aa, Artificial Sequence
  Description of Artificial Sequence: Synthetic peptide
  Seed: LRMKWMMAMKYPITA
LRIKWVMSMKVPITA

SEQ ID NO: 218470 - protein, 15 aa, Artificial Sequence
  Description of Artificial Sequence: Synthetic peptide
  Seed: LRMKWMMAMKYPITA
LRIKWVMTMKAPITA

SEQ ID NO: 218471 - protein, 15 aa, Artificial Sequence
  Description of Artificial Sequence: Synthetic peptide
  Seed: LRMKWMMAMKYPITA
LRIKWVMTMKGPITA

SEQ ID NO: 218472 - protein, 15 aa, Artificial Sequence
  Description of Artificial Sequence: Synthetic peptide
  Seed: LRMKWMMAMKYPITA
LRIKWVMTMKSPITA

SEQ ID NO: 218473 - protein, 15 aa, Artificial Sequence
  Description of Artificial Sequence: Synthetic peptide
  Seed: LRMKWMMAMKYPITA
LRIKWVMTMKVPITA

SEQ ID NO: 218474 - protein, 15 aa, Artificial Sequence
  Description of Artificial Sequence: Synthetic peptide
  Seed: LRMKWMMAMKYPITA
LRIKWWMAMKAPITA

SEQ ID NO: 218475 - protein, 15 aa, Artificial Sequence
  Description of Artificial Sequence: Synthetic peptide
  Seed: LRMKWMMAMKYPITA
LRIKWWMAMKFPITA

SEQ ID NO: 218476 - protein, 15 aa, Artificial Sequence
  Description of Artificial Sequence: Synthetic peptide
  Seed: LRMKWMMAMKYPITA
LRIKWWMAMKGPITA

SEQ ID NO: 218477 - protein, 15 aa, Artificial Sequence
  Description of Artificial Sequence: Synthetic peptide
  Seed: LRMKWMMAMKYPITA
LRIKWWMAMKHPITA

SEQ ID NO: 218478 - protein, 15 aa, Artificial Sequence
  Description of Artificial Sequence: Synthetic peptide
  Seed: LRMKWMMAMKYPITA
LRIKWWMAMKIPITA

SEQ ID NO: 218479 - protein, 15 aa, Artificial Sequence
  Description of Artificial Sequence: Synthetic peptide
  Seed: LRMKWMMAMKYPITA
LRIKWWMAMKLPITA

SEQ ID NO: 218480 - protein, 15 aa, Artificial Sequence
  Description of Artificial Sequence: Synthetic peptide
  Seed: LRMKWMMAMKYPITA
LRIKWWMAMKMPITA

SEQ ID NO: 218481 - protein, 15 aa, Artificial Sequence
  Description of Artificial Sequence: Synthetic peptide
  Seed: LRMKWMMAMKYPITA
LRIKWWMAMKRPITA

SEQ ID NO: 218482 - protein, 15 aa, Artificial Sequence
  Description of Artificial Sequence: Synthetic peptide
  Seed: LRMKWMMAMKYPITA
LRIKWWMAMKSPITA

SEQ ID NO: 218483 - protein, 15 aa, Artificial Sequence
  Description of Artificial Sequence: Synthetic peptide
  Seed: LRMKWMMAMKYPITA
LRIKWWMAMKTPITA

SEQ ID NO: 218484 - protein, 15 aa, Artificial Sequence
  Description of Artificial Sequence: Synthetic peptide
  Seed: LRMKWMMAMKYPITA
LRIKWWMAMKVPITA

SEQ ID NO: 218485 - protein, 15 aa, Artificial Sequence
  Description of Artificial Sequence: Synthetic peptide
  Seed: LRMKWMMAMKYPITA
LRIKWWMAMKYPITA

SEQ ID NO: 218486 - protein, 15 aa, Artificial Sequence
  Description of Artificial Sequence: Synthetic peptide
  Seed: LRMKWMMAMKYPITA
LRIKWWMDMKIPITA

SEQ ID NO: 218487 - protein, 15 aa, Artificial Sequence
  Description of Artificial Sequence: Synthetic peptide
  Seed: LRMKWMMAMKYPITA
LRIKWWMDMKLPITA

SEQ ID NO: 218488 - protein, 15 aa, Artificial Sequence
  Description of Artificial Sequence: Synthetic peptide
  Seed: LRMKWMMAMKYPITA
LRIKWWMDMKVPITA

SEQ ID NO: 218489 - protein, 15 aa, Artificial Sequence
  Description of Artificial Sequence: Synthetic peptide
  Seed: LRMKWMMAMKYPITA
LRIKWWMGMKAPITA

SEQ ID NO: 218490 - protein, 15 aa, Artificial Sequence
  Description of Artificial Sequence: Synthetic peptide
  Seed: LRMKWMMAMKYPITA
LRIKWWMGMKFPITA

SEQ ID NO: 218491 - protein, 15 aa, Artificial Sequence
  Description of Artificial Sequence: Synthetic peptide
  Seed: LRMKWMMAMKYPITA
LRIKWWMGMKIPITA

SEQ ID NO: 218492 - protein, 15 aa, Artificial Sequence
  Description of Artificial Sequence: Synthetic peptide
  Seed: LRMKWMMAMKYPITA
LRIKWWMGMKLPITA

SEQ ID NO: 218493 - protein, 15 aa, Artificial Sequence
  Description of Artificial Sequence: Synthetic peptide
  Seed: LRMKWMMAMKYPITA
LRIKWWMGMKMPITA

SEQ ID NO: 218494 - protein, 15 aa, Artificial Sequence
  Description of Artificial Sequence: Synthetic peptide
  Seed: LRMKWMMAMKYPITA
LRIKWWMGMKSPITA

SEQ ID NO: 218495 - protein, 15 aa, Artificial Sequence
  Description of Artificial Sequence: Synthetic peptide
  Seed: LRMKWMMAMKYPITA
LRIKWWMGMKTPITA

SEQ ID NO: 218496 - protein, 15 aa, Artificial Sequence
  Description of Artificial Sequence: Synthetic peptide
  Seed: LRMKWMMAMKYPITA
LRIKWWMGMKVPITA

SEQ ID NO: 218497 - protein, 15 aa, Artificial Sequence
  Description of Artificial Sequence: Synthetic peptide
  Seed: LRMKWMMAMKYPITA
LRIKWWMNMKAPITA

SEQ ID NO: 218498 - protein, 15 aa, Artificial Sequence
  Description of Artificial Sequence: Synthetic peptide
  Seed: LRMKWMMAMKYPITA
LRIKWWMNMKFPITA

SEQ ID NO: 218499 - protein, 15 aa, Artificial Sequence
  Description of Artificial Sequence: Synthetic peptide
  Seed: LRMKWMMAMKYPITA
LRIKWWMNMKGPITA

SEQ ID NO: 218500 - protein, 15 aa, Artificial Sequence
  Description of Artificial Sequence: Synthetic peptide
  Seed: LRMKWMMAMKYPITA
LRIKWWMNMKHPITA

SEQ ID NO: 218501 - protein, 15 aa, Artificial Sequence
  Description of Artificial Sequence: Synthetic peptide
  Seed: LRMKWMMAMKYPITA
LRIKWWMNMKIPITA

SEQ ID NO: 218502 - protein, 15 aa, Artificial Sequence
  Description of Artificial Sequence: Synthetic peptide
  Seed: LRMKWMMAMKYPITA
LRIKWWMNMKLPITA

SEQ ID NO: 218503 - protein, 15 aa, Artificial Sequence
  Description of Artificial Sequence: Synthetic peptide
  Seed: LRMKWMMAMKYPITA
LRIKWWMNMKMPITA

SEQ ID NO: 218504 - protein, 15 aa, Artificial Sequence
  Description of Artificial Sequence: Synthetic peptide
  Seed: LRMKWMMAMKYPITA
LRIKWWMNMKSPITA

SEQ ID NO: 218505 - protein, 15 aa, Artificial Sequence
  Description of Artificial Sequence: Synthetic peptide
  Seed: LRMKWMMAMKYPITA
LRIKWWMNMKTPITA

SEQ ID NO: 218506 - protein, 15 aa, Artificial Sequence
  Description of Artificial Sequence: Synthetic peptide
  Seed: LRMKWMMAMKYPITA
LRIKWWMNMKVPITA

SEQ ID NO: 218507 - protein, 15 aa, Artificial Sequence
  Description of Artificial Sequence: Synthetic peptide
  Seed: LRMKWMMAMKYPITA
LRIKWWMNMKYPITA

SEQ ID NO: 218508 - protein, 15 aa, Artificial Sequence
  Description of Artificial Sequence: Synthetic peptide
  Seed: LRMKWMMAMKYPITA
LRIKWWMPMKAPITA

SEQ ID NO: 218509 - protein, 15 aa, Artificial Sequence
  Description of Artificial Sequence: Synthetic peptide
  Seed: LRMKWMMAMKYPITA
LRIKWWMPMKIPITA

SEQ ID NO: 218510 - protein, 15 aa, Artificial Sequence
  Description of Artificial Sequence: Synthetic peptide
  Seed: LRMKWMMAMKYPITA
LRIKWWMPMKLPITA

SEQ ID NO: 218511 - protein, 15 aa, Artificial Sequence
  Description of Artificial Sequence: Synthetic peptide
  Seed: LRMKWMMAMKYPITA
LRIKWWMPMKMPITA

SEQ ID NO: 218512 - protein, 15 aa, Artificial Sequence
  Description of Artificial Sequence: Synthetic peptide
  Seed: LRMKWMMAMKYPITA
LRIKWWMPMKVPITA

SEQ ID NO: 218513 - protein, 15 aa, Artificial Sequence
  Description of Artificial Sequence: Synthetic peptide
  Seed: LRMKWMMAMKYPITA
LRIKWWMSMKAPITA

SEQ ID NO: 218514 - protein, 15 aa, Artificial Sequence
  Description of Artificial Sequence: Synthetic peptide
  Seed: LRMKWMMAMKYPITA
LRIKWWMSMKFPITA

SEQ ID NO: 218515 - protein, 15 aa, Artificial Sequence
  Description of Artificial Sequence: Synthetic peptide
  Seed: LRMKWMMAMKYPITA
LRIKWWMSMKGPITA

SEQ ID NO: 218516 - protein, 15 aa, Artificial Sequence
  Description of Artificial Sequence: Synthetic peptide
  Seed: LRMKWMMAMKYPITA
LRIKWWMSMKHPITA

SEQ ID NO: 218517 - protein, 15 aa, Artificial Sequence
  Description of Artificial Sequence: Synthetic peptide
  Seed: LRMKWMMAMKYPITA
LRIKWWMSMKIPITA

SEQ ID NO: 218518 - protein, 15 aa, Artificial Sequence
  Description of Artificial Sequence: Synthetic peptide
  Seed: LRMKWMMAMKYPITA
LRIKWWMSMKLPITA

SEQ ID NO: 218519 - protein, 15 aa, Artificial Sequence
  Description of Artificial Sequence: Synthetic peptide
  Seed: LRMKWMMAMKYPITA
LRIKWWMSMKMPITA

SEQ ID NO: 218520 - protein, 15 aa, Artificial Sequence
  Description of Artificial Sequence: Synthetic peptide
  Seed: LRMKWMMAMKYPITA
LRIKWWMSMKNPITA

SEQ ID NO: 218521 - protein, 15 aa, Artificial Sequence
  Description of Artificial Sequence: Synthetic peptide
  Seed: LRMKWMMAMKYPITA
LRIKWWMSMKRPITA

SEQ ID NO: 218522 - protein, 15 aa, Artificial Sequence
  Description of Artificial Sequence: Synthetic peptide
  Seed: LRMKWMMAMKYPITA
LRIKWWMSMKSPITA

SEQ ID NO: 218523 - protein, 15 aa, Artificial Sequence
  Description of Artificial Sequence: Synthetic peptide
  Seed: LRMKWMMAMKYPITA
LRIKWWMSMKTPITA

SEQ ID NO: 218524 - protein, 15 aa, Artificial Sequence
  Description of Artificial Sequence: Synthetic peptide
  Seed: LRMKWMMAMKYPITA
LRIKWWMSMKVPITA

SEQ ID NO: 218525 - protein, 15 aa, Artificial Sequence
  Description of Artificial Sequence: Synthetic peptide
  Seed: LRMKWMMAMKYPITA
LRIKWWMSMKYPITA

SEQ ID NO: 218526 - protein, 15 aa, Artificial Sequence
  Description of Artificial Sequence: Synthetic peptide
  Seed: LRMKWMMAMKYPITA
LRIKWWMTMKAPITA

SEQ ID NO: 218527 - protein, 15 aa, Artificial Sequence
  Description of Artificial Sequence: Synthetic peptide
  Seed: LRMKWMMAMKYPITA
LRIKWWMTMKFPITA

SEQ ID NO: 218528 - protein, 15 aa, Artificial Sequence
  Description of Artificial Sequence: Synthetic peptide
  Seed: LRMKWMMAMKYPITA
LRIKWWMTMKIPITA

SEQ ID NO: 218529 - protein, 15 aa, Artificial Sequence
  Description of Artificial Sequence: Synthetic peptide
  Seed: LRMKWMMAMKYPITA
LRIKWWMTMKLPITA

SEQ ID NO: 218530 - protein, 15 aa, Artificial Sequence
  Description of Artificial Sequence: Synthetic peptide
  Seed: LRMKWMMAMKYPITA
LRIKWWMTMKMPITA

SEQ ID NO: 218531 - protein, 15 aa, Artificial Sequence
  Description of Artificial Sequence: Synthetic peptide
  Seed: LRMKWMMAMKYPITA
LRIKWWMTMKSPITA

SEQ ID NO: 218532 - protein, 15 aa, Artificial Sequence
  Description of Artificial Sequence: Synthetic peptide
  Seed: LRMKWMMAMKYPITA
LRIKWWMTMKTPITA

SEQ ID NO: 218533 - protein, 15 aa, Artificial Sequence
  Description of Artificial Sequence: Synthetic peptide
  Seed: LRMKWMMAMKYPITA
LRIKWWMTMKVPITA

SEQ ID NO: 218534 - protein, 15 aa, Artificial Sequence
  Description of Artificial Sequence: Synthetic peptide
  Seed: LRMKWMMAMKYPITA
LRIKWWMVMKAPITA

SEQ ID NO: 218535 - protein, 15 aa, Artificial Sequence
  Description of Artificial Sequence: Synthetic peptide
  Seed: LRMKWMMAMKYPITA
LRIKWWMVMKVPITA

SEQ ID NO: 218536 - protein, 15 aa, Artificial Sequence
  Description of Artificial Sequence: Synthetic peptide
  Seed: LRMKWMMAMKYPITA
LRIKWYMAMKAPITA

SEQ ID NO: 218537 - protein, 15 aa, Artificial Sequence
  Description of Artificial Sequence: Synthetic peptide
  Seed: LRMKWMMAMKYPITA
LRIKWYMAMKFPITA

SEQ ID NO: 218538 - protein, 15 aa, Artificial Sequence
  Description of Artificial Sequence: Synthetic peptide
  Seed: LRMKWMMAMKYPITA
LRIKWYMAMKGPITA

SEQ ID NO: 218539 - protein, 15 aa, Artificial Sequence
  Description of Artificial Sequence: Synthetic peptide
  Seed: LRMKWMMAMKYPITA
LRIKWYMAMKHPITA

SEQ ID NO: 218540 - protein, 15 aa, Artificial Sequence
  Description of Artificial Sequence: Synthetic peptide
  Seed: LRMKWMMAMKYPITA
LRIKWYMAMKIPITA

SEQ ID NO: 218541 - protein, 15 aa, Artificial Sequence
  Description of Artificial Sequence: Synthetic peptide
  Seed: LRMKWMMAMKYPITA
LRIKWYMAMKKPITA

SEQ ID NO: 218542 - protein, 15 aa, Artificial Sequence
  Description of Artificial Sequence: Synthetic peptide
  Seed: LRMKWMMAMKYPITA
LRIKWYMAMKLPITA

SEQ ID NO: 218543 - protein, 15 aa, Artificial Sequence
  Description of Artificial Sequence: Synthetic peptide
  Seed: LRMKWMMAMKYPITA
LRIKWYMAMKMPITA

SEQ ID NO: 218544 - protein, 15 aa, Artificial Sequence
  Description of Artificial Sequence: Synthetic peptide
  Seed: LRMKWMMAMKYPITA
LRIKWYMAMKNPITA

SEQ ID NO: 218545 - protein, 15 aa, Artificial Sequence
  Description of Artificial Sequence: Synthetic peptide
  Seed: LRMKWMMAMKYPITA
LRIKWYMAMKPPITA

SEQ ID NO: 218546 - protein, 15 aa, Artificial Sequence
  Description of Artificial Sequence: Synthetic peptide
  Seed: LRMKWMMAMKYPITA
LRIKWYMAMKQPITA

SEQ ID NO: 218547 - protein, 15 aa, Artificial Sequence
  Description of Artificial Sequence: Synthetic peptide
  Seed: LRMKWMMAMKYPITA
LRIKWYMAMKRPITA

SEQ ID NO: 218548 - protein, 15 aa, Artificial Sequence
  Description of Artificial Sequence: Synthetic peptide
  Seed: LRMKWMMAMKYPITA
LRIKWYMAMKSPITA

SEQ ID NO: 218549 - protein, 15 aa, Artificial Sequence
  Description of Artificial Sequence: Synthetic peptide
  Seed: LRMKWMMAMKYPITA
LRIKWYMAMKTPITA

SEQ ID NO: 218550 - protein, 15 aa, Artificial Sequence
  Description of Artificial Sequence: Synthetic peptide
  Seed: LRMKWMMAMKYPITA
LRIKWYMAMKVPITA

SEQ ID NO: 218551 - protein, 15 aa, Artificial Sequence
  Description of Artificial Sequence: Synthetic peptide
  Seed: LRMKWMMAMKYPITA
LRIKWYMAMKYPITA

SEQ ID NO: 218552 - protein, 15 aa, Artificial Sequence
  Description of Artificial Sequence: Synthetic peptide
  Seed: LRMKWMMAMKYPITA
LRIKWYMDMKAPITA

SEQ ID NO: 218553 - protein, 15 aa, Artificial Sequence
  Description of Artificial Sequence: Synthetic peptide
  Seed: LRMKWMMAMKYPITA
LRIKWYMDMKFPITA

SEQ ID NO: 218554 - protein, 15 aa, Artificial Sequence
  Description of Artificial Sequence: Synthetic peptide
  Seed: LRMKWMMAMKYPITA
LRIKWYMDMKIPITA

SEQ ID NO: 218555 - protein, 15 aa, Artificial Sequence
  Description of Artificial Sequence: Synthetic peptide
  Seed: LRMKWMMAMKYPITA
LRIKWYMDMKLPITA

SEQ ID NO: 218556 - protein, 15 aa, Artificial Sequence
  Description of Artificial Sequence: Synthetic peptide
  Seed: LRMKWMMAMKYPITA
LRIKWYMDMKMPITA

SEQ ID NO: 218557 - protein, 15 aa, Artificial Sequence
  Description of Artificial Sequence: Synthetic peptide
  Seed: LRMKWMMAMKYPITA
LRIKWYMDMKTPITA

SEQ ID NO: 218558 - protein, 15 aa, Artificial Sequence
  Description of Artificial Sequence: Synthetic peptide
  Seed: LRMKWMMAMKYPITA
LRIKWYMDMKVPITA

SEQ ID NO: 218559 - protein, 15 aa, Artificial Sequence
  Description of Artificial Sequence: Synthetic peptide
  Seed: LRMKWMMAMKYPITA
LRIKWYMGMKAPITA

SEQ ID NO: 218560 - protein, 15 aa, Artificial Sequence
  Description of Artificial Sequence: Synthetic peptide
  Seed: LRMKWMMAMKYPITA
LRIKWYMGMKFPITA

SEQ ID NO: 218561 - protein, 15 aa, Artificial Sequence
  Description of Artificial Sequence: Synthetic peptide
  Seed: LRMKWMMAMKYPITA
LRIKWYMGMKGPITA

SEQ ID NO: 218562 - protein, 15 aa, Artificial Sequence
  Description of Artificial Sequence: Synthetic peptide
  Seed: LRMKWMMAMKYPITA
LRIKWYMGMKHPITA

SEQ ID NO: 218563 - protein, 15 aa, Artificial Sequence
  Description of Artificial Sequence: Synthetic peptide
  Seed: LRMKWMMAMKYPITA
LRIKWYMGMKIPITA

SEQ ID NO: 218564 - protein, 15 aa, Artificial Sequence
  Description of Artificial Sequence: Synthetic peptide
  Seed: LRMKWMMAMKYPITA
LRIKWYMGMKKPITA

SEQ ID NO: 218565 - protein, 15 aa, Artificial Sequence
  Description of Artificial Sequence: Synthetic peptide
  Seed: LRMKWMMAMKYPITA
LRIKWYMGMKLPITA

SEQ ID NO: 218566 - protein, 15 aa, Artificial Sequence
  Description of Artificial Sequence: Synthetic peptide
  Seed: LRMKWMMAMKYPITA
LRIKWYMGMKMPITA

SEQ ID NO: 218567 - protein, 15 aa, Artificial Sequence
  Description of Artificial Sequence: Synthetic peptide
  Seed: LRMKWMMAMKYPITA
LRIKWYMGMKNPITA

SEQ ID NO: 218568 - protein, 15 aa, Artificial Sequence
  Description of Artificial Sequence: Synthetic peptide
  Seed: LRMKWMMAMKYPITA
LRIKWYMGMKPPITA

SEQ ID NO: 218569 - protein, 15 aa, Artificial Sequence
  Description of Artificial Sequence: Synthetic peptide
  Seed: LRMKWMMAMKYPITA
LRIKWYMGMKQPITA

SEQ ID NO: 218570 - protein, 15 aa, Artificial Sequence
  Description of Artificial Sequence: Synthetic peptide
  Seed: LRMKWMMAMKYPITA
LRIKWYMGMKRPITA

SEQ ID NO: 218571 - protein, 15 aa, Artificial Sequence
  Description of Artificial Sequence: Synthetic peptide
  Seed: LRMKWMMAMKYPITA
LRIKWYMGMKSPITA

SEQ ID NO: 218572 - protein, 15 aa, Artificial Sequence
  Description of Artificial Sequence: Synthetic peptide
  Seed: LRMKWMMAMKYPITA
LRIKWYMGMKTPITA

SEQ ID NO: 218573 - protein, 15 aa, Artificial Sequence
  Description of Artificial Sequence: Synthetic peptide
  Seed: LRMKWMMAMKYPITA
LRIKWYMGMKVPITA

SEQ ID NO: 218574 - protein, 15 aa, Artificial Sequence
  Description of Artificial Sequence: Synthetic peptide
  Seed: LRMKWMMAMKYPITA
LRIKWYMGMKYPITA

SEQ ID NO: 218575 - protein, 15 aa, Artificial Sequence
  Description of Artificial Sequence: Synthetic peptide
  Seed: LRMKWMMAMKYPITA
LRIKWYMHMKAPITA

SEQ ID NO: 218576 - protein, 15 aa, Artificial Sequence
  Description of Artificial Sequence: Synthetic peptide
  Seed: LRMKWMMAMKYPITA
LRIKWYMHMKVPITA

SEQ ID NO: 218577 - protein, 15 aa, Artificial Sequence
  Description of Artificial Sequence: Synthetic peptide
  Seed: LRMKWMMAMKYPITA
LRIKWYMIMKAPITA

SEQ ID NO: 218578 - protein, 15 aa, Artificial Sequence
  Description of Artificial Sequence: Synthetic peptide
  Seed: LRMKWMMAMKYPITA
LRIKWYMIMKTPITA

SEQ ID NO: 218579 - protein, 15 aa, Artificial Sequence
  Description of Artificial Sequence: Synthetic peptide
  Seed: LRMKWMMAMKYPITA
LRIKWYMMMKAPITA

SEQ ID NO: 218580 - protein, 15 aa, Artificial Sequence
  Description of Artificial Sequence: Synthetic peptide
  Seed: LRMKWMMAMKYPITA
LRIKWYMNMKAPITA

SEQ ID NO: 218581 - protein, 15 aa, Artificial Sequence
  Description of Artificial Sequence: Synthetic peptide
  Seed: LRMKWMMAMKYPITA
LRIKWYMNMKCPITA

SEQ ID NO: 218582 - protein, 15 aa, Artificial Sequence
  Description of Artificial Sequence: Synthetic peptide
  Seed: LRMKWMMAMKYPITA
LRIKWYMNMKEPITA

SEQ ID NO: 218583 - protein, 15 aa, Artificial Sequence
  Description of Artificial Sequence: Synthetic peptide
  Seed: LRMKWMMAMKYPITA
LRIKWYMNMKFPITA

SEQ ID NO: 218584 - protein, 15 aa, Artificial Sequence
  Description of Artificial Sequence: Synthetic peptide
  Seed: LRMKWMMAMKYPITA
LRIKWYMNMKGPITA

SEQ ID NO: 218585 - protein, 15 aa, Artificial Sequence
  Description of Artificial Sequence: Synthetic peptide
  Seed: LRMKWMMAMKYPITA
LRIKWYMNMKHPITA

SEQ ID NO: 218586 - protein, 15 aa, Artificial Sequence
  Description of Artificial Sequence: Synthetic peptide
  Seed: LRMKWMMAMKYPITA
LRIKWYMNMKIPITA

SEQ ID NO: 218587 - protein, 15 aa, Artificial Sequence
  Description of Artificial Sequence: Synthetic peptide
  Seed: LRMKWMMAMKYPITA
LRIKWYMNMKKPITA

SEQ ID NO: 218588 - protein, 15 aa, Artificial Sequence
  Description of Artificial Sequence: Synthetic peptide
  Seed: LRMKWMMAMKYPITA
LRIKWYMNMKLPITA

SEQ ID NO: 218589 - protein, 15 aa, Artificial Sequence
  Description of Artificial Sequence: Synthetic peptide
  Seed: LRMKWMMAMKYPITA
LRIKWYMNMKMPITA

SEQ ID NO: 218590 - protein, 15 aa, Artificial Sequence
  Description of Artificial Sequence: Synthetic peptide
  Seed: LRMKWMMAMKYPITA
LRIKWYMNMKNPITA

SEQ ID NO: 218591 - protein, 15 aa, Artificial Sequence
  Description of Artificial Sequence: Synthetic peptide
  Seed: LRMKWMMAMKYPITA
LRIKWYMNMKPPITA

SEQ ID NO: 218592 - protein, 15 aa, Artificial Sequence
  Description of Artificial Sequence: Synthetic peptide
  Seed: LRMKWMMAMKYPITA
LRIKWYMNMKQPITA

SEQ ID NO: 218593 - protein, 15 aa, Artificial Sequence
  Description of Artificial Sequence: Synthetic peptide
  Seed: LRMKWMMAMKYPITA
LRIKWYMNMKRPITA

SEQ ID NO: 218594 - protein, 15 aa, Artificial Sequence
  Description of Artificial Sequence: Synthetic peptide
  Seed: LRMKWMMAMKYPITA
LRIKWYMNMKSPITA

SEQ ID NO: 218595 - protein, 15 aa, Artificial Sequence
  Description of Artificial Sequence: Synthetic peptide
  Seed: LRMKWMMAMKYPITA
LRIKWYMNMKTPITA

SEQ ID NO: 218596 - protein, 15 aa, Artificial Sequence
  Description of Artificial Sequence: Synthetic peptide
  Seed: LRMKWMMAMKYPITA
LRIKWYMNMKVPITA

SEQ ID NO: 218597 - protein, 15 aa, Artificial Sequence
  Description of Artificial Sequence: Synthetic peptide
  Seed: LRMKWMMAMKYPITA
LRIKWYMNMKYPITA

SEQ ID NO: 218598 - protein, 15 aa, Artificial Sequence
  Description of Artificial Sequence: Synthetic peptide
  Seed: LRMKWMMAMKYPITA
LRIKWYMPMKAPITA

SEQ ID NO: 218599 - protein, 15 aa, Artificial Sequence
  Description of Artificial Sequence: Synthetic peptide
  Seed: LRMKWMMAMKYPITA
LRIKWYMPMKFPITA

SEQ ID NO: 218600 - protein, 15 aa, Artificial Sequence
  Description of Artificial Sequence: Synthetic peptide
  Seed: LRMKWMMAMKYPITA
LRIKWYMPMKGPITA

SEQ ID NO: 218601 - protein, 15 aa, Artificial Sequence
  Description of Artificial Sequence: Synthetic peptide
  Seed: LRMKWMMAMKYPITA
LRIKWYMPMKIPITA

SEQ ID NO: 218602 - protein, 15 aa, Artificial Sequence
  Description of Artificial Sequence: Synthetic peptide
  Seed: LRMKWMMAMKYPITA
LRIKWYMPMKLPITA

SEQ ID NO: 218603 - protein, 15 aa, Artificial Sequence
  Description of Artificial Sequence: Synthetic peptide
  Seed: LRMKWMMAMKYPITA
LRIKWYMPMKMPITA

SEQ ID NO: 218604 - protein, 15 aa, Artificial Sequence
  Description of Artificial Sequence: Synthetic peptide
  Seed: LRMKWMMAMKYPITA
LRIKWYMPMKRPITA

SEQ ID NO: 218605 - protein, 15 aa, Artificial Sequence
  Description of Artificial Sequence: Synthetic peptide
  Seed: LRMKWMMAMKYPITA
LRIKWYMPMKSPITA

SEQ ID NO: 218606 - protein, 15 aa, Artificial Sequence
  Description of Artificial Sequence: Synthetic peptide
  Seed: LRMKWMMAMKYPITA
LRIKWYMPMKTPITA

SEQ ID NO: 218607 - protein, 15 aa, Artificial Sequence
  Description of Artificial Sequence: Synthetic peptide
  Seed: LRMKWMMAMKYPITA
LRIKWYMPMKVPITA

SEQ ID NO: 218608 - protein, 15 aa, Artificial Sequence
  Description of Artificial Sequence: Synthetic peptide
  Seed: LRMKWMMAMKYPITA
LRIKWYMSMKAPITA

SEQ ID NO: 218609 - protein, 15 aa, Artificial Sequence
  Description of Artificial Sequence: Synthetic peptide
  Seed: LRMKWMMAMKYPITA
LRIKWYMSMKCPITA

SEQ ID NO: 218610 - protein, 15 aa, Artificial Sequence
  Description of Artificial Sequence: Synthetic peptide
  Seed: LRMKWMMAMKYPITA
LRIKWYMSMKDPITA

SEQ ID NO: 218611 - protein, 15 aa, Artificial Sequence
  Description of Artificial Sequence: Synthetic peptide
  Seed: LRMKWMMAMKYPITA
LRIKWYMSMKEPITA

SEQ ID NO: 218612 - protein, 15 aa, Artificial Sequence
  Description of Artificial Sequence: Synthetic peptide
  Seed: LRMKWMMAMKYPITA
LRIKWYMSMKFPITA

SEQ ID NO: 218613 - protein, 15 aa, Artificial Sequence
  Description of Artificial Sequence: Synthetic peptide
  Seed: LRMKWMMAMKYPITA
LRIKWYMSMKGPITA

SEQ ID NO: 218614 - protein, 15 aa, Artificial Sequence
  Description of Artificial Sequence: Synthetic peptide
  Seed: LRMKWMMAMKYPITA
LRIKWYMSMKHPITA

SEQ ID NO: 218615 - protein, 15 aa, Artificial Sequence
  Description of Artificial Sequence: Synthetic peptide
  Seed: LRMKWMMAMKYPITA
LRIKWYMSMKIPITA

SEQ ID NO: 218616 - protein, 15 aa, Artificial Sequence
  Description of Artificial Sequence: Synthetic peptide
  Seed: LRMKWMMAMKYPITA
LRIKWYMSMKKPITA

SEQ ID NO: 218617 - protein, 15 aa, Artificial Sequence
  Description of Artificial Sequence: Synthetic peptide
  Seed: LRMKWMMAMKYPITA
LRIKWYMSMKLPITA

SEQ ID NO: 218618 - protein, 15 aa, Artificial Sequence
  Description of Artificial Sequence: Synthetic peptide
  Seed: LRMKWMMAMKYPITA
LRIKWYMSMKMPITA

SEQ ID NO: 218619 - protein, 15 aa, Artificial Sequence
  Description of Artificial Sequence: Synthetic peptide
  Seed: LRMKWMMAMKYPITA
LRIKWYMSMKNPITA

SEQ ID NO: 218620 - protein, 15 aa, Artificial Sequence
  Description of Artificial Sequence: Synthetic peptide
  Seed: LRMKWMMAMKYPITA
LRIKWYMSMKPPITA

SEQ ID NO: 218621 - protein, 15 aa, Artificial Sequence
  Description of Artificial Sequence: Synthetic peptide
  Seed: LRMKWMMAMKYPITA
LRIKWYMSMKQPITA

SEQ ID NO: 218622 - protein, 15 aa, Artificial Sequence
  Description of Artificial Sequence: Synthetic peptide
  Seed: LRMKWMMAMKYPITA
LRIKWYMSMKRPITA

SEQ ID NO: 218623 - protein, 15 aa, Artificial Sequence
  Description of Artificial Sequence: Synthetic peptide
  Seed: LRMKWMMAMKYPITA
LRIKWYMSMKSPITA

SEQ ID NO: 218624 - protein, 15 aa, Artificial Sequence
  Description of Artificial Sequence: Synthetic peptide
  Seed: LRMKWMMAMKYPITA
LRIKWYMSMKTPITA

SEQ ID NO: 218625 - protein, 15 aa, Artificial Sequence
  Description of Artificial Sequence: Synthetic peptide
  Seed: LRMKWMMAMKYPITA
LRIKWYMSMKVPITA

SEQ ID NO: 218626 - protein, 15 aa, Artificial Sequence
  Description of Artificial Sequence: Synthetic peptide
  Seed: LRMKWMMAMKYPITA
LRIKWYMSMKYPITA

SEQ ID NO: 218627 - protein, 15 aa, Artificial Sequence
  Description of Artificial Sequence: Synthetic peptide
  Seed: LRMKWMMAMKYPITA
LRIKWYMTMKAPITA

SEQ ID NO: 218628 - protein, 15 aa, Artificial Sequence
  Description of Artificial Sequence: Synthetic peptide
  Seed: LRMKWMMAMKYPITA
LRIKWYMTMKFPITA

SEQ ID NO: 218629 - protein, 15 aa, Artificial Sequence
  Description of Artificial Sequence: Synthetic peptide
  Seed: LRMKWMMAMKYPITA
LRIKWYMTMKGPITA

SEQ ID NO: 218630 - protein, 15 aa, Artificial Sequence
  Description of Artificial Sequence: Synthetic peptide
  Seed: LRMKWMMAMKYPITA
LRIKWYMTMKHPITA

SEQ ID NO: 218631 - protein, 15 aa, Artificial Sequence
  Description of Artificial Sequence: Synthetic peptide
  Seed: LRMKWMMAMKYPITA
LRIKWYMTMKIPITA

SEQ ID NO: 218632 - protein, 15 aa, Artificial Sequence
  Description of Artificial Sequence: Synthetic peptide
  Seed: LRMKWMMAMKYPITA
LRIKWYMTMKKPITA

SEQ ID NO: 218633 - protein, 15 aa, Artificial Sequence
  Description of Artificial Sequence: Synthetic peptide
  Seed: LRMKWMMAMKYPITA
LRIKWYMTMKLPITA

SEQ ID NO: 218634 - protein, 15 aa, Artificial Sequence
  Description of Artificial Sequence: Synthetic peptide
  Seed: LRMKWMMAMKYPITA
LRIKWYMTMKMPITA

SEQ ID NO: 218635 - protein, 15 aa, Artificial Sequence
  Description of Artificial Sequence: Synthetic peptide
  Seed: LRMKWMMAMKYPITA
LRIKWYMTMKNPITA

SEQ ID NO: 218636 - protein, 15 aa, Artificial Sequence
  Description of Artificial Sequence: Synthetic peptide
  Seed: LRMKWMMAMKYPITA
LRIKWYMTMKRPITA

SEQ ID NO: 218637 - protein, 15 aa, Artificial Sequence
  Description of Artificial Sequence: Synthetic peptide
  Seed: LRMKWMMAMKYPITA
LRIKWYMTMKSPITA

SEQ ID NO: 218638 - protein, 15 aa, Artificial Sequence
  Description of Artificial Sequence: Synthetic peptide
  Seed: LRMKWMMAMKYPITA
LRIKWYMTMKTPITA

SEQ ID NO: 218639 - protein, 15 aa, Artificial Sequence
  Description of Artificial Sequence: Synthetic peptide
  Seed: LRMKWMMAMKYPITA
LRIKWYMTMKVPITA

SEQ ID NO: 218640 - protein, 15 aa, Artificial Sequence
  Description of Artificial Sequence: Synthetic peptide
  Seed: LRMKWMMAMKYPITA
LRIKWYMTMKYPITA

SEQ ID NO: 218641 - protein, 15 aa, Artificial Sequence
  Description of Artificial Sequence: Synthetic peptide
  Seed: LRMKWMMAMKYPITA
LRIKWYMVMKAPITA

SEQ ID NO: 218642 - protein, 15 aa, Artificial Sequence
  Description of Artificial Sequence: Synthetic peptide
  Seed: LRMKWMMAMKYPITA
LRIKWYMVMKGPITA

SEQ ID NO: 218643 - protein, 15 aa, Artificial Sequence
  Description of Artificial Sequence: Synthetic peptide
  Seed: LRMKWMMAMKYPITA
LRIKWYMVMKHPITA

SEQ ID NO: 218644 - protein, 15 aa, Artificial Sequence
  Description of Artificial Sequence: Synthetic peptide
  Seed: LRMKWMMAMKYPITA
LRIKWYMVMKIPITA

SEQ ID NO: 218645 - protein, 15 aa, Artificial Sequence
  Description of Artificial Sequence: Synthetic peptide
  Seed: LRMKWMMAMKYPITA
LRIKWYMVMKLPITA

SEQ ID NO: 218646 - protein, 15 aa, Artificial Sequence
  Description of Artificial Sequence: Synthetic peptide
  Seed: LRMKWMMAMKYPITA
LRIKWYMVMKRPITA

SEQ ID NO: 218647 - protein, 15 aa, Artificial Sequence
  Description of Artificial Sequence: Synthetic peptide
  Seed: LRMKWMMAMKYPITA
LRIKWYMVMKSPITA

SEQ ID NO: 218648 - protein, 15 aa, Artificial Sequence
  Description of Artificial Sequence: Synthetic peptide
  Seed: LRMKWMMAMKYPITA
LRIKWYMVMKTPITA

SEQ ID NO: 218649 - protein, 15 aa, Artificial Sequence
  Description of Artificial Sequence: Synthetic peptide
  Seed: LRMKWMMAMKYPITA
LRIKWYMVMKVPITA

SEQ ID NO: 218650 - protein, 15 aa, Artificial Sequence
  Description of Artificial Sequence: Synthetic peptide
  Seed: LRMKWMMAMKYPITA
LRLKWAMAMKAPITA

SEQ ID NO: 218651 - protein, 15 aa, Artificial Sequence
  Description of Artificial Sequence: Synthetic peptide
  Seed: LRMKWMMAMKYPITA
LRLKWAMAMKIPITA

SEQ ID NO: 218652 - protein, 15 aa, Artificial Sequence
  Description of Artificial Sequence: Synthetic peptide
  Seed: LRMKWMMAMKYPITA
LRLKWAMAMKLPITA

SEQ ID NO: 218653 - protein, 15 aa, Artificial Sequence
  Description of Artificial Sequence: Synthetic peptide
  Seed: LRMKWMMAMKYPITA
LRLKWAMAMKMPITA

SEQ ID NO: 218654 - protein, 15 aa, Artificial Sequence
  Description of Artificial Sequence: Synthetic peptide
  Seed: LRMKWMMAMKYPITA
LRLKWAMAMKSPITA

SEQ ID NO: 218655 - protein, 15 aa, Artificial Sequence
  Description of Artificial Sequence: Synthetic peptide
  Seed: LRMKWMMAMKYPITA
LRLKWAMAMKTPITA

SEQ ID NO: 218656 - protein, 15 aa, Artificial Sequence
  Description of Artificial Sequence: Synthetic peptide
  Seed: LRMKWMMAMKYPITA
LRLKWAMAMKVPITA

SEQ ID NO: 218657 - protein, 15 aa, Artificial Sequence
  Description of Artificial Sequence: Synthetic peptide
  Seed: LRMKWMMAMKYPITA
LRLKWAMFMKAPITA

SEQ ID NO: 218658 - protein, 15 aa, Artificial Sequence
  Description of Artificial Sequence: Synthetic peptide
  Seed: LRMKWMMAMKYPITA
LRLKWAMFMKDPITA

SEQ ID NO: 218659 - protein, 15 aa, Artificial Sequence
  Description of Artificial Sequence: Synthetic peptide
  Seed: LRMKWMMAMKYPITA
LRLKWAMFMKEPITA

SEQ ID NO: 218660 - protein, 15 aa, Artificial Sequence
  Description of Artificial Sequence: Synthetic peptide
  Seed: LRMKWMMAMKYPITA
LRLKWAMFMKFPITA

SEQ ID NO: 218661 - protein, 15 aa, Artificial Sequence
  Description of Artificial Sequence: Synthetic peptide
  Seed: LRMKWMMAMKYPITA
LRLKWAMFMKIPITA

SEQ ID NO: 218662 - protein, 15 aa, Artificial Sequence
  Description of Artificial Sequence: Synthetic peptide
  Seed: LRMKWMMAMKYPITA
LRLKWAMFMKLPITA

SEQ ID NO: 218663 - protein, 15 aa, Artificial Sequence
  Description of Artificial Sequence: Synthetic peptide
  Seed: LRMKWMMAMKYPITA
LRLKWAMFMKMPITA

SEQ ID NO: 218664 - protein, 15 aa, Artificial Sequence
  Description of Artificial Sequence: Synthetic peptide
  Seed: LRMKWMMAMKYPITA
LRLKWAMFMKNPITA

SEQ ID NO: 218665 - protein, 15 aa, Artificial Sequence
  Description of Artificial Sequence: Synthetic peptide
  Seed: LRMKWMMAMKYPITA
LRLKWAMFMKVPITA

SEQ ID NO: 218666 - protein, 15 aa, Artificial Sequence
  Description of Artificial Sequence: Synthetic peptide
  Seed: LRMKWMMAMKYPITA
LRLKWAMGMKAPITA

SEQ ID NO: 218667 - protein, 15 aa, Artificial Sequence
  Description of Artificial Sequence: Synthetic peptide
  Seed: LRMKWMMAMKYPITA
LRLKWAMGMKIPITA

SEQ ID NO: 218668 - protein, 15 aa, Artificial Sequence
  Description of Artificial Sequence: Synthetic peptide
  Seed: LRMKWMMAMKYPITA
LRLKWAMGMKLPITA

SEQ ID NO: 218669 - protein, 15 aa, Artificial Sequence
  Description of Artificial Sequence: Synthetic peptide
  Seed: LRMKWMMAMKYPITA
LRLKWAMGMKVPITA

SEQ ID NO: 218670 - protein, 15 aa, Artificial Sequence
  Description of Artificial Sequence: Synthetic peptide
  Seed: LRMKWMMAMKYPITA
LRLKWAMPMKVPITA

SEQ ID NO: 218671 - protein, 15 aa, Artificial Sequence
  Description of Artificial Sequence: Synthetic peptide
  Seed: LRMKWMMAMKYPITA
LRLKWAMSMKAPITA

SEQ ID NO: 218672 - protein, 15 aa, Artificial Sequence
  Description of Artificial Sequence: Synthetic peptide
  Seed: LRMKWMMAMKYPITA
LRLKWAMSMKIPITA

SEQ ID NO: 218673 - protein, 15 aa, Artificial Sequence
  Description of Artificial Sequence: Synthetic peptide
  Seed: LRMKWMMAMKYPITA
LRLKWAMSMKLPITA

SEQ ID NO: 218674 - protein, 15 aa, Artificial Sequence
  Description of Artificial Sequence: Synthetic peptide
  Seed: LRMKWMMAMKYPITA
LRLKWAMSMKVPITA

SEQ ID NO: 218675 - protein, 15 aa, Artificial Sequence
  Description of Artificial Sequence: Synthetic peptide
  Seed: LRMKWMMAMKYPITA
LRLKWAMTMKAPITA

SEQ ID NO: 218676 - protein, 15 aa, Artificial Sequence
  Description of Artificial Sequence: Synthetic peptide
  Seed: LRMKWMMAMKYPITA
LRLKWAMTMKSPITA

SEQ ID NO: 218677 - protein, 15 aa, Artificial Sequence
  Description of Artificial Sequence: Synthetic peptide
  Seed: LRMKWMMAMKYPITA
LRLKWDMFMKIPITA

SEQ ID NO: 218678 - protein, 15 aa, Artificial Sequence
  Description of Artificial Sequence: Synthetic peptide
  Seed: LRMKWMMAMKYPITA
LRLKWDMFMKLPITA

SEQ ID NO: 218679 - protein, 15 aa, Artificial Sequence
  Description of Artificial Sequence: Synthetic peptide
  Seed: LRMKWMMAMKYPITA
LRLKWDMFMKVPITA

SEQ ID NO: 218680 - protein, 15 aa, Artificial Sequence
  Description of Artificial Sequence: Synthetic peptide
  Seed: LRMKWMMAMKYPITA
LRLKWEMFMKAPITA

SEQ ID NO: 218681 - protein, 15 aa, Artificial Sequence
  Description of Artificial Sequence: Synthetic peptide
  Seed: LRMKWMMAMKYPITA
LRLKWEMFMKEPITA

SEQ ID NO: 218682 - protein, 15 aa, Artificial Sequence
  Description of Artificial Sequence: Synthetic peptide
  Seed: LRMKWMMAMKYPITA
LRLKWEMFMKFPITA

SEQ ID NO: 218683 - protein, 15 aa, Artificial Sequence
  Description of Artificial Sequence: Synthetic peptide
  Seed: LRMKWMMAMKYPITA
LRLKWEMFMKIPITA

SEQ ID NO: 218684 - protein, 15 aa, Artificial Sequence
  Description of Artificial Sequence: Synthetic peptide
  Seed: LRMKWMMAMKYPITA
LRLKWEMFMKLPITA

SEQ ID NO: 218685 - protein, 15 aa, Artificial Sequence
  Description of Artificial Sequence: Synthetic peptide
  Seed: LRMKWMMAMKYPITA
LRLKWEMFMKMPITA

SEQ ID NO: 218686 - protein, 15 aa, Artificial Sequence
  Description of Artificial Sequence: Synthetic peptide
  Seed: LRMKWMMAMKYPITA
LRLKWEMFMKNPITA

SEQ ID NO: 218687 - protein, 15 aa, Artificial Sequence
  Description of Artificial Sequence: Synthetic peptide
  Seed: LRMKWMMAMKYPITA
LRLKWEMFMKSPITA

SEQ ID NO: 218688 - protein, 15 aa, Artificial Sequence
  Description of Artificial Sequence: Synthetic peptide
  Seed: LRMKWMMAMKYPITA
LRLKWEMFMKTPITA

SEQ ID NO: 218689 - protein, 15 aa, Artificial Sequence
  Description of Artificial Sequence: Synthetic peptide
  Seed: LRMKWMMAMKYPITA
LRLKWEMFMKVPITA

SEQ ID NO: 218690 - protein, 15 aa, Artificial Sequence
  Description of Artificial Sequence: Synthetic peptide
  Seed: LRMKWMMAMKYPITA
LRLKWEMIMKLPITA

SEQ ID NO: 218691 - protein, 15 aa, Artificial Sequence
  Description of Artificial Sequence: Synthetic peptide
  Seed: LRMKWMMAMKYPITA
LRLKWEMLMKLPITA

SEQ ID NO: 218692 - protein, 15 aa, Artificial Sequence
  Description of Artificial Sequence: Synthetic peptide
  Seed: LRMKWMMAMKYPITA
LRLKWEMLMKMPITA

SEQ ID NO: 218693 - protein, 15 aa, Artificial Sequence
  Description of Artificial Sequence: Synthetic peptide
  Seed: LRMKWMMAMKYPITA
LRLKWEMLMKVPITA

SEQ ID NO: 218694 - protein, 15 aa, Artificial Sequence
  Description of Artificial Sequence: Synthetic peptide
  Seed: LRMKWMMAMKYPITA
LRLKWFMAMKAPITA

SEQ ID NO: 218695 - protein, 15 aa, Artificial Sequence
  Description of Artificial Sequence: Synthetic peptide
  Seed: LRMKWMMAMKYPITA
LRLKWFMAMKGPITA

SEQ ID NO: 218696 - protein, 15 aa, Artificial Sequence
  Description of Artificial Sequence: Synthetic peptide
  Seed: LRMKWMMAMKYPITA
LRLKWFMAMKIPITA

SEQ ID NO: 218697 - protein, 15 aa, Artificial Sequence
  Description of Artificial Sequence: Synthetic peptide
  Seed: LRMKWMMAMKYPITA
LRLKWFMAMKLPITA

SEQ ID NO: 218698 - protein, 15 aa, Artificial Sequence
  Description of Artificial Sequence: Synthetic peptide
  Seed: LRMKWMMAMKYPITA
LRLKWFMAMKMPITA

SEQ ID NO: 218699 - protein, 15 aa, Artificial Sequence
  Description of Artificial Sequence: Synthetic peptide
  Seed: LRMKWMMAMKYPITA
LRLKWFMAMKSPITA

SEQ ID NO: 218700 - protein, 15 aa, Artificial Sequence
  Description of Artificial Sequence: Synthetic peptide
  Seed: LRMKWMMAMKYPITA
LRLKWFMAMKTPITA

SEQ ID NO: 218701 - protein, 15 aa, Artificial Sequence
  Description of Artificial Sequence: Synthetic peptide
  Seed: LRMKWMMAMKYPITA
LRLKWFMAMKVPITA

SEQ ID NO: 218702 - protein, 15 aa, Artificial Sequence
  Description of Artificial Sequence: Synthetic peptide
  Seed: LRMKWMMAMKYPITA
LRLKWFMDMKIPITA

SEQ ID NO: 218703 - protein, 15 aa, Artificial Sequence
  Description of Artificial Sequence: Synthetic peptide
  Seed: LRMKWMMAMKYPITA
LRLKWFMDMKLPITA

SEQ ID NO: 218704 - protein, 15 aa, Artificial Sequence
  Description of Artificial Sequence: Synthetic peptide
  Seed: LRMKWMMAMKYPITA
LRLKWFMDMKVPITA

SEQ ID NO: 218705 - protein, 15 aa, Artificial Sequence
  Description of Artificial Sequence: Synthetic peptide
  Seed: LRMKWMMAMKYPITA
LRLKWFMGMKAPITA

SEQ ID NO: 218706 - protein, 15 aa, Artificial Sequence
  Description of Artificial Sequence: Synthetic peptide
  Seed: LRMKWMMAMKYPITA
LRLKWFMGMKIPITA

SEQ ID NO: 218707 - protein, 15 aa, Artificial Sequence
  Description of Artificial Sequence: Synthetic peptide
  Seed: LRMKWMMAMKYPITA
LRLKWFMGMKLPITA

SEQ ID NO: 218708 - protein, 15 aa, Artificial Sequence
  Description of Artificial Sequence: Synthetic peptide
  Seed: LRMKWMMAMKYPITA
LRLKWFMGMKMPITA

SEQ ID NO: 218709 - protein, 15 aa, Artificial Sequence
  Description of Artificial Sequence: Synthetic peptide
  Seed: LRMKWMMAMKYPITA
LRLKWFMGMKSPITA

SEQ ID NO: 218710 - protein, 15 aa, Artificial Sequence
  Description of Artificial Sequence: Synthetic peptide
  Seed: LRMKWMMAMKYPITA
LRLKWFMGMKTPITA

SEQ ID NO: 218711 - protein, 15 aa, Artificial Sequence
  Description of Artificial Sequence: Synthetic peptide
  Seed: LRMKWMMAMKYPITA
LRLKWFMGMKVPITA

SEQ ID NO: 218712 - protein, 15 aa, Artificial Sequence
  Description of Artificial Sequence: Synthetic peptide
  Seed: LRMKWMMAMKYPITA
LRLKWFMNMKAPITA

SEQ ID NO: 218713 - protein, 15 aa, Artificial Sequence
  Description of Artificial Sequence: Synthetic peptide
  Seed: LRMKWMMAMKYPITA
LRLKWFMNMKFPITA

SEQ ID NO: 218714 - protein, 15 aa, Artificial Sequence
  Description of Artificial Sequence: Synthetic peptide
  Seed: LRMKWMMAMKYPITA
LRLKWFMNMKGPITA

SEQ ID NO: 218715 - protein, 15 aa, Artificial Sequence
  Description of Artificial Sequence: Synthetic peptide
  Seed: LRMKWMMAMKYPITA
LRLKWFMNMKIPITA

SEQ ID NO: 218716 - protein, 15 aa, Artificial Sequence
  Description of Artificial Sequence: Synthetic peptide
  Seed: LRMKWMMAMKYPITA
LRLKWFMNMKLPITA

SEQ ID NO: 218717 - protein, 15 aa, Artificial Sequence
  Description of Artificial Sequence: Synthetic peptide
  Seed: LRMKWMMAMKYPITA
LRLKWFMNMKMPITA

SEQ ID NO: 218718 - protein, 15 aa, Artificial Sequence
  Description of Artificial Sequence: Synthetic peptide
  Seed: LRMKWMMAMKYPITA
LRLKWFMNMKSPITA

SEQ ID NO: 218719 - protein, 15 aa, Artificial Sequence
  Description of Artificial Sequence: Synthetic peptide
  Seed: LRMKWMMAMKYPITA
LRLKWFMNMKTPITA

SEQ ID NO: 218720 - protein, 15 aa, Artificial Sequence
  Description of Artificial Sequence: Synthetic peptide
  Seed: LRMKWMMAMKYPITA
LRLKWFMNMKVPITA

SEQ ID NO: 218721 - protein, 15 aa, Artificial Sequence
  Description of Artificial Sequence: Synthetic peptide
  Seed: LRMKWMMAMKYPITA
LRLKWFMNMKYPITA

SEQ ID NO: 218722 - protein, 15 aa, Artificial Sequence
  Description of Artificial Sequence: Synthetic peptide
  Seed: LRMKWMMAMKYPITA
LRLKWFMPMKAPITA

SEQ ID NO: 218723 - protein, 15 aa, Artificial Sequence
  Description of Artificial Sequence: Synthetic peptide
  Seed: LRMKWMMAMKYPITA
LRLKWFMPMKIPITA

SEQ ID NO: 218724 - protein, 15 aa, Artificial Sequence
  Description of Artificial Sequence: Synthetic peptide
  Seed: LRMKWMMAMKYPITA
LRLKWFMPMKLPITA

SEQ ID NO: 218725 - protein, 15 aa, Artificial Sequence
  Description of Artificial Sequence: Synthetic peptide
  Seed: LRMKWMMAMKYPITA
LRLKWFMPMKVPITA

SEQ ID NO: 218726 - protein, 15 aa, Artificial Sequence
  Description of Artificial Sequence: Synthetic peptide
  Seed: LRMKWMMAMKYPITA
LRLKWFMSMKAPITA

SEQ ID NO: 218727 - protein, 15 aa, Artificial Sequence
  Description of Artificial Sequence: Synthetic peptide
  Seed: LRMKWMMAMKYPITA
LRLKWFMSMKFPITA

SEQ ID NO: 218728 - protein, 15 aa, Artificial Sequence
  Description of Artificial Sequence: Synthetic peptide
  Seed: LRMKWMMAMKYPITA
LRLKWFMSMKGPITA

SEQ ID NO: 218729 - protein, 15 aa, Artificial Sequence
  Description of Artificial Sequence: Synthetic peptide
  Seed: LRMKWMMAMKYPITA
LRLKWFMSMKHPITA

SEQ ID NO: 218730 - protein, 15 aa, Artificial Sequence
  Description of Artificial Sequence: Synthetic peptide
  Seed: LRMKWMMAMKYPITA
LRLKWFMSMKIPITA

SEQ ID NO: 218731 - protein, 15 aa, Artificial Sequence
  Description of Artificial Sequence: Synthetic peptide
  Seed: LRMKWMMAMKYPITA
LRLKWFMSMKLPITA

SEQ ID NO: 218732 - protein, 15 aa, Artificial Sequence
  Description of Artificial Sequence: Synthetic peptide
  Seed: LRMKWMMAMKYPITA
LRLKWFMSMKMPITA

SEQ ID NO: 218733 - protein, 15 aa, Artificial Sequence
  Description of Artificial Sequence: Synthetic peptide
  Seed: LRMKWMMAMKYPITA
LRLKWFMSMKNPITA

SEQ ID NO: 218734 - protein, 15 aa, Artificial Sequence
  Description of Artificial Sequence: Synthetic peptide
  Seed: LRMKWMMAMKYPITA
LRLKWFMSMKRPITA

SEQ ID NO: 218735 - protein, 15 aa, Artificial Sequence
  Description of Artificial Sequence: Synthetic peptide
  Seed: LRMKWMMAMKYPITA
LRLKWFMSMKSPITA

SEQ ID NO: 218736 - protein, 15 aa, Artificial Sequence
  Description of Artificial Sequence: Synthetic peptide
  Seed: LRMKWMMAMKYPITA
LRLKWFMSMKTPITA

SEQ ID NO: 218737 - protein, 15 aa, Artificial Sequence
  Description of Artificial Sequence: Synthetic peptide
  Seed: LRMKWMMAMKYPITA
LRLKWFMSMKVPITA

SEQ ID NO: 218738 - protein, 15 aa, Artificial Sequence
  Description of Artificial Sequence: Synthetic peptide
  Seed: LRMKWMMAMKYPITA
LRLKWFMSMKYPITA

SEQ ID NO: 218739 - protein, 15 aa, Artificial Sequence
  Description of Artificial Sequence: Synthetic peptide
  Seed: LRMKWMMAMKYPITA
LRLKWFMTMKAPITA

SEQ ID NO: 218740 - protein, 15 aa, Artificial Sequence
  Description of Artificial Sequence: Synthetic peptide
  Seed: LRMKWMMAMKYPITA
LRLKWFMTMKIPITA

SEQ ID NO: 218741 - protein, 15 aa, Artificial Sequence
  Description of Artificial Sequence: Synthetic peptide
  Seed: LRMKWMMAMKYPITA
LRLKWFMTMKLPITA

SEQ ID NO: 218742 - protein, 15 aa, Artificial Sequence
  Description of Artificial Sequence: Synthetic peptide
  Seed: LRMKWMMAMKYPITA
LRLKWFMTMKSPITA

SEQ ID NO: 218743 - protein, 15 aa, Artificial Sequence
  Description of Artificial Sequence: Synthetic peptide
  Seed: LRMKWMMAMKYPITA
LRLKWFMTMKTPITA

SEQ ID NO: 218744 - protein, 15 aa, Artificial Sequence
  Description of Artificial Sequence: Synthetic peptide
  Seed: LRMKWMMAMKYPITA
LRLKWFMTMKVPITA

SEQ ID NO: 218745 - protein, 15 aa, Artificial Sequence
  Description of Artificial Sequence: Synthetic peptide
  Seed: LRMKWMMAMKYPITA
LRLKWHMFMKFPITA

SEQ ID NO: 218746 - protein, 15 aa, Artificial Sequence
  Description of Artificial Sequence: Synthetic peptide
  Seed: LRMKWMMAMKYPITA
LRLKWHMFMKIPITA

SEQ ID NO: 218747 - protein, 15 aa, Artificial Sequence
  Description of Artificial Sequence: Synthetic peptide
  Seed: LRMKWMMAMKYPITA
LRLKWHMFMKLPITA

SEQ ID NO: 218748 - protein, 15 aa, Artificial Sequence
  Description of Artificial Sequence: Synthetic peptide
  Seed: LRMKWMMAMKYPITA
LRLKWHMFMKMPITA

SEQ ID NO: 218749 - protein, 15 aa, Artificial Sequence
  Description of Artificial Sequence: Synthetic peptide
  Seed: LRMKWMMAMKYPITA
LRLKWHMFMKVPITA

SEQ ID NO: 218750 - protein, 15 aa, Artificial Sequence
  Description of Artificial Sequence: Synthetic peptide
  Seed: LRMKWMMAMKYPITA
LRLKWHMLMKLPITA

SEQ ID NO: 218751 - protein, 15 aa, Artificial Sequence
  Description of Artificial Sequence: Synthetic peptide
  Seed: LRMKWMMAMKYPITA
LRLKWHMNMKLPITA

SEQ ID NO: 218752 - protein, 15 aa, Artificial Sequence
  Description of Artificial Sequence: Synthetic peptide
  Seed: LRMKWMMAMKYPITA
LRLKWHMNMKVPITA

SEQ ID NO: 218753 - protein, 15 aa, Artificial Sequence
  Description of Artificial Sequence: Synthetic peptide
  Seed: LRMKWMMAMKYPITA
LRLKWHMSMKIPITA

SEQ ID NO: 218754 - protein, 15 aa, Artificial Sequence
  Description of Artificial Sequence: Synthetic peptide
  Seed: LRMKWMMAMKYPITA
LRLKWHMSMKLPITA

SEQ ID NO: 218755 - protein, 15 aa, Artificial Sequence
  Description of Artificial Sequence: Synthetic peptide
  Seed: LRMKWMMAMKYPITA
LRLKWHMSMKVPITA

SEQ ID NO: 218756 - protein, 15 aa, Artificial Sequence
  Description of Artificial Sequence: Synthetic peptide
  Seed: LRMKWMMAMKYPITA
LRLKWIMAMKIPITA

SEQ ID NO: 218757 - protein, 15 aa, Artificial Sequence
  Description of Artificial Sequence: Synthetic peptide
  Seed: LRMKWMMAMKYPITA
LRLKWIMAMKLPITA

SEQ ID NO: 218758 - protein, 15 aa, Artificial Sequence
  Description of Artificial Sequence: Synthetic peptide
  Seed: LRMKWMMAMKYPITA
LRLKWIMAMKMPITA

SEQ ID NO: 218759 - protein, 15 aa, Artificial Sequence
  Description of Artificial Sequence: Synthetic peptide
  Seed: LRMKWMMAMKYPITA
LRLKWIMAMKVPITA

SEQ ID NO: 218760 - protein, 15 aa, Artificial Sequence
  Description of Artificial Sequence: Synthetic peptide
  Seed: LRMKWMMAMKYPITA
LRLKWIMFMKEPITA

SEQ ID NO: 218761 - protein, 15 aa, Artificial Sequence
  Description of Artificial Sequence: Synthetic peptide
  Seed: LRMKWMMAMKYPITA
LRLKWIMGMKLPITA

SEQ ID NO: 218762 - protein, 15 aa, Artificial Sequence
  Description of Artificial Sequence: Synthetic peptide
  Seed: LRMKWMMAMKYPITA
LRLKWIMGMKVPITA

SEQ ID NO: 218763 - protein, 15 aa, Artificial Sequence
  Description of Artificial Sequence: Synthetic peptide
  Seed: LRMKWMMAMKYPITA
LRLKWIMNMKAPITA

SEQ ID NO: 218764 - protein, 15 aa, Artificial Sequence
  Description of Artificial Sequence: Synthetic peptide
  Seed: LRMKWMMAMKYPITA
LRLKWIMNMKGPITA

SEQ ID NO: 218765 - protein, 15 aa, Artificial Sequence
  Description of Artificial Sequence: Synthetic peptide
  Seed: LRMKWMMAMKYPITA
LRLKWIMNMKIPITA

SEQ ID NO: 218766 - protein, 15 aa, Artificial Sequence
  Description of Artificial Sequence: Synthetic peptide
  Seed: LRMKWMMAMKYPITA
LRLKWIMNMKLPITA

SEQ ID NO: 218767 - protein, 15 aa, Artificial Sequence
  Description of Artificial Sequence: Synthetic peptide
  Seed: LRMKWMMAMKYPITA
LRLKWIMNMKVPITA

SEQ ID NO: 218768 - protein, 15 aa, Artificial Sequence
  Description of Artificial Sequence: Synthetic peptide
  Seed: LRMKWMMAMKYPITA
LRLKWIMPMKVPITA

SEQ ID NO: 218769 - protein, 15 aa, Artificial Sequence
  Description of Artificial Sequence: Synthetic peptide
  Seed: LRMKWMMAMKYPITA
LRLKWIMSMKAPITA

SEQ ID NO: 218770 - protein, 15 aa, Artificial Sequence
  Description of Artificial Sequence: Synthetic peptide
  Seed: LRMKWMMAMKYPITA
LRLKWIMSMKGPITA

SEQ ID NO: 218771 - protein, 15 aa, Artificial Sequence
  Description of Artificial Sequence: Synthetic peptide
  Seed: LRMKWMMAMKYPITA
LRLKWIMSMKIPITA

SEQ ID NO: 218772 - protein, 15 aa, Artificial Sequence
  Description of Artificial Sequence: Synthetic peptide
  Seed: LRMKWMMAMKYPITA
LRLKWIMSMKLPITA

SEQ ID NO: 218773 - protein, 15 aa, Artificial Sequence
  Description of Artificial Sequence: Synthetic peptide
  Seed: LRMKWMMAMKYPITA
LRLKWIMSMKVPITA

SEQ ID NO: 218774 - protein, 15 aa, Artificial Sequence
  Description of Artificial Sequence: Synthetic peptide
  Seed: LRMKWMMAMKYPITA
LRLKWIMTMKAPITA

SEQ ID NO: 218775 - protein, 15 aa, Artificial Sequence
  Description of Artificial Sequence: Synthetic peptide
  Seed: LRMKWMMAMKYPITA
LRLKWIMTMKGPITA

SEQ ID NO: 218776 - protein, 15 aa, Artificial Sequence
  Description of Artificial Sequence: Synthetic peptide
  Seed: LRMKWMMAMKYPITA
LRLKWLMAMKIPITA

SEQ ID NO: 218777 - protein, 15 aa, Artificial Sequence
  Description of Artificial Sequence: Synthetic peptide
  Seed: LRMKWMMAMKYPITA
LRLKWLMAMKLPITA

SEQ ID NO: 218778 - protein, 15 aa, Artificial Sequence
  Description of Artificial Sequence: Synthetic peptide
  Seed: LRMKWMMAMKYPITA
LRLKWLMAMKMPITA

SEQ ID NO: 218779 - protein, 15 aa, Artificial Sequence
  Description of Artificial Sequence: Synthetic peptide
  Seed: LRMKWMMAMKYPITA
LRLKWLMAMKTPITA

SEQ ID NO: 218780 - protein, 15 aa, Artificial Sequence
  Description of Artificial Sequence: Synthetic peptide
  Seed: LRMKWMMAMKYPITA
LRLKWLMAMKVPITA

SEQ ID NO: 218781 - protein, 15 aa, Artificial Sequence
  Description of Artificial Sequence: Synthetic peptide
  Seed: LRMKWMMAMKYPITA
LRLKWLMFMKEPITA

SEQ ID NO: 218782 - protein, 15 aa, Artificial Sequence
  Description of Artificial Sequence: Synthetic peptide
  Seed: LRMKWMMAMKYPITA
LRLKWLMGMKAPITA

SEQ ID NO: 218783 - protein, 15 aa, Artificial Sequence
  Description of Artificial Sequence: Synthetic peptide
  Seed: LRMKWMMAMKYPITA
LRLKWLMGMKGPITA

SEQ ID NO: 218784 - protein, 15 aa, Artificial Sequence
  Description of Artificial Sequence: Synthetic peptide
  Seed: LRMKWMMAMKYPITA
LRLKWLMGMKIPITA

SEQ ID NO: 218785 - protein, 15 aa, Artificial Sequence
  Description of Artificial Sequence: Synthetic peptide
  Seed: LRMKWMMAMKYPITA
LRLKWLMGMKLPITA

SEQ ID NO: 218786 - protein, 15 aa, Artificial Sequence
  Description of Artificial Sequence: Synthetic peptide
  Seed: LRMKWMMAMKYPITA
LRLKWLMGMKMPITA

SEQ ID NO: 218787 - protein, 15 aa, Artificial Sequence
  Description of Artificial Sequence: Synthetic peptide
  Seed: LRMKWMMAMKYPITA
LRLKWLMGMKSPITA

SEQ ID NO: 218788 - protein, 15 aa, Artificial Sequence
  Description of Artificial Sequence: Synthetic peptide
  Seed: LRMKWMMAMKYPITA
LRLKWLMGMKTPITA

SEQ ID NO: 218789 - protein, 15 aa, Artificial Sequence
  Description of Artificial Sequence: Synthetic peptide
  Seed: LRMKWMMAMKYPITA
LRLKWLMGMKVPITA

SEQ ID NO: 218790 - protein, 15 aa, Artificial Sequence
  Description of Artificial Sequence: Synthetic peptide
  Seed: LRMKWMMAMKYPITA
LRLKWLMNMKAPITA

SEQ ID NO: 218791 - protein, 15 aa, Artificial Sequence
  Description of Artificial Sequence: Synthetic peptide
  Seed: LRMKWMMAMKYPITA
LRLKWLMNMKGPITA

SEQ ID NO: 218792 - protein, 15 aa, Artificial Sequence
  Description of Artificial Sequence: Synthetic peptide
  Seed: LRMKWMMAMKYPITA
LRLKWLMNMKSPITA

SEQ ID NO: 218793 - protein, 15 aa, Artificial Sequence
  Description of Artificial Sequence: Synthetic peptide
  Seed: LRMKWMMAMKYPITA
LRLKWLMNMKVPITA

SEQ ID NO: 218794 - protein, 15 aa, Artificial Sequence
  Description of Artificial Sequence: Synthetic peptide
  Seed: LRMKWMMAMKYPITA
LRLKWLMPMKIPITA

SEQ ID NO: 218795 - protein, 15 aa, Artificial Sequence
  Description of Artificial Sequence: Synthetic peptide
  Seed: LRMKWMMAMKYPITA
LRLKWLMPMKLPITA

SEQ ID NO: 218796 - protein, 15 aa, Artificial Sequence
  Description of Artificial Sequence: Synthetic peptide
  Seed: LRMKWMMAMKYPITA
LRLKWLMPMKMPITA

SEQ ID NO: 218797 - protein, 15 aa, Artificial Sequence
  Description of Artificial Sequence: Synthetic peptide
  Seed: LRMKWMMAMKYPITA
LRLKWLMPMKTPITA

SEQ ID NO: 218798 - protein, 15 aa, Artificial Sequence
  Description of Artificial Sequence: Synthetic peptide
  Seed: LRMKWMMAMKYPITA
LRLKWLMPMKVPITA

SEQ ID NO: 218799 - protein, 15 aa, Artificial Sequence
  Description of Artificial Sequence: Synthetic peptide
  Seed: LRMKWMMAMKYPITA
LRLKWLMSMKAPITA

SEQ ID NO: 218800 - protein, 15 aa, Artificial Sequence
  Description of Artificial Sequence: Synthetic peptide
  Seed: LRMKWMMAMKYPITA
LRLKWLMSMKIPITA

SEQ ID NO: 218801 - protein, 15 aa, Artificial Sequence
  Description of Artificial Sequence: Synthetic peptide
  Seed: LRMKWMMAMKYPITA
LRLKWLMSMKLPITA

SEQ ID NO: 218802 - protein, 15 aa, Artificial Sequence
  Description of Artificial Sequence: Synthetic peptide
  Seed: LRMKWMMAMKYPITA
LRLKWLMSMKMPITA

SEQ ID NO: 218803 - protein, 15 aa, Artificial Sequence
  Description of Artificial Sequence: Synthetic peptide
  Seed: LRMKWMMAMKYPITA
LRLKWLMSMKTPITA

SEQ ID NO: 218804 - protein, 15 aa, Artificial Sequence
  Description of Artificial Sequence: Synthetic peptide
  Seed: LRMKWMMAMKYPITA
LRLKWLMSMKVPITA

SEQ ID NO: 218805 - protein, 15 aa, Artificial Sequence
  Description of Artificial Sequence: Synthetic peptide
  Seed: LRMKWMMAMKYPITA
LRLKWLMTMKAPITA

SEQ ID NO: 218806 - protein, 15 aa, Artificial Sequence
  Description of Artificial Sequence: Synthetic peptide
  Seed: LRMKWMMAMKYPITA
LRLKWLMTMKGPITA

SEQ ID NO: 218807 - protein, 15 aa, Artificial Sequence
  Description of Artificial Sequence: Synthetic peptide
  Seed: LRMKWMMAMKYPITA
LRLKWLMTMKSPITA

SEQ ID NO: 218808 - protein, 15 aa, Artificial Sequence
  Description of Artificial Sequence: Synthetic peptide
  Seed: LRMKWMMAMKYPITA
LRLKWMMAMKAPITA

SEQ ID NO: 218809 - protein, 15 aa, Artificial Sequence
  Description of Artificial Sequence: Synthetic peptide
  Seed: LRMKWMMAMKYPITA
LRLKWMMAMKIPITA

SEQ ID NO: 218810 - protein, 15 aa, Artificial Sequence
  Description of Artificial Sequence: Synthetic peptide
  Seed: LRMKWMMAMKYPITA
LRLKWMMAMKLPITA

SEQ ID NO: 218811 - protein, 15 aa, Artificial Sequence
  Description of Artificial Sequence: Synthetic peptide
  Seed: LRMKWMMAMKYPITA
LRLKWMMAMKMPITA

SEQ ID NO: 218812 - protein, 15 aa, Artificial Sequence
  Description of Artificial Sequence: Synthetic peptide
  Seed: LRMKWMMAMKYPITA
LRLKWMMAMKSPITA

SEQ ID NO: 218813 - protein, 15 aa, Artificial Sequence
  Description of Artificial Sequence: Synthetic peptide
  Seed: LRMKWMMAMKYPITA
LRLKWMMAMKTPITA

SEQ ID NO: 218814 - protein, 15 aa, Artificial Sequence
  Description of Artificial Sequence: Synthetic peptide
  Seed: LRMKWMMAMKYPITA
LRLKWMMAMKVPITA

SEQ ID NO: 218815 - protein, 15 aa, Artificial Sequence
  Description of Artificial Sequence: Synthetic peptide
  Seed: LRMKWMMAMKYPITA
LRLKWMMGMKAPITA

SEQ ID NO: 218816 - protein, 15 aa, Artificial Sequence
  Description of Artificial Sequence: Synthetic peptide
  Seed: LRMKWMMAMKYPITA
LRLKWMMGMKIPITA

SEQ ID NO: 218817 - protein, 15 aa, Artificial Sequence
  Description of Artificial Sequence: Synthetic peptide
  Seed: LRMKWMMAMKYPITA
LRLKWMMGMKLPITA

SEQ ID NO: 218818 - protein, 15 aa, Artificial Sequence
  Description of Artificial Sequence: Synthetic peptide
  Seed: LRMKWMMAMKYPITA
LRLKWMMGMKMPITA

SEQ ID NO: 218819 - protein, 15 aa, Artificial Sequence
  Description of Artificial Sequence: Synthetic peptide
  Seed: LRMKWMMAMKYPITA
LRLKWMMGMKSPITA

SEQ ID NO: 218820 - protein, 15 aa, Artificial Sequence
  Description of Artificial Sequence: Synthetic peptide
  Seed: LRMKWMMAMKYPITA
LRLKWMMGMKTPITA

SEQ ID NO: 218821 - protein, 15 aa, Artificial Sequence
  Description of Artificial Sequence: Synthetic peptide
  Seed: LRMKWMMAMKYPITA
LRLKWMMGMKVPITA

SEQ ID NO: 218822 - protein, 15 aa, Artificial Sequence
  Description of Artificial Sequence: Synthetic peptide
  Seed: LRMKWMMAMKYPITA
LRLKWMMNMKAPITA

SEQ ID NO: 218823 - protein, 15 aa, Artificial Sequence
  Description of Artificial Sequence: Synthetic peptide
  Seed: LRMKWMMAMKYPITA
LRLKWMMNMKGPITA

SEQ ID NO: 218824 - protein, 15 aa, Artificial Sequence
  Description of Artificial Sequence: Synthetic peptide
  Seed: LRMKWMMAMKYPITA
LRLKWMMNMKIPITA

SEQ ID NO: 218825 - protein, 15 aa, Artificial Sequence
  Description of Artificial Sequence: Synthetic peptide
  Seed: LRMKWMMAMKYPITA
LRLKWMMNMKLPITA

SEQ ID NO: 218826 - protein, 15 aa, Artificial Sequence
  Description of Artificial Sequence: Synthetic peptide
  Seed: LRMKWMMAMKYPITA
LRLKWMMNMKSPITA

SEQ ID NO: 218827 - protein, 15 aa, Artificial Sequence
  Description of Artificial Sequence: Synthetic peptide
  Seed: LRMKWMMAMKYPITA
LRLKWMMNMKVPITA

SEQ ID NO: 218828 - protein, 15 aa, Artificial Sequence
  Description of Artificial Sequence: Synthetic peptide
  Seed: LRMKWMMAMKYPITA
LRLKWMMPMKAPITA

SEQ ID NO: 218829 - protein, 15 aa, Artificial Sequence
  Description of Artificial Sequence: Synthetic peptide
  Seed: LRMKWMMAMKYPITA
LRLKWMMPMKIPITA

SEQ ID NO: 218830 - protein, 15 aa, Artificial Sequence
  Description of Artificial Sequence: Synthetic peptide
  Seed: LRMKWMMAMKYPITA
LRLKWMMPMKLPITA

SEQ ID NO: 218831 - protein, 15 aa, Artificial Sequence
  Description of Artificial Sequence: Synthetic peptide
  Seed: LRMKWMMAMKYPITA
LRLKWMMPMKMPITA

SEQ ID NO: 218832 - protein, 15 aa, Artificial Sequence
  Description of Artificial Sequence: Synthetic peptide
  Seed: LRMKWMMAMKYPITA
LRLKWMMPMKSPITA

SEQ ID NO: 218833 - protein, 15 aa, Artificial Sequence
  Description of Artificial Sequence: Synthetic peptide
  Seed: LRMKWMMAMKYPITA
LRLKWMMPMKVPITA

SEQ ID NO: 218834 - protein, 15 aa, Artificial Sequence
  Description of Artificial Sequence: Synthetic peptide
  Seed: LRMKWMMAMKYPITA
LRLKWMMSMKAPITA

SEQ ID NO: 218835 - protein, 15 aa, Artificial Sequence
  Description of Artificial Sequence: Synthetic peptide
  Seed: LRMKWMMAMKYPITA
LRLKWMMSMKGPITA

SEQ ID NO: 218836 - protein, 15 aa, Artificial Sequence
  Description of Artificial Sequence: Synthetic peptide
  Seed: LRMKWMMAMKYPITA
LRLKWMMSMKIPITA

SEQ ID NO: 218837 - protein, 15 aa, Artificial Sequence
  Description of Artificial Sequence: Synthetic peptide
  Seed: LRMKWMMAMKYPITA
LRLKWMMSMKLPITA

SEQ ID NO: 218838 - protein, 15 aa, Artificial Sequence
  Description of Artificial Sequence: Synthetic peptide
  Seed: LRMKWMMAMKYPITA
LRLKWMMSMKMPITA

SEQ ID NO: 218839 - protein, 15 aa, Artificial Sequence
  Description of Artificial Sequence: Synthetic peptide
  Seed: LRMKWMMAMKYPITA
LRLKWMMSMKSPITA

SEQ ID NO: 218840 - protein, 15 aa, Artificial Sequence
  Description of Artificial Sequence: Synthetic peptide
  Seed: LRMKWMMAMKYPITA
LRLKWMMSMKTPITA

SEQ ID NO: 218841 - protein, 15 aa, Artificial Sequence
  Description of Artificial Sequence: Synthetic peptide
  Seed: LRMKWMMAMKYPITA
LRLKWMMSMKVPITA

SEQ ID NO: 218842 - protein, 15 aa, Artificial Sequence
  Description of Artificial Sequence: Synthetic peptide
  Seed: LRMKWMMAMKYPITA
LRLKWMMTMKAPITA

SEQ ID NO: 218843 - protein, 15 aa, Artificial Sequence
  Description of Artificial Sequence: Synthetic peptide
  Seed: LRMKWMMAMKYPITA
LRLKWMMTMKGPITA

SEQ ID NO: 218844 - protein, 15 aa, Artificial Sequence
  Description of Artificial Sequence: Synthetic peptide
  Seed: LRMKWMMAMKYPITA
LRLKWMMTMKSPITA

SEQ ID NO: 218845 - protein, 15 aa, Artificial Sequence
  Description of Artificial Sequence: Synthetic peptide
  Seed: LRMKWMMAMKYPITA
LRLKWMMVMKAPITA

SEQ ID NO: 218846 - protein, 15 aa, Artificial Sequence
  Description of Artificial Sequence: Synthetic peptide
  Seed: LRMKWMMAMKYPITA
LRLKWQMAMKAPITA

SEQ ID NO: 218847 - protein, 15 aa, Artificial Sequence
  Description of Artificial Sequence: Synthetic peptide
  Seed: LRMKWMMAMKYPITA
LRLKWQMAMKIPITA

SEQ ID NO: 218848 - protein, 15 aa, Artificial Sequence
  Description of Artificial Sequence: Synthetic peptide
  Seed: LRMKWMMAMKYPITA
LRLKWQMAMKLPITA

SEQ ID NO: 218849 - protein, 15 aa, Artificial Sequence
  Description of Artificial Sequence: Synthetic peptide
  Seed: LRMKWMMAMKYPITA
LRLKWQMAMKVPITA

SEQ ID NO: 218850 - protein, 15 aa, Artificial Sequence
  Description of Artificial Sequence: Synthetic peptide
  Seed: LRMKWMMAMKYPITA
LRLKWQMFMKIPITA

SEQ ID NO: 218851 - protein, 15 aa, Artificial Sequence
  Description of Artificial Sequence: Synthetic peptide
  Seed: LRMKWMMAMKYPITA
LRLKWQMFMKLPITA

SEQ ID NO: 218852 - protein, 15 aa, Artificial Sequence
  Description of Artificial Sequence: Synthetic peptide
  Seed: LRMKWMMAMKYPITA
LRLKWQMFMKMPITA

SEQ ID NO: 218853 - protein, 15 aa, Artificial Sequence
  Description of Artificial Sequence: Synthetic peptide
  Seed: LRMKWMMAMKYPITA
LRLKWQMFMKVPITA

SEQ ID NO: 218854 - protein, 15 aa, Artificial Sequence
  Description of Artificial Sequence: Synthetic peptide
  Seed: LRMKWMMAMKYPITA
LRLKWQMGMKVPITA

SEQ ID NO: 218855 - protein, 15 aa, Artificial Sequence
  Description of Artificial Sequence: Synthetic peptide
  Seed: LRMKWMMAMKYPITA
LRLKWQMIMKLPITA

SEQ ID NO: 218856 - protein, 15 aa, Artificial Sequence
  Description of Artificial Sequence: Synthetic peptide
  Seed: LRMKWMMAMKYPITA
LRLKWQMLMKLPITA

SEQ ID NO: 218857 - protein, 15 aa, Artificial Sequence
  Description of Artificial Sequence: Synthetic peptide
  Seed: LRMKWMMAMKYPITA
LRLKWQMLMKVPITA

SEQ ID NO: 218858 - protein, 15 aa, Artificial Sequence
  Description of Artificial Sequence: Synthetic peptide
  Seed: LRMKWMMAMKYPITA
LRLKWSMAMKAPITA

SEQ ID NO: 218859 - protein, 15 aa, Artificial Sequence
  Description of Artificial Sequence: Synthetic peptide
  Seed: LRMKWMMAMKYPITA
LRLKWSMAMKIPITA

SEQ ID NO: 218860 - protein, 15 aa, Artificial Sequence
  Description of Artificial Sequence: Synthetic peptide
  Seed: LRMKWMMAMKYPITA
LRLKWSMAMKLPITA

SEQ ID NO: 218861 - protein, 15 aa, Artificial Sequence
  Description of Artificial Sequence: Synthetic peptide
  Seed: LRMKWMMAMKYPITA
LRLKWSMAMKVPITA

SEQ ID NO: 218862 - protein, 15 aa, Artificial Sequence
  Description of Artificial Sequence: Synthetic peptide
  Seed: LRMKWMMAMKYPITA
LRLKWSMFMKAPITA

SEQ ID NO: 218863 - protein, 15 aa, Artificial Sequence
  Description of Artificial Sequence: Synthetic peptide
  Seed: LRMKWMMAMKYPITA
LRLKWSMFMKEPITA

SEQ ID NO: 218864 - protein, 15 aa, Artificial Sequence
  Description of Artificial Sequence: Synthetic peptide
  Seed: LRMKWMMAMKYPITA
LRLKWSMFMKFPITA

SEQ ID NO: 218865 - protein, 15 aa, Artificial Sequence
  Description of Artificial Sequence: Synthetic peptide
  Seed: LRMKWMMAMKYPITA
LRLKWSMFMKIPITA

SEQ ID NO: 218866 - protein, 15 aa, Artificial Sequence
  Description of Artificial Sequence: Synthetic peptide
  Seed: LRMKWMMAMKYPITA
LRLKWSMFMKLPITA

SEQ ID NO: 218867 - protein, 15 aa, Artificial Sequence
  Description of Artificial Sequence: Synthetic peptide
  Seed: LRMKWMMAMKYPITA
LRLKWSMFMKMPITA

SEQ ID NO: 218868 - protein, 15 aa, Artificial Sequence
  Description of Artificial Sequence: Synthetic peptide
  Seed: LRMKWMMAMKYPITA
LRLKWSMFMKNPITA

SEQ ID NO: 218869 - protein, 15 aa, Artificial Sequence
  Description of Artificial Sequence: Synthetic peptide
  Seed: LRMKWMMAMKYPITA
LRLKWSMFMKSPITA

SEQ ID NO: 218870 - protein, 15 aa, Artificial Sequence
  Description of Artificial Sequence: Synthetic peptide
  Seed: LRMKWMMAMKYPITA
LRLKWSMFMKTPITA

SEQ ID NO: 218871 - protein, 15 aa, Artificial Sequence
  Description of Artificial Sequence: Synthetic peptide
  Seed: LRMKWMMAMKYPITA
LRLKWSMFMKVPITA

SEQ ID NO: 218872 - protein, 15 aa, Artificial Sequence
  Description of Artificial Sequence: Synthetic peptide
  Seed: LRMKWMMAMKYPITA
LRLKWSMFMKYPITA

SEQ ID NO: 218873 - protein, 15 aa, Artificial Sequence
  Description of Artificial Sequence: Synthetic peptide
  Seed: LRMKWMMAMKYPITA
LRLKWSMIMKFPITA

SEQ ID NO: 218874 - protein, 15 aa, Artificial Sequence
  Description of Artificial Sequence: Synthetic peptide
  Seed: LRMKWMMAMKYPITA
LRLKWSMIMKIPITA

SEQ ID NO: 218875 - protein, 15 aa, Artificial Sequence
  Description of Artificial Sequence: Synthetic peptide
  Seed: LRMKWMMAMKYPITA
LRLKWSMIMKLPITA

SEQ ID NO: 218876 - protein, 15 aa, Artificial Sequence
  Description of Artificial Sequence: Synthetic peptide
  Seed: LRMKWMMAMKYPITA
LRLKWSMIMKMPITA

SEQ ID NO: 218877 - protein, 15 aa, Artificial Sequence
  Description of Artificial Sequence: Synthetic peptide
  Seed: LRMKWMMAMKYPITA
LRLKWSMIMKVPITA

SEQ ID NO: 218878 - protein, 15 aa, Artificial Sequence
  Description of Artificial Sequence: Synthetic peptide
  Seed: LRMKWMMAMKYPITA
LRLKWSMLMKFPITA

SEQ ID NO: 218879 - protein, 15 aa, Artificial Sequence
  Description of Artificial Sequence: Synthetic peptide
  Seed: LRMKWMMAMKYPITA
LRLKWSMLMKIPITA

SEQ ID NO: 218880 - protein, 15 aa, Artificial Sequence
  Description of Artificial Sequence: Synthetic peptide
  Seed: LRMKWMMAMKYPITA
LRLKWSMLMKLPITA

SEQ ID NO: 218881 - protein, 15 aa, Artificial Sequence
  Description of Artificial Sequence: Synthetic peptide
  Seed: LRMKWMMAMKYPITA
LRLKWSMLMKMPITA

SEQ ID NO: 218882 - protein, 15 aa, Artificial Sequence
  Description of Artificial Sequence: Synthetic peptide
  Seed: LRMKWMMAMKYPITA
LRLKWSMLMKVPITA

SEQ ID NO: 218883 - protein, 15 aa, Artificial Sequence
  Description of Artificial Sequence: Synthetic peptide
  Seed: LRMKWMMAMKYPITA
LRLKWSMMMKIPITA

SEQ ID NO: 218884 - protein, 15 aa, Artificial Sequence
  Description of Artificial Sequence: Synthetic peptide
  Seed: LRMKWMMAMKYPITA
LRLKWSMMMKLPITA

SEQ ID NO: 218885 - protein, 15 aa, Artificial Sequence
  Description of Artificial Sequence: Synthetic peptide
  Seed: LRMKWMMAMKYPITA
LRLKWSMMMKMPITA

SEQ ID NO: 218886 - protein, 15 aa, Artificial Sequence
  Description of Artificial Sequence: Synthetic peptide
  Seed: LRMKWMMAMKYPITA
LRLKWSMMMKVPITA

SEQ ID NO: 218887 - protein, 15 aa, Artificial Sequence
  Description of Artificial Sequence: Synthetic peptide
  Seed: LRMKWMMAMKYPITA
LRLKWSMWMKLPITA

SEQ ID NO: 218888 - protein, 15 aa, Artificial Sequence
  Description of Artificial Sequence: Synthetic peptide
  Seed: LRMKWMMAMKYPITA
LRLKWSMYMKIPITA

SEQ ID NO: 218889 - protein, 15 aa, Artificial Sequence
  Description of Artificial Sequence: Synthetic peptide
  Seed: LRMKWMMAMKYPITA
LRLKWSMYMKLPITA

SEQ ID NO: 218890 - protein, 15 aa, Artificial Sequence
  Description of Artificial Sequence: Synthetic peptide
  Seed: LRMKWMMAMKYPITA
LRLKWSMYMKVPITA

SEQ ID NO: 218891 - protein, 15 aa, Artificial Sequence
  Description of Artificial Sequence: Synthetic peptide
  Seed: LRMKWMMAMKYPITA
LRLKWTMFMKAPITA

SEQ ID NO: 218892 - protein, 15 aa, Artificial Sequence
  Description of Artificial Sequence: Synthetic peptide
  Seed: LRMKWMMAMKYPITA
LRLKWTMFMKDPITA

SEQ ID NO: 218893 - protein, 15 aa, Artificial Sequence
  Description of Artificial Sequence: Synthetic peptide
  Seed: LRMKWMMAMKYPITA
LRLKWTMFMKEPITA

SEQ ID NO: 218894 - protein, 15 aa, Artificial Sequence
  Description of Artificial Sequence: Synthetic peptide
  Seed: LRMKWMMAMKYPITA
LRLKWTMFMKFPITA

SEQ ID NO: 218895 - protein, 15 aa, Artificial Sequence
  Description of Artificial Sequence: Synthetic peptide
  Seed: LRMKWMMAMKYPITA
LRLKWTMFMKHPITA

SEQ ID NO: 218896 - protein, 15 aa, Artificial Sequence
  Description of Artificial Sequence: Synthetic peptide
  Seed: LRMKWMMAMKYPITA
LRLKWTMFMKIPITA

SEQ ID NO: 218897 - protein, 15 aa, Artificial Sequence
  Description of Artificial Sequence: Synthetic peptide
  Seed: LRMKWMMAMKYPITA
LRLKWTMFMKLPITA

SEQ ID NO: 218898 - protein, 15 aa, Artificial Sequence
  Description of Artificial Sequence: Synthetic peptide
  Seed: LRMKWMMAMKYPITA
LRLKWTMFMKMPITA

SEQ ID NO: 218899 - protein, 15 aa, Artificial Sequence
  Description of Artificial Sequence: Synthetic peptide
  Seed: LRMKWMMAMKYPITA
LRLKWTMFMKNPITA

SEQ ID NO: 218900 - protein, 15 aa, Artificial Sequence
  Description of Artificial Sequence: Synthetic peptide
  Seed: LRMKWMMAMKYPITA
LRLKWTMFMKQPITA

SEQ ID NO: 218901 - protein, 15 aa, Artificial Sequence
  Description of Artificial Sequence: Synthetic peptide
  Seed: LRMKWMMAMKYPITA
LRLKWTMFMKSPITA

SEQ ID NO: 218902 - protein, 15 aa, Artificial Sequence
  Description of Artificial Sequence: Synthetic peptide
  Seed: LRMKWMMAMKYPITA
LRLKWTMFMKTPITA

SEQ ID NO: 218903 - protein, 15 aa, Artificial Sequence
  Description of Artificial Sequence: Synthetic peptide
  Seed: LRMKWMMAMKYPITA
LRLKWTMFMKVPITA

SEQ ID NO: 218904 - protein, 15 aa, Artificial Sequence
  Description of Artificial Sequence: Synthetic peptide
  Seed: LRMKWMMAMKYPITA
LRLKWTMFMKYPITA

SEQ ID NO: 218905 - protein, 15 aa, Artificial Sequence
  Description of Artificial Sequence: Synthetic peptide
  Seed: LRMKWMMAMKYPITA
LRLKWTMIMKIPITA

SEQ ID NO: 218906 - protein, 15 aa, Artificial Sequence
  Description of Artificial Sequence: Synthetic peptide
  Seed: LRMKWMMAMKYPITA
LRLKWTMIMKLPITA

SEQ ID NO: 218907 - protein, 15 aa, Artificial Sequence
  Description of Artificial Sequence: Synthetic peptide
  Seed: LRMKWMMAMKYPITA
LRLKWTMIMKMPITA

SEQ ID NO: 218908 - protein, 15 aa, Artificial Sequence
  Description of Artificial Sequence: Synthetic peptide
  Seed: LRMKWMMAMKYPITA
LRLKWTMIMKVPITA

SEQ ID NO: 218909 - protein, 15 aa, Artificial Sequence
  Description of Artificial Sequence: Synthetic peptide
  Seed: LRMKWMMAMKYPITA
LRLKWTMLMKEPITA

SEQ ID NO: 218910 - protein, 15 aa, Artificial Sequence
  Description of Artificial Sequence: Synthetic peptide
  Seed: LRMKWMMAMKYPITA
LRLKWTMLMKFPITA

SEQ ID NO: 218911 - protein, 15 aa, Artificial Sequence
  Description of Artificial Sequence: Synthetic peptide
  Seed: LRMKWMMAMKYPITA
LRLKWTMLMKIPITA

SEQ ID NO: 218912 - protein, 15 aa, Artificial Sequence
  Description of Artificial Sequence: Synthetic peptide
  Seed: LRMKWMMAMKYPITA
LRLKWTMLMKLPITA

SEQ ID NO: 218913 - protein, 15 aa, Artificial Sequence
  Description of Artificial Sequence: Synthetic peptide
  Seed: LRMKWMMAMKYPITA
LRLKWTMLMKMPITA

SEQ ID NO: 218914 - protein, 15 aa, Artificial Sequence
  Description of Artificial Sequence: Synthetic peptide
  Seed: LRMKWMMAMKYPITA
LRLKWTMLMKNPITA

SEQ ID NO: 218915 - protein, 15 aa, Artificial Sequence
  Description of Artificial Sequence: Synthetic peptide
  Seed: LRMKWMMAMKYPITA
LRLKWTMLMKSPITA

SEQ ID NO: 218916 - protein, 15 aa, Artificial Sequence
  Description of Artificial Sequence: Synthetic peptide
  Seed: LRMKWMMAMKYPITA
LRLKWTMLMKVPITA

SEQ ID NO: 218917 - protein, 15 aa, Artificial Sequence
  Description of Artificial Sequence: Synthetic peptide
  Seed: LRMKWMMAMKYPITA
LRLKWTMLMKYPITA

SEQ ID NO: 218918 - protein, 15 aa, Artificial Sequence
  Description of Artificial Sequence: Synthetic peptide
  Seed: LRMKWMMAMKYPITA
LRLKWTMMMKFPITA

SEQ ID NO: 218919 - protein, 15 aa, Artificial Sequence
  Description of Artificial Sequence: Synthetic peptide
  Seed: LRMKWMMAMKYPITA
LRLKWTMMMKIPITA

SEQ ID NO: 218920 - protein, 15 aa, Artificial Sequence
  Description of Artificial Sequence: Synthetic peptide
  Seed: LRMKWMMAMKYPITA
LRLKWTMMMKLPITA

SEQ ID NO: 218921 - protein, 15 aa, Artificial Sequence
  Description of Artificial Sequence: Synthetic peptide
  Seed: LRMKWMMAMKYPITA
LRLKWTMMMKMPITA

SEQ ID NO: 218922 - protein, 15 aa, Artificial Sequence
  Description of Artificial Sequence: Synthetic peptide
  Seed: LRMKWMMAMKYPITA
LRLKWTMMMKVPITA

SEQ ID NO: 218923 - protein, 15 aa, Artificial Sequence
  Description of Artificial Sequence: Synthetic peptide
  Seed: LRMKWMMAMKYPITA
LRLKWTMVMKLPITA

SEQ ID NO: 218924 - protein, 15 aa, Artificial Sequence
  Description of Artificial Sequence: Synthetic peptide
  Seed: LRMKWMMAMKYPITA
LRLKWTMWMKLPITA

SEQ ID NO: 218925 - protein, 15 aa, Artificial Sequence
  Description of Artificial Sequence: Synthetic peptide
  Seed: LRMKWMMAMKYPITA
LRLKWTMYMKFPITA

SEQ ID NO: 218926 - protein, 15 aa, Artificial Sequence
  Description of Artificial Sequence: Synthetic peptide
  Seed: LRMKWMMAMKYPITA
LRLKWTMYMKIPITA

SEQ ID NO: 218927 - protein, 15 aa, Artificial Sequence
  Description of Artificial Sequence: Synthetic peptide
  Seed: LRMKWMMAMKYPITA
LRLKWTMYMKLPITA

SEQ ID NO: 218928 - protein, 15 aa, Artificial Sequence
  Description of Artificial Sequence: Synthetic peptide
  Seed: LRMKWMMAMKYPITA
LRLKWTMYMKVPITA

SEQ ID NO: 218929 - protein, 15 aa, Artificial Sequence
  Description of Artificial Sequence: Synthetic peptide
  Seed: LRMKWMMAMKYPITA
LRLKWVMAMKVPITA

SEQ ID NO: 218930 - protein, 15 aa, Artificial Sequence
  Description of Artificial Sequence: Synthetic peptide
  Seed: LRMKWMMAMKYPITA
LRLKWVMFMKDPITA

SEQ ID NO: 218931 - protein, 15 aa, Artificial Sequence
  Description of Artificial Sequence: Synthetic peptide
  Seed: LRMKWMMAMKYPITA
LRLKWVMFMKEPITA

SEQ ID NO: 218932 - protein, 15 aa, Artificial Sequence
  Description of Artificial Sequence: Synthetic peptide
  Seed: LRMKWMMAMKYPITA
LRLKWVMNMKAPITA

SEQ ID NO: 218933 - protein, 15 aa, Artificial Sequence
  Description of Artificial Sequence: Synthetic peptide
  Seed: LRMKWMMAMKYPITA
LRLKWVMNMKSPITA

SEQ ID NO: 218934 - protein, 15 aa, Artificial Sequence
  Description of Artificial Sequence: Synthetic peptide
  Seed: LRMKWMMAMKYPITA
LRLKWVMNMKVPITA

SEQ ID NO: 218935 - protein, 15 aa, Artificial Sequence
  Description of Artificial Sequence: Synthetic peptide
  Seed: LRMKWMMAMKYPITA
LRLKWVMSMKAPITA

SEQ ID NO: 218936 - protein, 15 aa, Artificial Sequence
  Description of Artificial Sequence: Synthetic peptide
  Seed: LRMKWMMAMKYPITA
LRLKWVMSMKVPITA

SEQ ID NO: 218937 - protein, 15 aa, Artificial Sequence
  Description of Artificial Sequence: Synthetic peptide
  Seed: LRMKWMMAMKYPITA
LRLKWVMTMKAPITA

SEQ ID NO: 218938 - protein, 15 aa, Artificial Sequence
  Description of Artificial Sequence: Synthetic peptide
  Seed: LRMKWMMAMKYPITA
LRLKWVMTMKSPITA

SEQ ID NO: 218939 - protein, 15 aa, Artificial Sequence
  Description of Artificial Sequence: Synthetic peptide
  Seed: LRMKWMMAMKYPITA
LRLKWWMAMKAPITA

SEQ ID NO: 218940 - protein, 15 aa, Artificial Sequence
  Description of Artificial Sequence: Synthetic peptide
  Seed: LRMKWMMAMKYPITA
LRLKWWMAMKIPITA

SEQ ID NO: 218941 - protein, 15 aa, Artificial Sequence
  Description of Artificial Sequence: Synthetic peptide
  Seed: LRMKWMMAMKYPITA
LRLKWWMAMKLPITA

SEQ ID NO: 218942 - protein, 15 aa, Artificial Sequence
  Description of Artificial Sequence: Synthetic peptide
  Seed: LRMKWMMAMKYPITA
LRLKWWMAMKMPITA

SEQ ID NO: 218943 - protein, 15 aa, Artificial Sequence
  Description of Artificial Sequence: Synthetic peptide
  Seed: LRMKWMMAMKYPITA
LRLKWWMAMKSPITA

SEQ ID NO: 218944 - protein, 15 aa, Artificial Sequence
  Description of Artificial Sequence: Synthetic peptide
  Seed: LRMKWMMAMKYPITA
LRLKWWMAMKTPITA

SEQ ID NO: 218945 - protein, 15 aa, Artificial Sequence
  Description of Artificial Sequence: Synthetic peptide
  Seed: LRMKWMMAMKYPITA
LRLKWWMAMKVPITA

SEQ ID NO: 218946 - protein, 15 aa, Artificial Sequence
  Description of Artificial Sequence: Synthetic peptide
  Seed: LRMKWMMAMKYPITA
LRLKWWMGMKAPITA

SEQ ID NO: 218947 - protein, 15 aa, Artificial Sequence
  Description of Artificial Sequence: Synthetic peptide
  Seed: LRMKWMMAMKYPITA
LRLKWWMGMKIPITA

SEQ ID NO: 218948 - protein, 15 aa, Artificial Sequence
  Description of Artificial Sequence: Synthetic peptide
  Seed: LRMKWMMAMKYPITA
LRLKWWMGMKLPITA

SEQ ID NO: 218949 - protein, 15 aa, Artificial Sequence
  Description of Artificial Sequence: Synthetic peptide
  Seed: LRMKWMMAMKYPITA
LRLKWWMGMKMPITA

SEQ ID NO: 218950 - protein, 15 aa, Artificial Sequence
  Description of Artificial Sequence: Synthetic peptide
  Seed: LRMKWMMAMKYPITA
LRLKWWMGMKVPITA

SEQ ID NO: 218951 - protein, 15 aa, Artificial Sequence
  Description of Artificial Sequence: Synthetic peptide
  Seed: LRMKWMMAMKYPITA
LRLKWWMNMKAPITA

SEQ ID NO: 218952 - protein, 15 aa, Artificial Sequence
  Description of Artificial Sequence: Synthetic peptide
  Seed: LRMKWMMAMKYPITA
LRLKWWMNMKFPITA

SEQ ID NO: 218953 - protein, 15 aa, Artificial Sequence
  Description of Artificial Sequence: Synthetic peptide
  Seed: LRMKWMMAMKYPITA
LRLKWWMNMKIPITA

SEQ ID NO: 218954 - protein, 15 aa, Artificial Sequence
  Description of Artificial Sequence: Synthetic peptide
  Seed: LRMKWMMAMKYPITA
LRLKWWMNMKLPITA

SEQ ID NO: 218955 - protein, 15 aa, Artificial Sequence
  Description of Artificial Sequence: Synthetic peptide
  Seed: LRMKWMMAMKYPITA
LRLKWWMNMKMPITA

SEQ ID NO: 218956 - protein, 15 aa, Artificial Sequence
  Description of Artificial Sequence: Synthetic peptide
  Seed: LRMKWMMAMKYPITA
LRLKWWMNMKTPITA

SEQ ID NO: 218957 - protein, 15 aa, Artificial Sequence
  Description of Artificial Sequence: Synthetic peptide
  Seed: LRMKWMMAMKYPITA
LRLKWWMNMKVPITA

SEQ ID NO: 218958 - protein, 15 aa, Artificial Sequence
  Description of Artificial Sequence: Synthetic peptide
  Seed: LRMKWMMAMKYPITA
LRLKWWMPMKVPITA

SEQ ID NO: 218959 - protein, 15 aa, Artificial Sequence
  Description of Artificial Sequence: Synthetic peptide
  Seed: LRMKWMMAMKYPITA
LRLKWWMSMKAPITA

SEQ ID NO: 218960 - protein, 15 aa, Artificial Sequence
  Description of Artificial Sequence: Synthetic peptide
  Seed: LRMKWMMAMKYPITA
LRLKWWMSMKFPITA

SEQ ID NO: 218961 - protein, 15 aa, Artificial Sequence
  Description of Artificial Sequence: Synthetic peptide
  Seed: LRMKWMMAMKYPITA
LRLKWWMSMKIPITA

SEQ ID NO: 218962 - protein, 15 aa, Artificial Sequence
  Description of Artificial Sequence: Synthetic peptide
  Seed: LRMKWMMAMKYPITA
LRLKWWMSMKLPITA

SEQ ID NO: 218963 - protein, 15 aa, Artificial Sequence
  Description of Artificial Sequence: Synthetic peptide
  Seed: LRMKWMMAMKYPITA
LRLKWWMSMKMPITA

SEQ ID NO: 218964 - protein, 15 aa, Artificial Sequence
  Description of Artificial Sequence: Synthetic peptide
  Seed: LRMKWMMAMKYPITA
LRLKWWMSMKSPITA

SEQ ID NO: 218965 - protein, 15 aa, Artificial Sequence
  Description of Artificial Sequence: Synthetic peptide
  Seed: LRMKWMMAMKYPITA
LRLKWWMSMKTPITA

SEQ ID NO: 218966 - protein, 15 aa, Artificial Sequence
  Description of Artificial Sequence: Synthetic peptide
  Seed: LRMKWMMAMKYPITA
LRLKWWMSMKVPITA

SEQ ID NO: 218967 - protein, 15 aa, Artificial Sequence
  Description of Artificial Sequence: Synthetic peptide
  Seed: LRMKWMMAMKYPITA
LRLKWWMTMKAPITA

SEQ ID NO: 218968 - protein, 15 aa, Artificial Sequence
  Description of Artificial Sequence: Synthetic peptide
  Seed: LRMKWMMAMKYPITA
LRLKWWMTMKIPITA

SEQ ID NO: 218969 - protein, 15 aa, Artificial Sequence
  Description of Artificial Sequence: Synthetic peptide
  Seed: LRMKWMMAMKYPITA
LRLKWWMTMKLPITA

SEQ ID NO: 218970 - protein, 15 aa, Artificial Sequence
  Description of Artificial Sequence: Synthetic peptide
  Seed: LRMKWMMAMKYPITA
LRLKWWMTMKVPITA

SEQ ID NO: 218971 - protein, 15 aa, Artificial Sequence
  Description of Artificial Sequence: Synthetic peptide
  Seed: LRMKWMMAMKYPITA
LRLKWYMAMKAPITA

SEQ ID NO: 218972 - protein, 15 aa, Artificial Sequence
  Description of Artificial Sequence: Synthetic peptide
  Seed: LRMKWMMAMKYPITA
LRLKWYMAMKFPITA

SEQ ID NO: 218973 - protein, 15 aa, Artificial Sequence
  Description of Artificial Sequence: Synthetic peptide
  Seed: LRMKWMMAMKYPITA
LRLKWYMAMKGPITA

SEQ ID NO: 218974 - protein, 15 aa, Artificial Sequence
  Description of Artificial Sequence: Synthetic peptide
  Seed: LRMKWMMAMKYPITA
LRLKWYMAMKHPITA

SEQ ID NO: 218975 - protein, 15 aa, Artificial Sequence
  Description of Artificial Sequence: Synthetic peptide
  Seed: LRMKWMMAMKYPITA
LRLKWYMAMKIPITA

SEQ ID NO: 218976 - protein, 15 aa, Artificial Sequence
  Description of Artificial Sequence: Synthetic peptide
  Seed: LRMKWMMAMKYPITA
LRLKWYMAMKLPITA

SEQ ID NO: 218977 - protein, 15 aa, Artificial Sequence
  Description of Artificial Sequence: Synthetic peptide
  Seed: LRMKWMMAMKYPITA
LRLKWYMAMKMPITA

SEQ ID NO: 218978 - protein, 15 aa, Artificial Sequence
  Description of Artificial Sequence: Synthetic peptide
  Seed: LRMKWMMAMKYPITA
LRLKWYMAMKRPITA

SEQ ID NO: 218979 - protein, 15 aa, Artificial Sequence
  Description of Artificial Sequence: Synthetic peptide
  Seed: LRMKWMMAMKYPITA
LRLKWYMAMKSPITA

SEQ ID NO: 218980 - protein, 15 aa, Artificial Sequence
  Description of Artificial Sequence: Synthetic peptide
  Seed: LRMKWMMAMKYPITA
LRLKWYMAMKTPITA

SEQ ID NO: 218981 - protein, 15 aa, Artificial Sequence
  Description of Artificial Sequence: Synthetic peptide
  Seed: LRMKWMMAMKYPITA
LRLKWYMAMKVPITA

SEQ ID NO: 218982 - protein, 15 aa, Artificial Sequence
  Description of Artificial Sequence: Synthetic peptide
  Seed: LRMKWMMAMKYPITA
LRLKWYMAMKYPITA

SEQ ID NO: 218983 - protein, 15 aa, Artificial Sequence
  Description of Artificial Sequence: Synthetic peptide
  Seed: LRMKWMMAMKYPITA
LRLKWYMDMKAPITA

SEQ ID NO: 218984 - protein, 15 aa, Artificial Sequence
  Description of Artificial Sequence: Synthetic peptide
  Seed: LRMKWMMAMKYPITA
LRLKWYMDMKIPITA

SEQ ID NO: 218985 - protein, 15 aa, Artificial Sequence
  Description of Artificial Sequence: Synthetic peptide
  Seed: LRMKWMMAMKYPITA
LRLKWYMDMKLPITA

SEQ ID NO: 218986 - protein, 15 aa, Artificial Sequence
  Description of Artificial Sequence: Synthetic peptide
  Seed: LRMKWMMAMKYPITA
LRLKWYMDMKVPITA

SEQ ID NO: 218987 - protein, 15 aa, Artificial Sequence
  Description of Artificial Sequence: Synthetic peptide
  Seed: LRMKWMMAMKYPITA
LRLKWYMGMKAPITA

SEQ ID NO: 218988 - protein, 15 aa, Artificial Sequence
  Description of Artificial Sequence: Synthetic peptide
  Seed: LRMKWMMAMKYPITA
LRLKWYMGMKFPITA

SEQ ID NO: 218989 - protein, 15 aa, Artificial Sequence
  Description of Artificial Sequence: Synthetic peptide
  Seed: LRMKWMMAMKYPITA
LRLKWYMGMKGPITA

SEQ ID NO: 218990 - protein, 15 aa, Artificial Sequence
  Description of Artificial Sequence: Synthetic peptide
  Seed: LRMKWMMAMKYPITA
LRLKWYMGMKHPITA

SEQ ID NO: 218991 - protein, 15 aa, Artificial Sequence
  Description of Artificial Sequence: Synthetic peptide
  Seed: LRMKWMMAMKYPITA
LRLKWYMGMKIPITA

SEQ ID NO: 218992 - protein, 15 aa, Artificial Sequence
  Description of Artificial Sequence: Synthetic peptide
  Seed: LRMKWMMAMKYPITA
LRLKWYMGMKLPITA

SEQ ID NO: 218993 - protein, 15 aa, Artificial Sequence
  Description of Artificial Sequence: Synthetic peptide
  Seed: LRMKWMMAMKYPITA
LRLKWYMGMKMPITA

SEQ ID NO: 218994 - protein, 15 aa, Artificial Sequence
  Description of Artificial Sequence: Synthetic peptide
  Seed: LRMKWMMAMKYPITA
LRLKWYMGMKRPITA

SEQ ID NO: 218995 - protein, 15 aa, Artificial Sequence
  Description of Artificial Sequence: Synthetic peptide
  Seed: LRMKWMMAMKYPITA
LRLKWYMGMKSPITA

SEQ ID NO: 218996 - protein, 15 aa, Artificial Sequence
  Description of Artificial Sequence: Synthetic peptide
  Seed: LRMKWMMAMKYPITA
LRLKWYMGMKTPITA

SEQ ID NO: 218997 - protein, 15 aa, Artificial Sequence
  Description of Artificial Sequence: Synthetic peptide
  Seed: LRMKWMMAMKYPITA
LRLKWYMGMKVPITA

SEQ ID NO: 218998 - protein, 15 aa, Artificial Sequence
  Description of Artificial Sequence: Synthetic peptide
  Seed: LRMKWMMAMKYPITA
LRLKWYMGMKYPITA

SEQ ID NO: 218999 - protein, 15 aa, Artificial Sequence
  Description of Artificial Sequence: Synthetic peptide
  Seed: LRMKWMMAMKYPITA
LRLKWYMNMKAPITA

SEQ ID NO: 219000 - protein, 15 aa, Artificial Sequence
  Description of Artificial Sequence: Synthetic peptide
  Seed: LRMKWMMAMKYPITA
LRLKWYMNMKFPITA

SEQ ID NO: 219001 - protein, 15 aa, Artificial Sequence
  Description of Artificial Sequence: Synthetic peptide
  Seed: LRMKWMMAMKYPITA
LRLKWYMNMKGPITA

SEQ ID NO: 219002 - protein, 15 aa, Artificial Sequence
  Description of Artificial Sequence: Synthetic peptide
  Seed: LRMKWMMAMKYPITA
LRLKWYMNMKHPITA

SEQ ID NO: 219003 - protein, 15 aa, Artificial Sequence
  Description of Artificial Sequence: Synthetic peptide
  Seed: LRMKWMMAMKYPITA
LRLKWYMNMKIPITA

SEQ ID NO: 219004 - protein, 15 aa, Artificial Sequence
  Description of Artificial Sequence: Synthetic peptide
  Seed: LRMKWMMAMKYPITA
LRLKWYMNMKLPITA

SEQ ID NO: 219005 - protein, 15 aa, Artificial Sequence
  Description of Artificial Sequence: Synthetic peptide
  Seed: LRMKWMMAMKYPITA
LRLKWYMNMKMPITA

SEQ ID NO: 219006 - protein, 15 aa, Artificial Sequence
  Description of Artificial Sequence: Synthetic peptide
  Seed: LRMKWMMAMKYPITA
LRLKWYMNMKRPITA

SEQ ID NO: 219007 - protein, 15 aa, Artificial Sequence
  Description of Artificial Sequence: Synthetic peptide
  Seed: LRMKWMMAMKYPITA
LRLKWYMNMKSPITA

SEQ ID NO: 219008 - protein, 15 aa, Artificial Sequence
  Description of Artificial Sequence: Synthetic peptide
  Seed: LRMKWMMAMKYPITA
LRLKWYMNMKTPITA

SEQ ID NO: 219009 - protein, 15 aa, Artificial Sequence
  Description of Artificial Sequence: Synthetic peptide
  Seed: LRMKWMMAMKYPITA
LRLKWYMNMKVPITA

SEQ ID NO: 219010 - protein, 15 aa, Artificial Sequence
  Description of Artificial Sequence: Synthetic peptide
  Seed: LRMKWMMAMKYPITA
LRLKWYMNMKYPITA

SEQ ID NO: 219011 - protein, 15 aa, Artificial Sequence
  Description of Artificial Sequence: Synthetic peptide
  Seed: LRMKWMMAMKYPITA
LRLKWYMPMKAPITA

SEQ ID NO: 219012 - protein, 15 aa, Artificial Sequence
  Description of Artificial Sequence: Synthetic peptide
  Seed: LRMKWMMAMKYPITA
LRLKWYMPMKIPITA

SEQ ID NO: 219013 - protein, 15 aa, Artificial Sequence
  Description of Artificial Sequence: Synthetic peptide
  Seed: LRMKWMMAMKYPITA
LRLKWYMPMKLPITA

SEQ ID NO: 219014 - protein, 15 aa, Artificial Sequence
  Description of Artificial Sequence: Synthetic peptide
  Seed: LRMKWMMAMKYPITA
LRLKWYMPMKVPITA

SEQ ID NO: 219015 - protein, 15 aa, Artificial Sequence
  Description of Artificial Sequence: Synthetic peptide
  Seed: LRMKWMMAMKYPITA
LRLKWYMSMKAPITA

SEQ ID NO: 219016 - protein, 15 aa, Artificial Sequence
  Description of Artificial Sequence: Synthetic peptide
  Seed: LRMKWMMAMKYPITA
LRLKWYMSMKFPITA

SEQ ID NO: 219017 - protein, 15 aa, Artificial Sequence
  Description of Artificial Sequence: Synthetic peptide
  Seed: LRMKWMMAMKYPITA
LRLKWYMSMKGPITA

SEQ ID NO: 219018 - protein, 15 aa, Artificial Sequence
  Description of Artificial Sequence: Synthetic peptide
  Seed: LRMKWMMAMKYPITA
LRLKWYMSMKHPITA

SEQ ID NO: 219019 - protein, 15 aa, Artificial Sequence
  Description of Artificial Sequence: Synthetic peptide
  Seed: LRMKWMMAMKYPITA
LRLKWYMSMKIPITA

SEQ ID NO: 219020 - protein, 15 aa, Artificial Sequence
  Description of Artificial Sequence: Synthetic peptide
  Seed: LRMKWMMAMKYPITA
LRLKWYMSMKKPITA

SEQ ID NO: 219021 - protein, 15 aa, Artificial Sequence
  Description of Artificial Sequence: Synthetic peptide
  Seed: LRMKWMMAMKYPITA
LRLKWYMSMKLPITA

SEQ ID NO: 219022 - protein, 15 aa, Artificial Sequence
  Description of Artificial Sequence: Synthetic peptide
  Seed: LRMKWMMAMKYPITA
LRLKWYMSMKMPITA

SEQ ID NO: 219023 - protein, 15 aa, Artificial Sequence
  Description of Artificial Sequence: Synthetic peptide
  Seed: LRMKWMMAMKYPITA
LRLKWYMSMKNPITA

SEQ ID NO: 219024 - protein, 15 aa, Artificial Sequence
  Description of Artificial Sequence: Synthetic peptide
  Seed: LRMKWMMAMKYPITA
LRLKWYMSMKRPITA

SEQ ID NO: 219025 - protein, 15 aa, Artificial Sequence
  Description of Artificial Sequence: Synthetic peptide
  Seed: LRMKWMMAMKYPITA
LRLKWYMSMKSPITA

SEQ ID NO: 219026 - protein, 15 aa, Artificial Sequence
  Description of Artificial Sequence: Synthetic peptide
  Seed: LRMKWMMAMKYPITA
LRLKWYMSMKTPITA

SEQ ID NO: 219027 - protein, 15 aa, Artificial Sequence
  Description of Artificial Sequence: Synthetic peptide
  Seed: LRMKWMMAMKYPITA
LRLKWYMSMKVPITA

SEQ ID NO: 219028 - protein, 15 aa, Artificial Sequence
  Description of Artificial Sequence: Synthetic peptide
  Seed: LRMKWMMAMKYPITA
LRLKWYMSMKYPITA

SEQ ID NO: 219029 - protein, 15 aa, Artificial Sequence
  Description of Artificial Sequence: Synthetic peptide
  Seed: LRMKWMMAMKYPITA
LRLKWYMTMKAPITA

SEQ ID NO: 219030 - protein, 15 aa, Artificial Sequence
  Description of Artificial Sequence: Synthetic peptide
  Seed: LRMKWMMAMKYPITA
LRLKWYMTMKFPITA

SEQ ID NO: 219031 - protein, 15 aa, Artificial Sequence
  Description of Artificial Sequence: Synthetic peptide
  Seed: LRMKWMMAMKYPITA
LRLKWYMTMKGPITA

SEQ ID NO: 219032 - protein, 15 aa, Artificial Sequence
  Description of Artificial Sequence: Synthetic peptide
  Seed: LRMKWMMAMKYPITA
LRLKWYMTMKHPITA

SEQ ID NO: 219033 - protein, 15 aa, Artificial Sequence
  Description of Artificial Sequence: Synthetic peptide
  Seed: LRMKWMMAMKYPITA
LRLKWYMTMKIPITA

SEQ ID NO: 219034 - protein, 15 aa, Artificial Sequence
  Description of Artificial Sequence: Synthetic peptide
  Seed: LRMKWMMAMKYPITA
LRLKWYMTMKLPITA

SEQ ID NO: 219035 - protein, 15 aa, Artificial Sequence
  Description of Artificial Sequence: Synthetic peptide
  Seed: LRMKWMMAMKYPITA
LRLKWYMTMKMPITA

SEQ ID NO: 219036 - protein, 15 aa, Artificial Sequence
  Description of Artificial Sequence: Synthetic peptide
  Seed: LRMKWMMAMKYPITA
LRLKWYMTMKRPITA

SEQ ID NO: 219037 - protein, 15 aa, Artificial Sequence
  Description of Artificial Sequence: Synthetic peptide
  Seed: LRMKWMMAMKYPITA
LRLKWYMTMKSPITA

SEQ ID NO: 219038 - protein, 15 aa, Artificial Sequence
  Description of Artificial Sequence: Synthetic peptide
  Seed: LRMKWMMAMKYPITA
LRLKWYMTMKTPITA

SEQ ID NO: 219039 - protein, 15 aa, Artificial Sequence
  Description of Artificial Sequence: Synthetic peptide
  Seed: LRMKWMMAMKYPITA
LRLKWYMTMKVPITA

SEQ ID NO: 219040 - protein, 15 aa, Artificial Sequence
  Description of Artificial Sequence: Synthetic peptide
  Seed: LRMKWMMAMKYPITA
LRLKWYMTMKYPITA

SEQ ID NO: 219041 - protein, 15 aa, Artificial Sequence
  Description of Artificial Sequence: Synthetic peptide
  Seed: LRMKWMMAMKYPITA
LRLKWYMVMKAPITA

SEQ ID NO: 219042 - protein, 15 aa, Artificial Sequence
  Description of Artificial Sequence: Synthetic peptide
  Seed: LRMKWMMAMKYPITA
LRLKWYMVMKSPITA

SEQ ID NO: 219043 - protein, 15 aa, Artificial Sequence
  Description of Artificial Sequence: Synthetic peptide
  Seed: LRMKWMMAMKYPITA
LRMKWAMAMKAPITA

SEQ ID NO: 219044 - protein, 15 aa, Artificial Sequence
  Description of Artificial Sequence: Synthetic peptide
  Seed: LRMKWMMAMKYPITA
LRMKWAMAMKIPITA

SEQ ID NO: 219045 - protein, 15 aa, Artificial Sequence
  Description of Artificial Sequence: Synthetic peptide
  Seed: LRMKWMMAMKYPITA
LRMKWAMAMKLPITA

SEQ ID NO: 219046 - protein, 15 aa, Artificial Sequence
  Description of Artificial Sequence: Synthetic peptide
  Seed: LRMKWMMAMKYPITA
LRMKWAMAMKVPITA

SEQ ID NO: 219047 - protein, 15 aa, Artificial Sequence
  Description of Artificial Sequence: Synthetic peptide
  Seed: LRMKWMMAMKYPITA
LRMKWAMFMKEPITA

SEQ ID NO: 219048 - protein, 15 aa, Artificial Sequence
  Description of Artificial Sequence: Synthetic peptide
  Seed: LRMKWMMAMKYPITA
LRMKWAMFMKFPITA

SEQ ID NO: 219049 - protein, 15 aa, Artificial Sequence
  Description of Artificial Sequence: Synthetic peptide
  Seed: LRMKWMMAMKYPITA
LRMKWAMFMKIPITA

SEQ ID NO: 219050 - protein, 15 aa, Artificial Sequence
  Description of Artificial Sequence: Synthetic peptide
  Seed: LRMKWMMAMKYPITA
LRMKWAMFMKLPITA

SEQ ID NO: 219051 - protein, 15 aa, Artificial Sequence
  Description of Artificial Sequence: Synthetic peptide
  Seed: LRMKWMMAMKYPITA
LRMKWAMFMKMPITA

SEQ ID NO: 219052 - protein, 15 aa, Artificial Sequence
  Description of Artificial Sequence: Synthetic peptide
  Seed: LRMKWMMAMKYPITA
LRMKWAMFMKVPITA

SEQ ID NO: 219053 - protein, 15 aa, Artificial Sequence
  Description of Artificial Sequence: Synthetic peptide
  Seed: LRMKWMMAMKYPITA
LRMKWEMFMKAPITA

SEQ ID NO: 219054 - protein, 15 aa, Artificial Sequence
  Description of Artificial Sequence: Synthetic peptide
  Seed: LRMKWMMAMKYPITA
LRMKWEMFMKFPITA

SEQ ID NO: 219055 - protein, 15 aa, Artificial Sequence
  Description of Artificial Sequence: Synthetic peptide
  Seed: LRMKWMMAMKYPITA
LRMKWEMFMKIPITA

SEQ ID NO: 219056 - protein, 15 aa, Artificial Sequence
  Description of Artificial Sequence: Synthetic peptide
  Seed: LRMKWMMAMKYPITA
LRMKWEMFMKLPITA

SEQ ID NO: 219057 - protein, 15 aa, Artificial Sequence
  Description of Artificial Sequence: Synthetic peptide
  Seed: LRMKWMMAMKYPITA
LRMKWEMFMKMPITA

SEQ ID NO: 219058 - protein, 15 aa, Artificial Sequence
  Description of Artificial Sequence: Synthetic peptide
  Seed: LRMKWMMAMKYPITA
LRMKWEMFMKVPITA

SEQ ID NO: 219059 - protein, 15 aa, Artificial Sequence
  Description of Artificial Sequence: Synthetic peptide
  Seed: LRMKWMMAMKYPITA
LRMKWEMLMKLPITA

SEQ ID NO: 219060 - protein, 15 aa, Artificial Sequence
  Description of Artificial Sequence: Synthetic peptide
  Seed: LRMKWMMAMKYPITA
LRMKWFMAMKAPITA

SEQ ID NO: 219061 - protein, 15 aa, Artificial Sequence
  Description of Artificial Sequence: Synthetic peptide
  Seed: LRMKWMMAMKYPITA
LRMKWFMAMKFPITA

SEQ ID NO: 219062 - protein, 15 aa, Artificial Sequence
  Description of Artificial Sequence: Synthetic peptide
  Seed: LRMKWMMAMKYPITA
LRMKWFMAMKIPITA

SEQ ID NO: 219063 - protein, 15 aa, Artificial Sequence
  Description of Artificial Sequence: Synthetic peptide
  Seed: LRMKWMMAMKYPITA
LRMKWFMAMKLPITA

SEQ ID NO: 219064 - protein, 15 aa, Artificial Sequence
  Description of Artificial Sequence: Synthetic peptide
  Seed: LRMKWMMAMKYPITA
LRMKWFMAMKTPITA

SEQ ID NO: 219065 - protein, 15 aa, Artificial Sequence
  Description of Artificial Sequence: Synthetic peptide
  Seed: LRMKWMMAMKYPITA
LRMKWFMAMKVPITA

SEQ ID NO: 219066 - protein, 15 aa, Artificial Sequence
  Description of Artificial Sequence: Synthetic peptide
  Seed: LRMKWMMAMKYPITA
LRMKWFMGMKAPITA

SEQ ID NO: 219067 - protein, 15 aa, Artificial Sequence
  Description of Artificial Sequence: Synthetic peptide
  Seed: LRMKWMMAMKYPITA
LRMKWFMGMKIPITA

SEQ ID NO: 219068 - protein, 15 aa, Artificial Sequence
  Description of Artificial Sequence: Synthetic peptide
  Seed: LRMKWMMAMKYPITA
LRMKWFMGMKLPITA

SEQ ID NO: 219069 - protein, 15 aa, Artificial Sequence
  Description of Artificial Sequence: Synthetic peptide
  Seed: LRMKWMMAMKYPITA
LRMKWFMGMKSPITA

SEQ ID NO: 219070 - protein, 15 aa, Artificial Sequence
  Description of Artificial Sequence: Synthetic peptide
  Seed: LRMKWMMAMKYPITA
LRMKWFMGMKTPITA

SEQ ID NO: 219071 - protein, 15 aa, Artificial Sequence
  Description of Artificial Sequence: Synthetic peptide
  Seed: LRMKWMMAMKYPITA
LRMKWFMGMKVPITA

SEQ ID NO: 219072 - protein, 15 aa, Artificial Sequence
  Description of Artificial Sequence: Synthetic peptide
  Seed: LRMKWMMAMKYPITA
LRMKWFMNMKAPITA

SEQ ID NO: 219073 - protein, 15 aa, Artificial Sequence
  Description of Artificial Sequence: Synthetic peptide
  Seed: LRMKWMMAMKYPITA
LRMKWFMNMKIPITA

SEQ ID NO: 219074 - protein, 15 aa, Artificial Sequence
  Description of Artificial Sequence: Synthetic peptide
  Seed: LRMKWMMAMKYPITA
LRMKWFMNMKLPITA

SEQ ID NO: 219075 - protein, 15 aa, Artificial Sequence
  Description of Artificial Sequence: Synthetic peptide
  Seed: LRMKWMMAMKYPITA
LRMKWFMNMKMPITA

SEQ ID NO: 219076 - protein, 15 aa, Artificial Sequence
  Description of Artificial Sequence: Synthetic peptide
  Seed: LRMKWMMAMKYPITA
LRMKWFMNMKSPITA

SEQ ID NO: 219077 - protein, 15 aa, Artificial Sequence
  Description of Artificial Sequence: Synthetic peptide
  Seed: LRMKWMMAMKYPITA
LRMKWFMNMKTPITA

SEQ ID NO: 219078 - protein, 15 aa, Artificial Sequence
  Description of Artificial Sequence: Synthetic peptide
  Seed: LRMKWMMAMKYPITA
LRMKWFMNMKVPITA

SEQ ID NO: 219079 - protein, 15 aa, Artificial Sequence
  Description of Artificial Sequence: Synthetic peptide
  Seed: LRMKWMMAMKYPITA
LRMKWFMSMKAPITA

SEQ ID NO: 219080 - protein, 15 aa, Artificial Sequence
  Description of Artificial Sequence: Synthetic peptide
  Seed: LRMKWMMAMKYPITA
LRMKWFMSMKGPITA

SEQ ID NO: 219081 - protein, 15 aa, Artificial Sequence
  Description of Artificial Sequence: Synthetic peptide
  Seed: LRMKWMMAMKYPITA
LRMKWFMSMKIPITA

SEQ ID NO: 219082 - protein, 15 aa, Artificial Sequence
  Description of Artificial Sequence: Synthetic peptide
  Seed: LRMKWMMAMKYPITA
LRMKWFMSMKLPITA

SEQ ID NO: 219083 - protein, 15 aa, Artificial Sequence
  Description of Artificial Sequence: Synthetic peptide
  Seed: LRMKWMMAMKYPITA
LRMKWFMSMKMPITA

SEQ ID NO: 219084 - protein, 15 aa, Artificial Sequence
  Description of Artificial Sequence: Synthetic peptide
  Seed: LRMKWMMAMKYPITA
LRMKWFMSMKSPITA

SEQ ID NO: 219085 - protein, 15 aa, Artificial Sequence
  Description of Artificial Sequence: Synthetic peptide
  Seed: LRMKWMMAMKYPITA
LRMKWFMSMKTPITA

SEQ ID NO: 219086 - protein, 15 aa, Artificial Sequence
  Description of Artificial Sequence: Synthetic peptide
  Seed: LRMKWMMAMKYPITA
LRMKWFMSMKVPITA

SEQ ID NO: 219087 - protein, 15 aa, Artificial Sequence
  Description of Artificial Sequence: Synthetic peptide
  Seed: LRMKWMMAMKYPITA
LRMKWFMTMKAPITA

SEQ ID NO: 219088 - protein, 15 aa, Artificial Sequence
  Description of Artificial Sequence: Synthetic peptide
  Seed: LRMKWMMAMKYPITA
LRMKWFMTMKIPITA

SEQ ID NO: 219089 - protein, 15 aa, Artificial Sequence
  Description of Artificial Sequence: Synthetic peptide
  Seed: LRMKWMMAMKYPITA
LRMKWFMTMKLPITA

SEQ ID NO: 219090 - protein, 15 aa, Artificial Sequence
  Description of Artificial Sequence: Synthetic peptide
  Seed: LRMKWMMAMKYPITA
LRMKWFMTMKSPITA

SEQ ID NO: 219091 - protein, 15 aa, Artificial Sequence
  Description of Artificial Sequence: Synthetic peptide
  Seed: LRMKWMMAMKYPITA
LRMKWFMTMKVPITA

SEQ ID NO: 219092 - protein, 15 aa, Artificial Sequence
  Description of Artificial Sequence: Synthetic peptide
  Seed: LRMKWMMAMKYPITA
LRMKWHMFMKIPITA

SEQ ID NO: 219093 - protein, 15 aa, Artificial Sequence
  Description of Artificial Sequence: Synthetic peptide
  Seed: LRMKWMMAMKYPITA
LRMKWHMFMKLPITA

SEQ ID NO: 219094 - protein, 15 aa, Artificial Sequence
  Description of Artificial Sequence: Synthetic peptide
  Seed: LRMKWMMAMKYPITA
LRMKWIMAMKFPITA

SEQ ID NO: 219095 - protein, 15 aa, Artificial Sequence
  Description of Artificial Sequence: Synthetic peptide
  Seed: LRMKWMMAMKYPITA
LRMKWIMAMKIPITA

SEQ ID NO: 219096 - protein, 15 aa, Artificial Sequence
  Description of Artificial Sequence: Synthetic peptide
  Seed: LRMKWMMAMKYPITA
LRMKWIMAMKLPITA

SEQ ID NO: 219097 - protein, 15 aa, Artificial Sequence
  Description of Artificial Sequence: Synthetic peptide
  Seed: LRMKWMMAMKYPITA
LRMKWIMAMKMPITA

SEQ ID NO: 219098 - protein, 15 aa, Artificial Sequence
  Description of Artificial Sequence: Synthetic peptide
  Seed: LRMKWMMAMKYPITA
LRMKWIMAMKVPITA

SEQ ID NO: 219099 - protein, 15 aa, Artificial Sequence
  Description of Artificial Sequence: Synthetic peptide
  Seed: LRMKWMMAMKYPITA
LRMKWIMGMKVPITA

SEQ ID NO: 219100 - protein, 15 aa, Artificial Sequence
  Description of Artificial Sequence: Synthetic peptide
  Seed: LRMKWMMAMKYPITA
LRMKWIMNMKAPITA

SEQ ID NO: 219101 - protein, 15 aa, Artificial Sequence
  Description of Artificial Sequence: Synthetic peptide
  Seed: LRMKWMMAMKYPITA
LRMKWIMSMKVPITA

SEQ ID NO: 219102 - protein, 15 aa, Artificial Sequence
  Description of Artificial Sequence: Synthetic peptide
  Seed: LRMKWMMAMKYPITA
LRMKWIMTMKAPITA

SEQ ID NO: 219103 - protein, 15 aa, Artificial Sequence
  Description of Artificial Sequence: Synthetic peptide
  Seed: LRMKWMMAMKYPITA
LRMKWIMTMKGPITA

SEQ ID NO: 219104 - protein, 15 aa, Artificial Sequence
  Description of Artificial Sequence: Synthetic peptide
  Seed: LRMKWMMAMKYPITA
LRMKWLMAMKFPITA

SEQ ID NO: 219105 - protein, 15 aa, Artificial Sequence
  Description of Artificial Sequence: Synthetic peptide
  Seed: LRMKWMMAMKYPITA
LRMKWLMAMKIPITA

SEQ ID NO: 219106 - protein, 15 aa, Artificial Sequence
  Description of Artificial Sequence: Synthetic peptide
  Seed: LRMKWMMAMKYPITA
LRMKWLMAMKLPITA

SEQ ID NO: 219107 - protein, 15 aa, Artificial Sequence
  Description of Artificial Sequence: Synthetic peptide
  Seed: LRMKWMMAMKYPITA
LRMKWLMAMKMPITA

SEQ ID NO: 219108 - protein, 15 aa, Artificial Sequence
  Description of Artificial Sequence: Synthetic peptide
  Seed: LRMKWMMAMKYPITA
LRMKWLMAMKVPITA

SEQ ID NO: 219109 - protein, 15 aa, Artificial Sequence
  Description of Artificial Sequence: Synthetic peptide
  Seed: LRMKWMMAMKYPITA
LRMKWLMGMKAPITA

SEQ ID NO: 219110 - protein, 15 aa, Artificial Sequence
  Description of Artificial Sequence: Synthetic peptide
  Seed: LRMKWMMAMKYPITA
LRMKWLMGMKIPITA

SEQ ID NO: 219111 - protein, 15 aa, Artificial Sequence
  Description of Artificial Sequence: Synthetic peptide
  Seed: LRMKWMMAMKYPITA
LRMKWLMGMKLPITA

SEQ ID NO: 219112 - protein, 15 aa, Artificial Sequence
  Description of Artificial Sequence: Synthetic peptide
  Seed: LRMKWMMAMKYPITA
LRMKWLMGMKSPITA

SEQ ID NO: 219113 - protein, 15 aa, Artificial Sequence
  Description of Artificial Sequence: Synthetic peptide
  Seed: LRMKWMMAMKYPITA
LRMKWLMGMKTPITA

SEQ ID NO: 219114 - protein, 15 aa, Artificial Sequence
  Description of Artificial Sequence: Synthetic peptide
  Seed: LRMKWMMAMKYPITA
LRMKWLMGMKVPITA

SEQ ID NO: 219115 - protein, 15 aa, Artificial Sequence
  Description of Artificial Sequence: Synthetic peptide
  Seed: LRMKWMMAMKYPITA
LRMKWLMNMKAPITA

SEQ ID NO: 219116 - protein, 15 aa, Artificial Sequence
  Description of Artificial Sequence: Synthetic peptide
  Seed: LRMKWMMAMKYPITA
LRMKWLMNMKSPITA

SEQ ID NO: 219117 - protein, 15 aa, Artificial Sequence
  Description of Artificial Sequence: Synthetic peptide
  Seed: LRMKWMMAMKYPITA
LRMKWLMPMKIPITA

SEQ ID NO: 219118 - protein, 15 aa, Artificial Sequence
  Description of Artificial Sequence: Synthetic peptide
  Seed: LRMKWMMAMKYPITA
LRMKWLMPMKLPITA

SEQ ID NO: 219119 - protein, 15 aa, Artificial Sequence
  Description of Artificial Sequence: Synthetic peptide
  Seed: LRMKWMMAMKYPITA
LRMKWLMPMKTPITA

SEQ ID NO: 219120 - protein, 15 aa, Artificial Sequence
  Description of Artificial Sequence: Synthetic peptide
  Seed: LRMKWMMAMKYPITA
LRMKWLMPMKVPITA

SEQ ID NO: 219121 - protein, 15 aa, Artificial Sequence
  Description of Artificial Sequence: Synthetic peptide
  Seed: LRMKWMMAMKYPITA
LRMKWLMSMKAPITA

SEQ ID NO: 219122 - protein, 15 aa, Artificial Sequence
  Description of Artificial Sequence: Synthetic peptide
  Seed: LRMKWMMAMKYPITA
LRMKWLMSMKIPITA

SEQ ID NO: 219123 - protein, 15 aa, Artificial Sequence
  Description of Artificial Sequence: Synthetic peptide
  Seed: LRMKWMMAMKYPITA
LRMKWLMSMKLPITA

SEQ ID NO: 219124 - protein, 15 aa, Artificial Sequence
  Description of Artificial Sequence: Synthetic peptide
  Seed: LRMKWMMAMKYPITA
LRMKWLMSMKVPITA

SEQ ID NO: 219125 - protein, 15 aa, Artificial Sequence
  Description of Artificial Sequence: Synthetic peptide
  Seed: LRMKWMMAMKYPITA
LRMKWLMTMKAPITA

SEQ ID NO: 219126 - protein, 15 aa, Artificial Sequence
  Description of Artificial Sequence: Synthetic peptide
  Seed: LRMKWMMAMKYPITA
LRMKWLMTMKSPITA

SEQ ID NO: 219127 - protein, 15 aa, Artificial Sequence
  Description of Artificial Sequence: Synthetic peptide
  Seed: LRMKWMMAMKYPITA
LRMKWMMAMKIPITA

SEQ ID NO: 219128 - protein, 15 aa, Artificial Sequence
  Description of Artificial Sequence: Synthetic peptide
  Seed: LRMKWMMAMKYPITA
LRMKWMMAMKLPITA

SEQ ID NO: 219129 - protein, 15 aa, Artificial Sequence
  Description of Artificial Sequence: Synthetic peptide
  Seed: LRMKWMMAMKYPITA
LRMKWMMAMKMPITA

SEQ ID NO: 219130 - protein, 15 aa, Artificial Sequence
  Description of Artificial Sequence: Synthetic peptide
  Seed: LRMKWMMAMKYPITA
LRMKWMMAMKTPITA

SEQ ID NO: 219131 - protein, 15 aa, Artificial Sequence
  Description of Artificial Sequence: Synthetic peptide
  Seed: LRMKWMMAMKYPITA
LRMKWMMAMKVPITA

SEQ ID NO: 219132 - protein, 15 aa, Artificial Sequence
  Description of Artificial Sequence: Synthetic peptide
  Seed: LRMKWMMAMKYPITA
LRMKWMMGMKAPITA

SEQ ID NO: 219133 - protein, 15 aa, Artificial Sequence
  Description of Artificial Sequence: Synthetic peptide
  Seed: LRMKWMMAMKYPITA
LRMKWMMGMKIPITA

SEQ ID NO: 219134 - protein, 15 aa, Artificial Sequence
  Description of Artificial Sequence: Synthetic peptide
  Seed: LRMKWMMAMKYPITA
LRMKWMMGMKLPITA

SEQ ID NO: 219135 - protein, 15 aa, Artificial Sequence
  Description of Artificial Sequence: Synthetic peptide
  Seed: LRMKWMMAMKYPITA
LRMKWMMGMKSPITA

SEQ ID NO: 219136 - protein, 15 aa, Artificial Sequence
  Description of Artificial Sequence: Synthetic peptide
  Seed: LRMKWMMAMKYPITA
LRMKWMMGMKTPITA

SEQ ID NO: 219137 - protein, 15 aa, Artificial Sequence
  Description of Artificial Sequence: Synthetic peptide
  Seed: LRMKWMMAMKYPITA
LRMKWMMGMKVPITA

SEQ ID NO: 219138 - protein, 15 aa, Artificial Sequence
  Description of Artificial Sequence: Synthetic peptide
  Seed: LRMKWMMAMKYPITA
LRMKWMMGMKYPITA

SEQ ID NO: 219139 - protein, 15 aa, Artificial Sequence
  Description of Artificial Sequence: Synthetic peptide
  Seed: LRMKWMMAMKYPITA
LRMKWMMHMKYPITA

SEQ ID NO: 219140 - protein, 15 aa, Artificial Sequence
  Description of Artificial Sequence: Synthetic peptide
  Seed: LRMKWMMAMKYPITA
LRMKWMMIMKYPITA

SEQ ID NO: 219141 - protein, 15 aa, Artificial Sequence
  Description of Artificial Sequence: Synthetic peptide
  Seed: LRMKWMMAMKYPITA
LRMKWMMKMKYPITA

SEQ ID NO: 219142 - protein, 15 aa, Artificial Sequence
  Description of Artificial Sequence: Synthetic peptide
  Seed: LRMKWMMAMKYPITA
LRMKWMMLMKYPITA

SEQ ID NO: 219143 - protein, 15 aa, Artificial Sequence
  Description of Artificial Sequence: Synthetic peptide
  Seed: LRMKWMMAMKYPITA
LRMKWMMMMKYPITA

SEQ ID NO: 219144 - protein, 15 aa, Artificial Sequence
  Description of Artificial Sequence: Synthetic peptide
  Seed: LRMKWMMAMKYPITA
LRMKWMMNMKAPITA

SEQ ID NO: 219145 - protein, 15 aa, Artificial Sequence
  Description of Artificial Sequence: Synthetic peptide
  Seed: LRMKWMMAMKYPITA
LRMKWMMNMKSPITA

SEQ ID NO: 219146 - protein, 15 aa, Artificial Sequence
  Description of Artificial Sequence: Synthetic peptide
  Seed: LRMKWMMAMKYPITA
LRMKWMMNMKYPITA

SEQ ID NO: 219147 - protein, 15 aa, Artificial Sequence
  Description of Artificial Sequence: Synthetic peptide
  Seed: LRMKWMMAMKYPITA
LRMKWMMPMKIPITA

SEQ ID NO: 219148 - protein, 15 aa, Artificial Sequence
  Description of Artificial Sequence: Synthetic peptide
  Seed: LRMKWMMAMKYPITA
LRMKWMMPMKLPITA

SEQ ID NO: 219149 - protein, 15 aa, Artificial Sequence
  Description of Artificial Sequence: Synthetic peptide
  Seed: LRMKWMMAMKYPITA
LRMKWMMPMKVPITA

SEQ ID NO: 219150 - protein, 15 aa, Artificial Sequence
  Description of Artificial Sequence: Synthetic peptide
  Seed: LRMKWMMAMKYPITA
LRMKWMMQMKYPITA

SEQ ID NO: 219151 - protein, 15 aa, Artificial Sequence
  Description of Artificial Sequence: Synthetic peptide
  Seed: LRMKWMMAMKYPITA
LRMKWMMSMKAPITA

SEQ ID NO: 219152 - protein, 15 aa, Artificial Sequence
  Description of Artificial Sequence: Synthetic peptide
  Seed: LRMKWMMAMKYPITA
LRMKWMMSMKIPITA

SEQ ID NO: 219153 - protein, 15 aa, Artificial Sequence
  Description of Artificial Sequence: Synthetic peptide
  Seed: LRMKWMMAMKYPITA
LRMKWMMSMKLPITA

SEQ ID NO: 219154 - protein, 15 aa, Artificial Sequence
  Description of Artificial Sequence: Synthetic peptide
  Seed: LRMKWMMAMKYPITA
LRMKWMMSMKSPITA

SEQ ID NO: 219155 - protein, 15 aa, Artificial Sequence
  Description of Artificial Sequence: Synthetic peptide
  Seed: LRMKWMMAMKYPITA
LRMKWMMSMKVPITA

SEQ ID NO: 219156 - protein, 15 aa, Artificial Sequence
  Description of Artificial Sequence: Synthetic peptide
  Seed: LRMKWMMAMKYPITA
LRMKWMMSMKYPITA

SEQ ID NO: 219157 - protein, 15 aa, Artificial Sequence
  Description of Artificial Sequence: Synthetic peptide
  Seed: LRMKWMMAMKYPITA
LRMKWMMTMKAPITA

SEQ ID NO: 219158 - protein, 15 aa, Artificial Sequence
  Description of Artificial Sequence: Synthetic peptide
  Seed: LRMKWMMAMKYPITA
LRMKWMMTMKGPITA

SEQ ID NO: 219159 - protein, 15 aa, Artificial Sequence
  Description of Artificial Sequence: Synthetic peptide
  Seed: LRMKWMMAMKYPITA
LRMKWMMTMKSPITA

SEQ ID NO: 219160 - protein, 15 aa, Artificial Sequence
  Description of Artificial Sequence: Synthetic peptide
  Seed: LRMKWMMAMKYPITA
LRMKWMMTMKYPITA

SEQ ID NO: 219161 - protein, 15 aa, Artificial Sequence
  Description of Artificial Sequence: Synthetic peptide
  Seed: LRMKWMMAMKYPITA
LRMKWMMVMKAPITA

SEQ ID NO: 219162 - protein, 15 aa, Artificial Sequence
  Description of Artificial Sequence: Synthetic peptide
  Seed: LRMKWMMAMKYPITA
LRMKWMMVMKYPITA

SEQ ID NO: 219163 - protein, 15 aa, Artificial Sequence
  Description of Artificial Sequence: Synthetic peptide
  Seed: LRMKWMMAMKYPITA
LRMKWQMAMKIPITA

SEQ ID NO: 219164 - protein, 15 aa, Artificial Sequence
  Description of Artificial Sequence: Synthetic peptide
  Seed: LRMKWMMAMKYPITA
LRMKWQMAMKLPITA

SEQ ID NO: 219165 - protein, 15 aa, Artificial Sequence
  Description of Artificial Sequence: Synthetic peptide
  Seed: LRMKWMMAMKYPITA
LRMKWQMAMKVPITA

SEQ ID NO: 219166 - protein, 15 aa, Artificial Sequence
  Description of Artificial Sequence: Synthetic peptide
  Seed: LRMKWMMAMKYPITA
LRMKWQMFMKIPITA

SEQ ID NO: 219167 - protein, 15 aa, Artificial Sequence
  Description of Artificial Sequence: Synthetic peptide
  Seed: LRMKWMMAMKYPITA
LRMKWQMFMKLPITA

SEQ ID NO: 219168 - protein, 15 aa, Artificial Sequence
  Description of Artificial Sequence: Synthetic peptide
  Seed: LRMKWMMAMKYPITA
LRMKWQMFMKVPITA

SEQ ID NO: 219169 - protein, 15 aa, Artificial Sequence
  Description of Artificial Sequence: Synthetic peptide
  Seed: LRMKWMMAMKYPITA
LRMKWQMLMKLPITA

SEQ ID NO: 219170 - protein, 15 aa, Artificial Sequence
  Description of Artificial Sequence: Synthetic peptide
  Seed: LRMKWMMAMKYPITA
LRMKWSMFMKAPITA

SEQ ID NO: 219171 - protein, 15 aa, Artificial Sequence
  Description of Artificial Sequence: Synthetic peptide
  Seed: LRMKWMMAMKYPITA
LRMKWSMFMKEPITA

SEQ ID NO: 219172 - protein, 15 aa, Artificial Sequence
  Description of Artificial Sequence: Synthetic peptide
  Seed: LRMKWMMAMKYPITA
LRMKWSMFMKFPITA

SEQ ID NO: 219173 - protein, 15 aa, Artificial Sequence
  Description of Artificial Sequence: Synthetic peptide
  Seed: LRMKWMMAMKYPITA
LRMKWSMFMKIPITA

SEQ ID NO: 219174 - protein, 15 aa, Artificial Sequence
  Description of Artificial Sequence: Synthetic peptide
  Seed: LRMKWMMAMKYPITA
LRMKWSMFMKLPITA

SEQ ID NO: 219175 - protein, 15 aa, Artificial Sequence
  Description of Artificial Sequence: Synthetic peptide
  Seed: LRMKWMMAMKYPITA
LRMKWSMFMKMPITA

SEQ ID NO: 219176 - protein, 15 aa, Artificial Sequence
  Description of Artificial Sequence: Synthetic peptide
  Seed: LRMKWMMAMKYPITA
LRMKWSMFMKTPITA

SEQ ID NO: 219177 - protein, 15 aa, Artificial Sequence
  Description of Artificial Sequence: Synthetic peptide
  Seed: LRMKWMMAMKYPITA
LRMKWSMFMKVPITA

SEQ ID NO: 219178 - protein, 15 aa, Artificial Sequence
  Description of Artificial Sequence: Synthetic peptide
  Seed: LRMKWMMAMKYPITA
LRMKWSMIMKLPITA

SEQ ID NO: 219179 - protein, 15 aa, Artificial Sequence
  Description of Artificial Sequence: Synthetic peptide
  Seed: LRMKWMMAMKYPITA
LRMKWSMLMKIPITA

SEQ ID NO: 219180 - protein, 15 aa, Artificial Sequence
  Description of Artificial Sequence: Synthetic peptide
  Seed: LRMKWMMAMKYPITA
LRMKWSMLMKLPITA

SEQ ID NO: 219181 - protein, 15 aa, Artificial Sequence
  Description of Artificial Sequence: Synthetic peptide
  Seed: LRMKWMMAMKYPITA
LRMKWSMLMKMPITA

SEQ ID NO: 219182 - protein, 15 aa, Artificial Sequence
  Description of Artificial Sequence: Synthetic peptide
  Seed: LRMKWMMAMKYPITA
LRMKWSMLMKVPITA

SEQ ID NO: 219183 - protein, 15 aa, Artificial Sequence
  Description of Artificial Sequence: Synthetic peptide
  Seed: LRMKWMMAMKYPITA
LRMKWSMMMKLPITA

SEQ ID NO: 219184 - protein, 15 aa, Artificial Sequence
  Description of Artificial Sequence: Synthetic peptide
  Seed: LRMKWMMAMKYPITA
LRMKWTMFMKAPITA

SEQ ID NO: 219185 - protein, 15 aa, Artificial Sequence
  Description of Artificial Sequence: Synthetic peptide
  Seed: LRMKWMMAMKYPITA
LRMKWTMFMKEPITA

SEQ ID NO: 219186 - protein, 15 aa, Artificial Sequence
  Description of Artificial Sequence: Synthetic peptide
  Seed: LRMKWMMAMKYPITA
LRMKWTMFMKFPITA

SEQ ID NO: 219187 - protein, 15 aa, Artificial Sequence
  Description of Artificial Sequence: Synthetic peptide
  Seed: LRMKWMMAMKYPITA
LRMKWTMFMKIPITA

SEQ ID NO: 219188 - protein, 15 aa, Artificial Sequence
  Description of Artificial Sequence: Synthetic peptide
  Seed: LRMKWMMAMKYPITA
LRMKWTMFMKLPITA

SEQ ID NO: 219189 - protein, 15 aa, Artificial Sequence
  Description of Artificial Sequence: Synthetic peptide
  Seed: LRMKWMMAMKYPITA
LRMKWTMFMKMPITA

SEQ ID NO: 219190 - protein, 15 aa, Artificial Sequence
  Description of Artificial Sequence: Synthetic peptide
  Seed: LRMKWMMAMKYPITA
LRMKWTMFMKNPITA

SEQ ID NO: 219191 - protein, 15 aa, Artificial Sequence
  Description of Artificial Sequence: Synthetic peptide
  Seed: LRMKWMMAMKYPITA
LRMKWTMFMKSPITA

SEQ ID NO: 219192 - protein, 15 aa, Artificial Sequence
  Description of Artificial Sequence: Synthetic peptide
  Seed: LRMKWMMAMKYPITA
LRMKWTMFMKTPITA

SEQ ID NO: 219193 - protein, 15 aa, Artificial Sequence
  Description of Artificial Sequence: Synthetic peptide
  Seed: LRMKWMMAMKYPITA
LRMKWTMFMKVPITA

SEQ ID NO: 219194 - protein, 15 aa, Artificial Sequence
  Description of Artificial Sequence: Synthetic peptide
  Seed: LRMKWMMAMKYPITA
LRMKWTMFMKYPITA

SEQ ID NO: 219195 - protein, 15 aa, Artificial Sequence
  Description of Artificial Sequence: Synthetic peptide
  Seed: LRMKWMMAMKYPITA
LRMKWTMIMKLPITA

SEQ ID NO: 219196 - protein, 15 aa, Artificial Sequence
  Description of Artificial Sequence: Synthetic peptide
  Seed: LRMKWMMAMKYPITA
LRMKWTMIMKVPITA

SEQ ID NO: 219197 - protein, 15 aa, Artificial Sequence
  Description of Artificial Sequence: Synthetic peptide
  Seed: LRMKWMMAMKYPITA
LRMKWTMLMKFPITA

SEQ ID NO: 219198 - protein, 15 aa, Artificial Sequence
  Description of Artificial Sequence: Synthetic peptide
  Seed: LRMKWMMAMKYPITA
LRMKWTMLMKIPITA

SEQ ID NO: 219199 - protein, 15 aa, Artificial Sequence
  Description of Artificial Sequence: Synthetic peptide
  Seed: LRMKWMMAMKYPITA
LRMKWTMLMKLPITA

SEQ ID NO: 219200 - protein, 15 aa, Artificial Sequence
  Description of Artificial Sequence: Synthetic peptide
  Seed: LRMKWMMAMKYPITA
LRMKWTMLMKMPITA

SEQ ID NO: 219201 - protein, 15 aa, Artificial Sequence
  Description of Artificial Sequence: Synthetic peptide
  Seed: LRMKWMMAMKYPITA
LRMKWTMLMKVPITA

SEQ ID NO: 219202 - protein, 15 aa, Artificial Sequence
  Description of Artificial Sequence: Synthetic peptide
  Seed: LRMKWMMAMKYPITA
LRMKWTMMMKLPITA

SEQ ID NO: 219203 - protein, 15 aa, Artificial Sequence
  Description of Artificial Sequence: Synthetic peptide
  Seed: LRMKWMMAMKYPITA
LRMKWTMMMKMPITA

SEQ ID NO: 219204 - protein, 15 aa, Artificial Sequence
  Description of Artificial Sequence: Synthetic peptide
  Seed: LRMKWMMAMKYPITA
LRMKWTMMMKVPITA

SEQ ID NO: 219205 - protein, 15 aa, Artificial Sequence
  Description of Artificial Sequence: Synthetic peptide
  Seed: LRMKWMMAMKYPITA
LRMKWTMYMKLPITA

SEQ ID NO: 219206 - protein, 15 aa, Artificial Sequence
  Description of Artificial Sequence: Synthetic peptide
  Seed: LRMKWMMAMKYPITA
LRMKWVMAMKVPITA

SEQ ID NO: 219207 - protein, 15 aa, Artificial Sequence
  Description of Artificial Sequence: Synthetic peptide
  Seed: LRMKWMMAMKYPITA
LRMKWVMFMKVPITA

SEQ ID NO: 219208 - protein, 15 aa, Artificial Sequence
  Description of Artificial Sequence: Synthetic peptide
  Seed: LRMKWMMAMKYPITA
LRMKWVMTMKAPITA

SEQ ID NO: 219209 - protein, 15 aa, Artificial Sequence
  Description of Artificial Sequence: Synthetic peptide
  Seed: LRMKWMMAMKYPITA
LRMKWVMTMKSPITA

SEQ ID NO: 219210 - protein, 15 aa, Artificial Sequence
  Description of Artificial Sequence: Synthetic peptide
  Seed: LRMKWMMAMKYPITA
LRMKWWMAMKAPITA

SEQ ID NO: 219211 - protein, 15 aa, Artificial Sequence
  Description of Artificial Sequence: Synthetic peptide
  Seed: LRMKWMMAMKYPITA
LRMKWWMAMKIPITA

SEQ ID NO: 219212 - protein, 15 aa, Artificial Sequence
  Description of Artificial Sequence: Synthetic peptide
  Seed: LRMKWMMAMKYPITA
LRMKWWMAMKLPITA

SEQ ID NO: 219213 - protein, 15 aa, Artificial Sequence
  Description of Artificial Sequence: Synthetic peptide
  Seed: LRMKWMMAMKYPITA
LRMKWWMAMKVPITA

SEQ ID NO: 219214 - protein, 15 aa, Artificial Sequence
  Description of Artificial Sequence: Synthetic peptide
  Seed: LRMKWMMAMKYPITA
LRMKWWMGMKIPITA

SEQ ID NO: 219215 - protein, 15 aa, Artificial Sequence
  Description of Artificial Sequence: Synthetic peptide
  Seed: LRMKWMMAMKYPITA
LRMKWWMGMKLPITA

SEQ ID NO: 219216 - protein, 15 aa, Artificial Sequence
  Description of Artificial Sequence: Synthetic peptide
  Seed: LRMKWMMAMKYPITA
LRMKWWMGMKVPITA

SEQ ID NO: 219217 - protein, 15 aa, Artificial Sequence
  Description of Artificial Sequence: Synthetic peptide
  Seed: LRMKWMMAMKYPITA
LRMKWWMNMKAPITA

SEQ ID NO: 219218 - protein, 15 aa, Artificial Sequence
  Description of Artificial Sequence: Synthetic peptide
  Seed: LRMKWMMAMKYPITA
LRMKWWMNMKIPITA

SEQ ID NO: 219219 - protein, 15 aa, Artificial Sequence
  Description of Artificial Sequence: Synthetic peptide
  Seed: LRMKWMMAMKYPITA
LRMKWWMNMKLPITA

SEQ ID NO: 219220 - protein, 15 aa, Artificial Sequence
  Description of Artificial Sequence: Synthetic peptide
  Seed: LRMKWMMAMKYPITA
LRMKWWMNMKVPITA

SEQ ID NO: 219221 - protein, 15 aa, Artificial Sequence
  Description of Artificial Sequence: Synthetic peptide
  Seed: LRMKWMMAMKYPITA
LRMKWWMSMKAPITA

SEQ ID NO: 219222 - protein, 15 aa, Artificial Sequence
  Description of Artificial Sequence: Synthetic peptide
  Seed: LRMKWMMAMKYPITA
LRMKWWMSMKIPITA

SEQ ID NO: 219223 - protein, 15 aa, Artificial Sequence
  Description of Artificial Sequence: Synthetic peptide
  Seed: LRMKWMMAMKYPITA
LRMKWWMSMKLPITA

SEQ ID NO: 219224 - protein, 15 aa, Artificial Sequence
  Description of Artificial Sequence: Synthetic peptide
  Seed: LRMKWMMAMKYPITA
LRMKWWMSMKMPITA

SEQ ID NO: 219225 - protein, 15 aa, Artificial Sequence
  Description of Artificial Sequence: Synthetic peptide
  Seed: LRMKWMMAMKYPITA
LRMKWWMSMKVPITA

SEQ ID NO: 219226 - protein, 15 aa, Artificial Sequence
  Description of Artificial Sequence: Synthetic peptide
  Seed: LRMKWMMAMKYPITA
LRMKWWMTMKVPITA

SEQ ID NO: 219227 - protein, 15 aa, Artificial Sequence
  Description of Artificial Sequence: Synthetic peptide
  Seed: LRMKWMMAMKYPITA
LRMKWYMAMKAPITA

SEQ ID NO: 219228 - protein, 15 aa, Artificial Sequence
  Description of Artificial Sequence: Synthetic peptide
  Seed: LRMKWMMAMKYPITA
LRMKWYMAMKFPITA

SEQ ID NO: 219229 - protein, 15 aa, Artificial Sequence
  Description of Artificial Sequence: Synthetic peptide
  Seed: LRMKWMMAMKYPITA
LRMKWYMAMKGPITA

SEQ ID NO: 219230 - protein, 15 aa, Artificial Sequence
  Description of Artificial Sequence: Synthetic peptide
  Seed: LRMKWMMAMKYPITA
LRMKWYMAMKIPITA

SEQ ID NO: 219231 - protein, 15 aa, Artificial Sequence
  Description of Artificial Sequence: Synthetic peptide
  Seed: LRMKWMMAMKYPITA
LRMKWYMAMKLPITA

SEQ ID NO: 219232 - protein, 15 aa, Artificial Sequence
  Description of Artificial Sequence: Synthetic peptide
  Seed: LRMKWMMAMKYPITA
LRMKWYMAMKMPITA

SEQ ID NO: 219233 - protein, 15 aa, Artificial Sequence
  Description of Artificial Sequence: Synthetic peptide
  Seed: LRMKWMMAMKYPITA
LRMKWYMAMKRPITA

SEQ ID NO: 219234 - protein, 15 aa, Artificial Sequence
  Description of Artificial Sequence: Synthetic peptide
  Seed: LRMKWMMAMKYPITA
LRMKWYMAMKSPITA

SEQ ID NO: 219235 - protein, 15 aa, Artificial Sequence
  Description of Artificial Sequence: Synthetic peptide
  Seed: LRMKWMMAMKYPITA
LRMKWYMAMKTPITA

SEQ ID NO: 219236 - protein, 15 aa, Artificial Sequence
  Description of Artificial Sequence: Synthetic peptide
  Seed: LRMKWMMAMKYPITA
LRMKWYMAMKVPITA

SEQ ID NO: 219237 - protein, 15 aa, Artificial Sequence
  Description of Artificial Sequence: Synthetic peptide
  Seed: LRMKWMMAMKYPITA
LRMKWYMGMKAPITA

SEQ ID NO: 219238 - protein, 15 aa, Artificial Sequence
  Description of Artificial Sequence: Synthetic peptide
  Seed: LRMKWMMAMKYPITA
LRMKWYMGMKIPITA

SEQ ID NO: 219239 - protein, 15 aa, Artificial Sequence
  Description of Artificial Sequence: Synthetic peptide
  Seed: LRMKWMMAMKYPITA
LRMKWYMGMKLPITA

SEQ ID NO: 219240 - protein, 15 aa, Artificial Sequence
  Description of Artificial Sequence: Synthetic peptide
  Seed: LRMKWMMAMKYPITA
LRMKWYMGMKMPITA

SEQ ID NO: 219241 - protein, 15 aa, Artificial Sequence
  Description of Artificial Sequence: Synthetic peptide
  Seed: LRMKWMMAMKYPITA
LRMKWYMGMKSPITA

SEQ ID NO: 219242 - protein, 15 aa, Artificial Sequence
  Description of Artificial Sequence: Synthetic peptide
  Seed: LRMKWMMAMKYPITA
LRMKWYMGMKTPITA

SEQ ID NO: 219243 - protein, 15 aa, Artificial Sequence
  Description of Artificial Sequence: Synthetic peptide
  Seed: LRMKWMMAMKYPITA
LRMKWYMGMKVPITA

SEQ ID NO: 219244 - protein, 15 aa, Artificial Sequence
  Description of Artificial Sequence: Synthetic peptide
  Seed: LRMKWMMAMKYPITA
LRMKWYMNMKAPITA

SEQ ID NO: 219245 - protein, 15 aa, Artificial Sequence
  Description of Artificial Sequence: Synthetic peptide
  Seed: LRMKWMMAMKYPITA
LRMKWYMNMKFPITA

SEQ ID NO: 219246 - protein, 15 aa, Artificial Sequence
  Description of Artificial Sequence: Synthetic peptide
  Seed: LRMKWMMAMKYPITA
LRMKWYMNMKGPITA

SEQ ID NO: 219247 - protein, 15 aa, Artificial Sequence
  Description of Artificial Sequence: Synthetic peptide
  Seed: LRMKWMMAMKYPITA
LRMKWYMNMKIPITA

SEQ ID NO: 219248 - protein, 15 aa, Artificial Sequence
  Description of Artificial Sequence: Synthetic peptide
  Seed: LRMKWMMAMKYPITA
LRMKWYMNMKLPITA

SEQ ID NO: 219249 - protein, 15 aa, Artificial Sequence
  Description of Artificial Sequence: Synthetic peptide
  Seed: LRMKWMMAMKYPITA
LRMKWYMNMKMPITA

SEQ ID NO: 219250 - protein, 15 aa, Artificial Sequence
  Description of Artificial Sequence: Synthetic peptide
  Seed: LRMKWMMAMKYPITA
LRMKWYMNMKSPITA

SEQ ID NO: 219251 - protein, 15 aa, Artificial Sequence
  Description of Artificial Sequence: Synthetic peptide
  Seed: LRMKWMMAMKYPITA
LRMKWYMNMKTPITA

SEQ ID NO: 219252 - protein, 15 aa, Artificial Sequence
  Description of Artificial Sequence: Synthetic peptide
  Seed: LRMKWMMAMKYPITA
LRMKWYMNMKVPITA

SEQ ID NO: 219253 - protein, 15 aa, Artificial Sequence
  Description of Artificial Sequence: Synthetic peptide
  Seed: LRMKWMMAMKYPITA
LRMKWYMPMKIPITA

SEQ ID NO: 219254 - protein, 15 aa, Artificial Sequence
  Description of Artificial Sequence: Synthetic peptide
  Seed: LRMKWMMAMKYPITA
LRMKWYMPMKLPITA

SEQ ID NO: 219255 - protein, 15 aa, Artificial Sequence
  Description of Artificial Sequence: Synthetic peptide
  Seed: LRMKWMMAMKYPITA
LRMKWYMPMKVPITA

SEQ ID NO: 219256 - protein, 15 aa, Artificial Sequence
  Description of Artificial Sequence: Synthetic peptide
  Seed: LRMKWMMAMKYPITA
LRMKWYMSMKAPITA

SEQ ID NO: 219257 - protein, 15 aa, Artificial Sequence
  Description of Artificial Sequence: Synthetic peptide
  Seed: LRMKWMMAMKYPITA
LRMKWYMSMKFPITA

SEQ ID NO: 219258 - protein, 15 aa, Artificial Sequence
  Description of Artificial Sequence: Synthetic peptide
  Seed: LRMKWMMAMKYPITA
LRMKWYMSMKGPITA

SEQ ID NO: 219259 - protein, 15 aa, Artificial Sequence
  Description of Artificial Sequence: Synthetic peptide
  Seed: LRMKWMMAMKYPITA
LRMKWYMSMKHPITA

SEQ ID NO: 219260 - protein, 15 aa, Artificial Sequence
  Description of Artificial Sequence: Synthetic peptide
  Seed: LRMKWMMAMKYPITA
LRMKWYMSMKIPITA

SEQ ID NO: 219261 - protein, 15 aa, Artificial Sequence
  Description of Artificial Sequence: Synthetic peptide
  Seed: LRMKWMMAMKYPITA
LRMKWYMSMKLPITA

SEQ ID NO: 219262 - protein, 15 aa, Artificial Sequence
  Description of Artificial Sequence: Synthetic peptide
  Seed: LRMKWMMAMKYPITA
LRMKWYMSMKMPITA

SEQ ID NO: 219263 - protein, 15 aa, Artificial Sequence
  Description of Artificial Sequence: Synthetic peptide
  Seed: LRMKWMMAMKYPITA
LRMKWYMSMKRPITA

SEQ ID NO: 219264 - protein, 15 aa, Artificial Sequence
  Description of Artificial Sequence: Synthetic peptide
  Seed: LRMKWMMAMKYPITA
LRMKWYMSMKSPITA

SEQ ID NO: 219265 - protein, 15 aa, Artificial Sequence
  Description of Artificial Sequence: Synthetic peptide
  Seed: LRMKWMMAMKYPITA
LRMKWYMSMKTPITA

SEQ ID NO: 219266 - protein, 15 aa, Artificial Sequence
  Description of Artificial Sequence: Synthetic peptide
  Seed: LRMKWMMAMKYPITA
LRMKWYMSMKVPITA

SEQ ID NO: 219267 - protein, 15 aa, Artificial Sequence
  Description of Artificial Sequence: Synthetic peptide
  Seed: LRMKWMMAMKYPITA
LRMKWYMSMKYPITA

SEQ ID NO: 219268 - protein, 15 aa, Artificial Sequence
  Description of Artificial Sequence: Synthetic peptide
  Seed: LRMKWMMAMKYPITA
LRMKWYMTMKAPITA

SEQ ID NO: 219269 - protein, 15 aa, Artificial Sequence
  Description of Artificial Sequence: Synthetic peptide
  Seed: LRMKWMMAMKYPITA
LRMKWYMTMKIPITA

SEQ ID NO: 219270 - protein, 15 aa, Artificial Sequence
  Description of Artificial Sequence: Synthetic peptide
  Seed: LRMKWMMAMKYPITA
LRMKWYMTMKLPITA

SEQ ID NO: 219271 - protein, 15 aa, Artificial Sequence
  Description of Artificial Sequence: Synthetic peptide
  Seed: LRMKWMMAMKYPITA
LRMKWYMTMKMPITA

SEQ ID NO: 219272 - protein, 15 aa, Artificial Sequence
  Description of Artificial Sequence: Synthetic peptide
  Seed: LRMKWMMAMKYPITA
LRMKWYMTMKSPITA

SEQ ID NO: 219273 - protein, 15 aa, Artificial Sequence
  Description of Artificial Sequence: Synthetic peptide
  Seed: LRMKWMMAMKYPITA
LRMKWYMTMKTPITA

SEQ ID NO: 219274 - protein, 15 aa, Artificial Sequence
  Description of Artificial Sequence: Synthetic peptide
  Seed: LRMKWMMAMKYPITA
LRMKWYMTMKVPITA

SEQ ID NO: 219275 - protein, 15 aa, Artificial Sequence
  Description of Artificial Sequence: Synthetic peptide
  Seed: LRMKWMMAMKYPITA
LRRKWAMAMKAPITA

SEQ ID NO: 219276 - protein, 15 aa, Artificial Sequence
  Description of Artificial Sequence: Synthetic peptide
  Seed: LRMKWMMAMKYPITA
LRRKWAMAMKIPITA

SEQ ID NO: 219277 - protein, 15 aa, Artificial Sequence
  Description of Artificial Sequence: Synthetic peptide
  Seed: LRMKWMMAMKYPITA
LRRKWAMAMKLPITA

SEQ ID NO: 219278 - protein, 15 aa, Artificial Sequence
  Description of Artificial Sequence: Synthetic peptide
  Seed: LRMKWMMAMKYPITA
LRRKWAMAMKMPITA

SEQ ID NO: 219279 - protein, 15 aa, Artificial Sequence
  Description of Artificial Sequence: Synthetic peptide
  Seed: LRMKWMMAMKYPITA
LRRKWAMAMKNPITA

SEQ ID NO: 219280 - protein, 15 aa, Artificial Sequence
  Description of Artificial Sequence: Synthetic peptide
  Seed: LRMKWMMAMKYPITA
LRRKWAMAMKSPITA

SEQ ID NO: 219281 - protein, 15 aa, Artificial Sequence
  Description of Artificial Sequence: Synthetic peptide
  Seed: LRMKWMMAMKYPITA
LRRKWAMAMKTPITA

SEQ ID NO: 219282 - protein, 15 aa, Artificial Sequence
  Description of Artificial Sequence: Synthetic peptide
  Seed: LRMKWMMAMKYPITA
LRRKWAMAMKVPITA

SEQ ID NO: 219283 - protein, 15 aa, Artificial Sequence
  Description of Artificial Sequence: Synthetic peptide
  Seed: LRMKWMMAMKYPITA
LRRKWAMIMKAPITA

SEQ ID NO: 219284 - protein, 15 aa, Artificial Sequence
  Description of Artificial Sequence: Synthetic peptide
  Seed: LRMKWMMAMKYPITA
LRRKWAMIMKLPITA

SEQ ID NO: 219285 - protein, 15 aa, Artificial Sequence
  Description of Artificial Sequence: Synthetic peptide
  Seed: LRMKWMMAMKYPITA
LRRKWAMIMKNPITA

SEQ ID NO: 219286 - protein, 15 aa, Artificial Sequence
  Description of Artificial Sequence: Synthetic peptide
  Seed: LRMKWMMAMKYPITA
LRRKWAMIMKSPITA

SEQ ID NO: 219287 - protein, 15 aa, Artificial Sequence
  Description of Artificial Sequence: Synthetic peptide
  Seed: LRMKWMMAMKYPITA
LRRKWAMIMKVPITA

SEQ ID NO: 219288 - protein, 15 aa, Artificial Sequence
  Description of Artificial Sequence: Synthetic peptide
  Seed: LRMKWMMAMKYPITA
LRRKWAMVMKAPITA

SEQ ID NO: 219289 - protein, 15 aa, Artificial Sequence
  Description of Artificial Sequence: Synthetic peptide
  Seed: LRMKWMMAMKYPITA
LRRKWAMVMKIPITA

SEQ ID NO: 219290 - protein, 15 aa, Artificial Sequence
  Description of Artificial Sequence: Synthetic peptide
  Seed: LRMKWMMAMKYPITA
LRRKWAMVMKLPITA

SEQ ID NO: 219291 - protein, 15 aa, Artificial Sequence
  Description of Artificial Sequence: Synthetic peptide
  Seed: LRMKWMMAMKYPITA
LRRKWAMVMKNPITA

SEQ ID NO: 219292 - protein, 15 aa, Artificial Sequence
  Description of Artificial Sequence: Synthetic peptide
  Seed: LRMKWMMAMKYPITA
LRRKWAMVMKSPITA

SEQ ID NO: 219293 - protein, 15 aa, Artificial Sequence
  Description of Artificial Sequence: Synthetic peptide
  Seed: LRMKWMMAMKYPITA
LRRKWAMVMKVPITA

SEQ ID NO: 219294 - protein, 15 aa, Artificial Sequence
  Description of Artificial Sequence: Synthetic peptide
  Seed: LRMKWMMAMKYPITA
LRRKWIMAMKAPITA

SEQ ID NO: 219295 - protein, 15 aa, Artificial Sequence
  Description of Artificial Sequence: Synthetic peptide
  Seed: LRMKWMMAMKYPITA
LRRKWIMAMKIPITA

SEQ ID NO: 219296 - protein, 15 aa, Artificial Sequence
  Description of Artificial Sequence: Synthetic peptide
  Seed: LRMKWMMAMKYPITA
LRRKWIMAMKLPITA

SEQ ID NO: 219297 - protein, 15 aa, Artificial Sequence
  Description of Artificial Sequence: Synthetic peptide
  Seed: LRMKWMMAMKYPITA
LRRKWIMAMKMPITA

SEQ ID NO: 219298 - protein, 15 aa, Artificial Sequence
  Description of Artificial Sequence: Synthetic peptide
  Seed: LRMKWMMAMKYPITA
LRRKWIMAMKNPITA

SEQ ID NO: 219299 - protein, 15 aa, Artificial Sequence
  Description of Artificial Sequence: Synthetic peptide
  Seed: LRMKWMMAMKYPITA
LRRKWIMAMKSPITA

SEQ ID NO: 219300 - protein, 15 aa, Artificial Sequence
  Description of Artificial Sequence: Synthetic peptide
  Seed: LRMKWMMAMKYPITA
LRRKWIMAMKTPITA

SEQ ID NO: 219301 - protein, 15 aa, Artificial Sequence
  Description of Artificial Sequence: Synthetic peptide
  Seed: LRMKWMMAMKYPITA
LRRKWIMAMKVPITA

SEQ ID NO: 219302 - protein, 15 aa, Artificial Sequence
  Description of Artificial Sequence: Synthetic peptide
  Seed: LRMKWMMAMKYPITA
LRRKWIMIMKNPITA

SEQ ID NO: 219303 - protein, 15 aa, Artificial Sequence
  Description of Artificial Sequence: Synthetic peptide
  Seed: LRMKWMMAMKYPITA
LRRKWIMPMKVPITA

SEQ ID NO: 219304 - protein, 15 aa, Artificial Sequence
  Description of Artificial Sequence: Synthetic peptide
  Seed: LRMKWMMAMKYPITA
LRRKWIMVMKAPITA

SEQ ID NO: 219305 - protein, 15 aa, Artificial Sequence
  Description of Artificial Sequence: Synthetic peptide
  Seed: LRMKWMMAMKYPITA
LRRKWIMVMKNPITA

SEQ ID NO: 219306 - protein, 15 aa, Artificial Sequence
  Description of Artificial Sequence: Synthetic peptide
  Seed: LRMKWMMAMKYPITA
LRRKWIMVMKSPITA

SEQ ID NO: 219307 - protein, 15 aa, Artificial Sequence
  Description of Artificial Sequence: Synthetic peptide
  Seed: LRMKWMMAMKYPITA
LRRKWLMAMKAPITA

SEQ ID NO: 219308 - protein, 15 aa, Artificial Sequence
  Description of Artificial Sequence: Synthetic peptide
  Seed: LRMKWMMAMKYPITA
LRRKWMMAMKVPITA

SEQ ID NO: 219309 - protein, 15 aa, Artificial Sequence
  Description of Artificial Sequence: Synthetic peptide
  Seed: LRMKWMMAMKYPITA
LRRKWSMAMKAPITA

SEQ ID NO: 219310 - protein, 15 aa, Artificial Sequence
  Description of Artificial Sequence: Synthetic peptide
  Seed: LRMKWMMAMKYPITA
LRRKWSMAMKIPITA

SEQ ID NO: 219311 - protein, 15 aa, Artificial Sequence
  Description of Artificial Sequence: Synthetic peptide
  Seed: LRMKWMMAMKYPITA
LRRKWSMAMKLPITA

SEQ ID NO: 219312 - protein, 15 aa, Artificial Sequence
  Description of Artificial Sequence: Synthetic peptide
  Seed: LRMKWMMAMKYPITA
LRRKWSMAMKMPITA

SEQ ID NO: 219313 - protein, 15 aa, Artificial Sequence
  Description of Artificial Sequence: Synthetic peptide
  Seed: LRMKWMMAMKYPITA
LRRKWSMAMKNPITA

SEQ ID NO: 219314 - protein, 15 aa, Artificial Sequence
  Description of Artificial Sequence: Synthetic peptide
  Seed: LRMKWMMAMKYPITA
LRRKWSMAMKSPITA

SEQ ID NO: 219315 - protein, 15 aa, Artificial Sequence
  Description of Artificial Sequence: Synthetic peptide
  Seed: LRMKWMMAMKYPITA
LRRKWSMAMKVPITA

SEQ ID NO: 219316 - protein, 15 aa, Artificial Sequence
  Description of Artificial Sequence: Synthetic peptide
  Seed: LRMKWMMAMKYPITA
LRRKWSMIMKAPITA

SEQ ID NO: 219317 - protein, 15 aa, Artificial Sequence
  Description of Artificial Sequence: Synthetic peptide
  Seed: LRMKWMMAMKYPITA
LRRKWSMIMKSPITA

SEQ ID NO: 219318 - protein, 15 aa, Artificial Sequence
  Description of Artificial Sequence: Synthetic peptide
  Seed: LRMKWMMAMKYPITA
LRRKWSMVMKAPITA

SEQ ID NO: 219319 - protein, 15 aa, Artificial Sequence
  Description of Artificial Sequence: Synthetic peptide
  Seed: LRMKWMMAMKYPITA
LRRKWSMVMKNPITA

SEQ ID NO: 219320 - protein, 15 aa, Artificial Sequence
  Description of Artificial Sequence: Synthetic peptide
  Seed: LRMKWMMAMKYPITA
LRRKWSMVMKSPITA

SEQ ID NO: 219321 - protein, 15 aa, Artificial Sequence
  Description of Artificial Sequence: Synthetic peptide
  Seed: LRMKWMMAMKYPITA
LRRKWTMAMKAPITA

SEQ ID NO: 219322 - protein, 15 aa, Artificial Sequence
  Description of Artificial Sequence: Synthetic peptide
  Seed: LRMKWMMAMKYPITA
LRRKWTMAMKIPITA

SEQ ID NO: 219323 - protein, 15 aa, Artificial Sequence
  Description of Artificial Sequence: Synthetic peptide
  Seed: LRMKWMMAMKYPITA
LRRKWTMAMKLPITA

SEQ ID NO: 219324 - protein, 15 aa, Artificial Sequence
  Description of Artificial Sequence: Synthetic peptide
  Seed: LRMKWMMAMKYPITA
LRRKWTMAMKMPITA

SEQ ID NO: 219325 - protein, 15 aa, Artificial Sequence
  Description of Artificial Sequence: Synthetic peptide
  Seed: LRMKWMMAMKYPITA
LRRKWTMAMKSPITA

SEQ ID NO: 219326 - protein, 15 aa, Artificial Sequence
  Description of Artificial Sequence: Synthetic peptide
  Seed: LRMKWMMAMKYPITA
LRRKWTMAMKVPITA

SEQ ID NO: 219327 - protein, 15 aa, Artificial Sequence
  Description of Artificial Sequence: Synthetic peptide
  Seed: LRMKWMMAMKYPITA
LRRKWTMVMKAPITA

SEQ ID NO: 219328 - protein, 15 aa, Artificial Sequence
  Description of Artificial Sequence: Synthetic peptide
  Seed: LRMKWMMAMKYPITA
LRRKWVMAMKAPITA

SEQ ID NO: 219329 - protein, 15 aa, Artificial Sequence
  Description of Artificial Sequence: Synthetic peptide
  Seed: LRMKWMMAMKYPITA
LRRKWVMAMKIPITA

SEQ ID NO: 219330 - protein, 15 aa, Artificial Sequence
  Description of Artificial Sequence: Synthetic peptide
  Seed: LRMKWMMAMKYPITA
LRRKWVMAMKLPITA

SEQ ID NO: 219331 - protein, 15 aa, Artificial Sequence
  Description of Artificial Sequence: Synthetic peptide
  Seed: LRMKWMMAMKYPITA
LRRKWVMAMKMPITA

SEQ ID NO: 219332 - protein, 15 aa, Artificial Sequence
  Description of Artificial Sequence: Synthetic peptide
  Seed: LRMKWMMAMKYPITA
LRRKWVMAMKNPITA

SEQ ID NO: 219333 - protein, 15 aa, Artificial Sequence
  Description of Artificial Sequence: Synthetic peptide
  Seed: LRMKWMMAMKYPITA
LRRKWVMAMKSPITA

SEQ ID NO: 219334 - protein, 15 aa, Artificial Sequence
  Description of Artificial Sequence: Synthetic peptide
  Seed: LRMKWMMAMKYPITA
LRRKWVMAMKTPITA

SEQ ID NO: 219335 - protein, 15 aa, Artificial Sequence
  Description of Artificial Sequence: Synthetic peptide
  Seed: LRMKWMMAMKYPITA
LRRKWVMAMKVPITA

SEQ ID NO: 219336 - protein, 15 aa, Artificial Sequence
  Description of Artificial Sequence: Synthetic peptide
  Seed: LRMKWMMAMKYPITA
LRRKWVMIMKNPITA

SEQ ID NO: 219337 - protein, 15 aa, Artificial Sequence
  Description of Artificial Sequence: Synthetic peptide
  Seed: LRMKWMMAMKYPITA
LRRKWVMVMKNPITA

SEQ ID NO: 219338 - protein, 15 aa, Artificial Sequence
  Description of Artificial Sequence: Synthetic peptide
  Seed: LRMKWMMAMKYPITA
LRRKWVMVMKSPITA

SEQ ID NO: 219339 - protein, 15 aa, Artificial Sequence
  Description of Artificial Sequence: Synthetic peptide
  Seed: LRMKWMMAMKYPITA
LRVKWAMAMKAPITA

SEQ ID NO: 219340 - protein, 15 aa, Artificial Sequence
  Description of Artificial Sequence: Synthetic peptide
  Seed: LRMKWMMAMKYPITA
LRVKWAMAMKIPITA

SEQ ID NO: 219341 - protein, 15 aa, Artificial Sequence
  Description of Artificial Sequence: Synthetic peptide
  Seed: LRMKWMMAMKYPITA
LRVKWAMAMKLPITA

SEQ ID NO: 219342 - protein, 15 aa, Artificial Sequence
  Description of Artificial Sequence: Synthetic peptide
  Seed: LRMKWMMAMKYPITA
LRVKWAMAMKVPITA

SEQ ID NO: 219343 - protein, 15 aa, Artificial Sequence
  Description of Artificial Sequence: Synthetic peptide
  Seed: LRMKWMMAMKYPITA
LRVKWAMFMKEPITA

SEQ ID NO: 219344 - protein, 15 aa, Artificial Sequence
  Description of Artificial Sequence: Synthetic peptide
  Seed: LRMKWMMAMKYPITA
LRVKWAMFMKLPITA

SEQ ID NO: 219345 - protein, 15 aa, Artificial Sequence
  Description of Artificial Sequence: Synthetic peptide
  Seed: LRMKWMMAMKYPITA
LRVKWAMFMKMPITA

SEQ ID NO: 219346 - protein, 15 aa, Artificial Sequence
  Description of Artificial Sequence: Synthetic peptide
  Seed: LRMKWMMAMKYPITA
LRVKWAMFMKVPITA

SEQ ID NO: 219347 - protein, 15 aa, Artificial Sequence
  Description of Artificial Sequence: Synthetic peptide
  Seed: LRMKWMMAMKYPITA
LRVKWEMFMKIPITA

SEQ ID NO: 219348 - protein, 15 aa, Artificial Sequence
  Description of Artificial Sequence: Synthetic peptide
  Seed: LRMKWMMAMKYPITA
LRVKWEMFMKLPITA

SEQ ID NO: 219349 - protein, 15 aa, Artificial Sequence
  Description of Artificial Sequence: Synthetic peptide
  Seed: LRMKWMMAMKYPITA
LRVKWEMFMKMPITA

SEQ ID NO: 219350 - protein, 15 aa, Artificial Sequence
  Description of Artificial Sequence: Synthetic peptide
  Seed: LRMKWMMAMKYPITA
LRVKWEMFMKVPITA

SEQ ID NO: 219351 - protein, 15 aa, Artificial Sequence
  Description of Artificial Sequence: Synthetic peptide
  Seed: LRMKWMMAMKYPITA
LRVKWFMAMKAPITA

SEQ ID NO: 219352 - protein, 15 aa, Artificial Sequence
  Description of Artificial Sequence: Synthetic peptide
  Seed: LRMKWMMAMKYPITA
LRVKWFMAMKIPITA

SEQ ID NO: 219353 - protein, 15 aa, Artificial Sequence
  Description of Artificial Sequence: Synthetic peptide
  Seed: LRMKWMMAMKYPITA
LRVKWFMAMKLPITA

SEQ ID NO: 219354 - protein, 15 aa, Artificial Sequence
  Description of Artificial Sequence: Synthetic peptide
  Seed: LRMKWMMAMKYPITA
LRVKWFMAMKMPITA

SEQ ID NO: 219355 - protein, 15 aa, Artificial Sequence
  Description of Artificial Sequence: Synthetic peptide
  Seed: LRMKWMMAMKYPITA
LRVKWFMAMKSPITA

SEQ ID NO: 219356 - protein, 15 aa, Artificial Sequence
  Description of Artificial Sequence: Synthetic peptide
  Seed: LRMKWMMAMKYPITA
LRVKWFMAMKTPITA

SEQ ID NO: 219357 - protein, 15 aa, Artificial Sequence
  Description of Artificial Sequence: Synthetic peptide
  Seed: LRMKWMMAMKYPITA
LRVKWFMAMKVPITA

SEQ ID NO: 219358 - protein, 15 aa, Artificial Sequence
  Description of Artificial Sequence: Synthetic peptide
  Seed: LRMKWMMAMKYPITA
LRVKWFMDMKIPITA

SEQ ID NO: 219359 - protein, 15 aa, Artificial Sequence
  Description of Artificial Sequence: Synthetic peptide
  Seed: LRMKWMMAMKYPITA
LRVKWFMDMKLPITA

SEQ ID NO: 219360 - protein, 15 aa, Artificial Sequence
  Description of Artificial Sequence: Synthetic peptide
  Seed: LRMKWMMAMKYPITA
LRVKWFMDMKVPITA

SEQ ID NO: 219361 - protein, 15 aa, Artificial Sequence
  Description of Artificial Sequence: Synthetic peptide
  Seed: LRMKWMMAMKYPITA
LRVKWFMGMKAPITA

SEQ ID NO: 219362 - protein, 15 aa, Artificial Sequence
  Description of Artificial Sequence: Synthetic peptide
  Seed: LRMKWMMAMKYPITA
LRVKWFMGMKIPITA

SEQ ID NO: 219363 - protein, 15 aa, Artificial Sequence
  Description of Artificial Sequence: Synthetic peptide
  Seed: LRMKWMMAMKYPITA
LRVKWFMGMKLPITA

SEQ ID NO: 219364 - protein, 15 aa, Artificial Sequence
  Description of Artificial Sequence: Synthetic peptide
  Seed: LRMKWMMAMKYPITA
LRVKWFMGMKMPITA

SEQ ID NO: 219365 - protein, 15 aa, Artificial Sequence
  Description of Artificial Sequence: Synthetic peptide
  Seed: LRMKWMMAMKYPITA
LRVKWFMGMKSPITA

SEQ ID NO: 219366 - protein, 15 aa, Artificial Sequence
  Description of Artificial Sequence: Synthetic peptide
  Seed: LRMKWMMAMKYPITA
LRVKWFMGMKTPITA

SEQ ID NO: 219367 - protein, 15 aa, Artificial Sequence
  Description of Artificial Sequence: Synthetic peptide
  Seed: LRMKWMMAMKYPITA
LRVKWFMGMKVPITA

SEQ ID NO: 219368 - protein, 15 aa, Artificial Sequence
  Description of Artificial Sequence: Synthetic peptide
  Seed: LRMKWMMAMKYPITA
LRVKWFMNMKAPITA

SEQ ID NO: 219369 - protein, 15 aa, Artificial Sequence
  Description of Artificial Sequence: Synthetic peptide
  Seed: LRMKWMMAMKYPITA
LRVKWFMNMKFPITA

SEQ ID NO: 219370 - protein, 15 aa, Artificial Sequence
  Description of Artificial Sequence: Synthetic peptide
  Seed: LRMKWMMAMKYPITA
LRVKWFMNMKGPITA

SEQ ID NO: 219371 - protein, 15 aa, Artificial Sequence
  Description of Artificial Sequence: Synthetic peptide
  Seed: LRMKWMMAMKYPITA
LRVKWFMNMKIPITA

SEQ ID NO: 219372 - protein, 15 aa, Artificial Sequence
  Description of Artificial Sequence: Synthetic peptide
  Seed: LRMKWMMAMKYPITA
LRVKWFMNMKLPITA

SEQ ID NO: 219373 - protein, 15 aa, Artificial Sequence
  Description of Artificial Sequence: Synthetic peptide
  Seed: LRMKWMMAMKYPITA
LRVKWFMNMKMPITA

SEQ ID NO: 219374 - protein, 15 aa, Artificial Sequence
  Description of Artificial Sequence: Synthetic peptide
  Seed: LRMKWMMAMKYPITA
LRVKWFMNMKSPITA

SEQ ID NO: 219375 - protein, 15 aa, Artificial Sequence
  Description of Artificial Sequence: Synthetic peptide
  Seed: LRMKWMMAMKYPITA
LRVKWFMNMKTPITA

SEQ ID NO: 219376 - protein, 15 aa, Artificial Sequence
  Description of Artificial Sequence: Synthetic peptide
  Seed: LRMKWMMAMKYPITA
LRVKWFMNMKVPITA

SEQ ID NO: 219377 - protein, 15 aa, Artificial Sequence
  Description of Artificial Sequence: Synthetic peptide
  Seed: LRMKWMMAMKYPITA
LRVKWFMNMKYPITA

SEQ ID NO: 219378 - protein, 15 aa, Artificial Sequence
  Description of Artificial Sequence: Synthetic peptide
  Seed: LRMKWMMAMKYPITA
LRVKWFMPMKIPITA

SEQ ID NO: 219379 - protein, 15 aa, Artificial Sequence
  Description of Artificial Sequence: Synthetic peptide
  Seed: LRMKWMMAMKYPITA
LRVKWFMPMKLPITA

SEQ ID NO: 219380 - protein, 15 aa, Artificial Sequence
  Description of Artificial Sequence: Synthetic peptide
  Seed: LRMKWMMAMKYPITA
LRVKWFMPMKVPITA

SEQ ID NO: 219381 - protein, 15 aa, Artificial Sequence
  Description of Artificial Sequence: Synthetic peptide
  Seed: LRMKWMMAMKYPITA
LRVKWFMSMKAPITA

SEQ ID NO: 219382 - protein, 15 aa, Artificial Sequence
  Description of Artificial Sequence: Synthetic peptide
  Seed: LRMKWMMAMKYPITA
LRVKWFMSMKFPITA

SEQ ID NO: 219383 - protein, 15 aa, Artificial Sequence
  Description of Artificial Sequence: Synthetic peptide
  Seed: LRMKWMMAMKYPITA
LRVKWFMSMKGPITA

SEQ ID NO: 219384 - protein, 15 aa, Artificial Sequence
  Description of Artificial Sequence: Synthetic peptide
  Seed: LRMKWMMAMKYPITA
LRVKWFMSMKHPITA

SEQ ID NO: 219385 - protein, 15 aa, Artificial Sequence
  Description of Artificial Sequence: Synthetic peptide
  Seed: LRMKWMMAMKYPITA
LRVKWFMSMKIPITA

SEQ ID NO: 219386 - protein, 15 aa, Artificial Sequence
  Description of Artificial Sequence: Synthetic peptide
  Seed: LRMKWMMAMKYPITA
LRVKWFMSMKLPITA

SEQ ID NO: 219387 - protein, 15 aa, Artificial Sequence
  Description of Artificial Sequence: Synthetic peptide
  Seed: LRMKWMMAMKYPITA
LRVKWFMSMKMPITA

SEQ ID NO: 219388 - protein, 15 aa, Artificial Sequence
  Description of Artificial Sequence: Synthetic peptide
  Seed: LRMKWMMAMKYPITA
LRVKWFMSMKNPITA

SEQ ID NO: 219389 - protein, 15 aa, Artificial Sequence
  Description of Artificial Sequence: Synthetic peptide
  Seed: LRMKWMMAMKYPITA
LRVKWFMSMKRPITA

SEQ ID NO: 219390 - protein, 15 aa, Artificial Sequence
  Description of Artificial Sequence: Synthetic peptide
  Seed: LRMKWMMAMKYPITA
LRVKWFMSMKSPITA

SEQ ID NO: 219391 - protein, 15 aa, Artificial Sequence
  Description of Artificial Sequence: Synthetic peptide
  Seed: LRMKWMMAMKYPITA
LRVKWFMSMKTPITA

SEQ ID NO: 219392 - protein, 15 aa, Artificial Sequence
  Description of Artificial Sequence: Synthetic peptide
  Seed: LRMKWMMAMKYPITA
LRVKWFMSMKVPITA

SEQ ID NO: 219393 - protein, 15 aa, Artificial Sequence
  Description of Artificial Sequence: Synthetic peptide
  Seed: LRMKWMMAMKYPITA
LRVKWFMSMKYPITA

SEQ ID NO: 219394 - protein, 15 aa, Artificial Sequence
  Description of Artificial Sequence: Synthetic peptide
  Seed: LRMKWMMAMKYPITA
LRVKWFMTMKAPITA

SEQ ID NO: 219395 - protein, 15 aa, Artificial Sequence
  Description of Artificial Sequence: Synthetic peptide
  Seed: LRMKWMMAMKYPITA
LRVKWFMTMKIPITA

SEQ ID NO: 219396 - protein, 15 aa, Artificial Sequence
  Description of Artificial Sequence: Synthetic peptide
  Seed: LRMKWMMAMKYPITA
LRVKWFMTMKLPITA

SEQ ID NO: 219397 - protein, 15 aa, Artificial Sequence
  Description of Artificial Sequence: Synthetic peptide
  Seed: LRMKWMMAMKYPITA
LRVKWFMTMKSPITA

SEQ ID NO: 219398 - protein, 15 aa, Artificial Sequence
  Description of Artificial Sequence: Synthetic peptide
  Seed: LRMKWMMAMKYPITA
LRVKWFMTMKTPITA

SEQ ID NO: 219399 - protein, 15 aa, Artificial Sequence
  Description of Artificial Sequence: Synthetic peptide
  Seed: LRMKWMMAMKYPITA
LRVKWFMTMKVPITA

SEQ ID NO: 219400 - protein, 15 aa, Artificial Sequence
  Description of Artificial Sequence: Synthetic peptide
  Seed: LRMKWMMAMKYPITA
LRVKWHMFMKLPITA

SEQ ID NO: 219401 - protein, 15 aa, Artificial Sequence
  Description of Artificial Sequence: Synthetic peptide
  Seed: LRMKWMMAMKYPITA
LRVKWHMFMKVPITA

SEQ ID NO: 219402 - protein, 15 aa, Artificial Sequence
  Description of Artificial Sequence: Synthetic peptide
  Seed: LRMKWMMAMKYPITA
LRVKWHMSMKIPITA

SEQ ID NO: 219403 - protein, 15 aa, Artificial Sequence
  Description of Artificial Sequence: Synthetic peptide
  Seed: LRMKWMMAMKYPITA
LRVKWHMSMKLPITA

SEQ ID NO: 219404 - protein, 15 aa, Artificial Sequence
  Description of Artificial Sequence: Synthetic peptide
  Seed: LRMKWMMAMKYPITA
LRVKWHMSMKVPITA

SEQ ID NO: 219405 - protein, 15 aa, Artificial Sequence
  Description of Artificial Sequence: Synthetic peptide
  Seed: LRMKWMMAMKYPITA
LRVKWIMAMKVPITA

SEQ ID NO: 219406 - protein, 15 aa, Artificial Sequence
  Description of Artificial Sequence: Synthetic peptide
  Seed: LRMKWMMAMKYPITA
LRVKWIMGMKVPITA

SEQ ID NO: 219407 - protein, 15 aa, Artificial Sequence
  Description of Artificial Sequence: Synthetic peptide
  Seed: LRMKWMMAMKYPITA
LRVKWIMNMKAPITA

SEQ ID NO: 219408 - protein, 15 aa, Artificial Sequence
  Description of Artificial Sequence: Synthetic peptide
  Seed: LRMKWMMAMKYPITA
LRVKWIMNMKIPITA

SEQ ID NO: 219409 - protein, 15 aa, Artificial Sequence
  Description of Artificial Sequence: Synthetic peptide
  Seed: LRMKWMMAMKYPITA
LRVKWIMNMKLPITA

SEQ ID NO: 219410 - protein, 15 aa, Artificial Sequence
  Description of Artificial Sequence: Synthetic peptide
  Seed: LRMKWMMAMKYPITA
LRVKWIMNMKVPITA

SEQ ID NO: 219411 - protein, 15 aa, Artificial Sequence
  Description of Artificial Sequence: Synthetic peptide
  Seed: LRMKWMMAMKYPITA
LRVKWIMSMKAPITA

SEQ ID NO: 219412 - protein, 15 aa, Artificial Sequence
  Description of Artificial Sequence: Synthetic peptide
  Seed: LRMKWMMAMKYPITA
LRVKWIMSMKIPITA

SEQ ID NO: 219413 - protein, 15 aa, Artificial Sequence
  Description of Artificial Sequence: Synthetic peptide
  Seed: LRMKWMMAMKYPITA
LRVKWIMSMKLPITA

SEQ ID NO: 219414 - protein, 15 aa, Artificial Sequence
  Description of Artificial Sequence: Synthetic peptide
  Seed: LRMKWMMAMKYPITA
LRVKWIMSMKVPITA

SEQ ID NO: 219415 - protein, 15 aa, Artificial Sequence
  Description of Artificial Sequence: Synthetic peptide
  Seed: LRMKWMMAMKYPITA
LRVKWIMTMKAPITA

SEQ ID NO: 219416 - protein, 15 aa, Artificial Sequence
  Description of Artificial Sequence: Synthetic peptide
  Seed: LRMKWMMAMKYPITA
LRVKWIMTMKGPITA

SEQ ID NO: 219417 - protein, 15 aa, Artificial Sequence
  Description of Artificial Sequence: Synthetic peptide
  Seed: LRMKWMMAMKYPITA
LRVKWLMAMKIPITA

SEQ ID NO: 219418 - protein, 15 aa, Artificial Sequence
  Description of Artificial Sequence: Synthetic peptide
  Seed: LRMKWMMAMKYPITA
LRVKWLMAMKLPITA

SEQ ID NO: 219419 - protein, 15 aa, Artificial Sequence
  Description of Artificial Sequence: Synthetic peptide
  Seed: LRMKWMMAMKYPITA
LRVKWLMAMKMPITA

SEQ ID NO: 219420 - protein, 15 aa, Artificial Sequence
  Description of Artificial Sequence: Synthetic peptide
  Seed: LRMKWMMAMKYPITA
LRVKWLMAMKVPITA

SEQ ID NO: 219421 - protein, 15 aa, Artificial Sequence
  Description of Artificial Sequence: Synthetic peptide
  Seed: LRMKWMMAMKYPITA
LRVKWLMGMKAPITA

SEQ ID NO: 219422 - protein, 15 aa, Artificial Sequence
  Description of Artificial Sequence: Synthetic peptide
  Seed: LRMKWMMAMKYPITA
LRVKWLMGMKIPITA

SEQ ID NO: 219423 - protein, 15 aa, Artificial Sequence
  Description of Artificial Sequence: Synthetic peptide
  Seed: LRMKWMMAMKYPITA
LRVKWLMGMKLPITA

SEQ ID NO: 219424 - protein, 15 aa, Artificial Sequence
  Description of Artificial Sequence: Synthetic peptide
  Seed: LRMKWMMAMKYPITA
LRVKWLMGMKMPITA

SEQ ID NO: 219425 - protein, 15 aa, Artificial Sequence
  Description of Artificial Sequence: Synthetic peptide
  Seed: LRMKWMMAMKYPITA
LRVKWLMGMKSPITA

SEQ ID NO: 219426 - protein, 15 aa, Artificial Sequence
  Description of Artificial Sequence: Synthetic peptide
  Seed: LRMKWMMAMKYPITA
LRVKWLMGMKTPITA

SEQ ID NO: 219427 - protein, 15 aa, Artificial Sequence
  Description of Artificial Sequence: Synthetic peptide
  Seed: LRMKWMMAMKYPITA
LRVKWLMGMKVPITA

SEQ ID NO: 219428 - protein, 15 aa, Artificial Sequence
  Description of Artificial Sequence: Synthetic peptide
  Seed: LRMKWMMAMKYPITA
LRVKWLMNMKAPITA

SEQ ID NO: 219429 - protein, 15 aa, Artificial Sequence
  Description of Artificial Sequence: Synthetic peptide
  Seed: LRMKWMMAMKYPITA
LRVKWLMNMKSPITA

SEQ ID NO: 219430 - protein, 15 aa, Artificial Sequence
  Description of Artificial Sequence: Synthetic peptide
  Seed: LRMKWMMAMKYPITA
LRVKWLMNMKVPITA

SEQ ID NO: 219431 - protein, 15 aa, Artificial Sequence
  Description of Artificial Sequence: Synthetic peptide
  Seed: LRMKWMMAMKYPITA
LRVKWLMPMKIPITA

SEQ ID NO: 219432 - protein, 15 aa, Artificial Sequence
  Description of Artificial Sequence: Synthetic peptide
  Seed: LRMKWMMAMKYPITA
LRVKWLMPMKLPITA

SEQ ID NO: 219433 - protein, 15 aa, Artificial Sequence
  Description of Artificial Sequence: Synthetic peptide
  Seed: LRMKWMMAMKYPITA
LRVKWLMPMKVPITA

SEQ ID NO: 219434 - protein, 15 aa, Artificial Sequence
  Description of Artificial Sequence: Synthetic peptide
  Seed: LRMKWMMAMKYPITA
LRVKWLMSMKAPITA

SEQ ID NO: 219435 - protein, 15 aa, Artificial Sequence
  Description of Artificial Sequence: Synthetic peptide
  Seed: LRMKWMMAMKYPITA
LRVKWLMSMKIPITA

SEQ ID NO: 219436 - protein, 15 aa, Artificial Sequence
  Description of Artificial Sequence: Synthetic peptide
  Seed: LRMKWMMAMKYPITA
LRVKWLMSMKLPITA

SEQ ID NO: 219437 - protein, 15 aa, Artificial Sequence
  Description of Artificial Sequence: Synthetic peptide
  Seed: LRMKWMMAMKYPITA
LRVKWLMSMKVPITA

SEQ ID NO: 219438 - protein, 15 aa, Artificial Sequence
  Description of Artificial Sequence: Synthetic peptide
  Seed: LRMKWMMAMKYPITA
LRVKWLMTMKAPITA

SEQ ID NO: 219439 - protein, 15 aa, Artificial Sequence
  Description of Artificial Sequence: Synthetic peptide
  Seed: LRMKWMMAMKYPITA
LRVKWLMTMKSPITA

SEQ ID NO: 219440 - protein, 15 aa, Artificial Sequence
  Description of Artificial Sequence: Synthetic peptide
  Seed: LRMKWMMAMKYPITA
LRVKWMMAMKIPITA

SEQ ID NO: 219441 - protein, 15 aa, Artificial Sequence
  Description of Artificial Sequence: Synthetic peptide
  Seed: LRMKWMMAMKYPITA
LRVKWMMAMKLPITA

SEQ ID NO: 219442 - protein, 15 aa, Artificial Sequence
  Description of Artificial Sequence: Synthetic peptide
  Seed: LRMKWMMAMKYPITA
LRVKWMMAMKMPITA

SEQ ID NO: 219443 - protein, 15 aa, Artificial Sequence
  Description of Artificial Sequence: Synthetic peptide
  Seed: LRMKWMMAMKYPITA
LRVKWMMAMKTPITA

SEQ ID NO: 219444 - protein, 15 aa, Artificial Sequence
  Description of Artificial Sequence: Synthetic peptide
  Seed: LRMKWMMAMKYPITA
LRVKWMMAMKVPITA

SEQ ID NO: 219445 - protein, 15 aa, Artificial Sequence
  Description of Artificial Sequence: Synthetic peptide
  Seed: LRMKWMMAMKYPITA
LRVKWMMGMKAPITA

SEQ ID NO: 219446 - protein, 15 aa, Artificial Sequence
  Description of Artificial Sequence: Synthetic peptide
  Seed: LRMKWMMAMKYPITA
LRVKWMMGMKIPITA

SEQ ID NO: 219447 - protein, 15 aa, Artificial Sequence
  Description of Artificial Sequence: Synthetic peptide
  Seed: LRMKWMMAMKYPITA
LRVKWMMGMKLPITA

SEQ ID NO: 219448 - protein, 15 aa, Artificial Sequence
  Description of Artificial Sequence: Synthetic peptide
  Seed: LRMKWMMAMKYPITA
LRVKWMMGMKMPITA

SEQ ID NO: 219449 - protein, 15 aa, Artificial Sequence
  Description of Artificial Sequence: Synthetic peptide
  Seed: LRMKWMMAMKYPITA
LRVKWMMGMKSPITA

SEQ ID NO: 219450 - protein, 15 aa, Artificial Sequence
  Description of Artificial Sequence: Synthetic peptide
  Seed: LRMKWMMAMKYPITA
LRVKWMMGMKTPITA

SEQ ID NO: 219451 - protein, 15 aa, Artificial Sequence
  Description of Artificial Sequence: Synthetic peptide
  Seed: LRMKWMMAMKYPITA
LRVKWMMGMKVPITA

SEQ ID NO: 219452 - protein, 15 aa, Artificial Sequence
  Description of Artificial Sequence: Synthetic peptide
  Seed: LRMKWMMAMKYPITA
LRVKWMMNMKAPITA

SEQ ID NO: 219453 - protein, 15 aa, Artificial Sequence
  Description of Artificial Sequence: Synthetic peptide
  Seed: LRMKWMMAMKYPITA
LRVKWMMNMKGPITA

SEQ ID NO: 219454 - protein, 15 aa, Artificial Sequence
  Description of Artificial Sequence: Synthetic peptide
  Seed: LRMKWMMAMKYPITA
LRVKWMMNMKIPITA

SEQ ID NO: 219455 - protein, 15 aa, Artificial Sequence
  Description of Artificial Sequence: Synthetic peptide
  Seed: LRMKWMMAMKYPITA
LRVKWMMNMKLPITA

SEQ ID NO: 219456 - protein, 15 aa, Artificial Sequence
  Description of Artificial Sequence: Synthetic peptide
  Seed: LRMKWMMAMKYPITA
LRVKWMMNMKSPITA

SEQ ID NO: 219457 - protein, 15 aa, Artificial Sequence
  Description of Artificial Sequence: Synthetic peptide
  Seed: LRMKWMMAMKYPITA
LRVKWMMNMKVPITA

SEQ ID NO: 219458 - protein, 15 aa, Artificial Sequence
  Description of Artificial Sequence: Synthetic peptide
  Seed: LRMKWMMAMKYPITA
LRVKWMMPMKIPITA

SEQ ID NO: 219459 - protein, 15 aa, Artificial Sequence
  Description of Artificial Sequence: Synthetic peptide
  Seed: LRMKWMMAMKYPITA
LRVKWMMPMKLPITA

SEQ ID NO: 219460 - protein, 15 aa, Artificial Sequence
  Description of Artificial Sequence: Synthetic peptide
  Seed: LRMKWMMAMKYPITA
LRVKWMMPMKVPITA

SEQ ID NO: 219461 - protein, 15 aa, Artificial Sequence
  Description of Artificial Sequence: Synthetic peptide
  Seed: LRMKWMMAMKYPITA
LRVKWMMSMKAPITA

SEQ ID NO: 219462 - protein, 15 aa, Artificial Sequence
  Description of Artificial Sequence: Synthetic peptide
  Seed: LRMKWMMAMKYPITA
LRVKWMMSMKIPITA

SEQ ID NO: 219463 - protein, 15 aa, Artificial Sequence
  Description of Artificial Sequence: Synthetic peptide
  Seed: LRMKWMMAMKYPITA
LRVKWMMSMKLPITA

SEQ ID NO: 219464 - protein, 15 aa, Artificial Sequence
  Description of Artificial Sequence: Synthetic peptide
  Seed: LRMKWMMAMKYPITA
LRVKWMMSMKSPITA

SEQ ID NO: 219465 - protein, 15 aa, Artificial Sequence
  Description of Artificial Sequence: Synthetic peptide
  Seed: LRMKWMMAMKYPITA
LRVKWMMSMKTPITA

SEQ ID NO: 219466 - protein, 15 aa, Artificial Sequence
  Description of Artificial Sequence: Synthetic peptide
  Seed: LRMKWMMAMKYPITA
LRVKWMMSMKVPITA

SEQ ID NO: 219467 - protein, 15 aa, Artificial Sequence
  Description of Artificial Sequence: Synthetic peptide
  Seed: LRMKWMMAMKYPITA
LRVKWMMTMKAPITA

SEQ ID NO: 219468 - protein, 15 aa, Artificial Sequence
  Description of Artificial Sequence: Synthetic peptide
  Seed: LRMKWMMAMKYPITA
LRVKWMMTMKGPITA

SEQ ID NO: 219469 - protein, 15 aa, Artificial Sequence
  Description of Artificial Sequence: Synthetic peptide
  Seed: LRMKWMMAMKYPITA
LRVKWMMTMKSPITA

SEQ ID NO: 219470 - protein, 15 aa, Artificial Sequence
  Description of Artificial Sequence: Synthetic peptide
  Seed: LRMKWMMAMKYPITA
LRVKWQMAMKIPITA

SEQ ID NO: 219471 - protein, 15 aa, Artificial Sequence
  Description of Artificial Sequence: Synthetic peptide
  Seed: LRMKWMMAMKYPITA
LRVKWQMAMKLPITA

SEQ ID NO: 219472 - protein, 15 aa, Artificial Sequence
  Description of Artificial Sequence: Synthetic peptide
  Seed: LRMKWMMAMKYPITA
LRVKWQMAMKVPITA

SEQ ID NO: 219473 - protein, 15 aa, Artificial Sequence
  Description of Artificial Sequence: Synthetic peptide
  Seed: LRMKWMMAMKYPITA
LRVKWQMFMKLPITA

SEQ ID NO: 219474 - protein, 15 aa, Artificial Sequence
  Description of Artificial Sequence: Synthetic peptide
  Seed: LRMKWMMAMKYPITA
LRVKWSMFMKEPITA

SEQ ID NO: 219475 - protein, 15 aa, Artificial Sequence
  Description of Artificial Sequence: Synthetic peptide
  Seed: LRMKWMMAMKYPITA
LRVKWSMFMKFPITA

SEQ ID NO: 219476 - protein, 15 aa, Artificial Sequence
  Description of Artificial Sequence: Synthetic peptide
  Seed: LRMKWMMAMKYPITA
LRVKWSMFMKIPITA

SEQ ID NO: 219477 - protein, 15 aa, Artificial Sequence
  Description of Artificial Sequence: Synthetic peptide
  Seed: LRMKWMMAMKYPITA
LRVKWSMFMKLPITA

SEQ ID NO: 219478 - protein, 15 aa, Artificial Sequence
  Description of Artificial Sequence: Synthetic peptide
  Seed: LRMKWMMAMKYPITA
LRVKWSMFMKMPITA

SEQ ID NO: 219479 - protein, 15 aa, Artificial Sequence
  Description of Artificial Sequence: Synthetic peptide
  Seed: LRMKWMMAMKYPITA
LRVKWSMFMKVPITA

SEQ ID NO: 219480 - protein, 15 aa, Artificial Sequence
  Description of Artificial Sequence: Synthetic peptide
  Seed: LRMKWMMAMKYPITA
LRVKWSMLMKLPITA

SEQ ID NO: 219481 - protein, 15 aa, Artificial Sequence
  Description of Artificial Sequence: Synthetic peptide
  Seed: LRMKWMMAMKYPITA
LRVKWTMFMKAPITA

SEQ ID NO: 219482 - protein, 15 aa, Artificial Sequence
  Description of Artificial Sequence: Synthetic peptide
  Seed: LRMKWMMAMKYPITA
LRVKWTMFMKEPITA

SEQ ID NO: 219483 - protein, 15 aa, Artificial Sequence
  Description of Artificial Sequence: Synthetic peptide
  Seed: LRMKWMMAMKYPITA
LRVKWTMFMKFPITA

SEQ ID NO: 219484 - protein, 15 aa, Artificial Sequence
  Description of Artificial Sequence: Synthetic peptide
  Seed: LRMKWMMAMKYPITA
LRVKWTMFMKIPITA

SEQ ID NO: 219485 - protein, 15 aa, Artificial Sequence
  Description of Artificial Sequence: Synthetic peptide
  Seed: LRMKWMMAMKYPITA
LRVKWTMFMKLPITA

SEQ ID NO: 219486 - protein, 15 aa, Artificial Sequence
  Description of Artificial Sequence: Synthetic peptide
  Seed: LRMKWMMAMKYPITA
LRVKWTMFMKMPITA

SEQ ID NO: 219487 - protein, 15 aa, Artificial Sequence
  Description of Artificial Sequence: Synthetic peptide
  Seed: LRMKWMMAMKYPITA
LRVKWTMFMKNPITA

SEQ ID NO: 219488 - protein, 15 aa, Artificial Sequence
  Description of Artificial Sequence: Synthetic peptide
  Seed: LRMKWMMAMKYPITA
LRVKWTMFMKSPITA

SEQ ID NO: 219489 - protein, 15 aa, Artificial Sequence
  Description of Artificial Sequence: Synthetic peptide
  Seed: LRMKWMMAMKYPITA
LRVKWTMFMKVPITA

SEQ ID NO: 219490 - protein, 15 aa, Artificial Sequence
  Description of Artificial Sequence: Synthetic peptide
  Seed: LRMKWMMAMKYPITA
LRVKWTMFMKYPITA

SEQ ID NO: 219491 - protein, 15 aa, Artificial Sequence
  Description of Artificial Sequence: Synthetic peptide
  Seed: LRMKWMMAMKYPITA
LRVKWTMLMKLPITA

SEQ ID NO: 219492 - protein, 15 aa, Artificial Sequence
  Description of Artificial Sequence: Synthetic peptide
  Seed: LRMKWMMAMKYPITA
LRVKWTMLMKMPITA

SEQ ID NO: 219493 - protein, 15 aa, Artificial Sequence
  Description of Artificial Sequence: Synthetic peptide
  Seed: LRMKWMMAMKYPITA
LRVKWTMLMKVPITA

SEQ ID NO: 219494 - protein, 15 aa, Artificial Sequence
  Description of Artificial Sequence: Synthetic peptide
  Seed: LRMKWMMAMKYPITA
LRVKWTMYMKLPITA

SEQ ID NO: 219495 - protein, 15 aa, Artificial Sequence
  Description of Artificial Sequence: Synthetic peptide
  Seed: LRMKWMMAMKYPITA
LRVKWVMNMKSPITA

SEQ ID NO: 219496 - protein, 15 aa, Artificial Sequence
  Description of Artificial Sequence: Synthetic peptide
  Seed: LRMKWMMAMKYPITA
LRVKWVMNMKVPITA

SEQ ID NO: 219497 - protein, 15 aa, Artificial Sequence
  Description of Artificial Sequence: Synthetic peptide
  Seed: LRMKWMMAMKYPITA
LRVKWVMSMKVPITA

SEQ ID NO: 219498 - protein, 15 aa, Artificial Sequence
  Description of Artificial Sequence: Synthetic peptide
  Seed: LRMKWMMAMKYPITA
LRVKWVMTMKSPITA

SEQ ID NO: 219499 - protein, 15 aa, Artificial Sequence
  Description of Artificial Sequence: Synthetic peptide
  Seed: LRMKWMMAMKYPITA
LRVKWWMAMKAPITA

SEQ ID NO: 219500 - protein, 15 aa, Artificial Sequence
  Description of Artificial Sequence: Synthetic peptide
  Seed: LRMKWMMAMKYPITA
LRVKWWMAMKIPITA

SEQ ID NO: 219501 - protein, 15 aa, Artificial Sequence
  Description of Artificial Sequence: Synthetic peptide
  Seed: LRMKWMMAMKYPITA
LRVKWWMAMKLPITA

SEQ ID NO: 219502 - protein, 15 aa, Artificial Sequence
  Description of Artificial Sequence: Synthetic peptide
  Seed: LRMKWMMAMKYPITA
LRVKWWMAMKMPITA

SEQ ID NO: 219503 - protein, 15 aa, Artificial Sequence
  Description of Artificial Sequence: Synthetic peptide
  Seed: LRMKWMMAMKYPITA
LRVKWWMAMKVPITA

SEQ ID NO: 219504 - protein, 15 aa, Artificial Sequence
  Description of Artificial Sequence: Synthetic peptide
  Seed: LRMKWMMAMKYPITA
LRVKWWMGMKIPITA

SEQ ID NO: 219505 - protein, 15 aa, Artificial Sequence
  Description of Artificial Sequence: Synthetic peptide
  Seed: LRMKWMMAMKYPITA
LRVKWWMGMKLPITA

SEQ ID NO: 219506 - protein, 15 aa, Artificial Sequence
  Description of Artificial Sequence: Synthetic peptide
  Seed: LRMKWMMAMKYPITA
LRVKWWMGMKVPITA

SEQ ID NO: 219507 - protein, 15 aa, Artificial Sequence
  Description of Artificial Sequence: Synthetic peptide
  Seed: LRMKWMMAMKYPITA
LRVKWWMNMKAPITA

SEQ ID NO: 219508 - protein, 15 aa, Artificial Sequence
  Description of Artificial Sequence: Synthetic peptide
  Seed: LRMKWMMAMKYPITA
LRVKWWMNMKFPITA

SEQ ID NO: 219509 - protein, 15 aa, Artificial Sequence
  Description of Artificial Sequence: Synthetic peptide
  Seed: LRMKWMMAMKYPITA
LRVKWWMNMKIPITA

SEQ ID NO: 219510 - protein, 15 aa, Artificial Sequence
  Description of Artificial Sequence: Synthetic peptide
  Seed: LRMKWMMAMKYPITA
LRVKWWMNMKLPITA

SEQ ID NO: 219511 - protein, 15 aa, Artificial Sequence
  Description of Artificial Sequence: Synthetic peptide
  Seed: LRMKWMMAMKYPITA
LRVKWWMNMKMPITA

SEQ ID NO: 219512 - protein, 15 aa, Artificial Sequence
  Description of Artificial Sequence: Synthetic peptide
  Seed: LRMKWMMAMKYPITA
LRVKWWMNMKTPITA

SEQ ID NO: 219513 - protein, 15 aa, Artificial Sequence
  Description of Artificial Sequence: Synthetic peptide
  Seed: LRMKWMMAMKYPITA
LRVKWWMNMKVPITA

SEQ ID NO: 219514 - protein, 15 aa, Artificial Sequence
  Description of Artificial Sequence: Synthetic peptide
  Seed: LRMKWMMAMKYPITA
LRVKWWMPMKVPITA

SEQ ID NO: 219515 - protein, 15 aa, Artificial Sequence
  Description of Artificial Sequence: Synthetic peptide
  Seed: LRMKWMMAMKYPITA
LRVKWWMSMKAPITA

SEQ ID NO: 219516 - protein, 15 aa, Artificial Sequence
  Description of Artificial Sequence: Synthetic peptide
  Seed: LRMKWMMAMKYPITA
LRVKWWMSMKFPITA

SEQ ID NO: 219517 - protein, 15 aa, Artificial Sequence
  Description of Artificial Sequence: Synthetic peptide
  Seed: LRMKWMMAMKYPITA
LRVKWWMSMKIPITA

SEQ ID NO: 219518 - protein, 15 aa, Artificial Sequence
  Description of Artificial Sequence: Synthetic peptide
  Seed: LRMKWMMAMKYPITA
LRVKWWMSMKLPITA

SEQ ID NO: 219519 - protein, 15 aa, Artificial Sequence
  Description of Artificial Sequence: Synthetic peptide
  Seed: LRMKWMMAMKYPITA
LRVKWWMSMKMPITA

SEQ ID NO: 219520 - protein, 15 aa, Artificial Sequence
  Description of Artificial Sequence: Synthetic peptide
  Seed: LRMKWMMAMKYPITA
LRVKWWMSMKSPITA

SEQ ID NO: 219521 - protein, 15 aa, Artificial Sequence
  Description of Artificial Sequence: Synthetic peptide
  Seed: LRMKWMMAMKYPITA
LRVKWWMSMKTPITA

SEQ ID NO: 219522 - protein, 15 aa, Artificial Sequence
  Description of Artificial Sequence: Synthetic peptide
  Seed: LRMKWMMAMKYPITA
LRVKWWMSMKVPITA

SEQ ID NO: 219523 - protein, 15 aa, Artificial Sequence
  Description of Artificial Sequence: Synthetic peptide
  Seed: LRMKWMMAMKYPITA
LRVKWWMTMKIPITA

SEQ ID NO: 219524 - protein, 15 aa, Artificial Sequence
  Description of Artificial Sequence: Synthetic peptide
  Seed: LRMKWMMAMKYPITA
LRVKWWMTMKLPITA

SEQ ID NO: 219525 - protein, 15 aa, Artificial Sequence
  Description of Artificial Sequence: Synthetic peptide
  Seed: LRMKWMMAMKYPITA
LRVKWWMTMKVPITA

SEQ ID NO: 219526 - protein, 15 aa, Artificial Sequence
  Description of Artificial Sequence: Synthetic peptide
  Seed: LRMKWMMAMKYPITA
LRVKWYMAMKAPITA

SEQ ID NO: 219527 - protein, 15 aa, Artificial Sequence
  Description of Artificial Sequence: Synthetic peptide
  Seed: LRMKWMMAMKYPITA
LRVKWYMAMKFPITA

SEQ ID NO: 219528 - protein, 15 aa, Artificial Sequence
  Description of Artificial Sequence: Synthetic peptide
  Seed: LRMKWMMAMKYPITA
LRVKWYMAMKGPITA

SEQ ID NO: 219529 - protein, 15 aa, Artificial Sequence
  Description of Artificial Sequence: Synthetic peptide
  Seed: LRMKWMMAMKYPITA
LRVKWYMAMKHPITA

SEQ ID NO: 219530 - protein, 15 aa, Artificial Sequence
  Description of Artificial Sequence: Synthetic peptide
  Seed: LRMKWMMAMKYPITA
LRVKWYMAMKIPITA

SEQ ID NO: 219531 - protein, 15 aa, Artificial Sequence
  Description of Artificial Sequence: Synthetic peptide
  Seed: LRMKWMMAMKYPITA
LRVKWYMAMKLPITA

SEQ ID NO: 219532 - protein, 15 aa, Artificial Sequence
  Description of Artificial Sequence: Synthetic peptide
  Seed: LRMKWMMAMKYPITA
LRVKWYMAMKMPITA

SEQ ID NO: 219533 - protein, 15 aa, Artificial Sequence
  Description of Artificial Sequence: Synthetic peptide
  Seed: LRMKWMMAMKYPITA
LRVKWYMAMKRPITA

SEQ ID NO: 219534 - protein, 15 aa, Artificial Sequence
  Description of Artificial Sequence: Synthetic peptide
  Seed: LRMKWMMAMKYPITA
LRVKWYMAMKSPITA

SEQ ID NO: 219535 - protein, 15 aa, Artificial Sequence
  Description of Artificial Sequence: Synthetic peptide
  Seed: LRMKWMMAMKYPITA
LRVKWYMAMKTPITA

SEQ ID NO: 219536 - protein, 15 aa, Artificial Sequence
  Description of Artificial Sequence: Synthetic peptide
  Seed: LRMKWMMAMKYPITA
LRVKWYMAMKVPITA

SEQ ID NO: 219537 - protein, 15 aa, Artificial Sequence
  Description of Artificial Sequence: Synthetic peptide
  Seed: LRMKWMMAMKYPITA
LRVKWYMAMKYPITA

SEQ ID NO: 219538 - protein, 15 aa, Artificial Sequence
  Description of Artificial Sequence: Synthetic peptide
  Seed: LRMKWMMAMKYPITA
LRVKWYMDMKIPITA

SEQ ID NO: 219539 - protein, 15 aa, Artificial Sequence
  Description of Artificial Sequence: Synthetic peptide
  Seed: LRMKWMMAMKYPITA
LRVKWYMDMKLPITA

SEQ ID NO: 219540 - protein, 15 aa, Artificial Sequence
  Description of Artificial Sequence: Synthetic peptide
  Seed: LRMKWMMAMKYPITA
LRVKWYMDMKVPITA

SEQ ID NO: 219541 - protein, 15 aa, Artificial Sequence
  Description of Artificial Sequence: Synthetic peptide
  Seed: LRMKWMMAMKYPITA
LRVKWYMGMKAPITA

SEQ ID NO: 219542 - protein, 15 aa, Artificial Sequence
  Description of Artificial Sequence: Synthetic peptide
  Seed: LRMKWMMAMKYPITA
LRVKWYMGMKFPITA

SEQ ID NO: 219543 - protein, 15 aa, Artificial Sequence
  Description of Artificial Sequence: Synthetic peptide
  Seed: LRMKWMMAMKYPITA
LRVKWYMGMKGPITA

SEQ ID NO: 219544 - protein, 15 aa, Artificial Sequence
  Description of Artificial Sequence: Synthetic peptide
  Seed: LRMKWMMAMKYPITA
LRVKWYMGMKIPITA

SEQ ID NO: 219545 - protein, 15 aa, Artificial Sequence
  Description of Artificial Sequence: Synthetic peptide
  Seed: LRMKWMMAMKYPITA
LRVKWYMGMKLPITA

SEQ ID NO: 219546 - protein, 15 aa, Artificial Sequence
  Description of Artificial Sequence: Synthetic peptide
  Seed: LRMKWMMAMKYPITA
LRVKWYMGMKMPITA

SEQ ID NO: 219547 - protein, 15 aa, Artificial Sequence
  Description of Artificial Sequence: Synthetic peptide
  Seed: LRMKWMMAMKYPITA
LRVKWYMGMKSPITA

SEQ ID NO: 219548 - protein, 15 aa, Artificial Sequence
  Description of Artificial Sequence: Synthetic peptide
  Seed: LRMKWMMAMKYPITA
LRVKWYMGMKTPITA

SEQ ID NO: 219549 - protein, 15 aa, Artificial Sequence
  Description of Artificial Sequence: Synthetic peptide
  Seed: LRMKWMMAMKYPITA
LRVKWYMGMKVPITA

SEQ ID NO: 219550 - protein, 15 aa, Artificial Sequence
  Description of Artificial Sequence: Synthetic peptide
  Seed: LRMKWMMAMKYPITA
LRVKWYMNMKAPITA

SEQ ID NO: 219551 - protein, 15 aa, Artificial Sequence
  Description of Artificial Sequence: Synthetic peptide
  Seed: LRMKWMMAMKYPITA
LRVKWYMNMKFPITA

SEQ ID NO: 219552 - protein, 15 aa, Artificial Sequence
  Description of Artificial Sequence: Synthetic peptide
  Seed: LRMKWMMAMKYPITA
LRVKWYMNMKGPITA

SEQ ID NO: 219553 - protein, 15 aa, Artificial Sequence
  Description of Artificial Sequence: Synthetic peptide
  Seed: LRMKWMMAMKYPITA
LRVKWYMNMKHPITA

SEQ ID NO: 219554 - protein, 15 aa, Artificial Sequence
  Description of Artificial Sequence: Synthetic peptide
  Seed: LRMKWMMAMKYPITA
LRVKWYMNMKIPITA

SEQ ID NO: 219555 - protein, 15 aa, Artificial Sequence
  Description of Artificial Sequence: Synthetic peptide
  Seed: LRMKWMMAMKYPITA
LRVKWYMNMKLPITA

SEQ ID NO: 219556 - protein, 15 aa, Artificial Sequence
  Description of Artificial Sequence: Synthetic peptide
  Seed: LRMKWMMAMKYPITA
LRVKWYMNMKMPITA

SEQ ID NO: 219557 - protein, 15 aa, Artificial Sequence
  Description of Artificial Sequence: Synthetic peptide
  Seed: LRMKWMMAMKYPITA
LRVKWYMNMKSPITA

SEQ ID NO: 219558 - protein, 15 aa, Artificial Sequence
  Description of Artificial Sequence: Synthetic peptide
  Seed: LRMKWMMAMKYPITA
LRVKWYMNMKTPITA

SEQ ID NO: 219559 - protein, 15 aa, Artificial Sequence
  Description of Artificial Sequence: Synthetic peptide
  Seed: LRMKWMMAMKYPITA
LRVKWYMNMKVPITA

SEQ ID NO: 219560 - protein, 15 aa, Artificial Sequence
  Description of Artificial Sequence: Synthetic peptide
  Seed: LRMKWMMAMKYPITA
LRVKWYMNMKYPITA

SEQ ID NO: 219561 - protein, 15 aa, Artificial Sequence
  Description of Artificial Sequence: Synthetic peptide
  Seed: LRMKWMMAMKYPITA
LRVKWYMPMKAPITA

SEQ ID NO: 219562 - protein, 15 aa, Artificial Sequence
  Description of Artificial Sequence: Synthetic peptide
  Seed: LRMKWMMAMKYPITA
LRVKWYMPMKIPITA

SEQ ID NO: 219563 - protein, 15 aa, Artificial Sequence
  Description of Artificial Sequence: Synthetic peptide
  Seed: LRMKWMMAMKYPITA
LRVKWYMPMKLPITA

SEQ ID NO: 219564 - protein, 15 aa, Artificial Sequence
  Description of Artificial Sequence: Synthetic peptide
  Seed: LRMKWMMAMKYPITA
LRVKWYMPMKMPITA

SEQ ID NO: 219565 - protein, 15 aa, Artificial Sequence
  Description of Artificial Sequence: Synthetic peptide
  Seed: LRMKWMMAMKYPITA
LRVKWYMPMKVPITA

SEQ ID NO: 219566 - protein, 15 aa, Artificial Sequence
  Description of Artificial Sequence: Synthetic peptide
  Seed: LRMKWMMAMKYPITA
LRVKWYMSMKAPITA

SEQ ID NO: 219567 - protein, 15 aa, Artificial Sequence
  Description of Artificial Sequence: Synthetic peptide
  Seed: LRMKWMMAMKYPITA
LRVKWYMSMKFPITA

SEQ ID NO: 219568 - protein, 15 aa, Artificial Sequence
  Description of Artificial Sequence: Synthetic peptide
  Seed: LRMKWMMAMKYPITA
LRVKWYMSMKGPITA

SEQ ID NO: 219569 - protein, 15 aa, Artificial Sequence
  Description of Artificial Sequence: Synthetic peptide
  Seed: LRMKWMMAMKYPITA
LRVKWYMSMKHPITA

SEQ ID NO: 219570 - protein, 15 aa, Artificial Sequence
  Description of Artificial Sequence: Synthetic peptide
  Seed: LRMKWMMAMKYPITA
LRVKWYMSMKIPITA

SEQ ID NO: 219571 - protein, 15 aa, Artificial Sequence
  Description of Artificial Sequence: Synthetic peptide
  Seed: LRMKWMMAMKYPITA
LRVKWYMSMKLPITA

SEQ ID NO: 219572 - protein, 15 aa, Artificial Sequence
  Description of Artificial Sequence: Synthetic peptide
  Seed: LRMKWMMAMKYPITA
LRVKWYMSMKMPITA

SEQ ID NO: 219573 - protein, 15 aa, Artificial Sequence
  Description of Artificial Sequence: Synthetic peptide
  Seed: LRMKWMMAMKYPITA
LRVKWYMSMKNPITA

SEQ ID NO: 219574 - protein, 15 aa, Artificial Sequence
  Description of Artificial Sequence: Synthetic peptide
  Seed: LRMKWMMAMKYPITA
LRVKWYMSMKRPITA

SEQ ID NO: 219575 - protein, 15 aa, Artificial Sequence
  Description of Artificial Sequence: Synthetic peptide
  Seed: LRMKWMMAMKYPITA
LRVKWYMSMKSPITA

SEQ ID NO: 219576 - protein, 15 aa, Artificial Sequence
  Description of Artificial Sequence: Synthetic peptide
  Seed: LRMKWMMAMKYPITA
LRVKWYMSMKTPITA

SEQ ID NO: 219577 - protein, 15 aa, Artificial Sequence
  Description of Artificial Sequence: Synthetic peptide
  Seed: LRMKWMMAMKYPITA
LRVKWYMSMKVPITA

SEQ ID NO: 219578 - protein, 15 aa, Artificial Sequence
  Description of Artificial Sequence: Synthetic peptide
  Seed: LRMKWMMAMKYPITA
LRVKWYMSMKYPITA

SEQ ID NO: 219579 - protein, 15 aa, Artificial Sequence
  Description of Artificial Sequence: Synthetic peptide
  Seed: LRMKWMMAMKYPITA
LRVKWYMTMKAPITA

SEQ ID NO: 219580 - protein, 15 aa, Artificial Sequence
  Description of Artificial Sequence: Synthetic peptide
  Seed: LRMKWMMAMKYPITA
LRVKWYMTMKFPITA

SEQ ID NO: 219581 - protein, 15 aa, Artificial Sequence
  Description of Artificial Sequence: Synthetic peptide
  Seed: LRMKWMMAMKYPITA
LRVKWYMTMKIPITA

SEQ ID NO: 219582 - protein, 15 aa, Artificial Sequence
  Description of Artificial Sequence: Synthetic peptide
  Seed: LRMKWMMAMKYPITA
LRVKWYMTMKLPITA

SEQ ID NO: 219583 - protein, 15 aa, Artificial Sequence
  Description of Artificial Sequence: Synthetic peptide
  Seed: LRMKWMMAMKYPITA
LRVKWYMTMKMPITA

SEQ ID NO: 219584 - protein, 15 aa, Artificial Sequence
  Description of Artificial Sequence: Synthetic peptide
  Seed: LRMKWMMAMKYPITA
LRVKWYMTMKSPITA

SEQ ID NO: 219585 - protein, 15 aa, Artificial Sequence
  Description of Artificial Sequence: Synthetic peptide
  Seed: LRMKWMMAMKYPITA
LRVKWYMTMKTPITA

SEQ ID NO: 219586 - protein, 15 aa, Artificial Sequence
  Description of Artificial Sequence: Synthetic peptide
  Seed: LRMKWMMAMKYPITA
LRVKWYMTMKVPITA

SEQ ID NO: 219587 - protein, 15 aa, Artificial Sequence
  Description of Artificial Sequence: Synthetic peptide
  Seed: LRMKWMMAMKYPITA
LRVKWYMVMKAPITA

SEQ ID NO: 219588 - protein, 15 aa, Artificial Sequence
  Description of Artificial Sequence: Synthetic peptide
  Seed: LRMKWMMAMKYPITA
LRWKWEMFMKIPITA

SEQ ID NO: 219589 - protein, 15 aa, Artificial Sequence
  Description of Artificial Sequence: Synthetic peptide
  Seed: LRMKWMMAMKYPITA
LRWKWEMFMKLPITA

SEQ ID NO: 219590 - protein, 15 aa, Artificial Sequence
  Description of Artificial Sequence: Synthetic peptide
  Seed: LRMKWMMAMKYPITA
LRWKWEMFMKMPITA

SEQ ID NO: 219591 - protein, 15 aa, Artificial Sequence
  Description of Artificial Sequence: Synthetic peptide
  Seed: LRMKWMMAMKYPITA
LRWKWEMFMKVPITA

SEQ ID NO: 219592 - protein, 15 aa, Artificial Sequence
  Description of Artificial Sequence: Synthetic peptide
  Seed: LRMKWMMAMKYPITA
LRWKWHMFMKIPITA

SEQ ID NO: 219593 - protein, 15 aa, Artificial Sequence
  Description of Artificial Sequence: Synthetic peptide
  Seed: LRMKWMMAMKYPITA
LRWKWHMFMKLPITA

SEQ ID NO: 219594 - protein, 15 aa, Artificial Sequence
  Description of Artificial Sequence: Synthetic peptide
  Seed: LRMKWMMAMKYPITA
LRWKWHMFMKVPITA

SEQ ID NO: 219595 - protein, 15 aa, Artificial Sequence
  Description of Artificial Sequence: Synthetic peptide
  Seed: LRMKWMMAMKYPITA
LRWKWLMGMKAPITA

SEQ ID NO: 219596 - protein, 15 aa, Artificial Sequence
  Description of Artificial Sequence: Synthetic peptide
  Seed: LRMKWMMAMKYPITA
LRWKWMMAMKTPITA

SEQ ID NO: 219597 - protein, 15 aa, Artificial Sequence
  Description of Artificial Sequence: Synthetic peptide
  Seed: LRMKWMMAMKYPITA
LRWKWMMAMKVPITA

SEQ ID NO: 219598 - protein, 15 aa, Artificial Sequence
  Description of Artificial Sequence: Synthetic peptide
  Seed: LRMKWMMAMKYPITA
LRWKWMMGMKAPITA

SEQ ID NO: 219599 - protein, 15 aa, Artificial Sequence
  Description of Artificial Sequence: Synthetic peptide
  Seed: LRMKWMMAMKYPITA
LRWKWSMFMKIPITA

SEQ ID NO: 219600 - protein, 15 aa, Artificial Sequence
  Description of Artificial Sequence: Synthetic peptide
  Seed: LRMKWMMAMKYPITA
LRWKWSMFMKLPITA

SEQ ID NO: 219601 - protein, 15 aa, Artificial Sequence
  Description of Artificial Sequence: Synthetic peptide
  Seed: LRMKWMMAMKYPITA
LRWKWSMFMKMPITA

SEQ ID NO: 219602 - protein, 15 aa, Artificial Sequence
  Description of Artificial Sequence: Synthetic peptide
  Seed: LRMKWMMAMKYPITA
LRWKWSMFMKVPITA

SEQ ID NO: 219603 - protein, 15 aa, Artificial Sequence
  Description of Artificial Sequence: Synthetic peptide
  Seed: LRMKWMMAMKYPITA
LRWKWTMFMKEPITA

SEQ ID NO: 219604 - protein, 15 aa, Artificial Sequence
  Description of Artificial Sequence: Synthetic peptide
  Seed: LRMKWMMAMKYPITA
LRWKWTMFMKIPITA

SEQ ID NO: 219605 - protein, 15 aa, Artificial Sequence
  Description of Artificial Sequence: Synthetic peptide
  Seed: LRMKWMMAMKYPITA
LRWKWTMFMKLPITA

SEQ ID NO: 219606 - protein, 15 aa, Artificial Sequence
  Description of Artificial Sequence: Synthetic peptide
  Seed: LRMKWMMAMKYPITA
LRWKWTMFMKMPITA

SEQ ID NO: 219607 - protein, 15 aa, Artificial Sequence
  Description of Artificial Sequence: Synthetic peptide
  Seed: LRMKWMMAMKYPITA
LRWKWTMFMKVPITA

SEQ ID NO: 219608 - protein, 15 aa, Artificial Sequence
  Description of Artificial Sequence: Synthetic peptide
  Seed: LRMKWMMAMKYPITA
LRYKWAMAMKAPITA

SEQ ID NO: 219609 - protein, 15 aa, Artificial Sequence
  Description of Artificial Sequence: Synthetic peptide
  Seed: LRMKWMMAMKYPITA
LRYKWAMAMKLPITA

SEQ ID NO: 219610 - protein, 15 aa, Artificial Sequence
  Description of Artificial Sequence: Synthetic peptide
  Seed: LRMKWMMAMKYPITA
LRYKWAMAMKVPITA

SEQ ID NO: 219611 - protein, 15 aa, Artificial Sequence
  Description of Artificial Sequence: Synthetic peptide
  Seed: LRMKWMMAMKYPITA
LRYKWAMFMKEPITA

SEQ ID NO: 219612 - protein, 15 aa, Artificial Sequence
  Description of Artificial Sequence: Synthetic peptide
  Seed: LRMKWMMAMKYPITA
LRYKWAMFMKIPITA

SEQ ID NO: 219613 - protein, 15 aa, Artificial Sequence
  Description of Artificial Sequence: Synthetic peptide
  Seed: LRMKWMMAMKYPITA
LRYKWAMFMKLPITA

SEQ ID NO: 219614 - protein, 15 aa, Artificial Sequence
  Description of Artificial Sequence: Synthetic peptide
  Seed: LRMKWMMAMKYPITA
LRYKWAMFMKMPITA

SEQ ID NO: 219615 - protein, 15 aa, Artificial Sequence
  Description of Artificial Sequence: Synthetic peptide
  Seed: LRMKWMMAMKYPITA
LRYKWAMFMKVPITA

SEQ ID NO: 219616 - protein, 15 aa, Artificial Sequence
  Description of Artificial Sequence: Synthetic peptide
  Seed: LRMKWMMAMKYPITA
LRYKWDMFMKIPITA

SEQ ID NO: 219617 - protein, 15 aa, Artificial Sequence
  Description of Artificial Sequence: Synthetic peptide
  Seed: LRMKWMMAMKYPITA
LRYKWDMFMKLPITA

SEQ ID NO: 219618 - protein, 15 aa, Artificial Sequence
  Description of Artificial Sequence: Synthetic peptide
  Seed: LRMKWMMAMKYPITA
LRYKWDMFMKVPITA

SEQ ID NO: 219619 - protein, 15 aa, Artificial Sequence
  Description of Artificial Sequence: Synthetic peptide
  Seed: LRMKWMMAMKYPITA
LRYKWEMFMKAPITA

SEQ ID NO: 219620 - protein, 15 aa, Artificial Sequence
  Description of Artificial Sequence: Synthetic peptide
  Seed: LRMKWMMAMKYPITA
LRYKWEMFMKEPITA

SEQ ID NO: 219621 - protein, 15 aa, Artificial Sequence
  Description of Artificial Sequence: Synthetic peptide
  Seed: LRMKWMMAMKYPITA
LRYKWEMFMKFPITA

SEQ ID NO: 219622 - protein, 15 aa, Artificial Sequence
  Description of Artificial Sequence: Synthetic peptide
  Seed: LRMKWMMAMKYPITA
LRYKWEMFMKIPITA

SEQ ID NO: 219623 - protein, 15 aa, Artificial Sequence
  Description of Artificial Sequence: Synthetic peptide
  Seed: LRMKWMMAMKYPITA
LRYKWEMFMKLPITA

SEQ ID NO: 219624 - protein, 15 aa, Artificial Sequence
  Description of Artificial Sequence: Synthetic peptide
  Seed: LRMKWMMAMKYPITA
LRYKWEMFMKMPITA

SEQ ID NO: 219625 - protein, 15 aa, Artificial Sequence
  Description of Artificial Sequence: Synthetic peptide
  Seed: LRMKWMMAMKYPITA
LRYKWEMFMKTPITA

SEQ ID NO: 219626 - protein, 15 aa, Artificial Sequence
  Description of Artificial Sequence: Synthetic peptide
  Seed: LRMKWMMAMKYPITA
LRYKWEMFMKVPITA

SEQ ID NO: 219627 - protein, 15 aa, Artificial Sequence
  Description of Artificial Sequence: Synthetic peptide
  Seed: LRMKWMMAMKYPITA
LRYKWFMAMKVPITA

SEQ ID NO: 219628 - protein, 15 aa, Artificial Sequence
  Description of Artificial Sequence: Synthetic peptide
  Seed: LRMKWMMAMKYPITA
LRYKWFMNMKVPITA

SEQ ID NO: 219629 - protein, 15 aa, Artificial Sequence
  Description of Artificial Sequence: Synthetic peptide
  Seed: LRMKWMMAMKYPITA
LRYKWFMSMKAPITA

SEQ ID NO: 219630 - protein, 15 aa, Artificial Sequence
  Description of Artificial Sequence: Synthetic peptide
  Seed: LRMKWMMAMKYPITA
LRYKWFMSMKIPITA

SEQ ID NO: 219631 - protein, 15 aa, Artificial Sequence
  Description of Artificial Sequence: Synthetic peptide
  Seed: LRMKWMMAMKYPITA
LRYKWFMSMKLPITA

SEQ ID NO: 219632 - protein, 15 aa, Artificial Sequence
  Description of Artificial Sequence: Synthetic peptide
  Seed: LRMKWMMAMKYPITA
LRYKWFMSMKSPITA

SEQ ID NO: 219633 - protein, 15 aa, Artificial Sequence
  Description of Artificial Sequence: Synthetic peptide
  Seed: LRMKWMMAMKYPITA
LRYKWFMSMKVPITA

SEQ ID NO: 219634 - protein, 15 aa, Artificial Sequence
  Description of Artificial Sequence: Synthetic peptide
  Seed: LRMKWMMAMKYPITA
LRYKWFMTMKSPITA

SEQ ID NO: 219635 - protein, 15 aa, Artificial Sequence
  Description of Artificial Sequence: Synthetic peptide
  Seed: LRMKWMMAMKYPITA
LRYKWHMFMKFPITA

SEQ ID NO: 219636 - protein, 15 aa, Artificial Sequence
  Description of Artificial Sequence: Synthetic peptide
  Seed: LRMKWMMAMKYPITA
LRYKWHMFMKIPITA

SEQ ID NO: 219637 - protein, 15 aa, Artificial Sequence
  Description of Artificial Sequence: Synthetic peptide
  Seed: LRMKWMMAMKYPITA
LRYKWHMFMKLPITA

SEQ ID NO: 219638 - protein, 15 aa, Artificial Sequence
  Description of Artificial Sequence: Synthetic peptide
  Seed: LRMKWMMAMKYPITA
LRYKWHMFMKVPITA

SEQ ID NO: 219639 - protein, 15 aa, Artificial Sequence
  Description of Artificial Sequence: Synthetic peptide
  Seed: LRMKWMMAMKYPITA
LRYKWIMAMKIPITA

SEQ ID NO: 219640 - protein, 15 aa, Artificial Sequence
  Description of Artificial Sequence: Synthetic peptide
  Seed: LRMKWMMAMKYPITA
LRYKWIMAMKLPITA

SEQ ID NO: 219641 - protein, 15 aa, Artificial Sequence
  Description of Artificial Sequence: Synthetic peptide
  Seed: LRMKWMMAMKYPITA
LRYKWIMAMKVPITA

SEQ ID NO: 219642 - protein, 15 aa, Artificial Sequence
  Description of Artificial Sequence: Synthetic peptide
  Seed: LRMKWMMAMKYPITA
LRYKWIMGMKVPITA

SEQ ID NO: 219643 - protein, 15 aa, Artificial Sequence
  Description of Artificial Sequence: Synthetic peptide
  Seed: LRMKWMMAMKYPITA
LRYKWIMPMKVPITA

SEQ ID NO: 219644 - protein, 15 aa, Artificial Sequence
  Description of Artificial Sequence: Synthetic peptide
  Seed: LRMKWMMAMKYPITA
LRYKWIMTMKAPITA

SEQ ID NO: 219645 - protein, 15 aa, Artificial Sequence
  Description of Artificial Sequence: Synthetic peptide
  Seed: LRMKWMMAMKYPITA
LRYKWLMAMKIPITA

SEQ ID NO: 219646 - protein, 15 aa, Artificial Sequence
  Description of Artificial Sequence: Synthetic peptide
  Seed: LRMKWMMAMKYPITA
LRYKWLMAMKLPITA

SEQ ID NO: 219647 - protein, 15 aa, Artificial Sequence
  Description of Artificial Sequence: Synthetic peptide
  Seed: LRMKWMMAMKYPITA
LRYKWLMAMKMPITA

SEQ ID NO: 219648 - protein, 15 aa, Artificial Sequence
  Description of Artificial Sequence: Synthetic peptide
  Seed: LRMKWMMAMKYPITA
LRYKWLMAMKTPITA

SEQ ID NO: 219649 - protein, 15 aa, Artificial Sequence
  Description of Artificial Sequence: Synthetic peptide
  Seed: LRMKWMMAMKYPITA
LRYKWLMAMKVPITA

SEQ ID NO: 219650 - protein, 15 aa, Artificial Sequence
  Description of Artificial Sequence: Synthetic peptide
  Seed: LRMKWMMAMKYPITA
LRYKWLMGMKAPITA

SEQ ID NO: 219651 - protein, 15 aa, Artificial Sequence
  Description of Artificial Sequence: Synthetic peptide
  Seed: LRMKWMMAMKYPITA
LRYKWLMGMKSPITA

SEQ ID NO: 219652 - protein, 15 aa, Artificial Sequence
  Description of Artificial Sequence: Synthetic peptide
  Seed: LRMKWMMAMKYPITA
LRYKWLMGMKVPITA

SEQ ID NO: 219653 - protein, 15 aa, Artificial Sequence
  Description of Artificial Sequence: Synthetic peptide
  Seed: LRMKWMMAMKYPITA
LRYKWLMPMKVPITA

SEQ ID NO: 219654 - protein, 15 aa, Artificial Sequence
  Description of Artificial Sequence: Synthetic peptide
  Seed: LRMKWMMAMKYPITA
LRYKWLMSMKLPITA

SEQ ID NO: 219655 - protein, 15 aa, Artificial Sequence
  Description of Artificial Sequence: Synthetic peptide
  Seed: LRMKWMMAMKYPITA
LRYKWLMSMKTPITA

SEQ ID NO: 219656 - protein, 15 aa, Artificial Sequence
  Description of Artificial Sequence: Synthetic peptide
  Seed: LRMKWMMAMKYPITA
LRYKWLMSMKVPITA

SEQ ID NO: 219657 - protein, 15 aa, Artificial Sequence
  Description of Artificial Sequence: Synthetic peptide
  Seed: LRMKWMMAMKYPITA
LRYKWMMAMKAPITA

SEQ ID NO: 219658 - protein, 15 aa, Artificial Sequence
  Description of Artificial Sequence: Synthetic peptide
  Seed: LRMKWMMAMKYPITA
LRYKWMMAMKIPITA

SEQ ID NO: 219659 - protein, 15 aa, Artificial Sequence
  Description of Artificial Sequence: Synthetic peptide
  Seed: LRMKWMMAMKYPITA
LRYKWMMAMKLPITA

SEQ ID NO: 219660 - protein, 15 aa, Artificial Sequence
  Description of Artificial Sequence: Synthetic peptide
  Seed: LRMKWMMAMKYPITA
LRYKWMMAMKMPITA

SEQ ID NO: 219661 - protein, 15 aa, Artificial Sequence
  Description of Artificial Sequence: Synthetic peptide
  Seed: LRMKWMMAMKYPITA
LRYKWMMAMKSPITA

SEQ ID NO: 219662 - protein, 15 aa, Artificial Sequence
  Description of Artificial Sequence: Synthetic peptide
  Seed: LRMKWMMAMKYPITA
LRYKWMMAMKTPITA

SEQ ID NO: 219663 - protein, 15 aa, Artificial Sequence
  Description of Artificial Sequence: Synthetic peptide
  Seed: LRMKWMMAMKYPITA
LRYKWMMAMKVPITA

SEQ ID NO: 219664 - protein, 15 aa, Artificial Sequence
  Description of Artificial Sequence: Synthetic peptide
  Seed: LRMKWMMAMKYPITA
LRYKWMMGMKAPITA

SEQ ID NO: 219665 - protein, 15 aa, Artificial Sequence
  Description of Artificial Sequence: Synthetic peptide
  Seed: LRMKWMMAMKYPITA
LRYKWMMGMKVPITA

SEQ ID NO: 219666 - protein, 15 aa, Artificial Sequence
  Description of Artificial Sequence: Synthetic peptide
  Seed: LRMKWMMAMKYPITA
LRYKWMMPMKAPITA

SEQ ID NO: 219667 - protein, 15 aa, Artificial Sequence
  Description of Artificial Sequence: Synthetic peptide
  Seed: LRMKWMMAMKYPITA
LRYKWMMSMKLPITA

SEQ ID NO: 219668 - protein, 15 aa, Artificial Sequence
  Description of Artificial Sequence: Synthetic peptide
  Seed: LRMKWMMAMKYPITA
LRYKWMMSMKSPITA

SEQ ID NO: 219669 - protein, 15 aa, Artificial Sequence
  Description of Artificial Sequence: Synthetic peptide
  Seed: LRMKWMMAMKYPITA
LRYKWMMSMKTPITA

SEQ ID NO: 219670 - protein, 15 aa, Artificial Sequence
  Description of Artificial Sequence: Synthetic peptide
  Seed: LRMKWMMAMKYPITA
LRYKWMMSMKVPITA

SEQ ID NO: 219671 - protein, 15 aa, Artificial Sequence
  Description of Artificial Sequence: Synthetic peptide
  Seed: LRMKWMMAMKYPITA
LRYKWMMTMKAPITA

SEQ ID NO: 219672 - protein, 15 aa, Artificial Sequence
  Description of Artificial Sequence: Synthetic peptide
  Seed: LRMKWMMAMKYPITA
LRYKWMMTMKSPITA

SEQ ID NO: 219673 - protein, 15 aa, Artificial Sequence
  Description of Artificial Sequence: Synthetic peptide
  Seed: LRMKWMMAMKYPITA
LRYKWNMFMKIPITA

SEQ ID NO: 219674 - protein, 15 aa, Artificial Sequence
  Description of Artificial Sequence: Synthetic peptide
  Seed: LRMKWMMAMKYPITA
LRYKWNMFMKLPITA

SEQ ID NO: 219675 - protein, 15 aa, Artificial Sequence
  Description of Artificial Sequence: Synthetic peptide
  Seed: LRMKWMMAMKYPITA
LRYKWNMFMKVPITA

SEQ ID NO: 219676 - protein, 15 aa, Artificial Sequence
  Description of Artificial Sequence: Synthetic peptide
  Seed: LRMKWMMAMKYPITA
LRYKWQMFMKIPITA

SEQ ID NO: 219677 - protein, 15 aa, Artificial Sequence
  Description of Artificial Sequence: Synthetic peptide
  Seed: LRMKWMMAMKYPITA
LRYKWQMFMKLPITA

SEQ ID NO: 219678 - protein, 15 aa, Artificial Sequence
  Description of Artificial Sequence: Synthetic peptide
  Seed: LRMKWMMAMKYPITA
LRYKWQMFMKVPITA

SEQ ID NO: 219679 - protein, 15 aa, Artificial Sequence
  Description of Artificial Sequence: Synthetic peptide
  Seed: LRMKWMMAMKYPITA
LRYKWSMFMKAPITA

SEQ ID NO: 219680 - protein, 15 aa, Artificial Sequence
  Description of Artificial Sequence: Synthetic peptide
  Seed: LRMKWMMAMKYPITA
LRYKWSMFMKEPITA

SEQ ID NO: 219681 - protein, 15 aa, Artificial Sequence
  Description of Artificial Sequence: Synthetic peptide
  Seed: LRMKWMMAMKYPITA
LRYKWSMFMKFPITA

SEQ ID NO: 219682 - protein, 15 aa, Artificial Sequence
  Description of Artificial Sequence: Synthetic peptide
  Seed: LRMKWMMAMKYPITA
LRYKWSMFMKIPITA

SEQ ID NO: 219683 - protein, 15 aa, Artificial Sequence
  Description of Artificial Sequence: Synthetic peptide
  Seed: LRMKWMMAMKYPITA
LRYKWSMFMKLPITA

SEQ ID NO: 219684 - protein, 15 aa, Artificial Sequence
  Description of Artificial Sequence: Synthetic peptide
  Seed: LRMKWMMAMKYPITA
LRYKWSMFMKMPITA

SEQ ID NO: 219685 - protein, 15 aa, Artificial Sequence
  Description of Artificial Sequence: Synthetic peptide
  Seed: LRMKWMMAMKYPITA
LRYKWSMFMKTPITA

SEQ ID NO: 219686 - protein, 15 aa, Artificial Sequence
  Description of Artificial Sequence: Synthetic peptide
  Seed: LRMKWMMAMKYPITA
LRYKWSMFMKVPITA

SEQ ID NO: 219687 - protein, 15 aa, Artificial Sequence
  Description of Artificial Sequence: Synthetic peptide
  Seed: LRMKWMMAMKYPITA
LRYKWSMLMKIPITA

SEQ ID NO: 219688 - protein, 15 aa, Artificial Sequence
  Description of Artificial Sequence: Synthetic peptide
  Seed: LRMKWMMAMKYPITA
LRYKWSMLMKLPITA

SEQ ID NO: 219689 - protein, 15 aa, Artificial Sequence
  Description of Artificial Sequence: Synthetic peptide
  Seed: LRMKWMMAMKYPITA
LRYKWSMLMKVPITA

SEQ ID NO: 219690 - protein, 15 aa, Artificial Sequence
  Description of Artificial Sequence: Synthetic peptide
  Seed: LRMKWMMAMKYPITA
LRYKWTMFMKAPITA

SEQ ID NO: 219691 - protein, 15 aa, Artificial Sequence
  Description of Artificial Sequence: Synthetic peptide
  Seed: LRMKWMMAMKYPITA
LRYKWTMFMKDPITA

SEQ ID NO: 219692 - protein, 15 aa, Artificial Sequence
  Description of Artificial Sequence: Synthetic peptide
  Seed: LRMKWMMAMKYPITA
LRYKWTMFMKEPITA

SEQ ID NO: 219693 - protein, 15 aa, Artificial Sequence
  Description of Artificial Sequence: Synthetic peptide
  Seed: LRMKWMMAMKYPITA
LRYKWTMFMKFPITA

SEQ ID NO: 219694 - protein, 15 aa, Artificial Sequence
  Description of Artificial Sequence: Synthetic peptide
  Seed: LRMKWMMAMKYPITA
LRYKWTMFMKIPITA

SEQ ID NO: 219695 - protein, 15 aa, Artificial Sequence
  Description of Artificial Sequence: Synthetic peptide
  Seed: LRMKWMMAMKYPITA
LRYKWTMFMKLPITA

SEQ ID NO: 219696 - protein, 15 aa, Artificial Sequence
  Description of Artificial Sequence: Synthetic peptide
  Seed: LRMKWMMAMKYPITA
LRYKWTMFMKMPITA

SEQ ID NO: 219697 - protein, 15 aa, Artificial Sequence
  Description of Artificial Sequence: Synthetic peptide
  Seed: LRMKWMMAMKYPITA
LRYKWTMFMKNPITA

SEQ ID NO: 219698 - protein, 15 aa, Artificial Sequence
  Description of Artificial Sequence: Synthetic peptide
  Seed: LRMKWMMAMKYPITA
LRYKWTMFMKSPITA

SEQ ID NO: 219699 - protein, 15 aa, Artificial Sequence
  Description of Artificial Sequence: Synthetic peptide
  Seed: LRMKWMMAMKYPITA
LRYKWTMFMKTPITA

SEQ ID NO: 219700 - protein, 15 aa, Artificial Sequence
  Description of Artificial Sequence: Synthetic peptide
  Seed: LRMKWMMAMKYPITA
LRYKWTMFMKVPITA

SEQ ID NO: 219701 - protein, 15 aa, Artificial Sequence
  Description of Artificial Sequence: Synthetic peptide
  Seed: LRMKWMMAMKYPITA
LRYKWTMFMKYPITA

SEQ ID NO: 219702 - protein, 15 aa, Artificial Sequence
  Description of Artificial Sequence: Synthetic peptide
  Seed: LRMKWMMAMKYPITA
LRYKWTMIMKLPITA

SEQ ID NO: 219703 - protein, 15 aa, Artificial Sequence
  Description of Artificial Sequence: Synthetic peptide
  Seed: LRMKWMMAMKYPITA
LRYKWTMLMKIPITA

SEQ ID NO: 219704 - protein, 15 aa, Artificial Sequence
  Description of Artificial Sequence: Synthetic peptide
  Seed: LRMKWMMAMKYPITA
LRYKWTMLMKLPITA

SEQ ID NO: 219705 - protein, 15 aa, Artificial Sequence
  Description of Artificial Sequence: Synthetic peptide
  Seed: LRMKWMMAMKYPITA
LRYKWTMLMKVPITA

SEQ ID NO: 219706 - protein, 15 aa, Artificial Sequence
  Description of Artificial Sequence: Synthetic peptide
  Seed: LRMKWMMAMKYPITA
LRYKWTMYMKIPITA

SEQ ID NO: 219707 - protein, 15 aa, Artificial Sequence
  Description of Artificial Sequence: Synthetic peptide
  Seed: LRMKWMMAMKYPITA
LRYKWTMYMKLPITA

SEQ ID NO: 219708 - protein, 15 aa, Artificial Sequence
  Description of Artificial Sequence: Synthetic peptide
  Seed: LRMKWMMAMKYPITA
LRYKWTMYMKVPITA

SEQ ID NO: 219709 - protein, 15 aa, Artificial Sequence
  Description of Artificial Sequence: Synthetic peptide
  Seed: LRMKWMMAMKYPITA
LRYKWYMNMKAPITA

SEQ ID NO: 219710 - protein, 15 aa, Artificial Sequence
  Description of Artificial Sequence: Synthetic peptide
  Seed: LRMKWMMAMKYPITA
LRYKWYMNMKIPITA

SEQ ID NO: 219711 - protein, 15 aa, Artificial Sequence
  Description of Artificial Sequence: Synthetic peptide
  Seed: LRMKWMMAMKYPITA
LRYKWYMNMKLPITA

SEQ ID NO: 219712 - protein, 15 aa, Artificial Sequence
  Description of Artificial Sequence: Synthetic peptide
  Seed: LRMKWMMAMKYPITA
LRYKWYMNMKVPITA

SEQ ID NO: 219713 - protein, 15 aa, Artificial Sequence
  Description of Artificial Sequence: Synthetic peptide
  Seed: LRMKWMMAMKYPITA
LRYKWYMSMKAPITA

SEQ ID NO: 219714 - protein, 15 aa, Artificial Sequence
  Description of Artificial Sequence: Synthetic peptide
  Seed: LRMKWMMAMKYPITA
LRYKWYMSMKIPITA

SEQ ID NO: 219715 - protein, 15 aa, Artificial Sequence
  Description of Artificial Sequence: Synthetic peptide
  Seed: LRMKWMMAMKYPITA
LRYKWYMSMKLPITA

SEQ ID NO: 219716 - protein, 15 aa, Artificial Sequence
  Description of Artificial Sequence: Synthetic peptide
  Seed: LRMKWMMAMKYPITA
LRYKWYMSMKSPITA

SEQ ID NO: 219717 - protein, 15 aa, Artificial Sequence
  Description of Artificial Sequence: Synthetic peptide
  Seed: LRMKWMMAMKYPITA
LRYKWYMSMKTPITA

SEQ ID NO: 219718 - protein, 15 aa, Artificial Sequence
  Description of Artificial Sequence: Synthetic peptide
  Seed: LRMKWMMAMKYPITA
LRYKWYMSMKVPITA

SEQ ID NO: 219719 - protein, 15 aa, Artificial Sequence
  Description of Artificial Sequence: Synthetic peptide
  Seed: LRMKWMMAMKYPITA
LRMKWAMALKFPIVA

SEQ ID NO: 219720 - protein, 15 aa, Artificial Sequence
  Description of Artificial Sequence: Synthetic peptide
  Seed: LRMKWMMAMKYPITA
LRMKWFMAAKFPIAA

SEQ ID NO: 219721 - protein, 15 aa, Artificial Sequence
  Description of Artificial Sequence: Synthetic peptide
  Seed: LRMKWMMAMKYPITA
LRMKWFMAAKFPICA

SEQ ID NO: 219722 - protein, 15 aa, Artificial Sequence
  Description of Artificial Sequence: Synthetic peptide
  Seed: LRMKWMMAMKYPITA
LRMKWFMAAKFPIDA

SEQ ID NO: 219723 - protein, 15 aa, Artificial Sequence
  Description of Artificial Sequence: Synthetic peptide
  Seed: LRMKWMMAMKYPITA
LRMKWFMAAKFPIEA

SEQ ID NO: 219724 - protein, 15 aa, Artificial Sequence
  Description of Artificial Sequence: Synthetic peptide
  Seed: LRMKWMMAMKYPITA
LRMKWFMAAKFPIFA

SEQ ID NO: 219725 - protein, 15 aa, Artificial Sequence
  Description of Artificial Sequence: Synthetic peptide
  Seed: LRMKWMMAMKYPITA
LRMKWFMAAKFPIIA

SEQ ID NO: 219726 - protein, 15 aa, Artificial Sequence
  Description of Artificial Sequence: Synthetic peptide
  Seed: LRMKWMMAMKYPITA
LRMKWFMAAKFPILA

SEQ ID NO: 219727 - protein, 15 aa, Artificial Sequence
  Description of Artificial Sequence: Synthetic peptide
  Seed: LRMKWMMAMKYPITA
LRMKWFMAAKFPIMA

SEQ ID NO: 219728 - protein, 15 aa, Artificial Sequence
  Description of Artificial Sequence: Synthetic peptide
  Seed: LRMKWMMAMKYPITA
LRMKWFMAAKFPINA

SEQ ID NO: 219729 - protein, 15 aa, Artificial Sequence
  Description of Artificial Sequence: Synthetic peptide
  Seed: LRMKWMMAMKYPITA
LRMKWFMAAKFPIPA

SEQ ID NO: 219730 - protein, 15 aa, Artificial Sequence
  Description of Artificial Sequence: Synthetic peptide
  Seed: LRMKWMMAMKYPITA
LRMKWFMAAKFPIQA

SEQ ID NO: 219731 - protein, 15 aa, Artificial Sequence
  Description of Artificial Sequence: Synthetic peptide
  Seed: LRMKWMMAMKYPITA
LRMKWFMAAKFPIRA

SEQ ID NO: 219732 - protein, 15 aa, Artificial Sequence
  Description of Artificial Sequence: Synthetic peptide
  Seed: LRMKWMMAMKYPITA
LRMKWFMAAKFPISA

SEQ ID NO: 219733 - protein, 15 aa, Artificial Sequence
  Description of Artificial Sequence: Synthetic peptide
  Seed: LRMKWMMAMKYPITA
LRMKWFMAAKFPITA

SEQ ID NO: 219734 - protein, 15 aa, Artificial Sequence
  Description of Artificial Sequence: Synthetic peptide
  Seed: LRMKWMMAMKYPITA
LRMKWFMAAKFPIVA

SEQ ID NO: 219735 - protein, 15 aa, Artificial Sequence
  Description of Artificial Sequence: Synthetic peptide
  Seed: LRMKWMMAMKYPITA
LRMKWFMAAKFPIWA

SEQ ID NO: 219736 - protein, 15 aa, Artificial Sequence
  Description of Artificial Sequence: Synthetic peptide
  Seed: LRMKWMMAMKYPITA
LRMKWFMAAKFPIYA

SEQ ID NO: 219737 - protein, 15 aa, Artificial Sequence
  Description of Artificial Sequence: Synthetic peptide
  Seed: LRMKWMMAMKYPITA
LRMKWFMAAKIPIIA

SEQ ID NO: 219738 - protein, 15 aa, Artificial Sequence
  Description of Artificial Sequence: Synthetic peptide
  Seed: LRMKWMMAMKYPITA
LRMKWFMAAKIPILA

SEQ ID NO: 219739 - protein, 15 aa, Artificial Sequence
  Description of Artificial Sequence: Synthetic peptide
  Seed: LRMKWMMAMKYPITA
LRMKWFMAAKIPIVA

SEQ ID NO: 219740 - protein, 15 aa, Artificial Sequence
  Description of Artificial Sequence: Synthetic peptide
  Seed: LRMKWMMAMKYPITA
LRMKWFMAAKLPIFA

SEQ ID NO: 219741 - protein, 15 aa, Artificial Sequence
  Description of Artificial Sequence: Synthetic peptide
  Seed: LRMKWMMAMKYPITA
LRMKWFMAAKLPIIA

SEQ ID NO: 219742 - protein, 15 aa, Artificial Sequence
  Description of Artificial Sequence: Synthetic peptide
  Seed: LRMKWMMAMKYPITA
LRMKWFMAAKLPILA

SEQ ID NO: 219743 - protein, 15 aa, Artificial Sequence
  Description of Artificial Sequence: Synthetic peptide
  Seed: LRMKWMMAMKYPITA
LRMKWFMAAKLPIMA

SEQ ID NO: 219744 - protein, 15 aa, Artificial Sequence
  Description of Artificial Sequence: Synthetic peptide
  Seed: LRMKWMMAMKYPITA
LRMKWFMAAKLPIVA

SEQ ID NO: 219745 - protein, 15 aa, Artificial Sequence
  Description of Artificial Sequence: Synthetic peptide
  Seed: LRMKWMMAMKYPITA
LRMKWFMAAKMPIIA

SEQ ID NO: 219746 - protein, 15 aa, Artificial Sequence
  Description of Artificial Sequence: Synthetic peptide
  Seed: LRMKWMMAMKYPITA
LRMKWFMAAKMPILA

SEQ ID NO: 219747 - protein, 15 aa, Artificial Sequence
  Description of Artificial Sequence: Synthetic peptide
  Seed: LRMKWMMAMKYPITA
LRMKWFMAAKMPIVA

SEQ ID NO: 219748 - protein, 15 aa, Artificial Sequence
  Description of Artificial Sequence: Synthetic peptide
  Seed: LRMKWMMAMKYPITA
LRMKWFMAAKWPIIA

SEQ ID NO: 219749 - protein, 15 aa, Artificial Sequence
  Description of Artificial Sequence: Synthetic peptide
  Seed: LRMKWMMAMKYPITA
LRMKWFMAAKWPILA

SEQ ID NO: 219750 - protein, 15 aa, Artificial Sequence
  Description of Artificial Sequence: Synthetic peptide
  Seed: LRMKWMMAMKYPITA
LRMKWFMAAKWPIVA

SEQ ID NO: 219751 - protein, 15 aa, Artificial Sequence
  Description of Artificial Sequence: Synthetic peptide
  Seed: LRMKWMMAMKYPITA
LRMKWFMAAKYPIFA

SEQ ID NO: 219752 - protein, 15 aa, Artificial Sequence
  Description of Artificial Sequence: Synthetic peptide
  Seed: LRMKWMMAMKYPITA
LRMKWFMAAKYPIIA

SEQ ID NO: 219753 - protein, 15 aa, Artificial Sequence
  Description of Artificial Sequence: Synthetic peptide
  Seed: LRMKWMMAMKYPITA
LRMKWFMAAKYPILA

SEQ ID NO: 219754 - protein, 15 aa, Artificial Sequence
  Description of Artificial Sequence: Synthetic peptide
  Seed: LRMKWMMAMKYPITA
LRMKWFMAAKYPIMA

SEQ ID NO: 219755 - protein, 15 aa, Artificial Sequence
  Description of Artificial Sequence: Synthetic peptide
  Seed: LRMKWMMAMKYPITA
LRMKWFMAAKYPIVA

SEQ ID NO: 219756 - protein, 15 aa, Artificial Sequence
  Description of Artificial Sequence: Synthetic peptide
  Seed: LRMKWMMAMKYPITA
LRMKWFMACKFPIFA

SEQ ID NO: 219757 - protein, 15 aa, Artificial Sequence
  Description of Artificial Sequence: Synthetic peptide
  Seed: LRMKWMMAMKYPITA
LRMKWFMACKFPIIA

SEQ ID NO: 219758 - protein, 15 aa, Artificial Sequence
  Description of Artificial Sequence: Synthetic peptide
  Seed: LRMKWMMAMKYPITA
LRMKWFMACKFPILA

SEQ ID NO: 219759 - protein, 15 aa, Artificial Sequence
  Description of Artificial Sequence: Synthetic peptide
  Seed: LRMKWMMAMKYPITA
LRMKWFMACKFPIMA

SEQ ID NO: 219760 - protein, 15 aa, Artificial Sequence
  Description of Artificial Sequence: Synthetic peptide
  Seed: LRMKWMMAMKYPITA
LRMKWFMACKFPIVA

SEQ ID NO: 219761 - protein, 15 aa, Artificial Sequence
  Description of Artificial Sequence: Synthetic peptide
  Seed: LRMKWMMAMKYPITA
LRMKWFMADKFPIAA

SEQ ID NO: 219762 - protein, 15 aa, Artificial Sequence
  Description of Artificial Sequence: Synthetic peptide
  Seed: LRMKWMMAMKYPITA
LRMKWFMADKFPIFA

SEQ ID NO: 219763 - protein, 15 aa, Artificial Sequence
  Description of Artificial Sequence: Synthetic peptide
  Seed: LRMKWMMAMKYPITA
LRMKWFMADKFPIIA

SEQ ID NO: 219764 - protein, 15 aa, Artificial Sequence
  Description of Artificial Sequence: Synthetic peptide
  Seed: LRMKWMMAMKYPITA
LRMKWFMADKFPILA

SEQ ID NO: 219765 - protein, 15 aa, Artificial Sequence
  Description of Artificial Sequence: Synthetic peptide
  Seed: LRMKWMMAMKYPITA
LRMKWFMADKFPIMA

SEQ ID NO: 219766 - protein, 15 aa, Artificial Sequence
  Description of Artificial Sequence: Synthetic peptide
  Seed: LRMKWMMAMKYPITA
LRMKWFMADKFPITA

SEQ ID NO: 219767 - protein, 15 aa, Artificial Sequence
  Description of Artificial Sequence: Synthetic peptide
  Seed: LRMKWMMAMKYPITA
LRMKWFMADKFPIVA

SEQ ID NO: 219768 - protein, 15 aa, Artificial Sequence
  Description of Artificial Sequence: Synthetic peptide
  Seed: LRMKWMMAMKYPITA
LRMKWFMADKLPIIA

SEQ ID NO: 219769 - protein, 15 aa, Artificial Sequence
  Description of Artificial Sequence: Synthetic peptide
  Seed: LRMKWMMAMKYPITA
LRMKWFMADKLPILA

SEQ ID NO: 219770 - protein, 15 aa, Artificial Sequence
  Description of Artificial Sequence: Synthetic peptide
  Seed: LRMKWMMAMKYPITA
LRMKWFMADKLPIVA

SEQ ID NO: 219771 - protein, 15 aa, Artificial Sequence
  Description of Artificial Sequence: Synthetic peptide
  Seed: LRMKWMMAMKYPITA
LRMKWFMAEKFPIAA

SEQ ID NO: 219772 - protein, 15 aa, Artificial Sequence
  Description of Artificial Sequence: Synthetic peptide
  Seed: LRMKWMMAMKYPITA
LRMKWFMAEKFPICA

SEQ ID NO: 219773 - protein, 15 aa, Artificial Sequence
  Description of Artificial Sequence: Synthetic peptide
  Seed: LRMKWMMAMKYPITA
LRMKWFMAEKFPIDA

SEQ ID NO: 219774 - protein, 15 aa, Artificial Sequence
  Description of Artificial Sequence: Synthetic peptide
  Seed: LRMKWMMAMKYPITA
LRMKWFMAEKFPIEA

SEQ ID NO: 219775 - protein, 15 aa, Artificial Sequence
  Description of Artificial Sequence: Synthetic peptide
  Seed: LRMKWMMAMKYPITA
LRMKWFMAEKFPIFA

SEQ ID NO: 219776 - protein, 15 aa, Artificial Sequence
  Description of Artificial Sequence: Synthetic peptide
  Seed: LRMKWMMAMKYPITA
LRMKWFMAEKFPIGA

SEQ ID NO: 219777 - protein, 15 aa, Artificial Sequence
  Description of Artificial Sequence: Synthetic peptide
  Seed: LRMKWMMAMKYPITA
LRMKWFMAEKFPIHA

SEQ ID NO: 219778 - protein, 15 aa, Artificial Sequence
  Description of Artificial Sequence: Synthetic peptide
  Seed: LRMKWMMAMKYPITA
LRMKWFMAEKFPIIA

SEQ ID NO: 219779 - protein, 15 aa, Artificial Sequence
  Description of Artificial Sequence: Synthetic peptide
  Seed: LRMKWMMAMKYPITA
LRMKWFMAEKFPIKA

SEQ ID NO: 219780 - protein, 15 aa, Artificial Sequence
  Description of Artificial Sequence: Synthetic peptide
  Seed: LRMKWMMAMKYPITA
LRMKWFMAEKFPILA

SEQ ID NO: 219781 - protein, 15 aa, Artificial Sequence
  Description of Artificial Sequence: Synthetic peptide
  Seed: LRMKWMMAMKYPITA
LRMKWFMAEKFPIMA

SEQ ID NO: 219782 - protein, 15 aa, Artificial Sequence
  Description of Artificial Sequence: Synthetic peptide
  Seed: LRMKWMMAMKYPITA
LRMKWFMAEKFPINA

SEQ ID NO: 219783 - protein, 15 aa, Artificial Sequence
  Description of Artificial Sequence: Synthetic peptide
  Seed: LRMKWMMAMKYPITA
LRMKWFMAEKFPIPA

SEQ ID NO: 219784 - protein, 15 aa, Artificial Sequence
  Description of Artificial Sequence: Synthetic peptide
  Seed: LRMKWMMAMKYPITA
LRMKWFMAEKFPIQA

SEQ ID NO: 219785 - protein, 15 aa, Artificial Sequence
  Description of Artificial Sequence: Synthetic peptide
  Seed: LRMKWMMAMKYPITA
LRMKWFMAEKFPIRA

SEQ ID NO: 219786 - protein, 15 aa, Artificial Sequence
  Description of Artificial Sequence: Synthetic peptide
  Seed: LRMKWMMAMKYPITA
LRMKWFMAEKFPISA

SEQ ID NO: 219787 - protein, 15 aa, Artificial Sequence
  Description of Artificial Sequence: Synthetic peptide
  Seed: LRMKWMMAMKYPITA
LRMKWFMAEKFPITA

SEQ ID NO: 219788 - protein, 15 aa, Artificial Sequence
  Description of Artificial Sequence: Synthetic peptide
  Seed: LRMKWMMAMKYPITA
LRMKWFMAEKFPIVA

SEQ ID NO: 219789 - protein, 15 aa, Artificial Sequence
  Description of Artificial Sequence: Synthetic peptide
  Seed: LRMKWMMAMKYPITA
LRMKWFMAEKFPIWA

SEQ ID NO: 219790 - protein, 15 aa, Artificial Sequence
  Description of Artificial Sequence: Synthetic peptide
  Seed: LRMKWMMAMKYPITA
LRMKWFMAEKFPIYA

SEQ ID NO: 219791 - protein, 15 aa, Artificial Sequence
  Description of Artificial Sequence: Synthetic peptide
  Seed: LRMKWMMAMKYPITA
LRMKWFMAEKIPIIA

SEQ ID NO: 219792 - protein, 15 aa, Artificial Sequence
  Description of Artificial Sequence: Synthetic peptide
  Seed: LRMKWMMAMKYPITA
LRMKWFMAEKIPILA

SEQ ID NO: 219793 - protein, 15 aa, Artificial Sequence
  Description of Artificial Sequence: Synthetic peptide
  Seed: LRMKWMMAMKYPITA
LRMKWFMAEKIPIVA

SEQ ID NO: 219794 - protein, 15 aa, Artificial Sequence
  Description of Artificial Sequence: Synthetic peptide
  Seed: LRMKWMMAMKYPITA
LRMKWFMAEKLPIAA

SEQ ID NO: 219795 - protein, 15 aa, Artificial Sequence
  Description of Artificial Sequence: Synthetic peptide
  Seed: LRMKWMMAMKYPITA
LRMKWFMAEKLPIDA

SEQ ID NO: 219796 - protein, 15 aa, Artificial Sequence
  Description of Artificial Sequence: Synthetic peptide
  Seed: LRMKWMMAMKYPITA
LRMKWFMAEKLPIFA

SEQ ID NO: 219797 - protein, 15 aa, Artificial Sequence
  Description of Artificial Sequence: Synthetic peptide
  Seed: LRMKWMMAMKYPITA
LRMKWFMAEKLPIIA

SEQ ID NO: 219798 - protein, 15 aa, Artificial Sequence
  Description of Artificial Sequence: Synthetic peptide
  Seed: LRMKWMMAMKYPITA
LRMKWFMAEKLPILA

SEQ ID NO: 219799 - protein, 15 aa, Artificial Sequence
  Description of Artificial Sequence: Synthetic peptide
  Seed: LRMKWMMAMKYPITA
LRMKWFMAEKLPIMA

SEQ ID NO: 219800 - protein, 15 aa, Artificial Sequence
  Description of Artificial Sequence: Synthetic peptide
  Seed: LRMKWMMAMKYPITA
LRMKWFMAEKLPINA

SEQ ID NO: 219801 - protein, 15 aa, Artificial Sequence
  Description of Artificial Sequence: Synthetic peptide
  Seed: LRMKWMMAMKYPITA
LRMKWFMAEKLPISA

SEQ ID NO: 219802 - protein, 15 aa, Artificial Sequence
  Description of Artificial Sequence: Synthetic peptide
  Seed: LRMKWMMAMKYPITA
LRMKWFMAEKLPITA

SEQ ID NO: 219803 - protein, 15 aa, Artificial Sequence
  Description of Artificial Sequence: Synthetic peptide
  Seed: LRMKWMMAMKYPITA
LRMKWFMAEKLPIVA

SEQ ID NO: 219804 - protein, 15 aa, Artificial Sequence
  Description of Artificial Sequence: Synthetic peptide
  Seed: LRMKWMMAMKYPITA
LRMKWFMAEKMPIIA

SEQ ID NO: 219805 - protein, 15 aa, Artificial Sequence
  Description of Artificial Sequence: Synthetic peptide
  Seed: LRMKWMMAMKYPITA
LRMKWFMAEKMPILA

SEQ ID NO: 219806 - protein, 15 aa, Artificial Sequence
  Description of Artificial Sequence: Synthetic peptide
  Seed: LRMKWMMAMKYPITA
LRMKWFMAEKMPIMA

SEQ ID NO: 219807 - protein, 15 aa, Artificial Sequence
  Description of Artificial Sequence: Synthetic peptide
  Seed: LRMKWMMAMKYPITA
LRMKWFMAEKMPIVA

SEQ ID NO: 219808 - protein, 15 aa, Artificial Sequence
  Description of Artificial Sequence: Synthetic peptide
  Seed: LRMKWMMAMKYPITA
LRMKWFMAEKVPIIA

SEQ ID NO: 219809 - protein, 15 aa, Artificial Sequence
  Description of Artificial Sequence: Synthetic peptide
  Seed: LRMKWMMAMKYPITA
LRMKWFMAEKVPIVA

SEQ ID NO: 219810 - protein, 15 aa, Artificial Sequence
  Description of Artificial Sequence: Synthetic peptide
  Seed: LRMKWMMAMKYPITA
LRMKWFMAEKWPIFA

SEQ ID NO: 219811 - protein, 15 aa, Artificial Sequence
  Description of Artificial Sequence: Synthetic peptide
  Seed: LRMKWMMAMKYPITA
LRMKWFMAEKWPIIA

SEQ ID NO: 219812 - protein, 15 aa, Artificial Sequence
  Description of Artificial Sequence: Synthetic peptide
  Seed: LRMKWMMAMKYPITA
LRMKWFMAEKWPILA

SEQ ID NO: 219813 - protein, 15 aa, Artificial Sequence
  Description of Artificial Sequence: Synthetic peptide
  Seed: LRMKWMMAMKYPITA
LRMKWFMAEKWPIMA

SEQ ID NO: 219814 - protein, 15 aa, Artificial Sequence
  Description of Artificial Sequence: Synthetic peptide
  Seed: LRMKWMMAMKYPITA
LRMKWFMAEKWPIVA

SEQ ID NO: 219815 - protein, 15 aa, Artificial Sequence
  Description of Artificial Sequence: Synthetic peptide
  Seed: LRMKWMMAMKYPITA
LRMKWFMAEKYPIFA

SEQ ID NO: 219816 - protein, 15 aa, Artificial Sequence
  Description of Artificial Sequence: Synthetic peptide
  Seed: LRMKWMMAMKYPITA
LRMKWFMAEKYPIIA

SEQ ID NO: 219817 - protein, 15 aa, Artificial Sequence
  Description of Artificial Sequence: Synthetic peptide
  Seed: LRMKWMMAMKYPITA
LRMKWFMAEKYPILA

SEQ ID NO: 219818 - protein, 15 aa, Artificial Sequence
  Description of Artificial Sequence: Synthetic peptide
  Seed: LRMKWMMAMKYPITA
LRMKWFMAEKYPIMA

SEQ ID NO: 219819 - protein, 15 aa, Artificial Sequence
  Description of Artificial Sequence: Synthetic peptide
  Seed: LRMKWMMAMKYPITA
LRMKWFMAEKYPIVA

SEQ ID NO: 219820 - protein, 15 aa, Artificial Sequence
  Description of Artificial Sequence: Synthetic peptide
  Seed: LRMKWMMAMKYPITA
LRMKWFMAFKAPIIA

SEQ ID NO: 219821 - protein, 15 aa, Artificial Sequence
  Description of Artificial Sequence: Synthetic peptide
  Seed: LRMKWMMAMKYPITA
LRMKWFMAFKAPILA

SEQ ID NO: 219822 - protein, 15 aa, Artificial Sequence
  Description of Artificial Sequence: Synthetic peptide
  Seed: LRMKWMMAMKYPITA
LRMKWFMAFKAPIVA

SEQ ID NO: 219823 - protein, 15 aa, Artificial Sequence
  Description of Artificial Sequence: Synthetic peptide
  Seed: LRMKWMMAMKYPITA
LRMKWFMAFKFPIAA

SEQ ID NO: 219824 - protein, 15 aa, Artificial Sequence
  Description of Artificial Sequence: Synthetic peptide
  Seed: LRMKWMMAMKYPITA
LRMKWFMAFKFPICA

SEQ ID NO: 219825 - protein, 15 aa, Artificial Sequence
  Description of Artificial Sequence: Synthetic peptide
  Seed: LRMKWMMAMKYPITA
LRMKWFMAFKFPIDA

SEQ ID NO: 219826 - protein, 15 aa, Artificial Sequence
  Description of Artificial Sequence: Synthetic peptide
  Seed: LRMKWMMAMKYPITA
LRMKWFMAFKFPIEA

SEQ ID NO: 219827 - protein, 15 aa, Artificial Sequence
  Description of Artificial Sequence: Synthetic peptide
  Seed: LRMKWMMAMKYPITA
LRMKWFMAFKFPIFA

SEQ ID NO: 219828 - protein, 15 aa, Artificial Sequence
  Description of Artificial Sequence: Synthetic peptide
  Seed: LRMKWMMAMKYPITA
LRMKWFMAFKFPIGA

SEQ ID NO: 219829 - protein, 15 aa, Artificial Sequence
  Description of Artificial Sequence: Synthetic peptide
  Seed: LRMKWMMAMKYPITA
LRMKWFMAFKFPIHA

SEQ ID NO: 219830 - protein, 15 aa, Artificial Sequence
  Description of Artificial Sequence: Synthetic peptide
  Seed: LRMKWMMAMKYPITA
LRMKWFMAFKFPIIA

SEQ ID NO: 219831 - protein, 15 aa, Artificial Sequence
  Description of Artificial Sequence: Synthetic peptide
  Seed: LRMKWMMAMKYPITA
LRMKWFMAFKFPIKA

SEQ ID NO: 219832 - protein, 15 aa, Artificial Sequence
  Description of Artificial Sequence: Synthetic peptide
  Seed: LRMKWMMAMKYPITA
LRMKWFMAFKFPILA

SEQ ID NO: 219833 - protein, 15 aa, Artificial Sequence
  Description of Artificial Sequence: Synthetic peptide
  Seed: LRMKWMMAMKYPITA
LRMKWFMAFKFPIMA

SEQ ID NO: 219834 - protein, 15 aa, Artificial Sequence
  Description of Artificial Sequence: Synthetic peptide
  Seed: LRMKWMMAMKYPITA
LRMKWFMAFKFPINA

SEQ ID NO: 219835 - protein, 15 aa, Artificial Sequence
  Description of Artificial Sequence: Synthetic peptide
  Seed: LRMKWMMAMKYPITA
LRMKWFMAFKFPIPA

SEQ ID NO: 219836 - protein, 15 aa, Artificial Sequence
  Description of Artificial Sequence: Synthetic peptide
  Seed: LRMKWMMAMKYPITA
LRMKWFMAFKFPIQA

SEQ ID NO: 219837 - protein, 15 aa, Artificial Sequence
  Description of Artificial Sequence: Synthetic peptide
  Seed: LRMKWMMAMKYPITA
LRMKWFMAFKFPIRA

SEQ ID NO: 219838 - protein, 15 aa, Artificial Sequence
  Description of Artificial Sequence: Synthetic peptide
  Seed: LRMKWMMAMKYPITA
LRMKWFMAFKFPISA

SEQ ID NO: 219839 - protein, 15 aa, Artificial Sequence
  Description of Artificial Sequence: Synthetic peptide
  Seed: LRMKWMMAMKYPITA
LRMKWFMAFKFPITA

SEQ ID NO: 219840 - protein, 15 aa, Artificial Sequence
  Description of Artificial Sequence: Synthetic peptide
  Seed: LRMKWMMAMKYPITA
LRMKWFMAFKFPIVA

SEQ ID NO: 219841 - protein, 15 aa, Artificial Sequence
  Description of Artificial Sequence: Synthetic peptide
  Seed: LRMKWMMAMKYPITA
LRMKWFMAFKFPIWA

SEQ ID NO: 219842 - protein, 15 aa, Artificial Sequence
  Description of Artificial Sequence: Synthetic peptide
  Seed: LRMKWMMAMKYPITA
LRMKWFMAFKFPIYA

SEQ ID NO: 219843 - protein, 15 aa, Artificial Sequence
  Description of Artificial Sequence: Synthetic peptide
  Seed: LRMKWMMAMKYPITA
LRMKWFMAFKIPIAA

SEQ ID NO: 219844 - protein, 15 aa, Artificial Sequence
  Description of Artificial Sequence: Synthetic peptide
  Seed: LRMKWMMAMKYPITA
LRMKWFMAFKIPIFA

SEQ ID NO: 219845 - protein, 15 aa, Artificial Sequence
  Description of Artificial Sequence: Synthetic peptide
  Seed: LRMKWMMAMKYPITA
LRMKWFMAFKIPIIA

SEQ ID NO: 219846 - protein, 15 aa, Artificial Sequence
  Description of Artificial Sequence: Synthetic peptide
  Seed: LRMKWMMAMKYPITA
LRMKWFMAFKIPILA

SEQ ID NO: 219847 - protein, 15 aa, Artificial Sequence
  Description of Artificial Sequence: Synthetic peptide
  Seed: LRMKWMMAMKYPITA
LRMKWFMAFKIPIMA

SEQ ID NO: 219848 - protein, 15 aa, Artificial Sequence
  Description of Artificial Sequence: Synthetic peptide
  Seed: LRMKWMMAMKYPITA
LRMKWFMAFKIPINA

SEQ ID NO: 219849 - protein, 15 aa, Artificial Sequence
  Description of Artificial Sequence: Synthetic peptide
  Seed: LRMKWMMAMKYPITA
LRMKWFMAFKIPITA

SEQ ID NO: 219850 - protein, 15 aa, Artificial Sequence
  Description of Artificial Sequence: Synthetic peptide
  Seed: LRMKWMMAMKYPITA
LRMKWFMAFKIPIVA

SEQ ID NO: 219851 - protein, 15 aa, Artificial Sequence
  Description of Artificial Sequence: Synthetic peptide
  Seed: LRMKWMMAMKYPITA
LRMKWFMAFKIPIYA

SEQ ID NO: 219852 - protein, 15 aa, Artificial Sequence
  Description of Artificial Sequence: Synthetic peptide
  Seed: LRMKWMMAMKYPITA
LRMKWFMAFKLPIAA

SEQ ID NO: 219853 - protein, 15 aa, Artificial Sequence
  Description of Artificial Sequence: Synthetic peptide
  Seed: LRMKWMMAMKYPITA
LRMKWFMAFKLPIDA

SEQ ID NO: 219854 - protein, 15 aa, Artificial Sequence
  Description of Artificial Sequence: Synthetic peptide
  Seed: LRMKWMMAMKYPITA
LRMKWFMAFKLPIFA

SEQ ID NO: 219855 - protein, 15 aa, Artificial Sequence
  Description of Artificial Sequence: Synthetic peptide
  Seed: LRMKWMMAMKYPITA
LRMKWFMAFKLPIIA

SEQ ID NO: 219856 - protein, 15 aa, Artificial Sequence
  Description of Artificial Sequence: Synthetic peptide
  Seed: LRMKWMMAMKYPITA
LRMKWFMAFKLPILA

SEQ ID NO: 219857 - protein, 15 aa, Artificial Sequence
  Description of Artificial Sequence: Synthetic peptide
  Seed: LRMKWMMAMKYPITA
LRMKWFMAFKLPIMA

SEQ ID NO: 219858 - protein, 15 aa, Artificial Sequence
  Description of Artificial Sequence: Synthetic peptide
  Seed: LRMKWMMAMKYPITA
LRMKWFMAFKLPINA

SEQ ID NO: 219859 - protein, 15 aa, Artificial Sequence
  Description of Artificial Sequence: Synthetic peptide
  Seed: LRMKWMMAMKYPITA
LRMKWFMAFKLPISA

SEQ ID NO: 219860 - protein, 15 aa, Artificial Sequence
  Description of Artificial Sequence: Synthetic peptide
  Seed: LRMKWMMAMKYPITA
LRMKWFMAFKLPITA

SEQ ID NO: 219861 - protein, 15 aa, Artificial Sequence
  Description of Artificial Sequence: Synthetic peptide
  Seed: LRMKWMMAMKYPITA
LRMKWFMAFKLPIVA

SEQ ID NO: 219862 - protein, 15 aa, Artificial Sequence
  Description of Artificial Sequence: Synthetic peptide
  Seed: LRMKWMMAMKYPITA
LRMKWFMAFKLPIYA

SEQ ID NO: 219863 - protein, 15 aa, Artificial Sequence
  Description of Artificial Sequence: Synthetic peptide
  Seed: LRMKWMMAMKYPITA
LRMKWFMAFKMPIAA

SEQ ID NO: 219864 - protein, 15 aa, Artificial Sequence
  Description of Artificial Sequence: Synthetic peptide
  Seed: LRMKWMMAMKYPITA
LRMKWFMAFKMPIDA

SEQ ID NO: 219865 - protein, 15 aa, Artificial Sequence
  Description of Artificial Sequence: Synthetic peptide
  Seed: LRMKWMMAMKYPITA
LRMKWFMAFKMPIFA

SEQ ID NO: 219866 - protein, 15 aa, Artificial Sequence
  Description of Artificial Sequence: Synthetic peptide
  Seed: LRMKWMMAMKYPITA
LRMKWFMAFKMPIIA

SEQ ID NO: 219867 - protein, 15 aa, Artificial Sequence
  Description of Artificial Sequence: Synthetic peptide
  Seed: LRMKWMMAMKYPITA
LRMKWFMAFKMPILA

SEQ ID NO: 219868 - protein, 15 aa, Artificial Sequence
  Description of Artificial Sequence: Synthetic peptide
  Seed: LRMKWMMAMKYPITA
LRMKWFMAFKMPIMA

SEQ ID NO: 219869 - protein, 15 aa, Artificial Sequence
  Description of Artificial Sequence: Synthetic peptide
  Seed: LRMKWMMAMKYPITA
LRMKWFMAFKMPINA

SEQ ID NO: 219870 - protein, 15 aa, Artificial Sequence
  Description of Artificial Sequence: Synthetic peptide
  Seed: LRMKWMMAMKYPITA
LRMKWFMAFKMPISA

SEQ ID NO: 219871 - protein, 15 aa, Artificial Sequence
  Description of Artificial Sequence: Synthetic peptide
  Seed: LRMKWMMAMKYPITA
LRMKWFMAFKMPITA

SEQ ID NO: 219872 - protein, 15 aa, Artificial Sequence
  Description of Artificial Sequence: Synthetic peptide
  Seed: LRMKWMMAMKYPITA
LRMKWFMAFKMPIVA

SEQ ID NO: 219873 - protein, 15 aa, Artificial Sequence
  Description of Artificial Sequence: Synthetic peptide
  Seed: LRMKWMMAMKYPITA
LRMKWFMAFKMPIYA

SEQ ID NO: 219874 - protein, 15 aa, Artificial Sequence
  Description of Artificial Sequence: Synthetic peptide
  Seed: LRMKWMMAMKYPITA
LRMKWFMAFKVPIIA

SEQ ID NO: 219875 - protein, 15 aa, Artificial Sequence
  Description of Artificial Sequence: Synthetic peptide
  Seed: LRMKWMMAMKYPITA
LRMKWFMAFKVPILA

SEQ ID NO: 219876 - protein, 15 aa, Artificial Sequence
  Description of Artificial Sequence: Synthetic peptide
  Seed: LRMKWMMAMKYPITA
LRMKWFMAFKVPIMA

SEQ ID NO: 219877 - protein, 15 aa, Artificial Sequence
  Description of Artificial Sequence: Synthetic peptide
  Seed: LRMKWMMAMKYPITA
LRMKWFMAFKVPIVA

SEQ ID NO: 219878 - protein, 15 aa, Artificial Sequence
  Description of Artificial Sequence: Synthetic peptide
  Seed: LRMKWMMAMKYPITA
LRMKWFMAFKWPIFA

SEQ ID NO: 219879 - protein, 15 aa, Artificial Sequence
  Description of Artificial Sequence: Synthetic peptide
  Seed: LRMKWMMAMKYPITA
LRMKWFMAFKWPIIA

SEQ ID NO: 219880 - protein, 15 aa, Artificial Sequence
  Description of Artificial Sequence: Synthetic peptide
  Seed: LRMKWMMAMKYPITA
LRMKWFMAFKWPILA

SEQ ID NO: 219881 - protein, 15 aa, Artificial Sequence
  Description of Artificial Sequence: Synthetic peptide
  Seed: LRMKWMMAMKYPITA
LRMKWFMAFKWPIMA

SEQ ID NO: 219882 - protein, 15 aa, Artificial Sequence
  Description of Artificial Sequence: Synthetic peptide
  Seed: LRMKWMMAMKYPITA
LRMKWFMAFKWPIVA

SEQ ID NO: 219883 - protein, 15 aa, Artificial Sequence
  Description of Artificial Sequence: Synthetic peptide
  Seed: LRMKWMMAMKYPITA
LRMKWFMAFKWPIYA

SEQ ID NO: 219884 - protein, 15 aa, Artificial Sequence
  Description of Artificial Sequence: Synthetic peptide
  Seed: LRMKWMMAMKYPITA
LRMKWFMAFKYPIAA

SEQ ID NO: 219885 - protein, 15 aa, Artificial Sequence
  Description of Artificial Sequence: Synthetic peptide
  Seed: LRMKWMMAMKYPITA
LRMKWFMAFKYPIDA

SEQ ID NO: 219886 - protein, 15 aa, Artificial Sequence
  Description of Artificial Sequence: Synthetic peptide
  Seed: LRMKWMMAMKYPITA
LRMKWFMAFKYPIEA

SEQ ID NO: 219887 - protein, 15 aa, Artificial Sequence
  Description of Artificial Sequence: Synthetic peptide
  Seed: LRMKWMMAMKYPITA
LRMKWFMAFKYPIFA

SEQ ID NO: 219888 - protein, 15 aa, Artificial Sequence
  Description of Artificial Sequence: Synthetic peptide
  Seed: LRMKWMMAMKYPITA
LRMKWFMAFKYPIIA

SEQ ID NO: 219889 - protein, 15 aa, Artificial Sequence
  Description of Artificial Sequence: Synthetic peptide
  Seed: LRMKWMMAMKYPITA
LRMKWFMAFKYPILA

SEQ ID NO: 219890 - protein, 15 aa, Artificial Sequence
  Description of Artificial Sequence: Synthetic peptide
  Seed: LRMKWMMAMKYPITA
LRMKWFMAFKYPIMA

SEQ ID NO: 219891 - protein, 15 aa, Artificial Sequence
  Description of Artificial Sequence: Synthetic peptide
  Seed: LRMKWMMAMKYPITA
LRMKWFMAFKYPINA

SEQ ID NO: 219892 - protein, 15 aa, Artificial Sequence
  Description of Artificial Sequence: Synthetic peptide
  Seed: LRMKWMMAMKYPITA
LRMKWFMAFKYPIPA

SEQ ID NO: 219893 - protein, 15 aa, Artificial Sequence
  Description of Artificial Sequence: Synthetic peptide
  Seed: LRMKWMMAMKYPITA
LRMKWFMAFKYPISA

SEQ ID NO: 219894 - protein, 15 aa, Artificial Sequence
  Description of Artificial Sequence: Synthetic peptide
  Seed: LRMKWMMAMKYPITA
LRMKWFMAFKYPITA

SEQ ID NO: 219895 - protein, 15 aa, Artificial Sequence
  Description of Artificial Sequence: Synthetic peptide
  Seed: LRMKWMMAMKYPITA
LRMKWFMAFKYPIVA

SEQ ID NO: 219896 - protein, 15 aa, Artificial Sequence
  Description of Artificial Sequence: Synthetic peptide
  Seed: LRMKWMMAMKYPITA
LRMKWFMAFKYPIWA

SEQ ID NO: 219897 - protein, 15 aa, Artificial Sequence
  Description of Artificial Sequence: Synthetic peptide
  Seed: LRMKWMMAMKYPITA
LRMKWFMAFKYPIYA

SEQ ID NO: 219898 - protein, 15 aa, Artificial Sequence
  Description of Artificial Sequence: Synthetic peptide
  Seed: LRMKWMMAMKYPITA
LRMKWFMAGKFPIIA

SEQ ID NO: 219899 - protein, 15 aa, Artificial Sequence
  Description of Artificial Sequence: Synthetic peptide
  Seed: LRMKWMMAMKYPITA
LRMKWFMAGKFPILA

SEQ ID NO: 219900 - protein, 15 aa, Artificial Sequence
  Description of Artificial Sequence: Synthetic peptide
  Seed: LRMKWMMAMKYPITA
LRMKWFMAGKFPIVA

SEQ ID NO: 219901 - protein, 15 aa, Artificial Sequence
  Description of Artificial Sequence: Synthetic peptide
  Seed: LRMKWMMAMKYPITA
LRMKWFMAHKFPIAA

SEQ ID NO: 219902 - protein, 15 aa, Artificial Sequence
  Description of Artificial Sequence: Synthetic peptide
  Seed: LRMKWMMAMKYPITA
LRMKWFMAHKFPICA

SEQ ID NO: 219903 - protein, 15 aa, Artificial Sequence
  Description of Artificial Sequence: Synthetic peptide
  Seed: LRMKWMMAMKYPITA
LRMKWFMAHKFPIDA

SEQ ID NO: 219904 - protein, 15 aa, Artificial Sequence
  Description of Artificial Sequence: Synthetic peptide
  Seed: LRMKWMMAMKYPITA
LRMKWFMAHKFPIEA

SEQ ID NO: 219905 - protein, 15 aa, Artificial Sequence
  Description of Artificial Sequence: Synthetic peptide
  Seed: LRMKWMMAMKYPITA
LRMKWFMAHKFPIFA

SEQ ID NO: 219906 - protein, 15 aa, Artificial Sequence
  Description of Artificial Sequence: Synthetic peptide
  Seed: LRMKWMMAMKYPITA
LRMKWFMAHKFPIIA

SEQ ID NO: 219907 - protein, 15 aa, Artificial Sequence
  Description of Artificial Sequence: Synthetic peptide
  Seed: LRMKWMMAMKYPITA
LRMKWFMAHKFPILA

SEQ ID NO: 219908 - protein, 15 aa, Artificial Sequence
  Description of Artificial Sequence: Synthetic peptide
  Seed: LRMKWMMAMKYPITA
LRMKWFMAHKFPIMA

SEQ ID NO: 219909 - protein, 15 aa, Artificial Sequence
  Description of Artificial Sequence: Synthetic peptide
  Seed: LRMKWMMAMKYPITA
LRMKWFMAHKFPINA

SEQ ID NO: 219910 - protein, 15 aa, Artificial Sequence
  Description of Artificial Sequence: Synthetic peptide
  Seed: LRMKWMMAMKYPITA
LRMKWFMAHKFPIPA

SEQ ID NO: 219911 - protein, 15 aa, Artificial Sequence
  Description of Artificial Sequence: Synthetic peptide
  Seed: LRMKWMMAMKYPITA
LRMKWFMAHKFPIQA

SEQ ID NO: 219912 - protein, 15 aa, Artificial Sequence
  Description of Artificial Sequence: Synthetic peptide
  Seed: LRMKWMMAMKYPITA
LRMKWFMAHKFPIRA

SEQ ID NO: 219913 - protein, 15 aa, Artificial Sequence
  Description of Artificial Sequence: Synthetic peptide
  Seed: LRMKWMMAMKYPITA
LRMKWFMAHKFPISA

SEQ ID NO: 219914 - protein, 15 aa, Artificial Sequence
  Description of Artificial Sequence: Synthetic peptide
  Seed: LRMKWMMAMKYPITA
LRMKWFMAHKFPITA

SEQ ID NO: 219915 - protein, 15 aa, Artificial Sequence
  Description of Artificial Sequence: Synthetic peptide
  Seed: LRMKWMMAMKYPITA
LRMKWFMAHKFPIVA

SEQ ID NO: 219916 - protein, 15 aa, Artificial Sequence
  Description of Artificial Sequence: Synthetic peptide
  Seed: LRMKWMMAMKYPITA
LRMKWFMAHKFPIWA

SEQ ID NO: 219917 - protein, 15 aa, Artificial Sequence
  Description of Artificial Sequence: Synthetic peptide
  Seed: LRMKWMMAMKYPITA
LRMKWFMAHKFPIYA

SEQ ID NO: 219918 - protein, 15 aa, Artificial Sequence
  Description of Artificial Sequence: Synthetic peptide
  Seed: LRMKWMMAMKYPITA
LRMKWFMAHKIPIFA

SEQ ID NO: 219919 - protein, 15 aa, Artificial Sequence
  Description of Artificial Sequence: Synthetic peptide
  Seed: LRMKWMMAMKYPITA
LRMKWFMAHKIPIIA

SEQ ID NO: 219920 - protein, 15 aa, Artificial Sequence
  Description of Artificial Sequence: Synthetic peptide
  Seed: LRMKWMMAMKYPITA
LRMKWFMAHKIPILA

SEQ ID NO: 219921 - protein, 15 aa, Artificial Sequence
  Description of Artificial Sequence: Synthetic peptide
  Seed: LRMKWMMAMKYPITA
LRMKWFMAHKIPIMA

SEQ ID NO: 219922 - protein, 15 aa, Artificial Sequence
  Description of Artificial Sequence: Synthetic peptide
  Seed: LRMKWMMAMKYPITA
LRMKWFMAHKIPIVA

SEQ ID NO: 219923 - protein, 15 aa, Artificial Sequence
  Description of Artificial Sequence: Synthetic peptide
  Seed: LRMKWMMAMKYPITA
LRMKWFMAHKLPIFA

SEQ ID NO: 219924 - protein, 15 aa, Artificial Sequence
  Description of Artificial Sequence: Synthetic peptide
  Seed: LRMKWMMAMKYPITA
LRMKWFMAHKLPIIA

SEQ ID NO: 219925 - protein, 15 aa, Artificial Sequence
  Description of Artificial Sequence: Synthetic peptide
  Seed: LRMKWMMAMKYPITA
LRMKWFMAHKLPILA

SEQ ID NO: 219926 - protein, 15 aa, Artificial Sequence
  Description of Artificial Sequence: Synthetic peptide
  Seed: LRMKWMMAMKYPITA
LRMKWFMAHKLPIMA

SEQ ID NO: 219927 - protein, 15 aa, Artificial Sequence
  Description of Artificial Sequence: Synthetic peptide
  Seed: LRMKWMMAMKYPITA
LRMKWFMAHKLPIVA

SEQ ID NO: 219928 - protein, 15 aa, Artificial Sequence
  Description of Artificial Sequence: Synthetic peptide
  Seed: LRMKWMMAMKYPITA
LRMKWFMAHKLPIYA

SEQ ID NO: 219929 - protein, 15 aa, Artificial Sequence
  Description of Artificial Sequence: Synthetic peptide
  Seed: LRMKWMMAMKYPITA
LRMKWFMAHKMPIFA

SEQ ID NO: 219930 - protein, 15 aa, Artificial Sequence
  Description of Artificial Sequence: Synthetic peptide
  Seed: LRMKWMMAMKYPITA
LRMKWFMAHKMPIIA

SEQ ID NO: 219931 - protein, 15 aa, Artificial Sequence
  Description of Artificial Sequence: Synthetic peptide
  Seed: LRMKWMMAMKYPITA
LRMKWFMAHKMPILA

SEQ ID NO: 219932 - protein, 15 aa, Artificial Sequence
  Description of Artificial Sequence: Synthetic peptide
  Seed: LRMKWMMAMKYPITA
LRMKWFMAHKMPIMA

SEQ ID NO: 219933 - protein, 15 aa, Artificial Sequence
  Description of Artificial Sequence: Synthetic peptide
  Seed: LRMKWMMAMKYPITA
LRMKWFMAHKMPIVA

SEQ ID NO: 219934 - protein, 15 aa, Artificial Sequence
  Description of Artificial Sequence: Synthetic peptide
  Seed: LRMKWMMAMKYPITA
LRMKWFMAHKWPIIA

SEQ ID NO: 219935 - protein, 15 aa, Artificial Sequence
  Description of Artificial Sequence: Synthetic peptide
  Seed: LRMKWMMAMKYPITA
LRMKWFMAHKWPILA

SEQ ID NO: 219936 - protein, 15 aa, Artificial Sequence
  Description of Artificial Sequence: Synthetic peptide
  Seed: LRMKWMMAMKYPITA
LRMKWFMAHKWPIVA

SEQ ID NO: 219937 - protein, 15 aa, Artificial Sequence
  Description of Artificial Sequence: Synthetic peptide
  Seed: LRMKWMMAMKYPITA
LRMKWFMAHKYPIFA

SEQ ID NO: 219938 - protein, 15 aa, Artificial Sequence
  Description of Artificial Sequence: Synthetic peptide
  Seed: LRMKWMMAMKYPITA
LRMKWFMAHKYPIIA

SEQ ID NO: 219939 - protein, 15 aa, Artificial Sequence
  Description of Artificial Sequence: Synthetic peptide
  Seed: LRMKWMMAMKYPITA
LRMKWFMAHKYPILA

SEQ ID NO: 219940 - protein, 15 aa, Artificial Sequence
  Description of Artificial Sequence: Synthetic peptide
  Seed: LRMKWMMAMKYPITA
LRMKWFMAHKYPIMA

SEQ ID NO: 219941 - protein, 15 aa, Artificial Sequence
  Description of Artificial Sequence: Synthetic peptide
  Seed: LRMKWMMAMKYPITA
LRMKWFMAHKYPIVA

SEQ ID NO: 219942 - protein, 15 aa, Artificial Sequence
  Description of Artificial Sequence: Synthetic peptide
  Seed: LRMKWMMAMKYPITA
LRMKWFMAIKAPILA

SEQ ID NO: 219943 - protein, 15 aa, Artificial Sequence
  Description of Artificial Sequence: Synthetic peptide
  Seed: LRMKWMMAMKYPITA
LRMKWFMAIKFPIAA

SEQ ID NO: 219944 - protein, 15 aa, Artificial Sequence
  Description of Artificial Sequence: Synthetic peptide
  Seed: LRMKWMMAMKYPITA
LRMKWFMAIKFPICA

SEQ ID NO: 219945 - protein, 15 aa, Artificial Sequence
  Description of Artificial Sequence: Synthetic peptide
  Seed: LRMKWMMAMKYPITA
LRMKWFMAIKFPIDA

SEQ ID NO: 219946 - protein, 15 aa, Artificial Sequence
  Description of Artificial Sequence: Synthetic peptide
  Seed: LRMKWMMAMKYPITA
LRMKWFMAIKFPIEA

SEQ ID NO: 219947 - protein, 15 aa, Artificial Sequence
  Description of Artificial Sequence: Synthetic peptide
  Seed: LRMKWMMAMKYPITA
LRMKWFMAIKFPIFA

SEQ ID NO: 219948 - protein, 15 aa, Artificial Sequence
  Description of Artificial Sequence: Synthetic peptide
  Seed: LRMKWMMAMKYPITA
LRMKWFMAIKFPIGA

SEQ ID NO: 219949 - protein, 15 aa, Artificial Sequence
  Description of Artificial Sequence: Synthetic peptide
  Seed: LRMKWMMAMKYPITA
LRMKWFMAIKFPIHA

SEQ ID NO: 219950 - protein, 15 aa, Artificial Sequence
  Description of Artificial Sequence: Synthetic peptide
  Seed: LRMKWMMAMKYPITA
LRMKWFMAIKFPIIA

SEQ ID NO: 219951 - protein, 15 aa, Artificial Sequence
  Description of Artificial Sequence: Synthetic peptide
  Seed: LRMKWMMAMKYPITA
LRMKWFMAIKFPIKA

SEQ ID NO: 219952 - protein, 15 aa, Artificial Sequence
  Description of Artificial Sequence: Synthetic peptide
  Seed: LRMKWMMAMKYPITA
LRMKWFMAIKFPILA

SEQ ID NO: 219953 - protein, 15 aa, Artificial Sequence
  Description of Artificial Sequence: Synthetic peptide
  Seed: LRMKWMMAMKYPITA
LRMKWFMAIKFPIMA

SEQ ID NO: 219954 - protein, 15 aa, Artificial Sequence
  Description of Artificial Sequence: Synthetic peptide
  Seed: LRMKWMMAMKYPITA
LRMKWFMAIKFPINA

SEQ ID NO: 219955 - protein, 15 aa, Artificial Sequence
  Description of Artificial Sequence: Synthetic peptide
  Seed: LRMKWMMAMKYPITA
LRMKWFMAIKFPIPA

SEQ ID NO: 219956 - protein, 15 aa, Artificial Sequence
  Description of Artificial Sequence: Synthetic peptide
  Seed: LRMKWMMAMKYPITA
LRMKWFMAIKFPIQA

SEQ ID NO: 219957 - protein, 15 aa, Artificial Sequence
  Description of Artificial Sequence: Synthetic peptide
  Seed: LRMKWMMAMKYPITA
LRMKWFMAIKFPIRA

SEQ ID NO: 219958 - protein, 15 aa, Artificial Sequence
  Description of Artificial Sequence: Synthetic peptide
  Seed: LRMKWMMAMKYPITA
LRMKWFMAIKFPISA

SEQ ID NO: 219959 - protein, 15 aa, Artificial Sequence
  Description of Artificial Sequence: Synthetic peptide
  Seed: LRMKWMMAMKYPITA
LRMKWFMAIKFPITA

SEQ ID NO: 219960 - protein, 15 aa, Artificial Sequence
  Description of Artificial Sequence: Synthetic peptide
  Seed: LRMKWMMAMKYPITA
LRMKWFMAIKFPIVA

SEQ ID NO: 219961 - protein, 15 aa, Artificial Sequence
  Description of Artificial Sequence: Synthetic peptide
  Seed: LRMKWMMAMKYPITA
LRMKWFMAIKFPIWA

SEQ ID NO: 219962 - protein, 15 aa, Artificial Sequence
  Description of Artificial Sequence: Synthetic peptide
  Seed: LRMKWMMAMKYPITA
LRMKWFMAIKFPIYA

SEQ ID NO: 219963 - protein, 15 aa, Artificial Sequence
  Description of Artificial Sequence: Synthetic peptide
  Seed: LRMKWMMAMKYPITA
LRMKWFMAIKIPIFA

SEQ ID NO: 219964 - protein, 15 aa, Artificial Sequence
  Description of Artificial Sequence: Synthetic peptide
  Seed: LRMKWMMAMKYPITA
LRMKWFMAIKIPIIA

SEQ ID NO: 219965 - protein, 15 aa, Artificial Sequence
  Description of Artificial Sequence: Synthetic peptide
  Seed: LRMKWMMAMKYPITA
LRMKWFMAIKIPILA

SEQ ID NO: 219966 - protein, 15 aa, Artificial Sequence
  Description of Artificial Sequence: Synthetic peptide
  Seed: LRMKWMMAMKYPITA
LRMKWFMAIKIPIMA

SEQ ID NO: 219967 - protein, 15 aa, Artificial Sequence
  Description of Artificial Sequence: Synthetic peptide
  Seed: LRMKWMMAMKYPITA
LRMKWFMAIKIPITA

SEQ ID NO: 219968 - protein, 15 aa, Artificial Sequence
  Description of Artificial Sequence: Synthetic peptide
  Seed: LRMKWMMAMKYPITA
LRMKWFMAIKIPIVA

SEQ ID NO: 219969 - protein, 15 aa, Artificial Sequence
  Description of Artificial Sequence: Synthetic peptide
  Seed: LRMKWMMAMKYPITA
LRMKWFMAIKLPIAA

SEQ ID NO: 219970 - protein, 15 aa, Artificial Sequence
  Description of Artificial Sequence: Synthetic peptide
  Seed: LRMKWMMAMKYPITA
LRMKWFMAIKLPIDA

SEQ ID NO: 219971 - protein, 15 aa, Artificial Sequence
  Description of Artificial Sequence: Synthetic peptide
  Seed: LRMKWMMAMKYPITA
LRMKWFMAIKLPIEA

SEQ ID NO: 219972 - protein, 15 aa, Artificial Sequence
  Description of Artificial Sequence: Synthetic peptide
  Seed: LRMKWMMAMKYPITA
LRMKWFMAIKLPIFA

SEQ ID NO: 219973 - protein, 15 aa, Artificial Sequence
  Description of Artificial Sequence: Synthetic peptide
  Seed: LRMKWMMAMKYPITA
LRMKWFMAIKLPIIA

SEQ ID NO: 219974 - protein, 15 aa, Artificial Sequence
  Description of Artificial Sequence: Synthetic peptide
  Seed: LRMKWMMAMKYPITA
LRMKWFMAIKLPILA

SEQ ID NO: 219975 - protein, 15 aa, Artificial Sequence
  Description of Artificial Sequence: Synthetic peptide
  Seed: LRMKWMMAMKYPITA
LRMKWFMAIKLPIMA

SEQ ID NO: 219976 - protein, 15 aa, Artificial Sequence
  Description of Artificial Sequence: Synthetic peptide
  Seed: LRMKWMMAMKYPITA
LRMKWFMAIKLPINA

SEQ ID NO: 219977 - protein, 15 aa, Artificial Sequence
  Description of Artificial Sequence: Synthetic peptide
  Seed: LRMKWMMAMKYPITA
LRMKWFMAIKLPISA

SEQ ID NO: 219978 - protein, 15 aa, Artificial Sequence
  Description of Artificial Sequence: Synthetic peptide
  Seed: LRMKWMMAMKYPITA
LRMKWFMAIKLPITA

SEQ ID NO: 219979 - protein, 15 aa, Artificial Sequence
  Description of Artificial Sequence: Synthetic peptide
  Seed: LRMKWMMAMKYPITA
LRMKWFMAIKLPIVA

SEQ ID NO: 219980 - protein, 15 aa, Artificial Sequence
  Description of Artificial Sequence: Synthetic peptide
  Seed: LRMKWMMAMKYPITA
LRMKWFMAIKLPIYA

SEQ ID NO: 219981 - protein, 15 aa, Artificial Sequence
  Description of Artificial Sequence: Synthetic peptide
  Seed: LRMKWMMAMKYPITA
LRMKWFMAIKMPIFA

SEQ ID NO: 219982 - protein, 15 aa, Artificial Sequence
  Description of Artificial Sequence: Synthetic peptide
  Seed: LRMKWMMAMKYPITA
LRMKWFMAIKMPIIA

SEQ ID NO: 219983 - protein, 15 aa, Artificial Sequence
  Description of Artificial Sequence: Synthetic peptide
  Seed: LRMKWMMAMKYPITA
LRMKWFMAIKMPILA

SEQ ID NO: 219984 - protein, 15 aa, Artificial Sequence
  Description of Artificial Sequence: Synthetic peptide
  Seed: LRMKWMMAMKYPITA
LRMKWFMAIKMPIMA

SEQ ID NO: 219985 - protein, 15 aa, Artificial Sequence
  Description of Artificial Sequence: Synthetic peptide
  Seed: LRMKWMMAMKYPITA
LRMKWFMAIKMPIVA

SEQ ID NO: 219986 - protein, 15 aa, Artificial Sequence
  Description of Artificial Sequence: Synthetic peptide
  Seed: LRMKWMMAMKYPITA
LRMKWFMAIKMPIYA

SEQ ID NO: 219987 - protein, 15 aa, Artificial Sequence
  Description of Artificial Sequence: Synthetic peptide
  Seed: LRMKWMMAMKYPITA
LRMKWFMAIKVPIIA

SEQ ID NO: 219988 - protein, 15 aa, Artificial Sequence
  Description of Artificial Sequence: Synthetic peptide
  Seed: LRMKWMMAMKYPITA
LRMKWFMAIKVPILA

SEQ ID NO: 219989 - protein, 15 aa, Artificial Sequence
  Description of Artificial Sequence: Synthetic peptide
  Seed: LRMKWMMAMKYPITA
LRMKWFMAIKVPIVA

SEQ ID NO: 219990 - protein, 15 aa, Artificial Sequence
  Description of Artificial Sequence: Synthetic peptide
  Seed: LRMKWMMAMKYPITA
LRMKWFMAIKWPIFA

SEQ ID NO: 219991 - protein, 15 aa, Artificial Sequence
  Description of Artificial Sequence: Synthetic peptide
  Seed: LRMKWMMAMKYPITA
LRMKWFMAIKWPIIA

SEQ ID NO: 219992 - protein, 15 aa, Artificial Sequence
  Description of Artificial Sequence: Synthetic peptide
  Seed: LRMKWMMAMKYPITA
LRMKWFMAIKWPILA

SEQ ID NO: 219993 - protein, 15 aa, Artificial Sequence
  Description of Artificial Sequence: Synthetic peptide
  Seed: LRMKWMMAMKYPITA
LRMKWFMAIKWPIMA

SEQ ID NO: 219994 - protein, 15 aa, Artificial Sequence
  Description of Artificial Sequence: Synthetic peptide
  Seed: LRMKWMMAMKYPITA
LRMKWFMAIKWPIVA

SEQ ID NO: 219995 - protein, 15 aa, Artificial Sequence
  Description of Artificial Sequence: Synthetic peptide
  Seed: LRMKWMMAMKYPITA
LRMKWFMAIKYPIAA

SEQ ID NO: 219996 - protein, 15 aa, Artificial Sequence
  Description of Artificial Sequence: Synthetic peptide
  Seed: LRMKWMMAMKYPITA
LRMKWFMAIKYPIDA

SEQ ID NO: 219997 - protein, 15 aa, Artificial Sequence
  Description of Artificial Sequence: Synthetic peptide
  Seed: LRMKWMMAMKYPITA
LRMKWFMAIKYPIEA

SEQ ID NO: 219998 - protein, 15 aa, Artificial Sequence
  Description of Artificial Sequence: Synthetic peptide
  Seed: LRMKWMMAMKYPITA
LRMKWFMAIKYPIFA

SEQ ID NO: 219999 - protein, 15 aa, Artificial Sequence
  Description of Artificial Sequence: Synthetic peptide
  Seed: LRMKWMMAMKYPITA
LRMKWFMAIKYPIIA

SEQ ID NO: 220000 - protein, 15 aa, Artificial Sequence
  Description of Artificial Sequence: Synthetic peptide
  Seed: LRMKWMMAMKYPITA
LRMKWFMAIKYPILA

SEQ ID NO: 220001 - protein, 15 aa, Artificial Sequence
  Description of Artificial Sequence: Synthetic peptide
  Seed: LRMKWMMAMKYPITA
LRMKWFMAIKYPIMA

SEQ ID NO: 220002 - protein, 15 aa, Artificial Sequence
  Description of Artificial Sequence: Synthetic peptide
  Seed: LRMKWMMAMKYPITA
LRMKWFMAIKYPINA

SEQ ID NO: 220003 - protein, 15 aa, Artificial Sequence
  Description of Artificial Sequence: Synthetic peptide
  Seed: LRMKWMMAMKYPITA
LRMKWFMAIKYPISA

SEQ ID NO: 220004 - protein, 15 aa, Artificial Sequence
  Description of Artificial Sequence: Synthetic peptide
  Seed: LRMKWMMAMKYPITA
LRMKWFMAIKYPITA

SEQ ID NO: 220005 - protein, 15 aa, Artificial Sequence
  Description of Artificial Sequence: Synthetic peptide
  Seed: LRMKWMMAMKYPITA
LRMKWFMAIKYPIVA

SEQ ID NO: 220006 - protein, 15 aa, Artificial Sequence
  Description of Artificial Sequence: Synthetic peptide
  Seed: LRMKWMMAMKYPITA
LRMKWFMAIKYPIWA

SEQ ID NO: 220007 - protein, 15 aa, Artificial Sequence
  Description of Artificial Sequence: Synthetic peptide
  Seed: LRMKWMMAMKYPITA
LRMKWFMAIKYPIYA

SEQ ID NO: 220008 - protein, 15 aa, Artificial Sequence
  Description of Artificial Sequence: Synthetic peptide
  Seed: LRMKWMMAMKYPITA
LRMKWFMAKKFPIFA

SEQ ID NO: 220009 - protein, 15 aa, Artificial Sequence
  Description of Artificial Sequence: Synthetic peptide
  Seed: LRMKWMMAMKYPITA
LRMKWFMAKKFPIIA

SEQ ID NO: 220010 - protein, 15 aa, Artificial Sequence
  Description of Artificial Sequence: Synthetic peptide
  Seed: LRMKWMMAMKYPITA
LRMKWFMAKKFPILA

SEQ ID NO: 220011 - protein, 15 aa, Artificial Sequence
  Description of Artificial Sequence: Synthetic peptide
  Seed: LRMKWMMAMKYPITA
LRMKWFMAKKFPIMA

SEQ ID NO: 220012 - protein, 15 aa, Artificial Sequence
  Description of Artificial Sequence: Synthetic peptide
  Seed: LRMKWMMAMKYPITA
LRMKWFMAKKFPITA

SEQ ID NO: 220013 - protein, 15 aa, Artificial Sequence
  Description of Artificial Sequence: Synthetic peptide
  Seed: LRMKWMMAMKYPITA
LRMKWFMAKKFPIVA

SEQ ID NO: 220014 - protein, 15 aa, Artificial Sequence
  Description of Artificial Sequence: Synthetic peptide
  Seed: LRMKWMMAMKYPITA
LRMKWFMAKKLPILA

SEQ ID NO: 220015 - protein, 15 aa, Artificial Sequence
  Description of Artificial Sequence: Synthetic peptide
  Seed: LRMKWMMAMKYPITA
LRMKWFMALKFPIAA

SEQ ID NO: 220016 - protein, 15 aa, Artificial Sequence
  Description of Artificial Sequence: Synthetic peptide
  Seed: LRMKWMMAMKYPITA
LRMKWFMALKFPICA

SEQ ID NO: 220017 - protein, 15 aa, Artificial Sequence
  Description of Artificial Sequence: Synthetic peptide
  Seed: LRMKWMMAMKYPITA
LRMKWFMALKFPIDA

SEQ ID NO: 220018 - protein, 15 aa, Artificial Sequence
  Description of Artificial Sequence: Synthetic peptide
  Seed: LRMKWMMAMKYPITA
LRMKWFMALKFPIEA

SEQ ID NO: 220019 - protein, 15 aa, Artificial Sequence
  Description of Artificial Sequence: Synthetic peptide
  Seed: LRMKWMMAMKYPITA
LRMKWFMALKFPIFA

SEQ ID NO: 220020 - protein, 15 aa, Artificial Sequence
  Description of Artificial Sequence: Synthetic peptide
  Seed: LRMKWMMAMKYPITA
LRMKWFMALKFPIGA

SEQ ID NO: 220021 - protein, 15 aa, Artificial Sequence
  Description of Artificial Sequence: Synthetic peptide
  Seed: LRMKWMMAMKYPITA
LRMKWFMALKFPIHA

SEQ ID NO: 220022 - protein, 15 aa, Artificial Sequence
  Description of Artificial Sequence: Synthetic peptide
  Seed: LRMKWMMAMKYPITA
LRMKWFMALKFPIIA

SEQ ID NO: 220023 - protein, 15 aa, Artificial Sequence
  Description of Artificial Sequence: Synthetic peptide
  Seed: LRMKWMMAMKYPITA
LRMKWFMALKFPIKA

SEQ ID NO: 220024 - protein, 15 aa, Artificial Sequence
  Description of Artificial Sequence: Synthetic peptide
  Seed: LRMKWMMAMKYPITA
LRMKWFMALKFPILA

SEQ ID NO: 220025 - protein, 15 aa, Artificial Sequence
  Description of Artificial Sequence: Synthetic peptide
  Seed: LRMKWMMAMKYPITA
LRMKWFMALKFPIMA

SEQ ID NO: 220026 - protein, 15 aa, Artificial Sequence
  Description of Artificial Sequence: Synthetic peptide
  Seed: LRMKWMMAMKYPITA
LRMKWFMALKFPINA

SEQ ID NO: 220027 - protein, 15 aa, Artificial Sequence
  Description of Artificial Sequence: Synthetic peptide
  Seed: LRMKWMMAMKYPITA
LRMKWFMALKFPIPA

SEQ ID NO: 220028 - protein, 15 aa, Artificial Sequence
  Description of Artificial Sequence: Synthetic peptide
  Seed: LRMKWMMAMKYPITA
LRMKWFMALKFPIQA

SEQ ID NO: 220029 - protein, 15 aa, Artificial Sequence
  Description of Artificial Sequence: Synthetic peptide
  Seed: LRMKWMMAMKYPITA
LRMKWFMALKFPIRA

SEQ ID NO: 220030 - protein, 15 aa, Artificial Sequence
  Description of Artificial Sequence: Synthetic peptide
  Seed: LRMKWMMAMKYPITA
LRMKWFMALKFPISA

SEQ ID NO: 220031 - protein, 15 aa, Artificial Sequence
  Description of Artificial Sequence: Synthetic peptide
  Seed: LRMKWMMAMKYPITA
LRMKWFMALKFPITA

SEQ ID NO: 220032 - protein, 15 aa, Artificial Sequence
  Description of Artificial Sequence: Synthetic peptide
  Seed: LRMKWMMAMKYPITA
LRMKWFMALKFPIVA

SEQ ID NO: 220033 - protein, 15 aa, Artificial Sequence
  Description of Artificial Sequence: Synthetic peptide
  Seed: LRMKWMMAMKYPITA
LRMKWFMALKFPIWA

SEQ ID NO: 220034 - protein, 15 aa, Artificial Sequence
  Description of Artificial Sequence: Synthetic peptide
  Seed: LRMKWMMAMKYPITA
LRMKWFMALKFPIYA

SEQ ID NO: 220035 - protein, 15 aa, Artificial Sequence
  Description of Artificial Sequence: Synthetic peptide
  Seed: LRMKWMMAMKYPITA
LRMKWFMALKIPIIA

SEQ ID NO: 220036 - protein, 15 aa, Artificial Sequence
  Description of Artificial Sequence: Synthetic peptide
  Seed: LRMKWMMAMKYPITA
LRMKWFMALKIPILA

SEQ ID NO: 220037 - protein, 15 aa, Artificial Sequence
  Description of Artificial Sequence: Synthetic peptide
  Seed: LRMKWMMAMKYPITA
LRMKWFMALKIPIVA

SEQ ID NO: 220038 - protein, 15 aa, Artificial Sequence
  Description of Artificial Sequence: Synthetic peptide
  Seed: LRMKWMMAMKYPITA
LRMKWFMALKLPIFA

SEQ ID NO: 220039 - protein, 15 aa, Artificial Sequence
  Description of Artificial Sequence: Synthetic peptide
  Seed: LRMKWMMAMKYPITA
LRMKWFMALKLPIIA

SEQ ID NO: 220040 - protein, 15 aa, Artificial Sequence
  Description of Artificial Sequence: Synthetic peptide
  Seed: LRMKWMMAMKYPITA
LRMKWFMALKLPILA

SEQ ID NO: 220041 - protein, 15 aa, Artificial Sequence
  Description of Artificial Sequence: Synthetic peptide
  Seed: LRMKWMMAMKYPITA
LRMKWFMALKLPIMA

SEQ ID NO: 220042 - protein, 15 aa, Artificial Sequence
  Description of Artificial Sequence: Synthetic peptide
  Seed: LRMKWMMAMKYPITA
LRMKWFMALKLPITA

SEQ ID NO: 220043 - protein, 15 aa, Artificial Sequence
  Description of Artificial Sequence: Synthetic peptide
  Seed: LRMKWMMAMKYPITA
LRMKWFMALKLPIVA

SEQ ID NO: 220044 - protein, 15 aa, Artificial Sequence
  Description of Artificial Sequence: Synthetic peptide
  Seed: LRMKWMMAMKYPITA
LRMKWFMALKMPIIA

SEQ ID NO: 220045 - protein, 15 aa, Artificial Sequence
  Description of Artificial Sequence: Synthetic peptide
  Seed: LRMKWMMAMKYPITA
LRMKWFMALKMPILA

SEQ ID NO: 220046 - protein, 15 aa, Artificial Sequence
  Description of Artificial Sequence: Synthetic peptide
  Seed: LRMKWMMAMKYPITA
LRMKWFMALKMPIVA

SEQ ID NO: 220047 - protein, 15 aa, Artificial Sequence
  Description of Artificial Sequence: Synthetic peptide
  Seed: LRMKWMMAMKYPITA
LRMKWFMALKWPIEA

SEQ ID NO: 220048 - protein, 15 aa, Artificial Sequence
  Description of Artificial Sequence: Synthetic peptide
  Seed: LRMKWMMAMKYPITA
LRMKWFMALKWPIFA

SEQ ID NO: 220049 - protein, 15 aa, Artificial Sequence
  Description of Artificial Sequence: Synthetic peptide
  Seed: LRMKWMMAMKYPITA
LRMKWFMALKWPIIA

SEQ ID NO: 220050 - protein, 15 aa, Artificial Sequence
  Description of Artificial Sequence: Synthetic peptide
  Seed: LRMKWMMAMKYPITA
LRMKWFMALKWPILA

SEQ ID NO: 220051 - protein, 15 aa, Artificial Sequence
  Description of Artificial Sequence: Synthetic peptide
  Seed: LRMKWMMAMKYPITA
LRMKWFMALKWPIMA

SEQ ID NO: 220052 - protein, 15 aa, Artificial Sequence
  Description of Artificial Sequence: Synthetic peptide
  Seed: LRMKWMMAMKYPITA
LRMKWFMALKWPIVA

SEQ ID NO: 220053 - protein, 15 aa, Artificial Sequence
  Description of Artificial Sequence: Synthetic peptide
  Seed: LRMKWMMAMKYPITA
LRMKWFMALKYPIAA

SEQ ID NO: 220054 - protein, 15 aa, Artificial Sequence
  Description of Artificial Sequence: Synthetic peptide
  Seed: LRMKWMMAMKYPITA
LRMKWFMALKYPIDA

SEQ ID NO: 220055 - protein, 15 aa, Artificial Sequence
  Description of Artificial Sequence: Synthetic peptide
  Seed: LRMKWMMAMKYPITA
LRMKWFMALKYPIEA

SEQ ID NO: 220056 - protein, 15 aa, Artificial Sequence
  Description of Artificial Sequence: Synthetic peptide
  Seed: LRMKWMMAMKYPITA
LRMKWFMALKYPIFA

SEQ ID NO: 220057 - protein, 15 aa, Artificial Sequence
  Description of Artificial Sequence: Synthetic peptide
  Seed: LRMKWMMAMKYPITA
LRMKWFMALKYPIIA

SEQ ID NO: 220058 - protein, 15 aa, Artificial Sequence
  Description of Artificial Sequence: Synthetic peptide
  Seed: LRMKWMMAMKYPITA
LRMKWFMALKYPILA

SEQ ID NO: 220059 - protein, 15 aa, Artificial Sequence
  Description of Artificial Sequence: Synthetic peptide
  Seed: LRMKWMMAMKYPITA
LRMKWFMALKYPIMA

SEQ ID NO: 220060 - protein, 15 aa, Artificial Sequence
  Description of Artificial Sequence: Synthetic peptide
  Seed: LRMKWMMAMKYPITA
LRMKWFMALKYPINA

SEQ ID NO: 220061 - protein, 15 aa, Artificial Sequence
  Description of Artificial Sequence: Synthetic peptide
  Seed: LRMKWMMAMKYPITA
LRMKWFMALKYPIQA

SEQ ID NO: 220062 - protein, 15 aa, Artificial Sequence
  Description of Artificial Sequence: Synthetic peptide
  Seed: LRMKWMMAMKYPITA
LRMKWFMALKYPISA

SEQ ID NO: 220063 - protein, 15 aa, Artificial Sequence
  Description of Artificial Sequence: Synthetic peptide
  Seed: LRMKWMMAMKYPITA
LRMKWFMALKYPITA

SEQ ID NO: 220064 - protein, 15 aa, Artificial Sequence
  Description of Artificial Sequence: Synthetic peptide
  Seed: LRMKWMMAMKYPITA
LRMKWFMALKYPIVA

SEQ ID NO: 220065 - protein, 15 aa, Artificial Sequence
  Description of Artificial Sequence: Synthetic peptide
  Seed: LRMKWMMAMKYPITA
LRMKWFMALKYPIWA

SEQ ID NO: 220066 - protein, 15 aa, Artificial Sequence
  Description of Artificial Sequence: Synthetic peptide
  Seed: LRMKWMMAMKYPITA
LRMKWFMALKYPIYA

SEQ ID NO: 220067 - protein, 15 aa, Artificial Sequence
  Description of Artificial Sequence: Synthetic peptide
  Seed: LRMKWMMAMKYPITA
LRMKWFMAMKFPIAA

SEQ ID NO: 220068 - protein, 15 aa, Artificial Sequence
  Description of Artificial Sequence: Synthetic peptide
  Seed: LRMKWMMAMKYPITA
LRMKWFMAMKFPICA

SEQ ID NO: 220069 - protein, 15 aa, Artificial Sequence
  Description of Artificial Sequence: Synthetic peptide
  Seed: LRMKWMMAMKYPITA
LRMKWFMAMKFPIDA

SEQ ID NO: 220070 - protein, 15 aa, Artificial Sequence
  Description of Artificial Sequence: Synthetic peptide
  Seed: LRMKWMMAMKYPITA
LRMKWFMAMKFPIEA

SEQ ID NO: 220071 - protein, 15 aa, Artificial Sequence
  Description of Artificial Sequence: Synthetic peptide
  Seed: LRMKWMMAMKYPITA
LRMKWFMAMKFPIFA

SEQ ID NO: 220072 - protein, 15 aa, Artificial Sequence
  Description of Artificial Sequence: Synthetic peptide
  Seed: LRMKWMMAMKYPITA
LRMKWFMAMKFPIGA

SEQ ID NO: 220073 - protein, 15 aa, Artificial Sequence
  Description of Artificial Sequence: Synthetic peptide
  Seed: LRMKWMMAMKYPITA
LRMKWFMAMKFPIHA

SEQ ID NO: 220074 - protein, 15 aa, Artificial Sequence
  Description of Artificial Sequence: Synthetic peptide
  Seed: LRMKWMMAMKYPITA
LRMKWFMAMKFPIIA

SEQ ID NO: 220075 - protein, 15 aa, Artificial Sequence
  Description of Artificial Sequence: Synthetic peptide
  Seed: LRMKWMMAMKYPITA
LRMKWFMAMKFPIKA

SEQ ID NO: 220076 - protein, 15 aa, Artificial Sequence
  Description of Artificial Sequence: Synthetic peptide
  Seed: LRMKWMMAMKYPITA
LRMKWFMAMKFPILA

SEQ ID NO: 220077 - protein, 15 aa, Artificial Sequence
  Description of Artificial Sequence: Synthetic peptide
  Seed: LRMKWMMAMKYPITA
LRMKWFMAMKFPIMA

SEQ ID NO: 220078 - protein, 15 aa, Artificial Sequence
  Description of Artificial Sequence: Synthetic peptide
  Seed: LRMKWMMAMKYPITA
LRMKWFMAMKFPINA

SEQ ID NO: 220079 - protein, 15 aa, Artificial Sequence
  Description of Artificial Sequence: Synthetic peptide
  Seed: LRMKWMMAMKYPITA
LRMKWFMAMKFPIPA

SEQ ID NO: 220080 - protein, 15 aa, Artificial Sequence
  Description of Artificial Sequence: Synthetic peptide
  Seed: LRMKWMMAMKYPITA
LRMKWFMAMKFPIQA

SEQ ID NO: 220081 - protein, 15 aa, Artificial Sequence
  Description of Artificial Sequence: Synthetic peptide
  Seed: LRMKWMMAMKYPITA
LRMKWFMAMKFPIRA

SEQ ID NO: 220082 - protein, 15 aa, Artificial Sequence
  Description of Artificial Sequence: Synthetic peptide
  Seed: LRMKWMMAMKYPITA
LRMKWFMAMKFPISA

SEQ ID NO: 220083 - protein, 15 aa, Artificial Sequence
  Description of Artificial Sequence: Synthetic peptide
  Seed: LRMKWMMAMKYPITA
LRMKWFMAMKFPIVA

SEQ ID NO: 220084 - protein, 15 aa, Artificial Sequence
  Description of Artificial Sequence: Synthetic peptide
  Seed: LRMKWMMAMKYPITA
LRMKWFMAMKFPIWA

SEQ ID NO: 220085 - protein, 15 aa, Artificial Sequence
  Description of Artificial Sequence: Synthetic peptide
  Seed: LRMKWMMAMKYPITA
LRMKWFMAMKFPIYA

SEQ ID NO: 220086 - protein, 15 aa, Artificial Sequence
  Description of Artificial Sequence: Synthetic peptide
  Seed: LRMKWMMAMKYPITA
LRMKWFMAMKIPIIA

SEQ ID NO: 220087 - protein, 15 aa, Artificial Sequence
  Description of Artificial Sequence: Synthetic peptide
  Seed: LRMKWMMAMKYPITA
LRMKWFMAMKIPILA

SEQ ID NO: 220088 - protein, 15 aa, Artificial Sequence
  Description of Artificial Sequence: Synthetic peptide
  Seed: LRMKWMMAMKYPITA
LRMKWFMAMKIPIMA

SEQ ID NO: 220089 - protein, 15 aa, Artificial Sequence
  Description of Artificial Sequence: Synthetic peptide
  Seed: LRMKWMMAMKYPITA
LRMKWFMAMKIPIVA

SEQ ID NO: 220090 - protein, 15 aa, Artificial Sequence
  Description of Artificial Sequence: Synthetic peptide
  Seed: LRMKWMMAMKYPITA
LRMKWFMAMKLPIAA

SEQ ID NO: 220091 - protein, 15 aa, Artificial Sequence
  Description of Artificial Sequence: Synthetic peptide
  Seed: LRMKWMMAMKYPITA
LRMKWFMAMKLPIIA

SEQ ID NO: 220092 - protein, 15 aa, Artificial Sequence
  Description of Artificial Sequence: Synthetic peptide
  Seed: LRMKWMMAMKYPITA
LRMKWFMAMKLPILA

SEQ ID NO: 220093 - protein, 15 aa, Artificial Sequence
  Description of Artificial Sequence: Synthetic peptide
  Seed: LRMKWMMAMKYPITA
LRMKWFMAMKLPIMA

SEQ ID NO: 220094 - protein, 15 aa, Artificial Sequence
  Description of Artificial Sequence: Synthetic peptide
  Seed: LRMKWMMAMKYPITA
LRMKWFMAMKLPISA

SEQ ID NO: 220095 - protein, 15 aa, Artificial Sequence
  Description of Artificial Sequence: Synthetic peptide
  Seed: LRMKWMMAMKYPITA
LRMKWFMAMKLPIVA

SEQ ID NO: 220096 - protein, 15 aa, Artificial Sequence
  Description of Artificial Sequence: Synthetic peptide
  Seed: LRMKWMMAMKYPITA
LRMKWFMAMKMPIIA

SEQ ID NO: 220097 - protein, 15 aa, Artificial Sequence
  Description of Artificial Sequence: Synthetic peptide
  Seed: LRMKWMMAMKYPITA
LRMKWFMAMKMPILA

SEQ ID NO: 220098 - protein, 15 aa, Artificial Sequence
  Description of Artificial Sequence: Synthetic peptide
  Seed: LRMKWMMAMKYPITA
LRMKWFMAMKMPIMA

SEQ ID NO: 220099 - protein, 15 aa, Artificial Sequence
  Description of Artificial Sequence: Synthetic peptide
  Seed: LRMKWMMAMKYPITA
LRMKWFMAMKMPIVA

SEQ ID NO: 220100 - protein, 15 aa, Artificial Sequence
  Description of Artificial Sequence: Synthetic peptide
  Seed: LRMKWMMAMKYPITA
LRMKWFMAMKVPIIA

SEQ ID NO: 220101 - protein, 15 aa, Artificial Sequence
  Description of Artificial Sequence: Synthetic peptide
  Seed: LRMKWMMAMKYPITA
LRMKWFMAMKVPILA

SEQ ID NO: 220102 - protein, 15 aa, Artificial Sequence
  Description of Artificial Sequence: Synthetic peptide
  Seed: LRMKWMMAMKYPITA
LRMKWFMAMKVPIVA

SEQ ID NO: 220103 - protein, 15 aa, Artificial Sequence
  Description of Artificial Sequence: Synthetic peptide
  Seed: LRMKWMMAMKYPITA
LRMKWFMAMKWPIIA

SEQ ID NO: 220104 - protein, 15 aa, Artificial Sequence
  Description of Artificial Sequence: Synthetic peptide
  Seed: LRMKWMMAMKYPITA
LRMKWFMAMKWPILA

SEQ ID NO: 220105 - protein, 15 aa, Artificial Sequence
  Description of Artificial Sequence: Synthetic peptide
  Seed: LRMKWMMAMKYPITA
LRMKWFMAMKWPIVA

SEQ ID NO: 220106 - protein, 15 aa, Artificial Sequence
  Description of Artificial Sequence: Synthetic peptide
  Seed: LRMKWMMAMKYPITA
LRMKWFMAMKYPIFA

SEQ ID NO: 220107 - protein, 15 aa, Artificial Sequence
  Description of Artificial Sequence: Synthetic peptide
  Seed: LRMKWMMAMKYPITA
LRMKWFMAMKYPIIA

SEQ ID NO: 220108 - protein, 15 aa, Artificial Sequence
  Description of Artificial Sequence: Synthetic peptide
  Seed: LRMKWMMAMKYPITA
LRMKWFMAMKYPILA

SEQ ID NO: 220109 - protein, 15 aa, Artificial Sequence
  Description of Artificial Sequence: Synthetic peptide
  Seed: LRMKWMMAMKYPITA
LRMKWFMAMKYPIMA

SEQ ID NO: 220110 - protein, 15 aa, Artificial Sequence
  Description of Artificial Sequence: Synthetic peptide
  Seed: LRMKWMMAMKYPITA
LRMKWFMAMKYPIVA

SEQ ID NO: 220111 - protein, 15 aa, Artificial Sequence
  Description of Artificial Sequence: Synthetic peptide
  Seed: LRMKWMMAMKYPITA
LRMKWFMAMKYPIYA

SEQ ID NO: 220112 - protein, 15 aa, Artificial Sequence
  Description of Artificial Sequence: Synthetic peptide
  Seed: LRMKWMMAMKYPITA
LRMKWFMANKFPIAA

SEQ ID NO: 220113 - protein, 15 aa, Artificial Sequence
  Description of Artificial Sequence: Synthetic peptide
  Seed: LRMKWMMAMKYPITA
LRMKWFMANKFPICA

SEQ ID NO: 220114 - protein, 15 aa, Artificial Sequence
  Description of Artificial Sequence: Synthetic peptide
  Seed: LRMKWMMAMKYPITA
LRMKWFMANKFPIDA

SEQ ID NO: 220115 - protein, 15 aa, Artificial Sequence
  Description of Artificial Sequence: Synthetic peptide
  Seed: LRMKWMMAMKYPITA
LRMKWFMANKFPIEA

SEQ ID NO: 220116 - protein, 15 aa, Artificial Sequence
  Description of Artificial Sequence: Synthetic peptide
  Seed: LRMKWMMAMKYPITA
LRMKWFMANKFPIFA

SEQ ID NO: 220117 - protein, 15 aa, Artificial Sequence
  Description of Artificial Sequence: Synthetic peptide
  Seed: LRMKWMMAMKYPITA
LRMKWFMANKFPIIA

SEQ ID NO: 220118 - protein, 15 aa, Artificial Sequence
  Description of Artificial Sequence: Synthetic peptide
  Seed: LRMKWMMAMKYPITA
LRMKWFMANKFPILA

SEQ ID NO: 220119 - protein, 15 aa, Artificial Sequence
  Description of Artificial Sequence: Synthetic peptide
  Seed: LRMKWMMAMKYPITA
LRMKWFMANKFPIMA

SEQ ID NO: 220120 - protein, 15 aa, Artificial Sequence
  Description of Artificial Sequence: Synthetic peptide
  Seed: LRMKWMMAMKYPITA
LRMKWFMANKFPINA

SEQ ID NO: 220121 - protein, 15 aa, Artificial Sequence
  Description of Artificial Sequence: Synthetic peptide
  Seed: LRMKWMMAMKYPITA
LRMKWFMANKFPIQA

SEQ ID NO: 220122 - protein, 15 aa, Artificial Sequence
  Description of Artificial Sequence: Synthetic peptide
  Seed: LRMKWMMAMKYPITA
LRMKWFMANKFPISA

SEQ ID NO: 220123 - protein, 15 aa, Artificial Sequence
  Description of Artificial Sequence: Synthetic peptide
  Seed: LRMKWMMAMKYPITA
LRMKWFMANKFPITA

SEQ ID NO: 220124 - protein, 15 aa, Artificial Sequence
  Description of Artificial Sequence: Synthetic peptide
  Seed: LRMKWMMAMKYPITA
LRMKWFMANKFPIVA

SEQ ID NO: 220125 - protein, 15 aa, Artificial Sequence
  Description of Artificial Sequence: Synthetic peptide
  Seed: LRMKWMMAMKYPITA
LRMKWFMANKFPIWA

SEQ ID NO: 220126 - protein, 15 aa, Artificial Sequence
  Description of Artificial Sequence: Synthetic peptide
  Seed: LRMKWMMAMKYPITA
LRMKWFMANKFPIYA

SEQ ID NO: 220127 - protein, 15 aa, Artificial Sequence
  Description of Artificial Sequence: Synthetic peptide
  Seed: LRMKWMMAMKYPITA
LRMKWFMANKIPIIA

SEQ ID NO: 220128 - protein, 15 aa, Artificial Sequence
  Description of Artificial Sequence: Synthetic peptide
  Seed: LRMKWMMAMKYPITA
LRMKWFMANKIPILA

SEQ ID NO: 220129 - protein, 15 aa, Artificial Sequence
  Description of Artificial Sequence: Synthetic peptide
  Seed: LRMKWMMAMKYPITA
LRMKWFMANKIPIVA

SEQ ID NO: 220130 - protein, 15 aa, Artificial Sequence
  Description of Artificial Sequence: Synthetic peptide
  Seed: LRMKWMMAMKYPITA
LRMKWFMANKLPIFA

SEQ ID NO: 220131 - protein, 15 aa, Artificial Sequence
  Description of Artificial Sequence: Synthetic peptide
  Seed: LRMKWMMAMKYPITA
LRMKWFMANKLPIIA

SEQ ID NO: 220132 - protein, 15 aa, Artificial Sequence
  Description of Artificial Sequence: Synthetic peptide
  Seed: LRMKWMMAMKYPITA
LRMKWFMANKLPILA

SEQ ID NO: 220133 - protein, 15 aa, Artificial Sequence
  Description of Artificial Sequence: Synthetic peptide
  Seed: LRMKWMMAMKYPITA
LRMKWFMANKLPIMA

SEQ ID NO: 220134 - protein, 15 aa, Artificial Sequence
  Description of Artificial Sequence: Synthetic peptide
  Seed: LRMKWMMAMKYPITA
LRMKWFMANKLPIVA

SEQ ID NO: 220135 - protein, 15 aa, Artificial Sequence
  Description of Artificial Sequence: Synthetic peptide
  Seed: LRMKWMMAMKYPITA
LRMKWFMANKMPIIA

SEQ ID NO: 220136 - protein, 15 aa, Artificial Sequence
  Description of Artificial Sequence: Synthetic peptide
  Seed: LRMKWMMAMKYPITA
LRMKWFMANKMPILA

SEQ ID NO: 220137 - protein, 15 aa, Artificial Sequence
  Description of Artificial Sequence: Synthetic peptide
  Seed: LRMKWMMAMKYPITA
LRMKWFMANKYPIIA

SEQ ID NO: 220138 - protein, 15 aa, Artificial Sequence
  Description of Artificial Sequence: Synthetic peptide
  Seed: LRMKWMMAMKYPITA
LRMKWFMANKYPILA

SEQ ID NO: 220139 - protein, 15 aa, Artificial Sequence
  Description of Artificial Sequence: Synthetic peptide
  Seed: LRMKWMMAMKYPITA
LRMKWFMANKYPIVA

SEQ ID NO: 220140 - protein, 15 aa, Artificial Sequence
  Description of Artificial Sequence: Synthetic peptide
  Seed: LRMKWMMAMKYPITA
LRMKWFMAPKFPIIA

SEQ ID NO: 220141 - protein, 15 aa, Artificial Sequence
  Description of Artificial Sequence: Synthetic peptide
  Seed: LRMKWMMAMKYPITA
LRMKWFMAPKFPILA

SEQ ID NO: 220142 - protein, 15 aa, Artificial Sequence
  Description of Artificial Sequence: Synthetic peptide
  Seed: LRMKWMMAMKYPITA
LRMKWFMAPKFPIVA

SEQ ID NO: 220143 - protein, 15 aa, Artificial Sequence
  Description of Artificial Sequence: Synthetic peptide
  Seed: LRMKWMMAMKYPITA
LRMKWFMAQKFPIAA

SEQ ID NO: 220144 - protein, 15 aa, Artificial Sequence
  Description of Artificial Sequence: Synthetic peptide
  Seed: LRMKWMMAMKYPITA
LRMKWFMAQKFPICA

SEQ ID NO: 220145 - protein, 15 aa, Artificial Sequence
  Description of Artificial Sequence: Synthetic peptide
  Seed: LRMKWMMAMKYPITA
LRMKWFMAQKFPIDA

SEQ ID NO: 220146 - protein, 15 aa, Artificial Sequence
  Description of Artificial Sequence: Synthetic peptide
  Seed: LRMKWMMAMKYPITA
LRMKWFMAQKFPIEA

SEQ ID NO: 220147 - protein, 15 aa, Artificial Sequence
  Description of Artificial Sequence: Synthetic peptide
  Seed: LRMKWMMAMKYPITA
LRMKWFMAQKFPIFA

SEQ ID NO: 220148 - protein, 15 aa, Artificial Sequence
  Description of Artificial Sequence: Synthetic peptide
  Seed: LRMKWMMAMKYPITA
LRMKWFMAQKFPIHA

SEQ ID NO: 220149 - protein, 15 aa, Artificial Sequence
  Description of Artificial Sequence: Synthetic peptide
  Seed: LRMKWMMAMKYPITA
LRMKWFMAQKFPIIA

SEQ ID NO: 220150 - protein, 15 aa, Artificial Sequence
  Description of Artificial Sequence: Synthetic peptide
  Seed: LRMKWMMAMKYPITA
LRMKWFMAQKFPILA

SEQ ID NO: 220151 - protein, 15 aa, Artificial Sequence
  Description of Artificial Sequence: Synthetic peptide
  Seed: LRMKWMMAMKYPITA
LRMKWFMAQKFPIMA

SEQ ID NO: 220152 - protein, 15 aa, Artificial Sequence
  Description of Artificial Sequence: Synthetic peptide
  Seed: LRMKWMMAMKYPITA
LRMKWFMAQKFPINA

SEQ ID NO: 220153 - protein, 15 aa, Artificial Sequence
  Description of Artificial Sequence: Synthetic peptide
  Seed: LRMKWMMAMKYPITA
LRMKWFMAQKFPIPA

SEQ ID NO: 220154 - protein, 15 aa, Artificial Sequence
  Description of Artificial Sequence: Synthetic peptide
  Seed: LRMKWMMAMKYPITA
LRMKWFMAQKFPIQA

SEQ ID NO: 220155 - protein, 15 aa, Artificial Sequence
  Description of Artificial Sequence: Synthetic peptide
  Seed: LRMKWMMAMKYPITA
LRMKWFMAQKFPIRA

SEQ ID NO: 220156 - protein, 15 aa, Artificial Sequence
  Description of Artificial Sequence: Synthetic peptide
  Seed: LRMKWMMAMKYPITA
LRMKWFMAQKFPISA

SEQ ID NO: 220157 - protein, 15 aa, Artificial Sequence
  Description of Artificial Sequence: Synthetic peptide
  Seed: LRMKWMMAMKYPITA
LRMKWFMAQKFPITA

SEQ ID NO: 220158 - protein, 15 aa, Artificial Sequence
  Description of Artificial Sequence: Synthetic peptide
  Seed: LRMKWMMAMKYPITA
LRMKWFMAQKFPIVA

SEQ ID NO: 220159 - protein, 15 aa, Artificial Sequence
  Description of Artificial Sequence: Synthetic peptide
  Seed: LRMKWMMAMKYPITA
LRMKWFMAQKFPIWA

SEQ ID NO: 220160 - protein, 15 aa, Artificial Sequence
  Description of Artificial Sequence: Synthetic peptide
  Seed: LRMKWMMAMKYPITA
LRMKWFMAQKFPIYA

SEQ ID NO: 220161 - protein, 15 aa, Artificial Sequence
  Description of Artificial Sequence: Synthetic peptide
  Seed: LRMKWMMAMKYPITA
LRMKWFMAQKLPIIA

SEQ ID NO: 220162 - protein, 15 aa, Artificial Sequence
  Description of Artificial Sequence: Synthetic peptide
  Seed: LRMKWMMAMKYPITA
LRMKWFMAQKLPILA

SEQ ID NO: 220163 - protein, 15 aa, Artificial Sequence
  Description of Artificial Sequence: Synthetic peptide
  Seed: LRMKWMMAMKYPITA
LRMKWFMAQKLPIMA

SEQ ID NO: 220164 - protein, 15 aa, Artificial Sequence
  Description of Artificial Sequence: Synthetic peptide
  Seed: LRMKWMMAMKYPITA
LRMKWFMAQKLPITA

SEQ ID NO: 220165 - protein, 15 aa, Artificial Sequence
  Description of Artificial Sequence: Synthetic peptide
  Seed: LRMKWMMAMKYPITA
LRMKWFMAQKLPIVA

SEQ ID NO: 220166 - protein, 15 aa, Artificial Sequence
  Description of Artificial Sequence: Synthetic peptide
  Seed: LRMKWMMAMKYPITA
LRMKWFMAQKMPIIA

SEQ ID NO: 220167 - protein, 15 aa, Artificial Sequence
  Description of Artificial Sequence: Synthetic peptide
  Seed: LRMKWMMAMKYPITA
LRMKWFMAQKMPILA

SEQ ID NO: 220168 - protein, 15 aa, Artificial Sequence
  Description of Artificial Sequence: Synthetic peptide
  Seed: LRMKWMMAMKYPITA
LRMKWFMAQKMPIVA

SEQ ID NO: 220169 - protein, 15 aa, Artificial Sequence
  Description of Artificial Sequence: Synthetic peptide
  Seed: LRMKWMMAMKYPITA
LRMKWFMAQKWPIIA

SEQ ID NO: 220170 - protein, 15 aa, Artificial Sequence
  Description of Artificial Sequence: Synthetic peptide
  Seed: LRMKWMMAMKYPITA
LRMKWFMAQKWPILA

SEQ ID NO: 220171 - protein, 15 aa, Artificial Sequence
  Description of Artificial Sequence: Synthetic peptide
  Seed: LRMKWMMAMKYPITA
LRMKWFMAQKWPIVA

SEQ ID NO: 220172 - protein, 15 aa, Artificial Sequence
  Description of Artificial Sequence: Synthetic peptide
  Seed: LRMKWMMAMKYPITA
LRMKWFMAQKYPIIA

SEQ ID NO: 220173 - protein, 15 aa, Artificial Sequence
  Description of Artificial Sequence: Synthetic peptide
  Seed: LRMKWMMAMKYPITA
LRMKWFMAQKYPILA

SEQ ID NO: 220174 - protein, 15 aa, Artificial Sequence
  Description of Artificial Sequence: Synthetic peptide
  Seed: LRMKWMMAMKYPITA
LRMKWFMAQKYPIVA

SEQ ID NO: 220175 - protein, 15 aa, Artificial Sequence
  Description of Artificial Sequence: Synthetic peptide
  Seed: LRMKWMMAMKYPITA
LRMKWFMARKFPIFA

SEQ ID NO: 220176 - protein, 15 aa, Artificial Sequence
  Description of Artificial Sequence: Synthetic peptide
  Seed: LRMKWMMAMKYPITA
LRMKWFMARKFPIIA

SEQ ID NO: 220177 - protein, 15 aa, Artificial Sequence
  Description of Artificial Sequence: Synthetic peptide
  Seed: LRMKWMMAMKYPITA
LRMKWFMARKFPILA

SEQ ID NO: 220178 - protein, 15 aa, Artificial Sequence
  Description of Artificial Sequence: Synthetic peptide
  Seed: LRMKWMMAMKYPITA
LRMKWFMARKFPIMA

SEQ ID NO: 220179 - protein, 15 aa, Artificial Sequence
  Description of Artificial Sequence: Synthetic peptide
  Seed: LRMKWMMAMKYPITA
LRMKWFMARKFPIVA

SEQ ID NO: 220180 - protein, 15 aa, Artificial Sequence
  Description of Artificial Sequence: Synthetic peptide
  Seed: LRMKWMMAMKYPITA
LRMKWFMARKLPILA

SEQ ID NO: 220181 - protein, 15 aa, Artificial Sequence
  Description of Artificial Sequence: Synthetic peptide
  Seed: LRMKWMMAMKYPITA
LRMKWFMASKFPIAA

SEQ ID NO: 220182 - protein, 15 aa, Artificial Sequence
  Description of Artificial Sequence: Synthetic peptide
  Seed: LRMKWMMAMKYPITA
LRMKWFMASKFPICA

SEQ ID NO: 220183 - protein, 15 aa, Artificial Sequence
  Description of Artificial Sequence: Synthetic peptide
  Seed: LRMKWMMAMKYPITA
LRMKWFMASKFPIDA

SEQ ID NO: 220184 - protein, 15 aa, Artificial Sequence
  Description of Artificial Sequence: Synthetic peptide
  Seed: LRMKWMMAMKYPITA
LRMKWFMASKFPIEA

SEQ ID NO: 220185 - protein, 15 aa, Artificial Sequence
  Description of Artificial Sequence: Synthetic peptide
  Seed: LRMKWMMAMKYPITA
LRMKWFMASKFPIFA

SEQ ID NO: 220186 - protein, 15 aa, Artificial Sequence
  Description of Artificial Sequence: Synthetic peptide
  Seed: LRMKWMMAMKYPITA
LRMKWFMASKFPIIA

SEQ ID NO: 220187 - protein, 15 aa, Artificial Sequence
  Description of Artificial Sequence: Synthetic peptide
  Seed: LRMKWMMAMKYPITA
LRMKWFMASKFPILA

SEQ ID NO: 220188 - protein, 15 aa, Artificial Sequence
  Description of Artificial Sequence: Synthetic peptide
  Seed: LRMKWMMAMKYPITA
LRMKWFMASKFPIMA

SEQ ID NO: 220189 - protein, 15 aa, Artificial Sequence
  Description of Artificial Sequence: Synthetic peptide
  Seed: LRMKWMMAMKYPITA
LRMKWFMASKFPINA

SEQ ID NO: 220190 - protein, 15 aa, Artificial Sequence
  Description of Artificial Sequence: Synthetic peptide
  Seed: LRMKWMMAMKYPITA
LRMKWFMASKFPIPA

SEQ ID NO: 220191 - protein, 15 aa, Artificial Sequence
  Description of Artificial Sequence: Synthetic peptide
  Seed: LRMKWMMAMKYPITA
LRMKWFMASKFPIQA

SEQ ID NO: 220192 - protein, 15 aa, Artificial Sequence
  Description of Artificial Sequence: Synthetic peptide
  Seed: LRMKWMMAMKYPITA
LRMKWFMASKFPISA

SEQ ID NO: 220193 - protein, 15 aa, Artificial Sequence
  Description of Artificial Sequence: Synthetic peptide
  Seed: LRMKWMMAMKYPITA
LRMKWFMASKFPITA

SEQ ID NO: 220194 - protein, 15 aa, Artificial Sequence
  Description of Artificial Sequence: Synthetic peptide
  Seed: LRMKWMMAMKYPITA
LRMKWFMASKFPIVA

SEQ ID NO: 220195 - protein, 15 aa, Artificial Sequence
  Description of Artificial Sequence: Synthetic peptide
  Seed: LRMKWMMAMKYPITA
LRMKWFMASKFPIWA

SEQ ID NO: 220196 - protein, 15 aa, Artificial Sequence
  Description of Artificial Sequence: Synthetic peptide
  Seed: LRMKWMMAMKYPITA
LRMKWFMASKFPIYA

SEQ ID NO: 220197 - protein, 15 aa, Artificial Sequence
  Description of Artificial Sequence: Synthetic peptide
  Seed: LRMKWMMAMKYPITA
LRMKWFMASKIPIIA

SEQ ID NO: 220198 - protein, 15 aa, Artificial Sequence
  Description of Artificial Sequence: Synthetic peptide
  Seed: LRMKWMMAMKYPITA
LRMKWFMASKIPILA

SEQ ID NO: 220199 - protein, 15 aa, Artificial Sequence
  Description of Artificial Sequence: Synthetic peptide
  Seed: LRMKWMMAMKYPITA
LRMKWFMASKIPIVA

SEQ ID NO: 220200 - protein, 15 aa, Artificial Sequence
  Description of Artificial Sequence: Synthetic peptide
  Seed: LRMKWMMAMKYPITA
LRMKWFMASKLPIFA

SEQ ID NO: 220201 - protein, 15 aa, Artificial Sequence
  Description of Artificial Sequence: Synthetic peptide
  Seed: LRMKWMMAMKYPITA
LRMKWFMASKLPIIA

SEQ ID NO: 220202 - protein, 15 aa, Artificial Sequence
  Description of Artificial Sequence: Synthetic peptide
  Seed: LRMKWMMAMKYPITA
LRMKWFMASKLPILA

SEQ ID NO: 220203 - protein, 15 aa, Artificial Sequence
  Description of Artificial Sequence: Synthetic peptide
  Seed: LRMKWMMAMKYPITA
LRMKWFMASKLPIMA

SEQ ID NO: 220204 - protein, 15 aa, Artificial Sequence
  Description of Artificial Sequence: Synthetic peptide
  Seed: LRMKWMMAMKYPITA
LRMKWFMASKLPIVA

SEQ ID NO: 220205 - protein, 15 aa, Artificial Sequence
  Description of Artificial Sequence: Synthetic peptide
  Seed: LRMKWMMAMKYPITA
LRMKWFMASKMPIIA

SEQ ID NO: 220206 - protein, 15 aa, Artificial Sequence
  Description of Artificial Sequence: Synthetic peptide
  Seed: LRMKWMMAMKYPITA
LRMKWFMASKMPILA

SEQ ID NO: 220207 - protein, 15 aa, Artificial Sequence
  Description of Artificial Sequence: Synthetic peptide
  Seed: LRMKWMMAMKYPITA
LRMKWFMASKMPIVA

SEQ ID NO: 220208 - protein, 15 aa, Artificial Sequence
  Description of Artificial Sequence: Synthetic peptide
  Seed: LRMKWMMAMKYPITA
LRMKWFMASKWPIIA

SEQ ID NO: 220209 - protein, 15 aa, Artificial Sequence
  Description of Artificial Sequence: Synthetic peptide
  Seed: LRMKWMMAMKYPITA
LRMKWFMASKWPILA

SEQ ID NO: 220210 - protein, 15 aa, Artificial Sequence
  Description of Artificial Sequence: Synthetic peptide
  Seed: LRMKWMMAMKYPITA
LRMKWFMASKWPIVA

SEQ ID NO: 220211 - protein, 15 aa, Artificial Sequence
  Description of Artificial Sequence: Synthetic peptide
  Seed: LRMKWMMAMKYPITA
LRMKWFMASKYPIFA

SEQ ID NO: 220212 - protein, 15 aa, Artificial Sequence
  Description of Artificial Sequence: Synthetic peptide
  Seed: LRMKWMMAMKYPITA
LRMKWFMASKYPIIA

SEQ ID NO: 220213 - protein, 15 aa, Artificial Sequence
  Description of Artificial Sequence: Synthetic peptide
  Seed: LRMKWMMAMKYPITA
LRMKWFMASKYPILA

SEQ ID NO: 220214 - protein, 15 aa, Artificial Sequence
  Description of Artificial Sequence: Synthetic peptide
  Seed: LRMKWMMAMKYPITA
LRMKWFMASKYPIMA

SEQ ID NO: 220215 - protein, 15 aa, Artificial Sequence
  Description of Artificial Sequence: Synthetic peptide
  Seed: LRMKWMMAMKYPITA
LRMKWFMASKYPIVA

SEQ ID NO: 220216 - protein, 15 aa, Artificial Sequence
  Description of Artificial Sequence: Synthetic peptide
  Seed: LRMKWMMAMKYPITA
LRMKWFMATKFPIAA

SEQ ID NO: 220217 - protein, 15 aa, Artificial Sequence
  Description of Artificial Sequence: Synthetic peptide
  Seed: LRMKWMMAMKYPITA
LRMKWFMATKFPICA

SEQ ID NO: 220218 - protein, 15 aa, Artificial Sequence
  Description of Artificial Sequence: Synthetic peptide
  Seed: LRMKWMMAMKYPITA
LRMKWFMATKFPIDA

SEQ ID NO: 220219 - protein, 15 aa, Artificial Sequence
  Description of Artificial Sequence: Synthetic peptide
  Seed: LRMKWMMAMKYPITA
LRMKWFMATKFPIEA

SEQ ID NO: 220220 - protein, 15 aa, Artificial Sequence
  Description of Artificial Sequence: Synthetic peptide
  Seed: LRMKWMMAMKYPITA
LRMKWFMATKFPIFA

SEQ ID NO: 220221 - protein, 15 aa, Artificial Sequence
  Description of Artificial Sequence: Synthetic peptide
  Seed: LRMKWMMAMKYPITA
LRMKWFMATKFPIHA

SEQ ID NO: 220222 - protein, 15 aa, Artificial Sequence
  Description of Artificial Sequence: Synthetic peptide
  Seed: LRMKWMMAMKYPITA
LRMKWFMATKFPIIA

SEQ ID NO: 220223 - protein, 15 aa, Artificial Sequence
  Description of Artificial Sequence: Synthetic peptide
  Seed: LRMKWMMAMKYPITA
LRMKWFMATKFPILA

SEQ ID NO: 220224 - protein, 15 aa, Artificial Sequence
  Description of Artificial Sequence: Synthetic peptide
  Seed: LRMKWMMAMKYPITA
LRMKWFMATKFPIMA

SEQ ID NO: 220225 - protein, 15 aa, Artificial Sequence
  Description of Artificial Sequence: Synthetic peptide
  Seed: LRMKWMMAMKYPITA
LRMKWFMATKFPINA

SEQ ID NO: 220226 - protein, 15 aa, Artificial Sequence
  Description of Artificial Sequence: Synthetic peptide
  Seed: LRMKWMMAMKYPITA
LRMKWFMATKFPIPA

SEQ ID NO: 220227 - protein, 15 aa, Artificial Sequence
  Description of Artificial Sequence: Synthetic peptide
  Seed: LRMKWMMAMKYPITA
LRMKWFMATKFPIQA

SEQ ID NO: 220228 - protein, 15 aa, Artificial Sequence
  Description of Artificial Sequence: Synthetic peptide
  Seed: LRMKWMMAMKYPITA
LRMKWFMATKFPIRA

SEQ ID NO: 220229 - protein, 15 aa, Artificial Sequence
  Description of Artificial Sequence: Synthetic peptide
  Seed: LRMKWMMAMKYPITA
LRMKWFMATKFPISA

SEQ ID NO: 220230 - protein, 15 aa, Artificial Sequence
  Description of Artificial Sequence: Synthetic peptide
  Seed: LRMKWMMAMKYPITA
LRMKWFMATKFPITA

SEQ ID NO: 220231 - protein, 15 aa, Artificial Sequence
  Description of Artificial Sequence: Synthetic peptide
  Seed: LRMKWMMAMKYPITA
LRMKWFMATKFPIVA

SEQ ID NO: 220232 - protein, 15 aa, Artificial Sequence
  Description of Artificial Sequence: Synthetic peptide
  Seed: LRMKWMMAMKYPITA
LRMKWFMATKFPIWA

SEQ ID NO: 220233 - protein, 15 aa, Artificial Sequence
  Description of Artificial Sequence: Synthetic peptide
  Seed: LRMKWMMAMKYPITA
LRMKWFMATKFPIYA

SEQ ID NO: 220234 - protein, 15 aa, Artificial Sequence
  Description of Artificial Sequence: Synthetic peptide
  Seed: LRMKWMMAMKYPITA
LRMKWFMATKIPIFA

SEQ ID NO: 220235 - protein, 15 aa, Artificial Sequence
  Description of Artificial Sequence: Synthetic peptide
  Seed: LRMKWMMAMKYPITA
LRMKWFMATKIPIIA

SEQ ID NO: 220236 - protein, 15 aa, Artificial Sequence
  Description of Artificial Sequence: Synthetic peptide
  Seed: LRMKWMMAMKYPITA
LRMKWFMATKIPILA

SEQ ID NO: 220237 - protein, 15 aa, Artificial Sequence
  Description of Artificial Sequence: Synthetic peptide
  Seed: LRMKWMMAMKYPITA
LRMKWFMATKIPIMA

SEQ ID NO: 220238 - protein, 15 aa, Artificial Sequence
  Description of Artificial Sequence: Synthetic peptide
  Seed: LRMKWMMAMKYPITA
LRMKWFMATKIPIVA

SEQ ID NO: 220239 - protein, 15 aa, Artificial Sequence
  Description of Artificial Sequence: Synthetic peptide
  Seed: LRMKWMMAMKYPITA
LRMKWFMATKLPIFA

SEQ ID NO: 220240 - protein, 15 aa, Artificial Sequence
  Description of Artificial Sequence: Synthetic peptide
  Seed: LRMKWMMAMKYPITA
LRMKWFMATKLPIIA

SEQ ID NO: 220241 - protein, 15 aa, Artificial Sequence
  Description of Artificial Sequence: Synthetic peptide
  Seed: LRMKWMMAMKYPITA
LRMKWFMATKLPILA

SEQ ID NO: 220242 - protein, 15 aa, Artificial Sequence
  Description of Artificial Sequence: Synthetic peptide
  Seed: LRMKWMMAMKYPITA
LRMKWFMATKLPIMA

SEQ ID NO: 220243 - protein, 15 aa, Artificial Sequence
  Description of Artificial Sequence: Synthetic peptide
  Seed: LRMKWMMAMKYPITA
LRMKWFMATKLPITA

SEQ ID NO: 220244 - protein, 15 aa, Artificial Sequence
  Description of Artificial Sequence: Synthetic peptide
  Seed: LRMKWMMAMKYPITA
LRMKWFMATKLPIVA

SEQ ID NO: 220245 - protein, 15 aa, Artificial Sequence
  Description of Artificial Sequence: Synthetic peptide
  Seed: LRMKWMMAMKYPITA
LRMKWFMATKLPIYA

SEQ ID NO: 220246 - protein, 15 aa, Artificial Sequence
  Description of Artificial Sequence: Synthetic peptide
  Seed: LRMKWMMAMKYPITA
LRMKWFMATKMPIIA

SEQ ID NO: 220247 - protein, 15 aa, Artificial Sequence
  Description of Artificial Sequence: Synthetic peptide
  Seed: LRMKWMMAMKYPITA
LRMKWFMATKMPILA

SEQ ID NO: 220248 - protein, 15 aa, Artificial Sequence
  Description of Artificial Sequence: Synthetic peptide
  Seed: LRMKWMMAMKYPITA
LRMKWFMATKMPIMA

SEQ ID NO: 220249 - protein, 15 aa, Artificial Sequence
  Description of Artificial Sequence: Synthetic peptide
  Seed: LRMKWMMAMKYPITA
LRMKWFMATKMPIVA

SEQ ID NO: 220250 - protein, 15 aa, Artificial Sequence
  Description of Artificial Sequence: Synthetic peptide
  Seed: LRMKWMMAMKYPITA
LRMKWFMATKVPIIA

SEQ ID NO: 220251 - protein, 15 aa, Artificial Sequence
  Description of Artificial Sequence: Synthetic peptide
  Seed: LRMKWMMAMKYPITA
LRMKWFMATKVPILA

SEQ ID NO: 220252 - protein, 15 aa, Artificial Sequence
  Description of Artificial Sequence: Synthetic peptide
  Seed: LRMKWMMAMKYPITA
LRMKWFMATKWPIFA

SEQ ID NO: 220253 - protein, 15 aa, Artificial Sequence
  Description of Artificial Sequence: Synthetic peptide
  Seed: LRMKWMMAMKYPITA
LRMKWFMATKWPIIA

SEQ ID NO: 220254 - protein, 15 aa, Artificial Sequence
  Description of Artificial Sequence: Synthetic peptide
  Seed: LRMKWMMAMKYPITA
LRMKWFMATKWPILA

SEQ ID NO: 220255 - protein, 15 aa, Artificial Sequence
  Description of Artificial Sequence: Synthetic peptide
  Seed: LRMKWMMAMKYPITA
LRMKWFMATKWPIMA

SEQ ID NO: 220256 - protein, 15 aa, Artificial Sequence
  Description of Artificial Sequence: Synthetic peptide
  Seed: LRMKWMMAMKYPITA
LRMKWFMATKWPIVA

SEQ ID NO: 220257 - protein, 15 aa, Artificial Sequence
  Description of Artificial Sequence: Synthetic peptide
  Seed: LRMKWMMAMKYPITA
LRMKWFMATKYPIFA

SEQ ID NO: 220258 - protein, 15 aa, Artificial Sequence
  Description of Artificial Sequence: Synthetic peptide
  Seed: LRMKWMMAMKYPITA
LRMKWFMATKYPIIA

SEQ ID NO: 220259 - protein, 15 aa, Artificial Sequence
  Description of Artificial Sequence: Synthetic peptide
  Seed: LRMKWMMAMKYPITA
LRMKWFMATKYPILA

SEQ ID NO: 220260 - protein, 15 aa, Artificial Sequence
  Description of Artificial Sequence: Synthetic peptide
  Seed: LRMKWMMAMKYPITA
LRMKWFMATKYPIMA

SEQ ID NO: 220261 - protein, 15 aa, Artificial Sequence
  Description of Artificial Sequence: Synthetic peptide
  Seed: LRMKWMMAMKYPITA
LRMKWFMATKYPIVA

SEQ ID NO: 220262 - protein, 15 aa, Artificial Sequence
  Description of Artificial Sequence: Synthetic peptide
  Seed: LRMKWMMAMKYPITA
LRMKWFMAVKFPIAA

SEQ ID NO: 220263 - protein, 15 aa, Artificial Sequence
  Description of Artificial Sequence: Synthetic peptide
  Seed: LRMKWMMAMKYPITA
LRMKWFMAVKFPICA

SEQ ID NO: 220264 - protein, 15 aa, Artificial Sequence
  Description of Artificial Sequence: Synthetic peptide
  Seed: LRMKWMMAMKYPITA
LRMKWFMAVKFPIDA

SEQ ID NO: 220265 - protein, 15 aa, Artificial Sequence
  Description of Artificial Sequence: Synthetic peptide
  Seed: LRMKWMMAMKYPITA
LRMKWFMAVKFPIEA

SEQ ID NO: 220266 - protein, 15 aa, Artificial Sequence
  Description of Artificial Sequence: Synthetic peptide
  Seed: LRMKWMMAMKYPITA
LRMKWFMAVKFPIFA

SEQ ID NO: 220267 - protein, 15 aa, Artificial Sequence
  Description of Artificial Sequence: Synthetic peptide
  Seed: LRMKWMMAMKYPITA
LRMKWFMAVKFPIGA

SEQ ID NO: 220268 - protein, 15 aa, Artificial Sequence
  Description of Artificial Sequence: Synthetic peptide
  Seed: LRMKWMMAMKYPITA
LRMKWFMAVKFPIHA

SEQ ID NO: 220269 - protein, 15 aa, Artificial Sequence
  Description of Artificial Sequence: Synthetic peptide
  Seed: LRMKWMMAMKYPITA
LRMKWFMAVKFPIIA

SEQ ID NO: 220270 - protein, 15 aa, Artificial Sequence
  Description of Artificial Sequence: Synthetic peptide
  Seed: LRMKWMMAMKYPITA
LRMKWFMAVKFPIKA

SEQ ID NO: 220271 - protein, 15 aa, Artificial Sequence
  Description of Artificial Sequence: Synthetic peptide
  Seed: LRMKWMMAMKYPITA
LRMKWFMAVKFPILA

SEQ ID NO: 220272 - protein, 15 aa, Artificial Sequence
  Description of Artificial Sequence: Synthetic peptide
  Seed: LRMKWMMAMKYPITA
LRMKWFMAVKFPIMA

SEQ ID NO: 220273 - protein, 15 aa, Artificial Sequence
  Description of Artificial Sequence: Synthetic peptide
  Seed: LRMKWMMAMKYPITA
LRMKWFMAVKFPINA

SEQ ID NO: 220274 - protein, 15 aa, Artificial Sequence
  Description of Artificial Sequence: Synthetic peptide
  Seed: LRMKWMMAMKYPITA
LRMKWFMAVKFPIPA

SEQ ID NO: 220275 - protein, 15 aa, Artificial Sequence
  Description of Artificial Sequence: Synthetic peptide
  Seed: LRMKWMMAMKYPITA
LRMKWFMAVKFPIQA

SEQ ID NO: 220276 - protein, 15 aa, Artificial Sequence
  Description of Artificial Sequence: Synthetic peptide
  Seed: LRMKWMMAMKYPITA
LRMKWFMAVKFPIRA

SEQ ID NO: 220277 - protein, 15 aa, Artificial Sequence
  Description of Artificial Sequence: Synthetic peptide
  Seed: LRMKWMMAMKYPITA
LRMKWFMAVKFPISA

SEQ ID NO: 220278 - protein, 15 aa, Artificial Sequence
  Description of Artificial Sequence: Synthetic peptide
  Seed: LRMKWMMAMKYPITA
LRMKWFMAVKFPITA

SEQ ID NO: 220279 - protein, 15 aa, Artificial Sequence
  Description of Artificial Sequence: Synthetic peptide
  Seed: LRMKWMMAMKYPITA
LRMKWFMAVKFPIVA

SEQ ID NO: 220280 - protein, 15 aa, Artificial Sequence
  Description of Artificial Sequence: Synthetic peptide
  Seed: LRMKWMMAMKYPITA
LRMKWFMAVKFPIWA

SEQ ID NO: 220281 - protein, 15 aa, Artificial Sequence
  Description of Artificial Sequence: Synthetic peptide
  Seed: LRMKWMMAMKYPITA
LRMKWFMAVKFPIYA

SEQ ID NO: 220282 - protein, 15 aa, Artificial Sequence
  Description of Artificial Sequence: Synthetic peptide
  Seed: LRMKWMMAMKYPITA
LRMKWFMAVKIPIFA

SEQ ID NO: 220283 - protein, 15 aa, Artificial Sequence
  Description of Artificial Sequence: Synthetic peptide
  Seed: LRMKWMMAMKYPITA
LRMKWFMAVKIPIIA

SEQ ID NO: 220284 - protein, 15 aa, Artificial Sequence
  Description of Artificial Sequence: Synthetic peptide
  Seed: LRMKWMMAMKYPITA
LRMKWFMAVKIPILA

SEQ ID NO: 220285 - protein, 15 aa, Artificial Sequence
  Description of Artificial Sequence: Synthetic peptide
  Seed: LRMKWMMAMKYPITA
LRMKWFMAVKIPIMA

SEQ ID NO: 220286 - protein, 15 aa, Artificial Sequence
  Description of Artificial Sequence: Synthetic peptide
  Seed: LRMKWMMAMKYPITA
LRMKWFMAVKIPIVA

SEQ ID NO: 220287 - protein, 15 aa, Artificial Sequence
  Description of Artificial Sequence: Synthetic peptide
  Seed: LRMKWMMAMKYPITA
LRMKWFMAVKLPIAA

SEQ ID NO: 220288 - protein, 15 aa, Artificial Sequence
  Description of Artificial Sequence: Synthetic peptide
  Seed: LRMKWMMAMKYPITA
LRMKWFMAVKLPIDA

SEQ ID NO: 220289 - protein, 15 aa, Artificial Sequence
  Description of Artificial Sequence: Synthetic peptide
  Seed: LRMKWMMAMKYPITA
LRMKWFMAVKLPIFA

SEQ ID NO: 220290 - protein, 15 aa, Artificial Sequence
  Description of Artificial Sequence: Synthetic peptide
  Seed: LRMKWMMAMKYPITA
LRMKWFMAVKLPIIA

SEQ ID NO: 220291 - protein, 15 aa, Artificial Sequence
  Description of Artificial Sequence: Synthetic peptide
  Seed: LRMKWMMAMKYPITA
LRMKWFMAVKLPILA

SEQ ID NO: 220292 - protein, 15 aa, Artificial Sequence
  Description of Artificial Sequence: Synthetic peptide
  Seed: LRMKWMMAMKYPITA
LRMKWFMAVKLPIMA

SEQ ID NO: 220293 - protein, 15 aa, Artificial Sequence
  Description of Artificial Sequence: Synthetic peptide
  Seed: LRMKWMMAMKYPITA
LRMKWFMAVKLPINA

SEQ ID NO: 220294 - protein, 15 aa, Artificial Sequence
  Description of Artificial Sequence: Synthetic peptide
  Seed: LRMKWMMAMKYPITA
LRMKWFMAVKLPISA

SEQ ID NO: 220295 - protein, 15 aa, Artificial Sequence
  Description of Artificial Sequence: Synthetic peptide
  Seed: LRMKWMMAMKYPITA
LRMKWFMAVKLPITA

SEQ ID NO: 220296 - protein, 15 aa, Artificial Sequence
  Description of Artificial Sequence: Synthetic peptide
  Seed: LRMKWMMAMKYPITA
LRMKWFMAVKLPIVA

SEQ ID NO: 220297 - protein, 15 aa, Artificial Sequence
  Description of Artificial Sequence: Synthetic peptide
  Seed: LRMKWMMAMKYPITA
LRMKWFMAVKLPIYA

SEQ ID NO: 220298 - protein, 15 aa, Artificial Sequence
  Description of Artificial Sequence: Synthetic peptide
  Seed: LRMKWMMAMKYPITA
LRMKWFMAVKMPIFA

SEQ ID NO: 220299 - protein, 15 aa, Artificial Sequence
  Description of Artificial Sequence: Synthetic peptide
  Seed: LRMKWMMAMKYPITA
LRMKWFMAVKMPIIA

SEQ ID NO: 220300 - protein, 15 aa, Artificial Sequence
  Description of Artificial Sequence: Synthetic peptide
  Seed: LRMKWMMAMKYPITA
LRMKWFMAVKMPILA

SEQ ID NO: 220301 - protein, 15 aa, Artificial Sequence
  Description of Artificial Sequence: Synthetic peptide
  Seed: LRMKWMMAMKYPITA
LRMKWFMAVKMPIMA

SEQ ID NO: 220302 - protein, 15 aa, Artificial Sequence
  Description of Artificial Sequence: Synthetic peptide
  Seed: LRMKWMMAMKYPITA
LRMKWFMAVKMPIVA

SEQ ID NO: 220303 - protein, 15 aa, Artificial Sequence
  Description of Artificial Sequence: Synthetic peptide
  Seed: LRMKWMMAMKYPITA
LRMKWFMAVKVPIIA

SEQ ID NO: 220304 - protein, 15 aa, Artificial Sequence
  Description of Artificial Sequence: Synthetic peptide
  Seed: LRMKWMMAMKYPITA
LRMKWFMAVKVPILA

SEQ ID NO: 220305 - protein, 15 aa, Artificial Sequence
  Description of Artificial Sequence: Synthetic peptide
  Seed: LRMKWMMAMKYPITA
LRMKWFMAVKVPIVA

SEQ ID NO: 220306 - protein, 15 aa, Artificial Sequence
  Description of Artificial Sequence: Synthetic peptide
  Seed: LRMKWMMAMKYPITA
LRMKWFMAVKWPIFA

SEQ ID NO: 220307 - protein, 15 aa, Artificial Sequence
  Description of Artificial Sequence: Synthetic peptide
  Seed: LRMKWMMAMKYPITA
LRMKWFMAVKWPIIA

SEQ ID NO: 220308 - protein, 15 aa, Artificial Sequence
  Description of Artificial Sequence: Synthetic peptide
  Seed: LRMKWMMAMKYPITA
LRMKWFMAVKWPILA

SEQ ID NO: 220309 - protein, 15 aa, Artificial Sequence
  Description of Artificial Sequence: Synthetic peptide
  Seed: LRMKWMMAMKYPITA
LRMKWFMAVKWPIMA

SEQ ID NO: 220310 - protein, 15 aa, Artificial Sequence
  Description of Artificial Sequence: Synthetic peptide
  Seed: LRMKWMMAMKYPITA
LRMKWFMAVKWPIVA

SEQ ID NO: 220311 - protein, 15 aa, Artificial Sequence
  Description of Artificial Sequence: Synthetic peptide
  Seed: LRMKWMMAMKYPITA
LRMKWFMAVKYPIAA

SEQ ID NO: 220312 - protein, 15 aa, Artificial Sequence
  Description of Artificial Sequence: Synthetic peptide
  Seed: LRMKWMMAMKYPITA
LRMKWFMAVKYPIEA

SEQ ID NO: 220313 - protein, 15 aa, Artificial Sequence
  Description of Artificial Sequence: Synthetic peptide
  Seed: LRMKWMMAMKYPITA
LRMKWFMAVKYPIFA

SEQ ID NO: 220314 - protein, 15 aa, Artificial Sequence
  Description of Artificial Sequence: Synthetic peptide
  Seed: LRMKWMMAMKYPITA
LRMKWFMAVKYPIIA

SEQ ID NO: 220315 - protein, 15 aa, Artificial Sequence
  Description of Artificial Sequence: Synthetic peptide
  Seed: LRMKWMMAMKYPITA
LRMKWFMAVKYPILA

SEQ ID NO: 220316 - protein, 15 aa, Artificial Sequence
  Description of Artificial Sequence: Synthetic peptide
  Seed: LRMKWMMAMKYPITA
LRMKWFMAVKYPIMA

SEQ ID NO: 220317 - protein, 15 aa, Artificial Sequence
  Description of Artificial Sequence: Synthetic peptide
  Seed: LRMKWMMAMKYPITA
LRMKWFMAVKYPINA

SEQ ID NO: 220318 - protein, 15 aa, Artificial Sequence
  Description of Artificial Sequence: Synthetic peptide
  Seed: LRMKWMMAMKYPITA
LRMKWFMAVKYPISA

SEQ ID NO: 220319 - protein, 15 aa, Artificial Sequence
  Description of Artificial Sequence: Synthetic peptide
  Seed: LRMKWMMAMKYPITA
LRMKWFMAVKYPITA

SEQ ID NO: 220320 - protein, 15 aa, Artificial Sequence
  Description of Artificial Sequence: Synthetic peptide
  Seed: LRMKWMMAMKYPITA
LRMKWFMAVKYPIVA

SEQ ID NO: 220321 - protein, 15 aa, Artificial Sequence
  Description of Artificial Sequence: Synthetic peptide
  Seed: LRMKWMMAMKYPITA
LRMKWFMAVKYPIYA

SEQ ID NO: 220322 - protein, 15 aa, Artificial Sequence
  Description of Artificial Sequence: Synthetic peptide
  Seed: LRMKWMMAMKYPITA
LRMKWFMAWKFPIAA

SEQ ID NO: 220323 - protein, 15 aa, Artificial Sequence
  Description of Artificial Sequence: Synthetic peptide
  Seed: LRMKWMMAMKYPITA
LRMKWFMAWKFPIEA

SEQ ID NO: 220324 - protein, 15 aa, Artificial Sequence
  Description of Artificial Sequence: Synthetic peptide
  Seed: LRMKWMMAMKYPITA
LRMKWFMAWKFPIFA

SEQ ID NO: 220325 - protein, 15 aa, Artificial Sequence
  Description of Artificial Sequence: Synthetic peptide
  Seed: LRMKWMMAMKYPITA
LRMKWFMAWKFPIIA

SEQ ID NO: 220326 - protein, 15 aa, Artificial Sequence
  Description of Artificial Sequence: Synthetic peptide
  Seed: LRMKWMMAMKYPITA
LRMKWFMAWKFPILA

SEQ ID NO: 220327 - protein, 15 aa, Artificial Sequence
  Description of Artificial Sequence: Synthetic peptide
  Seed: LRMKWMMAMKYPITA
LRMKWFMAWKFPIMA

SEQ ID NO: 220328 - protein, 15 aa, Artificial Sequence
  Description of Artificial Sequence: Synthetic peptide
  Seed: LRMKWMMAMKYPITA
LRMKWFMAWKFPINA

SEQ ID NO: 220329 - protein, 15 aa, Artificial Sequence
  Description of Artificial Sequence: Synthetic peptide
  Seed: LRMKWMMAMKYPITA
LRMKWFMAWKFPITA

SEQ ID NO: 220330 - protein, 15 aa, Artificial Sequence
  Description of Artificial Sequence: Synthetic peptide
  Seed: LRMKWMMAMKYPITA
LRMKWFMAWKFPIVA

SEQ ID NO: 220331 - protein, 15 aa, Artificial Sequence
  Description of Artificial Sequence: Synthetic peptide
  Seed: LRMKWMMAMKYPITA
LRMKWFMAWKFPIYA

SEQ ID NO: 220332 - protein, 15 aa, Artificial Sequence
  Description of Artificial Sequence: Synthetic peptide
  Seed: LRMKWMMAMKYPITA
LRMKWFMAWKIPIIA

SEQ ID NO: 220333 - protein, 15 aa, Artificial Sequence
  Description of Artificial Sequence: Synthetic peptide
  Seed: LRMKWMMAMKYPITA
LRMKWFMAWKIPILA

SEQ ID NO: 220334 - protein, 15 aa, Artificial Sequence
  Description of Artificial Sequence: Synthetic peptide
  Seed: LRMKWMMAMKYPITA
LRMKWFMAWKIPIVA

SEQ ID NO: 220335 - protein, 15 aa, Artificial Sequence
  Description of Artificial Sequence: Synthetic peptide
  Seed: LRMKWMMAMKYPITA
LRMKWFMAWKLPIFA

SEQ ID NO: 220336 - protein, 15 aa, Artificial Sequence
  Description of Artificial Sequence: Synthetic peptide
  Seed: LRMKWMMAMKYPITA
LRMKWFMAWKLPIIA

SEQ ID NO: 220337 - protein, 15 aa, Artificial Sequence
  Description of Artificial Sequence: Synthetic peptide
  Seed: LRMKWMMAMKYPITA
LRMKWFMAWKLPILA

SEQ ID NO: 220338 - protein, 15 aa, Artificial Sequence
  Description of Artificial Sequence: Synthetic peptide
  Seed: LRMKWMMAMKYPITA
LRMKWFMAWKLPIMA

SEQ ID NO: 220339 - protein, 15 aa, Artificial Sequence
  Description of Artificial Sequence: Synthetic peptide
  Seed: LRMKWMMAMKYPITA
LRMKWFMAWKLPIVA

SEQ ID NO: 220340 - protein, 15 aa, Artificial Sequence
  Description of Artificial Sequence: Synthetic peptide
  Seed: LRMKWMMAMKYPITA
LRMKWFMAWKLPIYA

SEQ ID NO: 220341 - protein, 15 aa, Artificial Sequence
  Description of Artificial Sequence: Synthetic peptide
  Seed: LRMKWMMAMKYPITA
LRMKWFMAWKMPIIA

SEQ ID NO: 220342 - protein, 15 aa, Artificial Sequence
  Description of Artificial Sequence: Synthetic peptide
  Seed: LRMKWMMAMKYPITA
LRMKWFMAWKMPILA

SEQ ID NO: 220343 - protein, 15 aa, Artificial Sequence
  Description of Artificial Sequence: Synthetic peptide
  Seed: LRMKWMMAMKYPITA
LRMKWFMAWKMPIVA

SEQ ID NO: 220344 - protein, 15 aa, Artificial Sequence
  Description of Artificial Sequence: Synthetic peptide
  Seed: LRMKWMMAMKYPITA
LRMKWFMAWKYPIIA

SEQ ID NO: 220345 - protein, 15 aa, Artificial Sequence
  Description of Artificial Sequence: Synthetic peptide
  Seed: LRMKWMMAMKYPITA
LRMKWFMAWKYPILA

SEQ ID NO: 220346 - protein, 15 aa, Artificial Sequence
  Description of Artificial Sequence: Synthetic peptide
  Seed: LRMKWMMAMKYPITA
LRMKWFMAWKYPIVA

SEQ ID NO: 220347 - protein, 15 aa, Artificial Sequence
  Description of Artificial Sequence: Synthetic peptide
  Seed: LRMKWMMAMKYPITA
LRMKWFMAYKFPIAA

SEQ ID NO: 220348 - protein, 15 aa, Artificial Sequence
  Description of Artificial Sequence: Synthetic peptide
  Seed: LRMKWMMAMKYPITA
LRMKWFMAYKFPIDA

SEQ ID NO: 220349 - protein, 15 aa, Artificial Sequence
  Description of Artificial Sequence: Synthetic peptide
  Seed: LRMKWMMAMKYPITA
LRMKWFMAYKFPIEA

SEQ ID NO: 220350 - protein, 15 aa, Artificial Sequence
  Description of Artificial Sequence: Synthetic peptide
  Seed: LRMKWMMAMKYPITA
LRMKWFMAYKFPIFA

SEQ ID NO: 220351 - protein, 15 aa, Artificial Sequence
  Description of Artificial Sequence: Synthetic peptide
  Seed: LRMKWMMAMKYPITA
LRMKWFMAYKFPIHA

SEQ ID NO: 220352 - protein, 15 aa, Artificial Sequence
  Description of Artificial Sequence: Synthetic peptide
  Seed: LRMKWMMAMKYPITA
LRMKWFMAYKFPIIA

SEQ ID NO: 220353 - protein, 15 aa, Artificial Sequence
  Description of Artificial Sequence: Synthetic peptide
  Seed: LRMKWMMAMKYPITA
LRMKWFMAYKFPILA

SEQ ID NO: 220354 - protein, 15 aa, Artificial Sequence
  Description of Artificial Sequence: Synthetic peptide
  Seed: LRMKWMMAMKYPITA
LRMKWFMAYKFPIMA

SEQ ID NO: 220355 - protein, 15 aa, Artificial Sequence
  Description of Artificial Sequence: Synthetic peptide
  Seed: LRMKWMMAMKYPITA
LRMKWFMAYKFPINA

SEQ ID NO: 220356 - protein, 15 aa, Artificial Sequence
  Description of Artificial Sequence: Synthetic peptide
  Seed: LRMKWMMAMKYPITA
LRMKWFMAYKFPIPA

SEQ ID NO: 220357 - protein, 15 aa, Artificial Sequence
  Description of Artificial Sequence: Synthetic peptide
  Seed: LRMKWMMAMKYPITA
LRMKWFMAYKFPIQA

SEQ ID NO: 220358 - protein, 15 aa, Artificial Sequence
  Description of Artificial Sequence: Synthetic peptide
  Seed: LRMKWMMAMKYPITA
LRMKWFMAYKFPIRA

SEQ ID NO: 220359 - protein, 15 aa, Artificial Sequence
  Description of Artificial Sequence: Synthetic peptide
  Seed: LRMKWMMAMKYPITA
LRMKWFMAYKFPISA

SEQ ID NO: 220360 - protein, 15 aa, Artificial Sequence
  Description of Artificial Sequence: Synthetic peptide
  Seed: LRMKWMMAMKYPITA
LRMKWFMAYKFPITA

SEQ ID NO: 220361 - protein, 15 aa, Artificial Sequence
  Description of Artificial Sequence: Synthetic peptide
  Seed: LRMKWMMAMKYPITA
LRMKWFMAYKFPIVA

SEQ ID NO: 220362 - protein, 15 aa, Artificial Sequence
  Description of Artificial Sequence: Synthetic peptide
  Seed: LRMKWMMAMKYPITA
LRMKWFMAYKFPIWA

SEQ ID NO: 220363 - protein, 15 aa, Artificial Sequence
  Description of Artificial Sequence: Synthetic peptide
  Seed: LRMKWMMAMKYPITA
LRMKWFMAYKFPIYA

SEQ ID NO: 220364 - protein, 15 aa, Artificial Sequence
  Description of Artificial Sequence: Synthetic peptide
  Seed: LRMKWMMAMKYPITA
LRMKWFMAYKIPIIA

SEQ ID NO: 220365 - protein, 15 aa, Artificial Sequence
  Description of Artificial Sequence: Synthetic peptide
  Seed: LRMKWMMAMKYPITA
LRMKWFMAYKIPILA

SEQ ID NO: 220366 - protein, 15 aa, Artificial Sequence
  Description of Artificial Sequence: Synthetic peptide
  Seed: LRMKWMMAMKYPITA
LRMKWFMAYKIPIMA

SEQ ID NO: 220367 - protein, 15 aa, Artificial Sequence
  Description of Artificial Sequence: Synthetic peptide
  Seed: LRMKWMMAMKYPITA
LRMKWFMAYKIPIVA

SEQ ID NO: 220368 - protein, 15 aa, Artificial Sequence
  Description of Artificial Sequence: Synthetic peptide
  Seed: LRMKWMMAMKYPITA
LRMKWFMAYKLPIAA

SEQ ID NO: 220369 - protein, 15 aa, Artificial Sequence
  Description of Artificial Sequence: Synthetic peptide
  Seed: LRMKWMMAMKYPITA
LRMKWFMAYKLPIFA

SEQ ID NO: 220370 - protein, 15 aa, Artificial Sequence
  Description of Artificial Sequence: Synthetic peptide
  Seed: LRMKWMMAMKYPITA
LRMKWFMAYKLPIIA

SEQ ID NO: 220371 - protein, 15 aa, Artificial Sequence
  Description of Artificial Sequence: Synthetic peptide
  Seed: LRMKWMMAMKYPITA
LRMKWFMAYKLPILA

SEQ ID NO: 220372 - protein, 15 aa, Artificial Sequence
  Description of Artificial Sequence: Synthetic peptide
  Seed: LRMKWMMAMKYPITA
LRMKWFMAYKLPIMA

SEQ ID NO: 220373 - protein, 15 aa, Artificial Sequence
  Description of Artificial Sequence: Synthetic peptide
  Seed: LRMKWMMAMKYPITA
LRMKWFMAYKLPINA

SEQ ID NO: 220374 - protein, 15 aa, Artificial Sequence
  Description of Artificial Sequence: Synthetic peptide
  Seed: LRMKWMMAMKYPITA
LRMKWFMAYKLPISA

SEQ ID NO: 220375 - protein, 15 aa, Artificial Sequence
  Description of Artificial Sequence: Synthetic peptide
  Seed: LRMKWMMAMKYPITA
LRMKWFMAYKLPITA

SEQ ID NO: 220376 - protein, 15 aa, Artificial Sequence
  Description of Artificial Sequence: Synthetic peptide
  Seed: LRMKWMMAMKYPITA
LRMKWFMAYKLPIVA

SEQ ID NO: 220377 - protein, 15 aa, Artificial Sequence
  Description of Artificial Sequence: Synthetic peptide
  Seed: LRMKWMMAMKYPITA
LRMKWFMAYKLPIYA

SEQ ID NO: 220378 - protein, 15 aa, Artificial Sequence
  Description of Artificial Sequence: Synthetic peptide
  Seed: LRMKWMMAMKYPITA
LRMKWFMAYKMPIFA

SEQ ID NO: 220379 - protein, 15 aa, Artificial Sequence
  Description of Artificial Sequence: Synthetic peptide
  Seed: LRMKWMMAMKYPITA
LRMKWFMAYKMPIIA

SEQ ID NO: 220380 - protein, 15 aa, Artificial Sequence
  Description of Artificial Sequence: Synthetic peptide
  Seed: LRMKWMMAMKYPITA
LRMKWFMAYKMPILA

SEQ ID NO: 220381 - protein, 15 aa, Artificial Sequence
  Description of Artificial Sequence: Synthetic peptide
  Seed: LRMKWMMAMKYPITA
LRMKWFMAYKMPIMA

SEQ ID NO: 220382 - protein, 15 aa, Artificial Sequence
  Description of Artificial Sequence: Synthetic peptide
  Seed: LRMKWMMAMKYPITA
LRMKWFMAYKMPIVA

SEQ ID NO: 220383 - protein, 15 aa, Artificial Sequence
  Description of Artificial Sequence: Synthetic peptide
  Seed: LRMKWMMAMKYPITA
LRMKWFMAYKVPIIA

SEQ ID NO: 220384 - protein, 15 aa, Artificial Sequence
  Description of Artificial Sequence: Synthetic peptide
  Seed: LRMKWMMAMKYPITA
LRMKWFMAYKWPIIA

SEQ ID NO: 220385 - protein, 15 aa, Artificial Sequence
  Description of Artificial Sequence: Synthetic peptide
  Seed: LRMKWMMAMKYPITA
LRMKWFMAYKWPILA

SEQ ID NO: 220386 - protein, 15 aa, Artificial Sequence
  Description of Artificial Sequence: Synthetic peptide
  Seed: LRMKWMMAMKYPITA
LRMKWFMAYKWPIVA

SEQ ID NO: 220387 - protein, 15 aa, Artificial Sequence
  Description of Artificial Sequence: Synthetic peptide
  Seed: LRMKWMMAMKYPITA
LRMKWFMAYKYPIFA

SEQ ID NO: 220388 - protein, 15 aa, Artificial Sequence
  Description of Artificial Sequence: Synthetic peptide
  Seed: LRMKWMMAMKYPITA
LRMKWFMAYKYPIIA

SEQ ID NO: 220389 - protein, 15 aa, Artificial Sequence
  Description of Artificial Sequence: Synthetic peptide
  Seed: LRMKWMMAMKYPITA
LRMKWFMAYKYPILA

SEQ ID NO: 220390 - protein, 15 aa, Artificial Sequence
  Description of Artificial Sequence: Synthetic peptide
  Seed: LRMKWMMAMKYPITA
LRMKWFMAYKYPIMA

SEQ ID NO: 220391 - protein, 15 aa, Artificial Sequence
  Description of Artificial Sequence: Synthetic peptide
  Seed: LRMKWMMAMKYPITA
LRMKWFMAYKYPIVA

SEQ ID NO: 220392 - protein, 15 aa, Artificial Sequence
  Description of Artificial Sequence: Synthetic peptide
  Seed: LRMKWMMAMKYPITA
LRMKWIMAAKFPIFA

SEQ ID NO: 220393 - protein, 15 aa, Artificial Sequence
  Description of Artificial Sequence: Synthetic peptide
  Seed: LRMKWMMAMKYPITA
LRMKWIMAAKFPIIA

SEQ ID NO: 220394 - protein, 15 aa, Artificial Sequence
  Description of Artificial Sequence: Synthetic peptide
  Seed: LRMKWMMAMKYPITA
LRMKWIMAAKFPILA

SEQ ID NO: 220395 - protein, 15 aa, Artificial Sequence
  Description of Artificial Sequence: Synthetic peptide
  Seed: LRMKWMMAMKYPITA
LRMKWIMAAKFPIMA

SEQ ID NO: 220396 - protein, 15 aa, Artificial Sequence
  Description of Artificial Sequence: Synthetic peptide
  Seed: LRMKWMMAMKYPITA
LRMKWIMAAKFPIVA

SEQ ID NO: 220397 - protein, 15 aa, Artificial Sequence
  Description of Artificial Sequence: Synthetic peptide
  Seed: LRMKWMMAMKYPITA
LRMKWIMAEKFPIAA

SEQ ID NO: 220398 - protein, 15 aa, Artificial Sequence
  Description of Artificial Sequence: Synthetic peptide
  Seed: LRMKWMMAMKYPITA
LRMKWIMAEKFPIFA

SEQ ID NO: 220399 - protein, 15 aa, Artificial Sequence
  Description of Artificial Sequence: Synthetic peptide
  Seed: LRMKWMMAMKYPITA
LRMKWIMAEKFPIIA

SEQ ID NO: 220400 - protein, 15 aa, Artificial Sequence
  Description of Artificial Sequence: Synthetic peptide
  Seed: LRMKWMMAMKYPITA
LRMKWIMAEKFPILA

SEQ ID NO: 220401 - protein, 15 aa, Artificial Sequence
  Description of Artificial Sequence: Synthetic peptide
  Seed: LRMKWMMAMKYPITA
LRMKWIMAEKFPIMA

SEQ ID NO: 220402 - protein, 15 aa, Artificial Sequence
  Description of Artificial Sequence: Synthetic peptide
  Seed: LRMKWMMAMKYPITA
LRMKWIMAEKFPINA

SEQ ID NO: 220403 - protein, 15 aa, Artificial Sequence
  Description of Artificial Sequence: Synthetic peptide
  Seed: LRMKWMMAMKYPITA
LRMKWIMAEKFPISA

SEQ ID NO: 220404 - protein, 15 aa, Artificial Sequence
  Description of Artificial Sequence: Synthetic peptide
  Seed: LRMKWMMAMKYPITA
LRMKWIMAEKFPITA

SEQ ID NO: 220405 - protein, 15 aa, Artificial Sequence
  Description of Artificial Sequence: Synthetic peptide
  Seed: LRMKWMMAMKYPITA
LRMKWIMAEKFPIVA

SEQ ID NO: 220406 - protein, 15 aa, Artificial Sequence
  Description of Artificial Sequence: Synthetic peptide
  Seed: LRMKWMMAMKYPITA
LRMKWIMAEKFPIYA

SEQ ID NO: 220407 - protein, 15 aa, Artificial Sequence
  Description of Artificial Sequence: Synthetic peptide
  Seed: LRMKWMMAMKYPITA
LRMKWIMAEKLPIIA

SEQ ID NO: 220408 - protein, 15 aa, Artificial Sequence
  Description of Artificial Sequence: Synthetic peptide
  Seed: LRMKWMMAMKYPITA
LRMKWIMAEKLPILA

SEQ ID NO: 220409 - protein, 15 aa, Artificial Sequence
  Description of Artificial Sequence: Synthetic peptide
  Seed: LRMKWMMAMKYPITA
LRMKWIMAEKLPIVA

SEQ ID NO: 220410 - protein, 15 aa, Artificial Sequence
  Description of Artificial Sequence: Synthetic peptide
  Seed: LRMKWMMAMKYPITA
LRMKWIMAEKYPIIA

SEQ ID NO: 220411 - protein, 15 aa, Artificial Sequence
  Description of Artificial Sequence: Synthetic peptide
  Seed: LRMKWMMAMKYPITA
LRMKWIMAEKYPILA

SEQ ID NO: 220412 - protein, 15 aa, Artificial Sequence
  Description of Artificial Sequence: Synthetic peptide
  Seed: LRMKWMMAMKYPITA
LRMKWIMAFKFPIAA

SEQ ID NO: 220413 - protein, 15 aa, Artificial Sequence
  Description of Artificial Sequence: Synthetic peptide
  Seed: LRMKWMMAMKYPITA
LRMKWIMAFKFPIDA

SEQ ID NO: 220414 - protein, 15 aa, Artificial Sequence
  Description of Artificial Sequence: Synthetic peptide
  Seed: LRMKWMMAMKYPITA
LRMKWIMAFKFPIEA

SEQ ID NO: 220415 - protein, 15 aa, Artificial Sequence
  Description of Artificial Sequence: Synthetic peptide
  Seed: LRMKWMMAMKYPITA
LRMKWIMAFKFPIFA

SEQ ID NO: 220416 - protein, 15 aa, Artificial Sequence
  Description of Artificial Sequence: Synthetic peptide
  Seed: LRMKWMMAMKYPITA
LRMKWIMAFKFPIHA

SEQ ID NO: 220417 - protein, 15 aa, Artificial Sequence
  Description of Artificial Sequence: Synthetic peptide
  Seed: LRMKWMMAMKYPITA
LRMKWIMAFKFPIIA

SEQ ID NO: 220418 - protein, 15 aa, Artificial Sequence
  Description of Artificial Sequence: Synthetic peptide
  Seed: LRMKWMMAMKYPITA
LRMKWIMAFKFPILA

SEQ ID NO: 220419 - protein, 15 aa, Artificial Sequence
  Description of Artificial Sequence: Synthetic peptide
  Seed: LRMKWMMAMKYPITA
LRMKWIMAFKFPIMA

SEQ ID NO: 220420 - protein, 15 aa, Artificial Sequence
  Description of Artificial Sequence: Synthetic peptide
  Seed: LRMKWMMAMKYPITA
LRMKWIMAFKFPINA

SEQ ID NO: 220421 - protein, 15 aa, Artificial Sequence
  Description of Artificial Sequence: Synthetic peptide
  Seed: LRMKWMMAMKYPITA
LRMKWIMAFKFPIPA

SEQ ID NO: 220422 - protein, 15 aa, Artificial Sequence
  Description of Artificial Sequence: Synthetic peptide
  Seed: LRMKWMMAMKYPITA
LRMKWIMAFKFPIQA

SEQ ID NO: 220423 - protein, 15 aa, Artificial Sequence
  Description of Artificial Sequence: Synthetic peptide
  Seed: LRMKWMMAMKYPITA
LRMKWIMAFKFPIRA

SEQ ID NO: 220424 - protein, 15 aa, Artificial Sequence
  Description of Artificial Sequence: Synthetic peptide
  Seed: LRMKWMMAMKYPITA
LRMKWIMAFKFPISA

SEQ ID NO: 220425 - protein, 15 aa, Artificial Sequence
  Description of Artificial Sequence: Synthetic peptide
  Seed: LRMKWMMAMKYPITA
LRMKWIMAFKFPITA

SEQ ID NO: 220426 - protein, 15 aa, Artificial Sequence
  Description of Artificial Sequence: Synthetic peptide
  Seed: LRMKWMMAMKYPITA
LRMKWIMAFKFPIVA

SEQ ID NO: 220427 - protein, 15 aa, Artificial Sequence
  Description of Artificial Sequence: Synthetic peptide
  Seed: LRMKWMMAMKYPITA
LRMKWIMAFKFPIYA

SEQ ID NO: 220428 - protein, 15 aa, Artificial Sequence
  Description of Artificial Sequence: Synthetic peptide
  Seed: LRMKWMMAMKYPITA
LRMKWIMAFKIPIFA

SEQ ID NO: 220429 - protein, 15 aa, Artificial Sequence
  Description of Artificial Sequence: Synthetic peptide
  Seed: LRMKWMMAMKYPITA
LRMKWIMAFKIPILA

SEQ ID NO: 220430 - protein, 15 aa, Artificial Sequence
  Description of Artificial Sequence: Synthetic peptide
  Seed: LRMKWMMAMKYPITA
LRMKWIMAFKIPIVA

SEQ ID NO: 220431 - protein, 15 aa, Artificial Sequence
  Description of Artificial Sequence: Synthetic peptide
  Seed: LRMKWMMAMKYPITA
LRMKWIMAFKLPIEA

SEQ ID NO: 220432 - protein, 15 aa, Artificial Sequence
  Description of Artificial Sequence: Synthetic peptide
  Seed: LRMKWMMAMKYPITA
LRMKWIMAFKLPIFA

SEQ ID NO: 220433 - protein, 15 aa, Artificial Sequence
  Description of Artificial Sequence: Synthetic peptide
  Seed: LRMKWMMAMKYPITA
LRMKWIMAFKLPIIA

SEQ ID NO: 220434 - protein, 15 aa, Artificial Sequence
  Description of Artificial Sequence: Synthetic peptide
  Seed: LRMKWMMAMKYPITA
LRMKWIMAFKLPILA

SEQ ID NO: 220435 - protein, 15 aa, Artificial Sequence
  Description of Artificial Sequence: Synthetic peptide
  Seed: LRMKWMMAMKYPITA
LRMKWIMAFKLPIMA

SEQ ID NO: 220436 - protein, 15 aa, Artificial Sequence
  Description of Artificial Sequence: Synthetic peptide
  Seed: LRMKWMMAMKYPITA
LRMKWIMAFKLPIVA

SEQ ID NO: 220437 - protein, 15 aa, Artificial Sequence
  Description of Artificial Sequence: Synthetic peptide
  Seed: LRMKWMMAMKYPITA
LRMKWIMAFKLPIYA

SEQ ID NO: 220438 - protein, 15 aa, Artificial Sequence
  Description of Artificial Sequence: Synthetic peptide
  Seed: LRMKWMMAMKYPITA
LRMKWIMAFKMPIIA

SEQ ID NO: 220439 - protein, 15 aa, Artificial Sequence
  Description of Artificial Sequence: Synthetic peptide
  Seed: LRMKWMMAMKYPITA
LRMKWIMAFKMPILA

SEQ ID NO: 220440 - protein, 15 aa, Artificial Sequence
  Description of Artificial Sequence: Synthetic peptide
  Seed: LRMKWMMAMKYPITA
LRMKWIMAFKMPIVA

SEQ ID NO: 220441 - protein, 15 aa, Artificial Sequence
  Description of Artificial Sequence: Synthetic peptide
  Seed: LRMKWMMAMKYPITA
LRMKWIMAFKYPIFA

SEQ ID NO: 220442 - protein, 15 aa, Artificial Sequence
  Description of Artificial Sequence: Synthetic peptide
  Seed: LRMKWMMAMKYPITA
LRMKWIMAFKYPIIA

SEQ ID NO: 220443 - protein, 15 aa, Artificial Sequence
  Description of Artificial Sequence: Synthetic peptide
  Seed: LRMKWMMAMKYPITA
LRMKWIMAFKYPILA

SEQ ID NO: 220444 - protein, 15 aa, Artificial Sequence
  Description of Artificial Sequence: Synthetic peptide
  Seed: LRMKWMMAMKYPITA
LRMKWIMAFKYPIMA

SEQ ID NO: 220445 - protein, 15 aa, Artificial Sequence
  Description of Artificial Sequence: Synthetic peptide
  Seed: LRMKWMMAMKYPITA
LRMKWIMAFKYPIVA

SEQ ID NO: 220446 - protein, 15 aa, Artificial Sequence
  Description of Artificial Sequence: Synthetic peptide
  Seed: LRMKWMMAMKYPITA
LRMKWIMAHKFPIFA

SEQ ID NO: 220447 - protein, 15 aa, Artificial Sequence
  Description of Artificial Sequence: Synthetic peptide
  Seed: LRMKWMMAMKYPITA
LRMKWIMAHKFPIIA

SEQ ID NO: 220448 - protein, 15 aa, Artificial Sequence
  Description of Artificial Sequence: Synthetic peptide
  Seed: LRMKWMMAMKYPITA
LRMKWIMAHKFPILA

SEQ ID NO: 220449 - protein, 15 aa, Artificial Sequence
  Description of Artificial Sequence: Synthetic peptide
  Seed: LRMKWMMAMKYPITA
LRMKWIMAHKFPIMA

SEQ ID NO: 220450 - protein, 15 aa, Artificial Sequence
  Description of Artificial Sequence: Synthetic peptide
  Seed: LRMKWMMAMKYPITA
LRMKWIMAHKFPIVA

SEQ ID NO: 220451 - protein, 15 aa, Artificial Sequence
  Description of Artificial Sequence: Synthetic peptide
  Seed: LRMKWMMAMKYPITA
LRMKWIMAHKLPIIA

SEQ ID NO: 220452 - protein, 15 aa, Artificial Sequence
  Description of Artificial Sequence: Synthetic peptide
  Seed: LRMKWMMAMKYPITA
LRMKWIMAHKLPILA

SEQ ID NO: 220453 - protein, 15 aa, Artificial Sequence
  Description of Artificial Sequence: Synthetic peptide
  Seed: LRMKWMMAMKYPITA
LRMKWIMAHKLPIVA

SEQ ID NO: 220454 - protein, 15 aa, Artificial Sequence
  Description of Artificial Sequence: Synthetic peptide
  Seed: LRMKWMMAMKYPITA
LRMKWIMAIKFPIAA

SEQ ID NO: 220455 - protein, 15 aa, Artificial Sequence
  Description of Artificial Sequence: Synthetic peptide
  Seed: LRMKWMMAMKYPITA
LRMKWIMAIKFPIDA

SEQ ID NO: 220456 - protein, 15 aa, Artificial Sequence
  Description of Artificial Sequence: Synthetic peptide
  Seed: LRMKWMMAMKYPITA
LRMKWIMAIKFPIEA

SEQ ID NO: 220457 - protein, 15 aa, Artificial Sequence
  Description of Artificial Sequence: Synthetic peptide
  Seed: LRMKWMMAMKYPITA
LRMKWIMAIKFPIFA

SEQ ID NO: 220458 - protein, 15 aa, Artificial Sequence
  Description of Artificial Sequence: Synthetic peptide
  Seed: LRMKWMMAMKYPITA
LRMKWIMAIKFPIIA

SEQ ID NO: 220459 - protein, 15 aa, Artificial Sequence
  Description of Artificial Sequence: Synthetic peptide
  Seed: LRMKWMMAMKYPITA
LRMKWIMAIKFPILA

SEQ ID NO: 220460 - protein, 15 aa, Artificial Sequence
  Description of Artificial Sequence: Synthetic peptide
  Seed: LRMKWMMAMKYPITA
LRMKWIMAIKFPIMA

SEQ ID NO: 220461 - protein, 15 aa, Artificial Sequence
  Description of Artificial Sequence: Synthetic peptide
  Seed: LRMKWMMAMKYPITA
LRMKWIMAIKFPINA

SEQ ID NO: 220462 - protein, 15 aa, Artificial Sequence
  Description of Artificial Sequence: Synthetic peptide
  Seed: LRMKWMMAMKYPITA
LRMKWIMAIKFPISA

SEQ ID NO: 220463 - protein, 15 aa, Artificial Sequence
  Description of Artificial Sequence: Synthetic peptide
  Seed: LRMKWMMAMKYPITA
LRMKWIMAIKFPITA

SEQ ID NO: 220464 - protein, 15 aa, Artificial Sequence
  Description of Artificial Sequence: Synthetic peptide
  Seed: LRMKWMMAMKYPITA
LRMKWIMAIKFPIVA

SEQ ID NO: 220465 - protein, 15 aa, Artificial Sequence
  Description of Artificial Sequence: Synthetic peptide
  Seed: LRMKWMMAMKYPITA
LRMKWIMAIKFPIYA

SEQ ID NO: 220466 - protein, 15 aa, Artificial Sequence
  Description of Artificial Sequence: Synthetic peptide
  Seed: LRMKWMMAMKYPITA
LRMKWIMAIKLPIIA

SEQ ID NO: 220467 - protein, 15 aa, Artificial Sequence
  Description of Artificial Sequence: Synthetic peptide
  Seed: LRMKWMMAMKYPITA
LRMKWIMAIKLPILA

SEQ ID NO: 220468 - protein, 15 aa, Artificial Sequence
  Description of Artificial Sequence: Synthetic peptide
  Seed: LRMKWMMAMKYPITA
LRMKWIMAIKLPIVA

SEQ ID NO: 220469 - protein, 15 aa, Artificial Sequence
  Description of Artificial Sequence: Synthetic peptide
  Seed: LRMKWMMAMKYPITA
LRMKWIMAIKYPIIA

SEQ ID NO: 220470 - protein, 15 aa, Artificial Sequence
  Description of Artificial Sequence: Synthetic peptide
  Seed: LRMKWMMAMKYPITA
LRMKWIMAIKYPILA

SEQ ID NO: 220471 - protein, 15 aa, Artificial Sequence
  Description of Artificial Sequence: Synthetic peptide
  Seed: LRMKWMMAMKYPITA
LRMKWIMAIKYPIVA

SEQ ID NO: 220472 - protein, 15 aa, Artificial Sequence
  Description of Artificial Sequence: Synthetic peptide
  Seed: LRMKWMMAMKYPITA
LRMKWIMALKFPIAA

SEQ ID NO: 220473 - protein, 15 aa, Artificial Sequence
  Description of Artificial Sequence: Synthetic peptide
  Seed: LRMKWMMAMKYPITA
LRMKWIMALKFPIDA

SEQ ID NO: 220474 - protein, 15 aa, Artificial Sequence
  Description of Artificial Sequence: Synthetic peptide
  Seed: LRMKWMMAMKYPITA
LRMKWIMALKFPIEA

SEQ ID NO: 220475 - protein, 15 aa, Artificial Sequence
  Description of Artificial Sequence: Synthetic peptide
  Seed: LRMKWMMAMKYPITA
LRMKWIMALKFPIFA

SEQ ID NO: 220476 - protein, 15 aa, Artificial Sequence
  Description of Artificial Sequence: Synthetic peptide
  Seed: LRMKWMMAMKYPITA
LRMKWIMALKFPIHA

SEQ ID NO: 220477 - protein, 15 aa, Artificial Sequence
  Description of Artificial Sequence: Synthetic peptide
  Seed: LRMKWMMAMKYPITA
LRMKWIMALKFPIIA

SEQ ID NO: 220478 - protein, 15 aa, Artificial Sequence
  Description of Artificial Sequence: Synthetic peptide
  Seed: LRMKWMMAMKYPITA
LRMKWIMALKFPILA

SEQ ID NO: 220479 - protein, 15 aa, Artificial Sequence
  Description of Artificial Sequence: Synthetic peptide
  Seed: LRMKWMMAMKYPITA
LRMKWIMALKFPIMA

SEQ ID NO: 220480 - protein, 15 aa, Artificial Sequence
  Description of Artificial Sequence: Synthetic peptide
  Seed: LRMKWMMAMKYPITA
LRMKWIMALKFPINA

SEQ ID NO: 220481 - protein, 15 aa, Artificial Sequence
  Description of Artificial Sequence: Synthetic peptide
  Seed: LRMKWMMAMKYPITA
LRMKWIMALKFPIQA

SEQ ID NO: 220482 - protein, 15 aa, Artificial Sequence
  Description of Artificial Sequence: Synthetic peptide
  Seed: LRMKWMMAMKYPITA
LRMKWIMALKFPIRA

SEQ ID NO: 220483 - protein, 15 aa, Artificial Sequence
  Description of Artificial Sequence: Synthetic peptide
  Seed: LRMKWMMAMKYPITA
LRMKWIMALKFPISA

SEQ ID NO: 220484 - protein, 15 aa, Artificial Sequence
  Description of Artificial Sequence: Synthetic peptide
  Seed: LRMKWMMAMKYPITA
LRMKWIMALKFPITA

SEQ ID NO: 220485 - protein, 15 aa, Artificial Sequence
  Description of Artificial Sequence: Synthetic peptide
  Seed: LRMKWMMAMKYPITA
LRMKWIMALKFPIVA

SEQ ID NO: 220486 - protein, 15 aa, Artificial Sequence
  Description of Artificial Sequence: Synthetic peptide
  Seed: LRMKWMMAMKYPITA
LRMKWIMALKFPIYA

SEQ ID NO: 220487 - protein, 15 aa, Artificial Sequence
  Description of Artificial Sequence: Synthetic peptide
  Seed: LRMKWMMAMKYPITA
LRMKWIMALKYPIFA

SEQ ID NO: 220488 - protein, 15 aa, Artificial Sequence
  Description of Artificial Sequence: Synthetic peptide
  Seed: LRMKWMMAMKYPITA
LRMKWIMALKYPIIA

SEQ ID NO: 220489 - protein, 15 aa, Artificial Sequence
  Description of Artificial Sequence: Synthetic peptide
  Seed: LRMKWMMAMKYPITA
LRMKWIMALKYPILA

SEQ ID NO: 220490 - protein, 15 aa, Artificial Sequence
  Description of Artificial Sequence: Synthetic peptide
  Seed: LRMKWMMAMKYPITA
LRMKWIMALKYPIMA

SEQ ID NO: 220491 - protein, 15 aa, Artificial Sequence
  Description of Artificial Sequence: Synthetic peptide
  Seed: LRMKWMMAMKYPITA
LRMKWIMALKYPIVA

SEQ ID NO: 220492 - protein, 15 aa, Artificial Sequence
  Description of Artificial Sequence: Synthetic peptide
  Seed: LRMKWMMAMKYPITA
LRMKWIMAMKFPIAA

SEQ ID NO: 220493 - protein, 15 aa, Artificial Sequence
  Description of Artificial Sequence: Synthetic peptide
  Seed: LRMKWMMAMKYPITA
LRMKWIMAMKFPIDA

SEQ ID NO: 220494 - protein, 15 aa, Artificial Sequence
  Description of Artificial Sequence: Synthetic peptide
  Seed: LRMKWMMAMKYPITA
LRMKWIMAMKFPIEA

SEQ ID NO: 220495 - protein, 15 aa, Artificial Sequence
  Description of Artificial Sequence: Synthetic peptide
  Seed: LRMKWMMAMKYPITA
LRMKWIMAMKFPIFA

SEQ ID NO: 220496 - protein, 15 aa, Artificial Sequence
  Description of Artificial Sequence: Synthetic peptide
  Seed: LRMKWMMAMKYPITA
LRMKWIMAMKFPIIA

SEQ ID NO: 220497 - protein, 15 aa, Artificial Sequence
  Description of Artificial Sequence: Synthetic peptide
  Seed: LRMKWMMAMKYPITA
LRMKWIMAMKFPILA

SEQ ID NO: 220498 - protein, 15 aa, Artificial Sequence
  Description of Artificial Sequence: Synthetic peptide
  Seed: LRMKWMMAMKYPITA
LRMKWIMAMKFPIMA

SEQ ID NO: 220499 - protein, 15 aa, Artificial Sequence
  Description of Artificial Sequence: Synthetic peptide
  Seed: LRMKWMMAMKYPITA
LRMKWIMAMKFPINA

SEQ ID NO: 220500 - protein, 15 aa, Artificial Sequence
  Description of Artificial Sequence: Synthetic peptide
  Seed: LRMKWMMAMKYPITA
LRMKWIMAMKFPISA

SEQ ID NO: 220501 - protein, 15 aa, Artificial Sequence
  Description of Artificial Sequence: Synthetic peptide
  Seed: LRMKWMMAMKYPITA
LRMKWIMAMKFPIVA

SEQ ID NO: 220502 - protein, 15 aa, Artificial Sequence
  Description of Artificial Sequence: Synthetic peptide
  Seed: LRMKWMMAMKYPITA
LRMKWIMAMKFPIYA

SEQ ID NO: 220503 - protein, 15 aa, Artificial Sequence
  Description of Artificial Sequence: Synthetic peptide
  Seed: LRMKWMMAMKYPITA
LRMKWIMAMKLPIIA

SEQ ID NO: 220504 - protein, 15 aa, Artificial Sequence
  Description of Artificial Sequence: Synthetic peptide
  Seed: LRMKWMMAMKYPITA
LRMKWIMAMKLPIVA

SEQ ID NO: 220505 - protein, 15 aa, Artificial Sequence
  Description of Artificial Sequence: Synthetic peptide
  Seed: LRMKWMMAMKYPITA
LRMKWIMAMKYPIIA

SEQ ID NO: 220506 - protein, 15 aa, Artificial Sequence
  Description of Artificial Sequence: Synthetic peptide
  Seed: LRMKWMMAMKYPITA
LRMKWIMAMKYPILA

SEQ ID NO: 220507 - protein, 15 aa, Artificial Sequence
  Description of Artificial Sequence: Synthetic peptide
  Seed: LRMKWMMAMKYPITA
LRMKWIMAMKYPIVA

SEQ ID NO: 220508 - protein, 15 aa, Artificial Sequence
  Description of Artificial Sequence: Synthetic peptide
  Seed: LRMKWMMAMKYPITA
LRMKWIMANKFPIFA

SEQ ID NO: 220509 - protein, 15 aa, Artificial Sequence
  Description of Artificial Sequence: Synthetic peptide
  Seed: LRMKWMMAMKYPITA
LRMKWIMANKFPIIA

SEQ ID NO: 220510 - protein, 15 aa, Artificial Sequence
  Description of Artificial Sequence: Synthetic peptide
  Seed: LRMKWMMAMKYPITA
LRMKWIMANKFPILA

SEQ ID NO: 220511 - protein, 15 aa, Artificial Sequence
  Description of Artificial Sequence: Synthetic peptide
  Seed: LRMKWMMAMKYPITA
LRMKWIMANKFPIMA

SEQ ID NO: 220512 - protein, 15 aa, Artificial Sequence
  Description of Artificial Sequence: Synthetic peptide
  Seed: LRMKWMMAMKYPITA
LRMKWIMANKFPIVA

SEQ ID NO: 220513 - protein, 15 aa, Artificial Sequence
  Description of Artificial Sequence: Synthetic peptide
  Seed: LRMKWMMAMKYPITA
LRMKWIMAQKFPIFA

SEQ ID NO: 220514 - protein, 15 aa, Artificial Sequence
  Description of Artificial Sequence: Synthetic peptide
  Seed: LRMKWMMAMKYPITA
LRMKWIMAQKFPIIA

SEQ ID NO: 220515 - protein, 15 aa, Artificial Sequence
  Description of Artificial Sequence: Synthetic peptide
  Seed: LRMKWMMAMKYPITA
LRMKWIMAQKFPILA

SEQ ID NO: 220516 - protein, 15 aa, Artificial Sequence
  Description of Artificial Sequence: Synthetic peptide
  Seed: LRMKWMMAMKYPITA
LRMKWIMAQKFPIMA

SEQ ID NO: 220517 - protein, 15 aa, Artificial Sequence
  Description of Artificial Sequence: Synthetic peptide
  Seed: LRMKWMMAMKYPITA
LRMKWIMAQKFPIVA

SEQ ID NO: 220518 - protein, 15 aa, Artificial Sequence
  Description of Artificial Sequence: Synthetic peptide
  Seed: LRMKWMMAMKYPITA
LRMKWIMAQKLPIVA

SEQ ID NO: 220519 - protein, 15 aa, Artificial Sequence
  Description of Artificial Sequence: Synthetic peptide
  Seed: LRMKWMMAMKYPITA
LRMKWIMASKFPIFA

SEQ ID NO: 220520 - protein, 15 aa, Artificial Sequence
  Description of Artificial Sequence: Synthetic peptide
  Seed: LRMKWMMAMKYPITA
LRMKWIMASKFPIIA

SEQ ID NO: 220521 - protein, 15 aa, Artificial Sequence
  Description of Artificial Sequence: Synthetic peptide
  Seed: LRMKWMMAMKYPITA
LRMKWIMASKFPILA

SEQ ID NO: 220522 - protein, 15 aa, Artificial Sequence
  Description of Artificial Sequence: Synthetic peptide
  Seed: LRMKWMMAMKYPITA
LRMKWIMASKFPIMA

SEQ ID NO: 220523 - protein, 15 aa, Artificial Sequence
  Description of Artificial Sequence: Synthetic peptide
  Seed: LRMKWMMAMKYPITA
LRMKWIMASKFPIVA

SEQ ID NO: 220524 - protein, 15 aa, Artificial Sequence
  Description of Artificial Sequence: Synthetic peptide
  Seed: LRMKWMMAMKYPITA
LRMKWIMATKFPIAA

SEQ ID NO: 220525 - protein, 15 aa, Artificial Sequence
  Description of Artificial Sequence: Synthetic peptide
  Seed: LRMKWMMAMKYPITA
LRMKWIMATKFPIEA

SEQ ID NO: 220526 - protein, 15 aa, Artificial Sequence
  Description of Artificial Sequence: Synthetic peptide
  Seed: LRMKWMMAMKYPITA
LRMKWIMATKFPIFA

SEQ ID NO: 220527 - protein, 15 aa, Artificial Sequence
  Description of Artificial Sequence: Synthetic peptide
  Seed: LRMKWMMAMKYPITA
LRMKWIMATKFPIIA

SEQ ID NO: 220528 - protein, 15 aa, Artificial Sequence
  Description of Artificial Sequence: Synthetic peptide
  Seed: LRMKWMMAMKYPITA
LRMKWIMATKFPILA

SEQ ID NO: 220529 - protein, 15 aa, Artificial Sequence
  Description of Artificial Sequence: Synthetic peptide
  Seed: LRMKWMMAMKYPITA
LRMKWIMATKFPIMA

SEQ ID NO: 220530 - protein, 15 aa, Artificial Sequence
  Description of Artificial Sequence: Synthetic peptide
  Seed: LRMKWMMAMKYPITA
LRMKWIMATKFPINA

SEQ ID NO: 220531 - protein, 15 aa, Artificial Sequence
  Description of Artificial Sequence: Synthetic peptide
  Seed: LRMKWMMAMKYPITA
LRMKWIMATKFPISA

SEQ ID NO: 220532 - protein, 15 aa, Artificial Sequence
  Description of Artificial Sequence: Synthetic peptide
  Seed: LRMKWMMAMKYPITA
LRMKWIMATKFPITA

SEQ ID NO: 220533 - protein, 15 aa, Artificial Sequence
  Description of Artificial Sequence: Synthetic peptide
  Seed: LRMKWMMAMKYPITA
LRMKWIMATKFPIVA

SEQ ID NO: 220534 - protein, 15 aa, Artificial Sequence
  Description of Artificial Sequence: Synthetic peptide
  Seed: LRMKWMMAMKYPITA
LRMKWIMATKFPIYA

SEQ ID NO: 220535 - protein, 15 aa, Artificial Sequence
  Description of Artificial Sequence: Synthetic peptide
  Seed: LRMKWMMAMKYPITA
LRMKWIMATKLPIIA

SEQ ID NO: 220536 - protein, 15 aa, Artificial Sequence
  Description of Artificial Sequence: Synthetic peptide
  Seed: LRMKWMMAMKYPITA
LRMKWIMATKLPILA

SEQ ID NO: 220537 - protein, 15 aa, Artificial Sequence
  Description of Artificial Sequence: Synthetic peptide
  Seed: LRMKWMMAMKYPITA
LRMKWIMATKLPIVA

SEQ ID NO: 220538 - protein, 15 aa, Artificial Sequence
  Description of Artificial Sequence: Synthetic peptide
  Seed: LRMKWMMAMKYPITA
LRMKWIMATKYPIIA

SEQ ID NO: 220539 - protein, 15 aa, Artificial Sequence
  Description of Artificial Sequence: Synthetic peptide
  Seed: LRMKWMMAMKYPITA
LRMKWIMATKYPILA

SEQ ID NO: 220540 - protein, 15 aa, Artificial Sequence
  Description of Artificial Sequence: Synthetic peptide
  Seed: LRMKWMMAMKYPITA
LRMKWIMATKYPIVA

SEQ ID NO: 220541 - protein, 15 aa, Artificial Sequence
  Description of Artificial Sequence: Synthetic peptide
  Seed: LRMKWMMAMKYPITA
LRMKWIMAVKFPIAA

SEQ ID NO: 220542 - protein, 15 aa, Artificial Sequence
  Description of Artificial Sequence: Synthetic peptide
  Seed: LRMKWMMAMKYPITA
LRMKWIMAVKFPIDA

SEQ ID NO: 220543 - protein, 15 aa, Artificial Sequence
  Description of Artificial Sequence: Synthetic peptide
  Seed: LRMKWMMAMKYPITA
LRMKWIMAVKFPIEA

SEQ ID NO: 220544 - protein, 15 aa, Artificial Sequence
  Description of Artificial Sequence: Synthetic peptide
  Seed: LRMKWMMAMKYPITA
LRMKWIMAVKFPIFA

SEQ ID NO: 220545 - protein, 15 aa, Artificial Sequence
  Description of Artificial Sequence: Synthetic peptide
  Seed: LRMKWMMAMKYPITA
LRMKWIMAVKFPIIA

SEQ ID NO: 220546 - protein, 15 aa, Artificial Sequence
  Description of Artificial Sequence: Synthetic peptide
  Seed: LRMKWMMAMKYPITA
LRMKWIMAVKFPILA

SEQ ID NO: 220547 - protein, 15 aa, Artificial Sequence
  Description of Artificial Sequence: Synthetic peptide
  Seed: LRMKWMMAMKYPITA
LRMKWIMAVKFPIMA

SEQ ID NO: 220548 - protein, 15 aa, Artificial Sequence
  Description of Artificial Sequence: Synthetic peptide
  Seed: LRMKWMMAMKYPITA
LRMKWIMAVKFPINA

SEQ ID NO: 220549 - protein, 15 aa, Artificial Sequence
  Description of Artificial Sequence: Synthetic peptide
  Seed: LRMKWMMAMKYPITA
LRMKWIMAVKFPISA

SEQ ID NO: 220550 - protein, 15 aa, Artificial Sequence
  Description of Artificial Sequence: Synthetic peptide
  Seed: LRMKWMMAMKYPITA
LRMKWIMAVKFPITA

SEQ ID NO: 220551 - protein, 15 aa, Artificial Sequence
  Description of Artificial Sequence: Synthetic peptide
  Seed: LRMKWMMAMKYPITA
LRMKWIMAVKFPIVA

SEQ ID NO: 220552 - protein, 15 aa, Artificial Sequence
  Description of Artificial Sequence: Synthetic peptide
  Seed: LRMKWMMAMKYPITA
LRMKWIMAVKFPIYA

SEQ ID NO: 220553 - protein, 15 aa, Artificial Sequence
  Description of Artificial Sequence: Synthetic peptide
  Seed: LRMKWMMAMKYPITA
LRMKWIMAVKLPIIA

SEQ ID NO: 220554 - protein, 15 aa, Artificial Sequence
  Description of Artificial Sequence: Synthetic peptide
  Seed: LRMKWMMAMKYPITA
LRMKWIMAVKLPILA

SEQ ID NO: 220555 - protein, 15 aa, Artificial Sequence
  Description of Artificial Sequence: Synthetic peptide
  Seed: LRMKWMMAMKYPITA
LRMKWIMAVKLPIVA

SEQ ID NO: 220556 - protein, 15 aa, Artificial Sequence
  Description of Artificial Sequence: Synthetic peptide
  Seed: LRMKWMMAMKYPITA
LRMKWIMAVKYPIIA

SEQ ID NO: 220557 - protein, 15 aa, Artificial Sequence
  Description of Artificial Sequence: Synthetic peptide
  Seed: LRMKWMMAMKYPITA
LRMKWIMAVKYPILA

SEQ ID NO: 220558 - protein, 15 aa, Artificial Sequence
  Description of Artificial Sequence: Synthetic peptide
  Seed: LRMKWMMAMKYPITA
LRMKWIMAVKYPIVA

SEQ ID NO: 220559 - protein, 15 aa, Artificial Sequence
  Description of Artificial Sequence: Synthetic peptide
  Seed: LRMKWMMAMKYPITA
LRMKWIMAWKFPIFA

SEQ ID NO: 220560 - protein, 15 aa, Artificial Sequence
  Description of Artificial Sequence: Synthetic peptide
  Seed: LRMKWMMAMKYPITA
LRMKWIMAWKFPIIA

SEQ ID NO: 220561 - protein, 15 aa, Artificial Sequence
  Description of Artificial Sequence: Synthetic peptide
  Seed: LRMKWMMAMKYPITA
LRMKWIMAWKFPILA

SEQ ID NO: 220562 - protein, 15 aa, Artificial Sequence
  Description of Artificial Sequence: Synthetic peptide
  Seed: LRMKWMMAMKYPITA
LRMKWIMAWKFPIVA

SEQ ID NO: 220563 - protein, 15 aa, Artificial Sequence
  Description of Artificial Sequence: Synthetic peptide
  Seed: LRMKWMMAMKYPITA
LRMKWIMAWKLPIIA

SEQ ID NO: 220564 - protein, 15 aa, Artificial Sequence
  Description of Artificial Sequence: Synthetic peptide
  Seed: LRMKWMMAMKYPITA
LRMKWIMAWKLPILA

SEQ ID NO: 220565 - protein, 15 aa, Artificial Sequence
  Description of Artificial Sequence: Synthetic peptide
  Seed: LRMKWMMAMKYPITA
LRMKWIMAWKLPIVA

SEQ ID NO: 220566 - protein, 15 aa, Artificial Sequence
  Description of Artificial Sequence: Synthetic peptide
  Seed: LRMKWMMAMKYPITA
LRMKWIMAYKFPIFA

SEQ ID NO: 220567 - protein, 15 aa, Artificial Sequence
  Description of Artificial Sequence: Synthetic peptide
  Seed: LRMKWMMAMKYPITA
LRMKWIMAYKFPIIA

SEQ ID NO: 220568 - protein, 15 aa, Artificial Sequence
  Description of Artificial Sequence: Synthetic peptide
  Seed: LRMKWMMAMKYPITA
LRMKWIMAYKFPILA

SEQ ID NO: 220569 - protein, 15 aa, Artificial Sequence
  Description of Artificial Sequence: Synthetic peptide
  Seed: LRMKWMMAMKYPITA
LRMKWIMAYKFPIMA

SEQ ID NO: 220570 - protein, 15 aa, Artificial Sequence
  Description of Artificial Sequence: Synthetic peptide
  Seed: LRMKWMMAMKYPITA
LRMKWIMAYKFPIVA

SEQ ID NO: 220571 - protein, 15 aa, Artificial Sequence
  Description of Artificial Sequence: Synthetic peptide
  Seed: LRMKWMMAMKYPITA
LRMKWIMAYKLPILA

SEQ ID NO: 220572 - protein, 15 aa, Artificial Sequence
  Description of Artificial Sequence: Synthetic peptide
  Seed: LRMKWMMAMKYPITA
LRMKWIMAYKLPIVA

SEQ ID NO: 220573 - protein, 15 aa, Artificial Sequence
  Description of Artificial Sequence: Synthetic peptide
  Seed: LRMKWMMAMKYPITA
LRMKWLMAAKFPIFA

SEQ ID NO: 220574 - protein, 15 aa, Artificial Sequence
  Description of Artificial Sequence: Synthetic peptide
  Seed: LRMKWMMAMKYPITA
LRMKWLMAAKFPIIA

SEQ ID NO: 220575 - protein, 15 aa, Artificial Sequence
  Description of Artificial Sequence: Synthetic peptide
  Seed: LRMKWMMAMKYPITA
LRMKWLMAAKFPILA

SEQ ID NO: 220576 - protein, 15 aa, Artificial Sequence
  Description of Artificial Sequence: Synthetic peptide
  Seed: LRMKWMMAMKYPITA
LRMKWLMAAKFPIMA

SEQ ID NO: 220577 - protein, 15 aa, Artificial Sequence
  Description of Artificial Sequence: Synthetic peptide
  Seed: LRMKWMMAMKYPITA
LRMKWLMAAKFPIVA

SEQ ID NO: 220578 - protein, 15 aa, Artificial Sequence
  Description of Artificial Sequence: Synthetic peptide
  Seed: LRMKWMMAMKYPITA
LRMKWLMAEKFPIAA

SEQ ID NO: 220579 - protein, 15 aa, Artificial Sequence
  Description of Artificial Sequence: Synthetic peptide
  Seed: LRMKWMMAMKYPITA
LRMKWLMAEKFPIFA

SEQ ID NO: 220580 - protein, 15 aa, Artificial Sequence
  Description of Artificial Sequence: Synthetic peptide
  Seed: LRMKWMMAMKYPITA
LRMKWLMAEKFPIIA

SEQ ID NO: 220581 - protein, 15 aa, Artificial Sequence
  Description of Artificial Sequence: Synthetic peptide
  Seed: LRMKWMMAMKYPITA
LRMKWLMAEKFPILA

SEQ ID NO: 220582 - protein, 15 aa, Artificial Sequence
  Description of Artificial Sequence: Synthetic peptide
  Seed: LRMKWMMAMKYPITA
LRMKWLMAEKFPIMA

SEQ ID NO: 220583 - protein, 15 aa, Artificial Sequence
  Description of Artificial Sequence: Synthetic peptide
  Seed: LRMKWMMAMKYPITA
LRMKWLMAEKFPINA

SEQ ID NO: 220584 - protein, 15 aa, Artificial Sequence
  Description of Artificial Sequence: Synthetic peptide
  Seed: LRMKWMMAMKYPITA
LRMKWLMAEKFPISA

SEQ ID NO: 220585 - protein, 15 aa, Artificial Sequence
  Description of Artificial Sequence: Synthetic peptide
  Seed: LRMKWMMAMKYPITA
LRMKWLMAEKFPITA

SEQ ID NO: 220586 - protein, 15 aa, Artificial Sequence
  Description of Artificial Sequence: Synthetic peptide
  Seed: LRMKWMMAMKYPITA
LRMKWLMAEKFPIVA

SEQ ID NO: 220587 - protein, 15 aa, Artificial Sequence
  Description of Artificial Sequence: Synthetic peptide
  Seed: LRMKWMMAMKYPITA
LRMKWLMAEKFPIWA

SEQ ID NO: 220588 - protein, 15 aa, Artificial Sequence
  Description of Artificial Sequence: Synthetic peptide
  Seed: LRMKWMMAMKYPITA
LRMKWLMAEKFPIYA

SEQ ID NO: 220589 - protein, 15 aa, Artificial Sequence
  Description of Artificial Sequence: Synthetic peptide
  Seed: LRMKWMMAMKYPITA
LRMKWLMAEKLPIIA

SEQ ID NO: 220590 - protein, 15 aa, Artificial Sequence
  Description of Artificial Sequence: Synthetic peptide
  Seed: LRMKWMMAMKYPITA
LRMKWLMAEKLPILA

SEQ ID NO: 220591 - protein, 15 aa, Artificial Sequence
  Description of Artificial Sequence: Synthetic peptide
  Seed: LRMKWMMAMKYPITA
LRMKWLMAEKLPIVA

SEQ ID NO: 220592 - protein, 15 aa, Artificial Sequence
  Description of Artificial Sequence: Synthetic peptide
  Seed: LRMKWMMAMKYPITA
LRMKWLMAFKFPIAA

SEQ ID NO: 220593 - protein, 15 aa, Artificial Sequence
  Description of Artificial Sequence: Synthetic peptide
  Seed: LRMKWMMAMKYPITA
LRMKWLMAFKFPIDA

SEQ ID NO: 220594 - protein, 15 aa, Artificial Sequence
  Description of Artificial Sequence: Synthetic peptide
  Seed: LRMKWMMAMKYPITA
LRMKWLMAFKFPIEA

SEQ ID NO: 220595 - protein, 15 aa, Artificial Sequence
  Description of Artificial Sequence: Synthetic peptide
  Seed: LRMKWMMAMKYPITA
LRMKWLMAFKFPIFA

SEQ ID NO: 220596 - protein, 15 aa, Artificial Sequence
  Description of Artificial Sequence: Synthetic peptide
  Seed: LRMKWMMAMKYPITA
LRMKWLMAFKFPIHA

SEQ ID NO: 220597 - protein, 15 aa, Artificial Sequence
  Description of Artificial Sequence: Synthetic peptide
  Seed: LRMKWMMAMKYPITA
LRMKWLMAFKFPIIA

SEQ ID NO: 220598 - protein, 15 aa, Artificial Sequence
  Description of Artificial Sequence: Synthetic peptide
  Seed: LRMKWMMAMKYPITA
LRMKWLMAFKFPILA

SEQ ID NO: 220599 - protein, 15 aa, Artificial Sequence
  Description of Artificial Sequence: Synthetic peptide
  Seed: LRMKWMMAMKYPITA
LRMKWLMAFKFPIMA

SEQ ID NO: 220600 - protein, 15 aa, Artificial Sequence
  Description of Artificial Sequence: Synthetic peptide
  Seed: LRMKWMMAMKYPITA
LRMKWLMAFKFPINA

SEQ ID NO: 220601 - protein, 15 aa, Artificial Sequence
  Description of Artificial Sequence: Synthetic peptide
  Seed: LRMKWMMAMKYPITA
LRMKWLMAFKFPIPA

SEQ ID NO: 220602 - protein, 15 aa, Artificial Sequence
  Description of Artificial Sequence: Synthetic peptide
  Seed: LRMKWMMAMKYPITA
LRMKWLMAFKFPIQA

SEQ ID NO: 220603 - protein, 15 aa, Artificial Sequence
  Description of Artificial Sequence: Synthetic peptide
  Seed: LRMKWMMAMKYPITA
LRMKWLMAFKFPIRA

SEQ ID NO: 220604 - protein, 15 aa, Artificial Sequence
  Description of Artificial Sequence: Synthetic peptide
  Seed: LRMKWMMAMKYPITA
LRMKWLMAFKFPISA

SEQ ID NO: 220605 - protein, 15 aa, Artificial Sequence
  Description of Artificial Sequence: Synthetic peptide
  Seed: LRMKWMMAMKYPITA
LRMKWLMAFKFPITA

SEQ ID NO: 220606 - protein, 15 aa, Artificial Sequence
  Description of Artificial Sequence: Synthetic peptide
  Seed: LRMKWMMAMKYPITA
LRMKWLMAFKFPIVA

SEQ ID NO: 220607 - protein, 15 aa, Artificial Sequence
  Description of Artificial Sequence: Synthetic peptide
  Seed: LRMKWMMAMKYPITA
LRMKWLMAFKFPIYA

SEQ ID NO: 220608 - protein, 15 aa, Artificial Sequence
  Description of Artificial Sequence: Synthetic peptide
  Seed: LRMKWMMAMKYPITA
LRMKWLMAFKIPIIA

SEQ ID NO: 220609 - protein, 15 aa, Artificial Sequence
  Description of Artificial Sequence: Synthetic peptide
  Seed: LRMKWMMAMKYPITA
LRMKWLMAFKIPILA

SEQ ID NO: 220610 - protein, 15 aa, Artificial Sequence
  Description of Artificial Sequence: Synthetic peptide
  Seed: LRMKWMMAMKYPITA
LRMKWLMAFKIPIVA

SEQ ID NO: 220611 - protein, 15 aa, Artificial Sequence
  Description of Artificial Sequence: Synthetic peptide
  Seed: LRMKWMMAMKYPITA
LRMKWLMAFKLPIIA

SEQ ID NO: 220612 - protein, 15 aa, Artificial Sequence
  Description of Artificial Sequence: Synthetic peptide
  Seed: LRMKWMMAMKYPITA
LRMKWLMAFKLPILA

SEQ ID NO: 220613 - protein, 15 aa, Artificial Sequence
  Description of Artificial Sequence: Synthetic peptide
  Seed: LRMKWMMAMKYPITA
LRMKWLMAFKLPIMA

SEQ ID NO: 220614 - protein, 15 aa, Artificial Sequence
  Description of Artificial Sequence: Synthetic peptide
  Seed: LRMKWMMAMKYPITA
LRMKWLMAFKLPIVA

SEQ ID NO: 220615 - protein, 15 aa, Artificial Sequence
  Description of Artificial Sequence: Synthetic peptide
  Seed: LRMKWMMAMKYPITA
LRMKWLMAFKLPIYA

SEQ ID NO: 220616 - protein, 15 aa, Artificial Sequence
  Description of Artificial Sequence: Synthetic peptide
  Seed: LRMKWMMAMKYPITA
LRMKWLMAFKMPIIA

SEQ ID NO: 220617 - protein, 15 aa, Artificial Sequence
  Description of Artificial Sequence: Synthetic peptide
  Seed: LRMKWMMAMKYPITA
LRMKWLMAFKMPILA

SEQ ID NO: 220618 - protein, 15 aa, Artificial Sequence
  Description of Artificial Sequence: Synthetic peptide
  Seed: LRMKWMMAMKYPITA
LRMKWLMAFKMPIVA

SEQ ID NO: 220619 - protein, 15 aa, Artificial Sequence
  Description of Artificial Sequence: Synthetic peptide
  Seed: LRMKWMMAMKYPITA
LRMKWLMAFKYPIFA

SEQ ID NO: 220620 - protein, 15 aa, Artificial Sequence
  Description of Artificial Sequence: Synthetic peptide
  Seed: LRMKWMMAMKYPITA
LRMKWLMAFKYPIIA

SEQ ID NO: 220621 - protein, 15 aa, Artificial Sequence
  Description of Artificial Sequence: Synthetic peptide
  Seed: LRMKWMMAMKYPITA
LRMKWLMAFKYPILA

SEQ ID NO: 220622 - protein, 15 aa, Artificial Sequence
  Description of Artificial Sequence: Synthetic peptide
  Seed: LRMKWMMAMKYPITA
LRMKWLMAFKYPIMA

SEQ ID NO: 220623 - protein, 15 aa, Artificial Sequence
  Description of Artificial Sequence: Synthetic peptide
  Seed: LRMKWMMAMKYPITA
LRMKWLMAFKYPIVA

SEQ ID NO: 220624 - protein, 15 aa, Artificial Sequence
  Description of Artificial Sequence: Synthetic peptide
  Seed: LRMKWMMAMKYPITA
LRMKWLMAHKFPIFA

SEQ ID NO: 220625 - protein, 15 aa, Artificial Sequence
  Description of Artificial Sequence: Synthetic peptide
  Seed: LRMKWMMAMKYPITA
LRMKWLMAHKFPIIA

SEQ ID NO: 220626 - protein, 15 aa, Artificial Sequence
  Description of Artificial Sequence: Synthetic peptide
  Seed: LRMKWMMAMKYPITA
LRMKWLMAHKFPILA

SEQ ID NO: 220627 - protein, 15 aa, Artificial Sequence
  Description of Artificial Sequence: Synthetic peptide
  Seed: LRMKWMMAMKYPITA
LRMKWLMAHKFPIMA

SEQ ID NO: 220628 - protein, 15 aa, Artificial Sequence
  Description of Artificial Sequence: Synthetic peptide
  Seed: LRMKWMMAMKYPITA
LRMKWLMAHKFPIVA

SEQ ID NO: 220629 - protein, 15 aa, Artificial Sequence
  Description of Artificial Sequence: Synthetic peptide
  Seed: LRMKWMMAMKYPITA
LRMKWLMAHKLPIIA

SEQ ID NO: 220630 - protein, 15 aa, Artificial Sequence
  Description of Artificial Sequence: Synthetic peptide
  Seed: LRMKWMMAMKYPITA
LRMKWLMAHKLPILA

SEQ ID NO: 220631 - protein, 15 aa, Artificial Sequence
  Description of Artificial Sequence: Synthetic peptide
  Seed: LRMKWMMAMKYPITA
LRMKWLMAHKLPIVA

SEQ ID NO: 220632 - protein, 15 aa, Artificial Sequence
  Description of Artificial Sequence: Synthetic peptide
  Seed: LRMKWMMAMKYPITA
LRMKWLMAIKFPIAA

SEQ ID NO: 220633 - protein, 15 aa, Artificial Sequence
  Description of Artificial Sequence: Synthetic peptide
  Seed: LRMKWMMAMKYPITA
LRMKWLMAIKFPIDA

SEQ ID NO: 220634 - protein, 15 aa, Artificial Sequence
  Description of Artificial Sequence: Synthetic peptide
  Seed: LRMKWMMAMKYPITA
LRMKWLMAIKFPIEA

SEQ ID NO: 220635 - protein, 15 aa, Artificial Sequence
  Description of Artificial Sequence: Synthetic peptide
  Seed: LRMKWMMAMKYPITA
LRMKWLMAIKFPIFA

SEQ ID NO: 220636 - protein, 15 aa, Artificial Sequence
  Description of Artificial Sequence: Synthetic peptide
  Seed: LRMKWMMAMKYPITA
LRMKWLMAIKFPIIA

SEQ ID NO: 220637 - protein, 15 aa, Artificial Sequence
  Description of Artificial Sequence: Synthetic peptide
  Seed: LRMKWMMAMKYPITA
LRMKWLMAIKFPILA

SEQ ID NO: 220638 - protein, 15 aa, Artificial Sequence
  Description of Artificial Sequence: Synthetic peptide
  Seed: LRMKWMMAMKYPITA
LRMKWLMAIKFPIMA

SEQ ID NO: 220639 - protein, 15 aa, Artificial Sequence
  Description of Artificial Sequence: Synthetic peptide
  Seed: LRMKWMMAMKYPITA
LRMKWLMAIKFPINA

SEQ ID NO: 220640 - protein, 15 aa, Artificial Sequence
  Description of Artificial Sequence: Synthetic peptide
  Seed: LRMKWMMAMKYPITA
LRMKWLMAIKFPISA

SEQ ID NO: 220641 - protein, 15 aa, Artificial Sequence
  Description of Artificial Sequence: Synthetic peptide
  Seed: LRMKWMMAMKYPITA
LRMKWLMAIKFPITA

SEQ ID NO: 220642 - protein, 15 aa, Artificial Sequence
  Description of Artificial Sequence: Synthetic peptide
  Seed: LRMKWMMAMKYPITA
LRMKWLMAIKFPIVA

SEQ ID NO: 220643 - protein, 15 aa, Artificial Sequence
  Description of Artificial Sequence: Synthetic peptide
  Seed: LRMKWMMAMKYPITA
LRMKWLMAIKFPIYA

SEQ ID NO: 220644 - protein, 15 aa, Artificial Sequence
  Description of Artificial Sequence: Synthetic peptide
  Seed: LRMKWMMAMKYPITA
LRMKWLMAIKLPIIA

SEQ ID NO: 220645 - protein, 15 aa, Artificial Sequence
  Description of Artificial Sequence: Synthetic peptide
  Seed: LRMKWMMAMKYPITA
LRMKWLMAIKLPILA

SEQ ID NO: 220646 - protein, 15 aa, Artificial Sequence
  Description of Artificial Sequence: Synthetic peptide
  Seed: LRMKWMMAMKYPITA
LRMKWLMAIKLPIVA

SEQ ID NO: 220647 - protein, 15 aa, Artificial Sequence
  Description of Artificial Sequence: Synthetic peptide
  Seed: LRMKWMMAMKYPITA
LRMKWLMAIKYPIIA

SEQ ID NO: 220648 - protein, 15 aa, Artificial Sequence
  Description of Artificial Sequence: Synthetic peptide
  Seed: LRMKWMMAMKYPITA
LRMKWLMAIKYPILA

SEQ ID NO: 220649 - protein, 15 aa, Artificial Sequence
  Description of Artificial Sequence: Synthetic peptide
  Seed: LRMKWMMAMKYPITA
LRMKWLMAIKYPIVA

SEQ ID NO: 220650 - protein, 15 aa, Artificial Sequence
  Description of Artificial Sequence: Synthetic peptide
  Seed: LRMKWMMAMKYPITA
LRMKWLMAKKFPIIA

SEQ ID NO: 220651 - protein, 15 aa, Artificial Sequence
  Description of Artificial Sequence: Synthetic peptide
  Seed: LRMKWMMAMKYPITA
LRMKWLMAKKFPILA

SEQ ID NO: 220652 - protein, 15 aa, Artificial Sequence
  Description of Artificial Sequence: Synthetic peptide
  Seed: LRMKWMMAMKYPITA
LRMKWLMAKKFPIVA

SEQ ID NO: 220653 - protein, 15 aa, Artificial Sequence
  Description of Artificial Sequence: Synthetic peptide
  Seed: LRMKWMMAMKYPITA
LRMKWLMALKFPIAA

SEQ ID NO: 220654 - protein, 15 aa, Artificial Sequence
  Description of Artificial Sequence: Synthetic peptide
  Seed: LRMKWMMAMKYPITA
LRMKWLMALKFPIDA

SEQ ID NO: 220655 - protein, 15 aa, Artificial Sequence
  Description of Artificial Sequence: Synthetic peptide
  Seed: LRMKWMMAMKYPITA
LRMKWLMALKFPIEA

SEQ ID NO: 220656 - protein, 15 aa, Artificial Sequence
  Description of Artificial Sequence: Synthetic peptide
  Seed: LRMKWMMAMKYPITA
LRMKWLMALKFPIFA

SEQ ID NO: 220657 - protein, 15 aa, Artificial Sequence
  Description of Artificial Sequence: Synthetic peptide
  Seed: LRMKWMMAMKYPITA
LRMKWLMALKFPIHA

SEQ ID NO: 220658 - protein, 15 aa, Artificial Sequence
  Description of Artificial Sequence: Synthetic peptide
  Seed: LRMKWMMAMKYPITA
LRMKWLMALKFPIIA

SEQ ID NO: 220659 - protein, 15 aa, Artificial Sequence
  Description of Artificial Sequence: Synthetic peptide
  Seed: LRMKWMMAMKYPITA
LRMKWLMALKFPILA

SEQ ID NO: 220660 - protein, 15 aa, Artificial Sequence
  Description of Artificial Sequence: Synthetic peptide
  Seed: LRMKWMMAMKYPITA
LRMKWLMALKFPIMA

SEQ ID NO: 220661 - protein, 15 aa, Artificial Sequence
  Description of Artificial Sequence: Synthetic peptide
  Seed: LRMKWMMAMKYPITA
LRMKWLMALKFPINA

SEQ ID NO: 220662 - protein, 15 aa, Artificial Sequence
  Description of Artificial Sequence: Synthetic peptide
  Seed: LRMKWMMAMKYPITA
LRMKWLMALKFPIPA

SEQ ID NO: 220663 - protein, 15 aa, Artificial Sequence
  Description of Artificial Sequence: Synthetic peptide
  Seed: LRMKWMMAMKYPITA
LRMKWLMALKFPIQA

SEQ ID NO: 220664 - protein, 15 aa, Artificial Sequence
  Description of Artificial Sequence: Synthetic peptide
  Seed: LRMKWMMAMKYPITA
LRMKWLMALKFPIRA

SEQ ID NO: 220665 - protein, 15 aa, Artificial Sequence
  Description of Artificial Sequence: Synthetic peptide
  Seed: LRMKWMMAMKYPITA
LRMKWLMALKFPISA

SEQ ID NO: 220666 - protein, 15 aa, Artificial Sequence
  Description of Artificial Sequence: Synthetic peptide
  Seed: LRMKWMMAMKYPITA
LRMKWLMALKFPITA

SEQ ID NO: 220667 - protein, 15 aa, Artificial Sequence
  Description of Artificial Sequence: Synthetic peptide
  Seed: LRMKWMMAMKYPITA
LRMKWLMALKFPIVA

SEQ ID NO: 220668 - protein, 15 aa, Artificial Sequence
  Description of Artificial Sequence: Synthetic peptide
  Seed: LRMKWMMAMKYPITA
LRMKWLMALKFPIYA

SEQ ID NO: 220669 - protein, 15 aa, Artificial Sequence
  Description of Artificial Sequence: Synthetic peptide
  Seed: LRMKWMMAMKYPITA
LRMKWLMALKLPIVA

SEQ ID NO: 220670 - protein, 15 aa, Artificial Sequence
  Description of Artificial Sequence: Synthetic peptide
  Seed: LRMKWMMAMKYPITA
LRMKWLMALKYPIFA

SEQ ID NO: 220671 - protein, 15 aa, Artificial Sequence
  Description of Artificial Sequence: Synthetic peptide
  Seed: LRMKWMMAMKYPITA
LRMKWLMALKYPIIA

SEQ ID NO: 220672 - protein, 15 aa, Artificial Sequence
  Description of Artificial Sequence: Synthetic peptide
  Seed: LRMKWMMAMKYPITA
LRMKWLMALKYPILA

SEQ ID NO: 220673 - protein, 15 aa, Artificial Sequence
  Description of Artificial Sequence: Synthetic peptide
  Seed: LRMKWMMAMKYPITA
LRMKWLMALKYPIMA

SEQ ID NO: 220674 - protein, 15 aa, Artificial Sequence
  Description of Artificial Sequence: Synthetic peptide
  Seed: LRMKWMMAMKYPITA
LRMKWLMALKYPIVA

SEQ ID NO: 220675 - protein, 15 aa, Artificial Sequence
  Description of Artificial Sequence: Synthetic peptide
  Seed: LRMKWMMAMKYPITA
LRMKWLMAMKFPIAA

SEQ ID NO: 220676 - protein, 15 aa, Artificial Sequence
  Description of Artificial Sequence: Synthetic peptide
  Seed: LRMKWMMAMKYPITA
LRMKWLMAMKFPIEA

SEQ ID NO: 220677 - protein, 15 aa, Artificial Sequence
  Description of Artificial Sequence: Synthetic peptide
  Seed: LRMKWMMAMKYPITA
LRMKWLMAMKFPIFA

SEQ ID NO: 220678 - protein, 15 aa, Artificial Sequence
  Description of Artificial Sequence: Synthetic peptide
  Seed: LRMKWMMAMKYPITA
LRMKWLMAMKFPIIA

SEQ ID NO: 220679 - protein, 15 aa, Artificial Sequence
  Description of Artificial Sequence: Synthetic peptide
  Seed: LRMKWMMAMKYPITA
LRMKWLMAMKFPILA

SEQ ID NO: 220680 - protein, 15 aa, Artificial Sequence
  Description of Artificial Sequence: Synthetic peptide
  Seed: LRMKWMMAMKYPITA
LRMKWLMAMKFPIMA

SEQ ID NO: 220681 - protein, 15 aa, Artificial Sequence
  Description of Artificial Sequence: Synthetic peptide
  Seed: LRMKWMMAMKYPITA
LRMKWLMAMKFPIVA

SEQ ID NO: 220682 - protein, 15 aa, Artificial Sequence
  Description of Artificial Sequence: Synthetic peptide
  Seed: LRMKWMMAMKYPITA
LRMKWLMAMKFPIYA

SEQ ID NO: 220683 - protein, 15 aa, Artificial Sequence
  Description of Artificial Sequence: Synthetic peptide
  Seed: LRMKWMMAMKYPITA
LRMKWLMAMKLPIIA

SEQ ID NO: 220684 - protein, 15 aa, Artificial Sequence
  Description of Artificial Sequence: Synthetic peptide
  Seed: LRMKWMMAMKYPITA
LRMKWLMAMKLPILA

SEQ ID NO: 220685 - protein, 15 aa, Artificial Sequence
  Description of Artificial Sequence: Synthetic peptide
  Seed: LRMKWMMAMKYPITA
LRMKWLMAMKLPIVA

SEQ ID NO: 220686 - protein, 15 aa, Artificial Sequence
  Description of Artificial Sequence: Synthetic peptide
  Seed: LRMKWMMAMKYPITA
LRMKWLMAMKYPIIA

SEQ ID NO: 220687 - protein, 15 aa, Artificial Sequence
  Description of Artificial Sequence: Synthetic peptide
  Seed: LRMKWMMAMKYPITA
LRMKWLMAMKYPILA

SEQ ID NO: 220688 - protein, 15 aa, Artificial Sequence
  Description of Artificial Sequence: Synthetic peptide
  Seed: LRMKWMMAMKYPITA
LRMKWLMAMKYPIVA

SEQ ID NO: 220689 - protein, 15 aa, Artificial Sequence
  Description of Artificial Sequence: Synthetic peptide
  Seed: LRMKWMMAMKYPITA
LRMKWLMANKFPIFA

SEQ ID NO: 220690 - protein, 15 aa, Artificial Sequence
  Description of Artificial Sequence: Synthetic peptide
  Seed: LRMKWMMAMKYPITA
LRMKWLMANKFPIIA

SEQ ID NO: 220691 - protein, 15 aa, Artificial Sequence
  Description of Artificial Sequence: Synthetic peptide
  Seed: LRMKWMMAMKYPITA
LRMKWLMANKFPILA

SEQ ID NO: 220692 - protein, 15 aa, Artificial Sequence
  Description of Artificial Sequence: Synthetic peptide
  Seed: LRMKWMMAMKYPITA
LRMKWLMANKFPIMA

SEQ ID NO: 220693 - protein, 15 aa, Artificial Sequence
  Description of Artificial Sequence: Synthetic peptide
  Seed: LRMKWMMAMKYPITA
LRMKWLMANKFPIVA

SEQ ID NO: 220694 - protein, 15 aa, Artificial Sequence
  Description of Artificial Sequence: Synthetic peptide
  Seed: LRMKWMMAMKYPITA
LRMKWLMAQKFPIFA

SEQ ID NO: 220695 - protein, 15 aa, Artificial Sequence
  Description of Artificial Sequence: Synthetic peptide
  Seed: LRMKWMMAMKYPITA
LRMKWLMAQKFPIIA

SEQ ID NO: 220696 - protein, 15 aa, Artificial Sequence
  Description of Artificial Sequence: Synthetic peptide
  Seed: LRMKWMMAMKYPITA
LRMKWLMAQKFPILA

SEQ ID NO: 220697 - protein, 15 aa, Artificial Sequence
  Description of Artificial Sequence: Synthetic peptide
  Seed: LRMKWMMAMKYPITA
LRMKWLMAQKFPIMA

SEQ ID NO: 220698 - protein, 15 aa, Artificial Sequence
  Description of Artificial Sequence: Synthetic peptide
  Seed: LRMKWMMAMKYPITA
LRMKWLMAQKFPIVA

SEQ ID NO: 220699 - protein, 15 aa, Artificial Sequence
  Description of Artificial Sequence: Synthetic peptide
  Seed: LRMKWMMAMKYPITA
LRMKWLMASKFPIFA

SEQ ID NO: 220700 - protein, 15 aa, Artificial Sequence
  Description of Artificial Sequence: Synthetic peptide
  Seed: LRMKWMMAMKYPITA
LRMKWLMASKFPIIA

SEQ ID NO: 220701 - protein, 15 aa, Artificial Sequence
  Description of Artificial Sequence: Synthetic peptide
  Seed: LRMKWMMAMKYPITA
LRMKWLMASKFPILA

SEQ ID NO: 220702 - protein, 15 aa, Artificial Sequence
  Description of Artificial Sequence: Synthetic peptide
  Seed: LRMKWMMAMKYPITA
LRMKWLMASKFPIMA

SEQ ID NO: 220703 - protein, 15 aa, Artificial Sequence
  Description of Artificial Sequence: Synthetic peptide
  Seed: LRMKWMMAMKYPITA
LRMKWLMASKFPIVA

SEQ ID NO: 220704 - protein, 15 aa, Artificial Sequence
  Description of Artificial Sequence: Synthetic peptide
  Seed: LRMKWMMAMKYPITA
LRMKWLMATKFPIAA

SEQ ID NO: 220705 - protein, 15 aa, Artificial Sequence
  Description of Artificial Sequence: Synthetic peptide
  Seed: LRMKWMMAMKYPITA
LRMKWLMATKFPIFA

SEQ ID NO: 220706 - protein, 15 aa, Artificial Sequence
  Description of Artificial Sequence: Synthetic peptide
  Seed: LRMKWMMAMKYPITA
LRMKWLMATKFPIIA

SEQ ID NO: 220707 - protein, 15 aa, Artificial Sequence
  Description of Artificial Sequence: Synthetic peptide
  Seed: LRMKWMMAMKYPITA
LRMKWLMATKFPILA

SEQ ID NO: 220708 - protein, 15 aa, Artificial Sequence
  Description of Artificial Sequence: Synthetic peptide
  Seed: LRMKWMMAMKYPITA
LRMKWLMATKFPIMA

SEQ ID NO: 220709 - protein, 15 aa, Artificial Sequence
  Description of Artificial Sequence: Synthetic peptide
  Seed: LRMKWMMAMKYPITA
LRMKWLMATKFPINA

SEQ ID NO: 220710 - protein, 15 aa, Artificial Sequence
  Description of Artificial Sequence: Synthetic peptide
  Seed: LRMKWMMAMKYPITA
LRMKWLMATKFPISA

SEQ ID NO: 220711 - protein, 15 aa, Artificial Sequence
  Description of Artificial Sequence: Synthetic peptide
  Seed: LRMKWMMAMKYPITA
LRMKWLMATKFPITA

SEQ ID NO: 220712 - protein, 15 aa, Artificial Sequence
  Description of Artificial Sequence: Synthetic peptide
  Seed: LRMKWMMAMKYPITA
LRMKWLMATKFPIVA

SEQ ID NO: 220713 - protein, 15 aa, Artificial Sequence
  Description of Artificial Sequence: Synthetic peptide
  Seed: LRMKWMMAMKYPITA
LRMKWLMATKFPIYA

SEQ ID NO: 220714 - protein, 15 aa, Artificial Sequence
  Description of Artificial Sequence: Synthetic peptide
  Seed: LRMKWMMAMKYPITA
LRMKWLMATKLPIIA

SEQ ID NO: 220715 - protein, 15 aa, Artificial Sequence
  Description of Artificial Sequence: Synthetic peptide
  Seed: LRMKWMMAMKYPITA
LRMKWLMATKLPILA

SEQ ID NO: 220716 - protein, 15 aa, Artificial Sequence
  Description of Artificial Sequence: Synthetic peptide
  Seed: LRMKWMMAMKYPITA
LRMKWLMATKLPIVA

SEQ ID NO: 220717 - protein, 15 aa, Artificial Sequence
  Description of Artificial Sequence: Synthetic peptide
  Seed: LRMKWMMAMKYPITA
LRMKWLMATKYPIIA

SEQ ID NO: 220718 - protein, 15 aa, Artificial Sequence
  Description of Artificial Sequence: Synthetic peptide
  Seed: LRMKWMMAMKYPITA
LRMKWLMATKYPILA

SEQ ID NO: 220719 - protein, 15 aa, Artificial Sequence
  Description of Artificial Sequence: Synthetic peptide
  Seed: LRMKWMMAMKYPITA
LRMKWLMATKYPIVA

SEQ ID NO: 220720 - protein, 15 aa, Artificial Sequence
  Description of Artificial Sequence: Synthetic peptide
  Seed: LRMKWMMAMKYPITA
LRMKWLMAVKFPIAA

SEQ ID NO: 220721 - protein, 15 aa, Artificial Sequence
  Description of Artificial Sequence: Synthetic peptide
  Seed: LRMKWMMAMKYPITA
LRMKWLMAVKFPIEA

SEQ ID NO: 220722 - protein, 15 aa, Artificial Sequence
  Description of Artificial Sequence: Synthetic peptide
  Seed: LRMKWMMAMKYPITA
LRMKWLMAVKFPIFA

SEQ ID NO: 220723 - protein, 15 aa, Artificial Sequence
  Description of Artificial Sequence: Synthetic peptide
  Seed: LRMKWMMAMKYPITA
LRMKWLMAVKFPIIA

SEQ ID NO: 220724 - protein, 15 aa, Artificial Sequence
  Description of Artificial Sequence: Synthetic peptide
  Seed: LRMKWMMAMKYPITA
LRMKWLMAVKFPILA

SEQ ID NO: 220725 - protein, 15 aa, Artificial Sequence
  Description of Artificial Sequence: Synthetic peptide
  Seed: LRMKWMMAMKYPITA
LRMKWLMAVKFPIMA

SEQ ID NO: 220726 - protein, 15 aa, Artificial Sequence
  Description of Artificial Sequence: Synthetic peptide
  Seed: LRMKWMMAMKYPITA
LRMKWLMAVKFPINA

SEQ ID NO: 220727 - protein, 15 aa, Artificial Sequence
  Description of Artificial Sequence: Synthetic peptide
  Seed: LRMKWMMAMKYPITA
LRMKWLMAVKFPITA

SEQ ID NO: 220728 - protein, 15 aa, Artificial Sequence
  Description of Artificial Sequence: Synthetic peptide
  Seed: LRMKWMMAMKYPITA
LRMKWLMAVKFPIVA

SEQ ID NO: 220729 - protein, 15 aa, Artificial Sequence
  Description of Artificial Sequence: Synthetic peptide
  Seed: LRMKWMMAMKYPITA
LRMKWLMAVKFPIYA

SEQ ID NO: 220730 - protein, 15 aa, Artificial Sequence
  Description of Artificial Sequence: Synthetic peptide
  Seed: LRMKWMMAMKYPITA
LRMKWLMAVKLPIIA

SEQ ID NO: 220731 - protein, 15 aa, Artificial Sequence
  Description of Artificial Sequence: Synthetic peptide
  Seed: LRMKWMMAMKYPITA
LRMKWLMAVKLPILA

SEQ ID NO: 220732 - protein, 15 aa, Artificial Sequence
  Description of Artificial Sequence: Synthetic peptide
  Seed: LRMKWMMAMKYPITA
LRMKWLMAVKLPIVA

SEQ ID NO: 220733 - protein, 15 aa, Artificial Sequence
  Description of Artificial Sequence: Synthetic peptide
  Seed: LRMKWMMAMKYPITA
LRMKWLMAVKYPIIA

SEQ ID NO: 220734 - protein, 15 aa, Artificial Sequence
  Description of Artificial Sequence: Synthetic peptide
  Seed: LRMKWMMAMKYPITA
LRMKWLMAVKYPILA

SEQ ID NO: 220735 - protein, 15 aa, Artificial Sequence
  Description of Artificial Sequence: Synthetic peptide
  Seed: LRMKWMMAMKYPITA
LRMKWLMAVKYPIVA

SEQ ID NO: 220736 - protein, 15 aa, Artificial Sequence
  Description of Artificial Sequence: Synthetic peptide
  Seed: LRMKWMMAMKYPITA
LRMKWLMAWKFPIIA

SEQ ID NO: 220737 - protein, 15 aa, Artificial Sequence
  Description of Artificial Sequence: Synthetic peptide
  Seed: LRMKWMMAMKYPITA
LRMKWLMAWKFPILA

SEQ ID NO: 220738 - protein, 15 aa, Artificial Sequence
  Description of Artificial Sequence: Synthetic peptide
  Seed: LRMKWMMAMKYPITA
LRMKWLMAWKFPIVA

SEQ ID NO: 220739 - protein, 15 aa, Artificial Sequence
  Description of Artificial Sequence: Synthetic peptide
  Seed: LRMKWMMAMKYPITA
LRMKWLMAWKLPIIA

SEQ ID NO: 220740 - protein, 15 aa, Artificial Sequence
  Description of Artificial Sequence: Synthetic peptide
  Seed: LRMKWMMAMKYPITA
LRMKWLMAWKLPILA

SEQ ID NO: 220741 - protein, 15 aa, Artificial Sequence
  Description of Artificial Sequence: Synthetic peptide
  Seed: LRMKWMMAMKYPITA
LRMKWLMAYKFPIFA

SEQ ID NO: 220742 - protein, 15 aa, Artificial Sequence
  Description of Artificial Sequence: Synthetic peptide
  Seed: LRMKWMMAMKYPITA
LRMKWLMAYKFPIIA

SEQ ID NO: 220743 - protein, 15 aa, Artificial Sequence
  Description of Artificial Sequence: Synthetic peptide
  Seed: LRMKWMMAMKYPITA
LRMKWLMAYKFPILA

SEQ ID NO: 220744 - protein, 15 aa, Artificial Sequence
  Description of Artificial Sequence: Synthetic peptide
  Seed: LRMKWMMAMKYPITA
LRMKWLMAYKFPIMA

SEQ ID NO: 220745 - protein, 15 aa, Artificial Sequence
  Description of Artificial Sequence: Synthetic peptide
  Seed: LRMKWMMAMKYPITA
LRMKWLMAYKFPIVA

SEQ ID NO: 220746 - protein, 15 aa, Artificial Sequence
  Description of Artificial Sequence: Synthetic peptide
  Seed: LRMKWMMAMKYPITA
LRMKWLMAYKLPIIA

SEQ ID NO: 220747 - protein, 15 aa, Artificial Sequence
  Description of Artificial Sequence: Synthetic peptide
  Seed: LRMKWMMAMKYPITA
LRMKWLMAYKLPILA

SEQ ID NO: 220748 - protein, 15 aa, Artificial Sequence
  Description of Artificial Sequence: Synthetic peptide
  Seed: LRMKWMMAMKYPITA
LRMKWLMAYKLPIVA

SEQ ID NO: 220749 - protein, 15 aa, Artificial Sequence
  Description of Artificial Sequence: Synthetic peptide
  Seed: LRMKWMMAMKYPITA
LRMKWMMAAKFPIIA

SEQ ID NO: 220750 - protein, 15 aa, Artificial Sequence
  Description of Artificial Sequence: Synthetic peptide
  Seed: LRMKWMMAMKYPITA
LRMKWMMAAKFPILA

SEQ ID NO: 220751 - protein, 15 aa, Artificial Sequence
  Description of Artificial Sequence: Synthetic peptide
  Seed: LRMKWMMAMKYPITA
LRMKWMMAAKFPIVA

SEQ ID NO: 220752 - protein, 15 aa, Artificial Sequence
  Description of Artificial Sequence: Synthetic peptide
  Seed: LRMKWMMAMKYPITA
LRMKWMMAEKFPIIA

SEQ ID NO: 220753 - protein, 15 aa, Artificial Sequence
  Description of Artificial Sequence: Synthetic peptide
  Seed: LRMKWMMAMKYPITA
LRMKWMMAEKFPILA

SEQ ID NO: 220754 - protein, 15 aa, Artificial Sequence
  Description of Artificial Sequence: Synthetic peptide
  Seed: LRMKWMMAMKYPITA
LRMKWMMAEKFPIVA

SEQ ID NO: 220755 - protein, 15 aa, Artificial Sequence
  Description of Artificial Sequence: Synthetic peptide
  Seed: LRMKWMMAMKYPITA
LRMKWMMAFKFPIAA

SEQ ID NO: 220756 - protein, 15 aa, Artificial Sequence
  Description of Artificial Sequence: Synthetic peptide
  Seed: LRMKWMMAMKYPITA
LRMKWMMAFKFPIFA

SEQ ID NO: 220757 - protein, 15 aa, Artificial Sequence
  Description of Artificial Sequence: Synthetic peptide
  Seed: LRMKWMMAMKYPITA
LRMKWMMAFKFPIIA

SEQ ID NO: 220758 - protein, 15 aa, Artificial Sequence
  Description of Artificial Sequence: Synthetic peptide
  Seed: LRMKWMMAMKYPITA
LRMKWMMAFKFPILA

SEQ ID NO: 220759 - protein, 15 aa, Artificial Sequence
  Description of Artificial Sequence: Synthetic peptide
  Seed: LRMKWMMAMKYPITA
LRMKWMMAFKFPIMA

SEQ ID NO: 220760 - protein, 15 aa, Artificial Sequence
  Description of Artificial Sequence: Synthetic peptide
  Seed: LRMKWMMAMKYPITA
LRMKWMMAFKFPIVA

SEQ ID NO: 220761 - protein, 15 aa, Artificial Sequence
  Description of Artificial Sequence: Synthetic peptide
  Seed: LRMKWMMAMKYPITA
LRMKWMMAFKFPIYA

SEQ ID NO: 220762 - protein, 15 aa, Artificial Sequence
  Description of Artificial Sequence: Synthetic peptide
  Seed: LRMKWMMAMKYPITA
LRMKWMMAFKLPIIA

SEQ ID NO: 220763 - protein, 15 aa, Artificial Sequence
  Description of Artificial Sequence: Synthetic peptide
  Seed: LRMKWMMAMKYPITA
LRMKWMMAFKLPILA

SEQ ID NO: 220764 - protein, 15 aa, Artificial Sequence
  Description of Artificial Sequence: Synthetic peptide
  Seed: LRMKWMMAMKYPITA
LRMKWMMAFKLPIMA

SEQ ID NO: 220765 - protein, 15 aa, Artificial Sequence
  Description of Artificial Sequence: Synthetic peptide
  Seed: LRMKWMMAMKYPITA
LRMKWMMAFKLPIVA

SEQ ID NO: 220766 - protein, 15 aa, Artificial Sequence
  Description of Artificial Sequence: Synthetic peptide
  Seed: LRMKWMMAMKYPITA
LRMKWMMAHKFPIIA

SEQ ID NO: 220767 - protein, 15 aa, Artificial Sequence
  Description of Artificial Sequence: Synthetic peptide
  Seed: LRMKWMMAMKYPITA
LRMKWMMAHKFPILA

SEQ ID NO: 220768 - protein, 15 aa, Artificial Sequence
  Description of Artificial Sequence: Synthetic peptide
  Seed: LRMKWMMAMKYPITA
LRMKWMMAHKFPIVA

SEQ ID NO: 220769 - protein, 15 aa, Artificial Sequence
  Description of Artificial Sequence: Synthetic peptide
  Seed: LRMKWMMAMKYPITA
LRMKWMMAIKFPIIA

SEQ ID NO: 220770 - protein, 15 aa, Artificial Sequence
  Description of Artificial Sequence: Synthetic peptide
  Seed: LRMKWMMAMKYPITA
LRMKWMMAIKFPILA

SEQ ID NO: 220771 - protein, 15 aa, Artificial Sequence
  Description of Artificial Sequence: Synthetic peptide
  Seed: LRMKWMMAMKYPITA
LRMKWMMAIKFPIMA

SEQ ID NO: 220772 - protein, 15 aa, Artificial Sequence
  Description of Artificial Sequence: Synthetic peptide
  Seed: LRMKWMMAMKYPITA
LRMKWMMAIKFPIVA

SEQ ID NO: 220773 - protein, 15 aa, Artificial Sequence
  Description of Artificial Sequence: Synthetic peptide
  Seed: LRMKWMMAMKYPITA
LRMKWMMALKFPIAA

SEQ ID NO: 220774 - protein, 15 aa, Artificial Sequence
  Description of Artificial Sequence: Synthetic peptide
  Seed: LRMKWMMAMKYPITA
LRMKWMMALKFPIEA

SEQ ID NO: 220775 - protein, 15 aa, Artificial Sequence
  Description of Artificial Sequence: Synthetic peptide
  Seed: LRMKWMMAMKYPITA
LRMKWMMALKFPIFA

SEQ ID NO: 220776 - protein, 15 aa, Artificial Sequence
  Description of Artificial Sequence: Synthetic peptide
  Seed: LRMKWMMAMKYPITA
LRMKWMMALKFPIIA

SEQ ID NO: 220777 - protein, 15 aa, Artificial Sequence
  Description of Artificial Sequence: Synthetic peptide
  Seed: LRMKWMMAMKYPITA
LRMKWMMALKFPILA

SEQ ID NO: 220778 - protein, 15 aa, Artificial Sequence
  Description of Artificial Sequence: Synthetic peptide
  Seed: LRMKWMMAMKYPITA
LRMKWMMALKFPIMA

SEQ ID NO: 220779 - protein, 15 aa, Artificial Sequence
  Description of Artificial Sequence: Synthetic peptide
  Seed: LRMKWMMAMKYPITA
LRMKWMMALKFPITA

SEQ ID NO: 220780 - protein, 15 aa, Artificial Sequence
  Description of Artificial Sequence: Synthetic peptide
  Seed: LRMKWMMAMKYPITA
LRMKWMMALKFPIVA

SEQ ID NO: 220781 - protein, 15 aa, Artificial Sequence
  Description of Artificial Sequence: Synthetic peptide
  Seed: LRMKWMMAMKYPITA
LRMKWMMALKFPIYA

SEQ ID NO: 220782 - protein, 15 aa, Artificial Sequence
  Description of Artificial Sequence: Synthetic peptide
  Seed: LRMKWMMAMKYPITA
LRMKWMMAMKFPIIA

SEQ ID NO: 220783 - protein, 15 aa, Artificial Sequence
  Description of Artificial Sequence: Synthetic peptide
  Seed: LRMKWMMAMKYPITA
LRMKWMMAMKFPILA

SEQ ID NO: 220784 - protein, 15 aa, Artificial Sequence
  Description of Artificial Sequence: Synthetic peptide
  Seed: LRMKWMMAMKYPITA
LRMKWMMAMKFPIVA

SEQ ID NO: 220785 - protein, 15 aa, Artificial Sequence
  Description of Artificial Sequence: Synthetic peptide
  Seed: LRMKWMMAMKYPITA
LRMKWMMAQKFPIIA

SEQ ID NO: 220786 - protein, 15 aa, Artificial Sequence
  Description of Artificial Sequence: Synthetic peptide
  Seed: LRMKWMMAMKYPITA
LRMKWMMAQKFPILA

SEQ ID NO: 220787 - protein, 15 aa, Artificial Sequence
  Description of Artificial Sequence: Synthetic peptide
  Seed: LRMKWMMAMKYPITA
LRMKWMMAQKFPIVA

SEQ ID NO: 220788 - protein, 15 aa, Artificial Sequence
  Description of Artificial Sequence: Synthetic peptide
  Seed: LRMKWMMAMKYPITA
LRMKWMMASKFPIIA

SEQ ID NO: 220789 - protein, 15 aa, Artificial Sequence
  Description of Artificial Sequence: Synthetic peptide
  Seed: LRMKWMMAMKYPITA
LRMKWMMASKFPILA

SEQ ID NO: 220790 - protein, 15 aa, Artificial Sequence
  Description of Artificial Sequence: Synthetic peptide
  Seed: LRMKWMMAMKYPITA
LRMKWMMASKFPIVA

SEQ ID NO: 220791 - protein, 15 aa, Artificial Sequence
  Description of Artificial Sequence: Synthetic peptide
  Seed: LRMKWMMAMKYPITA
LRMKWMMATKFPIIA

SEQ ID NO: 220792 - protein, 15 aa, Artificial Sequence
  Description of Artificial Sequence: Synthetic peptide
  Seed: LRMKWMMAMKYPITA
LRMKWMMATKFPILA

SEQ ID NO: 220793 - protein, 15 aa, Artificial Sequence
  Description of Artificial Sequence: Synthetic peptide
  Seed: LRMKWMMAMKYPITA
LRMKWMMATKFPIVA

SEQ ID NO: 220794 - protein, 15 aa, Artificial Sequence
  Description of Artificial Sequence: Synthetic peptide
  Seed: LRMKWMMAMKYPITA
LRMKWMMAVKFPIIA

SEQ ID NO: 220795 - protein, 15 aa, Artificial Sequence
  Description of Artificial Sequence: Synthetic peptide
  Seed: LRMKWMMAMKYPITA
LRMKWMMAVKFPILA

SEQ ID NO: 220796 - protein, 15 aa, Artificial Sequence
  Description of Artificial Sequence: Synthetic peptide
  Seed: LRMKWMMAMKYPITA
LRMKWMMAVKFPIVA

SEQ ID NO: 220797 - protein, 15 aa, Artificial Sequence
  Description of Artificial Sequence: Synthetic peptide
  Seed: LRMKWMMAMKYPITA
LRMKWMMAYKFPIIA

SEQ ID NO: 220798 - protein, 15 aa, Artificial Sequence
  Description of Artificial Sequence: Synthetic peptide
  Seed: LRMKWMMAMKYPITA
LRMKWMMAYKFPILA

SEQ ID NO: 220799 - protein, 15 aa, Artificial Sequence
  Description of Artificial Sequence: Synthetic peptide
  Seed: LRMKWMMAMKYPITA
LRMKWMMAYKFPIVA

SEQ ID NO: 220800 - protein, 15 aa, Artificial Sequence
  Description of Artificial Sequence: Synthetic peptide
  Seed: LRMKWMMAMKYPITA
LRMKWVMAAKFPIIA

SEQ ID NO: 220801 - protein, 15 aa, Artificial Sequence
  Description of Artificial Sequence: Synthetic peptide
  Seed: LRMKWMMAMKYPITA
LRMKWVMAAKFPILA

SEQ ID NO: 220802 - protein, 15 aa, Artificial Sequence
  Description of Artificial Sequence: Synthetic peptide
  Seed: LRMKWMMAMKYPITA
LRMKWVMAAKFPIVA

SEQ ID NO: 220803 - protein, 15 aa, Artificial Sequence
  Description of Artificial Sequence: Synthetic peptide
  Seed: LRMKWMMAMKYPITA
LRMKWVMAEKFPIFA

SEQ ID NO: 220804 - protein, 15 aa, Artificial Sequence
  Description of Artificial Sequence: Synthetic peptide
  Seed: LRMKWMMAMKYPITA
LRMKWVMAEKFPIIA

SEQ ID NO: 220805 - protein, 15 aa, Artificial Sequence
  Description of Artificial Sequence: Synthetic peptide
  Seed: LRMKWMMAMKYPITA
LRMKWVMAEKFPILA

SEQ ID NO: 220806 - protein, 15 aa, Artificial Sequence
  Description of Artificial Sequence: Synthetic peptide
  Seed: LRMKWMMAMKYPITA
LRMKWVMAEKFPIMA

SEQ ID NO: 220807 - protein, 15 aa, Artificial Sequence
  Description of Artificial Sequence: Synthetic peptide
  Seed: LRMKWMMAMKYPITA
LRMKWVMAEKFPIVA

SEQ ID NO: 220808 - protein, 15 aa, Artificial Sequence
  Description of Artificial Sequence: Synthetic peptide
  Seed: LRMKWMMAMKYPITA
LRMKWVMAFKFPIAA

SEQ ID NO: 220809 - protein, 15 aa, Artificial Sequence
  Description of Artificial Sequence: Synthetic peptide
  Seed: LRMKWMMAMKYPITA
LRMKWVMAFKFPIEA

SEQ ID NO: 220810 - protein, 15 aa, Artificial Sequence
  Description of Artificial Sequence: Synthetic peptide
  Seed: LRMKWMMAMKYPITA
LRMKWVMAFKFPIFA

SEQ ID NO: 220811 - protein, 15 aa, Artificial Sequence
  Description of Artificial Sequence: Synthetic peptide
  Seed: LRMKWMMAMKYPITA
LRMKWVMAFKFPIIA

SEQ ID NO: 220812 - protein, 15 aa, Artificial Sequence
  Description of Artificial Sequence: Synthetic peptide
  Seed: LRMKWMMAMKYPITA
LRMKWVMAFKFPILA

SEQ ID NO: 220813 - protein, 15 aa, Artificial Sequence
  Description of Artificial Sequence: Synthetic peptide
  Seed: LRMKWMMAMKYPITA
LRMKWVMAFKFPIMA

SEQ ID NO: 220814 - protein, 15 aa, Artificial Sequence
  Description of Artificial Sequence: Synthetic peptide
  Seed: LRMKWMMAMKYPITA
LRMKWVMAFKFPIVA

SEQ ID NO: 220815 - protein, 15 aa, Artificial Sequence
  Description of Artificial Sequence: Synthetic peptide
  Seed: LRMKWMMAMKYPITA
LRMKWVMAFKFPIYA

SEQ ID NO: 220816 - protein, 15 aa, Artificial Sequence
  Description of Artificial Sequence: Synthetic peptide
  Seed: LRMKWMMAMKYPITA
LRMKWVMAFKYPIIA

SEQ ID NO: 220817 - protein, 15 aa, Artificial Sequence
  Description of Artificial Sequence: Synthetic peptide
  Seed: LRMKWMMAMKYPITA
LRMKWVMAFKYPILA

SEQ ID NO: 220818 - protein, 15 aa, Artificial Sequence
  Description of Artificial Sequence: Synthetic peptide
  Seed: LRMKWMMAMKYPITA
LRMKWVMAFKYPIVA

SEQ ID NO: 220819 - protein, 15 aa, Artificial Sequence
  Description of Artificial Sequence: Synthetic peptide
  Seed: LRMKWMMAMKYPITA
LRMKWVMAHKFPIFA

SEQ ID NO: 220820 - protein, 15 aa, Artificial Sequence
  Description of Artificial Sequence: Synthetic peptide
  Seed: LRMKWMMAMKYPITA
LRMKWVMAHKFPIIA

SEQ ID NO: 220821 - protein, 15 aa, Artificial Sequence
  Description of Artificial Sequence: Synthetic peptide
  Seed: LRMKWMMAMKYPITA
LRMKWVMAHKFPILA

SEQ ID NO: 220822 - protein, 15 aa, Artificial Sequence
  Description of Artificial Sequence: Synthetic peptide
  Seed: LRMKWMMAMKYPITA
LRMKWVMAHKFPIVA

SEQ ID NO: 220823 - protein, 15 aa, Artificial Sequence
  Description of Artificial Sequence: Synthetic peptide
  Seed: LRMKWMMAMKYPITA
LRMKWVMAIKFPIFA

SEQ ID NO: 220824 - protein, 15 aa, Artificial Sequence
  Description of Artificial Sequence: Synthetic peptide
  Seed: LRMKWMMAMKYPITA
LRMKWVMAIKFPIIA

SEQ ID NO: 220825 - protein, 15 aa, Artificial Sequence
  Description of Artificial Sequence: Synthetic peptide
  Seed: LRMKWMMAMKYPITA
LRMKWVMAIKFPILA

SEQ ID NO: 220826 - protein, 15 aa, Artificial Sequence
  Description of Artificial Sequence: Synthetic peptide
  Seed: LRMKWMMAMKYPITA
LRMKWVMAIKFPIMA

SEQ ID NO: 220827 - protein, 15 aa, Artificial Sequence
  Description of Artificial Sequence: Synthetic peptide
  Seed: LRMKWMMAMKYPITA
LRMKWVMAIKFPIVA

SEQ ID NO: 220828 - protein, 15 aa, Artificial Sequence
  Description of Artificial Sequence: Synthetic peptide
  Seed: LRMKWMMAMKYPITA
LRMKWVMALKFPIAA

SEQ ID NO: 220829 - protein, 15 aa, Artificial Sequence
  Description of Artificial Sequence: Synthetic peptide
  Seed: LRMKWMMAMKYPITA
LRMKWVMALKFPIDA

SEQ ID NO: 220830 - protein, 15 aa, Artificial Sequence
  Description of Artificial Sequence: Synthetic peptide
  Seed: LRMKWMMAMKYPITA
LRMKWVMALKFPIEA

SEQ ID NO: 220831 - protein, 15 aa, Artificial Sequence
  Description of Artificial Sequence: Synthetic peptide
  Seed: LRMKWMMAMKYPITA
LRMKWVMALKFPIFA

SEQ ID NO: 220832 - protein, 15 aa, Artificial Sequence
  Description of Artificial Sequence: Synthetic peptide
  Seed: LRMKWMMAMKYPITA
LRMKWVMALKFPIIA

SEQ ID NO: 220833 - protein, 15 aa, Artificial Sequence
  Description of Artificial Sequence: Synthetic peptide
  Seed: LRMKWMMAMKYPITA
LRMKWVMALKFPILA

SEQ ID NO: 220834 - protein, 15 aa, Artificial Sequence
  Description of Artificial Sequence: Synthetic peptide
  Seed: LRMKWMMAMKYPITA
LRMKWVMALKFPIMA

SEQ ID NO: 220835 - protein, 15 aa, Artificial Sequence
  Description of Artificial Sequence: Synthetic peptide
  Seed: LRMKWMMAMKYPITA
LRMKWVMALKFPINA

SEQ ID NO: 220836 - protein, 15 aa, Artificial Sequence
  Description of Artificial Sequence: Synthetic peptide
  Seed: LRMKWMMAMKYPITA
LRMKWVMALKFPISA

SEQ ID NO: 220837 - protein, 15 aa, Artificial Sequence
  Description of Artificial Sequence: Synthetic peptide
  Seed: LRMKWMMAMKYPITA
LRMKWVMALKFPITA

SEQ ID NO: 220838 - protein, 15 aa, Artificial Sequence
  Description of Artificial Sequence: Synthetic peptide
  Seed: LRMKWMMAMKYPITA
LRMKWVMALKFPIVA

SEQ ID NO: 220839 - protein, 15 aa, Artificial Sequence
  Description of Artificial Sequence: Synthetic peptide
  Seed: LRMKWMMAMKYPITA
LRMKWVMALKFPIYA

SEQ ID NO: 220840 - protein, 15 aa, Artificial Sequence
  Description of Artificial Sequence: Synthetic peptide
  Seed: LRMKWMMAMKYPITA
LRMKWVMALKYPIIA

SEQ ID NO: 220841 - protein, 15 aa, Artificial Sequence
  Description of Artificial Sequence: Synthetic peptide
  Seed: LRMKWMMAMKYPITA
LRMKWVMALKYPILA

SEQ ID NO: 220842 - protein, 15 aa, Artificial Sequence
  Description of Artificial Sequence: Synthetic peptide
  Seed: LRMKWMMAMKYPITA
LRMKWVMALKYPIVA

SEQ ID NO: 220843 - protein, 15 aa, Artificial Sequence
  Description of Artificial Sequence: Synthetic peptide
  Seed: LRMKWMMAMKYPITA
LRMKWVMAMKFPIFA

SEQ ID NO: 220844 - protein, 15 aa, Artificial Sequence
  Description of Artificial Sequence: Synthetic peptide
  Seed: LRMKWMMAMKYPITA
LRMKWVMAMKFPIIA

SEQ ID NO: 220845 - protein, 15 aa, Artificial Sequence
  Description of Artificial Sequence: Synthetic peptide
  Seed: LRMKWMMAMKYPITA
LRMKWVMAMKFPILA

SEQ ID NO: 220846 - protein, 15 aa, Artificial Sequence
  Description of Artificial Sequence: Synthetic peptide
  Seed: LRMKWMMAMKYPITA
LRMKWVMAMKFPIMA

SEQ ID NO: 220847 - protein, 15 aa, Artificial Sequence
  Description of Artificial Sequence: Synthetic peptide
  Seed: LRMKWMMAMKYPITA
LRMKWVMAMKFPIVA

SEQ ID NO: 220848 - protein, 15 aa, Artificial Sequence
  Description of Artificial Sequence: Synthetic peptide
  Seed: LRMKWMMAMKYPITA
LRMKWVMANKFPIIA

SEQ ID NO: 220849 - protein, 15 aa, Artificial Sequence
  Description of Artificial Sequence: Synthetic peptide
  Seed: LRMKWMMAMKYPITA
LRMKWVMANKFPILA

SEQ ID NO: 220850 - protein, 15 aa, Artificial Sequence
  Description of Artificial Sequence: Synthetic peptide
  Seed: LRMKWMMAMKYPITA
LRMKWVMANKFPIVA

SEQ ID NO: 220851 - protein, 15 aa, Artificial Sequence
  Description of Artificial Sequence: Synthetic peptide
  Seed: LRMKWMMAMKYPITA
LRMKWVMAQKFPIIA

SEQ ID NO: 220852 - protein, 15 aa, Artificial Sequence
  Description of Artificial Sequence: Synthetic peptide
  Seed: LRMKWMMAMKYPITA
LRMKWVMAQKFPILA

SEQ ID NO: 220853 - protein, 15 aa, Artificial Sequence
  Description of Artificial Sequence: Synthetic peptide
  Seed: LRMKWMMAMKYPITA
LRMKWVMAQKFPIVA

SEQ ID NO: 220854 - protein, 15 aa, Artificial Sequence
  Description of Artificial Sequence: Synthetic peptide
  Seed: LRMKWMMAMKYPITA
LRMKWVMASKFPIIA

SEQ ID NO: 220855 - protein, 15 aa, Artificial Sequence
  Description of Artificial Sequence: Synthetic peptide
  Seed: LRMKWMMAMKYPITA
LRMKWVMASKFPILA

SEQ ID NO: 220856 - protein, 15 aa, Artificial Sequence
  Description of Artificial Sequence: Synthetic peptide
  Seed: LRMKWMMAMKYPITA
LRMKWVMASKFPIVA

SEQ ID NO: 220857 - protein, 15 aa, Artificial Sequence
  Description of Artificial Sequence: Synthetic peptide
  Seed: LRMKWMMAMKYPITA
LRMKWVMATKFPIFA

SEQ ID NO: 220858 - protein, 15 aa, Artificial Sequence
  Description of Artificial Sequence: Synthetic peptide
  Seed: LRMKWMMAMKYPITA
LRMKWVMATKFPIIA

SEQ ID NO: 220859 - protein, 15 aa, Artificial Sequence
  Description of Artificial Sequence: Synthetic peptide
  Seed: LRMKWMMAMKYPITA
LRMKWVMATKFPILA

SEQ ID NO: 220860 - protein, 15 aa, Artificial Sequence
  Description of Artificial Sequence: Synthetic peptide
  Seed: LRMKWMMAMKYPITA
LRMKWVMATKFPIMA

SEQ ID NO: 220861 - protein, 15 aa, Artificial Sequence
  Description of Artificial Sequence: Synthetic peptide
  Seed: LRMKWMMAMKYPITA
LRMKWVMATKFPIVA

SEQ ID NO: 220862 - protein, 15 aa, Artificial Sequence
  Description of Artificial Sequence: Synthetic peptide
  Seed: LRMKWMMAMKYPITA
LRMKWVMAVKFPIIA

SEQ ID NO: 220863 - protein, 15 aa, Artificial Sequence
  Description of Artificial Sequence: Synthetic peptide
  Seed: LRMKWMMAMKYPITA
LRMKWVMAVKFPILA

SEQ ID NO: 220864 - protein, 15 aa, Artificial Sequence
  Description of Artificial Sequence: Synthetic peptide
  Seed: LRMKWMMAMKYPITA
LRMKWVMAVKFPIMA

SEQ ID NO: 220865 - protein, 15 aa, Artificial Sequence
  Description of Artificial Sequence: Synthetic peptide
  Seed: LRMKWMMAMKYPITA
LRMKWVMAVKFPIVA

SEQ ID NO: 220866 - protein, 15 aa, Artificial Sequence
  Description of Artificial Sequence: Synthetic peptide
  Seed: LRMKWMMAMKYPITA
LRMKWVMAYKFPIIA

SEQ ID NO: 220867 - protein, 15 aa, Artificial Sequence
  Description of Artificial Sequence: Synthetic peptide
  Seed: LRMKWMMAMKYPITA
LRMKWVMAYKFPILA

SEQ ID NO: 220868 - protein, 15 aa, Artificial Sequence
  Description of Artificial Sequence: Synthetic peptide
  Seed: LRMKWMMAMKYPITA
LRMKWVMAYKFPIVA

SEQ ID NO: 220869 - protein, 15 aa, Artificial Sequence
  Description of Artificial Sequence: Synthetic peptide
  Seed: LRMKWMMAMKYPITA
LRMKWWMAAKFPIFA

SEQ ID NO: 220870 - protein, 15 aa, Artificial Sequence
  Description of Artificial Sequence: Synthetic peptide
  Seed: LRMKWMMAMKYPITA
LRMKWWMAAKFPIIA

SEQ ID NO: 220871 - protein, 15 aa, Artificial Sequence
  Description of Artificial Sequence: Synthetic peptide
  Seed: LRMKWMMAMKYPITA
LRMKWWMAAKFPILA

SEQ ID NO: 220872 - protein, 15 aa, Artificial Sequence
  Description of Artificial Sequence: Synthetic peptide
  Seed: LRMKWMMAMKYPITA
LRMKWWMAAKFPIMA

SEQ ID NO: 220873 - protein, 15 aa, Artificial Sequence
  Description of Artificial Sequence: Synthetic peptide
  Seed: LRMKWMMAMKYPITA
LRMKWWMAAKFPIVA

SEQ ID NO: 220874 - protein, 15 aa, Artificial Sequence
  Description of Artificial Sequence: Synthetic peptide
  Seed: LRMKWMMAMKYPITA
LRMKWWMAEKFPIAA

SEQ ID NO: 220875 - protein, 15 aa, Artificial Sequence
  Description of Artificial Sequence: Synthetic peptide
  Seed: LRMKWMMAMKYPITA
LRMKWWMAEKFPIFA

SEQ ID NO: 220876 - protein, 15 aa, Artificial Sequence
  Description of Artificial Sequence: Synthetic peptide
  Seed: LRMKWMMAMKYPITA
LRMKWWMAEKFPIIA

SEQ ID NO: 220877 - protein, 15 aa, Artificial Sequence
  Description of Artificial Sequence: Synthetic peptide
  Seed: LRMKWMMAMKYPITA
LRMKWWMAEKFPILA

SEQ ID NO: 220878 - protein, 15 aa, Artificial Sequence
  Description of Artificial Sequence: Synthetic peptide
  Seed: LRMKWMMAMKYPITA
LRMKWWMAEKFPIMA

SEQ ID NO: 220879 - protein, 15 aa, Artificial Sequence
  Description of Artificial Sequence: Synthetic peptide
  Seed: LRMKWMMAMKYPITA
LRMKWWMAEKFPIVA

SEQ ID NO: 220880 - protein, 15 aa, Artificial Sequence
  Description of Artificial Sequence: Synthetic peptide
  Seed: LRMKWMMAMKYPITA
LRMKWWMAEKFPIYA

SEQ ID NO: 220881 - protein, 15 aa, Artificial Sequence
  Description of Artificial Sequence: Synthetic peptide
  Seed: LRMKWMMAMKYPITA
LRMKWWMAEKLPIIA

SEQ ID NO: 220882 - protein, 15 aa, Artificial Sequence
  Description of Artificial Sequence: Synthetic peptide
  Seed: LRMKWMMAMKYPITA
LRMKWWMAEKLPILA

SEQ ID NO: 220883 - protein, 15 aa, Artificial Sequence
  Description of Artificial Sequence: Synthetic peptide
  Seed: LRMKWMMAMKYPITA
LRMKWWMAEKLPIVA

SEQ ID NO: 220884 - protein, 15 aa, Artificial Sequence
  Description of Artificial Sequence: Synthetic peptide
  Seed: LRMKWMMAMKYPITA
LRMKWWMAFKFPIAA

SEQ ID NO: 220885 - protein, 15 aa, Artificial Sequence
  Description of Artificial Sequence: Synthetic peptide
  Seed: LRMKWMMAMKYPITA
LRMKWWMAFKFPIFA

SEQ ID NO: 220886 - protein, 15 aa, Artificial Sequence
  Description of Artificial Sequence: Synthetic peptide
  Seed: LRMKWMMAMKYPITA
LRMKWWMAFKFPIIA

SEQ ID NO: 220887 - protein, 15 aa, Artificial Sequence
  Description of Artificial Sequence: Synthetic peptide
  Seed: LRMKWMMAMKYPITA
LRMKWWMAFKFPILA

SEQ ID NO: 220888 - protein, 15 aa, Artificial Sequence
  Description of Artificial Sequence: Synthetic peptide
  Seed: LRMKWMMAMKYPITA
LRMKWWMAFKFPIMA

SEQ ID NO: 220889 - protein, 15 aa, Artificial Sequence
  Description of Artificial Sequence: Synthetic peptide
  Seed: LRMKWMMAMKYPITA
LRMKWWMAFKFPITA

SEQ ID NO: 220890 - protein, 15 aa, Artificial Sequence
  Description of Artificial Sequence: Synthetic peptide
  Seed: LRMKWMMAMKYPITA
LRMKWWMAFKFPIVA

SEQ ID NO: 220891 - protein, 15 aa, Artificial Sequence
  Description of Artificial Sequence: Synthetic peptide
  Seed: LRMKWMMAMKYPITA
LRMKWWMAFKFPIYA

SEQ ID NO: 220892 - protein, 15 aa, Artificial Sequence
  Description of Artificial Sequence: Synthetic peptide
  Seed: LRMKWMMAMKYPITA
LRMKWWMAFKIPIVA

SEQ ID NO: 220893 - protein, 15 aa, Artificial Sequence
  Description of Artificial Sequence: Synthetic peptide
  Seed: LRMKWMMAMKYPITA
LRMKWWMAFKLPIIA

SEQ ID NO: 220894 - protein, 15 aa, Artificial Sequence
  Description of Artificial Sequence: Synthetic peptide
  Seed: LRMKWMMAMKYPITA
LRMKWWMAFKLPILA

SEQ ID NO: 220895 - protein, 15 aa, Artificial Sequence
  Description of Artificial Sequence: Synthetic peptide
  Seed: LRMKWMMAMKYPITA
LRMKWWMAFKLPIVA

SEQ ID NO: 220896 - protein, 15 aa, Artificial Sequence
  Description of Artificial Sequence: Synthetic peptide
  Seed: LRMKWMMAMKYPITA
LRMKWWMAFKMPILA

SEQ ID NO: 220897 - protein, 15 aa, Artificial Sequence
  Description of Artificial Sequence: Synthetic peptide
  Seed: LRMKWMMAMKYPITA
LRMKWWMAFKYPIIA

SEQ ID NO: 220898 - protein, 15 aa, Artificial Sequence
  Description of Artificial Sequence: Synthetic peptide
  Seed: LRMKWMMAMKYPITA
LRMKWWMAFKYPILA

SEQ ID NO: 220899 - protein, 15 aa, Artificial Sequence
  Description of Artificial Sequence: Synthetic peptide
  Seed: LRMKWMMAMKYPITA
LRMKWWMAFKYPIVA

SEQ ID NO: 220900 - protein, 15 aa, Artificial Sequence
  Description of Artificial Sequence: Synthetic peptide
  Seed: LRMKWMMAMKYPITA
LRMKWWMAHKFPIFA

SEQ ID NO: 220901 - protein, 15 aa, Artificial Sequence
  Description of Artificial Sequence: Synthetic peptide
  Seed: LRMKWMMAMKYPITA
LRMKWWMAHKFPIIA

SEQ ID NO: 220902 - protein, 15 aa, Artificial Sequence
  Description of Artificial Sequence: Synthetic peptide
  Seed: LRMKWMMAMKYPITA
LRMKWWMAHKFPILA

SEQ ID NO: 220903 - protein, 15 aa, Artificial Sequence
  Description of Artificial Sequence: Synthetic peptide
  Seed: LRMKWMMAMKYPITA
LRMKWWMAHKFPIMA

SEQ ID NO: 220904 - protein, 15 aa, Artificial Sequence
  Description of Artificial Sequence: Synthetic peptide
  Seed: LRMKWMMAMKYPITA
LRMKWWMAHKFPIVA

SEQ ID NO: 220905 - protein, 15 aa, Artificial Sequence
  Description of Artificial Sequence: Synthetic peptide
  Seed: LRMKWMMAMKYPITA
LRMKWWMAIKFPIAA

SEQ ID NO: 220906 - protein, 15 aa, Artificial Sequence
  Description of Artificial Sequence: Synthetic peptide
  Seed: LRMKWMMAMKYPITA
LRMKWWMAIKFPIFA

SEQ ID NO: 220907 - protein, 15 aa, Artificial Sequence
  Description of Artificial Sequence: Synthetic peptide
  Seed: LRMKWMMAMKYPITA
LRMKWWMAIKFPIIA

SEQ ID NO: 220908 - protein, 15 aa, Artificial Sequence
  Description of Artificial Sequence: Synthetic peptide
  Seed: LRMKWMMAMKYPITA
LRMKWWMAIKFPILA

SEQ ID NO: 220909 - protein, 15 aa, Artificial Sequence
  Description of Artificial Sequence: Synthetic peptide
  Seed: LRMKWMMAMKYPITA
LRMKWWMAIKFPIMA

SEQ ID NO: 220910 - protein, 15 aa, Artificial Sequence
  Description of Artificial Sequence: Synthetic peptide
  Seed: LRMKWMMAMKYPITA
LRMKWWMAIKFPINA

SEQ ID NO: 220911 - protein, 15 aa, Artificial Sequence
  Description of Artificial Sequence: Synthetic peptide
  Seed: LRMKWMMAMKYPITA
LRMKWWMAIKFPITA

SEQ ID NO: 220912 - protein, 15 aa, Artificial Sequence
  Description of Artificial Sequence: Synthetic peptide
  Seed: LRMKWMMAMKYPITA
LRMKWWMAIKFPIVA

SEQ ID NO: 220913 - protein, 15 aa, Artificial Sequence
  Description of Artificial Sequence: Synthetic peptide
  Seed: LRMKWMMAMKYPITA
LRMKWWMAIKFPIYA

SEQ ID NO: 220914 - protein, 15 aa, Artificial Sequence
  Description of Artificial Sequence: Synthetic peptide
  Seed: LRMKWMMAMKYPITA
LRMKWWMAIKLPIIA

SEQ ID NO: 220915 - protein, 15 aa, Artificial Sequence
  Description of Artificial Sequence: Synthetic peptide
  Seed: LRMKWMMAMKYPITA
LRMKWWMAIKLPILA

SEQ ID NO: 220916 - protein, 15 aa, Artificial Sequence
  Description of Artificial Sequence: Synthetic peptide
  Seed: LRMKWMMAMKYPITA
LRMKWWMAIKLPIVA

SEQ ID NO: 220917 - protein, 15 aa, Artificial Sequence
  Description of Artificial Sequence: Synthetic peptide
  Seed: LRMKWMMAMKYPITA
LRMKWWMAIKYPIIA

SEQ ID NO: 220918 - protein, 15 aa, Artificial Sequence
  Description of Artificial Sequence: Synthetic peptide
  Seed: LRMKWMMAMKYPITA
LRMKWWMAIKYPILA

SEQ ID NO: 220919 - protein, 15 aa, Artificial Sequence
  Description of Artificial Sequence: Synthetic peptide
  Seed: LRMKWMMAMKYPITA
LRMKWWMAIKYPIVA

SEQ ID NO: 220920 - protein, 15 aa, Artificial Sequence
  Description of Artificial Sequence: Synthetic peptide
  Seed: LRMKWMMAMKYPITA
LRMKWWMALKFPIAA

SEQ ID NO: 220921 - protein, 15 aa, Artificial Sequence
  Description of Artificial Sequence: Synthetic peptide
  Seed: LRMKWMMAMKYPITA
LRMKWWMALKFPIDA

SEQ ID NO: 220922 - protein, 15 aa, Artificial Sequence
  Description of Artificial Sequence: Synthetic peptide
  Seed: LRMKWMMAMKYPITA
LRMKWWMALKFPIEA

SEQ ID NO: 220923 - protein, 15 aa, Artificial Sequence
  Description of Artificial Sequence: Synthetic peptide
  Seed: LRMKWMMAMKYPITA
LRMKWWMALKFPIFA

SEQ ID NO: 220924 - protein, 15 aa, Artificial Sequence
  Description of Artificial Sequence: Synthetic peptide
  Seed: LRMKWMMAMKYPITA
LRMKWWMALKFPIIA

SEQ ID NO: 220925 - protein, 15 aa, Artificial Sequence
  Description of Artificial Sequence: Synthetic peptide
  Seed: LRMKWMMAMKYPITA
LRMKWWMALKFPILA

SEQ ID NO: 220926 - protein, 15 aa, Artificial Sequence
  Description of Artificial Sequence: Synthetic peptide
  Seed: LRMKWMMAMKYPITA
LRMKWWMALKFPIMA

SEQ ID NO: 220927 - protein, 15 aa, Artificial Sequence
  Description of Artificial Sequence: Synthetic peptide
  Seed: LRMKWMMAMKYPITA
LRMKWWMALKFPINA

SEQ ID NO: 220928 - protein, 15 aa, Artificial Sequence
  Description of Artificial Sequence: Synthetic peptide
  Seed: LRMKWMMAMKYPITA
LRMKWWMALKFPISA

SEQ ID NO: 220929 - protein, 15 aa, Artificial Sequence
  Description of Artificial Sequence: Synthetic peptide
  Seed: LRMKWMMAMKYPITA
LRMKWWMALKFPITA

SEQ ID NO: 220930 - protein, 15 aa, Artificial Sequence
  Description of Artificial Sequence: Synthetic peptide
  Seed: LRMKWMMAMKYPITA
LRMKWWMALKFPIVA

SEQ ID NO: 220931 - protein, 15 aa, Artificial Sequence
  Description of Artificial Sequence: Synthetic peptide
  Seed: LRMKWMMAMKYPITA
LRMKWWMALKFPIYA

SEQ ID NO: 220932 - protein, 15 aa, Artificial Sequence
  Description of Artificial Sequence: Synthetic peptide
  Seed: LRMKWMMAMKYPITA
LRMKWWMALKYPIIA

SEQ ID NO: 220933 - protein, 15 aa, Artificial Sequence
  Description of Artificial Sequence: Synthetic peptide
  Seed: LRMKWMMAMKYPITA
LRMKWWMALKYPILA

SEQ ID NO: 220934 - protein, 15 aa, Artificial Sequence
  Description of Artificial Sequence: Synthetic peptide
  Seed: LRMKWMMAMKYPITA
LRMKWWMALKYPIVA

SEQ ID NO: 220935 - protein, 15 aa, Artificial Sequence
  Description of Artificial Sequence: Synthetic peptide
  Seed: LRMKWMMAMKYPITA
LRMKWWMAMKFPIFA

SEQ ID NO: 220936 - protein, 15 aa, Artificial Sequence
  Description of Artificial Sequence: Synthetic peptide
  Seed: LRMKWMMAMKYPITA
LRMKWWMAMKFPIIA

SEQ ID NO: 220937 - protein, 15 aa, Artificial Sequence
  Description of Artificial Sequence: Synthetic peptide
  Seed: LRMKWMMAMKYPITA
LRMKWWMAMKFPILA

SEQ ID NO: 220938 - protein, 15 aa, Artificial Sequence
  Description of Artificial Sequence: Synthetic peptide
  Seed: LRMKWMMAMKYPITA
LRMKWWMAMKFPIMA

SEQ ID NO: 220939 - protein, 15 aa, Artificial Sequence
  Description of Artificial Sequence: Synthetic peptide
  Seed: LRMKWMMAMKYPITA
LRMKWWMAMKFPIVA

SEQ ID NO: 220940 - protein, 15 aa, Artificial Sequence
  Description of Artificial Sequence: Synthetic peptide
  Seed: LRMKWMMAMKYPITA
LRMKWWMAMKLPIVA

SEQ ID NO: 220941 - protein, 15 aa, Artificial Sequence
  Description of Artificial Sequence: Synthetic peptide
  Seed: LRMKWMMAMKYPITA
LRMKWWMANKFPIIA

SEQ ID NO: 220942 - protein, 15 aa, Artificial Sequence
  Description of Artificial Sequence: Synthetic peptide
  Seed: LRMKWMMAMKYPITA
LRMKWWMANKFPILA

SEQ ID NO: 220943 - protein, 15 aa, Artificial Sequence
  Description of Artificial Sequence: Synthetic peptide
  Seed: LRMKWMMAMKYPITA
LRMKWWMANKFPIVA

SEQ ID NO: 220944 - protein, 15 aa, Artificial Sequence
  Description of Artificial Sequence: Synthetic peptide
  Seed: LRMKWMMAMKYPITA
LRMKWWMAQKFPIFA

SEQ ID NO: 220945 - protein, 15 aa, Artificial Sequence
  Description of Artificial Sequence: Synthetic peptide
  Seed: LRMKWMMAMKYPITA
LRMKWWMAQKFPIIA

SEQ ID NO: 220946 - protein, 15 aa, Artificial Sequence
  Description of Artificial Sequence: Synthetic peptide
  Seed: LRMKWMMAMKYPITA
LRMKWWMAQKFPILA

SEQ ID NO: 220947 - protein, 15 aa, Artificial Sequence
  Description of Artificial Sequence: Synthetic peptide
  Seed: LRMKWMMAMKYPITA
LRMKWWMAQKFPIVA

SEQ ID NO: 220948 - protein, 15 aa, Artificial Sequence
  Description of Artificial Sequence: Synthetic peptide
  Seed: LRMKWMMAMKYPITA
LRMKWWMASKFPIFA

SEQ ID NO: 220949 - protein, 15 aa, Artificial Sequence
  Description of Artificial Sequence: Synthetic peptide
  Seed: LRMKWMMAMKYPITA
LRMKWWMASKFPIIA

SEQ ID NO: 220950 - protein, 15 aa, Artificial Sequence
  Description of Artificial Sequence: Synthetic peptide
  Seed: LRMKWMMAMKYPITA
LRMKWWMASKFPILA

SEQ ID NO: 220951 - protein, 15 aa, Artificial Sequence
  Description of Artificial Sequence: Synthetic peptide
  Seed: LRMKWMMAMKYPITA
LRMKWWMASKFPIMA

SEQ ID NO: 220952 - protein, 15 aa, Artificial Sequence
  Description of Artificial Sequence: Synthetic peptide
  Seed: LRMKWMMAMKYPITA
LRMKWWMASKFPIVA

SEQ ID NO: 220953 - protein, 15 aa, Artificial Sequence
  Description of Artificial Sequence: Synthetic peptide
  Seed: LRMKWMMAMKYPITA
LRMKWWMATKFPIFA

SEQ ID NO: 220954 - protein, 15 aa, Artificial Sequence
  Description of Artificial Sequence: Synthetic peptide
  Seed: LRMKWMMAMKYPITA
LRMKWWMATKFPIIA

SEQ ID NO: 220955 - protein, 15 aa, Artificial Sequence
  Description of Artificial Sequence: Synthetic peptide
  Seed: LRMKWMMAMKYPITA
LRMKWWMATKFPILA

SEQ ID NO: 220956 - protein, 15 aa, Artificial Sequence
  Description of Artificial Sequence: Synthetic peptide
  Seed: LRMKWMMAMKYPITA
LRMKWWMATKFPIMA

SEQ ID NO: 220957 - protein, 15 aa, Artificial Sequence
  Description of Artificial Sequence: Synthetic peptide
  Seed: LRMKWMMAMKYPITA
LRMKWWMATKFPIVA

SEQ ID NO: 220958 - protein, 15 aa, Artificial Sequence
  Description of Artificial Sequence: Synthetic peptide
  Seed: LRMKWMMAMKYPITA
LRMKWWMATKLPILA

SEQ ID NO: 220959 - protein, 15 aa, Artificial Sequence
  Description of Artificial Sequence: Synthetic peptide
  Seed: LRMKWMMAMKYPITA
LRMKWWMAVKFPIAA

SEQ ID NO: 220960 - protein, 15 aa, Artificial Sequence
  Description of Artificial Sequence: Synthetic peptide
  Seed: LRMKWMMAMKYPITA
LRMKWWMAVKFPIFA

SEQ ID NO: 220961 - protein, 15 aa, Artificial Sequence
  Description of Artificial Sequence: Synthetic peptide
  Seed: LRMKWMMAMKYPITA
LRMKWWMAVKFPIIA

SEQ ID NO: 220962 - protein, 15 aa, Artificial Sequence
  Description of Artificial Sequence: Synthetic peptide
  Seed: LRMKWMMAMKYPITA
LRMKWWMAVKFPILA

SEQ ID NO: 220963 - protein, 15 aa, Artificial Sequence
  Description of Artificial Sequence: Synthetic peptide
  Seed: LRMKWMMAMKYPITA
LRMKWWMAVKFPIMA

SEQ ID NO: 220964 - protein, 15 aa, Artificial Sequence
  Description of Artificial Sequence: Synthetic peptide
  Seed: LRMKWMMAMKYPITA
LRMKWWMAVKFPITA

SEQ ID NO: 220965 - protein, 15 aa, Artificial Sequence
  Description of Artificial Sequence: Synthetic peptide
  Seed: LRMKWMMAMKYPITA
LRMKWWMAVKFPIVA

SEQ ID NO: 220966 - protein, 15 aa, Artificial Sequence
  Description of Artificial Sequence: Synthetic peptide
  Seed: LRMKWMMAMKYPITA
LRMKWWMAVKFPIYA

SEQ ID NO: 220967 - protein, 15 aa, Artificial Sequence
  Description of Artificial Sequence: Synthetic peptide
  Seed: LRMKWMMAMKYPITA
LRMKWWMAVKYPIIA

SEQ ID NO: 220968 - protein, 15 aa, Artificial Sequence
  Description of Artificial Sequence: Synthetic peptide
  Seed: LRMKWMMAMKYPITA
LRMKWWMAVKYPILA

SEQ ID NO: 220969 - protein, 15 aa, Artificial Sequence
  Description of Artificial Sequence: Synthetic peptide
  Seed: LRMKWMMAMKYPITA
LRMKWWMAWKFPIIA

SEQ ID NO: 220970 - protein, 15 aa, Artificial Sequence
  Description of Artificial Sequence: Synthetic peptide
  Seed: LRMKWMMAMKYPITA
LRMKWWMAWKFPILA

SEQ ID NO: 220971 - protein, 15 aa, Artificial Sequence
  Description of Artificial Sequence: Synthetic peptide
  Seed: LRMKWMMAMKYPITA
LRMKWWMAWKFPIVA

SEQ ID NO: 220972 - protein, 15 aa, Artificial Sequence
  Description of Artificial Sequence: Synthetic peptide
  Seed: LRMKWMMAMKYPITA
LRMKWWMAYKFPIFA

SEQ ID NO: 220973 - protein, 15 aa, Artificial Sequence
  Description of Artificial Sequence: Synthetic peptide
  Seed: LRMKWMMAMKYPITA
LRMKWWMAYKFPIIA

SEQ ID NO: 220974 - protein, 15 aa, Artificial Sequence
  Description of Artificial Sequence: Synthetic peptide
  Seed: LRMKWMMAMKYPITA
LRMKWWMAYKFPILA

SEQ ID NO: 220975 - protein, 15 aa, Artificial Sequence
  Description of Artificial Sequence: Synthetic peptide
  Seed: LRMKWMMAMKYPITA
LRMKWWMAYKFPIMA

SEQ ID NO: 220976 - protein, 15 aa, Artificial Sequence
  Description of Artificial Sequence: Synthetic peptide
  Seed: LRMKWMMAMKYPITA
LRMKWWMAYKFPIVA

SEQ ID NO: 220977 - protein, 15 aa, Artificial Sequence
  Description of Artificial Sequence: Synthetic peptide
  Seed: LRMKWMMAMKYPITA
LRMKWYMAAKFPIFA

SEQ ID NO: 220978 - protein, 15 aa, Artificial Sequence
  Description of Artificial Sequence: Synthetic peptide
  Seed: LRMKWMMAMKYPITA
LRMKWYMAAKFPIIA

SEQ ID NO: 220979 - protein, 15 aa, Artificial Sequence
  Description of Artificial Sequence: Synthetic peptide
  Seed: LRMKWMMAMKYPITA
LRMKWYMAAKFPILA

SEQ ID NO: 220980 - protein, 15 aa, Artificial Sequence
  Description of Artificial Sequence: Synthetic peptide
  Seed: LRMKWMMAMKYPITA
LRMKWYMAAKFPIMA

SEQ ID NO: 220981 - protein, 15 aa, Artificial Sequence
  Description of Artificial Sequence: Synthetic peptide
  Seed: LRMKWMMAMKYPITA
LRMKWYMAAKFPIVA

SEQ ID NO: 220982 - protein, 15 aa, Artificial Sequence
  Description of Artificial Sequence: Synthetic peptide
  Seed: LRMKWMMAMKYPITA
LRMKWYMADKFPIIA

SEQ ID NO: 220983 - protein, 15 aa, Artificial Sequence
  Description of Artificial Sequence: Synthetic peptide
  Seed: LRMKWMMAMKYPITA
LRMKWYMADKFPILA

SEQ ID NO: 220984 - protein, 15 aa, Artificial Sequence
  Description of Artificial Sequence: Synthetic peptide
  Seed: LRMKWMMAMKYPITA
LRMKWYMAEKFPIAA

SEQ ID NO: 220985 - protein, 15 aa, Artificial Sequence
  Description of Artificial Sequence: Synthetic peptide
  Seed: LRMKWMMAMKYPITA
LRMKWYMAEKFPIFA

SEQ ID NO: 220986 - protein, 15 aa, Artificial Sequence
  Description of Artificial Sequence: Synthetic peptide
  Seed: LRMKWMMAMKYPITA
LRMKWYMAEKFPIIA

SEQ ID NO: 220987 - protein, 15 aa, Artificial Sequence
  Description of Artificial Sequence: Synthetic peptide
  Seed: LRMKWMMAMKYPITA
LRMKWYMAEKFPILA

SEQ ID NO: 220988 - protein, 15 aa, Artificial Sequence
  Description of Artificial Sequence: Synthetic peptide
  Seed: LRMKWMMAMKYPITA
LRMKWYMAEKFPIMA

SEQ ID NO: 220989 - protein, 15 aa, Artificial Sequence
  Description of Artificial Sequence: Synthetic peptide
  Seed: LRMKWMMAMKYPITA
LRMKWYMAEKFPITA

SEQ ID NO: 220990 - protein, 15 aa, Artificial Sequence
  Description of Artificial Sequence: Synthetic peptide
  Seed: LRMKWMMAMKYPITA
LRMKWYMAEKFPIVA

SEQ ID NO: 220991 - protein, 15 aa, Artificial Sequence
  Description of Artificial Sequence: Synthetic peptide
  Seed: LRMKWMMAMKYPITA
LRMKWYMAEKFPIYA

SEQ ID NO: 220992 - protein, 15 aa, Artificial Sequence
  Description of Artificial Sequence: Synthetic peptide
  Seed: LRMKWMMAMKYPITA
LRMKWYMAEKLPIIA

SEQ ID NO: 220993 - protein, 15 aa, Artificial Sequence
  Description of Artificial Sequence: Synthetic peptide
  Seed: LRMKWMMAMKYPITA
LRMKWYMAEKLPILA

SEQ ID NO: 220994 - protein, 15 aa, Artificial Sequence
  Description of Artificial Sequence: Synthetic peptide
  Seed: LRMKWMMAMKYPITA
LRMKWYMAEKLPIVA

SEQ ID NO: 220995 - protein, 15 aa, Artificial Sequence
  Description of Artificial Sequence: Synthetic peptide
  Seed: LRMKWMMAMKYPITA
LRMKWYMAFKFPIAA

SEQ ID NO: 220996 - protein, 15 aa, Artificial Sequence
  Description of Artificial Sequence: Synthetic peptide
  Seed: LRMKWMMAMKYPITA
LRMKWYMAFKFPIEA

SEQ ID NO: 220997 - protein, 15 aa, Artificial Sequence
  Description of Artificial Sequence: Synthetic peptide
  Seed: LRMKWMMAMKYPITA
LRMKWYMAFKFPIFA

SEQ ID NO: 220998 - protein, 15 aa, Artificial Sequence
  Description of Artificial Sequence: Synthetic peptide
  Seed: LRMKWMMAMKYPITA
LRMKWYMAFKFPIIA

SEQ ID NO: 220999 - protein, 15 aa, Artificial Sequence
  Description of Artificial Sequence: Synthetic peptide
  Seed: LRMKWMMAMKYPITA
LRMKWYMAFKFPILA

SEQ ID NO: 221000 - protein, 15 aa, Artificial Sequence
  Description of Artificial Sequence: Synthetic peptide
  Seed: LRMKWMMAMKYPITA
LRMKWYMAFKFPIMA

SEQ ID NO: 221001 - protein, 15 aa, Artificial Sequence
  Description of Artificial Sequence: Synthetic peptide
  Seed: LRMKWMMAMKYPITA
LRMKWYMAFKFPINA

SEQ ID NO: 221002 - protein, 15 aa, Artificial Sequence
  Description of Artificial Sequence: Synthetic peptide
  Seed: LRMKWMMAMKYPITA
LRMKWYMAFKFPITA

SEQ ID NO: 221003 - protein, 15 aa, Artificial Sequence
  Description of Artificial Sequence: Synthetic peptide
  Seed: LRMKWMMAMKYPITA
LRMKWYMAFKFPIVA

SEQ ID NO: 221004 - protein, 15 aa, Artificial Sequence
  Description of Artificial Sequence: Synthetic peptide
  Seed: LRMKWMMAMKYPITA
LRMKWYMAFKFPIYA

SEQ ID NO: 221005 - protein, 15 aa, Artificial Sequence
  Description of Artificial Sequence: Synthetic peptide
  Seed: LRMKWMMAMKYPITA
LRMKWYMAFKLPIIA

SEQ ID NO: 221006 - protein, 15 aa, Artificial Sequence
  Description of Artificial Sequence: Synthetic peptide
  Seed: LRMKWMMAMKYPITA
LRMKWYMAFKLPILA

SEQ ID NO: 221007 - protein, 15 aa, Artificial Sequence
  Description of Artificial Sequence: Synthetic peptide
  Seed: LRMKWMMAMKYPITA
LRMKWYMAFKLPIVA

SEQ ID NO: 221008 - protein, 15 aa, Artificial Sequence
  Description of Artificial Sequence: Synthetic peptide
  Seed: LRMKWMMAMKYPITA
LRMKWYMAFKMPIIA

SEQ ID NO: 221009 - protein, 15 aa, Artificial Sequence
  Description of Artificial Sequence: Synthetic peptide
  Seed: LRMKWMMAMKYPITA
LRMKWYMAFKMPILA

SEQ ID NO: 221010 - protein, 15 aa, Artificial Sequence
  Description of Artificial Sequence: Synthetic peptide
  Seed: LRMKWMMAMKYPITA
LRMKWYMAFKMPIVA

SEQ ID NO: 221011 - protein, 15 aa, Artificial Sequence
  Description of Artificial Sequence: Synthetic peptide
  Seed: LRMKWMMAMKYPITA
LRMKWYMAFKYPIIA

SEQ ID NO: 221012 - protein, 15 aa, Artificial Sequence
  Description of Artificial Sequence: Synthetic peptide
  Seed: LRMKWMMAMKYPITA
LRMKWYMAFKYPILA

SEQ ID NO: 221013 - protein, 15 aa, Artificial Sequence
  Description of Artificial Sequence: Synthetic peptide
  Seed: LRMKWMMAMKYPITA
LRMKWYMAFKYPIVA

SEQ ID NO: 221014 - protein, 15 aa, Artificial Sequence
  Description of Artificial Sequence: Synthetic peptide
  Seed: LRMKWMMAMKYPITA
LRMKWYMAHKFPIFA

SEQ ID NO: 221015 - protein, 15 aa, Artificial Sequence
  Description of Artificial Sequence: Synthetic peptide
  Seed: LRMKWMMAMKYPITA
LRMKWYMAHKFPIIA

SEQ ID NO: 221016 - protein, 15 aa, Artificial Sequence
  Description of Artificial Sequence: Synthetic peptide
  Seed: LRMKWMMAMKYPITA
LRMKWYMAHKFPILA

SEQ ID NO: 221017 - protein, 15 aa, Artificial Sequence
  Description of Artificial Sequence: Synthetic peptide
  Seed: LRMKWMMAMKYPITA
LRMKWYMAHKFPIMA

SEQ ID NO: 221018 - protein, 15 aa, Artificial Sequence
  Description of Artificial Sequence: Synthetic peptide
  Seed: LRMKWMMAMKYPITA
LRMKWYMAHKFPIVA

SEQ ID NO: 221019 - protein, 15 aa, Artificial Sequence
  Description of Artificial Sequence: Synthetic peptide
  Seed: LRMKWMMAMKYPITA
LRMKWYMAHKLPILA

SEQ ID NO: 221020 - protein, 15 aa, Artificial Sequence
  Description of Artificial Sequence: Synthetic peptide
  Seed: LRMKWMMAMKYPITA
LRMKWYMAIKFPIAA

SEQ ID NO: 221021 - protein, 15 aa, Artificial Sequence
  Description of Artificial Sequence: Synthetic peptide
  Seed: LRMKWMMAMKYPITA
LRMKWYMAIKFPIDA

SEQ ID NO: 221022 - protein, 15 aa, Artificial Sequence
  Description of Artificial Sequence: Synthetic peptide
  Seed: LRMKWMMAMKYPITA
LRMKWYMAIKFPIEA

SEQ ID NO: 221023 - protein, 15 aa, Artificial Sequence
  Description of Artificial Sequence: Synthetic peptide
  Seed: LRMKWMMAMKYPITA
LRMKWYMAIKFPIFA

SEQ ID NO: 221024 - protein, 15 aa, Artificial Sequence
  Description of Artificial Sequence: Synthetic peptide
  Seed: LRMKWMMAMKYPITA
LRMKWYMAIKFPIIA

SEQ ID NO: 221025 - protein, 15 aa, Artificial Sequence
  Description of Artificial Sequence: Synthetic peptide
  Seed: LRMKWMMAMKYPITA
LRMKWYMAIKFPILA

SEQ ID NO: 221026 - protein, 15 aa, Artificial Sequence
  Description of Artificial Sequence: Synthetic peptide
  Seed: LRMKWMMAMKYPITA
LRMKWYMAIKFPIMA

SEQ ID NO: 221027 - protein, 15 aa, Artificial Sequence
  Description of Artificial Sequence: Synthetic peptide
  Seed: LRMKWMMAMKYPITA
LRMKWYMAIKFPINA

SEQ ID NO: 221028 - protein, 15 aa, Artificial Sequence
  Description of Artificial Sequence: Synthetic peptide
  Seed: LRMKWMMAMKYPITA
LRMKWYMAIKFPISA

SEQ ID NO: 221029 - protein, 15 aa, Artificial Sequence
  Description of Artificial Sequence: Synthetic peptide
  Seed: LRMKWMMAMKYPITA
LRMKWYMAIKFPITA

SEQ ID NO: 221030 - protein, 15 aa, Artificial Sequence
  Description of Artificial Sequence: Synthetic peptide
  Seed: LRMKWMMAMKYPITA
LRMKWYMAIKFPIVA

SEQ ID NO: 221031 - protein, 15 aa, Artificial Sequence
  Description of Artificial Sequence: Synthetic peptide
  Seed: LRMKWMMAMKYPITA
LRMKWYMAIKFPIYA

SEQ ID NO: 221032 - protein, 15 aa, Artificial Sequence
  Description of Artificial Sequence: Synthetic peptide
  Seed: LRMKWMMAMKYPITA
LRMKWYMAIKLPIIA

SEQ ID NO: 221033 - protein, 15 aa, Artificial Sequence
  Description of Artificial Sequence: Synthetic peptide
  Seed: LRMKWMMAMKYPITA
LRMKWYMAIKLPILA

SEQ ID NO: 221034 - protein, 15 aa, Artificial Sequence
  Description of Artificial Sequence: Synthetic peptide
  Seed: LRMKWMMAMKYPITA
LRMKWYMAIKLPIVA

SEQ ID NO: 221035 - protein, 15 aa, Artificial Sequence
  Description of Artificial Sequence: Synthetic peptide
  Seed: LRMKWMMAMKYPITA
LRMKWYMAIKYPIIA

SEQ ID NO: 221036 - protein, 15 aa, Artificial Sequence
  Description of Artificial Sequence: Synthetic peptide
  Seed: LRMKWMMAMKYPITA
LRMKWYMAIKYPILA

SEQ ID NO: 221037 - protein, 15 aa, Artificial Sequence
  Description of Artificial Sequence: Synthetic peptide
  Seed: LRMKWMMAMKYPITA
LRMKWYMAIKYPIVA

SEQ ID NO: 221038 - protein, 15 aa, Artificial Sequence
  Description of Artificial Sequence: Synthetic peptide
  Seed: LRMKWMMAMKYPITA
LRMKWYMAKKFPILA

SEQ ID NO: 221039 - protein, 15 aa, Artificial Sequence
  Description of Artificial Sequence: Synthetic peptide
  Seed: LRMKWMMAMKYPITA
LRMKWYMALKFPIAA

SEQ ID NO: 221040 - protein, 15 aa, Artificial Sequence
  Description of Artificial Sequence: Synthetic peptide
  Seed: LRMKWMMAMKYPITA
LRMKWYMALKFPIDA

SEQ ID NO: 221041 - protein, 15 aa, Artificial Sequence
  Description of Artificial Sequence: Synthetic peptide
  Seed: LRMKWMMAMKYPITA
LRMKWYMALKFPIEA

SEQ ID NO: 221042 - protein, 15 aa, Artificial Sequence
  Description of Artificial Sequence: Synthetic peptide
  Seed: LRMKWMMAMKYPITA
LRMKWYMALKFPIFA

SEQ ID NO: 221043 - protein, 15 aa, Artificial Sequence
  Description of Artificial Sequence: Synthetic peptide
  Seed: LRMKWMMAMKYPITA
LRMKWYMALKFPIHA

SEQ ID NO: 221044 - protein, 15 aa, Artificial Sequence
  Description of Artificial Sequence: Synthetic peptide
  Seed: LRMKWMMAMKYPITA
LRMKWYMALKFPIIA

SEQ ID NO: 221045 - protein, 15 aa, Artificial Sequence
  Description of Artificial Sequence: Synthetic peptide
  Seed: LRMKWMMAMKYPITA
LRMKWYMALKFPILA

SEQ ID NO: 221046 - protein, 15 aa, Artificial Sequence
  Description of Artificial Sequence: Synthetic peptide
  Seed: LRMKWMMAMKYPITA
LRMKWYMALKFPIMA

SEQ ID NO: 221047 - protein, 15 aa, Artificial Sequence
  Description of Artificial Sequence: Synthetic peptide
  Seed: LRMKWMMAMKYPITA
LRMKWYMALKFPINA

SEQ ID NO: 221048 - protein, 15 aa, Artificial Sequence
  Description of Artificial Sequence: Synthetic peptide
  Seed: LRMKWMMAMKYPITA
LRMKWYMALKFPIPA

SEQ ID NO: 221049 - protein, 15 aa, Artificial Sequence
  Description of Artificial Sequence: Synthetic peptide
  Seed: LRMKWMMAMKYPITA
LRMKWYMALKFPIQA

SEQ ID NO: 221050 - protein, 15 aa, Artificial Sequence
  Description of Artificial Sequence: Synthetic peptide
  Seed: LRMKWMMAMKYPITA
LRMKWYMALKFPIRA

SEQ ID NO: 221051 - protein, 15 aa, Artificial Sequence
  Description of Artificial Sequence: Synthetic peptide
  Seed: LRMKWMMAMKYPITA
LRMKWYMALKFPISA

SEQ ID NO: 221052 - protein, 15 aa, Artificial Sequence
  Description of Artificial Sequence: Synthetic peptide
  Seed: LRMKWMMAMKYPITA
LRMKWYMALKFPITA

SEQ ID NO: 221053 - protein, 15 aa, Artificial Sequence
  Description of Artificial Sequence: Synthetic peptide
  Seed: LRMKWMMAMKYPITA
LRMKWYMALKFPIVA

SEQ ID NO: 221054 - protein, 15 aa, Artificial Sequence
  Description of Artificial Sequence: Synthetic peptide
  Seed: LRMKWMMAMKYPITA
LRMKWYMALKFPIYA

SEQ ID NO: 221055 - protein, 15 aa, Artificial Sequence
  Description of Artificial Sequence: Synthetic peptide
  Seed: LRMKWMMAMKYPITA
LRMKWYMALKLPIIA

SEQ ID NO: 221056 - protein, 15 aa, Artificial Sequence
  Description of Artificial Sequence: Synthetic peptide
  Seed: LRMKWMMAMKYPITA
LRMKWYMALKLPILA

SEQ ID NO: 221057 - protein, 15 aa, Artificial Sequence
  Description of Artificial Sequence: Synthetic peptide
  Seed: LRMKWMMAMKYPITA
LRMKWYMALKLPIVA

SEQ ID NO: 221058 - protein, 15 aa, Artificial Sequence
  Description of Artificial Sequence: Synthetic peptide
  Seed: LRMKWMMAMKYPITA
LRMKWYMALKMPIIA

SEQ ID NO: 221059 - protein, 15 aa, Artificial Sequence
  Description of Artificial Sequence: Synthetic peptide
  Seed: LRMKWMMAMKYPITA
LRMKWYMALKMPILA

SEQ ID NO: 221060 - protein, 15 aa, Artificial Sequence
  Description of Artificial Sequence: Synthetic peptide
  Seed: LRMKWMMAMKYPITA
LRMKWYMALKMPIVA

SEQ ID NO: 221061 - protein, 15 aa, Artificial Sequence
  Description of Artificial Sequence: Synthetic peptide
  Seed: LRMKWMMAMKYPITA
LRMKWYMALKYPIIA

SEQ ID NO: 221062 - protein, 15 aa, Artificial Sequence
  Description of Artificial Sequence: Synthetic peptide
  Seed: LRMKWMMAMKYPITA
LRMKWYMALKYPILA

SEQ ID NO: 221063 - protein, 15 aa, Artificial Sequence
  Description of Artificial Sequence: Synthetic peptide
  Seed: LRMKWMMAMKYPITA
LRMKWYMALKYPIVA

SEQ ID NO: 221064 - protein, 15 aa, Artificial Sequence
  Description of Artificial Sequence: Synthetic peptide
  Seed: LRMKWMMAMKYPITA
LRMKWYMAMKFPIAA

SEQ ID NO: 221065 - protein, 15 aa, Artificial Sequence
  Description of Artificial Sequence: Synthetic peptide
  Seed: LRMKWMMAMKYPITA
LRMKWYMAMKFPIFA

SEQ ID NO: 221066 - protein, 15 aa, Artificial Sequence
  Description of Artificial Sequence: Synthetic peptide
  Seed: LRMKWMMAMKYPITA
LRMKWYMAMKFPIIA

SEQ ID NO: 221067 - protein, 15 aa, Artificial Sequence
  Description of Artificial Sequence: Synthetic peptide
  Seed: LRMKWMMAMKYPITA
LRMKWYMAMKFPILA

SEQ ID NO: 221068 - protein, 15 aa, Artificial Sequence
  Description of Artificial Sequence: Synthetic peptide
  Seed: LRMKWMMAMKYPITA
LRMKWYMAMKFPIMA

SEQ ID NO: 221069 - protein, 15 aa, Artificial Sequence
  Description of Artificial Sequence: Synthetic peptide
  Seed: LRMKWMMAMKYPITA
LRMKWYMAMKFPIVA

SEQ ID NO: 221070 - protein, 15 aa, Artificial Sequence
  Description of Artificial Sequence: Synthetic peptide
  Seed: LRMKWMMAMKYPITA
LRMKWYMAMKFPIYA

SEQ ID NO: 221071 - protein, 15 aa, Artificial Sequence
  Description of Artificial Sequence: Synthetic peptide
  Seed: LRMKWMMAMKYPITA
LRMKWYMAMKLPIIA

SEQ ID NO: 221072 - protein, 15 aa, Artificial Sequence
  Description of Artificial Sequence: Synthetic peptide
  Seed: LRMKWMMAMKYPITA
LRMKWYMAMKLPILA

SEQ ID NO: 221073 - protein, 15 aa, Artificial Sequence
  Description of Artificial Sequence: Synthetic peptide
  Seed: LRMKWMMAMKYPITA
LRMKWYMAMKLPIVA

SEQ ID NO: 221074 - protein, 15 aa, Artificial Sequence
  Description of Artificial Sequence: Synthetic peptide
  Seed: LRMKWMMAMKYPITA
LRMKWYMANKFPIIA

SEQ ID NO: 221075 - protein, 15 aa, Artificial Sequence
  Description of Artificial Sequence: Synthetic peptide
  Seed: LRMKWMMAMKYPITA
LRMKWYMANKFPILA

SEQ ID NO: 221076 - protein, 15 aa, Artificial Sequence
  Description of Artificial Sequence: Synthetic peptide
  Seed: LRMKWMMAMKYPITA
LRMKWYMANKFPIVA

SEQ ID NO: 221077 - protein, 15 aa, Artificial Sequence
  Description of Artificial Sequence: Synthetic peptide
  Seed: LRMKWMMAMKYPITA
LRMKWYMAQKFPIFA

SEQ ID NO: 221078 - protein, 15 aa, Artificial Sequence
  Description of Artificial Sequence: Synthetic peptide
  Seed: LRMKWMMAMKYPITA
LRMKWYMAQKFPIIA

SEQ ID NO: 221079 - protein, 15 aa, Artificial Sequence
  Description of Artificial Sequence: Synthetic peptide
  Seed: LRMKWMMAMKYPITA
LRMKWYMAQKFPILA

SEQ ID NO: 221080 - protein, 15 aa, Artificial Sequence
  Description of Artificial Sequence: Synthetic peptide
  Seed: LRMKWMMAMKYPITA
LRMKWYMAQKFPIMA

SEQ ID NO: 221081 - protein, 15 aa, Artificial Sequence
  Description of Artificial Sequence: Synthetic peptide
  Seed: LRMKWMMAMKYPITA
LRMKWYMAQKFPIVA

SEQ ID NO: 221082 - protein, 15 aa, Artificial Sequence
  Description of Artificial Sequence: Synthetic peptide
  Seed: LRMKWMMAMKYPITA
LRMKWYMASKFPIFA

SEQ ID NO: 221083 - protein, 15 aa, Artificial Sequence
  Description of Artificial Sequence: Synthetic peptide
  Seed: LRMKWMMAMKYPITA
LRMKWYMASKFPIIA

SEQ ID NO: 221084 - protein, 15 aa, Artificial Sequence
  Description of Artificial Sequence: Synthetic peptide
  Seed: LRMKWMMAMKYPITA
LRMKWYMASKFPILA

SEQ ID NO: 221085 - protein, 15 aa, Artificial Sequence
  Description of Artificial Sequence: Synthetic peptide
  Seed: LRMKWMMAMKYPITA
LRMKWYMASKFPIMA

SEQ ID NO: 221086 - protein, 15 aa, Artificial Sequence
  Description of Artificial Sequence: Synthetic peptide
  Seed: LRMKWMMAMKYPITA
LRMKWYMASKFPIVA

SEQ ID NO: 221087 - protein, 15 aa, Artificial Sequence
  Description of Artificial Sequence: Synthetic peptide
  Seed: LRMKWMMAMKYPITA
LRMKWYMATKFPIAA

SEQ ID NO: 221088 - protein, 15 aa, Artificial Sequence
  Description of Artificial Sequence: Synthetic peptide
  Seed: LRMKWMMAMKYPITA
LRMKWYMATKFPIFA

SEQ ID NO: 221089 - protein, 15 aa, Artificial Sequence
  Description of Artificial Sequence: Synthetic peptide
  Seed: LRMKWMMAMKYPITA
LRMKWYMATKFPIIA

SEQ ID NO: 221090 - protein, 15 aa, Artificial Sequence
  Description of Artificial Sequence: Synthetic peptide
  Seed: LRMKWMMAMKYPITA
LRMKWYMATKFPILA

SEQ ID NO: 221091 - protein, 15 aa, Artificial Sequence
  Description of Artificial Sequence: Synthetic peptide
  Seed: LRMKWMMAMKYPITA
LRMKWYMATKFPIMA

SEQ ID NO: 221092 - protein, 15 aa, Artificial Sequence
  Description of Artificial Sequence: Synthetic peptide
  Seed: LRMKWMMAMKYPITA
LRMKWYMATKFPITA

SEQ ID NO: 221093 - protein, 15 aa, Artificial Sequence
  Description of Artificial Sequence: Synthetic peptide
  Seed: LRMKWMMAMKYPITA
LRMKWYMATKFPIVA

SEQ ID NO: 221094 - protein, 15 aa, Artificial Sequence
  Description of Artificial Sequence: Synthetic peptide
  Seed: LRMKWMMAMKYPITA
LRMKWYMATKFPIYA

SEQ ID NO: 221095 - protein, 15 aa, Artificial Sequence
  Description of Artificial Sequence: Synthetic peptide
  Seed: LRMKWMMAMKYPITA
LRMKWYMATKLPIIA

SEQ ID NO: 221096 - protein, 15 aa, Artificial Sequence
  Description of Artificial Sequence: Synthetic peptide
  Seed: LRMKWMMAMKYPITA
LRMKWYMATKLPILA

SEQ ID NO: 221097 - protein, 15 aa, Artificial Sequence
  Description of Artificial Sequence: Synthetic peptide
  Seed: LRMKWMMAMKYPITA
LRMKWYMATKYPIIA

SEQ ID NO: 221098 - protein, 15 aa, Artificial Sequence
  Description of Artificial Sequence: Synthetic peptide
  Seed: LRMKWMMAMKYPITA
LRMKWYMATKYPILA

SEQ ID NO: 221099 - protein, 15 aa, Artificial Sequence
  Description of Artificial Sequence: Synthetic peptide
  Seed: LRMKWMMAMKYPITA
LRMKWYMAVKFPIAA

SEQ ID NO: 221100 - protein, 15 aa, Artificial Sequence
  Description of Artificial Sequence: Synthetic peptide
  Seed: LRMKWMMAMKYPITA
LRMKWYMAVKFPIDA

SEQ ID NO: 221101 - protein, 15 aa, Artificial Sequence
  Description of Artificial Sequence: Synthetic peptide
  Seed: LRMKWMMAMKYPITA
LRMKWYMAVKFPIEA

SEQ ID NO: 221102 - protein, 15 aa, Artificial Sequence
  Description of Artificial Sequence: Synthetic peptide
  Seed: LRMKWMMAMKYPITA
LRMKWYMAVKFPIFA

SEQ ID NO: 221103 - protein, 15 aa, Artificial Sequence
  Description of Artificial Sequence: Synthetic peptide
  Seed: LRMKWMMAMKYPITA
LRMKWYMAVKFPIIA

SEQ ID NO: 221104 - protein, 15 aa, Artificial Sequence
  Description of Artificial Sequence: Synthetic peptide
  Seed: LRMKWMMAMKYPITA
LRMKWYMAVKFPILA

SEQ ID NO: 221105 - protein, 15 aa, Artificial Sequence
  Description of Artificial Sequence: Synthetic peptide
  Seed: LRMKWMMAMKYPITA
LRMKWYMAVKFPIMA

SEQ ID NO: 221106 - protein, 15 aa, Artificial Sequence
  Description of Artificial Sequence: Synthetic peptide
  Seed: LRMKWMMAMKYPITA
LRMKWYMAVKFPINA

SEQ ID NO: 221107 - protein, 15 aa, Artificial Sequence
  Description of Artificial Sequence: Synthetic peptide
  Seed: LRMKWMMAMKYPITA
LRMKWYMAVKFPITA

SEQ ID NO: 221108 - protein, 15 aa, Artificial Sequence
  Description of Artificial Sequence: Synthetic peptide
  Seed: LRMKWMMAMKYPITA
LRMKWYMAVKFPIVA

SEQ ID NO: 221109 - protein, 15 aa, Artificial Sequence
  Description of Artificial Sequence: Synthetic peptide
  Seed: LRMKWMMAMKYPITA
LRMKWYMAVKFPIYA

SEQ ID NO: 221110 - protein, 15 aa, Artificial Sequence
  Description of Artificial Sequence: Synthetic peptide
  Seed: LRMKWMMAMKYPITA
LRMKWYMAVKLPIIA

SEQ ID NO: 221111 - protein, 15 aa, Artificial Sequence
  Description of Artificial Sequence: Synthetic peptide
  Seed: LRMKWMMAMKYPITA
LRMKWYMAVKLPILA

SEQ ID NO: 221112 - protein, 15 aa, Artificial Sequence
  Description of Artificial Sequence: Synthetic peptide
  Seed: LRMKWMMAMKYPITA
LRMKWYMAVKLPIVA

SEQ ID NO: 221113 - protein, 15 aa, Artificial Sequence
  Description of Artificial Sequence: Synthetic peptide
  Seed: LRMKWMMAMKYPITA
LRMKWYMAVKYPIIA

SEQ ID NO: 221114 - protein, 15 aa, Artificial Sequence
  Description of Artificial Sequence: Synthetic peptide
  Seed: LRMKWMMAMKYPITA
LRMKWYMAVKYPILA

SEQ ID NO: 221115 - protein, 15 aa, Artificial Sequence
  Description of Artificial Sequence: Synthetic peptide
  Seed: LRMKWMMAMKYPITA
LRMKWYMAVKYPIVA

SEQ ID NO: 221116 - protein, 15 aa, Artificial Sequence
  Description of Artificial Sequence: Synthetic peptide
  Seed: LRMKWMMAMKYPITA
LRMKWYMAWKFPIFA

SEQ ID NO: 221117 - protein, 15 aa, Artificial Sequence
  Description of Artificial Sequence: Synthetic peptide
  Seed: LRMKWMMAMKYPITA
LRMKWYMAWKFPIIA

SEQ ID NO: 221118 - protein, 15 aa, Artificial Sequence
  Description of Artificial Sequence: Synthetic peptide
  Seed: LRMKWMMAMKYPITA
LRMKWYMAWKFPILA

SEQ ID NO: 221119 - protein, 15 aa, Artificial Sequence
  Description of Artificial Sequence: Synthetic peptide
  Seed: LRMKWMMAMKYPITA
LRMKWYMAWKFPIVA

SEQ ID NO: 221120 - protein, 15 aa, Artificial Sequence
  Description of Artificial Sequence: Synthetic peptide
  Seed: LRMKWMMAMKYPITA
LRMKWYMAWKLPILA

SEQ ID NO: 221121 - protein, 15 aa, Artificial Sequence
  Description of Artificial Sequence: Synthetic peptide
  Seed: LRMKWMMAMKYPITA
LRMKWYMAYKFPIFA

SEQ ID NO: 221122 - protein, 15 aa, Artificial Sequence
  Description of Artificial Sequence: Synthetic peptide
  Seed: LRMKWMMAMKYPITA
LRMKWYMAYKFPIIA

SEQ ID NO: 221123 - protein, 15 aa, Artificial Sequence
  Description of Artificial Sequence: Synthetic peptide
  Seed: LRMKWMMAMKYPITA
LRMKWYMAYKFPILA

SEQ ID NO: 221124 - protein, 15 aa, Artificial Sequence
  Description of Artificial Sequence: Synthetic peptide
  Seed: LRMKWMMAMKYPITA
LRMKWYMAYKFPIMA

SEQ ID NO: 221125 - protein, 15 aa, Artificial Sequence
  Description of Artificial Sequence: Synthetic peptide
  Seed: LRMKWMMAMKYPITA
LRMKWYMAYKFPIVA

SEQ ID NO: 221126 - protein, 15 aa, Artificial Sequence
  Description of Artificial Sequence: Synthetic peptide
  Seed: LRMKWMMAMKYPITA
LRMKWYMAYKLPIIA

SEQ ID NO: 221127 - protein, 15 aa, Artificial Sequence
  Description of Artificial Sequence: Synthetic peptide
  Seed: LRMKWMMAMKYPITA
LRMKWYMAYKLPIVA

SEQ ID NO: 221128 - protein, 15 aa, Artificial Sequence
  Description of Artificial Sequence: Synthetic peptide
  Seed: LRMKWMMAMKYPITA
LRMKAMMAMAYPATA

SEQ ID NO: 221129 - protein, 15 aa, Artificial Sequence
  Description of Artificial Sequence: Synthetic peptide
  Seed: LRMKWMMAMKYPITA
LRMKAMMAMAYPCTA

SEQ ID NO: 221130 - protein, 15 aa, Artificial Sequence
  Description of Artificial Sequence: Synthetic peptide
  Seed: LRMKWMMAMKYPITA
LRMKAMMAMAYPGTA

SEQ ID NO: 221131 - protein, 15 aa, Artificial Sequence
  Description of Artificial Sequence: Synthetic peptide
  Seed: LRMKWMMAMKYPITA
LRMKAMMAMAYPITA

SEQ ID NO: 221132 - protein, 15 aa, Artificial Sequence
  Description of Artificial Sequence: Synthetic peptide
  Seed: LRMKWMMAMKYPITA
LRMKAMMAMAYPLTA

SEQ ID NO: 221133 - protein, 15 aa, Artificial Sequence
  Description of Artificial Sequence: Synthetic peptide
  Seed: LRMKWMMAMKYPITA
LRMKAMMAMAYPMTA

SEQ ID NO: 221134 - protein, 15 aa, Artificial Sequence
  Description of Artificial Sequence: Synthetic peptide
  Seed: LRMKWMMAMKYPITA
LRMKAMMAMAYPSTA

SEQ ID NO: 221135 - protein, 15 aa, Artificial Sequence
  Description of Artificial Sequence: Synthetic peptide
  Seed: LRMKWMMAMKYPITA
LRMKAMMAMAYPTTA

SEQ ID NO: 221136 - protein, 15 aa, Artificial Sequence
  Description of Artificial Sequence: Synthetic peptide
  Seed: LRMKWMMAMKYPITA
LRMKAMMAMAYPVTA

SEQ ID NO: 221137 - protein, 15 aa, Artificial Sequence
  Description of Artificial Sequence: Synthetic peptide
  Seed: LRMKWMMAMKYPITA
LRMKAMMAMGYPITA

SEQ ID NO: 221138 - protein, 15 aa, Artificial Sequence
  Description of Artificial Sequence: Synthetic peptide
  Seed: LRMKWMMAMKYPITA
LRMKAMMAMGYPLTA

SEQ ID NO: 221139 - protein, 15 aa, Artificial Sequence
  Description of Artificial Sequence: Synthetic peptide
  Seed: LRMKWMMAMKYPITA
LRMKAMMAMGYPVTA

SEQ ID NO: 221140 - protein, 15 aa, Artificial Sequence
  Description of Artificial Sequence: Synthetic peptide
  Seed: LRMKWMMAMKYPITA
LRMKAMMAMIYPATA

SEQ ID NO: 221141 - protein, 15 aa, Artificial Sequence
  Description of Artificial Sequence: Synthetic peptide
  Seed: LRMKWMMAMKYPITA
LRMKAMMAMKYPATA

SEQ ID NO: 221142 - protein, 15 aa, Artificial Sequence
  Description of Artificial Sequence: Synthetic peptide
  Seed: LRMKWMMAMKYPITA
LRMKAMMAMKYPRTA

SEQ ID NO: 221143 - protein, 15 aa, Artificial Sequence
  Description of Artificial Sequence: Synthetic peptide
  Seed: LRMKWMMAMKYPITA
LRMKAMMAMKYPYTA

SEQ ID NO: 221144 - protein, 15 aa, Artificial Sequence
  Description of Artificial Sequence: Synthetic peptide
  Seed: LRMKWMMAMKYPITA
LRMKAMMAMPYPLTA

SEQ ID NO: 221145 - protein, 15 aa, Artificial Sequence
  Description of Artificial Sequence: Synthetic peptide
  Seed: LRMKWMMAMKYPITA
LRMKAMMAMRYPATA

SEQ ID NO: 221146 - protein, 15 aa, Artificial Sequence
  Description of Artificial Sequence: Synthetic peptide
  Seed: LRMKWMMAMKYPITA
LRMKAMMAMRYPGTA

SEQ ID NO: 221147 - protein, 15 aa, Artificial Sequence
  Description of Artificial Sequence: Synthetic peptide
  Seed: LRMKWMMAMKYPITA
LRMKAMMAMRYPLTA

SEQ ID NO: 221148 - protein, 15 aa, Artificial Sequence
  Description of Artificial Sequence: Synthetic peptide
  Seed: LRMKWMMAMKYPITA
LRMKAMMAMRYPQTA

SEQ ID NO: 221149 - protein, 15 aa, Artificial Sequence
  Description of Artificial Sequence: Synthetic peptide
  Seed: LRMKWMMAMKYPITA
LRMKAMMAMRYPRTA

SEQ ID NO: 221150 - protein, 15 aa, Artificial Sequence
  Description of Artificial Sequence: Synthetic peptide
  Seed: LRMKWMMAMKYPITA
LRMKAMMAMRYPSTA

SEQ ID NO: 221151 - protein, 15 aa, Artificial Sequence
  Description of Artificial Sequence: Synthetic peptide
  Seed: LRMKWMMAMKYPITA
LRMKAMMAMRYPYTA

SEQ ID NO: 221152 - protein, 15 aa, Artificial Sequence
  Description of Artificial Sequence: Synthetic peptide
  Seed: LRMKWMMAMKYPITA
LRMKAMMAMSYPATA

SEQ ID NO: 221153 - protein, 15 aa, Artificial Sequence
  Description of Artificial Sequence: Synthetic peptide
  Seed: LRMKWMMAMKYPITA
LRMKAMMAMSYPITA

SEQ ID NO: 221154 - protein, 15 aa, Artificial Sequence
  Description of Artificial Sequence: Synthetic peptide
  Seed: LRMKWMMAMKYPITA
LRMKAMMAMSYPLTA

SEQ ID NO: 221155 - protein, 15 aa, Artificial Sequence
  Description of Artificial Sequence: Synthetic peptide
  Seed: LRMKWMMAMKYPITA
LRMKAMMAMSYPVTA

SEQ ID NO: 221156 - protein, 15 aa, Artificial Sequence
  Description of Artificial Sequence: Synthetic peptide
  Seed: LRMKWMMAMKYPITA
LRMKAMMAMTYPSTA

SEQ ID NO: 221157 - protein, 15 aa, Artificial Sequence
  Description of Artificial Sequence: Synthetic peptide
  Seed: LRMKWMMAMKYPITA
LRMKAMMAMVYPATA

SEQ ID NO: 221158 - protein, 15 aa, Artificial Sequence
  Description of Artificial Sequence: Synthetic peptide
  Seed: LRMKWMMAMKYPITA
LRMKAMMEMAYPLTA

SEQ ID NO: 221159 - protein, 15 aa, Artificial Sequence
  Description of Artificial Sequence: Synthetic peptide
  Seed: LRMKWMMAMKYPITA
LRMKAMMFMRYPRTA

SEQ ID NO: 221160 - protein, 15 aa, Artificial Sequence
  Description of Artificial Sequence: Synthetic peptide
  Seed: LRMKWMMAMKYPITA
LRMKAMMFMRYPYTA

SEQ ID NO: 221161 - protein, 15 aa, Artificial Sequence
  Description of Artificial Sequence: Synthetic peptide
  Seed: LRMKWMMAMKYPITA
LRMKAMMFMSYPVTA

SEQ ID NO: 221162 - protein, 15 aa, Artificial Sequence
  Description of Artificial Sequence: Synthetic peptide
  Seed: LRMKWMMAMKYPITA
LRMKAMMGMAYPITA

SEQ ID NO: 221163 - protein, 15 aa, Artificial Sequence
  Description of Artificial Sequence: Synthetic peptide
  Seed: LRMKWMMAMKYPITA
LRMKAMMGMAYPLTA

SEQ ID NO: 221164 - protein, 15 aa, Artificial Sequence
  Description of Artificial Sequence: Synthetic peptide
  Seed: LRMKWMMAMKYPITA
LRMKAMMGMAYPMTA

SEQ ID NO: 221165 - protein, 15 aa, Artificial Sequence
  Description of Artificial Sequence: Synthetic peptide
  Seed: LRMKWMMAMKYPITA
LRMKAMMGMAYPVTA

SEQ ID NO: 221166 - protein, 15 aa, Artificial Sequence
  Description of Artificial Sequence: Synthetic peptide
  Seed: LRMKWMMAMKYPITA
LRMKAMMGMSYPITA

SEQ ID NO: 221167 - protein, 15 aa, Artificial Sequence
  Description of Artificial Sequence: Synthetic peptide
  Seed: LRMKWMMAMKYPITA
LRMKAMMGMSYPLTA

SEQ ID NO: 221168 - protein, 15 aa, Artificial Sequence
  Description of Artificial Sequence: Synthetic peptide
  Seed: LRMKWMMAMKYPITA
LRMKAMMHMAYPITA

SEQ ID NO: 221169 - protein, 15 aa, Artificial Sequence
  Description of Artificial Sequence: Synthetic peptide
  Seed: LRMKWMMAMKYPITA
LRMKAMMHMAYPRTA

SEQ ID NO: 221170 - protein, 15 aa, Artificial Sequence
  Description of Artificial Sequence: Synthetic peptide
  Seed: LRMKWMMAMKYPITA
LRMKAMMHMKYPFTA

SEQ ID NO: 221171 - protein, 15 aa, Artificial Sequence
  Description of Artificial Sequence: Synthetic peptide
  Seed: LRMKWMMAMKYPITA
LRMKAMMHMKYPITA

SEQ ID NO: 221172 - protein, 15 aa, Artificial Sequence
  Description of Artificial Sequence: Synthetic peptide
  Seed: LRMKWMMAMKYPITA
LRMKAMMHMKYPLTA

SEQ ID NO: 221173 - protein, 15 aa, Artificial Sequence
  Description of Artificial Sequence: Synthetic peptide
  Seed: LRMKWMMAMKYPITA
LRMKAMMHMKYPRTA

SEQ ID NO: 221174 - protein, 15 aa, Artificial Sequence
  Description of Artificial Sequence: Synthetic peptide
  Seed: LRMKWMMAMKYPITA
LRMKAMMHMKYPVTA

SEQ ID NO: 221175 - protein, 15 aa, Artificial Sequence
  Description of Artificial Sequence: Synthetic peptide
  Seed: LRMKWMMAMKYPITA
LRMKAMMHMKYPYTA

SEQ ID NO: 221176 - protein, 15 aa, Artificial Sequence
  Description of Artificial Sequence: Synthetic peptide
  Seed: LRMKWMMAMKYPITA
LRMKAMMHMRYPATA

SEQ ID NO: 221177 - protein, 15 aa, Artificial Sequence
  Description of Artificial Sequence: Synthetic peptide
  Seed: LRMKWMMAMKYPITA
LRMKAMMHMRYPFTA

SEQ ID NO: 221178 - protein, 15 aa, Artificial Sequence
  Description of Artificial Sequence: Synthetic peptide
  Seed: LRMKWMMAMKYPITA
LRMKAMMHMRYPITA

SEQ ID NO: 221179 - protein, 15 aa, Artificial Sequence
  Description of Artificial Sequence: Synthetic peptide
  Seed: LRMKWMMAMKYPITA
LRMKAMMHMRYPLTA

SEQ ID NO: 221180 - protein, 15 aa, Artificial Sequence
  Description of Artificial Sequence: Synthetic peptide
  Seed: LRMKWMMAMKYPITA
LRMKAMMHMRYPMTA

SEQ ID NO: 221181 - protein, 15 aa, Artificial Sequence
  Description of Artificial Sequence: Synthetic peptide
  Seed: LRMKWMMAMKYPITA
LRMKAMMHMRYPQTA

SEQ ID NO: 221182 - protein, 15 aa, Artificial Sequence
  Description of Artificial Sequence: Synthetic peptide
  Seed: LRMKWMMAMKYPITA
LRMKAMMHMRYPRTA

SEQ ID NO: 221183 - protein, 15 aa, Artificial Sequence
  Description of Artificial Sequence: Synthetic peptide
  Seed: LRMKWMMAMKYPITA
LRMKAMMHMRYPSTA

SEQ ID NO: 221184 - protein, 15 aa, Artificial Sequence
  Description of Artificial Sequence: Synthetic peptide
  Seed: LRMKWMMAMKYPITA
LRMKAMMHMRYPVTA

SEQ ID NO: 221185 - protein, 15 aa, Artificial Sequence
  Description of Artificial Sequence: Synthetic peptide
  Seed: LRMKWMMAMKYPITA
LRMKAMMHMRYPYTA

SEQ ID NO: 221186 - protein, 15 aa, Artificial Sequence
  Description of Artificial Sequence: Synthetic peptide
  Seed: LRMKWMMAMKYPITA
LRMKAMMHMSYPITA

SEQ ID NO: 221187 - protein, 15 aa, Artificial Sequence
  Description of Artificial Sequence: Synthetic peptide
  Seed: LRMKWMMAMKYPITA
LRMKAMMIMAYPATA

SEQ ID NO: 221188 - protein, 15 aa, Artificial Sequence
  Description of Artificial Sequence: Synthetic peptide
  Seed: LRMKWMMAMKYPITA
LRMKAMMIMAYPCTA

SEQ ID NO: 221189 - protein, 15 aa, Artificial Sequence
  Description of Artificial Sequence: Synthetic peptide
  Seed: LRMKWMMAMKYPITA
LRMKAMMIMAYPGTA

SEQ ID NO: 221190 - protein, 15 aa, Artificial Sequence
  Description of Artificial Sequence: Synthetic peptide
  Seed: LRMKWMMAMKYPITA
LRMKAMMIMAYPITA

SEQ ID NO: 221191 - protein, 15 aa, Artificial Sequence
  Description of Artificial Sequence: Synthetic peptide
  Seed: LRMKWMMAMKYPITA
LRMKAMMIMAYPLTA

SEQ ID NO: 221192 - protein, 15 aa, Artificial Sequence
  Description of Artificial Sequence: Synthetic peptide
  Seed: LRMKWMMAMKYPITA
LRMKAMMIMAYPMTA

SEQ ID NO: 221193 - protein, 15 aa, Artificial Sequence
  Description of Artificial Sequence: Synthetic peptide
  Seed: LRMKWMMAMKYPITA
LRMKAMMIMAYPSTA

SEQ ID NO: 221194 - protein, 15 aa, Artificial Sequence
  Description of Artificial Sequence: Synthetic peptide
  Seed: LRMKWMMAMKYPITA
LRMKAMMIMAYPVTA

SEQ ID NO: 221195 - protein, 15 aa, Artificial Sequence
  Description of Artificial Sequence: Synthetic peptide
  Seed: LRMKWMMAMKYPITA
LRMKAMMIMGYPATA

SEQ ID NO: 221196 - protein, 15 aa, Artificial Sequence
  Description of Artificial Sequence: Synthetic peptide
  Seed: LRMKWMMAMKYPITA
LRMKAMMIMGYPITA

SEQ ID NO: 221197 - protein, 15 aa, Artificial Sequence
  Description of Artificial Sequence: Synthetic peptide
  Seed: LRMKWMMAMKYPITA
LRMKAMMIMGYPLTA

SEQ ID NO: 221198 - protein, 15 aa, Artificial Sequence
  Description of Artificial Sequence: Synthetic peptide
  Seed: LRMKWMMAMKYPITA
LRMKAMMIMGYPMTA

SEQ ID NO: 221199 - protein, 15 aa, Artificial Sequence
  Description of Artificial Sequence: Synthetic peptide
  Seed: LRMKWMMAMKYPITA
LRMKAMMIMGYPTTA

SEQ ID NO: 221200 - protein, 15 aa, Artificial Sequence
  Description of Artificial Sequence: Synthetic peptide
  Seed: LRMKWMMAMKYPITA
LRMKAMMIMGYPVTA

SEQ ID NO: 221201 - protein, 15 aa, Artificial Sequence
  Description of Artificial Sequence: Synthetic peptide
  Seed: LRMKWMMAMKYPITA
LRMKAMMIMKYPATA

SEQ ID NO: 221202 - protein, 15 aa, Artificial Sequence
  Description of Artificial Sequence: Synthetic peptide
  Seed: LRMKWMMAMKYPITA
LRMKAMMIMKYPKTA

SEQ ID NO: 221203 - protein, 15 aa, Artificial Sequence
  Description of Artificial Sequence: Synthetic peptide
  Seed: LRMKWMMAMKYPITA
LRMKAMMIMKYPRTA

SEQ ID NO: 221204 - protein, 15 aa, Artificial Sequence
  Description of Artificial Sequence: Synthetic peptide
  Seed: LRMKWMMAMKYPITA
LRMKAMMIMKYPSTA

SEQ ID NO: 221205 - protein, 15 aa, Artificial Sequence
  Description of Artificial Sequence: Synthetic peptide
  Seed: LRMKWMMAMKYPITA
LRMKAMMIMKYPYTA

SEQ ID NO: 221206 - protein, 15 aa, Artificial Sequence
  Description of Artificial Sequence: Synthetic peptide
  Seed: LRMKWMMAMKYPITA
LRMKAMMIMNYPLTA

SEQ ID NO: 221207 - protein, 15 aa, Artificial Sequence
  Description of Artificial Sequence: Synthetic peptide
  Seed: LRMKWMMAMKYPITA
LRMKAMMIMPYPATA

SEQ ID NO: 221208 - protein, 15 aa, Artificial Sequence
  Description of Artificial Sequence: Synthetic peptide
  Seed: LRMKWMMAMKYPITA
LRMKAMMIMPYPITA

SEQ ID NO: 221209 - protein, 15 aa, Artificial Sequence
  Description of Artificial Sequence: Synthetic peptide
  Seed: LRMKWMMAMKYPITA
LRMKAMMIMPYPLTA

SEQ ID NO: 221210 - protein, 15 aa, Artificial Sequence
  Description of Artificial Sequence: Synthetic peptide
  Seed: LRMKWMMAMKYPITA
LRMKAMMIMPYPMTA

SEQ ID NO: 221211 - protein, 15 aa, Artificial Sequence
  Description of Artificial Sequence: Synthetic peptide
  Seed: LRMKWMMAMKYPITA
LRMKAMMIMPYPSTA

SEQ ID NO: 221212 - protein, 15 aa, Artificial Sequence
  Description of Artificial Sequence: Synthetic peptide
  Seed: LRMKWMMAMKYPITA
LRMKAMMIMPYPVTA

SEQ ID NO: 221213 - protein, 15 aa, Artificial Sequence
  Description of Artificial Sequence: Synthetic peptide
  Seed: LRMKWMMAMKYPITA
LRMKAMMIMRYPATA

SEQ ID NO: 221214 - protein, 15 aa, Artificial Sequence
  Description of Artificial Sequence: Synthetic peptide
  Seed: LRMKWMMAMKYPITA
LRMKAMMIMRYPFTA

SEQ ID NO: 221215 - protein, 15 aa, Artificial Sequence
  Description of Artificial Sequence: Synthetic peptide
  Seed: LRMKWMMAMKYPITA
LRMKAMMIMRYPGTA

SEQ ID NO: 221216 - protein, 15 aa, Artificial Sequence
  Description of Artificial Sequence: Synthetic peptide
  Seed: LRMKWMMAMKYPITA
LRMKAMMIMRYPHTA

SEQ ID NO: 221217 - protein, 15 aa, Artificial Sequence
  Description of Artificial Sequence: Synthetic peptide
  Seed: LRMKWMMAMKYPITA
LRMKAMMIMRYPITA

SEQ ID NO: 221218 - protein, 15 aa, Artificial Sequence
  Description of Artificial Sequence: Synthetic peptide
  Seed: LRMKWMMAMKYPITA
LRMKAMMIMRYPKTA

SEQ ID NO: 221219 - protein, 15 aa, Artificial Sequence
  Description of Artificial Sequence: Synthetic peptide
  Seed: LRMKWMMAMKYPITA
LRMKAMMIMRYPLTA

SEQ ID NO: 221220 - protein, 15 aa, Artificial Sequence
  Description of Artificial Sequence: Synthetic peptide
  Seed: LRMKWMMAMKYPITA
LRMKAMMIMRYPMTA

SEQ ID NO: 221221 - protein, 15 aa, Artificial Sequence
  Description of Artificial Sequence: Synthetic peptide
  Seed: LRMKWMMAMKYPITA
LRMKAMMIMRYPQTA

SEQ ID NO: 221222 - protein, 15 aa, Artificial Sequence
  Description of Artificial Sequence: Synthetic peptide
  Seed: LRMKWMMAMKYPITA
LRMKAMMIMRYPRTA

SEQ ID NO: 221223 - protein, 15 aa, Artificial Sequence
  Description of Artificial Sequence: Synthetic peptide
  Seed: LRMKWMMAMKYPITA
LRMKAMMIMRYPSTA

SEQ ID NO: 221224 - protein, 15 aa, Artificial Sequence
  Description of Artificial Sequence: Synthetic peptide
  Seed: LRMKWMMAMKYPITA
LRMKAMMIMRYPTTA

SEQ ID NO: 221225 - protein, 15 aa, Artificial Sequence
  Description of Artificial Sequence: Synthetic peptide
  Seed: LRMKWMMAMKYPITA
LRMKAMMIMRYPVTA

SEQ ID NO: 221226 - protein, 15 aa, Artificial Sequence
  Description of Artificial Sequence: Synthetic peptide
  Seed: LRMKWMMAMKYPITA
LRMKAMMIMRYPYTA

SEQ ID NO: 221227 - protein, 15 aa, Artificial Sequence
  Description of Artificial Sequence: Synthetic peptide
  Seed: LRMKWMMAMKYPITA
LRMKAMMIMSYPITA

SEQ ID NO: 221228 - protein, 15 aa, Artificial Sequence
  Description of Artificial Sequence: Synthetic peptide
  Seed: LRMKWMMAMKYPITA
LRMKAMMIMSYPLTA

SEQ ID NO: 221229 - protein, 15 aa, Artificial Sequence
  Description of Artificial Sequence: Synthetic peptide
  Seed: LRMKWMMAMKYPITA
LRMKAMMIMSYPMTA

SEQ ID NO: 221230 - protein, 15 aa, Artificial Sequence
  Description of Artificial Sequence: Synthetic peptide
  Seed: LRMKWMMAMKYPITA
LRMKAMMIMSYPVTA

SEQ ID NO: 221231 - protein, 15 aa, Artificial Sequence
  Description of Artificial Sequence: Synthetic peptide
  Seed: LRMKWMMAMKYPITA
LRMKAMMLMAYPATA

SEQ ID NO: 221232 - protein, 15 aa, Artificial Sequence
  Description of Artificial Sequence: Synthetic peptide
  Seed: LRMKWMMAMKYPITA
LRMKAMMLMAYPCTA

SEQ ID NO: 221233 - protein, 15 aa, Artificial Sequence
  Description of Artificial Sequence: Synthetic peptide
  Seed: LRMKWMMAMKYPITA
LRMKAMMLMAYPGTA

SEQ ID NO: 221234 - protein, 15 aa, Artificial Sequence
  Description of Artificial Sequence: Synthetic peptide
  Seed: LRMKWMMAMKYPITA
LRMKAMMLMAYPITA

SEQ ID NO: 221235 - protein, 15 aa, Artificial Sequence
  Description of Artificial Sequence: Synthetic peptide
  Seed: LRMKWMMAMKYPITA
LRMKAMMLMAYPLTA

SEQ ID NO: 221236 - protein, 15 aa, Artificial Sequence
  Description of Artificial Sequence: Synthetic peptide
  Seed: LRMKWMMAMKYPITA
LRMKAMMLMAYPMTA

SEQ ID NO: 221237 - protein, 15 aa, Artificial Sequence
  Description of Artificial Sequence: Synthetic peptide
  Seed: LRMKWMMAMKYPITA
LRMKAMMLMAYPSTA

SEQ ID NO: 221238 - protein, 15 aa, Artificial Sequence
  Description of Artificial Sequence: Synthetic peptide
  Seed: LRMKWMMAMKYPITA
LRMKAMMLMAYPTTA

SEQ ID NO: 221239 - protein, 15 aa, Artificial Sequence
  Description of Artificial Sequence: Synthetic peptide
  Seed: LRMKWMMAMKYPITA
LRMKAMMLMAYPVTA

SEQ ID NO: 221240 - protein, 15 aa, Artificial Sequence
  Description of Artificial Sequence: Synthetic peptide
  Seed: LRMKWMMAMKYPITA
LRMKAMMLMGYPATA

SEQ ID NO: 221241 - protein, 15 aa, Artificial Sequence
  Description of Artificial Sequence: Synthetic peptide
  Seed: LRMKWMMAMKYPITA
LRMKAMMLMGYPITA

SEQ ID NO: 221242 - protein, 15 aa, Artificial Sequence
  Description of Artificial Sequence: Synthetic peptide
  Seed: LRMKWMMAMKYPITA
LRMKAMMLMGYPLTA

SEQ ID NO: 221243 - protein, 15 aa, Artificial Sequence
  Description of Artificial Sequence: Synthetic peptide
  Seed: LRMKWMMAMKYPITA
LRMKAMMLMGYPMTA

SEQ ID NO: 221244 - protein, 15 aa, Artificial Sequence
  Description of Artificial Sequence: Synthetic peptide
  Seed: LRMKWMMAMKYPITA
LRMKAMMLMGYPSTA

SEQ ID NO: 221245 - protein, 15 aa, Artificial Sequence
  Description of Artificial Sequence: Synthetic peptide
  Seed: LRMKWMMAMKYPITA
LRMKAMMLMGYPTTA

SEQ ID NO: 221246 - protein, 15 aa, Artificial Sequence
  Description of Artificial Sequence: Synthetic peptide
  Seed: LRMKWMMAMKYPITA
LRMKAMMLMGYPVTA

SEQ ID NO: 221247 - protein, 15 aa, Artificial Sequence
  Description of Artificial Sequence: Synthetic peptide
  Seed: LRMKWMMAMKYPITA
LRMKAMMLMKYPATA

SEQ ID NO: 221248 - protein, 15 aa, Artificial Sequence
  Description of Artificial Sequence: Synthetic peptide
  Seed: LRMKWMMAMKYPITA
LRMKAMMLMKYPKTA

SEQ ID NO: 221249 - protein, 15 aa, Artificial Sequence
  Description of Artificial Sequence: Synthetic peptide
  Seed: LRMKWMMAMKYPITA
LRMKAMMLMKYPRTA

SEQ ID NO: 221250 - protein, 15 aa, Artificial Sequence
  Description of Artificial Sequence: Synthetic peptide
  Seed: LRMKWMMAMKYPITA
LRMKAMMLMKYPSTA

SEQ ID NO: 221251 - protein, 15 aa, Artificial Sequence
  Description of Artificial Sequence: Synthetic peptide
  Seed: LRMKWMMAMKYPITA
LRMKAMMLMNYPATA

SEQ ID NO: 221252 - protein, 15 aa, Artificial Sequence
  Description of Artificial Sequence: Synthetic peptide
  Seed: LRMKWMMAMKYPITA
LRMKAMMLMNYPITA

SEQ ID NO: 221253 - protein, 15 aa, Artificial Sequence
  Description of Artificial Sequence: Synthetic peptide
  Seed: LRMKWMMAMKYPITA
LRMKAMMLMNYPLTA

SEQ ID NO: 221254 - protein, 15 aa, Artificial Sequence
  Description of Artificial Sequence: Synthetic peptide
  Seed: LRMKWMMAMKYPITA
LRMKAMMLMNYPVTA

SEQ ID NO: 221255 - protein, 15 aa, Artificial Sequence
  Description of Artificial Sequence: Synthetic peptide
  Seed: LRMKWMMAMKYPITA
LRMKAMMLMPYPATA

SEQ ID NO: 221256 - protein, 15 aa, Artificial Sequence
  Description of Artificial Sequence: Synthetic peptide
  Seed: LRMKWMMAMKYPITA
LRMKAMMLMPYPITA

SEQ ID NO: 221257 - protein, 15 aa, Artificial Sequence
  Description of Artificial Sequence: Synthetic peptide
  Seed: LRMKWMMAMKYPITA
LRMKAMMLMPYPLTA

SEQ ID NO: 221258 - protein, 15 aa, Artificial Sequence
  Description of Artificial Sequence: Synthetic peptide
  Seed: LRMKWMMAMKYPITA
LRMKAMMLMPYPMTA

SEQ ID NO: 221259 - protein, 15 aa, Artificial Sequence
  Description of Artificial Sequence: Synthetic peptide
  Seed: LRMKWMMAMKYPITA
LRMKAMMLMPYPSTA

SEQ ID NO: 221260 - protein, 15 aa, Artificial Sequence
  Description of Artificial Sequence: Synthetic peptide
  Seed: LRMKWMMAMKYPITA
LRMKAMMLMPYPTTA

SEQ ID NO: 221261 - protein, 15 aa, Artificial Sequence
  Description of Artificial Sequence: Synthetic peptide
  Seed: LRMKWMMAMKYPITA
LRMKAMMLMPYPVTA

SEQ ID NO: 221262 - protein, 15 aa, Artificial Sequence
  Description of Artificial Sequence: Synthetic peptide
  Seed: LRMKWMMAMKYPITA
LRMKAMMLMRYPATA

SEQ ID NO: 221263 - protein, 15 aa, Artificial Sequence
  Description of Artificial Sequence: Synthetic peptide
  Seed: LRMKWMMAMKYPITA
LRMKAMMLMRYPGTA

SEQ ID NO: 221264 - protein, 15 aa, Artificial Sequence
  Description of Artificial Sequence: Synthetic peptide
  Seed: LRMKWMMAMKYPITA
LRMKAMMLMRYPHTA

SEQ ID NO: 221265 - protein, 15 aa, Artificial Sequence
  Description of Artificial Sequence: Synthetic peptide
  Seed: LRMKWMMAMKYPITA
LRMKAMMLMRYPITA

SEQ ID NO: 221266 - protein, 15 aa, Artificial Sequence
  Description of Artificial Sequence: Synthetic peptide
  Seed: LRMKWMMAMKYPITA
LRMKAMMLMRYPKTA

SEQ ID NO: 221267 - protein, 15 aa, Artificial Sequence
  Description of Artificial Sequence: Synthetic peptide
  Seed: LRMKWMMAMKYPITA
LRMKAMMLMRYPLTA

SEQ ID NO: 221268 - protein, 15 aa, Artificial Sequence
  Description of Artificial Sequence: Synthetic peptide
  Seed: LRMKWMMAMKYPITA
LRMKAMMLMRYPMTA

SEQ ID NO: 221269 - protein, 15 aa, Artificial Sequence
  Description of Artificial Sequence: Synthetic peptide
  Seed: LRMKWMMAMKYPITA
LRMKAMMLMRYPQTA

SEQ ID NO: 221270 - protein, 15 aa, Artificial Sequence
  Description of Artificial Sequence: Synthetic peptide
  Seed: LRMKWMMAMKYPITA
LRMKAMMLMRYPRTA

SEQ ID NO: 221271 - protein, 15 aa, Artificial Sequence
  Description of Artificial Sequence: Synthetic peptide
  Seed: LRMKWMMAMKYPITA
LRMKAMMLMRYPSTA

SEQ ID NO: 221272 - protein, 15 aa, Artificial Sequence
  Description of Artificial Sequence: Synthetic peptide
  Seed: LRMKWMMAMKYPITA
LRMKAMMLMRYPTTA

SEQ ID NO: 221273 - protein, 15 aa, Artificial Sequence
  Description of Artificial Sequence: Synthetic peptide
  Seed: LRMKWMMAMKYPITA
LRMKAMMLMRYPVTA

SEQ ID NO: 221274 - protein, 15 aa, Artificial Sequence
  Description of Artificial Sequence: Synthetic peptide
  Seed: LRMKWMMAMKYPITA
LRMKAMMLMRYPYTA

SEQ ID NO: 221275 - protein, 15 aa, Artificial Sequence
  Description of Artificial Sequence: Synthetic peptide
  Seed: LRMKWMMAMKYPITA
LRMKAMMLMSYPATA

SEQ ID NO: 221276 - protein, 15 aa, Artificial Sequence
  Description of Artificial Sequence: Synthetic peptide
  Seed: LRMKWMMAMKYPITA
LRMKAMMLMSYPITA

SEQ ID NO: 221277 - protein, 15 aa, Artificial Sequence
  Description of Artificial Sequence: Synthetic peptide
  Seed: LRMKWMMAMKYPITA
LRMKAMMLMSYPLTA

SEQ ID NO: 221278 - protein, 15 aa, Artificial Sequence
  Description of Artificial Sequence: Synthetic peptide
  Seed: LRMKWMMAMKYPITA
LRMKAMMLMSYPMTA

SEQ ID NO: 221279 - protein, 15 aa, Artificial Sequence
  Description of Artificial Sequence: Synthetic peptide
  Seed: LRMKWMMAMKYPITA
LRMKAMMLMSYPSTA

SEQ ID NO: 221280 - protein, 15 aa, Artificial Sequence
  Description of Artificial Sequence: Synthetic peptide
  Seed: LRMKWMMAMKYPITA
LRMKAMMLMSYPTTA

SEQ ID NO: 221281 - protein, 15 aa, Artificial Sequence
  Description of Artificial Sequence: Synthetic peptide
  Seed: LRMKWMMAMKYPITA
LRMKAMMLMSYPVTA

SEQ ID NO: 221282 - protein, 15 aa, Artificial Sequence
  Description of Artificial Sequence: Synthetic peptide
  Seed: LRMKWMMAMKYPITA
LRMKAMMLMTYPATA

SEQ ID NO: 221283 - protein, 15 aa, Artificial Sequence
  Description of Artificial Sequence: Synthetic peptide
  Seed: LRMKWMMAMKYPITA
LRMKAMMLMTYPITA

SEQ ID NO: 221284 - protein, 15 aa, Artificial Sequence
  Description of Artificial Sequence: Synthetic peptide
  Seed: LRMKWMMAMKYPITA
LRMKAMMLMTYPLTA

SEQ ID NO: 221285 - protein, 15 aa, Artificial Sequence
  Description of Artificial Sequence: Synthetic peptide
  Seed: LRMKWMMAMKYPITA
LRMKAMMLMTYPMTA

SEQ ID NO: 221286 - protein, 15 aa, Artificial Sequence
  Description of Artificial Sequence: Synthetic peptide
  Seed: LRMKWMMAMKYPITA
LRMKAMMLMTYPSTA

SEQ ID NO: 221287 - protein, 15 aa, Artificial Sequence
  Description of Artificial Sequence: Synthetic peptide
  Seed: LRMKWMMAMKYPITA
LRMKAMMLMTYPVTA

SEQ ID NO: 221288 - protein, 15 aa, Artificial Sequence
  Description of Artificial Sequence: Synthetic peptide
  Seed: LRMKWMMAMKYPITA
LRMKAMMLMVYPLTA

SEQ ID NO: 221289 - protein, 15 aa, Artificial Sequence
  Description of Artificial Sequence: Synthetic peptide
  Seed: LRMKWMMAMKYPITA
LRMKAMMLMVYPVTA

SEQ ID NO: 221290 - protein, 15 aa, Artificial Sequence
  Description of Artificial Sequence: Synthetic peptide
  Seed: LRMKWMMAMKYPITA
LRMKAMMMMAYPATA

SEQ ID NO: 221291 - protein, 15 aa, Artificial Sequence
  Description of Artificial Sequence: Synthetic peptide
  Seed: LRMKWMMAMKYPITA
LRMKAMMMMAYPCTA

SEQ ID NO: 221292 - protein, 15 aa, Artificial Sequence
  Description of Artificial Sequence: Synthetic peptide
  Seed: LRMKWMMAMKYPITA
LRMKAMMMMAYPGTA

SEQ ID NO: 221293 - protein, 15 aa, Artificial Sequence
  Description of Artificial Sequence: Synthetic peptide
  Seed: LRMKWMMAMKYPITA
LRMKAMMMMAYPITA

SEQ ID NO: 221294 - protein, 15 aa, Artificial Sequence
  Description of Artificial Sequence: Synthetic peptide
  Seed: LRMKWMMAMKYPITA
LRMKAMMMMAYPLTA

SEQ ID NO: 221295 - protein, 15 aa, Artificial Sequence
  Description of Artificial Sequence: Synthetic peptide
  Seed: LRMKWMMAMKYPITA
LRMKAMMMMAYPMTA

SEQ ID NO: 221296 - protein, 15 aa, Artificial Sequence
  Description of Artificial Sequence: Synthetic peptide
  Seed: LRMKWMMAMKYPITA
LRMKAMMMMAYPSTA

SEQ ID NO: 221297 - protein, 15 aa, Artificial Sequence
  Description of Artificial Sequence: Synthetic peptide
  Seed: LRMKWMMAMKYPITA
LRMKAMMMMAYPTTA

SEQ ID NO: 221298 - protein, 15 aa, Artificial Sequence
  Description of Artificial Sequence: Synthetic peptide
  Seed: LRMKWMMAMKYPITA
LRMKAMMMMAYPVTA

SEQ ID NO: 221299 - protein, 15 aa, Artificial Sequence
  Description of Artificial Sequence: Synthetic peptide
  Seed: LRMKWMMAMKYPITA
LRMKAMMMMGYPATA

SEQ ID NO: 221300 - protein, 15 aa, Artificial Sequence
  Description of Artificial Sequence: Synthetic peptide
  Seed: LRMKWMMAMKYPITA
LRMKAMMMMGYPITA

SEQ ID NO: 221301 - protein, 15 aa, Artificial Sequence
  Description of Artificial Sequence: Synthetic peptide
  Seed: LRMKWMMAMKYPITA
LRMKAMMMMGYPLTA

SEQ ID NO: 221302 - protein, 15 aa, Artificial Sequence
  Description of Artificial Sequence: Synthetic peptide
  Seed: LRMKWMMAMKYPITA
LRMKAMMMMGYPMTA

SEQ ID NO: 221303 - protein, 15 aa, Artificial Sequence
  Description of Artificial Sequence: Synthetic peptide
  Seed: LRMKWMMAMKYPITA
LRMKAMMMMGYPSTA

SEQ ID NO: 221304 - protein, 15 aa, Artificial Sequence
  Description of Artificial Sequence: Synthetic peptide
  Seed: LRMKWMMAMKYPITA
LRMKAMMMMGYPTTA

SEQ ID NO: 221305 - protein, 15 aa, Artificial Sequence
  Description of Artificial Sequence: Synthetic peptide
  Seed: LRMKWMMAMKYPITA
LRMKAMMMMGYPVTA

SEQ ID NO: 221306 - protein, 15 aa, Artificial Sequence
  Description of Artificial Sequence: Synthetic peptide
  Seed: LRMKWMMAMKYPITA
LRMKAMMMMKYPATA

SEQ ID NO: 221307 - protein, 15 aa, Artificial Sequence
  Description of Artificial Sequence: Synthetic peptide
  Seed: LRMKWMMAMKYPITA
LRMKAMMMMKYPKTA

SEQ ID NO: 221308 - protein, 15 aa, Artificial Sequence
  Description of Artificial Sequence: Synthetic peptide
  Seed: LRMKWMMAMKYPITA
LRMKAMMMMKYPMTA

SEQ ID NO: 221309 - protein, 15 aa, Artificial Sequence
  Description of Artificial Sequence: Synthetic peptide
  Seed: LRMKWMMAMKYPITA
LRMKAMMMMKYPQTA

SEQ ID NO: 221310 - protein, 15 aa, Artificial Sequence
  Description of Artificial Sequence: Synthetic peptide
  Seed: LRMKWMMAMKYPITA
LRMKAMMMMKYPRTA

SEQ ID NO: 221311 - protein, 15 aa, Artificial Sequence
  Description of Artificial Sequence: Synthetic peptide
  Seed: LRMKWMMAMKYPITA
LRMKAMMMMKYPSTA

SEQ ID NO: 221312 - protein, 15 aa, Artificial Sequence
  Description of Artificial Sequence: Synthetic peptide
  Seed: LRMKWMMAMKYPITA
LRMKAMMMMNYPATA

SEQ ID NO: 221313 - protein, 15 aa, Artificial Sequence
  Description of Artificial Sequence: Synthetic peptide
  Seed: LRMKWMMAMKYPITA
LRMKAMMMMNYPITA

SEQ ID NO: 221314 - protein, 15 aa, Artificial Sequence
  Description of Artificial Sequence: Synthetic peptide
  Seed: LRMKWMMAMKYPITA
LRMKAMMMMNYPLTA

SEQ ID NO: 221315 - protein, 15 aa, Artificial Sequence
  Description of Artificial Sequence: Synthetic peptide
  Seed: LRMKWMMAMKYPITA
LRMKAMMMMNYPMTA

SEQ ID NO: 221316 - protein, 15 aa, Artificial Sequence
  Description of Artificial Sequence: Synthetic peptide
  Seed: LRMKWMMAMKYPITA
LRMKAMMMMNYPVTA

SEQ ID NO: 221317 - protein, 15 aa, Artificial Sequence
  Description of Artificial Sequence: Synthetic peptide
  Seed: LRMKWMMAMKYPITA
LRMKAMMMMPYPATA

SEQ ID NO: 221318 - protein, 15 aa, Artificial Sequence
  Description of Artificial Sequence: Synthetic peptide
  Seed: LRMKWMMAMKYPITA
LRMKAMMMMPYPITA

SEQ ID NO: 221319 - protein, 15 aa, Artificial Sequence
  Description of Artificial Sequence: Synthetic peptide
  Seed: LRMKWMMAMKYPITA
LRMKAMMMMPYPLTA

SEQ ID NO: 221320 - protein, 15 aa, Artificial Sequence
  Description of Artificial Sequence: Synthetic peptide
  Seed: LRMKWMMAMKYPITA
LRMKAMMMMPYPMTA

SEQ ID NO: 221321 - protein, 15 aa, Artificial Sequence
  Description of Artificial Sequence: Synthetic peptide
  Seed: LRMKWMMAMKYPITA
LRMKAMMMMPYPSTA

SEQ ID NO: 221322 - protein, 15 aa, Artificial Sequence
  Description of Artificial Sequence: Synthetic peptide
  Seed: LRMKWMMAMKYPITA
LRMKAMMMMPYPTTA

SEQ ID NO: 221323 - protein, 15 aa, Artificial Sequence
  Description of Artificial Sequence: Synthetic peptide
  Seed: LRMKWMMAMKYPITA
LRMKAMMMMPYPVTA

SEQ ID NO: 221324 - protein, 15 aa, Artificial Sequence
  Description of Artificial Sequence: Synthetic peptide
  Seed: LRMKWMMAMKYPITA
LRMKAMMMMRYPATA

SEQ ID NO: 221325 - protein, 15 aa, Artificial Sequence
  Description of Artificial Sequence: Synthetic peptide
  Seed: LRMKWMMAMKYPITA
LRMKAMMMMRYPFTA

SEQ ID NO: 221326 - protein, 15 aa, Artificial Sequence
  Description of Artificial Sequence: Synthetic peptide
  Seed: LRMKWMMAMKYPITA
LRMKAMMMMRYPGTA

SEQ ID NO: 221327 - protein, 15 aa, Artificial Sequence
  Description of Artificial Sequence: Synthetic peptide
  Seed: LRMKWMMAMKYPITA
LRMKAMMMMRYPHTA

SEQ ID NO: 221328 - protein, 15 aa, Artificial Sequence
  Description of Artificial Sequence: Synthetic peptide
  Seed: LRMKWMMAMKYPITA
LRMKAMMMMRYPITA

SEQ ID NO: 221329 - protein, 15 aa, Artificial Sequence
  Description of Artificial Sequence: Synthetic peptide
  Seed: LRMKWMMAMKYPITA
LRMKAMMMMRYPKTA

SEQ ID NO: 221330 - protein, 15 aa, Artificial Sequence
  Description of Artificial Sequence: Synthetic peptide
  Seed: LRMKWMMAMKYPITA
LRMKAMMMMRYPLTA

SEQ ID NO: 221331 - protein, 15 aa, Artificial Sequence
  Description of Artificial Sequence: Synthetic peptide
  Seed: LRMKWMMAMKYPITA
LRMKAMMMMRYPMTA

SEQ ID NO: 221332 - protein, 15 aa, Artificial Sequence
  Description of Artificial Sequence: Synthetic peptide
  Seed: LRMKWMMAMKYPITA
LRMKAMMMMRYPQTA

SEQ ID NO: 221333 - protein, 15 aa, Artificial Sequence
  Description of Artificial Sequence: Synthetic peptide
  Seed: LRMKWMMAMKYPITA
LRMKAMMMMRYPRTA

SEQ ID NO: 221334 - protein, 15 aa, Artificial Sequence
  Description of Artificial Sequence: Synthetic peptide
  Seed: LRMKWMMAMKYPITA
LRMKAMMMMRYPSTA

SEQ ID NO: 221335 - protein, 15 aa, Artificial Sequence
  Description of Artificial Sequence: Synthetic peptide
  Seed: LRMKWMMAMKYPITA
LRMKAMMMMRYPTTA

SEQ ID NO: 221336 - protein, 15 aa, Artificial Sequence
  Description of Artificial Sequence: Synthetic peptide
  Seed: LRMKWMMAMKYPITA
LRMKAMMMMRYPVTA

SEQ ID NO: 221337 - protein, 15 aa, Artificial Sequence
  Description of Artificial Sequence: Synthetic peptide
  Seed: LRMKWMMAMKYPITA
LRMKAMMMMRYPYTA

SEQ ID NO: 221338 - protein, 15 aa, Artificial Sequence
  Description of Artificial Sequence: Synthetic peptide
  Seed: LRMKWMMAMKYPITA
LRMKAMMMMSYPATA

SEQ ID NO: 221339 - protein, 15 aa, Artificial Sequence
  Description of Artificial Sequence: Synthetic peptide
  Seed: LRMKWMMAMKYPITA
LRMKAMMMMSYPITA

SEQ ID NO: 221340 - protein, 15 aa, Artificial Sequence
  Description of Artificial Sequence: Synthetic peptide
  Seed: LRMKWMMAMKYPITA
LRMKAMMMMSYPLTA

SEQ ID NO: 221341 - protein, 15 aa, Artificial Sequence
  Description of Artificial Sequence: Synthetic peptide
  Seed: LRMKWMMAMKYPITA
LRMKAMMMMSYPMTA

SEQ ID NO: 221342 - protein, 15 aa, Artificial Sequence
  Description of Artificial Sequence: Synthetic peptide
  Seed: LRMKWMMAMKYPITA
LRMKAMMMMSYPNTA

SEQ ID NO: 221343 - protein, 15 aa, Artificial Sequence
  Description of Artificial Sequence: Synthetic peptide
  Seed: LRMKWMMAMKYPITA
LRMKAMMMMSYPSTA

SEQ ID NO: 221344 - protein, 15 aa, Artificial Sequence
  Description of Artificial Sequence: Synthetic peptide
  Seed: LRMKWMMAMKYPITA
LRMKAMMMMSYPTTA

SEQ ID NO: 221345 - protein, 15 aa, Artificial Sequence
  Description of Artificial Sequence: Synthetic peptide
  Seed: LRMKWMMAMKYPITA
LRMKAMMMMSYPVTA

SEQ ID NO: 221346 - protein, 15 aa, Artificial Sequence
  Description of Artificial Sequence: Synthetic peptide
  Seed: LRMKWMMAMKYPITA
LRMKAMMMMTYPATA

SEQ ID NO: 221347 - protein, 15 aa, Artificial Sequence
  Description of Artificial Sequence: Synthetic peptide
  Seed: LRMKWMMAMKYPITA
LRMKAMMMMTYPITA

SEQ ID NO: 221348 - protein, 15 aa, Artificial Sequence
  Description of Artificial Sequence: Synthetic peptide
  Seed: LRMKWMMAMKYPITA
LRMKAMMMMTYPLTA

SEQ ID NO: 221349 - protein, 15 aa, Artificial Sequence
  Description of Artificial Sequence: Synthetic peptide
  Seed: LRMKWMMAMKYPITA
LRMKAMMMMTYPMTA

SEQ ID NO: 221350 - protein, 15 aa, Artificial Sequence
  Description of Artificial Sequence: Synthetic peptide
  Seed: LRMKWMMAMKYPITA
LRMKAMMMMTYPVTA

SEQ ID NO: 221351 - protein, 15 aa, Artificial Sequence
  Description of Artificial Sequence: Synthetic peptide
  Seed: LRMKWMMAMKYPITA
LRMKAMMMMVYPMTA

SEQ ID NO: 221352 - protein, 15 aa, Artificial Sequence
  Description of Artificial Sequence: Synthetic peptide
  Seed: LRMKWMMAMKYPITA
LRMKAMMMMVYPSTA

SEQ ID NO: 221353 - protein, 15 aa, Artificial Sequence
  Description of Artificial Sequence: Synthetic peptide
  Seed: LRMKWMMAMKYPITA
LRMKAMMMMVYPVTA

SEQ ID NO: 221354 - protein, 15 aa, Artificial Sequence
  Description of Artificial Sequence: Synthetic peptide
  Seed: LRMKWMMAMKYPITA
LRMKAMMNMAYPFTA

SEQ ID NO: 221355 - protein, 15 aa, Artificial Sequence
  Description of Artificial Sequence: Synthetic peptide
  Seed: LRMKWMMAMKYPITA
LRMKAMMNMAYPITA

SEQ ID NO: 221356 - protein, 15 aa, Artificial Sequence
  Description of Artificial Sequence: Synthetic peptide
  Seed: LRMKWMMAMKYPITA
LRMKAMMNMAYPLTA

SEQ ID NO: 221357 - protein, 15 aa, Artificial Sequence
  Description of Artificial Sequence: Synthetic peptide
  Seed: LRMKWMMAMKYPITA
LRMKAMMNMAYPMTA

SEQ ID NO: 221358 - protein, 15 aa, Artificial Sequence
  Description of Artificial Sequence: Synthetic peptide
  Seed: LRMKWMMAMKYPITA
LRMKAMMNMAYPVTA

SEQ ID NO: 221359 - protein, 15 aa, Artificial Sequence
  Description of Artificial Sequence: Synthetic peptide
  Seed: LRMKWMMAMKYPITA
LRMKAMMNMAYPYTA

SEQ ID NO: 221360 - protein, 15 aa, Artificial Sequence
  Description of Artificial Sequence: Synthetic peptide
  Seed: LRMKWMMAMKYPITA
LRMKAMMNMGYPITA

SEQ ID NO: 221361 - protein, 15 aa, Artificial Sequence
  Description of Artificial Sequence: Synthetic peptide
  Seed: LRMKWMMAMKYPITA
LRMKAMMNMGYPLTA

SEQ ID NO: 221362 - protein, 15 aa, Artificial Sequence
  Description of Artificial Sequence: Synthetic peptide
  Seed: LRMKWMMAMKYPITA
LRMKAMMNMGYPVTA

SEQ ID NO: 221363 - protein, 15 aa, Artificial Sequence
  Description of Artificial Sequence: Synthetic peptide
  Seed: LRMKWMMAMKYPITA
LRMKAMMNMIYPITA

SEQ ID NO: 221364 - protein, 15 aa, Artificial Sequence
  Description of Artificial Sequence: Synthetic peptide
  Seed: LRMKWMMAMKYPITA
LRMKAMMNMIYPVTA

SEQ ID NO: 221365 - protein, 15 aa, Artificial Sequence
  Description of Artificial Sequence: Synthetic peptide
  Seed: LRMKWMMAMKYPITA
LRMKAMMNMNYPFTA

SEQ ID NO: 221366 - protein, 15 aa, Artificial Sequence
  Description of Artificial Sequence: Synthetic peptide
  Seed: LRMKWMMAMKYPITA
LRMKAMMNMNYPITA

SEQ ID NO: 221367 - protein, 15 aa, Artificial Sequence
  Description of Artificial Sequence: Synthetic peptide
  Seed: LRMKWMMAMKYPITA
LRMKAMMNMNYPLTA

SEQ ID NO: 221368 - protein, 15 aa, Artificial Sequence
  Description of Artificial Sequence: Synthetic peptide
  Seed: LRMKWMMAMKYPITA
LRMKAMMNMNYPMTA

SEQ ID NO: 221369 - protein, 15 aa, Artificial Sequence
  Description of Artificial Sequence: Synthetic peptide
  Seed: LRMKWMMAMKYPITA
LRMKAMMNMNYPVTA

SEQ ID NO: 221370 - protein, 15 aa, Artificial Sequence
  Description of Artificial Sequence: Synthetic peptide
  Seed: LRMKWMMAMKYPITA
LRMKAMMNMPYPITA

SEQ ID NO: 221371 - protein, 15 aa, Artificial Sequence
  Description of Artificial Sequence: Synthetic peptide
  Seed: LRMKWMMAMKYPITA
LRMKAMMNMPYPLTA

SEQ ID NO: 221372 - protein, 15 aa, Artificial Sequence
  Description of Artificial Sequence: Synthetic peptide
  Seed: LRMKWMMAMKYPITA
LRMKAMMNMPYPVTA

SEQ ID NO: 221373 - protein, 15 aa, Artificial Sequence
  Description of Artificial Sequence: Synthetic peptide
  Seed: LRMKWMMAMKYPITA
LRMKAMMNMSYPITA

SEQ ID NO: 221374 - protein, 15 aa, Artificial Sequence
  Description of Artificial Sequence: Synthetic peptide
  Seed: LRMKWMMAMKYPITA
LRMKAMMNMSYPLTA

SEQ ID NO: 221375 - protein, 15 aa, Artificial Sequence
  Description of Artificial Sequence: Synthetic peptide
  Seed: LRMKWMMAMKYPITA
LRMKAMMNMSYPVTA

SEQ ID NO: 221376 - protein, 15 aa, Artificial Sequence
  Description of Artificial Sequence: Synthetic peptide
  Seed: LRMKWMMAMKYPITA
LRMKAMMNMTYPITA

SEQ ID NO: 221377 - protein, 15 aa, Artificial Sequence
  Description of Artificial Sequence: Synthetic peptide
  Seed: LRMKWMMAMKYPITA
LRMKAMMNMTYPVTA

SEQ ID NO: 221378 - protein, 15 aa, Artificial Sequence
  Description of Artificial Sequence: Synthetic peptide
  Seed: LRMKWMMAMKYPITA
LRMKAMMNMVYPITA

SEQ ID NO: 221379 - protein, 15 aa, Artificial Sequence
  Description of Artificial Sequence: Synthetic peptide
  Seed: LRMKWMMAMKYPITA
LRMKAMMNMVYPVTA

SEQ ID NO: 221380 - protein, 15 aa, Artificial Sequence
  Description of Artificial Sequence: Synthetic peptide
  Seed: LRMKWMMAMKYPITA
LRMKAMMPMAYPITA

SEQ ID NO: 221381 - protein, 15 aa, Artificial Sequence
  Description of Artificial Sequence: Synthetic peptide
  Seed: LRMKWMMAMKYPITA
LRMKAMMPMAYPLTA

SEQ ID NO: 221382 - protein, 15 aa, Artificial Sequence
  Description of Artificial Sequence: Synthetic peptide
  Seed: LRMKWMMAMKYPITA
LRMKAMMQMAYPATA

SEQ ID NO: 221383 - protein, 15 aa, Artificial Sequence
  Description of Artificial Sequence: Synthetic peptide
  Seed: LRMKWMMAMKYPITA
LRMKAMMQMAYPITA

SEQ ID NO: 221384 - protein, 15 aa, Artificial Sequence
  Description of Artificial Sequence: Synthetic peptide
  Seed: LRMKWMMAMKYPITA
LRMKAMMQMAYPLTA

SEQ ID NO: 221385 - protein, 15 aa, Artificial Sequence
  Description of Artificial Sequence: Synthetic peptide
  Seed: LRMKWMMAMKYPITA
LRMKAMMQMAYPMTA

SEQ ID NO: 221386 - protein, 15 aa, Artificial Sequence
  Description of Artificial Sequence: Synthetic peptide
  Seed: LRMKWMMAMKYPITA
LRMKAMMQMAYPVTA

SEQ ID NO: 221387 - protein, 15 aa, Artificial Sequence
  Description of Artificial Sequence: Synthetic peptide
  Seed: LRMKWMMAMKYPITA
LRMKAMMQMGYPITA

SEQ ID NO: 221388 - protein, 15 aa, Artificial Sequence
  Description of Artificial Sequence: Synthetic peptide
  Seed: LRMKWMMAMKYPITA
LRMKAMMQMGYPLTA

SEQ ID NO: 221389 - protein, 15 aa, Artificial Sequence
  Description of Artificial Sequence: Synthetic peptide
  Seed: LRMKWMMAMKYPITA
LRMKAMMQMGYPVTA

SEQ ID NO: 221390 - protein, 15 aa, Artificial Sequence
  Description of Artificial Sequence: Synthetic peptide
  Seed: LRMKWMMAMKYPITA
LRMKAMMQMRYPFTA

SEQ ID NO: 221391 - protein, 15 aa, Artificial Sequence
  Description of Artificial Sequence: Synthetic peptide
  Seed: LRMKWMMAMKYPITA
LRMKAMMQMRYPITA

SEQ ID NO: 221392 - protein, 15 aa, Artificial Sequence
  Description of Artificial Sequence: Synthetic peptide
  Seed: LRMKWMMAMKYPITA
LRMKAMMQMRYPLTA

SEQ ID NO: 221393 - protein, 15 aa, Artificial Sequence
  Description of Artificial Sequence: Synthetic peptide
  Seed: LRMKWMMAMKYPITA
LRMKAMMQMRYPVTA

SEQ ID NO: 221394 - protein, 15 aa, Artificial Sequence
  Description of Artificial Sequence: Synthetic peptide
  Seed: LRMKWMMAMKYPITA
LRMKAMMQMRYPYTA

SEQ ID NO: 221395 - protein, 15 aa, Artificial Sequence
  Description of Artificial Sequence: Synthetic peptide
  Seed: LRMKWMMAMKYPITA
LRMKAMMQMSYPITA

SEQ ID NO: 221396 - protein, 15 aa, Artificial Sequence
  Description of Artificial Sequence: Synthetic peptide
  Seed: LRMKWMMAMKYPITA
LRMKAMMQMSYPLTA

SEQ ID NO: 221397 - protein, 15 aa, Artificial Sequence
  Description of Artificial Sequence: Synthetic peptide
  Seed: LRMKWMMAMKYPITA
LRMKAMMQMSYPVTA

SEQ ID NO: 221398 - protein, 15 aa, Artificial Sequence
  Description of Artificial Sequence: Synthetic peptide
  Seed: LRMKWMMAMKYPITA
LRMKAMMSMAYPATA

SEQ ID NO: 221399 - protein, 15 aa, Artificial Sequence
  Description of Artificial Sequence: Synthetic peptide
  Seed: LRMKWMMAMKYPITA
LRMKAMMSMAYPFTA

SEQ ID NO: 221400 - protein, 15 aa, Artificial Sequence
  Description of Artificial Sequence: Synthetic peptide
  Seed: LRMKWMMAMKYPITA
LRMKAMMSMAYPITA

SEQ ID NO: 221401 - protein, 15 aa, Artificial Sequence
  Description of Artificial Sequence: Synthetic peptide
  Seed: LRMKWMMAMKYPITA
LRMKAMMSMAYPLTA

SEQ ID NO: 221402 - protein, 15 aa, Artificial Sequence
  Description of Artificial Sequence: Synthetic peptide
  Seed: LRMKWMMAMKYPITA
LRMKAMMSMAYPMTA

SEQ ID NO: 221403 - protein, 15 aa, Artificial Sequence
  Description of Artificial Sequence: Synthetic peptide
  Seed: LRMKWMMAMKYPITA
LRMKAMMSMAYPVTA

SEQ ID NO: 221404 - protein, 15 aa, Artificial Sequence
  Description of Artificial Sequence: Synthetic peptide
  Seed: LRMKWMMAMKYPITA
LRMKAMMSMGYPATA

SEQ ID NO: 221405 - protein, 15 aa, Artificial Sequence
  Description of Artificial Sequence: Synthetic peptide
  Seed: LRMKWMMAMKYPITA
LRMKAMMSMGYPITA

SEQ ID NO: 221406 - protein, 15 aa, Artificial Sequence
  Description of Artificial Sequence: Synthetic peptide
  Seed: LRMKWMMAMKYPITA
LRMKAMMSMGYPLTA

SEQ ID NO: 221407 - protein, 15 aa, Artificial Sequence
  Description of Artificial Sequence: Synthetic peptide
  Seed: LRMKWMMAMKYPITA
LRMKAMMSMGYPMTA

SEQ ID NO: 221408 - protein, 15 aa, Artificial Sequence
  Description of Artificial Sequence: Synthetic peptide
  Seed: LRMKWMMAMKYPITA
LRMKAMMSMGYPVTA

SEQ ID NO: 221409 - protein, 15 aa, Artificial Sequence
  Description of Artificial Sequence: Synthetic peptide
  Seed: LRMKWMMAMKYPITA
LRMKAMMSMPYPITA

SEQ ID NO: 221410 - protein, 15 aa, Artificial Sequence
  Description of Artificial Sequence: Synthetic peptide
  Seed: LRMKWMMAMKYPITA
LRMKAMMSMPYPLTA

SEQ ID NO: 221411 - protein, 15 aa, Artificial Sequence
  Description of Artificial Sequence: Synthetic peptide
  Seed: LRMKWMMAMKYPITA
LRMKAMMSMPYPVTA

SEQ ID NO: 221412 - protein, 15 aa, Artificial Sequence
  Description of Artificial Sequence: Synthetic peptide
  Seed: LRMKWMMAMKYPITA
LRMKAMMSMRYPATA

SEQ ID NO: 221413 - protein, 15 aa, Artificial Sequence
  Description of Artificial Sequence: Synthetic peptide
  Seed: LRMKWMMAMKYPITA
LRMKAMMSMRYPSTA

SEQ ID NO: 221414 - protein, 15 aa, Artificial Sequence
  Description of Artificial Sequence: Synthetic peptide
  Seed: LRMKWMMAMKYPITA
LRMKAMMSMSYPATA

SEQ ID NO: 221415 - protein, 15 aa, Artificial Sequence
  Description of Artificial Sequence: Synthetic peptide
  Seed: LRMKWMMAMKYPITA
LRMKAMMSMSYPFTA

SEQ ID NO: 221416 - protein, 15 aa, Artificial Sequence
  Description of Artificial Sequence: Synthetic peptide
  Seed: LRMKWMMAMKYPITA
LRMKAMMSMSYPITA

SEQ ID NO: 221417 - protein, 15 aa, Artificial Sequence
  Description of Artificial Sequence: Synthetic peptide
  Seed: LRMKWMMAMKYPITA
LRMKAMMSMSYPLTA

SEQ ID NO: 221418 - protein, 15 aa, Artificial Sequence
  Description of Artificial Sequence: Synthetic peptide
  Seed: LRMKWMMAMKYPITA
LRMKAMMSMSYPMTA

SEQ ID NO: 221419 - protein, 15 aa, Artificial Sequence
  Description of Artificial Sequence: Synthetic peptide
  Seed: LRMKWMMAMKYPITA
LRMKAMMSMSYPVTA

SEQ ID NO: 221420 - protein, 15 aa, Artificial Sequence
  Description of Artificial Sequence: Synthetic peptide
  Seed: LRMKWMMAMKYPITA
LRMKAMMSMTYPITA

SEQ ID NO: 221421 - protein, 15 aa, Artificial Sequence
  Description of Artificial Sequence: Synthetic peptide
  Seed: LRMKWMMAMKYPITA
LRMKAMMTMAYPATA

SEQ ID NO: 221422 - protein, 15 aa, Artificial Sequence
  Description of Artificial Sequence: Synthetic peptide
  Seed: LRMKWMMAMKYPITA
LRMKAMMTMAYPFTA

SEQ ID NO: 221423 - protein, 15 aa, Artificial Sequence
  Description of Artificial Sequence: Synthetic peptide
  Seed: LRMKWMMAMKYPITA
LRMKAMMTMAYPITA

SEQ ID NO: 221424 - protein, 15 aa, Artificial Sequence
  Description of Artificial Sequence: Synthetic peptide
  Seed: LRMKWMMAMKYPITA
LRMKAMMTMAYPLTA

SEQ ID NO: 221425 - protein, 15 aa, Artificial Sequence
  Description of Artificial Sequence: Synthetic peptide
  Seed: LRMKWMMAMKYPITA
LRMKAMMTMAYPMTA

SEQ ID NO: 221426 - protein, 15 aa, Artificial Sequence
  Description of Artificial Sequence: Synthetic peptide
  Seed: LRMKWMMAMKYPITA
LRMKAMMTMAYPVTA

SEQ ID NO: 221427 - protein, 15 aa, Artificial Sequence
  Description of Artificial Sequence: Synthetic peptide
  Seed: LRMKWMMAMKYPITA
LRMKAMMTMGYPITA

SEQ ID NO: 221428 - protein, 15 aa, Artificial Sequence
  Description of Artificial Sequence: Synthetic peptide
  Seed: LRMKWMMAMKYPITA
LRMKAMMTMGYPLTA

SEQ ID NO: 221429 - protein, 15 aa, Artificial Sequence
  Description of Artificial Sequence: Synthetic peptide
  Seed: LRMKWMMAMKYPITA
LRMKAMMTMGYPVTA

SEQ ID NO: 221430 - protein, 15 aa, Artificial Sequence
  Description of Artificial Sequence: Synthetic peptide
  Seed: LRMKWMMAMKYPITA
LRMKAMMTMNYPITA

SEQ ID NO: 221431 - protein, 15 aa, Artificial Sequence
  Description of Artificial Sequence: Synthetic peptide
  Seed: LRMKWMMAMKYPITA
LRMKAMMTMPYPITA

SEQ ID NO: 221432 - protein, 15 aa, Artificial Sequence
  Description of Artificial Sequence: Synthetic peptide
  Seed: LRMKWMMAMKYPITA
LRMKAMMTMPYPLTA

SEQ ID NO: 221433 - protein, 15 aa, Artificial Sequence
  Description of Artificial Sequence: Synthetic peptide
  Seed: LRMKWMMAMKYPITA
LRMKAMMTMPYPVTA

SEQ ID NO: 221434 - protein, 15 aa, Artificial Sequence
  Description of Artificial Sequence: Synthetic peptide
  Seed: LRMKWMMAMKYPITA
LRMKAMMTMSYPFTA

SEQ ID NO: 221435 - protein, 15 aa, Artificial Sequence
  Description of Artificial Sequence: Synthetic peptide
  Seed: LRMKWMMAMKYPITA
LRMKAMMTMSYPITA

SEQ ID NO: 221436 - protein, 15 aa, Artificial Sequence
  Description of Artificial Sequence: Synthetic peptide
  Seed: LRMKWMMAMKYPITA
LRMKAMMTMSYPLTA

SEQ ID NO: 221437 - protein, 15 aa, Artificial Sequence
  Description of Artificial Sequence: Synthetic peptide
  Seed: LRMKWMMAMKYPITA
LRMKAMMTMSYPMTA

SEQ ID NO: 221438 - protein, 15 aa, Artificial Sequence
  Description of Artificial Sequence: Synthetic peptide
  Seed: LRMKWMMAMKYPITA
LRMKAMMTMSYPVTA

SEQ ID NO: 221439 - protein, 15 aa, Artificial Sequence
  Description of Artificial Sequence: Synthetic peptide
  Seed: LRMKWMMAMKYPITA
LRMKAMMTMTYPITA

SEQ ID NO: 221440 - protein, 15 aa, Artificial Sequence
  Description of Artificial Sequence: Synthetic peptide
  Seed: LRMKWMMAMKYPITA
LRMKAMMTMTYPLTA

SEQ ID NO: 221441 - protein, 15 aa, Artificial Sequence
  Description of Artificial Sequence: Synthetic peptide
  Seed: LRMKWMMAMKYPITA
LRMKAMMTMTYPVTA

SEQ ID NO: 221442 - protein, 15 aa, Artificial Sequence
  Description of Artificial Sequence: Synthetic peptide
  Seed: LRMKWMMAMKYPITA
LRMKAMMTMVYPITA

SEQ ID NO: 221443 - protein, 15 aa, Artificial Sequence
  Description of Artificial Sequence: Synthetic peptide
  Seed: LRMKWMMAMKYPITA
LRMKAMMVMAYPCTA

SEQ ID NO: 221444 - protein, 15 aa, Artificial Sequence
  Description of Artificial Sequence: Synthetic peptide
  Seed: LRMKWMMAMKYPITA
LRMKAMMVMAYPITA

SEQ ID NO: 221445 - protein, 15 aa, Artificial Sequence
  Description of Artificial Sequence: Synthetic peptide
  Seed: LRMKWMMAMKYPITA
LRMKAMMVMAYPLTA

SEQ ID NO: 221446 - protein, 15 aa, Artificial Sequence
  Description of Artificial Sequence: Synthetic peptide
  Seed: LRMKWMMAMKYPITA
LRMKAMMVMAYPVTA

SEQ ID NO: 221447 - protein, 15 aa, Artificial Sequence
  Description of Artificial Sequence: Synthetic peptide
  Seed: LRMKWMMAMKYPITA
LRMKAMMVMGYPATA

SEQ ID NO: 221448 - protein, 15 aa, Artificial Sequence
  Description of Artificial Sequence: Synthetic peptide
  Seed: LRMKWMMAMKYPITA
LRMKAMMVMGYPITA

SEQ ID NO: 221449 - protein, 15 aa, Artificial Sequence
  Description of Artificial Sequence: Synthetic peptide
  Seed: LRMKWMMAMKYPITA
LRMKAMMVMGYPLTA

SEQ ID NO: 221450 - protein, 15 aa, Artificial Sequence
  Description of Artificial Sequence: Synthetic peptide
  Seed: LRMKWMMAMKYPITA
LRMKAMMVMGYPMTA

SEQ ID NO: 221451 - protein, 15 aa, Artificial Sequence
  Description of Artificial Sequence: Synthetic peptide
  Seed: LRMKWMMAMKYPITA
LRMKAMMVMGYPVTA

SEQ ID NO: 221452 - protein, 15 aa, Artificial Sequence
  Description of Artificial Sequence: Synthetic peptide
  Seed: LRMKWMMAMKYPITA
LRMKAMMVMKYPATA

SEQ ID NO: 221453 - protein, 15 aa, Artificial Sequence
  Description of Artificial Sequence: Synthetic peptide
  Seed: LRMKWMMAMKYPITA
LRMKAMMVMKYPRTA

SEQ ID NO: 221454 - protein, 15 aa, Artificial Sequence
  Description of Artificial Sequence: Synthetic peptide
  Seed: LRMKWMMAMKYPITA
LRMKAMMVMKYPSTA

SEQ ID NO: 221455 - protein, 15 aa, Artificial Sequence
  Description of Artificial Sequence: Synthetic peptide
  Seed: LRMKWMMAMKYPITA
LRMKAMMVMPYPATA

SEQ ID NO: 221456 - protein, 15 aa, Artificial Sequence
  Description of Artificial Sequence: Synthetic peptide
  Seed: LRMKWMMAMKYPITA
LRMKAMMVMPYPITA

SEQ ID NO: 221457 - protein, 15 aa, Artificial Sequence
  Description of Artificial Sequence: Synthetic peptide
  Seed: LRMKWMMAMKYPITA
LRMKAMMVMPYPLTA

SEQ ID NO: 221458 - protein, 15 aa, Artificial Sequence
  Description of Artificial Sequence: Synthetic peptide
  Seed: LRMKWMMAMKYPITA
LRMKAMMVMPYPMTA

SEQ ID NO: 221459 - protein, 15 aa, Artificial Sequence
  Description of Artificial Sequence: Synthetic peptide
  Seed: LRMKWMMAMKYPITA
LRMKAMMVMPYPVTA

SEQ ID NO: 221460 - protein, 15 aa, Artificial Sequence
  Description of Artificial Sequence: Synthetic peptide
  Seed: LRMKWMMAMKYPITA
LRMKAMMVMRYPATA

SEQ ID NO: 221461 - protein, 15 aa, Artificial Sequence
  Description of Artificial Sequence: Synthetic peptide
  Seed: LRMKWMMAMKYPITA
LRMKAMMVMRYPFTA

SEQ ID NO: 221462 - protein, 15 aa, Artificial Sequence
  Description of Artificial Sequence: Synthetic peptide
  Seed: LRMKWMMAMKYPITA
LRMKAMMVMRYPGTA

SEQ ID NO: 221463 - protein, 15 aa, Artificial Sequence
  Description of Artificial Sequence: Synthetic peptide
  Seed: LRMKWMMAMKYPITA
LRMKAMMVMRYPITA

SEQ ID NO: 221464 - protein, 15 aa, Artificial Sequence
  Description of Artificial Sequence: Synthetic peptide
  Seed: LRMKWMMAMKYPITA
LRMKAMMVMRYPKTA

SEQ ID NO: 221465 - protein, 15 aa, Artificial Sequence
  Description of Artificial Sequence: Synthetic peptide
  Seed: LRMKWMMAMKYPITA
LRMKAMMVMRYPLTA

SEQ ID NO: 221466 - protein, 15 aa, Artificial Sequence
  Description of Artificial Sequence: Synthetic peptide
  Seed: LRMKWMMAMKYPITA
LRMKAMMVMRYPMTA

SEQ ID NO: 221467 - protein, 15 aa, Artificial Sequence
  Description of Artificial Sequence: Synthetic peptide
  Seed: LRMKWMMAMKYPITA
LRMKAMMVMRYPQTA

SEQ ID NO: 221468 - protein, 15 aa, Artificial Sequence
  Description of Artificial Sequence: Synthetic peptide
  Seed: LRMKWMMAMKYPITA
LRMKAMMVMRYPRTA

SEQ ID NO: 221469 - protein, 15 aa, Artificial Sequence
  Description of Artificial Sequence: Synthetic peptide
  Seed: LRMKWMMAMKYPITA
LRMKAMMVMRYPSTA

SEQ ID NO: 221470 - protein, 15 aa, Artificial Sequence
  Description of Artificial Sequence: Synthetic peptide
  Seed: LRMKWMMAMKYPITA
LRMKAMMVMRYPTTA

SEQ ID NO: 221471 - protein, 15 aa, Artificial Sequence
  Description of Artificial Sequence: Synthetic peptide
  Seed: LRMKWMMAMKYPITA
LRMKAMMVMRYPVTA

SEQ ID NO: 221472 - protein, 15 aa, Artificial Sequence
  Description of Artificial Sequence: Synthetic peptide
  Seed: LRMKWMMAMKYPITA
LRMKAMMVMRYPYTA

SEQ ID NO: 221473 - protein, 15 aa, Artificial Sequence
  Description of Artificial Sequence: Synthetic peptide
  Seed: LRMKWMMAMKYPITA
LRMKAMMVMSYPITA

SEQ ID NO: 221474 - protein, 15 aa, Artificial Sequence
  Description of Artificial Sequence: Synthetic peptide
  Seed: LRMKWMMAMKYPITA
LRMKAMMVMSYPLTA

SEQ ID NO: 221475 - protein, 15 aa, Artificial Sequence
  Description of Artificial Sequence: Synthetic peptide
  Seed: LRMKWMMAMKYPITA
LRMKAMMVMSYPMTA

SEQ ID NO: 221476 - protein, 15 aa, Artificial Sequence
  Description of Artificial Sequence: Synthetic peptide
  Seed: LRMKWMMAMKYPITA
LRMKAMMVMSYPVTA

SEQ ID NO: 221477 - protein, 15 aa, Artificial Sequence
  Description of Artificial Sequence: Synthetic peptide
  Seed: LRMKWMMAMKYPITA
LRMKAMMWMRYPFTA

SEQ ID NO: 221478 - protein, 15 aa, Artificial Sequence
  Description of Artificial Sequence: Synthetic peptide
  Seed: LRMKWMMAMKYPITA
LRMKAMMWMRYPITA

SEQ ID NO: 221479 - protein, 15 aa, Artificial Sequence
  Description of Artificial Sequence: Synthetic peptide
  Seed: LRMKWMMAMKYPITA
LRMKAMMWMRYPVTA

SEQ ID NO: 221480 - protein, 15 aa, Artificial Sequence
  Description of Artificial Sequence: Synthetic peptide
  Seed: LRMKWMMAMKYPITA
LRMKAMMWMRYPYTA

SEQ ID NO: 221481 - protein, 15 aa, Artificial Sequence
  Description of Artificial Sequence: Synthetic peptide
  Seed: LRMKWMMAMKYPITA
LRMKAMMYMRYPITA

SEQ ID NO: 221482 - protein, 15 aa, Artificial Sequence
  Description of Artificial Sequence: Synthetic peptide
  Seed: LRMKWMMAMKYPITA
LRMKAMMYMRYPMTA

SEQ ID NO: 221483 - protein, 15 aa, Artificial Sequence
  Description of Artificial Sequence: Synthetic peptide
  Seed: LRMKWMMAMKYPITA
LRMKAMMYMRYPRTA

SEQ ID NO: 221484 - protein, 15 aa, Artificial Sequence
  Description of Artificial Sequence: Synthetic peptide
  Seed: LRMKWMMAMKYPITA
LRMKAMMYMRYPVTA

SEQ ID NO: 221485 - protein, 15 aa, Artificial Sequence
  Description of Artificial Sequence: Synthetic peptide
  Seed: LRMKWMMAMKYPITA
LRMKAMMYMRYPYTA

SEQ ID NO: 221486 - protein, 15 aa, Artificial Sequence
  Description of Artificial Sequence: Synthetic peptide
  Seed: LRMKWMMAMKYPITA
LRMKCMMAMAYPATA

SEQ ID NO: 221487 - protein, 15 aa, Artificial Sequence
  Description of Artificial Sequence: Synthetic peptide
  Seed: LRMKWMMAMKYPITA
LRMKCMMAMAYPCTA

SEQ ID NO: 221488 - protein, 15 aa, Artificial Sequence
  Description of Artificial Sequence: Synthetic peptide
  Seed: LRMKWMMAMKYPITA
LRMKCMMAMAYPFTA

SEQ ID NO: 221489 - protein, 15 aa, Artificial Sequence
  Description of Artificial Sequence: Synthetic peptide
  Seed: LRMKWMMAMKYPITA
LRMKCMMAMAYPGTA

SEQ ID NO: 221490 - protein, 15 aa, Artificial Sequence
  Description of Artificial Sequence: Synthetic peptide
  Seed: LRMKWMMAMKYPITA
LRMKCMMAMAYPITA

SEQ ID NO: 221491 - protein, 15 aa, Artificial Sequence
  Description of Artificial Sequence: Synthetic peptide
  Seed: LRMKWMMAMKYPITA
LRMKCMMAMAYPLTA

SEQ ID NO: 221492 - protein, 15 aa, Artificial Sequence
  Description of Artificial Sequence: Synthetic peptide
  Seed: LRMKWMMAMKYPITA
LRMKCMMAMAYPMTA

SEQ ID NO: 221493 - protein, 15 aa, Artificial Sequence
  Description of Artificial Sequence: Synthetic peptide
  Seed: LRMKWMMAMKYPITA
LRMKCMMAMAYPNTA

SEQ ID NO: 221494 - protein, 15 aa, Artificial Sequence
  Description of Artificial Sequence: Synthetic peptide
  Seed: LRMKWMMAMKYPITA
LRMKCMMAMAYPSTA

SEQ ID NO: 221495 - protein, 15 aa, Artificial Sequence
  Description of Artificial Sequence: Synthetic peptide
  Seed: LRMKWMMAMKYPITA
LRMKCMMAMAYPTTA

SEQ ID NO: 221496 - protein, 15 aa, Artificial Sequence
  Description of Artificial Sequence: Synthetic peptide
  Seed: LRMKWMMAMKYPITA
LRMKCMMAMAYPVTA

SEQ ID NO: 221497 - protein, 15 aa, Artificial Sequence
  Description of Artificial Sequence: Synthetic peptide
  Seed: LRMKWMMAMKYPITA
LRMKCMMAMGYPATA

SEQ ID NO: 221498 - protein, 15 aa, Artificial Sequence
  Description of Artificial Sequence: Synthetic peptide
  Seed: LRMKWMMAMKYPITA
LRMKCMMAMGYPITA

SEQ ID NO: 221499 - protein, 15 aa, Artificial Sequence
  Description of Artificial Sequence: Synthetic peptide
  Seed: LRMKWMMAMKYPITA
LRMKCMMAMGYPLTA

SEQ ID NO: 221500 - protein, 15 aa, Artificial Sequence
  Description of Artificial Sequence: Synthetic peptide
  Seed: LRMKWMMAMKYPITA
LRMKCMMAMGYPMTA

SEQ ID NO: 221501 - protein, 15 aa, Artificial Sequence
  Description of Artificial Sequence: Synthetic peptide
  Seed: LRMKWMMAMKYPITA
LRMKCMMAMGYPSTA

SEQ ID NO: 221502 - protein, 15 aa, Artificial Sequence
  Description of Artificial Sequence: Synthetic peptide
  Seed: LRMKWMMAMKYPITA
LRMKCMMAMGYPTTA

SEQ ID NO: 221503 - protein, 15 aa, Artificial Sequence
  Description of Artificial Sequence: Synthetic peptide
  Seed: LRMKWMMAMKYPITA
LRMKCMMAMGYPVTA

SEQ ID NO: 221504 - protein, 15 aa, Artificial Sequence
  Description of Artificial Sequence: Synthetic peptide
  Seed: LRMKWMMAMKYPITA
LRMKCMMAMIYPITA

SEQ ID NO: 221505 - protein, 15 aa, Artificial Sequence
  Description of Artificial Sequence: Synthetic peptide
  Seed: LRMKWMMAMKYPITA
LRMKCMMAMIYPLTA

SEQ ID NO: 221506 - protein, 15 aa, Artificial Sequence
  Description of Artificial Sequence: Synthetic peptide
  Seed: LRMKWMMAMKYPITA
LRMKCMMAMIYPMTA

SEQ ID NO: 221507 - protein, 15 aa, Artificial Sequence
  Description of Artificial Sequence: Synthetic peptide
  Seed: LRMKWMMAMKYPITA
LRMKCMMAMIYPVTA

SEQ ID NO: 221508 - protein, 15 aa, Artificial Sequence
  Description of Artificial Sequence: Synthetic peptide
  Seed: LRMKWMMAMKYPITA
LRMKCMMAMKYPATA

SEQ ID NO: 221509 - protein, 15 aa, Artificial Sequence
  Description of Artificial Sequence: Synthetic peptide
  Seed: LRMKWMMAMKYPITA
LRMKCMMAMNYPATA

SEQ ID NO: 221510 - protein, 15 aa, Artificial Sequence
  Description of Artificial Sequence: Synthetic peptide
  Seed: LRMKWMMAMKYPITA
LRMKCMMAMNYPITA

SEQ ID NO: 221511 - protein, 15 aa, Artificial Sequence
  Description of Artificial Sequence: Synthetic peptide
  Seed: LRMKWMMAMKYPITA
LRMKCMMAMNYPLTA

SEQ ID NO: 221512 - protein, 15 aa, Artificial Sequence
  Description of Artificial Sequence: Synthetic peptide
  Seed: LRMKWMMAMKYPITA
LRMKCMMAMNYPVTA

SEQ ID NO: 221513 - protein, 15 aa, Artificial Sequence
  Description of Artificial Sequence: Synthetic peptide
  Seed: LRMKWMMAMKYPITA
LRMKCMMAMPYPATA

SEQ ID NO: 221514 - protein, 15 aa, Artificial Sequence
  Description of Artificial Sequence: Synthetic peptide
  Seed: LRMKWMMAMKYPITA
LRMKCMMAMPYPCTA

SEQ ID NO: 221515 - protein, 15 aa, Artificial Sequence
  Description of Artificial Sequence: Synthetic peptide
  Seed: LRMKWMMAMKYPITA
LRMKCMMAMPYPITA

SEQ ID NO: 221516 - protein, 15 aa, Artificial Sequence
  Description of Artificial Sequence: Synthetic peptide
  Seed: LRMKWMMAMKYPITA
LRMKCMMAMPYPLTA

SEQ ID NO: 221517 - protein, 15 aa, Artificial Sequence
  Description of Artificial Sequence: Synthetic peptide
  Seed: LRMKWMMAMKYPITA
LRMKCMMAMPYPMTA

SEQ ID NO: 221518 - protein, 15 aa, Artificial Sequence
  Description of Artificial Sequence: Synthetic peptide
  Seed: LRMKWMMAMKYPITA
LRMKCMMAMPYPVTA

SEQ ID NO: 221519 - protein, 15 aa, Artificial Sequence
  Description of Artificial Sequence: Synthetic peptide
  Seed: LRMKWMMAMKYPITA
LRMKCMMAMRYPATA

SEQ ID NO: 221520 - protein, 15 aa, Artificial Sequence
  Description of Artificial Sequence: Synthetic peptide
  Seed: LRMKWMMAMKYPITA
LRMKCMMAMRYPGTA

SEQ ID NO: 221521 - protein, 15 aa, Artificial Sequence
  Description of Artificial Sequence: Synthetic peptide
  Seed: LRMKWMMAMKYPITA
LRMKCMMAMRYPQTA

SEQ ID NO: 221522 - protein, 15 aa, Artificial Sequence
  Description of Artificial Sequence: Synthetic peptide
  Seed: LRMKWMMAMKYPITA
LRMKCMMAMRYPRTA

SEQ ID NO: 221523 - protein, 15 aa, Artificial Sequence
  Description of Artificial Sequence: Synthetic peptide
  Seed: LRMKWMMAMKYPITA
LRMKCMMAMRYPSTA

SEQ ID NO: 221524 - protein, 15 aa, Artificial Sequence
  Description of Artificial Sequence: Synthetic peptide
  Seed: LRMKWMMAMKYPITA
LRMKCMMAMRYPYTA

SEQ ID NO: 221525 - protein, 15 aa, Artificial Sequence
  Description of Artificial Sequence: Synthetic peptide
  Seed: LRMKWMMAMKYPITA
LRMKCMMAMSYPATA

SEQ ID NO: 221526 - protein, 15 aa, Artificial Sequence
  Description of Artificial Sequence: Synthetic peptide
  Seed: LRMKWMMAMKYPITA
LRMKCMMAMSYPFTA

SEQ ID NO: 221527 - protein, 15 aa, Artificial Sequence
  Description of Artificial Sequence: Synthetic peptide
  Seed: LRMKWMMAMKYPITA
LRMKCMMAMSYPGTA

SEQ ID NO: 221528 - protein, 15 aa, Artificial Sequence
  Description of Artificial Sequence: Synthetic peptide
  Seed: LRMKWMMAMKYPITA
LRMKCMMAMSYPITA

SEQ ID NO: 221529 - protein, 15 aa, Artificial Sequence
  Description of Artificial Sequence: Synthetic peptide
  Seed: LRMKWMMAMKYPITA
LRMKCMMAMSYPLTA

SEQ ID NO: 221530 - protein, 15 aa, Artificial Sequence
  Description of Artificial Sequence: Synthetic peptide
  Seed: LRMKWMMAMKYPITA
LRMKCMMAMSYPMTA

SEQ ID NO: 221531 - protein, 15 aa, Artificial Sequence
  Description of Artificial Sequence: Synthetic peptide
  Seed: LRMKWMMAMKYPITA
LRMKCMMAMSYPSTA

SEQ ID NO: 221532 - protein, 15 aa, Artificial Sequence
  Description of Artificial Sequence: Synthetic peptide
  Seed: LRMKWMMAMKYPITA
LRMKCMMAMSYPTTA

SEQ ID NO: 221533 - protein, 15 aa, Artificial Sequence
  Description of Artificial Sequence: Synthetic peptide
  Seed: LRMKWMMAMKYPITA
LRMKCMMAMSYPVTA

SEQ ID NO: 221534 - protein, 15 aa, Artificial Sequence
  Description of Artificial Sequence: Synthetic peptide
  Seed: LRMKWMMAMKYPITA
LRMKCMMAMTYPATA

SEQ ID NO: 221535 - protein, 15 aa, Artificial Sequence
  Description of Artificial Sequence: Synthetic peptide
  Seed: LRMKWMMAMKYPITA
LRMKCMMAMTYPITA

SEQ ID NO: 221536 - protein, 15 aa, Artificial Sequence
  Description of Artificial Sequence: Synthetic peptide
  Seed: LRMKWMMAMKYPITA
LRMKCMMAMTYPLTA

SEQ ID NO: 221537 - protein, 15 aa, Artificial Sequence
  Description of Artificial Sequence: Synthetic peptide
  Seed: LRMKWMMAMKYPITA
LRMKCMMAMTYPMTA

SEQ ID NO: 221538 - protein, 15 aa, Artificial Sequence
  Description of Artificial Sequence: Synthetic peptide
  Seed: LRMKWMMAMKYPITA
LRMKCMMAMTYPTTA

SEQ ID NO: 221539 - protein, 15 aa, Artificial Sequence
  Description of Artificial Sequence: Synthetic peptide
  Seed: LRMKWMMAMKYPITA
LRMKCMMAMTYPVTA

SEQ ID NO: 221540 - protein, 15 aa, Artificial Sequence
  Description of Artificial Sequence: Synthetic peptide
  Seed: LRMKWMMAMKYPITA
LRMKCMMAMVYPATA

SEQ ID NO: 221541 - protein, 15 aa, Artificial Sequence
  Description of Artificial Sequence: Synthetic peptide
  Seed: LRMKWMMAMKYPITA
LRMKCMMAMVYPITA

SEQ ID NO: 221542 - protein, 15 aa, Artificial Sequence
  Description of Artificial Sequence: Synthetic peptide
  Seed: LRMKWMMAMKYPITA
LRMKCMMAMVYPLTA

SEQ ID NO: 221543 - protein, 15 aa, Artificial Sequence
  Description of Artificial Sequence: Synthetic peptide
  Seed: LRMKWMMAMKYPITA
LRMKCMMAMVYPMTA

SEQ ID NO: 221544 - protein, 15 aa, Artificial Sequence
  Description of Artificial Sequence: Synthetic peptide
  Seed: LRMKWMMAMKYPITA
LRMKCMMAMVYPTTA

SEQ ID NO: 221545 - protein, 15 aa, Artificial Sequence
  Description of Artificial Sequence: Synthetic peptide
  Seed: LRMKWMMAMKYPITA
LRMKCMMAMVYPVTA

SEQ ID NO: 221546 - protein, 15 aa, Artificial Sequence
  Description of Artificial Sequence: Synthetic peptide
  Seed: LRMKWMMAMKYPITA
LRMKCMMCMAYPITA

SEQ ID NO: 221547 - protein, 15 aa, Artificial Sequence
  Description of Artificial Sequence: Synthetic peptide
  Seed: LRMKWMMAMKYPITA
LRMKCMMCMAYPLTA

SEQ ID NO: 221548 - protein, 15 aa, Artificial Sequence
  Description of Artificial Sequence: Synthetic peptide
  Seed: LRMKWMMAMKYPITA
LRMKCMMCMAYPVTA

SEQ ID NO: 221549 - protein, 15 aa, Artificial Sequence
  Description of Artificial Sequence: Synthetic peptide
  Seed: LRMKWMMAMKYPITA
LRMKCMMEMAYPATA

SEQ ID NO: 221550 - protein, 15 aa, Artificial Sequence
  Description of Artificial Sequence: Synthetic peptide
  Seed: LRMKWMMAMKYPITA
LRMKCMMEMAYPITA

SEQ ID NO: 221551 - protein, 15 aa, Artificial Sequence
  Description of Artificial Sequence: Synthetic peptide
  Seed: LRMKWMMAMKYPITA
LRMKCMMEMAYPLTA

SEQ ID NO: 221552 - protein, 15 aa, Artificial Sequence
  Description of Artificial Sequence: Synthetic peptide
  Seed: LRMKWMMAMKYPITA
LRMKCMMEMAYPMTA

SEQ ID NO: 221553 - protein, 15 aa, Artificial Sequence
  Description of Artificial Sequence: Synthetic peptide
  Seed: LRMKWMMAMKYPITA
LRMKCMMEMAYPTTA

SEQ ID NO: 221554 - protein, 15 aa, Artificial Sequence
  Description of Artificial Sequence: Synthetic peptide
  Seed: LRMKWMMAMKYPITA
LRMKCMMEMAYPVTA

SEQ ID NO: 221555 - protein, 15 aa, Artificial Sequence
  Description of Artificial Sequence: Synthetic peptide
  Seed: LRMKWMMAMKYPITA
LRMKCMMEMFYPITA

SEQ ID NO: 221556 - protein, 15 aa, Artificial Sequence
  Description of Artificial Sequence: Synthetic peptide
  Seed: LRMKWMMAMKYPITA
LRMKCMMEMFYPVTA

SEQ ID NO: 221557 - protein, 15 aa, Artificial Sequence
  Description of Artificial Sequence: Synthetic peptide
  Seed: LRMKWMMAMKYPITA
LRMKCMMEMGYPITA

SEQ ID NO: 221558 - protein, 15 aa, Artificial Sequence
  Description of Artificial Sequence: Synthetic peptide
  Seed: LRMKWMMAMKYPITA
LRMKCMMEMGYPLTA

SEQ ID NO: 221559 - protein, 15 aa, Artificial Sequence
  Description of Artificial Sequence: Synthetic peptide
  Seed: LRMKWMMAMKYPITA
LRMKCMMEMGYPVTA

SEQ ID NO: 221560 - protein, 15 aa, Artificial Sequence
  Description of Artificial Sequence: Synthetic peptide
  Seed: LRMKWMMAMKYPITA
LRMKCMMEMSYPITA

SEQ ID NO: 221561 - protein, 15 aa, Artificial Sequence
  Description of Artificial Sequence: Synthetic peptide
  Seed: LRMKWMMAMKYPITA
LRMKCMMEMSYPLTA

SEQ ID NO: 221562 - protein, 15 aa, Artificial Sequence
  Description of Artificial Sequence: Synthetic peptide
  Seed: LRMKWMMAMKYPITA
LRMKCMMEMSYPVTA

SEQ ID NO: 221563 - protein, 15 aa, Artificial Sequence
  Description of Artificial Sequence: Synthetic peptide
  Seed: LRMKWMMAMKYPITA
LRMKCMMFMAYPATA

SEQ ID NO: 221564 - protein, 15 aa, Artificial Sequence
  Description of Artificial Sequence: Synthetic peptide
  Seed: LRMKWMMAMKYPITA
LRMKCMMFMAYPITA

SEQ ID NO: 221565 - protein, 15 aa, Artificial Sequence
  Description of Artificial Sequence: Synthetic peptide
  Seed: LRMKWMMAMKYPITA
LRMKCMMFMAYPLTA

SEQ ID NO: 221566 - protein, 15 aa, Artificial Sequence
  Description of Artificial Sequence: Synthetic peptide
  Seed: LRMKWMMAMKYPITA
LRMKCMMFMAYPMTA

SEQ ID NO: 221567 - protein, 15 aa, Artificial Sequence
  Description of Artificial Sequence: Synthetic peptide
  Seed: LRMKWMMAMKYPITA
LRMKCMMFMAYPTTA

SEQ ID NO: 221568 - protein, 15 aa, Artificial Sequence
  Description of Artificial Sequence: Synthetic peptide
  Seed: LRMKWMMAMKYPITA
LRMKCMMFMAYPVTA

SEQ ID NO: 221569 - protein, 15 aa, Artificial Sequence
  Description of Artificial Sequence: Synthetic peptide
  Seed: LRMKWMMAMKYPITA
LRMKCMMFMGYPITA

SEQ ID NO: 221570 - protein, 15 aa, Artificial Sequence
  Description of Artificial Sequence: Synthetic peptide
  Seed: LRMKWMMAMKYPITA
LRMKCMMFMGYPLTA

SEQ ID NO: 221571 - protein, 15 aa, Artificial Sequence
  Description of Artificial Sequence: Synthetic peptide
  Seed: LRMKWMMAMKYPITA
LRMKCMMFMGYPVTA

SEQ ID NO: 221572 - protein, 15 aa, Artificial Sequence
  Description of Artificial Sequence: Synthetic peptide
  Seed: LRMKWMMAMKYPITA
LRMKCMMFMPYPLTA

SEQ ID NO: 221573 - protein, 15 aa, Artificial Sequence
  Description of Artificial Sequence: Synthetic peptide
  Seed: LRMKWMMAMKYPITA
LRMKCMMFMPYPVTA

SEQ ID NO: 221574 - protein, 15 aa, Artificial Sequence
  Description of Artificial Sequence: Synthetic peptide
  Seed: LRMKWMMAMKYPITA
LRMKCMMFMRYPVTA

SEQ ID NO: 221575 - protein, 15 aa, Artificial Sequence
  Description of Artificial Sequence: Synthetic peptide
  Seed: LRMKWMMAMKYPITA
LRMKCMMFMRYPYTA

SEQ ID NO: 221576 - protein, 15 aa, Artificial Sequence
  Description of Artificial Sequence: Synthetic peptide
  Seed: LRMKWMMAMKYPITA
LRMKCMMFMSYPATA

SEQ ID NO: 221577 - protein, 15 aa, Artificial Sequence
  Description of Artificial Sequence: Synthetic peptide
  Seed: LRMKWMMAMKYPITA
LRMKCMMFMSYPITA

SEQ ID NO: 221578 - protein, 15 aa, Artificial Sequence
  Description of Artificial Sequence: Synthetic peptide
  Seed: LRMKWMMAMKYPITA
LRMKCMMFMSYPLTA

SEQ ID NO: 221579 - protein, 15 aa, Artificial Sequence
  Description of Artificial Sequence: Synthetic peptide
  Seed: LRMKWMMAMKYPITA
LRMKCMMFMSYPVTA

SEQ ID NO: 221580 - protein, 15 aa, Artificial Sequence
  Description of Artificial Sequence: Synthetic peptide
  Seed: LRMKWMMAMKYPITA
LRMKCMMFMTYPVTA

SEQ ID NO: 221581 - protein, 15 aa, Artificial Sequence
  Description of Artificial Sequence: Synthetic peptide
  Seed: LRMKWMMAMKYPITA
LRMKCMMGMAYPATA

SEQ ID NO: 221582 - protein, 15 aa, Artificial Sequence
  Description of Artificial Sequence: Synthetic peptide
  Seed: LRMKWMMAMKYPITA
LRMKCMMGMAYPFTA

SEQ ID NO: 221583 - protein, 15 aa, Artificial Sequence
  Description of Artificial Sequence: Synthetic peptide
  Seed: LRMKWMMAMKYPITA
LRMKCMMGMAYPITA

SEQ ID NO: 221584 - protein, 15 aa, Artificial Sequence
  Description of Artificial Sequence: Synthetic peptide
  Seed: LRMKWMMAMKYPITA
LRMKCMMGMAYPLTA

SEQ ID NO: 221585 - protein, 15 aa, Artificial Sequence
  Description of Artificial Sequence: Synthetic peptide
  Seed: LRMKWMMAMKYPITA
LRMKCMMGMAYPMTA

SEQ ID NO: 221586 - protein, 15 aa, Artificial Sequence
  Description of Artificial Sequence: Synthetic peptide
  Seed: LRMKWMMAMKYPITA
LRMKCMMGMAYPSTA

SEQ ID NO: 221587 - protein, 15 aa, Artificial Sequence
  Description of Artificial Sequence: Synthetic peptide
  Seed: LRMKWMMAMKYPITA
LRMKCMMGMAYPTTA

SEQ ID NO: 221588 - protein, 15 aa, Artificial Sequence
  Description of Artificial Sequence: Synthetic peptide
  Seed: LRMKWMMAMKYPITA
LRMKCMMGMAYPVTA

SEQ ID NO: 221589 - protein, 15 aa, Artificial Sequence
  Description of Artificial Sequence: Synthetic peptide
  Seed: LRMKWMMAMKYPITA
LRMKCMMGMGYPITA

SEQ ID NO: 221590 - protein, 15 aa, Artificial Sequence
  Description of Artificial Sequence: Synthetic peptide
  Seed: LRMKWMMAMKYPITA
LRMKCMMGMGYPLTA

SEQ ID NO: 221591 - protein, 15 aa, Artificial Sequence
  Description of Artificial Sequence: Synthetic peptide
  Seed: LRMKWMMAMKYPITA
LRMKCMMGMGYPVTA

SEQ ID NO: 221592 - protein, 15 aa, Artificial Sequence
  Description of Artificial Sequence: Synthetic peptide
  Seed: LRMKWMMAMKYPITA
LRMKCMMGMNYPITA

SEQ ID NO: 221593 - protein, 15 aa, Artificial Sequence
  Description of Artificial Sequence: Synthetic peptide
  Seed: LRMKWMMAMKYPITA
LRMKCMMGMNYPVTA

SEQ ID NO: 221594 - protein, 15 aa, Artificial Sequence
  Description of Artificial Sequence: Synthetic peptide
  Seed: LRMKWMMAMKYPITA
LRMKCMMGMPYPITA

SEQ ID NO: 221595 - protein, 15 aa, Artificial Sequence
  Description of Artificial Sequence: Synthetic peptide
  Seed: LRMKWMMAMKYPITA
LRMKCMMGMPYPLTA

SEQ ID NO: 221596 - protein, 15 aa, Artificial Sequence
  Description of Artificial Sequence: Synthetic peptide
  Seed: LRMKWMMAMKYPITA
LRMKCMMGMPYPMTA

SEQ ID NO: 221597 - protein, 15 aa, Artificial Sequence
  Description of Artificial Sequence: Synthetic peptide
  Seed: LRMKWMMAMKYPITA
LRMKCMMGMPYPVTA

SEQ ID NO: 221598 - protein, 15 aa, Artificial Sequence
  Description of Artificial Sequence: Synthetic peptide
  Seed: LRMKWMMAMKYPITA
LRMKCMMGMSYPATA

SEQ ID NO: 221599 - protein, 15 aa, Artificial Sequence
  Description of Artificial Sequence: Synthetic peptide
  Seed: LRMKWMMAMKYPITA
LRMKCMMGMSYPITA

SEQ ID NO: 221600 - protein, 15 aa, Artificial Sequence
  Description of Artificial Sequence: Synthetic peptide
  Seed: LRMKWMMAMKYPITA
LRMKCMMGMSYPLTA

SEQ ID NO: 221601 - protein, 15 aa, Artificial Sequence
  Description of Artificial Sequence: Synthetic peptide
  Seed: LRMKWMMAMKYPITA
LRMKCMMGMSYPMTA

SEQ ID NO: 221602 - protein, 15 aa, Artificial Sequence
  Description of Artificial Sequence: Synthetic peptide
  Seed: LRMKWMMAMKYPITA
LRMKCMMGMSYPVTA

SEQ ID NO: 221603 - protein, 15 aa, Artificial Sequence
  Description of Artificial Sequence: Synthetic peptide
  Seed: LRMKWMMAMKYPITA
LRMKCMMGMTYPITA

SEQ ID NO: 221604 - protein, 15 aa, Artificial Sequence
  Description of Artificial Sequence: Synthetic peptide
  Seed: LRMKWMMAMKYPITA
LRMKCMMGMTYPLTA

SEQ ID NO: 221605 - protein, 15 aa, Artificial Sequence
  Description of Artificial Sequence: Synthetic peptide
  Seed: LRMKWMMAMKYPITA
LRMKCMMGMTYPVTA

SEQ ID NO: 221606 - protein, 15 aa, Artificial Sequence
  Description of Artificial Sequence: Synthetic peptide
  Seed: LRMKWMMAMKYPITA
LRMKCMMGMVYPITA

SEQ ID NO: 221607 - protein, 15 aa, Artificial Sequence
  Description of Artificial Sequence: Synthetic peptide
  Seed: LRMKWMMAMKYPITA
LRMKCMMGMVYPVTA

SEQ ID NO: 221608 - protein, 15 aa, Artificial Sequence
  Description of Artificial Sequence: Synthetic peptide
  Seed: LRMKWMMAMKYPITA
LRMKCMMHMAYPATA

SEQ ID NO: 221609 - protein, 15 aa, Artificial Sequence
  Description of Artificial Sequence: Synthetic peptide
  Seed: LRMKWMMAMKYPITA
LRMKCMMHMAYPITA

SEQ ID NO: 221610 - protein, 15 aa, Artificial Sequence
  Description of Artificial Sequence: Synthetic peptide
  Seed: LRMKWMMAMKYPITA
LRMKCMMHMAYPLTA

SEQ ID NO: 221611 - protein, 15 aa, Artificial Sequence
  Description of Artificial Sequence: Synthetic peptide
  Seed: LRMKWMMAMKYPITA
LRMKCMMHMAYPVTA

SEQ ID NO: 221612 - protein, 15 aa, Artificial Sequence
  Description of Artificial Sequence: Synthetic peptide
  Seed: LRMKWMMAMKYPITA
LRMKCMMHMGYPITA

SEQ ID NO: 221613 - protein, 15 aa, Artificial Sequence
  Description of Artificial Sequence: Synthetic peptide
  Seed: LRMKWMMAMKYPITA
LRMKCMMHMGYPLTA

SEQ ID NO: 221614 - protein, 15 aa, Artificial Sequence
  Description of Artificial Sequence: Synthetic peptide
  Seed: LRMKWMMAMKYPITA
LRMKCMMHMGYPVTA

SEQ ID NO: 221615 - protein, 15 aa, Artificial Sequence
  Description of Artificial Sequence: Synthetic peptide
  Seed: LRMKWMMAMKYPITA
LRMKCMMHMRYPRTA

SEQ ID NO: 221616 - protein, 15 aa, Artificial Sequence
  Description of Artificial Sequence: Synthetic peptide
  Seed: LRMKWMMAMKYPITA
LRMKCMMHMRYPVTA

SEQ ID NO: 221617 - protein, 15 aa, Artificial Sequence
  Description of Artificial Sequence: Synthetic peptide
  Seed: LRMKWMMAMKYPITA
LRMKCMMHMRYPYTA

SEQ ID NO: 221618 - protein, 15 aa, Artificial Sequence
  Description of Artificial Sequence: Synthetic peptide
  Seed: LRMKWMMAMKYPITA
LRMKCMMHMSYPITA

SEQ ID NO: 221619 - protein, 15 aa, Artificial Sequence
  Description of Artificial Sequence: Synthetic peptide
  Seed: LRMKWMMAMKYPITA
LRMKCMMHMSYPLTA

SEQ ID NO: 221620 - protein, 15 aa, Artificial Sequence
  Description of Artificial Sequence: Synthetic peptide
  Seed: LRMKWMMAMKYPITA
LRMKCMMHMSYPVTA

SEQ ID NO: 221621 - protein, 15 aa, Artificial Sequence
  Description of Artificial Sequence: Synthetic peptide
  Seed: LRMKWMMAMKYPITA
LRMKCMMIMAYPATA

SEQ ID NO: 221622 - protein, 15 aa, Artificial Sequence
  Description of Artificial Sequence: Synthetic peptide
  Seed: LRMKWMMAMKYPITA
LRMKCMMIMAYPCTA

SEQ ID NO: 221623 - protein, 15 aa, Artificial Sequence
  Description of Artificial Sequence: Synthetic peptide
  Seed: LRMKWMMAMKYPITA
LRMKCMMIMAYPFTA

SEQ ID NO: 221624 - protein, 15 aa, Artificial Sequence
  Description of Artificial Sequence: Synthetic peptide
  Seed: LRMKWMMAMKYPITA
LRMKCMMIMAYPGTA

SEQ ID NO: 221625 - protein, 15 aa, Artificial Sequence
  Description of Artificial Sequence: Synthetic peptide
  Seed: LRMKWMMAMKYPITA
LRMKCMMIMAYPITA

SEQ ID NO: 221626 - protein, 15 aa, Artificial Sequence
  Description of Artificial Sequence: Synthetic peptide
  Seed: LRMKWMMAMKYPITA
LRMKCMMIMAYPLTA

SEQ ID NO: 221627 - protein, 15 aa, Artificial Sequence
  Description of Artificial Sequence: Synthetic peptide
  Seed: LRMKWMMAMKYPITA
LRMKCMMIMAYPMTA

SEQ ID NO: 221628 - protein, 15 aa, Artificial Sequence
  Description of Artificial Sequence: Synthetic peptide
  Seed: LRMKWMMAMKYPITA
LRMKCMMIMAYPSTA

SEQ ID NO: 221629 - protein, 15 aa, Artificial Sequence
  Description of Artificial Sequence: Synthetic peptide
  Seed: LRMKWMMAMKYPITA
LRMKCMMIMAYPTTA

SEQ ID NO: 221630 - protein, 15 aa, Artificial Sequence
  Description of Artificial Sequence: Synthetic peptide
  Seed: LRMKWMMAMKYPITA
LRMKCMMIMAYPVTA

SEQ ID NO: 221631 - protein, 15 aa, Artificial Sequence
  Description of Artificial Sequence: Synthetic peptide
  Seed: LRMKWMMAMKYPITA
LRMKCMMIMGYPATA

SEQ ID NO: 221632 - protein, 15 aa, Artificial Sequence
  Description of Artificial Sequence: Synthetic peptide
  Seed: LRMKWMMAMKYPITA
LRMKCMMIMGYPFTA

SEQ ID NO: 221633 - protein, 15 aa, Artificial Sequence
  Description of Artificial Sequence: Synthetic peptide
  Seed: LRMKWMMAMKYPITA
LRMKCMMIMGYPITA

SEQ ID NO: 221634 - protein, 15 aa, Artificial Sequence
  Description of Artificial Sequence: Synthetic peptide
  Seed: LRMKWMMAMKYPITA
LRMKCMMIMGYPLTA

SEQ ID NO: 221635 - protein, 15 aa, Artificial Sequence
  Description of Artificial Sequence: Synthetic peptide
  Seed: LRMKWMMAMKYPITA
LRMKCMMIMGYPMTA

SEQ ID NO: 221636 - protein, 15 aa, Artificial Sequence
  Description of Artificial Sequence: Synthetic peptide
  Seed: LRMKWMMAMKYPITA
LRMKCMMIMGYPSTA

SEQ ID NO: 221637 - protein, 15 aa, Artificial Sequence
  Description of Artificial Sequence: Synthetic peptide
  Seed: LRMKWMMAMKYPITA
LRMKCMMIMGYPTTA

SEQ ID NO: 221638 - protein, 15 aa, Artificial Sequence
  Description of Artificial Sequence: Synthetic peptide
  Seed: LRMKWMMAMKYPITA
LRMKCMMIMGYPVTA

SEQ ID NO: 221639 - protein, 15 aa, Artificial Sequence
  Description of Artificial Sequence: Synthetic peptide
  Seed: LRMKWMMAMKYPITA
LRMKCMMIMKYPATA

SEQ ID NO: 221640 - protein, 15 aa, Artificial Sequence
  Description of Artificial Sequence: Synthetic peptide
  Seed: LRMKWMMAMKYPITA
LRMKCMMIMKYPKTA

SEQ ID NO: 221641 - protein, 15 aa, Artificial Sequence
  Description of Artificial Sequence: Synthetic peptide
  Seed: LRMKWMMAMKYPITA
LRMKCMMIMKYPRTA

SEQ ID NO: 221642 - protein, 15 aa, Artificial Sequence
  Description of Artificial Sequence: Synthetic peptide
  Seed: LRMKWMMAMKYPITA
LRMKCMMIMKYPSTA

SEQ ID NO: 221643 - protein, 15 aa, Artificial Sequence
  Description of Artificial Sequence: Synthetic peptide
  Seed: LRMKWMMAMKYPITA
LRMKCMMIMNYPATA

SEQ ID NO: 221644 - protein, 15 aa, Artificial Sequence
  Description of Artificial Sequence: Synthetic peptide
  Seed: LRMKWMMAMKYPITA
LRMKCMMIMNYPITA

SEQ ID NO: 221645 - protein, 15 aa, Artificial Sequence
  Description of Artificial Sequence: Synthetic peptide
  Seed: LRMKWMMAMKYPITA
LRMKCMMIMNYPLTA

SEQ ID NO: 221646 - protein, 15 aa, Artificial Sequence
  Description of Artificial Sequence: Synthetic peptide
  Seed: LRMKWMMAMKYPITA
LRMKCMMIMNYPMTA

SEQ ID NO: 221647 - protein, 15 aa, Artificial Sequence
  Description of Artificial Sequence: Synthetic peptide
  Seed: LRMKWMMAMKYPITA
LRMKCMMIMNYPTTA

SEQ ID NO: 221648 - protein, 15 aa, Artificial Sequence
  Description of Artificial Sequence: Synthetic peptide
  Seed: LRMKWMMAMKYPITA
LRMKCMMIMNYPVTA

SEQ ID NO: 221649 - protein, 15 aa, Artificial Sequence
  Description of Artificial Sequence: Synthetic peptide
  Seed: LRMKWMMAMKYPITA
LRMKCMMIMPYPATA

SEQ ID NO: 221650 - protein, 15 aa, Artificial Sequence
  Description of Artificial Sequence: Synthetic peptide
  Seed: LRMKWMMAMKYPITA
LRMKCMMIMPYPITA

SEQ ID NO: 221651 - protein, 15 aa, Artificial Sequence
  Description of Artificial Sequence: Synthetic peptide
  Seed: LRMKWMMAMKYPITA
LRMKCMMIMPYPLTA

SEQ ID NO: 221652 - protein, 15 aa, Artificial Sequence
  Description of Artificial Sequence: Synthetic peptide
  Seed: LRMKWMMAMKYPITA
LRMKCMMIMPYPMTA

SEQ ID NO: 221653 - protein, 15 aa, Artificial Sequence
  Description of Artificial Sequence: Synthetic peptide
  Seed: LRMKWMMAMKYPITA
LRMKCMMIMPYPSTA

SEQ ID NO: 221654 - protein, 15 aa, Artificial Sequence
  Description of Artificial Sequence: Synthetic peptide
  Seed: LRMKWMMAMKYPITA
LRMKCMMIMPYPTTA

SEQ ID NO: 221655 - protein, 15 aa, Artificial Sequence
  Description of Artificial Sequence: Synthetic peptide
  Seed: LRMKWMMAMKYPITA
LRMKCMMIMPYPVTA

SEQ ID NO: 221656 - protein, 15 aa, Artificial Sequence
  Description of Artificial Sequence: Synthetic peptide
  Seed: LRMKWMMAMKYPITA
LRMKCMMIMRYPATA

SEQ ID NO: 221657 - protein, 15 aa, Artificial Sequence
  Description of Artificial Sequence: Synthetic peptide
  Seed: LRMKWMMAMKYPITA
LRMKCMMIMRYPFTA

SEQ ID NO: 221658 - protein, 15 aa, Artificial Sequence
  Description of Artificial Sequence: Synthetic peptide
  Seed: LRMKWMMAMKYPITA
LRMKCMMIMRYPGTA

SEQ ID NO: 221659 - protein, 15 aa, Artificial Sequence
  Description of Artificial Sequence: Synthetic peptide
  Seed: LRMKWMMAMKYPITA
LRMKCMMIMRYPHTA

SEQ ID NO: 221660 - protein, 15 aa, Artificial Sequence
  Description of Artificial Sequence: Synthetic peptide
  Seed: LRMKWMMAMKYPITA
LRMKCMMIMRYPITA

SEQ ID NO: 221661 - protein, 15 aa, Artificial Sequence
  Description of Artificial Sequence: Synthetic peptide
  Seed: LRMKWMMAMKYPITA
LRMKCMMIMRYPKTA

SEQ ID NO: 221662 - protein, 15 aa, Artificial Sequence
  Description of Artificial Sequence: Synthetic peptide
  Seed: LRMKWMMAMKYPITA
LRMKCMMIMRYPLTA

SEQ ID NO: 221663 - protein, 15 aa, Artificial Sequence
  Description of Artificial Sequence: Synthetic peptide
  Seed: LRMKWMMAMKYPITA
LRMKCMMIMRYPMTA

SEQ ID NO: 221664 - protein, 15 aa, Artificial Sequence
  Description of Artificial Sequence: Synthetic peptide
  Seed: LRMKWMMAMKYPITA
LRMKCMMIMRYPQTA

SEQ ID NO: 221665 - protein, 15 aa, Artificial Sequence
  Description of Artificial Sequence: Synthetic peptide
  Seed: LRMKWMMAMKYPITA
LRMKCMMIMRYPRTA

SEQ ID NO: 221666 - protein, 15 aa, Artificial Sequence
  Description of Artificial Sequence: Synthetic peptide
  Seed: LRMKWMMAMKYPITA
LRMKCMMIMRYPSTA

SEQ ID NO: 221667 - protein, 15 aa, Artificial Sequence
  Description of Artificial Sequence: Synthetic peptide
  Seed: LRMKWMMAMKYPITA
LRMKCMMIMRYPTTA

SEQ ID NO: 221668 - protein, 15 aa, Artificial Sequence
  Description of Artificial Sequence: Synthetic peptide
  Seed: LRMKWMMAMKYPITA
LRMKCMMIMRYPVTA

SEQ ID NO: 221669 - protein, 15 aa, Artificial Sequence
  Description of Artificial Sequence: Synthetic peptide
  Seed: LRMKWMMAMKYPITA
LRMKCMMIMRYPYTA

SEQ ID NO: 221670 - protein, 15 aa, Artificial Sequence
  Description of Artificial Sequence: Synthetic peptide
  Seed: LRMKWMMAMKYPITA
LRMKCMMIMSYPATA

SEQ ID NO: 221671 - protein, 15 aa, Artificial Sequence
  Description of Artificial Sequence: Synthetic peptide
  Seed: LRMKWMMAMKYPITA
LRMKCMMIMSYPFTA

SEQ ID NO: 221672 - protein, 15 aa, Artificial Sequence
  Description of Artificial Sequence: Synthetic peptide
  Seed: LRMKWMMAMKYPITA
LRMKCMMIMSYPITA

SEQ ID NO: 221673 - protein, 15 aa, Artificial Sequence
  Description of Artificial Sequence: Synthetic peptide
  Seed: LRMKWMMAMKYPITA
LRMKCMMIMSYPLTA

SEQ ID NO: 221674 - protein, 15 aa, Artificial Sequence
  Description of Artificial Sequence: Synthetic peptide
  Seed: LRMKWMMAMKYPITA
LRMKCMMIMSYPMTA

SEQ ID NO: 221675 - protein, 15 aa, Artificial Sequence
  Description of Artificial Sequence: Synthetic peptide
  Seed: LRMKWMMAMKYPITA
LRMKCMMIMSYPSTA

SEQ ID NO: 221676 - protein, 15 aa, Artificial Sequence
  Description of Artificial Sequence: Synthetic peptide
  Seed: LRMKWMMAMKYPITA
LRMKCMMIMSYPTTA

SEQ ID NO: 221677 - protein, 15 aa, Artificial Sequence
  Description of Artificial Sequence: Synthetic peptide
  Seed: LRMKWMMAMKYPITA
LRMKCMMIMSYPVTA

SEQ ID NO: 221678 - protein, 15 aa, Artificial Sequence
  Description of Artificial Sequence: Synthetic peptide
  Seed: LRMKWMMAMKYPITA
LRMKCMMIMTYPATA

SEQ ID NO: 221679 - protein, 15 aa, Artificial Sequence
  Description of Artificial Sequence: Synthetic peptide
  Seed: LRMKWMMAMKYPITA
LRMKCMMIMTYPITA

SEQ ID NO: 221680 - protein, 15 aa, Artificial Sequence
  Description of Artificial Sequence: Synthetic peptide
  Seed: LRMKWMMAMKYPITA
LRMKCMMIMTYPLTA

SEQ ID NO: 221681 - protein, 15 aa, Artificial Sequence
  Description of Artificial Sequence: Synthetic peptide
  Seed: LRMKWMMAMKYPITA
LRMKCMMIMTYPMTA

SEQ ID NO: 221682 - protein, 15 aa, Artificial Sequence
  Description of Artificial Sequence: Synthetic peptide
  Seed: LRMKWMMAMKYPITA
LRMKCMMIMTYPSTA

SEQ ID NO: 221683 - protein, 15 aa, Artificial Sequence
  Description of Artificial Sequence: Synthetic peptide
  Seed: LRMKWMMAMKYPITA
LRMKCMMIMTYPTTA

SEQ ID NO: 221684 - protein, 15 aa, Artificial Sequence
  Description of Artificial Sequence: Synthetic peptide
  Seed: LRMKWMMAMKYPITA
LRMKCMMIMTYPVTA

SEQ ID NO: 221685 - protein, 15 aa, Artificial Sequence
  Description of Artificial Sequence: Synthetic peptide
  Seed: LRMKWMMAMKYPITA
LRMKCMMIMVYPATA

SEQ ID NO: 221686 - protein, 15 aa, Artificial Sequence
  Description of Artificial Sequence: Synthetic peptide
  Seed: LRMKWMMAMKYPITA
LRMKCMMIMVYPITA

SEQ ID NO: 221687 - protein, 15 aa, Artificial Sequence
  Description of Artificial Sequence: Synthetic peptide
  Seed: LRMKWMMAMKYPITA
LRMKCMMIMVYPLTA

SEQ ID NO: 221688 - protein, 15 aa, Artificial Sequence
  Description of Artificial Sequence: Synthetic peptide
  Seed: LRMKWMMAMKYPITA
LRMKCMMIMVYPVTA

SEQ ID NO: 221689 - protein, 15 aa, Artificial Sequence
  Description of Artificial Sequence: Synthetic peptide
  Seed: LRMKWMMAMKYPITA
LRMKCMMKMSYPLTA

SEQ ID NO: 221690 - protein, 15 aa, Artificial Sequence
  Description of Artificial Sequence: Synthetic peptide
  Seed: LRMKWMMAMKYPITA
LRMKCMMLMAYPATA

SEQ ID NO: 221691 - protein, 15 aa, Artificial Sequence
  Description of Artificial Sequence: Synthetic peptide
  Seed: LRMKWMMAMKYPITA
LRMKCMMLMAYPCTA

SEQ ID NO: 221692 - protein, 15 aa, Artificial Sequence
  Description of Artificial Sequence: Synthetic peptide
  Seed: LRMKWMMAMKYPITA
LRMKCMMLMAYPFTA

SEQ ID NO: 221693 - protein, 15 aa, Artificial Sequence
  Description of Artificial Sequence: Synthetic peptide
  Seed: LRMKWMMAMKYPITA
LRMKCMMLMAYPGTA

SEQ ID NO: 221694 - protein, 15 aa, Artificial Sequence
  Description of Artificial Sequence: Synthetic peptide
  Seed: LRMKWMMAMKYPITA
LRMKCMMLMAYPITA

SEQ ID NO: 221695 - protein, 15 aa, Artificial Sequence
  Description of Artificial Sequence: Synthetic peptide
  Seed: LRMKWMMAMKYPITA
LRMKCMMLMAYPLTA

SEQ ID NO: 221696 - protein, 15 aa, Artificial Sequence
  Description of Artificial Sequence: Synthetic peptide
  Seed: LRMKWMMAMKYPITA
LRMKCMMLMAYPMTA

SEQ ID NO: 221697 - protein, 15 aa, Artificial Sequence
  Description of Artificial Sequence: Synthetic peptide
  Seed: LRMKWMMAMKYPITA
LRMKCMMLMAYPNTA

SEQ ID NO: 221698 - protein, 15 aa, Artificial Sequence
  Description of Artificial Sequence: Synthetic peptide
  Seed: LRMKWMMAMKYPITA
LRMKCMMLMAYPPTA

SEQ ID NO: 221699 - protein, 15 aa, Artificial Sequence
  Description of Artificial Sequence: Synthetic peptide
  Seed: LRMKWMMAMKYPITA
LRMKCMMLMAYPRTA

SEQ ID NO: 221700 - protein, 15 aa, Artificial Sequence
  Description of Artificial Sequence: Synthetic peptide
  Seed: LRMKWMMAMKYPITA
LRMKCMMLMAYPSTA

SEQ ID NO: 221701 - protein, 15 aa, Artificial Sequence
  Description of Artificial Sequence: Synthetic peptide
  Seed: LRMKWMMAMKYPITA
LRMKCMMLMAYPTTA

SEQ ID NO: 221702 - protein, 15 aa, Artificial Sequence
  Description of Artificial Sequence: Synthetic peptide
  Seed: LRMKWMMAMKYPITA
LRMKCMMLMAYPVTA

SEQ ID NO: 221703 - protein, 15 aa, Artificial Sequence
  Description of Artificial Sequence: Synthetic peptide
  Seed: LRMKWMMAMKYPITA
LRMKCMMLMAYPYTA

SEQ ID NO: 221704 - protein, 15 aa, Artificial Sequence
  Description of Artificial Sequence: Synthetic peptide
  Seed: LRMKWMMAMKYPITA
LRMKCMMLMGYPATA

SEQ ID NO: 221705 - protein, 15 aa, Artificial Sequence
  Description of Artificial Sequence: Synthetic peptide
  Seed: LRMKWMMAMKYPITA
LRMKCMMLMGYPCTA

SEQ ID NO: 221706 - protein, 15 aa, Artificial Sequence
  Description of Artificial Sequence: Synthetic peptide
  Seed: LRMKWMMAMKYPITA
LRMKCMMLMGYPFTA

SEQ ID NO: 221707 - protein, 15 aa, Artificial Sequence
  Description of Artificial Sequence: Synthetic peptide
  Seed: LRMKWMMAMKYPITA
LRMKCMMLMGYPGTA

SEQ ID NO: 221708 - protein, 15 aa, Artificial Sequence
  Description of Artificial Sequence: Synthetic peptide
  Seed: LRMKWMMAMKYPITA
LRMKCMMLMGYPITA

SEQ ID NO: 221709 - protein, 15 aa, Artificial Sequence
  Description of Artificial Sequence: Synthetic peptide
  Seed: LRMKWMMAMKYPITA
LRMKCMMLMGYPLTA

SEQ ID NO: 221710 - protein, 15 aa, Artificial Sequence
  Description of Artificial Sequence: Synthetic peptide
  Seed: LRMKWMMAMKYPITA
LRMKCMMLMGYPMTA

SEQ ID NO: 221711 - protein, 15 aa, Artificial Sequence
  Description of Artificial Sequence: Synthetic peptide
  Seed: LRMKWMMAMKYPITA
LRMKCMMLMGYPSTA

SEQ ID NO: 221712 - protein, 15 aa, Artificial Sequence
  Description of Artificial Sequence: Synthetic peptide
  Seed: LRMKWMMAMKYPITA
LRMKCMMLMGYPTTA

SEQ ID NO: 221713 - protein, 15 aa, Artificial Sequence
  Description of Artificial Sequence: Synthetic peptide
  Seed: LRMKWMMAMKYPITA
LRMKCMMLMGYPVTA

SEQ ID NO: 221714 - protein, 15 aa, Artificial Sequence
  Description of Artificial Sequence: Synthetic peptide
  Seed: LRMKWMMAMKYPITA
LRMKCMMLMGYPYTA

SEQ ID NO: 221715 - protein, 15 aa, Artificial Sequence
  Description of Artificial Sequence: Synthetic peptide
  Seed: LRMKWMMAMKYPITA
LRMKCMMLMHYPLTA

SEQ ID NO: 221716 - protein, 15 aa, Artificial Sequence
  Description of Artificial Sequence: Synthetic peptide
  Seed: LRMKWMMAMKYPITA
LRMKCMMLMHYPVTA

SEQ ID NO: 221717 - protein, 15 aa, Artificial Sequence
  Description of Artificial Sequence: Synthetic peptide
  Seed: LRMKWMMAMKYPITA
LRMKCMMLMIYPATA

SEQ ID NO: 221718 - protein, 15 aa, Artificial Sequence
  Description of Artificial Sequence: Synthetic peptide
  Seed: LRMKWMMAMKYPITA
LRMKCMMLMIYPITA

SEQ ID NO: 221719 - protein, 15 aa, Artificial Sequence
  Description of Artificial Sequence: Synthetic peptide
  Seed: LRMKWMMAMKYPITA
LRMKCMMLMIYPVTA

SEQ ID NO: 221720 - protein, 15 aa, Artificial Sequence
  Description of Artificial Sequence: Synthetic peptide
  Seed: LRMKWMMAMKYPITA
LRMKCMMLMKYPATA

SEQ ID NO: 221721 - protein, 15 aa, Artificial Sequence
  Description of Artificial Sequence: Synthetic peptide
  Seed: LRMKWMMAMKYPITA
LRMKCMMLMKYPRTA

SEQ ID NO: 221722 - protein, 15 aa, Artificial Sequence
  Description of Artificial Sequence: Synthetic peptide
  Seed: LRMKWMMAMKYPITA
LRMKCMMLMKYPSTA

SEQ ID NO: 221723 - protein, 15 aa, Artificial Sequence
  Description of Artificial Sequence: Synthetic peptide
  Seed: LRMKWMMAMKYPITA
LRMKCMMLMNYPATA

SEQ ID NO: 221724 - protein, 15 aa, Artificial Sequence
  Description of Artificial Sequence: Synthetic peptide
  Seed: LRMKWMMAMKYPITA
LRMKCMMLMNYPITA

SEQ ID NO: 221725 - protein, 15 aa, Artificial Sequence
  Description of Artificial Sequence: Synthetic peptide
  Seed: LRMKWMMAMKYPITA
LRMKCMMLMNYPLTA

SEQ ID NO: 221726 - protein, 15 aa, Artificial Sequence
  Description of Artificial Sequence: Synthetic peptide
  Seed: LRMKWMMAMKYPITA
LRMKCMMLMNYPMTA

SEQ ID NO: 221727 - protein, 15 aa, Artificial Sequence
  Description of Artificial Sequence: Synthetic peptide
  Seed: LRMKWMMAMKYPITA
LRMKCMMLMNYPSTA

SEQ ID NO: 221728 - protein, 15 aa, Artificial Sequence
  Description of Artificial Sequence: Synthetic peptide
  Seed: LRMKWMMAMKYPITA
LRMKCMMLMNYPTTA

SEQ ID NO: 221729 - protein, 15 aa, Artificial Sequence
  Description of Artificial Sequence: Synthetic peptide
  Seed: LRMKWMMAMKYPITA
LRMKCMMLMNYPVTA

SEQ ID NO: 221730 - protein, 15 aa, Artificial Sequence
  Description of Artificial Sequence: Synthetic peptide
  Seed: LRMKWMMAMKYPITA
LRMKCMMLMPYPATA

SEQ ID NO: 221731 - protein, 15 aa, Artificial Sequence
  Description of Artificial Sequence: Synthetic peptide
  Seed: LRMKWMMAMKYPITA
LRMKCMMLMPYPCTA

SEQ ID NO: 221732 - protein, 15 aa, Artificial Sequence
  Description of Artificial Sequence: Synthetic peptide
  Seed: LRMKWMMAMKYPITA
LRMKCMMLMPYPFTA

SEQ ID NO: 221733 - protein, 15 aa, Artificial Sequence
  Description of Artificial Sequence: Synthetic peptide
  Seed: LRMKWMMAMKYPITA
LRMKCMMLMPYPITA

SEQ ID NO: 221734 - protein, 15 aa, Artificial Sequence
  Description of Artificial Sequence: Synthetic peptide
  Seed: LRMKWMMAMKYPITA
LRMKCMMLMPYPLTA

SEQ ID NO: 221735 - protein, 15 aa, Artificial Sequence
  Description of Artificial Sequence: Synthetic peptide
  Seed: LRMKWMMAMKYPITA
LRMKCMMLMPYPMTA

SEQ ID NO: 221736 - protein, 15 aa, Artificial Sequence
  Description of Artificial Sequence: Synthetic peptide
  Seed: LRMKWMMAMKYPITA
LRMKCMMLMPYPSTA

SEQ ID NO: 221737 - protein, 15 aa, Artificial Sequence
  Description of Artificial Sequence: Synthetic peptide
  Seed: LRMKWMMAMKYPITA
LRMKCMMLMPYPTTA

SEQ ID NO: 221738 - protein, 15 aa, Artificial Sequence
  Description of Artificial Sequence: Synthetic peptide
  Seed: LRMKWMMAMKYPITA
LRMKCMMLMPYPVTA

SEQ ID NO: 221739 - protein, 15 aa, Artificial Sequence
  Description of Artificial Sequence: Synthetic peptide
  Seed: LRMKWMMAMKYPITA
LRMKCMMLMRYPATA

SEQ ID NO: 221740 - protein, 15 aa, Artificial Sequence
  Description of Artificial Sequence: Synthetic peptide
  Seed: LRMKWMMAMKYPITA
LRMKCMMLMRYPGTA

SEQ ID NO: 221741 - protein, 15 aa, Artificial Sequence
  Description of Artificial Sequence: Synthetic peptide
  Seed: LRMKWMMAMKYPITA
LRMKCMMLMRYPHTA

SEQ ID NO: 221742 - protein, 15 aa, Artificial Sequence
  Description of Artificial Sequence: Synthetic peptide
  Seed: LRMKWMMAMKYPITA
LRMKCMMLMRYPKTA

SEQ ID NO: 221743 - protein, 15 aa, Artificial Sequence
  Description of Artificial Sequence: Synthetic peptide
  Seed: LRMKWMMAMKYPITA
LRMKCMMLMRYPMTA

SEQ ID NO: 221744 - protein, 15 aa, Artificial Sequence
  Description of Artificial Sequence: Synthetic peptide
  Seed: LRMKWMMAMKYPITA
LRMKCMMLMRYPQTA

SEQ ID NO: 221745 - protein, 15 aa, Artificial Sequence
  Description of Artificial Sequence: Synthetic peptide
  Seed: LRMKWMMAMKYPITA
LRMKCMMLMRYPRTA

SEQ ID NO: 221746 - protein, 15 aa, Artificial Sequence
  Description of Artificial Sequence: Synthetic peptide
  Seed: LRMKWMMAMKYPITA
LRMKCMMLMRYPSTA

SEQ ID NO: 221747 - protein, 15 aa, Artificial Sequence
  Description of Artificial Sequence: Synthetic peptide
  Seed: LRMKWMMAMKYPITA
LRMKCMMLMRYPVTA

SEQ ID NO: 221748 - protein, 15 aa, Artificial Sequence
  Description of Artificial Sequence: Synthetic peptide
  Seed: LRMKWMMAMKYPITA
LRMKCMMLMSYPATA

SEQ ID NO: 221749 - protein, 15 aa, Artificial Sequence
  Description of Artificial Sequence: Synthetic peptide
  Seed: LRMKWMMAMKYPITA
LRMKCMMLMSYPCTA

SEQ ID NO: 221750 - protein, 15 aa, Artificial Sequence
  Description of Artificial Sequence: Synthetic peptide
  Seed: LRMKWMMAMKYPITA
LRMKCMMLMSYPFTA

SEQ ID NO: 221751 - protein, 15 aa, Artificial Sequence
  Description of Artificial Sequence: Synthetic peptide
  Seed: LRMKWMMAMKYPITA
LRMKCMMLMSYPGTA

SEQ ID NO: 221752 - protein, 15 aa, Artificial Sequence
  Description of Artificial Sequence: Synthetic peptide
  Seed: LRMKWMMAMKYPITA
LRMKCMMLMSYPITA

SEQ ID NO: 221753 - protein, 15 aa, Artificial Sequence
  Description of Artificial Sequence: Synthetic peptide
  Seed: LRMKWMMAMKYPITA
LRMKCMMLMSYPLTA

SEQ ID NO: 221754 - protein, 15 aa, Artificial Sequence
  Description of Artificial Sequence: Synthetic peptide
  Seed: LRMKWMMAMKYPITA
LRMKCMMLMSYPMTA

SEQ ID NO: 221755 - protein, 15 aa, Artificial Sequence
  Description of Artificial Sequence: Synthetic peptide
  Seed: LRMKWMMAMKYPITA
LRMKCMMLMSYPSTA

SEQ ID NO: 221756 - protein, 15 aa, Artificial Sequence
  Description of Artificial Sequence: Synthetic peptide
  Seed: LRMKWMMAMKYPITA
LRMKCMMLMSYPTTA

SEQ ID NO: 221757 - protein, 15 aa, Artificial Sequence
  Description of Artificial Sequence: Synthetic peptide
  Seed: LRMKWMMAMKYPITA
LRMKCMMLMSYPVTA

SEQ ID NO: 221758 - protein, 15 aa, Artificial Sequence
  Description of Artificial Sequence: Synthetic peptide
  Seed: LRMKWMMAMKYPITA
LRMKCMMLMSYPYTA

SEQ ID NO: 221759 - protein, 15 aa, Artificial Sequence
  Description of Artificial Sequence: Synthetic peptide
  Seed: LRMKWMMAMKYPITA
LRMKCMMLMTYPATA

SEQ ID NO: 221760 - protein, 15 aa, Artificial Sequence
  Description of Artificial Sequence: Synthetic peptide
  Seed: LRMKWMMAMKYPITA
LRMKCMMLMTYPITA

SEQ ID NO: 221761 - protein, 15 aa, Artificial Sequence
  Description of Artificial Sequence: Synthetic peptide
  Seed: LRMKWMMAMKYPITA
LRMKCMMLMTYPLTA

SEQ ID NO: 221762 - protein, 15 aa, Artificial Sequence
  Description of Artificial Sequence: Synthetic peptide
  Seed: LRMKWMMAMKYPITA
LRMKCMMLMTYPMTA

SEQ ID NO: 221763 - protein, 15 aa, Artificial Sequence
  Description of Artificial Sequence: Synthetic peptide
  Seed: LRMKWMMAMKYPITA
LRMKCMMLMTYPSTA

SEQ ID NO: 221764 - protein, 15 aa, Artificial Sequence
  Description of Artificial Sequence: Synthetic peptide
  Seed: LRMKWMMAMKYPITA
LRMKCMMLMTYPTTA

SEQ ID NO: 221765 - protein, 15 aa, Artificial Sequence
  Description of Artificial Sequence: Synthetic peptide
  Seed: LRMKWMMAMKYPITA
LRMKCMMLMTYPVTA

SEQ ID NO: 221766 - protein, 15 aa, Artificial Sequence
  Description of Artificial Sequence: Synthetic peptide
  Seed: LRMKWMMAMKYPITA
LRMKCMMLMVYPATA

SEQ ID NO: 221767 - protein, 15 aa, Artificial Sequence
  Description of Artificial Sequence: Synthetic peptide
  Seed: LRMKWMMAMKYPITA
LRMKCMMLMVYPITA

SEQ ID NO: 221768 - protein, 15 aa, Artificial Sequence
  Description of Artificial Sequence: Synthetic peptide
  Seed: LRMKWMMAMKYPITA
LRMKCMMLMVYPLTA

SEQ ID NO: 221769 - protein, 15 aa, Artificial Sequence
  Description of Artificial Sequence: Synthetic peptide
  Seed: LRMKWMMAMKYPITA
LRMKCMMLMVYPMTA

SEQ ID NO: 221770 - protein, 15 aa, Artificial Sequence
  Description of Artificial Sequence: Synthetic peptide
  Seed: LRMKWMMAMKYPITA
LRMKCMMLMVYPVTA

SEQ ID NO: 221771 - protein, 15 aa, Artificial Sequence
  Description of Artificial Sequence: Synthetic peptide
  Seed: LRMKWMMAMKYPITA
LRMKCMMMMAYPATA

SEQ ID NO: 221772 - protein, 15 aa, Artificial Sequence
  Description of Artificial Sequence: Synthetic peptide
  Seed: LRMKWMMAMKYPITA
LRMKCMMMMAYPCTA

SEQ ID NO: 221773 - protein, 15 aa, Artificial Sequence
  Description of Artificial Sequence: Synthetic peptide
  Seed: LRMKWMMAMKYPITA
LRMKCMMMMAYPFTA

SEQ ID NO: 221774 - protein, 15 aa, Artificial Sequence
  Description of Artificial Sequence: Synthetic peptide
  Seed: LRMKWMMAMKYPITA
LRMKCMMMMAYPGTA

SEQ ID NO: 221775 - protein, 15 aa, Artificial Sequence
  Description of Artificial Sequence: Synthetic peptide
  Seed: LRMKWMMAMKYPITA
LRMKCMMMMAYPHTA

SEQ ID NO: 221776 - protein, 15 aa, Artificial Sequence
  Description of Artificial Sequence: Synthetic peptide
  Seed: LRMKWMMAMKYPITA
LRMKCMMMMAYPITA

SEQ ID NO: 221777 - protein, 15 aa, Artificial Sequence
  Description of Artificial Sequence: Synthetic peptide
  Seed: LRMKWMMAMKYPITA
LRMKCMMMMAYPKTA

SEQ ID NO: 221778 - protein, 15 aa, Artificial Sequence
  Description of Artificial Sequence: Synthetic peptide
  Seed: LRMKWMMAMKYPITA
LRMKCMMMMAYPLTA

SEQ ID NO: 221779 - protein, 15 aa, Artificial Sequence
  Description of Artificial Sequence: Synthetic peptide
  Seed: LRMKWMMAMKYPITA
LRMKCMMMMAYPMTA

SEQ ID NO: 221780 - protein, 15 aa, Artificial Sequence
  Description of Artificial Sequence: Synthetic peptide
  Seed: LRMKWMMAMKYPITA
LRMKCMMMMAYPNTA

SEQ ID NO: 221781 - protein, 15 aa, Artificial Sequence
  Description of Artificial Sequence: Synthetic peptide
  Seed: LRMKWMMAMKYPITA
LRMKCMMMMAYPPTA

SEQ ID NO: 221782 - protein, 15 aa, Artificial Sequence
  Description of Artificial Sequence: Synthetic peptide
  Seed: LRMKWMMAMKYPITA
LRMKCMMMMAYPRTA

SEQ ID NO: 221783 - protein, 15 aa, Artificial Sequence
  Description of Artificial Sequence: Synthetic peptide
  Seed: LRMKWMMAMKYPITA
LRMKCMMMMAYPSTA

SEQ ID NO: 221784 - protein, 15 aa, Artificial Sequence
  Description of Artificial Sequence: Synthetic peptide
  Seed: LRMKWMMAMKYPITA
LRMKCMMMMAYPTTA

SEQ ID NO: 221785 - protein, 15 aa, Artificial Sequence
  Description of Artificial Sequence: Synthetic peptide
  Seed: LRMKWMMAMKYPITA
LRMKCMMMMAYPVTA

SEQ ID NO: 221786 - protein, 15 aa, Artificial Sequence
  Description of Artificial Sequence: Synthetic peptide
  Seed: LRMKWMMAMKYPITA
LRMKCMMMMAYPYTA

SEQ ID NO: 221787 - protein, 15 aa, Artificial Sequence
  Description of Artificial Sequence: Synthetic peptide
  Seed: LRMKWMMAMKYPITA
LRMKCMMMMGYPATA

SEQ ID NO: 221788 - protein, 15 aa, Artificial Sequence
  Description of Artificial Sequence: Synthetic peptide
  Seed: LRMKWMMAMKYPITA
LRMKCMMMMGYPCTA

SEQ ID NO: 221789 - protein, 15 aa, Artificial Sequence
  Description of Artificial Sequence: Synthetic peptide
  Seed: LRMKWMMAMKYPITA
LRMKCMMMMGYPFTA

SEQ ID NO: 221790 - protein, 15 aa, Artificial Sequence
  Description of Artificial Sequence: Synthetic peptide
  Seed: LRMKWMMAMKYPITA
LRMKCMMMMGYPGTA

SEQ ID NO: 221791 - protein, 15 aa, Artificial Sequence
  Description of Artificial Sequence: Synthetic peptide
  Seed: LRMKWMMAMKYPITA
LRMKCMMMMGYPITA

SEQ ID NO: 221792 - protein, 15 aa, Artificial Sequence
  Description of Artificial Sequence: Synthetic peptide
  Seed: LRMKWMMAMKYPITA
LRMKCMMMMGYPLTA

SEQ ID NO: 221793 - protein, 15 aa, Artificial Sequence
  Description of Artificial Sequence: Synthetic peptide
  Seed: LRMKWMMAMKYPITA
LRMKCMMMMGYPMTA

SEQ ID NO: 221794 - protein, 15 aa, Artificial Sequence
  Description of Artificial Sequence: Synthetic peptide
  Seed: LRMKWMMAMKYPITA
LRMKCMMMMGYPNTA

SEQ ID NO: 221795 - protein, 15 aa, Artificial Sequence
  Description of Artificial Sequence: Synthetic peptide
  Seed: LRMKWMMAMKYPITA
LRMKCMMMMGYPSTA

SEQ ID NO: 221796 - protein, 15 aa, Artificial Sequence
  Description of Artificial Sequence: Synthetic peptide
  Seed: LRMKWMMAMKYPITA
LRMKCMMMMGYPTTA

SEQ ID NO: 221797 - protein, 15 aa, Artificial Sequence
  Description of Artificial Sequence: Synthetic peptide
  Seed: LRMKWMMAMKYPITA
LRMKCMMMMGYPVTA

SEQ ID NO: 221798 - protein, 15 aa, Artificial Sequence
  Description of Artificial Sequence: Synthetic peptide
  Seed: LRMKWMMAMKYPITA
LRMKCMMMMGYPYTA

SEQ ID NO: 221799 - protein, 15 aa, Artificial Sequence
  Description of Artificial Sequence: Synthetic peptide
  Seed: LRMKWMMAMKYPITA
LRMKCMMMMHYPITA

SEQ ID NO: 221800 - protein, 15 aa, Artificial Sequence
  Description of Artificial Sequence: Synthetic peptide
  Seed: LRMKWMMAMKYPITA
LRMKCMMMMHYPLTA

SEQ ID NO: 221801 - protein, 15 aa, Artificial Sequence
  Description of Artificial Sequence: Synthetic peptide
  Seed: LRMKWMMAMKYPITA
LRMKCMMMMHYPVTA

SEQ ID NO: 221802 - protein, 15 aa, Artificial Sequence
  Description of Artificial Sequence: Synthetic peptide
  Seed: LRMKWMMAMKYPITA
LRMKCMMMMIYPATA

SEQ ID NO: 221803 - protein, 15 aa, Artificial Sequence
  Description of Artificial Sequence: Synthetic peptide
  Seed: LRMKWMMAMKYPITA
LRMKCMMMMIYPITA

SEQ ID NO: 221804 - protein, 15 aa, Artificial Sequence
  Description of Artificial Sequence: Synthetic peptide
  Seed: LRMKWMMAMKYPITA
LRMKCMMMMIYPMTA

SEQ ID NO: 221805 - protein, 15 aa, Artificial Sequence
  Description of Artificial Sequence: Synthetic peptide
  Seed: LRMKWMMAMKYPITA
LRMKCMMMMIYPVTA

SEQ ID NO: 221806 - protein, 15 aa, Artificial Sequence
  Description of Artificial Sequence: Synthetic peptide
  Seed: LRMKWMMAMKYPITA
LRMKCMMMMKYPATA

SEQ ID NO: 221807 - protein, 15 aa, Artificial Sequence
  Description of Artificial Sequence: Synthetic peptide
  Seed: LRMKWMMAMKYPITA
LRMKCMMMMKYPKTA

SEQ ID NO: 221808 - protein, 15 aa, Artificial Sequence
  Description of Artificial Sequence: Synthetic peptide
  Seed: LRMKWMMAMKYPITA
LRMKCMMMMKYPMTA

SEQ ID NO: 221809 - protein, 15 aa, Artificial Sequence
  Description of Artificial Sequence: Synthetic peptide
  Seed: LRMKWMMAMKYPITA
LRMKCMMMMKYPQTA

SEQ ID NO: 221810 - protein, 15 aa, Artificial Sequence
  Description of Artificial Sequence: Synthetic peptide
  Seed: LRMKWMMAMKYPITA
LRMKCMMMMKYPRTA

SEQ ID NO: 221811 - protein, 15 aa, Artificial Sequence
  Description of Artificial Sequence: Synthetic peptide
  Seed: LRMKWMMAMKYPITA
LRMKCMMMMKYPSTA

SEQ ID NO: 221812 - protein, 15 aa, Artificial Sequence
  Description of Artificial Sequence: Synthetic peptide
  Seed: LRMKWMMAMKYPITA
LRMKCMMMMKYPVTA

SEQ ID NO: 221813 - protein, 15 aa, Artificial Sequence
  Description of Artificial Sequence: Synthetic peptide
  Seed: LRMKWMMAMKYPITA
LRMKCMMMMNYPATA

SEQ ID NO: 221814 - protein, 15 aa, Artificial Sequence
  Description of Artificial Sequence: Synthetic peptide
  Seed: LRMKWMMAMKYPITA
LRMKCMMMMNYPITA

SEQ ID NO: 221815 - protein, 15 aa, Artificial Sequence
  Description of Artificial Sequence: Synthetic peptide
  Seed: LRMKWMMAMKYPITA
LRMKCMMMMNYPLTA

SEQ ID NO: 221816 - protein, 15 aa, Artificial Sequence
  Description of Artificial Sequence: Synthetic peptide
  Seed: LRMKWMMAMKYPITA
LRMKCMMMMNYPMTA

SEQ ID NO: 221817 - protein, 15 aa, Artificial Sequence
  Description of Artificial Sequence: Synthetic peptide
  Seed: LRMKWMMAMKYPITA
LRMKCMMMMNYPSTA

SEQ ID NO: 221818 - protein, 15 aa, Artificial Sequence
  Description of Artificial Sequence: Synthetic peptide
  Seed: LRMKWMMAMKYPITA
LRMKCMMMMNYPTTA

SEQ ID NO: 221819 - protein, 15 aa, Artificial Sequence
  Description of Artificial Sequence: Synthetic peptide
  Seed: LRMKWMMAMKYPITA
LRMKCMMMMNYPVTA

SEQ ID NO: 221820 - protein, 15 aa, Artificial Sequence
  Description of Artificial Sequence: Synthetic peptide
  Seed: LRMKWMMAMKYPITA
LRMKCMMMMPYPATA

SEQ ID NO: 221821 - protein, 15 aa, Artificial Sequence
  Description of Artificial Sequence: Synthetic peptide
  Seed: LRMKWMMAMKYPITA
LRMKCMMMMPYPCTA

SEQ ID NO: 221822 - protein, 15 aa, Artificial Sequence
  Description of Artificial Sequence: Synthetic peptide
  Seed: LRMKWMMAMKYPITA
LRMKCMMMMPYPFTA

SEQ ID NO: 221823 - protein, 15 aa, Artificial Sequence
  Description of Artificial Sequence: Synthetic peptide
  Seed: LRMKWMMAMKYPITA
LRMKCMMMMPYPITA

SEQ ID NO: 221824 - protein, 15 aa, Artificial Sequence
  Description of Artificial Sequence: Synthetic peptide
  Seed: LRMKWMMAMKYPITA
LRMKCMMMMPYPLTA

SEQ ID NO: 221825 - protein, 15 aa, Artificial Sequence
  Description of Artificial Sequence: Synthetic peptide
  Seed: LRMKWMMAMKYPITA
LRMKCMMMMPYPMTA

SEQ ID NO: 221826 - protein, 15 aa, Artificial Sequence
  Description of Artificial Sequence: Synthetic peptide
  Seed: LRMKWMMAMKYPITA
LRMKCMMMMPYPSTA

SEQ ID NO: 221827 - protein, 15 aa, Artificial Sequence
  Description of Artificial Sequence: Synthetic peptide
  Seed: LRMKWMMAMKYPITA
LRMKCMMMMPYPTTA

SEQ ID NO: 221828 - protein, 15 aa, Artificial Sequence
  Description of Artificial Sequence: Synthetic peptide
  Seed: LRMKWMMAMKYPITA
LRMKCMMMMPYPVTA

SEQ ID NO: 221829 - protein, 15 aa, Artificial Sequence
  Description of Artificial Sequence: Synthetic peptide
  Seed: LRMKWMMAMKYPITA
LRMKCMMMMPYPYTA

SEQ ID NO: 221830 - protein, 15 aa, Artificial Sequence
  Description of Artificial Sequence: Synthetic peptide
  Seed: LRMKWMMAMKYPITA
LRMKCMMMMRYPATA

SEQ ID NO: 221831 - protein, 15 aa, Artificial Sequence
  Description of Artificial Sequence: Synthetic peptide
  Seed: LRMKWMMAMKYPITA
LRMKCMMMMRYPGTA

SEQ ID NO: 221832 - protein, 15 aa, Artificial Sequence
  Description of Artificial Sequence: Synthetic peptide
  Seed: LRMKWMMAMKYPITA
LRMKCMMMMRYPHTA

SEQ ID NO: 221833 - protein, 15 aa, Artificial Sequence
  Description of Artificial Sequence: Synthetic peptide
  Seed: LRMKWMMAMKYPITA
LRMKCMMMMRYPITA

SEQ ID NO: 221834 - protein, 15 aa, Artificial Sequence
  Description of Artificial Sequence: Synthetic peptide
  Seed: LRMKWMMAMKYPITA
LRMKCMMMMRYPKTA

SEQ ID NO: 221835 - protein, 15 aa, Artificial Sequence
  Description of Artificial Sequence: Synthetic peptide
  Seed: LRMKWMMAMKYPITA
LRMKCMMMMRYPLTA

SEQ ID NO: 221836 - protein, 15 aa, Artificial Sequence
  Description of Artificial Sequence: Synthetic peptide
  Seed: LRMKWMMAMKYPITA
LRMKCMMMMRYPMTA

SEQ ID NO: 221837 - protein, 15 aa, Artificial Sequence
  Description of Artificial Sequence: Synthetic peptide
  Seed: LRMKWMMAMKYPITA
LRMKCMMMMRYPQTA

SEQ ID NO: 221838 - protein, 15 aa, Artificial Sequence
  Description of Artificial Sequence: Synthetic peptide
  Seed: LRMKWMMAMKYPITA
LRMKCMMMMRYPRTA

SEQ ID NO: 221839 - protein, 15 aa, Artificial Sequence
  Description of Artificial Sequence: Synthetic peptide
  Seed: LRMKWMMAMKYPITA
LRMKCMMMMRYPSTA

SEQ ID NO: 221840 - protein, 15 aa, Artificial Sequence
  Description of Artificial Sequence: Synthetic peptide
  Seed: LRMKWMMAMKYPITA
LRMKCMMMMRYPTTA

SEQ ID NO: 221841 - protein, 15 aa, Artificial Sequence
  Description of Artificial Sequence: Synthetic peptide
  Seed: LRMKWMMAMKYPITA
LRMKCMMMMRYPVTA

SEQ ID NO: 221842 - protein, 15 aa, Artificial Sequence
  Description of Artificial Sequence: Synthetic peptide
  Seed: LRMKWMMAMKYPITA
LRMKCMMMMRYPYTA

SEQ ID NO: 221843 - protein, 15 aa, Artificial Sequence
  Description of Artificial Sequence: Synthetic peptide
  Seed: LRMKWMMAMKYPITA
LRMKCMMMMSYPATA

SEQ ID NO: 221844 - protein, 15 aa, Artificial Sequence
  Description of Artificial Sequence: Synthetic peptide
  Seed: LRMKWMMAMKYPITA
LRMKCMMMMSYPCTA

SEQ ID NO: 221845 - protein, 15 aa, Artificial Sequence
  Description of Artificial Sequence: Synthetic peptide
  Seed: LRMKWMMAMKYPITA
LRMKCMMMMSYPFTA

SEQ ID NO: 221846 - protein, 15 aa, Artificial Sequence
  Description of Artificial Sequence: Synthetic peptide
  Seed: LRMKWMMAMKYPITA
LRMKCMMMMSYPGTA

SEQ ID NO: 221847 - protein, 15 aa, Artificial Sequence
  Description of Artificial Sequence: Synthetic peptide
  Seed: LRMKWMMAMKYPITA
LRMKCMMMMSYPITA

SEQ ID NO: 221848 - protein, 15 aa, Artificial Sequence
  Description of Artificial Sequence: Synthetic peptide
  Seed: LRMKWMMAMKYPITA
LRMKCMMMMSYPLTA

SEQ ID NO: 221849 - protein, 15 aa, Artificial Sequence
  Description of Artificial Sequence: Synthetic peptide
  Seed: LRMKWMMAMKYPITA
LRMKCMMMMSYPMTA

SEQ ID NO: 221850 - protein, 15 aa, Artificial Sequence
  Description of Artificial Sequence: Synthetic peptide
  Seed: LRMKWMMAMKYPITA
LRMKCMMMMSYPSTA

SEQ ID NO: 221851 - protein, 15 aa, Artificial Sequence
  Description of Artificial Sequence: Synthetic peptide
  Seed: LRMKWMMAMKYPITA
LRMKCMMMMSYPTTA

SEQ ID NO: 221852 - protein, 15 aa, Artificial Sequence
  Description of Artificial Sequence: Synthetic peptide
  Seed: LRMKWMMAMKYPITA
LRMKCMMMMSYPVTA

SEQ ID NO: 221853 - protein, 15 aa, Artificial Sequence
  Description of Artificial Sequence: Synthetic peptide
  Seed: LRMKWMMAMKYPITA
LRMKCMMMMSYPYTA

SEQ ID NO: 221854 - protein, 15 aa, Artificial Sequence
  Description of Artificial Sequence: Synthetic peptide
  Seed: LRMKWMMAMKYPITA
LRMKCMMMMTYPATA

SEQ ID NO: 221855 - protein, 15 aa, Artificial Sequence
  Description of Artificial Sequence: Synthetic peptide
  Seed: LRMKWMMAMKYPITA
LRMKCMMMMTYPFTA

SEQ ID NO: 221856 - protein, 15 aa, Artificial Sequence
  Description of Artificial Sequence: Synthetic peptide
  Seed: LRMKWMMAMKYPITA
LRMKCMMMMTYPITA

SEQ ID NO: 221857 - protein, 15 aa, Artificial Sequence
  Description of Artificial Sequence: Synthetic peptide
  Seed: LRMKWMMAMKYPITA
LRMKCMMMMTYPLTA

SEQ ID NO: 221858 - protein, 15 aa, Artificial Sequence
  Description of Artificial Sequence: Synthetic peptide
  Seed: LRMKWMMAMKYPITA
LRMKCMMMMTYPMTA

SEQ ID NO: 221859 - protein, 15 aa, Artificial Sequence
  Description of Artificial Sequence: Synthetic peptide
  Seed: LRMKWMMAMKYPITA
LRMKCMMMMTYPSTA

SEQ ID NO: 221860 - protein, 15 aa, Artificial Sequence
  Description of Artificial Sequence: Synthetic peptide
  Seed: LRMKWMMAMKYPITA
LRMKCMMMMTYPTTA

SEQ ID NO: 221861 - protein, 15 aa, Artificial Sequence
  Description of Artificial Sequence: Synthetic peptide
  Seed: LRMKWMMAMKYPITA
LRMKCMMMMTYPVTA

SEQ ID NO: 221862 - protein, 15 aa, Artificial Sequence
  Description of Artificial Sequence: Synthetic peptide
  Seed: LRMKWMMAMKYPITA
LRMKCMMMMVYPATA

SEQ ID NO: 221863 - protein, 15 aa, Artificial Sequence
  Description of Artificial Sequence: Synthetic peptide
  Seed: LRMKWMMAMKYPITA
LRMKCMMMMVYPITA

SEQ ID NO: 221864 - protein, 15 aa, Artificial Sequence
  Description of Artificial Sequence: Synthetic peptide
  Seed: LRMKWMMAMKYPITA
LRMKCMMMMVYPLTA

SEQ ID NO: 221865 - protein, 15 aa, Artificial Sequence
  Description of Artificial Sequence: Synthetic peptide
  Seed: LRMKWMMAMKYPITA
LRMKCMMMMVYPMTA

SEQ ID NO: 221866 - protein, 15 aa, Artificial Sequence
  Description of Artificial Sequence: Synthetic peptide
  Seed: LRMKWMMAMKYPITA
LRMKCMMMMVYPSTA

SEQ ID NO: 221867 - protein, 15 aa, Artificial Sequence
  Description of Artificial Sequence: Synthetic peptide
  Seed: LRMKWMMAMKYPITA
LRMKCMMMMVYPTTA

SEQ ID NO: 221868 - protein, 15 aa, Artificial Sequence
  Description of Artificial Sequence: Synthetic peptide
  Seed: LRMKWMMAMKYPITA
LRMKCMMMMVYPVTA

SEQ ID NO: 221869 - protein, 15 aa, Artificial Sequence
  Description of Artificial Sequence: Synthetic peptide
  Seed: LRMKWMMAMKYPITA
LRMKCMMNMAYPATA

SEQ ID NO: 221870 - protein, 15 aa, Artificial Sequence
  Description of Artificial Sequence: Synthetic peptide
  Seed: LRMKWMMAMKYPITA
LRMKCMMNMAYPFTA

SEQ ID NO: 221871 - protein, 15 aa, Artificial Sequence
  Description of Artificial Sequence: Synthetic peptide
  Seed: LRMKWMMAMKYPITA
LRMKCMMNMAYPITA

SEQ ID NO: 221872 - protein, 15 aa, Artificial Sequence
  Description of Artificial Sequence: Synthetic peptide
  Seed: LRMKWMMAMKYPITA
LRMKCMMNMAYPLTA

SEQ ID NO: 221873 - protein, 15 aa, Artificial Sequence
  Description of Artificial Sequence: Synthetic peptide
  Seed: LRMKWMMAMKYPITA
LRMKCMMNMAYPMTA

SEQ ID NO: 221874 - protein, 15 aa, Artificial Sequence
  Description of Artificial Sequence: Synthetic peptide
  Seed: LRMKWMMAMKYPITA
LRMKCMMNMAYPVTA

SEQ ID NO: 221875 - protein, 15 aa, Artificial Sequence
  Description of Artificial Sequence: Synthetic peptide
  Seed: LRMKWMMAMKYPITA
LRMKCMMNMAYPYTA

SEQ ID NO: 221876 - protein, 15 aa, Artificial Sequence
  Description of Artificial Sequence: Synthetic peptide
  Seed: LRMKWMMAMKYPITA
LRMKCMMNMGYPITA

SEQ ID NO: 221877 - protein, 15 aa, Artificial Sequence
  Description of Artificial Sequence: Synthetic peptide
  Seed: LRMKWMMAMKYPITA
LRMKCMMNMGYPLTA

SEQ ID NO: 221878 - protein, 15 aa, Artificial Sequence
  Description of Artificial Sequence: Synthetic peptide
  Seed: LRMKWMMAMKYPITA
LRMKCMMNMGYPVTA

SEQ ID NO: 221879 - protein, 15 aa, Artificial Sequence
  Description of Artificial Sequence: Synthetic peptide
  Seed: LRMKWMMAMKYPITA
LRMKCMMNMIYPITA

SEQ ID NO: 221880 - protein, 15 aa, Artificial Sequence
  Description of Artificial Sequence: Synthetic peptide
  Seed: LRMKWMMAMKYPITA
LRMKCMMNMIYPVTA

SEQ ID NO: 221881 - protein, 15 aa, Artificial Sequence
  Description of Artificial Sequence: Synthetic peptide
  Seed: LRMKWMMAMKYPITA
LRMKCMMNMNYPFTA

SEQ ID NO: 221882 - protein, 15 aa, Artificial Sequence
  Description of Artificial Sequence: Synthetic peptide
  Seed: LRMKWMMAMKYPITA
LRMKCMMNMNYPITA

SEQ ID NO: 221883 - protein, 15 aa, Artificial Sequence
  Description of Artificial Sequence: Synthetic peptide
  Seed: LRMKWMMAMKYPITA
LRMKCMMNMNYPLTA

SEQ ID NO: 221884 - protein, 15 aa, Artificial Sequence
  Description of Artificial Sequence: Synthetic peptide
  Seed: LRMKWMMAMKYPITA
LRMKCMMNMNYPMTA

SEQ ID NO: 221885 - protein, 15 aa, Artificial Sequence
  Description of Artificial Sequence: Synthetic peptide
  Seed: LRMKWMMAMKYPITA
LRMKCMMNMNYPVTA

SEQ ID NO: 221886 - protein, 15 aa, Artificial Sequence
  Description of Artificial Sequence: Synthetic peptide
  Seed: LRMKWMMAMKYPITA
LRMKCMMNMNYPYTA

SEQ ID NO: 221887 - protein, 15 aa, Artificial Sequence
  Description of Artificial Sequence: Synthetic peptide
  Seed: LRMKWMMAMKYPITA
LRMKCMMNMPYPITA

SEQ ID NO: 221888 - protein, 15 aa, Artificial Sequence
  Description of Artificial Sequence: Synthetic peptide
  Seed: LRMKWMMAMKYPITA
LRMKCMMNMPYPLTA

SEQ ID NO: 221889 - protein, 15 aa, Artificial Sequence
  Description of Artificial Sequence: Synthetic peptide
  Seed: LRMKWMMAMKYPITA
LRMKCMMNMPYPVTA

SEQ ID NO: 221890 - protein, 15 aa, Artificial Sequence
  Description of Artificial Sequence: Synthetic peptide
  Seed: LRMKWMMAMKYPITA
LRMKCMMNMSYPFTA

SEQ ID NO: 221891 - protein, 15 aa, Artificial Sequence
  Description of Artificial Sequence: Synthetic peptide
  Seed: LRMKWMMAMKYPITA
LRMKCMMNMSYPITA

SEQ ID NO: 221892 - protein, 15 aa, Artificial Sequence
  Description of Artificial Sequence: Synthetic peptide
  Seed: LRMKWMMAMKYPITA
LRMKCMMNMSYPLTA

SEQ ID NO: 221893 - protein, 15 aa, Artificial Sequence
  Description of Artificial Sequence: Synthetic peptide
  Seed: LRMKWMMAMKYPITA
LRMKCMMNMSYPVTA

SEQ ID NO: 221894 - protein, 15 aa, Artificial Sequence
  Description of Artificial Sequence: Synthetic peptide
  Seed: LRMKWMMAMKYPITA
LRMKCMMNMTYPITA

SEQ ID NO: 221895 - protein, 15 aa, Artificial Sequence
  Description of Artificial Sequence: Synthetic peptide
  Seed: LRMKWMMAMKYPITA
LRMKCMMNMTYPVTA

SEQ ID NO: 221896 - protein, 15 aa, Artificial Sequence
  Description of Artificial Sequence: Synthetic peptide
  Seed: LRMKWMMAMKYPITA
LRMKCMMNMVYPITA

SEQ ID NO: 221897 - protein, 15 aa, Artificial Sequence
  Description of Artificial Sequence: Synthetic peptide
  Seed: LRMKWMMAMKYPITA
LRMKCMMNMVYPVTA

SEQ ID NO: 221898 - protein, 15 aa, Artificial Sequence
  Description of Artificial Sequence: Synthetic peptide
  Seed: LRMKWMMAMKYPITA
LRMKCMMPMAYPITA

SEQ ID NO: 221899 - protein, 15 aa, Artificial Sequence
  Description of Artificial Sequence: Synthetic peptide
  Seed: LRMKWMMAMKYPITA
LRMKCMMPMAYPVTA

SEQ ID NO: 221900 - protein, 15 aa, Artificial Sequence
  Description of Artificial Sequence: Synthetic peptide
  Seed: LRMKWMMAMKYPITA
LRMKCMMQMAYPATA

SEQ ID NO: 221901 - protein, 15 aa, Artificial Sequence
  Description of Artificial Sequence: Synthetic peptide
  Seed: LRMKWMMAMKYPITA
LRMKCMMQMAYPITA

SEQ ID NO: 221902 - protein, 15 aa, Artificial Sequence
  Description of Artificial Sequence: Synthetic peptide
  Seed: LRMKWMMAMKYPITA
LRMKCMMQMAYPLTA

SEQ ID NO: 221903 - protein, 15 aa, Artificial Sequence
  Description of Artificial Sequence: Synthetic peptide
  Seed: LRMKWMMAMKYPITA
LRMKCMMQMAYPMTA

SEQ ID NO: 221904 - protein, 15 aa, Artificial Sequence
  Description of Artificial Sequence: Synthetic peptide
  Seed: LRMKWMMAMKYPITA
LRMKCMMQMAYPSTA

SEQ ID NO: 221905 - protein, 15 aa, Artificial Sequence
  Description of Artificial Sequence: Synthetic peptide
  Seed: LRMKWMMAMKYPITA
LRMKCMMQMAYPTTA

SEQ ID NO: 221906 - protein, 15 aa, Artificial Sequence
  Description of Artificial Sequence: Synthetic peptide
  Seed: LRMKWMMAMKYPITA
LRMKCMMQMAYPVTA

SEQ ID NO: 221907 - protein, 15 aa, Artificial Sequence
  Description of Artificial Sequence: Synthetic peptide
  Seed: LRMKWMMAMKYPITA
LRMKCMMQMGYPATA

SEQ ID NO: 221908 - protein, 15 aa, Artificial Sequence
  Description of Artificial Sequence: Synthetic peptide
  Seed: LRMKWMMAMKYPITA
LRMKCMMQMGYPITA

SEQ ID NO: 221909 - protein, 15 aa, Artificial Sequence
  Description of Artificial Sequence: Synthetic peptide
  Seed: LRMKWMMAMKYPITA
LRMKCMMQMGYPLTA

SEQ ID NO: 221910 - protein, 15 aa, Artificial Sequence
  Description of Artificial Sequence: Synthetic peptide
  Seed: LRMKWMMAMKYPITA
LRMKCMMQMGYPMTA

SEQ ID NO: 221911 - protein, 15 aa, Artificial Sequence
  Description of Artificial Sequence: Synthetic peptide
  Seed: LRMKWMMAMKYPITA
LRMKCMMQMGYPVTA

SEQ ID NO: 221912 - protein, 15 aa, Artificial Sequence
  Description of Artificial Sequence: Synthetic peptide
  Seed: LRMKWMMAMKYPITA
LRMKCMMQMNYPITA

SEQ ID NO: 221913 - protein, 15 aa, Artificial Sequence
  Description of Artificial Sequence: Synthetic peptide
  Seed: LRMKWMMAMKYPITA
LRMKCMMQMNYPLTA

SEQ ID NO: 221914 - protein, 15 aa, Artificial Sequence
  Description of Artificial Sequence: Synthetic peptide
  Seed: LRMKWMMAMKYPITA
LRMKCMMQMNYPVTA

SEQ ID NO: 221915 - protein, 15 aa, Artificial Sequence
  Description of Artificial Sequence: Synthetic peptide
  Seed: LRMKWMMAMKYPITA
LRMKCMMQMPYPITA

SEQ ID NO: 221916 - protein, 15 aa, Artificial Sequence
  Description of Artificial Sequence: Synthetic peptide
  Seed: LRMKWMMAMKYPITA
LRMKCMMQMPYPLTA

SEQ ID NO: 221917 - protein, 15 aa, Artificial Sequence
  Description of Artificial Sequence: Synthetic peptide
  Seed: LRMKWMMAMKYPITA
LRMKCMMQMPYPVTA

SEQ ID NO: 221918 - protein, 15 aa, Artificial Sequence
  Description of Artificial Sequence: Synthetic peptide
  Seed: LRMKWMMAMKYPITA
LRMKCMMQMSYPATA

SEQ ID NO: 221919 - protein, 15 aa, Artificial Sequence
  Description of Artificial Sequence: Synthetic peptide
  Seed: LRMKWMMAMKYPITA
LRMKCMMQMSYPITA

SEQ ID NO: 221920 - protein, 15 aa, Artificial Sequence
  Description of Artificial Sequence: Synthetic peptide
  Seed: LRMKWMMAMKYPITA
LRMKCMMQMSYPLTA

SEQ ID NO: 221921 - protein, 15 aa, Artificial Sequence
  Description of Artificial Sequence: Synthetic peptide
  Seed: LRMKWMMAMKYPITA
LRMKCMMQMSYPMTA

SEQ ID NO: 221922 - protein, 15 aa, Artificial Sequence
  Description of Artificial Sequence: Synthetic peptide
  Seed: LRMKWMMAMKYPITA
LRMKCMMQMSYPVTA

SEQ ID NO: 221923 - protein, 15 aa, Artificial Sequence
  Description of Artificial Sequence: Synthetic peptide
  Seed: LRMKWMMAMKYPITA
LRMKCMMQMTYPITA

SEQ ID NO: 221924 - protein, 15 aa, Artificial Sequence
  Description of Artificial Sequence: Synthetic peptide
  Seed: LRMKWMMAMKYPITA
LRMKCMMQMTYPLTA

SEQ ID NO: 221925 - protein, 15 aa, Artificial Sequence
  Description of Artificial Sequence: Synthetic peptide
  Seed: LRMKWMMAMKYPITA
LRMKCMMQMTYPVTA

SEQ ID NO: 221926 - protein, 15 aa, Artificial Sequence
  Description of Artificial Sequence: Synthetic peptide
  Seed: LRMKWMMAMKYPITA
LRMKCMMQMVYPITA

SEQ ID NO: 221927 - protein, 15 aa, Artificial Sequence
  Description of Artificial Sequence: Synthetic peptide
  Seed: LRMKWMMAMKYPITA
LRMKCMMQMVYPLTA

SEQ ID NO: 221928 - protein, 15 aa, Artificial Sequence
  Description of Artificial Sequence: Synthetic peptide
  Seed: LRMKWMMAMKYPITA
LRMKCMMQMVYPVTA

SEQ ID NO: 221929 - protein, 15 aa, Artificial Sequence
  Description of Artificial Sequence: Synthetic peptide
  Seed: LRMKWMMAMKYPITA
LRMKCMMSMAYPATA

SEQ ID NO: 221930 - protein, 15 aa, Artificial Sequence
  Description of Artificial Sequence: Synthetic peptide
  Seed: LRMKWMMAMKYPITA
LRMKCMMSMAYPCTA

SEQ ID NO: 221931 - protein, 15 aa, Artificial Sequence
  Description of Artificial Sequence: Synthetic peptide
  Seed: LRMKWMMAMKYPITA
LRMKCMMSMAYPFTA

SEQ ID NO: 221932 - protein, 15 aa, Artificial Sequence
  Description of Artificial Sequence: Synthetic peptide
  Seed: LRMKWMMAMKYPITA
LRMKCMMSMAYPGTA

SEQ ID NO: 221933 - protein, 15 aa, Artificial Sequence
  Description of Artificial Sequence: Synthetic peptide
  Seed: LRMKWMMAMKYPITA
LRMKCMMSMAYPITA

SEQ ID NO: 221934 - protein, 15 aa, Artificial Sequence
  Description of Artificial Sequence: Synthetic peptide
  Seed: LRMKWMMAMKYPITA
LRMKCMMSMAYPLTA

SEQ ID NO: 221935 - protein, 15 aa, Artificial Sequence
  Description of Artificial Sequence: Synthetic peptide
  Seed: LRMKWMMAMKYPITA
LRMKCMMSMAYPMTA

SEQ ID NO: 221936 - protein, 15 aa, Artificial Sequence
  Description of Artificial Sequence: Synthetic peptide
  Seed: LRMKWMMAMKYPITA
LRMKCMMSMAYPSTA

SEQ ID NO: 221937 - protein, 15 aa, Artificial Sequence
  Description of Artificial Sequence: Synthetic peptide
  Seed: LRMKWMMAMKYPITA
LRMKCMMSMAYPTTA

SEQ ID NO: 221938 - protein, 15 aa, Artificial Sequence
  Description of Artificial Sequence: Synthetic peptide
  Seed: LRMKWMMAMKYPITA
LRMKCMMSMAYPVTA

SEQ ID NO: 221939 - protein, 15 aa, Artificial Sequence
  Description of Artificial Sequence: Synthetic peptide
  Seed: LRMKWMMAMKYPITA
LRMKCMMSMAYPYTA

SEQ ID NO: 221940 - protein, 15 aa, Artificial Sequence
  Description of Artificial Sequence: Synthetic peptide
  Seed: LRMKWMMAMKYPITA
LRMKCMMSMFYPVTA

SEQ ID NO: 221941 - protein, 15 aa, Artificial Sequence
  Description of Artificial Sequence: Synthetic peptide
  Seed: LRMKWMMAMKYPITA
LRMKCMMSMGYPATA

SEQ ID NO: 221942 - protein, 15 aa, Artificial Sequence
  Description of Artificial Sequence: Synthetic peptide
  Seed: LRMKWMMAMKYPITA
LRMKCMMSMGYPITA

SEQ ID NO: 221943 - protein, 15 aa, Artificial Sequence
  Description of Artificial Sequence: Synthetic peptide
  Seed: LRMKWMMAMKYPITA
LRMKCMMSMGYPLTA

SEQ ID NO: 221944 - protein, 15 aa, Artificial Sequence
  Description of Artificial Sequence: Synthetic peptide
  Seed: LRMKWMMAMKYPITA
LRMKCMMSMGYPMTA

SEQ ID NO: 221945 - protein, 15 aa, Artificial Sequence
  Description of Artificial Sequence: Synthetic peptide
  Seed: LRMKWMMAMKYPITA
LRMKCMMSMGYPVTA

SEQ ID NO: 221946 - protein, 15 aa, Artificial Sequence
  Description of Artificial Sequence: Synthetic peptide
  Seed: LRMKWMMAMKYPITA
LRMKCMMSMNYPITA

SEQ ID NO: 221947 - protein, 15 aa, Artificial Sequence
  Description of Artificial Sequence: Synthetic peptide
  Seed: LRMKWMMAMKYPITA
LRMKCMMSMNYPLTA

SEQ ID NO: 221948 - protein, 15 aa, Artificial Sequence
  Description of Artificial Sequence: Synthetic peptide
  Seed: LRMKWMMAMKYPITA
LRMKCMMSMNYPVTA

SEQ ID NO: 221949 - protein, 15 aa, Artificial Sequence
  Description of Artificial Sequence: Synthetic peptide
  Seed: LRMKWMMAMKYPITA
LRMKCMMSMPYPATA

SEQ ID NO: 221950 - protein, 15 aa, Artificial Sequence
  Description of Artificial Sequence: Synthetic peptide
  Seed: LRMKWMMAMKYPITA
LRMKCMMSMPYPITA

SEQ ID NO: 221951 - protein, 15 aa, Artificial Sequence
  Description of Artificial Sequence: Synthetic peptide
  Seed: LRMKWMMAMKYPITA
LRMKCMMSMPYPLTA

SEQ ID NO: 221952 - protein, 15 aa, Artificial Sequence
  Description of Artificial Sequence: Synthetic peptide
  Seed: LRMKWMMAMKYPITA
LRMKCMMSMPYPMTA

SEQ ID NO: 221953 - protein, 15 aa, Artificial Sequence
  Description of Artificial Sequence: Synthetic peptide
  Seed: LRMKWMMAMKYPITA
LRMKCMMSMPYPVTA

SEQ ID NO: 221954 - protein, 15 aa, Artificial Sequence
  Description of Artificial Sequence: Synthetic peptide
  Seed: LRMKWMMAMKYPITA
LRMKCMMSMSYPATA

SEQ ID NO: 221955 - protein, 15 aa, Artificial Sequence
  Description of Artificial Sequence: Synthetic peptide
  Seed: LRMKWMMAMKYPITA
LRMKCMMSMSYPFTA

SEQ ID NO: 221956 - protein, 15 aa, Artificial Sequence
  Description of Artificial Sequence: Synthetic peptide
  Seed: LRMKWMMAMKYPITA
LRMKCMMSMSYPITA

SEQ ID NO: 221957 - protein, 15 aa, Artificial Sequence
  Description of Artificial Sequence: Synthetic peptide
  Seed: LRMKWMMAMKYPITA
LRMKCMMSMSYPLTA

SEQ ID NO: 221958 - protein, 15 aa, Artificial Sequence
  Description of Artificial Sequence: Synthetic peptide
  Seed: LRMKWMMAMKYPITA
LRMKCMMSMSYPMTA

SEQ ID NO: 221959 - protein, 15 aa, Artificial Sequence
  Description of Artificial Sequence: Synthetic peptide
  Seed: LRMKWMMAMKYPITA
LRMKCMMSMSYPTTA

SEQ ID NO: 221960 - protein, 15 aa, Artificial Sequence
  Description of Artificial Sequence: Synthetic peptide
  Seed: LRMKWMMAMKYPITA
LRMKCMMSMSYPVTA

SEQ ID NO: 221961 - protein, 15 aa, Artificial Sequence
  Description of Artificial Sequence: Synthetic peptide
  Seed: LRMKWMMAMKYPITA
LRMKCMMSMTYPATA

SEQ ID NO: 221962 - protein, 15 aa, Artificial Sequence
  Description of Artificial Sequence: Synthetic peptide
  Seed: LRMKWMMAMKYPITA
LRMKCMMSMTYPITA

SEQ ID NO: 221963 - protein, 15 aa, Artificial Sequence
  Description of Artificial Sequence: Synthetic peptide
  Seed: LRMKWMMAMKYPITA
LRMKCMMSMTYPLTA

SEQ ID NO: 221964 - protein, 15 aa, Artificial Sequence
  Description of Artificial Sequence: Synthetic peptide
  Seed: LRMKWMMAMKYPITA
LRMKCMMSMTYPMTA

SEQ ID NO: 221965 - protein, 15 aa, Artificial Sequence
  Description of Artificial Sequence: Synthetic peptide
  Seed: LRMKWMMAMKYPITA
LRMKCMMSMTYPVTA

SEQ ID NO: 221966 - protein, 15 aa, Artificial Sequence
  Description of Artificial Sequence: Synthetic peptide
  Seed: LRMKWMMAMKYPITA
LRMKCMMSMVYPATA

SEQ ID NO: 221967 - protein, 15 aa, Artificial Sequence
  Description of Artificial Sequence: Synthetic peptide
  Seed: LRMKWMMAMKYPITA
LRMKCMMSMVYPITA

SEQ ID NO: 221968 - protein, 15 aa, Artificial Sequence
  Description of Artificial Sequence: Synthetic peptide
  Seed: LRMKWMMAMKYPITA
LRMKCMMSMVYPLTA

SEQ ID NO: 221969 - protein, 15 aa, Artificial Sequence
  Description of Artificial Sequence: Synthetic peptide
  Seed: LRMKWMMAMKYPITA
LRMKCMMSMVYPVTA

SEQ ID NO: 221970 - protein, 15 aa, Artificial Sequence
  Description of Artificial Sequence: Synthetic peptide
  Seed: LRMKWMMAMKYPITA
LRMKCMMTMAYPATA

SEQ ID NO: 221971 - protein, 15 aa, Artificial Sequence
  Description of Artificial Sequence: Synthetic peptide
  Seed: LRMKWMMAMKYPITA
LRMKCMMTMAYPFTA

SEQ ID NO: 221972 - protein, 15 aa, Artificial Sequence
  Description of Artificial Sequence: Synthetic peptide
  Seed: LRMKWMMAMKYPITA
LRMKCMMTMAYPITA

SEQ ID NO: 221973 - protein, 15 aa, Artificial Sequence
  Description of Artificial Sequence: Synthetic peptide
  Seed: LRMKWMMAMKYPITA
LRMKCMMTMAYPLTA

SEQ ID NO: 221974 - protein, 15 aa, Artificial Sequence
  Description of Artificial Sequence: Synthetic peptide
  Seed: LRMKWMMAMKYPITA
LRMKCMMTMAYPMTA

SEQ ID NO: 221975 - protein, 15 aa, Artificial Sequence
  Description of Artificial Sequence: Synthetic peptide
  Seed: LRMKWMMAMKYPITA
LRMKCMMTMAYPSTA

SEQ ID NO: 221976 - protein, 15 aa, Artificial Sequence
  Description of Artificial Sequence: Synthetic peptide
  Seed: LRMKWMMAMKYPITA
LRMKCMMTMAYPTTA

SEQ ID NO: 221977 - protein, 15 aa, Artificial Sequence
  Description of Artificial Sequence: Synthetic peptide
  Seed: LRMKWMMAMKYPITA
LRMKCMMTMAYPVTA

SEQ ID NO: 221978 - protein, 15 aa, Artificial Sequence
  Description of Artificial Sequence: Synthetic peptide
  Seed: LRMKWMMAMKYPITA
LRMKCMMTMAYPYTA

SEQ ID NO: 221979 - protein, 15 aa, Artificial Sequence
  Description of Artificial Sequence: Synthetic peptide
  Seed: LRMKWMMAMKYPITA
LRMKCMMTMFYPITA

SEQ ID NO: 221980 - protein, 15 aa, Artificial Sequence
  Description of Artificial Sequence: Synthetic peptide
  Seed: LRMKWMMAMKYPITA
LRMKCMMTMFYPLTA

SEQ ID NO: 221981 - protein, 15 aa, Artificial Sequence
  Description of Artificial Sequence: Synthetic peptide
  Seed: LRMKWMMAMKYPITA
LRMKCMMTMFYPVTA

SEQ ID NO: 221982 - protein, 15 aa, Artificial Sequence
  Description of Artificial Sequence: Synthetic peptide
  Seed: LRMKWMMAMKYPITA
LRMKCMMTMGYPATA

SEQ ID NO: 221983 - protein, 15 aa, Artificial Sequence
  Description of Artificial Sequence: Synthetic peptide
  Seed: LRMKWMMAMKYPITA
LRMKCMMTMGYPFTA

SEQ ID NO: 221984 - protein, 15 aa, Artificial Sequence
  Description of Artificial Sequence: Synthetic peptide
  Seed: LRMKWMMAMKYPITA
LRMKCMMTMGYPITA

SEQ ID NO: 221985 - protein, 15 aa, Artificial Sequence
  Description of Artificial Sequence: Synthetic peptide
  Seed: LRMKWMMAMKYPITA
LRMKCMMTMGYPLTA

SEQ ID NO: 221986 - protein, 15 aa, Artificial Sequence
  Description of Artificial Sequence: Synthetic peptide
  Seed: LRMKWMMAMKYPITA
LRMKCMMTMGYPMTA

SEQ ID NO: 221987 - protein, 15 aa, Artificial Sequence
  Description of Artificial Sequence: Synthetic peptide
  Seed: LRMKWMMAMKYPITA
LRMKCMMTMGYPVTA

SEQ ID NO: 221988 - protein, 15 aa, Artificial Sequence
  Description of Artificial Sequence: Synthetic peptide
  Seed: LRMKWMMAMKYPITA
LRMKCMMTMIYPITA

SEQ ID NO: 221989 - protein, 15 aa, Artificial Sequence
  Description of Artificial Sequence: Synthetic peptide
  Seed: LRMKWMMAMKYPITA
LRMKCMMTMNYPITA

SEQ ID NO: 221990 - protein, 15 aa, Artificial Sequence
  Description of Artificial Sequence: Synthetic peptide
  Seed: LRMKWMMAMKYPITA
LRMKCMMTMNYPLTA

SEQ ID NO: 221991 - protein, 15 aa, Artificial Sequence
  Description of Artificial Sequence: Synthetic peptide
  Seed: LRMKWMMAMKYPITA
LRMKCMMTMNYPVTA

SEQ ID NO: 221992 - protein, 15 aa, Artificial Sequence
  Description of Artificial Sequence: Synthetic peptide
  Seed: LRMKWMMAMKYPITA
LRMKCMMTMPYPATA

SEQ ID NO: 221993 - protein, 15 aa, Artificial Sequence
  Description of Artificial Sequence: Synthetic peptide
  Seed: LRMKWMMAMKYPITA
LRMKCMMTMPYPITA

SEQ ID NO: 221994 - protein, 15 aa, Artificial Sequence
  Description of Artificial Sequence: Synthetic peptide
  Seed: LRMKWMMAMKYPITA
LRMKCMMTMPYPLTA

SEQ ID NO: 221995 - protein, 15 aa, Artificial Sequence
  Description of Artificial Sequence: Synthetic peptide
  Seed: LRMKWMMAMKYPITA
LRMKCMMTMPYPMTA

SEQ ID NO: 221996 - protein, 15 aa, Artificial Sequence
  Description of Artificial Sequence: Synthetic peptide
  Seed: LRMKWMMAMKYPITA
LRMKCMMTMPYPVTA

SEQ ID NO: 221997 - protein, 15 aa, Artificial Sequence
  Description of Artificial Sequence: Synthetic peptide
  Seed: LRMKWMMAMKYPITA
LRMKCMMTMSYPATA

SEQ ID NO: 221998 - protein, 15 aa, Artificial Sequence
  Description of Artificial Sequence: Synthetic peptide
  Seed: LRMKWMMAMKYPITA
LRMKCMMTMSYPFTA

SEQ ID NO: 221999 - protein, 15 aa, Artificial Sequence
  Description of Artificial Sequence: Synthetic peptide
  Seed: LRMKWMMAMKYPITA
LRMKCMMTMSYPITA

SEQ ID NO: 222000 - protein, 15 aa, Artificial Sequence
  Description of Artificial Sequence: Synthetic peptide
  Seed: LRMKWMMAMKYPITA
LRMKCMMTMSYPLTA

SEQ ID NO: 222001 - protein, 15 aa, Artificial Sequence
  Description of Artificial Sequence: Synthetic peptide
  Seed: LRMKWMMAMKYPITA
LRMKCMMTMSYPMTA

SEQ ID NO: 222002 - protein, 15 aa, Artificial Sequence
  Description of Artificial Sequence: Synthetic peptide
  Seed: LRMKWMMAMKYPITA
LRMKCMMTMSYPVTA

SEQ ID NO: 222003 - protein, 15 aa, Artificial Sequence
  Description of Artificial Sequence: Synthetic peptide
  Seed: LRMKWMMAMKYPITA
LRMKCMMTMTYPFTA

SEQ ID NO: 222004 - protein, 15 aa, Artificial Sequence
  Description of Artificial Sequence: Synthetic peptide
  Seed: LRMKWMMAMKYPITA
LRMKCMMTMTYPITA

SEQ ID NO: 222005 - protein, 15 aa, Artificial Sequence
  Description of Artificial Sequence: Synthetic peptide
  Seed: LRMKWMMAMKYPITA
LRMKCMMTMTYPLTA

SEQ ID NO: 222006 - protein, 15 aa, Artificial Sequence
  Description of Artificial Sequence: Synthetic peptide
  Seed: LRMKWMMAMKYPITA
LRMKCMMTMTYPVTA

SEQ ID NO: 222007 - protein, 15 aa, Artificial Sequence
  Description of Artificial Sequence: Synthetic peptide
  Seed: LRMKWMMAMKYPITA
LRMKCMMTMVYPITA

SEQ ID NO: 222008 - protein, 15 aa, Artificial Sequence
  Description of Artificial Sequence: Synthetic peptide
  Seed: LRMKWMMAMKYPITA
LRMKCMMTMVYPLTA

SEQ ID NO: 222009 - protein, 15 aa, Artificial Sequence
  Description of Artificial Sequence: Synthetic peptide
  Seed: LRMKWMMAMKYPITA
LRMKCMMTMVYPVTA

SEQ ID NO: 222010 - protein, 15 aa, Artificial Sequence
  Description of Artificial Sequence: Synthetic peptide
  Seed: LRMKWMMAMKYPITA
LRMKCMMVMAYPATA

SEQ ID NO: 222011 - protein, 15 aa, Artificial Sequence
  Description of Artificial Sequence: Synthetic peptide
  Seed: LRMKWMMAMKYPITA
LRMKCMMVMAYPCTA

SEQ ID NO: 222012 - protein, 15 aa, Artificial Sequence
  Description of Artificial Sequence: Synthetic peptide
  Seed: LRMKWMMAMKYPITA
LRMKCMMVMAYPFTA

SEQ ID NO: 222013 - protein, 15 aa, Artificial Sequence
  Description of Artificial Sequence: Synthetic peptide
  Seed: LRMKWMMAMKYPITA
LRMKCMMVMAYPGTA

SEQ ID NO: 222014 - protein, 15 aa, Artificial Sequence
  Description of Artificial Sequence: Synthetic peptide
  Seed: LRMKWMMAMKYPITA
LRMKCMMVMAYPITA

SEQ ID NO: 222015 - protein, 15 aa, Artificial Sequence
  Description of Artificial Sequence: Synthetic peptide
  Seed: LRMKWMMAMKYPITA
LRMKCMMVMAYPLTA

SEQ ID NO: 222016 - protein, 15 aa, Artificial Sequence
  Description of Artificial Sequence: Synthetic peptide
  Seed: LRMKWMMAMKYPITA
LRMKCMMVMAYPMTA

SEQ ID NO: 222017 - protein, 15 aa, Artificial Sequence
  Description of Artificial Sequence: Synthetic peptide
  Seed: LRMKWMMAMKYPITA
LRMKCMMVMAYPSTA

SEQ ID NO: 222018 - protein, 15 aa, Artificial Sequence
  Description of Artificial Sequence: Synthetic peptide
  Seed: LRMKWMMAMKYPITA
LRMKCMMVMAYPTTA

SEQ ID NO: 222019 - protein, 15 aa, Artificial Sequence
  Description of Artificial Sequence: Synthetic peptide
  Seed: LRMKWMMAMKYPITA
LRMKCMMVMAYPVTA

SEQ ID NO: 222020 - protein, 15 aa, Artificial Sequence
  Description of Artificial Sequence: Synthetic peptide
  Seed: LRMKWMMAMKYPITA
LRMKCMMVMGYPATA

SEQ ID NO: 222021 - protein, 15 aa, Artificial Sequence
  Description of Artificial Sequence: Synthetic peptide
  Seed: LRMKWMMAMKYPITA
LRMKCMMVMGYPITA

SEQ ID NO: 222022 - protein, 15 aa, Artificial Sequence
  Description of Artificial Sequence: Synthetic peptide
  Seed: LRMKWMMAMKYPITA
LRMKCMMVMGYPLTA

SEQ ID NO: 222023 - protein, 15 aa, Artificial Sequence
  Description of Artificial Sequence: Synthetic peptide
  Seed: LRMKWMMAMKYPITA
LRMKCMMVMGYPMTA

SEQ ID NO: 222024 - protein, 15 aa, Artificial Sequence
  Description of Artificial Sequence: Synthetic peptide
  Seed: LRMKWMMAMKYPITA
LRMKCMMVMGYPSTA

SEQ ID NO: 222025 - protein, 15 aa, Artificial Sequence
  Description of Artificial Sequence: Synthetic peptide
  Seed: LRMKWMMAMKYPITA
LRMKCMMVMGYPTTA

SEQ ID NO: 222026 - protein, 15 aa, Artificial Sequence
  Description of Artificial Sequence: Synthetic peptide
  Seed: LRMKWMMAMKYPITA
LRMKCMMVMGYPVTA

SEQ ID NO: 222027 - protein, 15 aa, Artificial Sequence
  Description of Artificial Sequence: Synthetic peptide
  Seed: LRMKWMMAMKYPITA
LRMKCMMVMKYPATA

SEQ ID NO: 222028 - protein, 15 aa, Artificial Sequence
  Description of Artificial Sequence: Synthetic peptide
  Seed: LRMKWMMAMKYPITA
LRMKCMMVMKYPRTA

SEQ ID NO: 222029 - protein, 15 aa, Artificial Sequence
  Description of Artificial Sequence: Synthetic peptide
  Seed: LRMKWMMAMKYPITA
LRMKCMMVMKYPSTA

SEQ ID NO: 222030 - protein, 15 aa, Artificial Sequence
  Description of Artificial Sequence: Synthetic peptide
  Seed: LRMKWMMAMKYPITA
LRMKCMMVMNYPATA

SEQ ID NO: 222031 - protein, 15 aa, Artificial Sequence
  Description of Artificial Sequence: Synthetic peptide
  Seed: LRMKWMMAMKYPITA
LRMKCMMVMNYPITA

SEQ ID NO: 222032 - protein, 15 aa, Artificial Sequence
  Description of Artificial Sequence: Synthetic peptide
  Seed: LRMKWMMAMKYPITA
LRMKCMMVMNYPLTA

SEQ ID NO: 222033 - protein, 15 aa, Artificial Sequence
  Description of Artificial Sequence: Synthetic peptide
  Seed: LRMKWMMAMKYPITA
LRMKCMMVMNYPVTA

SEQ ID NO: 222034 - protein, 15 aa, Artificial Sequence
  Description of Artificial Sequence: Synthetic peptide
  Seed: LRMKWMMAMKYPITA
LRMKCMMVMPYPATA

SEQ ID NO: 222035 - protein, 15 aa, Artificial Sequence
  Description of Artificial Sequence: Synthetic peptide
  Seed: LRMKWMMAMKYPITA
LRMKCMMVMPYPITA

SEQ ID NO: 222036 - protein, 15 aa, Artificial Sequence
  Description of Artificial Sequence: Synthetic peptide
  Seed: LRMKWMMAMKYPITA
LRMKCMMVMPYPLTA

SEQ ID NO: 222037 - protein, 15 aa, Artificial Sequence
  Description of Artificial Sequence: Synthetic peptide
  Seed: LRMKWMMAMKYPITA
LRMKCMMVMPYPMTA

SEQ ID NO: 222038 - protein, 15 aa, Artificial Sequence
  Description of Artificial Sequence: Synthetic peptide
  Seed: LRMKWMMAMKYPITA
LRMKCMMVMPYPTTA

SEQ ID NO: 222039 - protein, 15 aa, Artificial Sequence
  Description of Artificial Sequence: Synthetic peptide
  Seed: LRMKWMMAMKYPITA
LRMKCMMVMPYPVTA

SEQ ID NO: 222040 - protein, 15 aa, Artificial Sequence
  Description of Artificial Sequence: Synthetic peptide
  Seed: LRMKWMMAMKYPITA
LRMKCMMVMRYPATA

SEQ ID NO: 222041 - protein, 15 aa, Artificial Sequence
  Description of Artificial Sequence: Synthetic peptide
  Seed: LRMKWMMAMKYPITA
LRMKCMMVMRYPGTA

SEQ ID NO: 222042 - protein, 15 aa, Artificial Sequence
  Description of Artificial Sequence: Synthetic peptide
  Seed: LRMKWMMAMKYPITA
LRMKCMMVMRYPHTA

SEQ ID NO: 222043 - protein, 15 aa, Artificial Sequence
  Description of Artificial Sequence: Synthetic peptide
  Seed: LRMKWMMAMKYPITA
LRMKCMMVMRYPQTA

SEQ ID NO: 222044 - protein, 15 aa, Artificial Sequence
  Description of Artificial Sequence: Synthetic peptide
  Seed: LRMKWMMAMKYPITA
LRMKCMMVMRYPRTA

SEQ ID NO: 222045 - protein, 15 aa, Artificial Sequence
  Description of Artificial Sequence: Synthetic peptide
  Seed: LRMKWMMAMKYPITA
LRMKCMMVMRYPSTA

SEQ ID NO: 222046 - protein, 15 aa, Artificial Sequence
  Description of Artificial Sequence: Synthetic peptide
  Seed: LRMKWMMAMKYPITA
LRMKCMMVMRYPVTA

SEQ ID NO: 222047 - protein, 15 aa, Artificial Sequence
  Description of Artificial Sequence: Synthetic peptide
  Seed: LRMKWMMAMKYPITA
LRMKCMMVMRYPYTA

SEQ ID NO: 222048 - protein, 15 aa, Artificial Sequence
  Description of Artificial Sequence: Synthetic peptide
  Seed: LRMKWMMAMKYPITA
LRMKCMMVMSYPATA

SEQ ID NO: 222049 - protein, 15 aa, Artificial Sequence
  Description of Artificial Sequence: Synthetic peptide
  Seed: LRMKWMMAMKYPITA
LRMKCMMVMSYPFTA

SEQ ID NO: 222050 - protein, 15 aa, Artificial Sequence
  Description of Artificial Sequence: Synthetic peptide
  Seed: LRMKWMMAMKYPITA
LRMKCMMVMSYPITA

SEQ ID NO: 222051 - protein, 15 aa, Artificial Sequence
  Description of Artificial Sequence: Synthetic peptide
  Seed: LRMKWMMAMKYPITA
LRMKCMMVMSYPLTA

SEQ ID NO: 222052 - protein, 15 aa, Artificial Sequence
  Description of Artificial Sequence: Synthetic peptide
  Seed: LRMKWMMAMKYPITA
LRMKCMMVMSYPMTA

SEQ ID NO: 222053 - protein, 15 aa, Artificial Sequence
  Description of Artificial Sequence: Synthetic peptide
  Seed: LRMKWMMAMKYPITA
LRMKCMMVMSYPSTA

SEQ ID NO: 222054 - protein, 15 aa, Artificial Sequence
  Description of Artificial Sequence: Synthetic peptide
  Seed: LRMKWMMAMKYPITA
LRMKCMMVMSYPTTA

SEQ ID NO: 222055 - protein, 15 aa, Artificial Sequence
  Description of Artificial Sequence: Synthetic peptide
  Seed: LRMKWMMAMKYPITA
LRMKCMMVMSYPVTA

SEQ ID NO: 222056 - protein, 15 aa, Artificial Sequence
  Description of Artificial Sequence: Synthetic peptide
  Seed: LRMKWMMAMKYPITA
LRMKCMMVMTYPATA

SEQ ID NO: 222057 - protein, 15 aa, Artificial Sequence
  Description of Artificial Sequence: Synthetic peptide
  Seed: LRMKWMMAMKYPITA
LRMKCMMVMTYPITA

SEQ ID NO: 222058 - protein, 15 aa, Artificial Sequence
  Description of Artificial Sequence: Synthetic peptide
  Seed: LRMKWMMAMKYPITA
LRMKCMMVMTYPLTA

SEQ ID NO: 222059 - protein, 15 aa, Artificial Sequence
  Description of Artificial Sequence: Synthetic peptide
  Seed: LRMKWMMAMKYPITA
LRMKCMMVMTYPVTA

SEQ ID NO: 222060 - protein, 15 aa, Artificial Sequence
  Description of Artificial Sequence: Synthetic peptide
  Seed: LRMKWMMAMKYPITA
LRMKCMMVMVYPVTA

SEQ ID NO: 222061 - protein, 15 aa, Artificial Sequence
  Description of Artificial Sequence: Synthetic peptide
  Seed: LRMKWMMAMKYPITA
LRMKCMMWMAYPITA

SEQ ID NO: 222062 - protein, 15 aa, Artificial Sequence
  Description of Artificial Sequence: Synthetic peptide
  Seed: LRMKWMMAMKYPITA
LRMKCMMWMAYPLTA

SEQ ID NO: 222063 - protein, 15 aa, Artificial Sequence
  Description of Artificial Sequence: Synthetic peptide
  Seed: LRMKWMMAMKYPITA
LRMKCMMWMAYPVTA

SEQ ID NO: 222064 - protein, 15 aa, Artificial Sequence
  Description of Artificial Sequence: Synthetic peptide
  Seed: LRMKWMMAMKYPITA
LRMKDMMAMAYPATA

SEQ ID NO: 222065 - protein, 15 aa, Artificial Sequence
  Description of Artificial Sequence: Synthetic peptide
  Seed: LRMKWMMAMKYPITA
LRMKDMMAMAYPITA

SEQ ID NO: 222066 - protein, 15 aa, Artificial Sequence
  Description of Artificial Sequence: Synthetic peptide
  Seed: LRMKWMMAMKYPITA
LRMKDMMAMAYPLTA

SEQ ID NO: 222067 - protein, 15 aa, Artificial Sequence
  Description of Artificial Sequence: Synthetic peptide
  Seed: LRMKWMMAMKYPITA
LRMKDMMAMAYPMTA

SEQ ID NO: 222068 - protein, 15 aa, Artificial Sequence
  Description of Artificial Sequence: Synthetic peptide
  Seed: LRMKWMMAMKYPITA
LRMKDMMAMAYPVTA

SEQ ID NO: 222069 - protein, 15 aa, Artificial Sequence
  Description of Artificial Sequence: Synthetic peptide
  Seed: LRMKWMMAMKYPITA
LRMKDMMAMGYPLTA

SEQ ID NO: 222070 - protein, 15 aa, Artificial Sequence
  Description of Artificial Sequence: Synthetic peptide
  Seed: LRMKWMMAMKYPITA
LRMKDMMAMSYPITA

SEQ ID NO: 222071 - protein, 15 aa, Artificial Sequence
  Description of Artificial Sequence: Synthetic peptide
  Seed: LRMKWMMAMKYPITA
LRMKDMMAMSYPLTA

SEQ ID NO: 222072 - protein, 15 aa, Artificial Sequence
  Description of Artificial Sequence: Synthetic peptide
  Seed: LRMKWMMAMKYPITA
LRMKDMMAMSYPVTA

SEQ ID NO: 222073 - protein, 15 aa, Artificial Sequence
  Description of Artificial Sequence: Synthetic peptide
  Seed: LRMKWMMAMKYPITA
LRMKDMMIMGYPITA

SEQ ID NO: 222074 - protein, 15 aa, Artificial Sequence
  Description of Artificial Sequence: Synthetic peptide
  Seed: LRMKWMMAMKYPITA
LRMKDMMIMGYPLTA

SEQ ID NO: 222075 - protein, 15 aa, Artificial Sequence
  Description of Artificial Sequence: Synthetic peptide
  Seed: LRMKWMMAMKYPITA
LRMKDMMIMGYPMTA

SEQ ID NO: 222076 - protein, 15 aa, Artificial Sequence
  Description of Artificial Sequence: Synthetic peptide
  Seed: LRMKWMMAMKYPITA
LRMKDMMIMGYPVTA

SEQ ID NO: 222077 - protein, 15 aa, Artificial Sequence
  Description of Artificial Sequence: Synthetic peptide
  Seed: LRMKWMMAMKYPITA
LRMKDMMIMSYPLTA

SEQ ID NO: 222078 - protein, 15 aa, Artificial Sequence
  Description of Artificial Sequence: Synthetic peptide
  Seed: LRMKWMMAMKYPITA
LRMKDMMIMSYPMTA

SEQ ID NO: 222079 - protein, 15 aa, Artificial Sequence
  Description of Artificial Sequence: Synthetic peptide
  Seed: LRMKWMMAMKYPITA
LRMKDMMIMSYPVTA

SEQ ID NO: 222080 - protein, 15 aa, Artificial Sequence
  Description of Artificial Sequence: Synthetic peptide
  Seed: LRMKWMMAMKYPITA
LRMKDMMLMAYPATA

SEQ ID NO: 222081 - protein, 15 aa, Artificial Sequence
  Description of Artificial Sequence: Synthetic peptide
  Seed: LRMKWMMAMKYPITA
LRMKDMMLMAYPITA

SEQ ID NO: 222082 - protein, 15 aa, Artificial Sequence
  Description of Artificial Sequence: Synthetic peptide
  Seed: LRMKWMMAMKYPITA
LRMKDMMLMAYPLTA

SEQ ID NO: 222083 - protein, 15 aa, Artificial Sequence
  Description of Artificial Sequence: Synthetic peptide
  Seed: LRMKWMMAMKYPITA
LRMKDMMLMAYPMTA

SEQ ID NO: 222084 - protein, 15 aa, Artificial Sequence
  Description of Artificial Sequence: Synthetic peptide
  Seed: LRMKWMMAMKYPITA
LRMKDMMLMAYPSTA

SEQ ID NO: 222085 - protein, 15 aa, Artificial Sequence
  Description of Artificial Sequence: Synthetic peptide
  Seed: LRMKWMMAMKYPITA
LRMKDMMLMAYPTTA

SEQ ID NO: 222086 - protein, 15 aa, Artificial Sequence
  Description of Artificial Sequence: Synthetic peptide
  Seed: LRMKWMMAMKYPITA
LRMKDMMLMAYPVTA

SEQ ID NO: 222087 - protein, 15 aa, Artificial Sequence
  Description of Artificial Sequence: Synthetic peptide
  Seed: LRMKWMMAMKYPITA
LRMKDMMLMGYPATA

SEQ ID NO: 222088 - protein, 15 aa, Artificial Sequence
  Description of Artificial Sequence: Synthetic peptide
  Seed: LRMKWMMAMKYPITA
LRMKDMMLMGYPITA

SEQ ID NO: 222089 - protein, 15 aa, Artificial Sequence
  Description of Artificial Sequence: Synthetic peptide
  Seed: LRMKWMMAMKYPITA
LRMKDMMLMGYPLTA

SEQ ID NO: 222090 - protein, 15 aa, Artificial Sequence
  Description of Artificial Sequence: Synthetic peptide
  Seed: LRMKWMMAMKYPITA
LRMKDMMLMGYPMTA

SEQ ID NO: 222091 - protein, 15 aa, Artificial Sequence
  Description of Artificial Sequence: Synthetic peptide
  Seed: LRMKWMMAMKYPITA
LRMKDMMLMGYPVTA

SEQ ID NO: 222092 - protein, 15 aa, Artificial Sequence
  Description of Artificial Sequence: Synthetic peptide
  Seed: LRMKWMMAMKYPITA
LRMKDMMLMPYPITA

SEQ ID NO: 222093 - protein, 15 aa, Artificial Sequence
  Description of Artificial Sequence: Synthetic peptide
  Seed: LRMKWMMAMKYPITA
LRMKDMMLMPYPLTA

SEQ ID NO: 222094 - protein, 15 aa, Artificial Sequence
  Description of Artificial Sequence: Synthetic peptide
  Seed: LRMKWMMAMKYPITA
LRMKDMMLMPYPVTA

SEQ ID NO: 222095 - protein, 15 aa, Artificial Sequence
  Description of Artificial Sequence: Synthetic peptide
  Seed: LRMKWMMAMKYPITA
LRMKDMMLMSYPATA

SEQ ID NO: 222096 - protein, 15 aa, Artificial Sequence
  Description of Artificial Sequence: Synthetic peptide
  Seed: LRMKWMMAMKYPITA
LRMKDMMLMSYPITA

SEQ ID NO: 222097 - protein, 15 aa, Artificial Sequence
  Description of Artificial Sequence: Synthetic peptide
  Seed: LRMKWMMAMKYPITA
LRMKDMMLMSYPLTA

SEQ ID NO: 222098 - protein, 15 aa, Artificial Sequence
  Description of Artificial Sequence: Synthetic peptide
  Seed: LRMKWMMAMKYPITA
LRMKDMMLMSYPMTA

SEQ ID NO: 222099 - protein, 15 aa, Artificial Sequence
  Description of Artificial Sequence: Synthetic peptide
  Seed: LRMKWMMAMKYPITA
LRMKDMMLMSYPVTA

SEQ ID NO: 222100 - protein, 15 aa, Artificial Sequence
  Description of Artificial Sequence: Synthetic peptide
  Seed: LRMKWMMAMKYPITA
LRMKDMMLMTYPITA

SEQ ID NO: 222101 - protein, 15 aa, Artificial Sequence
  Description of Artificial Sequence: Synthetic peptide
  Seed: LRMKWMMAMKYPITA
LRMKDMMLMTYPLTA

SEQ ID NO: 222102 - protein, 15 aa, Artificial Sequence
  Description of Artificial Sequence: Synthetic peptide
  Seed: LRMKWMMAMKYPITA
LRMKDMMLMTYPVTA

SEQ ID NO: 222103 - protein, 15 aa, Artificial Sequence
  Description of Artificial Sequence: Synthetic peptide
  Seed: LRMKWMMAMKYPITA
LRMKDMMMMAYPATA

SEQ ID NO: 222104 - protein, 15 aa, Artificial Sequence
  Description of Artificial Sequence: Synthetic peptide
  Seed: LRMKWMMAMKYPITA
LRMKDMMMMAYPITA

SEQ ID NO: 222105 - protein, 15 aa, Artificial Sequence
  Description of Artificial Sequence: Synthetic peptide
  Seed: LRMKWMMAMKYPITA
LRMKDMMMMAYPLTA

SEQ ID NO: 222106 - protein, 15 aa, Artificial Sequence
  Description of Artificial Sequence: Synthetic peptide
  Seed: LRMKWMMAMKYPITA
LRMKDMMMMAYPMTA

SEQ ID NO: 222107 - protein, 15 aa, Artificial Sequence
  Description of Artificial Sequence: Synthetic peptide
  Seed: LRMKWMMAMKYPITA
LRMKDMMMMAYPTTA

SEQ ID NO: 222108 - protein, 15 aa, Artificial Sequence
  Description of Artificial Sequence: Synthetic peptide
  Seed: LRMKWMMAMKYPITA
LRMKDMMMMAYPVTA

SEQ ID NO: 222109 - protein, 15 aa, Artificial Sequence
  Description of Artificial Sequence: Synthetic peptide
  Seed: LRMKWMMAMKYPITA
LRMKDMMMMGYPATA

SEQ ID NO: 222110 - protein, 15 aa, Artificial Sequence
  Description of Artificial Sequence: Synthetic peptide
  Seed: LRMKWMMAMKYPITA
LRMKDMMMMGYPITA

SEQ ID NO: 222111 - protein, 15 aa, Artificial Sequence
  Description of Artificial Sequence: Synthetic peptide
  Seed: LRMKWMMAMKYPITA
LRMKDMMMMGYPLTA

SEQ ID NO: 222112 - protein, 15 aa, Artificial Sequence
  Description of Artificial Sequence: Synthetic peptide
  Seed: LRMKWMMAMKYPITA
LRMKDMMMMGYPMTA

SEQ ID NO: 222113 - protein, 15 aa, Artificial Sequence
  Description of Artificial Sequence: Synthetic peptide
  Seed: LRMKWMMAMKYPITA
LRMKDMMMMGYPVTA

SEQ ID NO: 222114 - protein, 15 aa, Artificial Sequence
  Description of Artificial Sequence: Synthetic peptide
  Seed: LRMKWMMAMKYPITA
LRMKDMMMMPYPITA

SEQ ID NO: 222115 - protein, 15 aa, Artificial Sequence
  Description of Artificial Sequence: Synthetic peptide
  Seed: LRMKWMMAMKYPITA
LRMKDMMMMPYPLTA

SEQ ID NO: 222116 - protein, 15 aa, Artificial Sequence
  Description of Artificial Sequence: Synthetic peptide
  Seed: LRMKWMMAMKYPITA
LRMKDMMMMPYPVTA

SEQ ID NO: 222117 - protein, 15 aa, Artificial Sequence
  Description of Artificial Sequence: Synthetic peptide
  Seed: LRMKWMMAMKYPITA
LRMKDMMMMSYPATA

SEQ ID NO: 222118 - protein, 15 aa, Artificial Sequence
  Description of Artificial Sequence: Synthetic peptide
  Seed: LRMKWMMAMKYPITA
LRMKDMMMMSYPITA

SEQ ID NO: 222119 - protein, 15 aa, Artificial Sequence
  Description of Artificial Sequence: Synthetic peptide
  Seed: LRMKWMMAMKYPITA
LRMKDMMMMSYPLTA

SEQ ID NO: 222120 - protein, 15 aa, Artificial Sequence
  Description of Artificial Sequence: Synthetic peptide
  Seed: LRMKWMMAMKYPITA
LRMKDMMMMSYPMTA

SEQ ID NO: 222121 - protein, 15 aa, Artificial Sequence
  Description of Artificial Sequence: Synthetic peptide
  Seed: LRMKWMMAMKYPITA
LRMKDMMMMSYPVTA

SEQ ID NO: 222122 - protein, 15 aa, Artificial Sequence
  Description of Artificial Sequence: Synthetic peptide
  Seed: LRMKWMMAMKYPITA
LRMKDMMMMTYPLTA

SEQ ID NO: 222123 - protein, 15 aa, Artificial Sequence
  Description of Artificial Sequence: Synthetic peptide
  Seed: LRMKWMMAMKYPITA
LRMKDMMMMTYPVTA

SEQ ID NO: 222124 - protein, 15 aa, Artificial Sequence
  Description of Artificial Sequence: Synthetic peptide
  Seed: LRMKWMMAMKYPITA
LRMKDMMNMAYPITA

SEQ ID NO: 222125 - protein, 15 aa, Artificial Sequence
  Description of Artificial Sequence: Synthetic peptide
  Seed: LRMKWMMAMKYPITA
LRMKDMMSMAYPITA

SEQ ID NO: 222126 - protein, 15 aa, Artificial Sequence
  Description of Artificial Sequence: Synthetic peptide
  Seed: LRMKWMMAMKYPITA
LRMKDMMSMAYPLTA

SEQ ID NO: 222127 - protein, 15 aa, Artificial Sequence
  Description of Artificial Sequence: Synthetic peptide
  Seed: LRMKWMMAMKYPITA
LRMKDMMSMSYPITA

SEQ ID NO: 222128 - protein, 15 aa, Artificial Sequence
  Description of Artificial Sequence: Synthetic peptide
  Seed: LRMKWMMAMKYPITA
LRMKDMMTMAYPITA

SEQ ID NO: 222129 - protein, 15 aa, Artificial Sequence
  Description of Artificial Sequence: Synthetic peptide
  Seed: LRMKWMMAMKYPITA
LRMKDMMTMAYPLTA

SEQ ID NO: 222130 - protein, 15 aa, Artificial Sequence
  Description of Artificial Sequence: Synthetic peptide
  Seed: LRMKWMMAMKYPITA
LRMKDMMTMAYPVTA

SEQ ID NO: 222131 - protein, 15 aa, Artificial Sequence
  Description of Artificial Sequence: Synthetic peptide
  Seed: LRMKWMMAMKYPITA
LRMKDMMTMSYPITA

SEQ ID NO: 222132 - protein, 15 aa, Artificial Sequence
  Description of Artificial Sequence: Synthetic peptide
  Seed: LRMKWMMAMKYPITA
LRMKDMMTMSYPLTA

SEQ ID NO: 222133 - protein, 15 aa, Artificial Sequence
  Description of Artificial Sequence: Synthetic peptide
  Seed: LRMKWMMAMKYPITA
LRMKDMMTMSYPVTA

SEQ ID NO: 222134 - protein, 15 aa, Artificial Sequence
  Description of Artificial Sequence: Synthetic peptide
  Seed: LRMKWMMAMKYPITA
LRMKDMMVMGYPITA

SEQ ID NO: 222135 - protein, 15 aa, Artificial Sequence
  Description of Artificial Sequence: Synthetic peptide
  Seed: LRMKWMMAMKYPITA
LRMKDMMVMGYPLTA

SEQ ID NO: 222136 - protein, 15 aa, Artificial Sequence
  Description of Artificial Sequence: Synthetic peptide
  Seed: LRMKWMMAMKYPITA
LRMKDMMVMGYPVTA

SEQ ID NO: 222137 - protein, 15 aa, Artificial Sequence
  Description of Artificial Sequence: Synthetic peptide
  Seed: LRMKWMMAMKYPITA
LRMKEMMAMAYPATA

SEQ ID NO: 222138 - protein, 15 aa, Artificial Sequence
  Description of Artificial Sequence: Synthetic peptide
  Seed: LRMKWMMAMKYPITA
LRMKEMMAMAYPITA

SEQ ID NO: 222139 - protein, 15 aa, Artificial Sequence
  Description of Artificial Sequence: Synthetic peptide
  Seed: LRMKWMMAMKYPITA
LRMKEMMAMAYPLTA

SEQ ID NO: 222140 - protein, 15 aa, Artificial Sequence
  Description of Artificial Sequence: Synthetic peptide
  Seed: LRMKWMMAMKYPITA
LRMKEMMAMAYPMTA

SEQ ID NO: 222141 - protein, 15 aa, Artificial Sequence
  Description of Artificial Sequence: Synthetic peptide
  Seed: LRMKWMMAMKYPITA
LRMKEMMAMAYPVTA

SEQ ID NO: 222142 - protein, 15 aa, Artificial Sequence
  Description of Artificial Sequence: Synthetic peptide
  Seed: LRMKWMMAMKYPITA
LRMKEMMAMGYPITA

SEQ ID NO: 222143 - protein, 15 aa, Artificial Sequence
  Description of Artificial Sequence: Synthetic peptide
  Seed: LRMKWMMAMKYPITA
LRMKEMMAMGYPLTA

SEQ ID NO: 222144 - protein, 15 aa, Artificial Sequence
  Description of Artificial Sequence: Synthetic peptide
  Seed: LRMKWMMAMKYPITA
LRMKEMMAMGYPMTA

SEQ ID NO: 222145 - protein, 15 aa, Artificial Sequence
  Description of Artificial Sequence: Synthetic peptide
  Seed: LRMKWMMAMKYPITA
LRMKEMMAMGYPVTA

SEQ ID NO: 222146 - protein, 15 aa, Artificial Sequence
  Description of Artificial Sequence: Synthetic peptide
  Seed: LRMKWMMAMKYPITA
LRMKEMMAMPYPITA

SEQ ID NO: 222147 - protein, 15 aa, Artificial Sequence
  Description of Artificial Sequence: Synthetic peptide
  Seed: LRMKWMMAMKYPITA
LRMKEMMAMPYPLTA

SEQ ID NO: 222148 - protein, 15 aa, Artificial Sequence
  Description of Artificial Sequence: Synthetic peptide
  Seed: LRMKWMMAMKYPITA
LRMKEMMAMSYPITA

SEQ ID NO: 222149 - protein, 15 aa, Artificial Sequence
  Description of Artificial Sequence: Synthetic peptide
  Seed: LRMKWMMAMKYPITA
LRMKEMMAMSYPLTA

SEQ ID NO: 222150 - protein, 15 aa, Artificial Sequence
  Description of Artificial Sequence: Synthetic peptide
  Seed: LRMKWMMAMKYPITA
LRMKEMMAMSYPMTA

SEQ ID NO: 222151 - protein, 15 aa, Artificial Sequence
  Description of Artificial Sequence: Synthetic peptide
  Seed: LRMKWMMAMKYPITA
LRMKEMMAMSYPVTA

SEQ ID NO: 222152 - protein, 15 aa, Artificial Sequence
  Description of Artificial Sequence: Synthetic peptide
  Seed: LRMKWMMAMKYPITA
LRMKEMMIMAYPATA

SEQ ID NO: 222153 - protein, 15 aa, Artificial Sequence
  Description of Artificial Sequence: Synthetic peptide
  Seed: LRMKWMMAMKYPITA
LRMKEMMIMAYPLTA

SEQ ID NO: 222154 - protein, 15 aa, Artificial Sequence
  Description of Artificial Sequence: Synthetic peptide
  Seed: LRMKWMMAMKYPITA
LRMKEMMIMAYPMTA

SEQ ID NO: 222155 - protein, 15 aa, Artificial Sequence
  Description of Artificial Sequence: Synthetic peptide
  Seed: LRMKWMMAMKYPITA
LRMKEMMIMAYPVTA

SEQ ID NO: 222156 - protein, 15 aa, Artificial Sequence
  Description of Artificial Sequence: Synthetic peptide
  Seed: LRMKWMMAMKYPITA
LRMKEMMIMGYPATA

SEQ ID NO: 222157 - protein, 15 aa, Artificial Sequence
  Description of Artificial Sequence: Synthetic peptide
  Seed: LRMKWMMAMKYPITA
LRMKEMMIMGYPITA

SEQ ID NO: 222158 - protein, 15 aa, Artificial Sequence
  Description of Artificial Sequence: Synthetic peptide
  Seed: LRMKWMMAMKYPITA
LRMKEMMIMGYPLTA

SEQ ID NO: 222159 - protein, 15 aa, Artificial Sequence
  Description of Artificial Sequence: Synthetic peptide
  Seed: LRMKWMMAMKYPITA
LRMKEMMIMGYPMTA

SEQ ID NO: 222160 - protein, 15 aa, Artificial Sequence
  Description of Artificial Sequence: Synthetic peptide
  Seed: LRMKWMMAMKYPITA
LRMKEMMIMGYPVTA

SEQ ID NO: 222161 - protein, 15 aa, Artificial Sequence
  Description of Artificial Sequence: Synthetic peptide
  Seed: LRMKWMMAMKYPITA
LRMKEMMIMPYPLTA

SEQ ID NO: 222162 - protein, 15 aa, Artificial Sequence
  Description of Artificial Sequence: Synthetic peptide
  Seed: LRMKWMMAMKYPITA
LRMKEMMIMPYPVTA

SEQ ID NO: 222163 - protein, 15 aa, Artificial Sequence
  Description of Artificial Sequence: Synthetic peptide
  Seed: LRMKWMMAMKYPITA
LRMKEMMIMSYPATA

SEQ ID NO: 222164 - protein, 15 aa, Artificial Sequence
  Description of Artificial Sequence: Synthetic peptide
  Seed: LRMKWMMAMKYPITA
LRMKEMMIMSYPITA

SEQ ID NO: 222165 - protein, 15 aa, Artificial Sequence
  Description of Artificial Sequence: Synthetic peptide
  Seed: LRMKWMMAMKYPITA
LRMKEMMIMSYPLTA

SEQ ID NO: 222166 - protein, 15 aa, Artificial Sequence
  Description of Artificial Sequence: Synthetic peptide
  Seed: LRMKWMMAMKYPITA
LRMKEMMIMSYPMTA

SEQ ID NO: 222167 - protein, 15 aa, Artificial Sequence
  Description of Artificial Sequence: Synthetic peptide
  Seed: LRMKWMMAMKYPITA
LRMKEMMIMSYPVTA

SEQ ID NO: 222168 - protein, 15 aa, Artificial Sequence
  Description of Artificial Sequence: Synthetic peptide
  Seed: LRMKWMMAMKYPITA
LRMKEMMLMAYPATA

SEQ ID NO: 222169 - protein, 15 aa, Artificial Sequence
  Description of Artificial Sequence: Synthetic peptide
  Seed: LRMKWMMAMKYPITA
LRMKEMMLMAYPITA

SEQ ID NO: 222170 - protein, 15 aa, Artificial Sequence
  Description of Artificial Sequence: Synthetic peptide
  Seed: LRMKWMMAMKYPITA
LRMKEMMLMAYPLTA

SEQ ID NO: 222171 - protein, 15 aa, Artificial Sequence
  Description of Artificial Sequence: Synthetic peptide
  Seed: LRMKWMMAMKYPITA
LRMKEMMLMAYPMTA

SEQ ID NO: 222172 - protein, 15 aa, Artificial Sequence
  Description of Artificial Sequence: Synthetic peptide
  Seed: LRMKWMMAMKYPITA
LRMKEMMLMAYPSTA

SEQ ID NO: 222173 - protein, 15 aa, Artificial Sequence
  Description of Artificial Sequence: Synthetic peptide
  Seed: LRMKWMMAMKYPITA
LRMKEMMLMAYPTTA

SEQ ID NO: 222174 - protein, 15 aa, Artificial Sequence
  Description of Artificial Sequence: Synthetic peptide
  Seed: LRMKWMMAMKYPITA
LRMKEMMLMAYPVTA

SEQ ID NO: 222175 - protein, 15 aa, Artificial Sequence
  Description of Artificial Sequence: Synthetic peptide
  Seed: LRMKWMMAMKYPITA
LRMKEMMLMGYPATA

SEQ ID NO: 222176 - protein, 15 aa, Artificial Sequence
  Description of Artificial Sequence: Synthetic peptide
  Seed: LRMKWMMAMKYPITA
LRMKEMMLMGYPITA

SEQ ID NO: 222177 - protein, 15 aa, Artificial Sequence
  Description of Artificial Sequence: Synthetic peptide
  Seed: LRMKWMMAMKYPITA
LRMKEMMLMGYPLTA

SEQ ID NO: 222178 - protein, 15 aa, Artificial Sequence
  Description of Artificial Sequence: Synthetic peptide
  Seed: LRMKWMMAMKYPITA
LRMKEMMLMGYPMTA

SEQ ID NO: 222179 - protein, 15 aa, Artificial Sequence
  Description of Artificial Sequence: Synthetic peptide
  Seed: LRMKWMMAMKYPITA
LRMKEMMLMGYPVTA

SEQ ID NO: 222180 - protein, 15 aa, Artificial Sequence
  Description of Artificial Sequence: Synthetic peptide
  Seed: LRMKWMMAMKYPITA
LRMKEMMLMPYPITA

SEQ ID NO: 222181 - protein, 15 aa, Artificial Sequence
  Description of Artificial Sequence: Synthetic peptide
  Seed: LRMKWMMAMKYPITA
LRMKEMMLMPYPLTA

SEQ ID NO: 222182 - protein, 15 aa, Artificial Sequence
  Description of Artificial Sequence: Synthetic peptide
  Seed: LRMKWMMAMKYPITA
LRMKEMMLMPYPMTA

SEQ ID NO: 222183 - protein, 15 aa, Artificial Sequence
  Description of Artificial Sequence: Synthetic peptide
  Seed: LRMKWMMAMKYPITA
LRMKEMMLMPYPVTA

SEQ ID NO: 222184 - protein, 15 aa, Artificial Sequence
  Description of Artificial Sequence: Synthetic peptide
  Seed: LRMKWMMAMKYPITA
LRMKEMMLMSYPATA

SEQ ID NO: 222185 - protein, 15 aa, Artificial Sequence
  Description of Artificial Sequence: Synthetic peptide
  Seed: LRMKWMMAMKYPITA
LRMKEMMLMSYPITA

SEQ ID NO: 222186 - protein, 15 aa, Artificial Sequence
  Description of Artificial Sequence: Synthetic peptide
  Seed: LRMKWMMAMKYPITA
LRMKEMMLMSYPLTA

SEQ ID NO: 222187 - protein, 15 aa, Artificial Sequence
  Description of Artificial Sequence: Synthetic peptide
  Seed: LRMKWMMAMKYPITA
LRMKEMMLMSYPMTA

SEQ ID NO: 222188 - protein, 15 aa, Artificial Sequence
  Description of Artificial Sequence: Synthetic peptide
  Seed: LRMKWMMAMKYPITA
LRMKEMMLMSYPVTA

SEQ ID NO: 222189 - protein, 15 aa, Artificial Sequence
  Description of Artificial Sequence: Synthetic peptide
  Seed: LRMKWMMAMKYPITA
LRMKEMMLMTYPATA

SEQ ID NO: 222190 - protein, 15 aa, Artificial Sequence
  Description of Artificial Sequence: Synthetic peptide
  Seed: LRMKWMMAMKYPITA
LRMKEMMLMTYPITA

SEQ ID NO: 222191 - protein, 15 aa, Artificial Sequence
  Description of Artificial Sequence: Synthetic peptide
  Seed: LRMKWMMAMKYPITA
LRMKEMMLMTYPLTA

SEQ ID NO: 222192 - protein, 15 aa, Artificial Sequence
  Description of Artificial Sequence: Synthetic peptide
  Seed: LRMKWMMAMKYPITA
LRMKEMMLMTYPVTA

SEQ ID NO: 222193 - protein, 15 aa, Artificial Sequence
  Description of Artificial Sequence: Synthetic peptide
  Seed: LRMKWMMAMKYPITA
LRMKEMMLMVYPLTA

SEQ ID NO: 222194 - protein, 15 aa, Artificial Sequence
  Description of Artificial Sequence: Synthetic peptide
  Seed: LRMKWMMAMKYPITA
LRMKEMMMMAYPATA

SEQ ID NO: 222195 - protein, 15 aa, Artificial Sequence
  Description of Artificial Sequence: Synthetic peptide
  Seed: LRMKWMMAMKYPITA
LRMKEMMMMAYPITA

SEQ ID NO: 222196 - protein, 15 aa, Artificial Sequence
  Description of Artificial Sequence: Synthetic peptide
  Seed: LRMKWMMAMKYPITA
LRMKEMMMMAYPLTA

SEQ ID NO: 222197 - protein, 15 aa, Artificial Sequence
  Description of Artificial Sequence: Synthetic peptide
  Seed: LRMKWMMAMKYPITA
LRMKEMMMMAYPMTA

SEQ ID NO: 222198 - protein, 15 aa, Artificial Sequence
  Description of Artificial Sequence: Synthetic peptide
  Seed: LRMKWMMAMKYPITA
LRMKEMMMMAYPSTA

SEQ ID NO: 222199 - protein, 15 aa, Artificial Sequence
  Description of Artificial Sequence: Synthetic peptide
  Seed: LRMKWMMAMKYPITA
LRMKEMMMMAYPTTA

SEQ ID NO: 222200 - protein, 15 aa, Artificial Sequence
  Description of Artificial Sequence: Synthetic peptide
  Seed: LRMKWMMAMKYPITA
LRMKEMMMMAYPVTA

SEQ ID NO: 222201 - protein, 15 aa, Artificial Sequence
  Description of Artificial Sequence: Synthetic peptide
  Seed: LRMKWMMAMKYPITA
LRMKEMMMMGYPATA

SEQ ID NO: 222202 - protein, 15 aa, Artificial Sequence
  Description of Artificial Sequence: Synthetic peptide
  Seed: LRMKWMMAMKYPITA
LRMKEMMMMGYPITA

SEQ ID NO: 222203 - protein, 15 aa, Artificial Sequence
  Description of Artificial Sequence: Synthetic peptide
  Seed: LRMKWMMAMKYPITA
LRMKEMMMMGYPLTA

SEQ ID NO: 222204 - protein, 15 aa, Artificial Sequence
  Description of Artificial Sequence: Synthetic peptide
  Seed: LRMKWMMAMKYPITA
LRMKEMMMMGYPMTA

SEQ ID NO: 222205 - protein, 15 aa, Artificial Sequence
  Description of Artificial Sequence: Synthetic peptide
  Seed: LRMKWMMAMKYPITA
LRMKEMMMMGYPVTA

SEQ ID NO: 222206 - protein, 15 aa, Artificial Sequence
  Description of Artificial Sequence: Synthetic peptide
  Seed: LRMKWMMAMKYPITA
LRMKEMMMMPYPITA

SEQ ID NO: 222207 - protein, 15 aa, Artificial Sequence
  Description of Artificial Sequence: Synthetic peptide
  Seed: LRMKWMMAMKYPITA
LRMKEMMMMPYPLTA

SEQ ID NO: 222208 - protein, 15 aa, Artificial Sequence
  Description of Artificial Sequence: Synthetic peptide
  Seed: LRMKWMMAMKYPITA
LRMKEMMMMPYPMTA

SEQ ID NO: 222209 - protein, 15 aa, Artificial Sequence
  Description of Artificial Sequence: Synthetic peptide
  Seed: LRMKWMMAMKYPITA
LRMKEMMMMPYPVTA

SEQ ID NO: 222210 - protein, 15 aa, Artificial Sequence
  Description of Artificial Sequence: Synthetic peptide
  Seed: LRMKWMMAMKYPITA
LRMKEMMMMSYPATA

SEQ ID NO: 222211 - protein, 15 aa, Artificial Sequence
  Description of Artificial Sequence: Synthetic peptide
  Seed: LRMKWMMAMKYPITA
LRMKEMMMMSYPITA

SEQ ID NO: 222212 - protein, 15 aa, Artificial Sequence
  Description of Artificial Sequence: Synthetic peptide
  Seed: LRMKWMMAMKYPITA
LRMKEMMMMSYPLTA

SEQ ID NO: 222213 - protein, 15 aa, Artificial Sequence
  Description of Artificial Sequence: Synthetic peptide
  Seed: LRMKWMMAMKYPITA
LRMKEMMMMSYPMTA

SEQ ID NO: 222214 - protein, 15 aa, Artificial Sequence
  Description of Artificial Sequence: Synthetic peptide
  Seed: LRMKWMMAMKYPITA
LRMKEMMMMSYPVTA

SEQ ID NO: 222215 - protein, 15 aa, Artificial Sequence
  Description of Artificial Sequence: Synthetic peptide
  Seed: LRMKWMMAMKYPITA
LRMKEMMMMTYPITA

SEQ ID NO: 222216 - protein, 15 aa, Artificial Sequence
  Description of Artificial Sequence: Synthetic peptide
  Seed: LRMKWMMAMKYPITA
LRMKEMMMMTYPLTA

SEQ ID NO: 222217 - protein, 15 aa, Artificial Sequence
  Description of Artificial Sequence: Synthetic peptide
  Seed: LRMKWMMAMKYPITA
LRMKEMMMMTYPVTA

SEQ ID NO: 222218 - protein, 15 aa, Artificial Sequence
  Description of Artificial Sequence: Synthetic peptide
  Seed: LRMKWMMAMKYPITA
LRMKEMMMMVYPLTA

SEQ ID NO: 222219 - protein, 15 aa, Artificial Sequence
  Description of Artificial Sequence: Synthetic peptide
  Seed: LRMKWMMAMKYPITA
LRMKEMMQMAYPITA

SEQ ID NO: 222220 - protein, 15 aa, Artificial Sequence
  Description of Artificial Sequence: Synthetic peptide
  Seed: LRMKWMMAMKYPITA
LRMKEMMQMAYPLTA

SEQ ID NO: 222221 - protein, 15 aa, Artificial Sequence
  Description of Artificial Sequence: Synthetic peptide
  Seed: LRMKWMMAMKYPITA
LRMKEMMQMAYPVTA

SEQ ID NO: 222222 - protein, 15 aa, Artificial Sequence
  Description of Artificial Sequence: Synthetic peptide
  Seed: LRMKWMMAMKYPITA
LRMKEMMSMAYPITA

SEQ ID NO: 222223 - protein, 15 aa, Artificial Sequence
  Description of Artificial Sequence: Synthetic peptide
  Seed: LRMKWMMAMKYPITA
LRMKEMMSMAYPLTA

SEQ ID NO: 222224 - protein, 15 aa, Artificial Sequence
  Description of Artificial Sequence: Synthetic peptide
  Seed: LRMKWMMAMKYPITA
LRMKEMMSMAYPMTA

SEQ ID NO: 222225 - protein, 15 aa, Artificial Sequence
  Description of Artificial Sequence: Synthetic peptide
  Seed: LRMKWMMAMKYPITA
LRMKEMMSMAYPVTA

SEQ ID NO: 222226 - protein, 15 aa, Artificial Sequence
  Description of Artificial Sequence: Synthetic peptide
  Seed: LRMKWMMAMKYPITA
LRMKEMMSMGYPLTA

SEQ ID NO: 222227 - protein, 15 aa, Artificial Sequence
  Description of Artificial Sequence: Synthetic peptide
  Seed: LRMKWMMAMKYPITA
LRMKEMMSMSYPITA

SEQ ID NO: 222228 - protein, 15 aa, Artificial Sequence
  Description of Artificial Sequence: Synthetic peptide
  Seed: LRMKWMMAMKYPITA
LRMKEMMSMSYPLTA

SEQ ID NO: 222229 - protein, 15 aa, Artificial Sequence
  Description of Artificial Sequence: Synthetic peptide
  Seed: LRMKWMMAMKYPITA
LRMKEMMSMSYPVTA

SEQ ID NO: 222230 - protein, 15 aa, Artificial Sequence
  Description of Artificial Sequence: Synthetic peptide
  Seed: LRMKWMMAMKYPITA
LRMKEMMTMAYPITA

SEQ ID NO: 222231 - protein, 15 aa, Artificial Sequence
  Description of Artificial Sequence: Synthetic peptide
  Seed: LRMKWMMAMKYPITA
LRMKEMMTMAYPLTA

SEQ ID NO: 222232 - protein, 15 aa, Artificial Sequence
  Description of Artificial Sequence: Synthetic peptide
  Seed: LRMKWMMAMKYPITA
LRMKEMMTMAYPVTA

SEQ ID NO: 222233 - protein, 15 aa, Artificial Sequence
  Description of Artificial Sequence: Synthetic peptide
  Seed: LRMKWMMAMKYPITA
LRMKEMMTMSYPITA

SEQ ID NO: 222234 - protein, 15 aa, Artificial Sequence
  Description of Artificial Sequence: Synthetic peptide
  Seed: LRMKWMMAMKYPITA
LRMKEMMTMSYPLTA

SEQ ID NO: 222235 - protein, 15 aa, Artificial Sequence
  Description of Artificial Sequence: Synthetic peptide
  Seed: LRMKWMMAMKYPITA
LRMKEMMTMSYPVTA

SEQ ID NO: 222236 - protein, 15 aa, Artificial Sequence
  Description of Artificial Sequence: Synthetic peptide
  Seed: LRMKWMMAMKYPITA
LRMKEMMTMTYPITA

SEQ ID NO: 222237 - protein, 15 aa, Artificial Sequence
  Description of Artificial Sequence: Synthetic peptide
  Seed: LRMKWMMAMKYPITA
LRMKEMMVMGYPITA

SEQ ID NO: 222238 - protein, 15 aa, Artificial Sequence
  Description of Artificial Sequence: Synthetic peptide
  Seed: LRMKWMMAMKYPITA
LRMKEMMVMGYPLTA

SEQ ID NO: 222239 - protein, 15 aa, Artificial Sequence
  Description of Artificial Sequence: Synthetic peptide
  Seed: LRMKWMMAMKYPITA
LRMKEMMVMGYPVTA

SEQ ID NO: 222240 - protein, 15 aa, Artificial Sequence
  Description of Artificial Sequence: Synthetic peptide
  Seed: LRMKWMMAMKYPITA
LRMKEMMVMSYPITA

SEQ ID NO: 222241 - protein, 15 aa, Artificial Sequence
  Description of Artificial Sequence: Synthetic peptide
  Seed: LRMKWMMAMKYPITA
LRMKEMMVMSYPLTA

SEQ ID NO: 222242 - protein, 15 aa, Artificial Sequence
  Description of Artificial Sequence: Synthetic peptide
  Seed: LRMKWMMAMKYPITA
LRMKEMMVMSYPMTA

SEQ ID NO: 222243 - protein, 15 aa, Artificial Sequence
  Description of Artificial Sequence: Synthetic peptide
  Seed: LRMKWMMAMKYPITA
LRMKEMMVMSYPVTA

SEQ ID NO: 222244 - protein, 15 aa, Artificial Sequence
  Description of Artificial Sequence: Synthetic peptide
  Seed: LRMKWMMAMKYPITA
LRMKFMMAMAYPATA

SEQ ID NO: 222245 - protein, 15 aa, Artificial Sequence
  Description of Artificial Sequence: Synthetic peptide
  Seed: LRMKWMMAMKYPITA
LRMKFMMAMAYPCTA

SEQ ID NO: 222246 - protein, 15 aa, Artificial Sequence
  Description of Artificial Sequence: Synthetic peptide
  Seed: LRMKWMMAMKYPITA
LRMKFMMAMAYPDTA

SEQ ID NO: 222247 - protein, 15 aa, Artificial Sequence
  Description of Artificial Sequence: Synthetic peptide
  Seed: LRMKWMMAMKYPITA
LRMKFMMAMAYPETA

SEQ ID NO: 222248 - protein, 15 aa, Artificial Sequence
  Description of Artificial Sequence: Synthetic peptide
  Seed: LRMKWMMAMKYPITA
LRMKFMMAMAYPFTA

SEQ ID NO: 222249 - protein, 15 aa, Artificial Sequence
  Description of Artificial Sequence: Synthetic peptide
  Seed: LRMKWMMAMKYPITA
LRMKFMMAMAYPGTA

SEQ ID NO: 222250 - protein, 15 aa, Artificial Sequence
  Description of Artificial Sequence: Synthetic peptide
  Seed: LRMKWMMAMKYPITA
LRMKFMMAMAYPHTA

SEQ ID NO: 222251 - protein, 15 aa, Artificial Sequence
  Description of Artificial Sequence: Synthetic peptide
  Seed: LRMKWMMAMKYPITA
LRMKFMMAMAYPITA

SEQ ID NO: 222252 - protein, 15 aa, Artificial Sequence
  Description of Artificial Sequence: Synthetic peptide
  Seed: LRMKWMMAMKYPITA
LRMKFMMAMAYPKTA

SEQ ID NO: 222253 - protein, 15 aa, Artificial Sequence
  Description of Artificial Sequence: Synthetic peptide
  Seed: LRMKWMMAMKYPITA
LRMKFMMAMAYPLTA

SEQ ID NO: 222254 - protein, 15 aa, Artificial Sequence
  Description of Artificial Sequence: Synthetic peptide
  Seed: LRMKWMMAMKYPITA
LRMKFMMAMAYPMTA

SEQ ID NO: 222255 - protein, 15 aa, Artificial Sequence
  Description of Artificial Sequence: Synthetic peptide
  Seed: LRMKWMMAMKYPITA
LRMKFMMAMAYPNTA

SEQ ID NO: 222256 - protein, 15 aa, Artificial Sequence
  Description of Artificial Sequence: Synthetic peptide
  Seed: LRMKWMMAMKYPITA
LRMKFMMAMAYPPTA

SEQ ID NO: 222257 - protein, 15 aa, Artificial Sequence
  Description of Artificial Sequence: Synthetic peptide
  Seed: LRMKWMMAMKYPITA
LRMKFMMAMAYPQTA

SEQ ID NO: 222258 - protein, 15 aa, Artificial Sequence
  Description of Artificial Sequence: Synthetic peptide
  Seed: LRMKWMMAMKYPITA
LRMKFMMAMAYPRTA

SEQ ID NO: 222259 - protein, 15 aa, Artificial Sequence
  Description of Artificial Sequence: Synthetic peptide
  Seed: LRMKWMMAMKYPITA
LRMKFMMAMAYPSTA

SEQ ID NO: 222260 - protein, 15 aa, Artificial Sequence
  Description of Artificial Sequence: Synthetic peptide
  Seed: LRMKWMMAMKYPITA
LRMKFMMAMAYPTTA

SEQ ID NO: 222261 - protein, 15 aa, Artificial Sequence
  Description of Artificial Sequence: Synthetic peptide
  Seed: LRMKWMMAMKYPITA
LRMKFMMAMAYPVTA

SEQ ID NO: 222262 - protein, 15 aa, Artificial Sequence
  Description of Artificial Sequence: Synthetic peptide
  Seed: LRMKWMMAMKYPITA
LRMKFMMAMAYPWTA

SEQ ID NO: 222263 - protein, 15 aa, Artificial Sequence
  Description of Artificial Sequence: Synthetic peptide
  Seed: LRMKWMMAMKYPITA
LRMKFMMAMAYPYTA

SEQ ID NO: 222264 - protein, 15 aa, Artificial Sequence
  Description of Artificial Sequence: Synthetic peptide
  Seed: LRMKWMMAMKYPITA
LRMKFMMAMCYPATA

SEQ ID NO: 222265 - protein, 15 aa, Artificial Sequence
  Description of Artificial Sequence: Synthetic peptide
  Seed: LRMKWMMAMKYPITA
LRMKFMMAMCYPCTA

SEQ ID NO: 222266 - protein, 15 aa, Artificial Sequence
  Description of Artificial Sequence: Synthetic peptide
  Seed: LRMKWMMAMKYPITA
LRMKFMMAMCYPDTA

SEQ ID NO: 222267 - protein, 15 aa, Artificial Sequence
  Description of Artificial Sequence: Synthetic peptide
  Seed: LRMKWMMAMKYPITA
LRMKFMMAMCYPETA

SEQ ID NO: 222268 - protein, 15 aa, Artificial Sequence
  Description of Artificial Sequence: Synthetic peptide
  Seed: LRMKWMMAMKYPITA
LRMKFMMAMCYPFTA

SEQ ID NO: 222269 - protein, 15 aa, Artificial Sequence
  Description of Artificial Sequence: Synthetic peptide
  Seed: LRMKWMMAMKYPITA
LRMKFMMAMCYPGTA

SEQ ID NO: 222270 - protein, 15 aa, Artificial Sequence
  Description of Artificial Sequence: Synthetic peptide
  Seed: LRMKWMMAMKYPITA
LRMKFMMAMCYPHTA

SEQ ID NO: 222271 - protein, 15 aa, Artificial Sequence
  Description of Artificial Sequence: Synthetic peptide
  Seed: LRMKWMMAMKYPITA
LRMKFMMAMCYPITA

SEQ ID NO: 222272 - protein, 15 aa, Artificial Sequence
  Description of Artificial Sequence: Synthetic peptide
  Seed: LRMKWMMAMKYPITA
LRMKFMMAMCYPKTA

SEQ ID NO: 222273 - protein, 15 aa, Artificial Sequence
  Description of Artificial Sequence: Synthetic peptide
  Seed: LRMKWMMAMKYPITA
LRMKFMMAMCYPLTA

SEQ ID NO: 222274 - protein, 15 aa, Artificial Sequence
  Description of Artificial Sequence: Synthetic peptide
  Seed: LRMKWMMAMKYPITA
LRMKFMMAMCYPMTA

SEQ ID NO: 222275 - protein, 15 aa, Artificial Sequence
  Description of Artificial Sequence: Synthetic peptide
  Seed: LRMKWMMAMKYPITA
LRMKFMMAMCYPNTA

SEQ ID NO: 222276 - protein, 15 aa, Artificial Sequence
  Description of Artificial Sequence: Synthetic peptide
  Seed: LRMKWMMAMKYPITA
LRMKFMMAMCYPPTA

SEQ ID NO: 222277 - protein, 15 aa, Artificial Sequence
  Description of Artificial Sequence: Synthetic peptide
  Seed: LRMKWMMAMKYPITA
LRMKFMMAMCYPQTA

SEQ ID NO: 222278 - protein, 15 aa, Artificial Sequence
  Description of Artificial Sequence: Synthetic peptide
  Seed: LRMKWMMAMKYPITA
LRMKFMMAMCYPRTA

SEQ ID NO: 222279 - protein, 15 aa, Artificial Sequence
  Description of Artificial Sequence: Synthetic peptide
  Seed: LRMKWMMAMKYPITA
LRMKFMMAMCYPSTA

SEQ ID NO: 222280 - protein, 15 aa, Artificial Sequence
  Description of Artificial Sequence: Synthetic peptide
  Seed: LRMKWMMAMKYPITA
LRMKFMMAMCYPTTA

SEQ ID NO: 222281 - protein, 15 aa, Artificial Sequence
  Description of Artificial Sequence: Synthetic peptide
  Seed: LRMKWMMAMKYPITA
LRMKFMMAMCYPVTA

SEQ ID NO: 222282 - protein, 15 aa, Artificial Sequence
  Description of Artificial Sequence: Synthetic peptide
  Seed: LRMKWMMAMKYPITA
LRMKFMMAMCYPYTA

SEQ ID NO: 222283 - protein, 15 aa, Artificial Sequence
  Description of Artificial Sequence: Synthetic peptide
  Seed: LRMKWMMAMKYPITA
LRMKFMMAMDYPATA

SEQ ID NO: 222284 - protein, 15 aa, Artificial Sequence
  Description of Artificial Sequence: Synthetic peptide
  Seed: LRMKWMMAMKYPITA
LRMKFMMAMDYPCTA

SEQ ID NO: 222285 - protein, 15 aa, Artificial Sequence
  Description of Artificial Sequence: Synthetic peptide
  Seed: LRMKWMMAMKYPITA
LRMKFMMAMDYPDTA

SEQ ID NO: 222286 - protein, 15 aa, Artificial Sequence
  Description of Artificial Sequence: Synthetic peptide
  Seed: LRMKWMMAMKYPITA
LRMKFMMAMDYPETA

SEQ ID NO: 222287 - protein, 15 aa, Artificial Sequence
  Description of Artificial Sequence: Synthetic peptide
  Seed: LRMKWMMAMKYPITA
LRMKFMMAMDYPFTA

SEQ ID NO: 222288 - protein, 15 aa, Artificial Sequence
  Description of Artificial Sequence: Synthetic peptide
  Seed: LRMKWMMAMKYPITA
LRMKFMMAMDYPGTA

SEQ ID NO: 222289 - protein, 15 aa, Artificial Sequence
  Description of Artificial Sequence: Synthetic peptide
  Seed: LRMKWMMAMKYPITA
LRMKFMMAMDYPHTA

SEQ ID NO: 222290 - protein, 15 aa, Artificial Sequence
  Description of Artificial Sequence: Synthetic peptide
  Seed: LRMKWMMAMKYPITA
LRMKFMMAMDYPITA

SEQ ID NO: 222291 - protein, 15 aa, Artificial Sequence
  Description of Artificial Sequence: Synthetic peptide
  Seed: LRMKWMMAMKYPITA
LRMKFMMAMDYPLTA

SEQ ID NO: 222292 - protein, 15 aa, Artificial Sequence
  Description of Artificial Sequence: Synthetic peptide
  Seed: LRMKWMMAMKYPITA
LRMKFMMAMDYPMTA

SEQ ID NO: 222293 - protein, 15 aa, Artificial Sequence
  Description of Artificial Sequence: Synthetic peptide
  Seed: LRMKWMMAMKYPITA
LRMKFMMAMDYPNTA

SEQ ID NO: 222294 - protein, 15 aa, Artificial Sequence
  Description of Artificial Sequence: Synthetic peptide
  Seed: LRMKWMMAMKYPITA
LRMKFMMAMDYPPTA

SEQ ID NO: 222295 - protein, 15 aa, Artificial Sequence
  Description of Artificial Sequence: Synthetic peptide
  Seed: LRMKWMMAMKYPITA
LRMKFMMAMDYPQTA

SEQ ID NO: 222296 - protein, 15 aa, Artificial Sequence
  Description of Artificial Sequence: Synthetic peptide
  Seed: LRMKWMMAMKYPITA
LRMKFMMAMDYPRTA

SEQ ID NO: 222297 - protein, 15 aa, Artificial Sequence
  Description of Artificial Sequence: Synthetic peptide
  Seed: LRMKWMMAMKYPITA
LRMKFMMAMDYPSTA

SEQ ID NO: 222298 - protein, 15 aa, Artificial Sequence
  Description of Artificial Sequence: Synthetic peptide
  Seed: LRMKWMMAMKYPITA
LRMKFMMAMDYPTTA

SEQ ID NO: 222299 - protein, 15 aa, Artificial Sequence
  Description of Artificial Sequence: Synthetic peptide
  Seed: LRMKWMMAMKYPITA
LRMKFMMAMDYPVTA

SEQ ID NO: 222300 - protein, 15 aa, Artificial Sequence
  Description of Artificial Sequence: Synthetic peptide
  Seed: LRMKWMMAMKYPITA
LRMKFMMAMDYPWTA

SEQ ID NO: 222301 - protein, 15 aa, Artificial Sequence
  Description of Artificial Sequence: Synthetic peptide
  Seed: LRMKWMMAMKYPITA
LRMKFMMAMDYPYTA

SEQ ID NO: 222302 - protein, 15 aa, Artificial Sequence
  Description of Artificial Sequence: Synthetic peptide
  Seed: LRMKWMMAMKYPITA
LRMKFMMAMEYPATA

SEQ ID NO: 222303 - protein, 15 aa, Artificial Sequence
  Description of Artificial Sequence: Synthetic peptide
  Seed: LRMKWMMAMKYPITA
LRMKFMMAMEYPCTA

SEQ ID NO: 222304 - protein, 15 aa, Artificial Sequence
  Description of Artificial Sequence: Synthetic peptide
  Seed: LRMKWMMAMKYPITA
LRMKFMMAMEYPDTA

SEQ ID NO: 222305 - protein, 15 aa, Artificial Sequence
  Description of Artificial Sequence: Synthetic peptide
  Seed: LRMKWMMAMKYPITA
LRMKFMMAMEYPETA

SEQ ID NO: 222306 - protein, 15 aa, Artificial Sequence
  Description of Artificial Sequence: Synthetic peptide
  Seed: LRMKWMMAMKYPITA
LRMKFMMAMEYPFTA

SEQ ID NO: 222307 - protein, 15 aa, Artificial Sequence
  Description of Artificial Sequence: Synthetic peptide
  Seed: LRMKWMMAMKYPITA
LRMKFMMAMEYPGTA

SEQ ID NO: 222308 - protein, 15 aa, Artificial Sequence
  Description of Artificial Sequence: Synthetic peptide
  Seed: LRMKWMMAMKYPITA
LRMKFMMAMEYPHTA

SEQ ID NO: 222309 - protein, 15 aa, Artificial Sequence
  Description of Artificial Sequence: Synthetic peptide
  Seed: LRMKWMMAMKYPITA
LRMKFMMAMEYPITA

SEQ ID NO: 222310 - protein, 15 aa, Artificial Sequence
  Description of Artificial Sequence: Synthetic peptide
  Seed: LRMKWMMAMKYPITA
LRMKFMMAMEYPKTA

SEQ ID NO: 222311 - protein, 15 aa, Artificial Sequence
  Description of Artificial Sequence: Synthetic peptide
  Seed: LRMKWMMAMKYPITA
LRMKFMMAMEYPLTA

SEQ ID NO: 222312 - protein, 15 aa, Artificial Sequence
  Description of Artificial Sequence: Synthetic peptide
  Seed: LRMKWMMAMKYPITA
LRMKFMMAMEYPMTA

SEQ ID NO: 222313 - protein, 15 aa, Artificial Sequence
  Description of Artificial Sequence: Synthetic peptide
  Seed: LRMKWMMAMKYPITA
LRMKFMMAMEYPNTA

SEQ ID NO: 222314 - protein, 15 aa, Artificial Sequence
  Description of Artificial Sequence: Synthetic peptide
  Seed: LRMKWMMAMKYPITA
LRMKFMMAMEYPPTA

SEQ ID NO: 222315 - protein, 15 aa, Artificial Sequence
  Description of Artificial Sequence: Synthetic peptide
  Seed: LRMKWMMAMKYPITA
LRMKFMMAMEYPQTA

SEQ ID NO: 222316 - protein, 15 aa, Artificial Sequence
  Description of Artificial Sequence: Synthetic peptide
  Seed: LRMKWMMAMKYPITA
LRMKFMMAMEYPRTA

SEQ ID NO: 222317 - protein, 15 aa, Artificial Sequence
  Description of Artificial Sequence: Synthetic peptide
  Seed: LRMKWMMAMKYPITA
LRMKFMMAMEYPSTA

SEQ ID NO: 222318 - protein, 15 aa, Artificial Sequence
  Description of Artificial Sequence: Synthetic peptide
  Seed: LRMKWMMAMKYPITA
LRMKFMMAMEYPTTA

SEQ ID NO: 222319 - protein, 15 aa, Artificial Sequence
  Description of Artificial Sequence: Synthetic peptide
  Seed: LRMKWMMAMKYPITA
LRMKFMMAMEYPVTA

SEQ ID NO: 222320 - protein, 15 aa, Artificial Sequence
  Description of Artificial Sequence: Synthetic peptide
  Seed: LRMKWMMAMKYPITA
LRMKFMMAMEYPWTA

SEQ ID NO: 222321 - protein, 15 aa, Artificial Sequence
  Description of Artificial Sequence: Synthetic peptide
  Seed: LRMKWMMAMKYPITA
LRMKFMMAMEYPYTA

SEQ ID NO: 222322 - protein, 15 aa, Artificial Sequence
  Description of Artificial Sequence: Synthetic peptide
  Seed: LRMKWMMAMKYPITA
LRMKFMMAMFYPATA

SEQ ID NO: 222323 - protein, 15 aa, Artificial Sequence
  Description of Artificial Sequence: Synthetic peptide
  Seed: LRMKWMMAMKYPITA
LRMKFMMAMFYPDTA

SEQ ID NO: 222324 - protein, 15 aa, Artificial Sequence
  Description of Artificial Sequence: Synthetic peptide
  Seed: LRMKWMMAMKYPITA
LRMKFMMAMFYPETA

SEQ ID NO: 222325 - protein, 15 aa, Artificial Sequence
  Description of Artificial Sequence: Synthetic peptide
  Seed: LRMKWMMAMKYPITA
LRMKFMMAMFYPFTA

SEQ ID NO: 222326 - protein, 15 aa, Artificial Sequence
  Description of Artificial Sequence: Synthetic peptide
  Seed: LRMKWMMAMKYPITA
LRMKFMMAMFYPGTA

SEQ ID NO: 222327 - protein, 15 aa, Artificial Sequence
  Description of Artificial Sequence: Synthetic peptide
  Seed: LRMKWMMAMKYPITA
LRMKFMMAMFYPHTA

SEQ ID NO: 222328 - protein, 15 aa, Artificial Sequence
  Description of Artificial Sequence: Synthetic peptide
  Seed: LRMKWMMAMKYPITA
LRMKFMMAMFYPITA

SEQ ID NO: 222329 - protein, 15 aa, Artificial Sequence
  Description of Artificial Sequence: Synthetic peptide
  Seed: LRMKWMMAMKYPITA
LRMKFMMAMFYPLTA

SEQ ID NO: 222330 - protein, 15 aa, Artificial Sequence
  Description of Artificial Sequence: Synthetic peptide
  Seed: LRMKWMMAMKYPITA
LRMKFMMAMFYPMTA

SEQ ID NO: 222331 - protein, 15 aa, Artificial Sequence
  Description of Artificial Sequence: Synthetic peptide
  Seed: LRMKWMMAMKYPITA
LRMKFMMAMFYPNTA

SEQ ID NO: 222332 - protein, 15 aa, Artificial Sequence
  Description of Artificial Sequence: Synthetic peptide
  Seed: LRMKWMMAMKYPITA
LRMKFMMAMFYPQTA

SEQ ID NO: 222333 - protein, 15 aa, Artificial Sequence
  Description of Artificial Sequence: Synthetic peptide
  Seed: LRMKWMMAMKYPITA
LRMKFMMAMFYPSTA

SEQ ID NO: 222334 - protein, 15 aa, Artificial Sequence
  Description of Artificial Sequence: Synthetic peptide
  Seed: LRMKWMMAMKYPITA
LRMKFMMAMFYPTTA

SEQ ID NO: 222335 - protein, 15 aa, Artificial Sequence
  Description of Artificial Sequence: Synthetic peptide
  Seed: LRMKWMMAMKYPITA
LRMKFMMAMFYPVTA

SEQ ID NO: 222336 - protein, 15 aa, Artificial Sequence
  Description of Artificial Sequence: Synthetic peptide
  Seed: LRMKWMMAMKYPITA
LRMKFMMAMFYPYTA

SEQ ID NO: 222337 - protein, 15 aa, Artificial Sequence
  Description of Artificial Sequence: Synthetic peptide
  Seed: LRMKWMMAMKYPITA
LRMKFMMAMGYPATA

SEQ ID NO: 222338 - protein, 15 aa, Artificial Sequence
  Description of Artificial Sequence: Synthetic peptide
  Seed: LRMKWMMAMKYPITA
LRMKFMMAMGYPCTA

SEQ ID NO: 222339 - protein, 15 aa, Artificial Sequence
  Description of Artificial Sequence: Synthetic peptide
  Seed: LRMKWMMAMKYPITA
LRMKFMMAMGYPDTA

SEQ ID NO: 222340 - protein, 15 aa, Artificial Sequence
  Description of Artificial Sequence: Synthetic peptide
  Seed: LRMKWMMAMKYPITA
LRMKFMMAMGYPETA

SEQ ID NO: 222341 - protein, 15 aa, Artificial Sequence
  Description of Artificial Sequence: Synthetic peptide
  Seed: LRMKWMMAMKYPITA
LRMKFMMAMGYPFTA

SEQ ID NO: 222342 - protein, 15 aa, Artificial Sequence
  Description of Artificial Sequence: Synthetic peptide
  Seed: LRMKWMMAMKYPITA
LRMKFMMAMGYPGTA

SEQ ID NO: 222343 - protein, 15 aa, Artificial Sequence
  Description of Artificial Sequence: Synthetic peptide
  Seed: LRMKWMMAMKYPITA
LRMKFMMAMGYPHTA

SEQ ID NO: 222344 - protein, 15 aa, Artificial Sequence
  Description of Artificial Sequence: Synthetic peptide
  Seed: LRMKWMMAMKYPITA
LRMKFMMAMGYPITA

SEQ ID NO: 222345 - protein, 15 aa, Artificial Sequence
  Description of Artificial Sequence: Synthetic peptide
  Seed: LRMKWMMAMKYPITA
LRMKFMMAMGYPKTA

SEQ ID NO: 222346 - protein, 15 aa, Artificial Sequence
  Description of Artificial Sequence: Synthetic peptide
  Seed: LRMKWMMAMKYPITA
LRMKFMMAMGYPLTA

SEQ ID NO: 222347 - protein, 15 aa, Artificial Sequence
  Description of Artificial Sequence: Synthetic peptide
  Seed: LRMKWMMAMKYPITA
LRMKFMMAMGYPMTA

SEQ ID NO: 222348 - protein, 15 aa, Artificial Sequence
  Description of Artificial Sequence: Synthetic peptide
  Seed: LRMKWMMAMKYPITA
LRMKFMMAMGYPNTA

SEQ ID NO: 222349 - protein, 15 aa, Artificial Sequence
  Description of Artificial Sequence: Synthetic peptide
  Seed: LRMKWMMAMKYPITA
LRMKFMMAMGYPPTA

SEQ ID NO: 222350 - protein, 15 aa, Artificial Sequence
  Description of Artificial Sequence: Synthetic peptide
  Seed: LRMKWMMAMKYPITA
LRMKFMMAMGYPQTA

SEQ ID NO: 222351 - protein, 15 aa, Artificial Sequence
  Description of Artificial Sequence: Synthetic peptide
  Seed: LRMKWMMAMKYPITA
LRMKFMMAMGYPRTA

SEQ ID NO: 222352 - protein, 15 aa, Artificial Sequence
  Description of Artificial Sequence: Synthetic peptide
  Seed: LRMKWMMAMKYPITA
LRMKFMMAMGYPSTA

SEQ ID NO: 222353 - protein, 15 aa, Artificial Sequence
  Description of Artificial Sequence: Synthetic peptide
  Seed: LRMKWMMAMKYPITA
LRMKFMMAMGYPTTA

SEQ ID NO: 222354 - protein, 15 aa, Artificial Sequence
  Description of Artificial Sequence: Synthetic peptide
  Seed: LRMKWMMAMKYPITA
LRMKFMMAMGYPVTA

SEQ ID NO: 222355 - protein, 15 aa, Artificial Sequence
  Description of Artificial Sequence: Synthetic peptide
  Seed: LRMKWMMAMKYPITA
LRMKFMMAMGYPWTA

SEQ ID NO: 222356 - protein, 15 aa, Artificial Sequence
  Description of Artificial Sequence: Synthetic peptide
  Seed: LRMKWMMAMKYPITA
LRMKFMMAMGYPYTA

SEQ ID NO: 222357 - protein, 15 aa, Artificial Sequence
  Description of Artificial Sequence: Synthetic peptide
  Seed: LRMKWMMAMKYPITA
LRMKFMMAMHYPATA

SEQ ID NO: 222358 - protein, 15 aa, Artificial Sequence
  Description of Artificial Sequence: Synthetic peptide
  Seed: LRMKWMMAMKYPITA
LRMKFMMAMHYPCTA

SEQ ID NO: 222359 - protein, 15 aa, Artificial Sequence
  Description of Artificial Sequence: Synthetic peptide
  Seed: LRMKWMMAMKYPITA
LRMKFMMAMHYPDTA

SEQ ID NO: 222360 - protein, 15 aa, Artificial Sequence
  Description of Artificial Sequence: Synthetic peptide
  Seed: LRMKWMMAMKYPITA
LRMKFMMAMHYPETA

SEQ ID NO: 222361 - protein, 15 aa, Artificial Sequence
  Description of Artificial Sequence: Synthetic peptide
  Seed: LRMKWMMAMKYPITA
LRMKFMMAMHYPFTA

SEQ ID NO: 222362 - protein, 15 aa, Artificial Sequence
  Description of Artificial Sequence: Synthetic peptide
  Seed: LRMKWMMAMKYPITA
LRMKFMMAMHYPGTA

SEQ ID NO: 222363 - protein, 15 aa, Artificial Sequence
  Description of Artificial Sequence: Synthetic peptide
  Seed: LRMKWMMAMKYPITA
LRMKFMMAMHYPHTA

SEQ ID NO: 222364 - protein, 15 aa, Artificial Sequence
  Description of Artificial Sequence: Synthetic peptide
  Seed: LRMKWMMAMKYPITA
LRMKFMMAMHYPITA

SEQ ID NO: 222365 - protein, 15 aa, Artificial Sequence
  Description of Artificial Sequence: Synthetic peptide
  Seed: LRMKWMMAMKYPITA
LRMKFMMAMHYPKTA

SEQ ID NO: 222366 - protein, 15 aa, Artificial Sequence
  Description of Artificial Sequence: Synthetic peptide
  Seed: LRMKWMMAMKYPITA
LRMKFMMAMHYPLTA

SEQ ID NO: 222367 - protein, 15 aa, Artificial Sequence
  Description of Artificial Sequence: Synthetic peptide
  Seed: LRMKWMMAMKYPITA
LRMKFMMAMHYPMTA

SEQ ID NO: 222368 - protein, 15 aa, Artificial Sequence
  Description of Artificial Sequence: Synthetic peptide
  Seed: LRMKWMMAMKYPITA
LRMKFMMAMHYPNTA

SEQ ID NO: 222369 - protein, 15 aa, Artificial Sequence
  Description of Artificial Sequence: Synthetic peptide
  Seed: LRMKWMMAMKYPITA
LRMKFMMAMHYPQTA

SEQ ID NO: 222370 - protein, 15 aa, Artificial Sequence
  Description of Artificial Sequence: Synthetic peptide
  Seed: LRMKWMMAMKYPITA
LRMKFMMAMHYPRTA

SEQ ID NO: 222371 - protein, 15 aa, Artificial Sequence
  Description of Artificial Sequence: Synthetic peptide
  Seed: LRMKWMMAMKYPITA
LRMKFMMAMHYPSTA

SEQ ID NO: 222372 - protein, 15 aa, Artificial Sequence
  Description of Artificial Sequence: Synthetic peptide
  Seed: LRMKWMMAMKYPITA
LRMKFMMAMHYPTTA

SEQ ID NO: 222373 - protein, 15 aa, Artificial Sequence
  Description of Artificial Sequence: Synthetic peptide
  Seed: LRMKWMMAMKYPITA
LRMKFMMAMHYPVTA

SEQ ID NO: 222374 - protein, 15 aa, Artificial Sequence
  Description of Artificial Sequence: Synthetic peptide
  Seed: LRMKWMMAMKYPITA
LRMKFMMAMHYPYTA

SEQ ID NO: 222375 - protein, 15 aa, Artificial Sequence
  Description of Artificial Sequence: Synthetic peptide
  Seed: LRMKWMMAMKYPITA
LRMKFMMAMIYPATA

SEQ ID NO: 222376 - protein, 15 aa, Artificial Sequence
  Description of Artificial Sequence: Synthetic peptide
  Seed: LRMKWMMAMKYPITA
LRMKFMMAMIYPCTA

SEQ ID NO: 222377 - protein, 15 aa, Artificial Sequence
  Description of Artificial Sequence: Synthetic peptide
  Seed: LRMKWMMAMKYPITA
LRMKFMMAMIYPDTA

SEQ ID NO: 222378 - protein, 15 aa, Artificial Sequence
  Description of Artificial Sequence: Synthetic peptide
  Seed: LRMKWMMAMKYPITA
LRMKFMMAMIYPETA

SEQ ID NO: 222379 - protein, 15 aa, Artificial Sequence
  Description of Artificial Sequence: Synthetic peptide
  Seed: LRMKWMMAMKYPITA
LRMKFMMAMIYPFTA

SEQ ID NO: 222380 - protein, 15 aa, Artificial Sequence
  Description of Artificial Sequence: Synthetic peptide
  Seed: LRMKWMMAMKYPITA
LRMKFMMAMIYPGTA

SEQ ID NO: 222381 - protein, 15 aa, Artificial Sequence
  Description of Artificial Sequence: Synthetic peptide
  Seed: LRMKWMMAMKYPITA
LRMKFMMAMIYPHTA

SEQ ID NO: 222382 - protein, 15 aa, Artificial Sequence
  Description of Artificial Sequence: Synthetic peptide
  Seed: LRMKWMMAMKYPITA
LRMKFMMAMIYPITA

SEQ ID NO: 222383 - protein, 15 aa, Artificial Sequence
  Description of Artificial Sequence: Synthetic peptide
  Seed: LRMKWMMAMKYPITA
LRMKFMMAMIYPKTA

SEQ ID NO: 222384 - protein, 15 aa, Artificial Sequence
  Description of Artificial Sequence: Synthetic peptide
  Seed: LRMKWMMAMKYPITA
LRMKFMMAMIYPLTA

SEQ ID NO: 222385 - protein, 15 aa, Artificial Sequence
  Description of Artificial Sequence: Synthetic peptide
  Seed: LRMKWMMAMKYPITA
LRMKFMMAMIYPMTA

SEQ ID NO: 222386 - protein, 15 aa, Artificial Sequence
  Description of Artificial Sequence: Synthetic peptide
  Seed: LRMKWMMAMKYPITA
LRMKFMMAMIYPNTA

SEQ ID NO: 222387 - protein, 15 aa, Artificial Sequence
  Description of Artificial Sequence: Synthetic peptide
  Seed: LRMKWMMAMKYPITA
LRMKFMMAMIYPPTA

SEQ ID NO: 222388 - protein, 15 aa, Artificial Sequence
  Description of Artificial Sequence: Synthetic peptide
  Seed: LRMKWMMAMKYPITA
LRMKFMMAMIYPQTA

SEQ ID NO: 222389 - protein, 15 aa, Artificial Sequence
  Description of Artificial Sequence: Synthetic peptide
  Seed: LRMKWMMAMKYPITA
LRMKFMMAMIYPRTA

SEQ ID NO: 222390 - protein, 15 aa, Artificial Sequence
  Description of Artificial Sequence: Synthetic peptide
  Seed: LRMKWMMAMKYPITA
LRMKFMMAMIYPSTA

SEQ ID NO: 222391 - protein, 15 aa, Artificial Sequence
  Description of Artificial Sequence: Synthetic peptide
  Seed: LRMKWMMAMKYPITA
LRMKFMMAMIYPTTA

SEQ ID NO: 222392 - protein, 15 aa, Artificial Sequence
  Description of Artificial Sequence: Synthetic peptide
  Seed: LRMKWMMAMKYPITA
LRMKFMMAMIYPVTA

SEQ ID NO: 222393 - protein, 15 aa, Artificial Sequence
  Description of Artificial Sequence: Synthetic peptide
  Seed: LRMKWMMAMKYPITA
LRMKFMMAMIYPWTA

SEQ ID NO: 222394 - protein, 15 aa, Artificial Sequence
  Description of Artificial Sequence: Synthetic peptide
  Seed: LRMKWMMAMKYPITA
LRMKFMMAMIYPYTA

SEQ ID NO: 222395 - protein, 15 aa, Artificial Sequence
  Description of Artificial Sequence: Synthetic peptide
  Seed: LRMKWMMAMKYPITA
LRMKFMMAMKYPATA

SEQ ID NO: 222396 - protein, 15 aa, Artificial Sequence
  Description of Artificial Sequence: Synthetic peptide
  Seed: LRMKWMMAMKYPITA
LRMKFMMAMKYPCTA

SEQ ID NO: 222397 - protein, 15 aa, Artificial Sequence
  Description of Artificial Sequence: Synthetic peptide
  Seed: LRMKWMMAMKYPITA
LRMKFMMAMKYPDTA

SEQ ID NO: 222398 - protein, 15 aa, Artificial Sequence
  Description of Artificial Sequence: Synthetic peptide
  Seed: LRMKWMMAMKYPITA
LRMKFMMAMKYPETA

SEQ ID NO: 222399 - protein, 15 aa, Artificial Sequence
  Description of Artificial Sequence: Synthetic peptide
  Seed: LRMKWMMAMKYPITA
LRMKFMMAMKYPFTA

SEQ ID NO: 222400 - protein, 15 aa, Artificial Sequence
  Description of Artificial Sequence: Synthetic peptide
  Seed: LRMKWMMAMKYPITA
LRMKFMMAMKYPGTA

SEQ ID NO: 222401 - protein, 15 aa, Artificial Sequence
  Description of Artificial Sequence: Synthetic peptide
  Seed: LRMKWMMAMKYPITA
LRMKFMMAMKYPHTA

SEQ ID NO: 222402 - protein, 15 aa, Artificial Sequence
  Description of Artificial Sequence: Synthetic peptide
  Seed: LRMKWMMAMKYPITA
LRMKFMMAMKYPITA

SEQ ID NO: 222403 - protein, 15 aa, Artificial Sequence
  Description of Artificial Sequence: Synthetic peptide
  Seed: LRMKWMMAMKYPITA
LRMKFMMAMKYPKTA

SEQ ID NO: 222404 - protein, 15 aa, Artificial Sequence
  Description of Artificial Sequence: Synthetic peptide
  Seed: LRMKWMMAMKYPITA
LRMKFMMAMKYPLTA

SEQ ID NO: 222405 - protein, 15 aa, Artificial Sequence
  Description of Artificial Sequence: Synthetic peptide
  Seed: LRMKWMMAMKYPITA
LRMKFMMAMKYPMTA

SEQ ID NO: 222406 - protein, 15 aa, Artificial Sequence
  Description of Artificial Sequence: Synthetic peptide
  Seed: LRMKWMMAMKYPITA
LRMKFMMAMKYPNTA

SEQ ID NO: 222407 - protein, 15 aa, Artificial Sequence
  Description of Artificial Sequence: Synthetic peptide
  Seed: LRMKWMMAMKYPITA
LRMKFMMAMKYPPTA

SEQ ID NO: 222408 - protein, 15 aa, Artificial Sequence
  Description of Artificial Sequence: Synthetic peptide
  Seed: LRMKWMMAMKYPITA
LRMKFMMAMKYPQTA

SEQ ID NO: 222409 - protein, 15 aa, Artificial Sequence
  Description of Artificial Sequence: Synthetic peptide
  Seed: LRMKWMMAMKYPITA
LRMKFMMAMKYPRTA

SEQ ID NO: 222410 - protein, 15 aa, Artificial Sequence
  Description of Artificial Sequence: Synthetic peptide
  Seed: LRMKWMMAMKYPITA
LRMKFMMAMKYPSTA

SEQ ID NO: 222411 - protein, 15 aa, Artificial Sequence
  Description of Artificial Sequence: Synthetic peptide
  Seed: LRMKWMMAMKYPITA
LRMKFMMAMKYPTTA

SEQ ID NO: 222412 - protein, 15 aa, Artificial Sequence
  Description of Artificial Sequence: Synthetic peptide
  Seed: LRMKWMMAMKYPITA
LRMKFMMAMKYPVTA

SEQ ID NO: 222413 - protein, 15 aa, Artificial Sequence
  Description of Artificial Sequence: Synthetic peptide
  Seed: LRMKWMMAMKYPITA
LRMKFMMAMKYPWTA

SEQ ID NO: 222414 - protein, 15 aa, Artificial Sequence
  Description of Artificial Sequence: Synthetic peptide
  Seed: LRMKWMMAMKYPITA
LRMKFMMAMKYPYTA

SEQ ID NO: 222415 - protein, 15 aa, Artificial Sequence
  Description of Artificial Sequence: Synthetic peptide
  Seed: LRMKWMMAMKYPITA
LRMKFMMAMLYPATA

SEQ ID NO: 222416 - protein, 15 aa, Artificial Sequence
  Description of Artificial Sequence: Synthetic peptide
  Seed: LRMKWMMAMKYPITA
LRMKFMMAMLYPCTA

SEQ ID NO: 222417 - protein, 15 aa, Artificial Sequence
  Description of Artificial Sequence: Synthetic peptide
  Seed: LRMKWMMAMKYPITA
LRMKFMMAMLYPDTA

SEQ ID NO: 222418 - protein, 15 aa, Artificial Sequence
  Description of Artificial Sequence: Synthetic peptide
  Seed: LRMKWMMAMKYPITA
LRMKFMMAMLYPGTA

SEQ ID NO: 222419 - protein, 15 aa, Artificial Sequence
  Description of Artificial Sequence: Synthetic peptide
  Seed: LRMKWMMAMKYPITA
LRMKFMMAMLYPITA

SEQ ID NO: 222420 - protein, 15 aa, Artificial Sequence
  Description of Artificial Sequence: Synthetic peptide
  Seed: LRMKWMMAMKYPITA
LRMKFMMAMLYPLTA

SEQ ID NO: 222421 - protein, 15 aa, Artificial Sequence
  Description of Artificial Sequence: Synthetic peptide
  Seed: LRMKWMMAMKYPITA
LRMKFMMAMLYPMTA

SEQ ID NO: 222422 - protein, 15 aa, Artificial Sequence
  Description of Artificial Sequence: Synthetic peptide
  Seed: LRMKWMMAMKYPITA
LRMKFMMAMLYPNTA

SEQ ID NO: 222423 - protein, 15 aa, Artificial Sequence
  Description of Artificial Sequence: Synthetic peptide
  Seed: LRMKWMMAMKYPITA
LRMKFMMAMLYPQTA

SEQ ID NO: 222424 - protein, 15 aa, Artificial Sequence
  Description of Artificial Sequence: Synthetic peptide
  Seed: LRMKWMMAMKYPITA
LRMKFMMAMLYPRTA

SEQ ID NO: 222425 - protein, 15 aa, Artificial Sequence
  Description of Artificial Sequence: Synthetic peptide
  Seed: LRMKWMMAMKYPITA
LRMKFMMAMLYPSTA

SEQ ID NO: 222426 - protein, 15 aa, Artificial Sequence
  Description of Artificial Sequence: Synthetic peptide
  Seed: LRMKWMMAMKYPITA
LRMKFMMAMLYPTTA

SEQ ID NO: 222427 - protein, 15 aa, Artificial Sequence
  Description of Artificial Sequence: Synthetic peptide
  Seed: LRMKWMMAMKYPITA
LRMKFMMAMLYPVTA

SEQ ID NO: 222428 - protein, 15 aa, Artificial Sequence
  Description of Artificial Sequence: Synthetic peptide
  Seed: LRMKWMMAMKYPITA
LRMKFMMAMMYPATA

SEQ ID NO: 222429 - protein, 15 aa, Artificial Sequence
  Description of Artificial Sequence: Synthetic peptide
  Seed: LRMKWMMAMKYPITA
LRMKFMMAMMYPCTA

SEQ ID NO: 222430 - protein, 15 aa, Artificial Sequence
  Description of Artificial Sequence: Synthetic peptide
  Seed: LRMKWMMAMKYPITA
LRMKFMMAMMYPDTA

SEQ ID NO: 222431 - protein, 15 aa, Artificial Sequence
  Description of Artificial Sequence: Synthetic peptide
  Seed: LRMKWMMAMKYPITA
LRMKFMMAMMYPGTA

SEQ ID NO: 222432 - protein, 15 aa, Artificial Sequence
  Description of Artificial Sequence: Synthetic peptide
  Seed: LRMKWMMAMKYPITA
LRMKFMMAMMYPITA

SEQ ID NO: 222433 - protein, 15 aa, Artificial Sequence
  Description of Artificial Sequence: Synthetic peptide
  Seed: LRMKWMMAMKYPITA
LRMKFMMAMMYPKTA

SEQ ID NO: 222434 - protein, 15 aa, Artificial Sequence
  Description of Artificial Sequence: Synthetic peptide
  Seed: LRMKWMMAMKYPITA
LRMKFMMAMMYPLTA

SEQ ID NO: 222435 - protein, 15 aa, Artificial Sequence
  Description of Artificial Sequence: Synthetic peptide
  Seed: LRMKWMMAMKYPITA
LRMKFMMAMMYPMTA

SEQ ID NO: 222436 - protein, 15 aa, Artificial Sequence
  Description of Artificial Sequence: Synthetic peptide
  Seed: LRMKWMMAMKYPITA
LRMKFMMAMMYPNTA

SEQ ID NO: 222437 - protein, 15 aa, Artificial Sequence
  Description of Artificial Sequence: Synthetic peptide
  Seed: LRMKWMMAMKYPITA
LRMKFMMAMMYPQTA

SEQ ID NO: 222438 - protein, 15 aa, Artificial Sequence
  Description of Artificial Sequence: Synthetic peptide
  Seed: LRMKWMMAMKYPITA
LRMKFMMAMMYPRTA

SEQ ID NO: 222439 - protein, 15 aa, Artificial Sequence
  Description of Artificial Sequence: Synthetic peptide
  Seed: LRMKWMMAMKYPITA
LRMKFMMAMMYPSTA

SEQ ID NO: 222440 - protein, 15 aa, Artificial Sequence
  Description of Artificial Sequence: Synthetic peptide
  Seed: LRMKWMMAMKYPITA
LRMKFMMAMMYPTTA

SEQ ID NO: 222441 - protein, 15 aa, Artificial Sequence
  Description of Artificial Sequence: Synthetic peptide
  Seed: LRMKWMMAMKYPITA
LRMKFMMAMMYPVTA

SEQ ID NO: 222442 - protein, 15 aa, Artificial Sequence
  Description of Artificial Sequence: Synthetic peptide
  Seed: LRMKWMMAMKYPITA
LRMKFMMAMMYPYTA

SEQ ID NO: 222443 - protein, 15 aa, Artificial Sequence
  Description of Artificial Sequence: Synthetic peptide
  Seed: LRMKWMMAMKYPITA
LRMKFMMAMNYPATA

SEQ ID NO: 222444 - protein, 15 aa, Artificial Sequence
  Description of Artificial Sequence: Synthetic peptide
  Seed: LRMKWMMAMKYPITA
LRMKFMMAMNYPCTA

SEQ ID NO: 222445 - protein, 15 aa, Artificial Sequence
  Description of Artificial Sequence: Synthetic peptide
  Seed: LRMKWMMAMKYPITA
LRMKFMMAMNYPDTA

SEQ ID NO: 222446 - protein, 15 aa, Artificial Sequence
  Description of Artificial Sequence: Synthetic peptide
  Seed: LRMKWMMAMKYPITA
LRMKFMMAMNYPETA

SEQ ID NO: 222447 - protein, 15 aa, Artificial Sequence
  Description of Artificial Sequence: Synthetic peptide
  Seed: LRMKWMMAMKYPITA
LRMKFMMAMNYPFTA

SEQ ID NO: 222448 - protein, 15 aa, Artificial Sequence
  Description of Artificial Sequence: Synthetic peptide
  Seed: LRMKWMMAMKYPITA
LRMKFMMAMNYPGTA

SEQ ID NO: 222449 - protein, 15 aa, Artificial Sequence
  Description of Artificial Sequence: Synthetic peptide
  Seed: LRMKWMMAMKYPITA
LRMKFMMAMNYPHTA

SEQ ID NO: 222450 - protein, 15 aa, Artificial Sequence
  Description of Artificial Sequence: Synthetic peptide
  Seed: LRMKWMMAMKYPITA
LRMKFMMAMNYPITA

SEQ ID NO: 222451 - protein, 15 aa, Artificial Sequence
  Description of Artificial Sequence: Synthetic peptide
  Seed: LRMKWMMAMKYPITA
LRMKFMMAMNYPKTA

SEQ ID NO: 222452 - protein, 15 aa, Artificial Sequence
  Description of Artificial Sequence: Synthetic peptide
  Seed: LRMKWMMAMKYPITA
LRMKFMMAMNYPLTA

SEQ ID NO: 222453 - protein, 15 aa, Artificial Sequence
  Description of Artificial Sequence: Synthetic peptide
  Seed: LRMKWMMAMKYPITA
LRMKFMMAMNYPMTA

SEQ ID NO: 222454 - protein, 15 aa, Artificial Sequence
  Description of Artificial Sequence: Synthetic peptide
  Seed: LRMKWMMAMKYPITA
LRMKFMMAMNYPNTA

SEQ ID NO: 222455 - protein, 15 aa, Artificial Sequence
  Description of Artificial Sequence: Synthetic peptide
  Seed: LRMKWMMAMKYPITA
LRMKFMMAMNYPPTA

SEQ ID NO: 222456 - protein, 15 aa, Artificial Sequence
  Description of Artificial Sequence: Synthetic peptide
  Seed: LRMKWMMAMKYPITA
LRMKFMMAMNYPQTA

SEQ ID NO: 222457 - protein, 15 aa, Artificial Sequence
  Description of Artificial Sequence: Synthetic peptide
  Seed: LRMKWMMAMKYPITA
LRMKFMMAMNYPRTA

SEQ ID NO: 222458 - protein, 15 aa, Artificial Sequence
  Description of Artificial Sequence: Synthetic peptide
  Seed: LRMKWMMAMKYPITA
LRMKFMMAMNYPSTA

SEQ ID NO: 222459 - protein, 15 aa, Artificial Sequence
  Description of Artificial Sequence: Synthetic peptide
  Seed: LRMKWMMAMKYPITA
LRMKFMMAMNYPTTA

SEQ ID NO: 222460 - protein, 15 aa, Artificial Sequence
  Description of Artificial Sequence: Synthetic peptide
  Seed: LRMKWMMAMKYPITA
LRMKFMMAMNYPVTA

SEQ ID NO: 222461 - protein, 15 aa, Artificial Sequence
  Description of Artificial Sequence: Synthetic peptide
  Seed: LRMKWMMAMKYPITA
LRMKFMMAMNYPWTA

SEQ ID NO: 222462 - protein, 15 aa, Artificial Sequence
  Description of Artificial Sequence: Synthetic peptide
  Seed: LRMKWMMAMKYPITA
LRMKFMMAMNYPYTA

SEQ ID NO: 222463 - protein, 15 aa, Artificial Sequence
  Description of Artificial Sequence: Synthetic peptide
  Seed: LRMKWMMAMKYPITA
LRMKFMMAMPYPATA

SEQ ID NO: 222464 - protein, 15 aa, Artificial Sequence
  Description of Artificial Sequence: Synthetic peptide
  Seed: LRMKWMMAMKYPITA
LRMKFMMAMPYPCTA

SEQ ID NO: 222465 - protein, 15 aa, Artificial Sequence
  Description of Artificial Sequence: Synthetic peptide
  Seed: LRMKWMMAMKYPITA
LRMKFMMAMPYPDTA

SEQ ID NO: 222466 - protein, 15 aa, Artificial Sequence
  Description of Artificial Sequence: Synthetic peptide
  Seed: LRMKWMMAMKYPITA
LRMKFMMAMPYPETA

SEQ ID NO: 222467 - protein, 15 aa, Artificial Sequence
  Description of Artificial Sequence: Synthetic peptide
  Seed: LRMKWMMAMKYPITA
LRMKFMMAMPYPFTA

SEQ ID NO: 222468 - protein, 15 aa, Artificial Sequence
  Description of Artificial Sequence: Synthetic peptide
  Seed: LRMKWMMAMKYPITA
LRMKFMMAMPYPGTA

SEQ ID NO: 222469 - protein, 15 aa, Artificial Sequence
  Description of Artificial Sequence: Synthetic peptide
  Seed: LRMKWMMAMKYPITA
LRMKFMMAMPYPHTA

SEQ ID NO: 222470 - protein, 15 aa, Artificial Sequence
  Description of Artificial Sequence: Synthetic peptide
  Seed: LRMKWMMAMKYPITA
LRMKFMMAMPYPITA

SEQ ID NO: 222471 - protein, 15 aa, Artificial Sequence
  Description of Artificial Sequence: Synthetic peptide
  Seed: LRMKWMMAMKYPITA
LRMKFMMAMPYPKTA

SEQ ID NO: 222472 - protein, 15 aa, Artificial Sequence
  Description of Artificial Sequence: Synthetic peptide
  Seed: LRMKWMMAMKYPITA
LRMKFMMAMPYPLTA

SEQ ID NO: 222473 - protein, 15 aa, Artificial Sequence
  Description of Artificial Sequence: Synthetic peptide
  Seed: LRMKWMMAMKYPITA
LRMKFMMAMPYPMTA

SEQ ID NO: 222474 - protein, 15 aa, Artificial Sequence
  Description of Artificial Sequence: Synthetic peptide
  Seed: LRMKWMMAMKYPITA
LRMKFMMAMPYPNTA

SEQ ID NO: 222475 - protein, 15 aa, Artificial Sequence
  Description of Artificial Sequence: Synthetic peptide
  Seed: LRMKWMMAMKYPITA
LRMKFMMAMPYPPTA

SEQ ID NO: 222476 - protein, 15 aa, Artificial Sequence
  Description of Artificial Sequence: Synthetic peptide
  Seed: LRMKWMMAMKYPITA
LRMKFMMAMPYPQTA

SEQ ID NO: 222477 - protein, 15 aa, Artificial Sequence
  Description of Artificial Sequence: Synthetic peptide
  Seed: LRMKWMMAMKYPITA
LRMKFMMAMPYPRTA

SEQ ID NO: 222478 - protein, 15 aa, Artificial Sequence
  Description of Artificial Sequence: Synthetic peptide
  Seed: LRMKWMMAMKYPITA
LRMKFMMAMPYPSTA

SEQ ID NO: 222479 - protein, 15 aa, Artificial Sequence
  Description of Artificial Sequence: Synthetic peptide
  Seed: LRMKWMMAMKYPITA
LRMKFMMAMPYPTTA

SEQ ID NO: 222480 - protein, 15 aa, Artificial Sequence
  Description of Artificial Sequence: Synthetic peptide
  Seed: LRMKWMMAMKYPITA
LRMKFMMAMPYPVTA

SEQ ID NO: 222481 - protein, 15 aa, Artificial Sequence
  Description of Artificial Sequence: Synthetic peptide
  Seed: LRMKWMMAMKYPITA
LRMKFMMAMPYPWTA

SEQ ID NO: 222482 - protein, 15 aa, Artificial Sequence
  Description of Artificial Sequence: Synthetic peptide
  Seed: LRMKWMMAMKYPITA
LRMKFMMAMPYPYTA

SEQ ID NO: 222483 - protein, 15 aa, Artificial Sequence
  Description of Artificial Sequence: Synthetic peptide
  Seed: LRMKWMMAMKYPITA
LRMKFMMAMQYPATA

SEQ ID NO: 222484 - protein, 15 aa, Artificial Sequence
  Description of Artificial Sequence: Synthetic peptide
  Seed: LRMKWMMAMKYPITA
LRMKFMMAMQYPCTA

SEQ ID NO: 222485 - protein, 15 aa, Artificial Sequence
  Description of Artificial Sequence: Synthetic peptide
  Seed: LRMKWMMAMKYPITA
LRMKFMMAMQYPDTA

SEQ ID NO: 222486 - protein, 15 aa, Artificial Sequence
  Description of Artificial Sequence: Synthetic peptide
  Seed: LRMKWMMAMKYPITA
LRMKFMMAMQYPETA

SEQ ID NO: 222487 - protein, 15 aa, Artificial Sequence
  Description of Artificial Sequence: Synthetic peptide
  Seed: LRMKWMMAMKYPITA
LRMKFMMAMQYPFTA

SEQ ID NO: 222488 - protein, 15 aa, Artificial Sequence
  Description of Artificial Sequence: Synthetic peptide
  Seed: LRMKWMMAMKYPITA
LRMKFMMAMQYPGTA

SEQ ID NO: 222489 - protein, 15 aa, Artificial Sequence
  Description of Artificial Sequence: Synthetic peptide
  Seed: LRMKWMMAMKYPITA
LRMKFMMAMQYPHTA

SEQ ID NO: 222490 - protein, 15 aa, Artificial Sequence
  Description of Artificial Sequence: Synthetic peptide
  Seed: LRMKWMMAMKYPITA
LRMKFMMAMQYPITA

SEQ ID NO: 222491 - protein, 15 aa, Artificial Sequence
  Description of Artificial Sequence: Synthetic peptide
  Seed: LRMKWMMAMKYPITA
LRMKFMMAMQYPKTA

SEQ ID NO: 222492 - protein, 15 aa, Artificial Sequence
  Description of Artificial Sequence: Synthetic peptide
  Seed: LRMKWMMAMKYPITA
LRMKFMMAMQYPLTA

SEQ ID NO: 222493 - protein, 15 aa, Artificial Sequence
  Description of Artificial Sequence: Synthetic peptide
  Seed: LRMKWMMAMKYPITA
LRMKFMMAMQYPMTA

SEQ ID NO: 222494 - protein, 15 aa, Artificial Sequence
  Description of Artificial Sequence: Synthetic peptide
  Seed: LRMKWMMAMKYPITA
LRMKFMMAMQYPNTA

SEQ ID NO: 222495 - protein, 15 aa, Artificial Sequence
  Description of Artificial Sequence: Synthetic peptide
  Seed: LRMKWMMAMKYPITA
LRMKFMMAMQYPPTA

SEQ ID NO: 222496 - protein, 15 aa, Artificial Sequence
  Description of Artificial Sequence: Synthetic peptide
  Seed: LRMKWMMAMKYPITA
LRMKFMMAMQYPQTA

SEQ ID NO: 222497 - protein, 15 aa, Artificial Sequence
  Description of Artificial Sequence: Synthetic peptide
  Seed: LRMKWMMAMKYPITA
LRMKFMMAMQYPRTA

SEQ ID NO: 222498 - protein, 15 aa, Artificial Sequence
  Description of Artificial Sequence: Synthetic peptide
  Seed: LRMKWMMAMKYPITA
LRMKFMMAMQYPSTA

SEQ ID NO: 222499 - protein, 15 aa, Artificial Sequence
  Description of Artificial Sequence: Synthetic peptide
  Seed: LRMKWMMAMKYPITA
LRMKFMMAMQYPTTA

SEQ ID NO: 222500 - protein, 15 aa, Artificial Sequence
  Description of Artificial Sequence: Synthetic peptide
  Seed: LRMKWMMAMKYPITA
LRMKFMMAMQYPVTA

SEQ ID NO: 222501 - protein, 15 aa, Artificial Sequence
  Description of Artificial Sequence: Synthetic peptide
  Seed: LRMKWMMAMKYPITA
LRMKFMMAMQYPWTA

SEQ ID NO: 222502 - protein, 15 aa, Artificial Sequence
  Description of Artificial Sequence: Synthetic peptide
  Seed: LRMKWMMAMKYPITA
LRMKFMMAMQYPYTA

SEQ ID NO: 222503 - protein, 15 aa, Artificial Sequence
  Description of Artificial Sequence: Synthetic peptide
  Seed: LRMKWMMAMKYPITA
LRMKFMMAMRYPATA

SEQ ID NO: 222504 - protein, 15 aa, Artificial Sequence
  Description of Artificial Sequence: Synthetic peptide
  Seed: LRMKWMMAMKYPITA
LRMKFMMAMRYPCTA

SEQ ID NO: 222505 - protein, 15 aa, Artificial Sequence
  Description of Artificial Sequence: Synthetic peptide
  Seed: LRMKWMMAMKYPITA
LRMKFMMAMRYPDTA

SEQ ID NO: 222506 - protein, 15 aa, Artificial Sequence
  Description of Artificial Sequence: Synthetic peptide
  Seed: LRMKWMMAMKYPITA
LRMKFMMAMRYPETA

SEQ ID NO: 222507 - protein, 15 aa, Artificial Sequence
  Description of Artificial Sequence: Synthetic peptide
  Seed: LRMKWMMAMKYPITA
LRMKFMMAMRYPFTA

SEQ ID NO: 222508 - protein, 15 aa, Artificial Sequence
  Description of Artificial Sequence: Synthetic peptide
  Seed: LRMKWMMAMKYPITA
LRMKFMMAMRYPGTA

SEQ ID NO: 222509 - protein, 15 aa, Artificial Sequence
  Description of Artificial Sequence: Synthetic peptide
  Seed: LRMKWMMAMKYPITA
LRMKFMMAMRYPHTA

SEQ ID NO: 222510 - protein, 15 aa, Artificial Sequence
  Description of Artificial Sequence: Synthetic peptide
  Seed: LRMKWMMAMKYPITA
LRMKFMMAMRYPITA

SEQ ID NO: 222511 - protein, 15 aa, Artificial Sequence
  Description of Artificial Sequence: Synthetic peptide
  Seed: LRMKWMMAMKYPITA
LRMKFMMAMRYPKTA

SEQ ID NO: 222512 - protein, 15 aa, Artificial Sequence
  Description of Artificial Sequence: Synthetic peptide
  Seed: LRMKWMMAMKYPITA
LRMKFMMAMRYPLTA

SEQ ID NO: 222513 - protein, 15 aa, Artificial Sequence
  Description of Artificial Sequence: Synthetic peptide
  Seed: LRMKWMMAMKYPITA
LRMKFMMAMRYPMTA

SEQ ID NO: 222514 - protein, 15 aa, Artificial Sequence
  Description of Artificial Sequence: Synthetic peptide
  Seed: LRMKWMMAMKYPITA
LRMKFMMAMRYPNTA

SEQ ID NO: 222515 - protein, 15 aa, Artificial Sequence
  Description of Artificial Sequence: Synthetic peptide
  Seed: LRMKWMMAMKYPITA
LRMKFMMAMRYPPTA

SEQ ID NO: 222516 - protein, 15 aa, Artificial Sequence
  Description of Artificial Sequence: Synthetic peptide
  Seed: LRMKWMMAMKYPITA
LRMKFMMAMRYPQTA

SEQ ID NO: 222517 - protein, 15 aa, Artificial Sequence
  Description of Artificial Sequence: Synthetic peptide
  Seed: LRMKWMMAMKYPITA
LRMKFMMAMRYPRTA

SEQ ID NO: 222518 - protein, 15 aa, Artificial Sequence
  Description of Artificial Sequence: Synthetic peptide
  Seed: LRMKWMMAMKYPITA
LRMKFMMAMRYPSTA

SEQ ID NO: 222519 - protein, 15 aa, Artificial Sequence
  Description of Artificial Sequence: Synthetic peptide
  Seed: LRMKWMMAMKYPITA
LRMKFMMAMRYPTTA

SEQ ID NO: 222520 - protein, 15 aa, Artificial Sequence
  Description of Artificial Sequence: Synthetic peptide
  Seed: LRMKWMMAMKYPITA
LRMKFMMAMRYPVTA

SEQ ID NO: 222521 - protein, 15 aa, Artificial Sequence
  Description of Artificial Sequence: Synthetic peptide
  Seed: LRMKWMMAMKYPITA
LRMKFMMAMRYPWTA

SEQ ID NO: 222522 - protein, 15 aa, Artificial Sequence
  Description of Artificial Sequence: Synthetic peptide
  Seed: LRMKWMMAMKYPITA
LRMKFMMAMRYPYTA

SEQ ID NO: 222523 - protein, 15 aa, Artificial Sequence
  Description of Artificial Sequence: Synthetic peptide
  Seed: LRMKWMMAMKYPITA
LRMKFMMAMSYPATA

SEQ ID NO: 222524 - protein, 15 aa, Artificial Sequence
  Description of Artificial Sequence: Synthetic peptide
  Seed: LRMKWMMAMKYPITA
LRMKFMMAMSYPCTA

SEQ ID NO: 222525 - protein, 15 aa, Artificial Sequence
  Description of Artificial Sequence: Synthetic peptide
  Seed: LRMKWMMAMKYPITA
LRMKFMMAMSYPDTA

SEQ ID NO: 222526 - protein, 15 aa, Artificial Sequence
  Description of Artificial Sequence: Synthetic peptide
  Seed: LRMKWMMAMKYPITA
LRMKFMMAMSYPETA

SEQ ID NO: 222527 - protein, 15 aa, Artificial Sequence
  Description of Artificial Sequence: Synthetic peptide
  Seed: LRMKWMMAMKYPITA
LRMKFMMAMSYPFTA

SEQ ID NO: 222528 - protein, 15 aa, Artificial Sequence
  Description of Artificial Sequence: Synthetic peptide
  Seed: LRMKWMMAMKYPITA
LRMKFMMAMSYPGTA

SEQ ID NO: 222529 - protein, 15 aa, Artificial Sequence
  Description of Artificial Sequence: Synthetic peptide
  Seed: LRMKWMMAMKYPITA
LRMKFMMAMSYPHTA

SEQ ID NO: 222530 - protein, 15 aa, Artificial Sequence
  Description of Artificial Sequence: Synthetic peptide
  Seed: LRMKWMMAMKYPITA
LRMKFMMAMSYPITA

SEQ ID NO: 222531 - protein, 15 aa, Artificial Sequence
  Description of Artificial Sequence: Synthetic peptide
  Seed: LRMKWMMAMKYPITA
LRMKFMMAMSYPKTA

SEQ ID NO: 222532 - protein, 15 aa, Artificial Sequence
  Description of Artificial Sequence: Synthetic peptide
  Seed: LRMKWMMAMKYPITA
LRMKFMMAMSYPLTA

SEQ ID NO: 222533 - protein, 15 aa, Artificial Sequence
  Description of Artificial Sequence: Synthetic peptide
  Seed: LRMKWMMAMKYPITA
LRMKFMMAMSYPMTA

SEQ ID NO: 222534 - protein, 15 aa, Artificial Sequence
  Description of Artificial Sequence: Synthetic peptide
  Seed: LRMKWMMAMKYPITA
LRMKFMMAMSYPNTA

SEQ ID NO: 222535 - protein, 15 aa, Artificial Sequence
  Description of Artificial Sequence: Synthetic peptide
  Seed: LRMKWMMAMKYPITA
LRMKFMMAMSYPPTA

SEQ ID NO: 222536 - protein, 15 aa, Artificial Sequence
  Description of Artificial Sequence: Synthetic peptide
  Seed: LRMKWMMAMKYPITA
LRMKFMMAMSYPQTA

SEQ ID NO: 222537 - protein, 15 aa, Artificial Sequence
  Description of Artificial Sequence: Synthetic peptide
  Seed: LRMKWMMAMKYPITA
LRMKFMMAMSYPRTA

SEQ ID NO: 222538 - protein, 15 aa, Artificial Sequence
  Description of Artificial Sequence: Synthetic peptide
  Seed: LRMKWMMAMKYPITA
LRMKFMMAMSYPSTA

SEQ ID NO: 222539 - protein, 15 aa, Artificial Sequence
  Description of Artificial Sequence: Synthetic peptide
  Seed: LRMKWMMAMKYPITA
LRMKFMMAMSYPTTA

SEQ ID NO: 222540 - protein, 15 aa, Artificial Sequence
  Description of Artificial Sequence: Synthetic peptide
  Seed: LRMKWMMAMKYPITA
LRMKFMMAMSYPVTA

SEQ ID NO: 222541 - protein, 15 aa, Artificial Sequence
  Description of Artificial Sequence: Synthetic peptide
  Seed: LRMKWMMAMKYPITA
LRMKFMMAMSYPWTA

SEQ ID NO: 222542 - protein, 15 aa, Artificial Sequence
  Description of Artificial Sequence: Synthetic peptide
  Seed: LRMKWMMAMKYPITA
LRMKFMMAMSYPYTA

SEQ ID NO: 222543 - protein, 15 aa, Artificial Sequence
  Description of Artificial Sequence: Synthetic peptide
  Seed: LRMKWMMAMKYPITA
LRMKFMMAMTYPATA

SEQ ID NO: 222544 - protein, 15 aa, Artificial Sequence
  Description of Artificial Sequence: Synthetic peptide
  Seed: LRMKWMMAMKYPITA
LRMKFMMAMTYPCTA

SEQ ID NO: 222545 - protein, 15 aa, Artificial Sequence
  Description of Artificial Sequence: Synthetic peptide
  Seed: LRMKWMMAMKYPITA
LRMKFMMAMTYPDTA

SEQ ID NO: 222546 - protein, 15 aa, Artificial Sequence
  Description of Artificial Sequence: Synthetic peptide
  Seed: LRMKWMMAMKYPITA
LRMKFMMAMTYPETA

SEQ ID NO: 222547 - protein, 15 aa, Artificial Sequence
  Description of Artificial Sequence: Synthetic peptide
  Seed: LRMKWMMAMKYPITA
LRMKFMMAMTYPFTA

SEQ ID NO: 222548 - protein, 15 aa, Artificial Sequence
  Description of Artificial Sequence: Synthetic peptide
  Seed: LRMKWMMAMKYPITA
LRMKFMMAMTYPGTA

SEQ ID NO: 222549 - protein, 15 aa, Artificial Sequence
  Description of Artificial Sequence: Synthetic peptide
  Seed: LRMKWMMAMKYPITA
LRMKFMMAMTYPHTA

SEQ ID NO: 222550 - protein, 15 aa, Artificial Sequence
  Description of Artificial Sequence: Synthetic peptide
  Seed: LRMKWMMAMKYPITA
LRMKFMMAMTYPITA

SEQ ID NO: 222551 - protein, 15 aa, Artificial Sequence
  Description of Artificial Sequence: Synthetic peptide
  Seed: LRMKWMMAMKYPITA
LRMKFMMAMTYPKTA

SEQ ID NO: 222552 - protein, 15 aa, Artificial Sequence
  Description of Artificial Sequence: Synthetic peptide
  Seed: LRMKWMMAMKYPITA
LRMKFMMAMTYPLTA

SEQ ID NO: 222553 - protein, 15 aa, Artificial Sequence
  Description of Artificial Sequence: Synthetic peptide
  Seed: LRMKWMMAMKYPITA
LRMKFMMAMTYPMTA

SEQ ID NO: 222554 - protein, 15 aa, Artificial Sequence
  Description of Artificial Sequence: Synthetic peptide
  Seed: LRMKWMMAMKYPITA
LRMKFMMAMTYPNTA

SEQ ID NO: 222555 - protein, 15 aa, Artificial Sequence
  Description of Artificial Sequence: Synthetic peptide
  Seed: LRMKWMMAMKYPITA
LRMKFMMAMTYPPTA

SEQ ID NO: 222556 - protein, 15 aa, Artificial Sequence
  Description of Artificial Sequence: Synthetic peptide
  Seed: LRMKWMMAMKYPITA
LRMKFMMAMTYPQTA

SEQ ID NO: 222557 - protein, 15 aa, Artificial Sequence
  Description of Artificial Sequence: Synthetic peptide
  Seed: LRMKWMMAMKYPITA
LRMKFMMAMTYPRTA

SEQ ID NO: 222558 - protein, 15 aa, Artificial Sequence
  Description of Artificial Sequence: Synthetic peptide
  Seed: LRMKWMMAMKYPITA
LRMKFMMAMTYPSTA

SEQ ID NO: 222559 - protein, 15 aa, Artificial Sequence
  Description of Artificial Sequence: Synthetic peptide
  Seed: LRMKWMMAMKYPITA
LRMKFMMAMTYPTTA

SEQ ID NO: 222560 - protein, 15 aa, Artificial Sequence
  Description of Artificial Sequence: Synthetic peptide
  Seed: LRMKWMMAMKYPITA
LRMKFMMAMTYPVTA

SEQ ID NO: 222561 - protein, 15 aa, Artificial Sequence
  Description of Artificial Sequence: Synthetic peptide
  Seed: LRMKWMMAMKYPITA
LRMKFMMAMTYPWTA

SEQ ID NO: 222562 - protein, 15 aa, Artificial Sequence
  Description of Artificial Sequence: Synthetic peptide
  Seed: LRMKWMMAMKYPITA
LRMKFMMAMTYPYTA

SEQ ID NO: 222563 - protein, 15 aa, Artificial Sequence
  Description of Artificial Sequence: Synthetic peptide
  Seed: LRMKWMMAMKYPITA
LRMKFMMAMVYPATA

SEQ ID NO: 222564 - protein, 15 aa, Artificial Sequence
  Description of Artificial Sequence: Synthetic peptide
  Seed: LRMKWMMAMKYPITA
LRMKFMMAMVYPCTA

SEQ ID NO: 222565 - protein, 15 aa, Artificial Sequence
  Description of Artificial Sequence: Synthetic peptide
  Seed: LRMKWMMAMKYPITA
LRMKFMMAMVYPDTA

SEQ ID NO: 222566 - protein, 15 aa, Artificial Sequence
  Description of Artificial Sequence: Synthetic peptide
  Seed: LRMKWMMAMKYPITA
LRMKFMMAMVYPETA

SEQ ID NO: 222567 - protein, 15 aa, Artificial Sequence
  Description of Artificial Sequence: Synthetic peptide
  Seed: LRMKWMMAMKYPITA
LRMKFMMAMVYPFTA

SEQ ID NO: 222568 - protein, 15 aa, Artificial Sequence
  Description of Artificial Sequence: Synthetic peptide
  Seed: LRMKWMMAMKYPITA
LRMKFMMAMVYPGTA

SEQ ID NO: 222569 - protein, 15 aa, Artificial Sequence
  Description of Artificial Sequence: Synthetic peptide
  Seed: LRMKWMMAMKYPITA
LRMKFMMAMVYPHTA

SEQ ID NO: 222570 - protein, 15 aa, Artificial Sequence
  Description of Artificial Sequence: Synthetic peptide
  Seed: LRMKWMMAMKYPITA
LRMKFMMAMVYPITA

SEQ ID NO: 222571 - protein, 15 aa, Artificial Sequence
  Description of Artificial Sequence: Synthetic peptide
  Seed: LRMKWMMAMKYPITA
LRMKFMMAMVYPKTA

SEQ ID NO: 222572 - protein, 15 aa, Artificial Sequence
  Description of Artificial Sequence: Synthetic peptide
  Seed: LRMKWMMAMKYPITA
LRMKFMMAMVYPLTA

SEQ ID NO: 222573 - protein, 15 aa, Artificial Sequence
  Description of Artificial Sequence: Synthetic peptide
  Seed: LRMKWMMAMKYPITA
LRMKFMMAMVYPMTA

SEQ ID NO: 222574 - protein, 15 aa, Artificial Sequence
  Description of Artificial Sequence: Synthetic peptide
  Seed: LRMKWMMAMKYPITA
LRMKFMMAMVYPNTA

SEQ ID NO: 222575 - protein, 15 aa, Artificial Sequence
  Description of Artificial Sequence: Synthetic peptide
  Seed: LRMKWMMAMKYPITA
LRMKFMMAMVYPPTA

SEQ ID NO: 222576 - protein, 15 aa, Artificial Sequence
  Description of Artificial Sequence: Synthetic peptide
  Seed: LRMKWMMAMKYPITA
LRMKFMMAMVYPQTA

SEQ ID NO: 222577 - protein, 15 aa, Artificial Sequence
  Description of Artificial Sequence: Synthetic peptide
  Seed: LRMKWMMAMKYPITA
LRMKFMMAMVYPRTA

SEQ ID NO: 222578 - protein, 15 aa, Artificial Sequence
  Description of Artificial Sequence: Synthetic peptide
  Seed: LRMKWMMAMKYPITA
LRMKFMMAMVYPSTA

SEQ ID NO: 222579 - protein, 15 aa, Artificial Sequence
  Description of Artificial Sequence: Synthetic peptide
  Seed: LRMKWMMAMKYPITA
LRMKFMMAMVYPTTA

SEQ ID NO: 222580 - protein, 15 aa, Artificial Sequence
  Description of Artificial Sequence: Synthetic peptide
  Seed: LRMKWMMAMKYPITA
LRMKFMMAMVYPVTA

SEQ ID NO: 222581 - protein, 15 aa, Artificial Sequence
  Description of Artificial Sequence: Synthetic peptide
  Seed: LRMKWMMAMKYPITA
LRMKFMMAMVYPWTA

SEQ ID NO: 222582 - protein, 15 aa, Artificial Sequence
  Description of Artificial Sequence: Synthetic peptide
  Seed: LRMKWMMAMKYPITA
LRMKFMMAMVYPYTA

SEQ ID NO: 222583 - protein, 15 aa, Artificial Sequence
  Description of Artificial Sequence: Synthetic peptide
  Seed: LRMKWMMAMKYPITA
LRMKFMMAMWYPATA

SEQ ID NO: 222584 - protein, 15 aa, Artificial Sequence
  Description of Artificial Sequence: Synthetic peptide
  Seed: LRMKWMMAMKYPITA
LRMKFMMAMWYPDTA

SEQ ID NO: 222585 - protein, 15 aa, Artificial Sequence
  Description of Artificial Sequence: Synthetic peptide
  Seed: LRMKWMMAMKYPITA
LRMKFMMAMWYPETA

SEQ ID NO: 222586 - protein, 15 aa, Artificial Sequence
  Description of Artificial Sequence: Synthetic peptide
  Seed: LRMKWMMAMKYPITA
LRMKFMMAMWYPFTA

SEQ ID NO: 222587 - protein, 15 aa, Artificial Sequence
  Description of Artificial Sequence: Synthetic peptide
  Seed: LRMKWMMAMKYPITA
LRMKFMMAMWYPGTA

SEQ ID NO: 222588 - protein, 15 aa, Artificial Sequence
  Description of Artificial Sequence: Synthetic peptide
  Seed: LRMKWMMAMKYPITA
LRMKFMMAMWYPHTA

SEQ ID NO: 222589 - protein, 15 aa, Artificial Sequence
  Description of Artificial Sequence: Synthetic peptide
  Seed: LRMKWMMAMKYPITA
LRMKFMMAMWYPITA

SEQ ID NO: 222590 - protein, 15 aa, Artificial Sequence
  Description of Artificial Sequence: Synthetic peptide
  Seed: LRMKWMMAMKYPITA
LRMKFMMAMWYPLTA

SEQ ID NO: 222591 - protein, 15 aa, Artificial Sequence
  Description of Artificial Sequence: Synthetic peptide
  Seed: LRMKWMMAMKYPITA
LRMKFMMAMWYPMTA

SEQ ID NO: 222592 - protein, 15 aa, Artificial Sequence
  Description of Artificial Sequence: Synthetic peptide
  Seed: LRMKWMMAMKYPITA
LRMKFMMAMWYPNTA

SEQ ID NO: 222593 - protein, 15 aa, Artificial Sequence
  Description of Artificial Sequence: Synthetic peptide
  Seed: LRMKWMMAMKYPITA
LRMKFMMAMWYPPTA

SEQ ID NO: 222594 - protein, 15 aa, Artificial Sequence
  Description of Artificial Sequence: Synthetic peptide
  Seed: LRMKWMMAMKYPITA
LRMKFMMAMWYPQTA

SEQ ID NO: 222595 - protein, 15 aa, Artificial Sequence
  Description of Artificial Sequence: Synthetic peptide
  Seed: LRMKWMMAMKYPITA
LRMKFMMAMWYPRTA

SEQ ID NO: 222596 - protein, 15 aa, Artificial Sequence
  Description of Artificial Sequence: Synthetic peptide
  Seed: LRMKWMMAMKYPITA
LRMKFMMAMWYPSTA

SEQ ID NO: 222597 - protein, 15 aa, Artificial Sequence
  Description of Artificial Sequence: Synthetic peptide
  Seed: LRMKWMMAMKYPITA
LRMKFMMAMWYPTTA

SEQ ID NO: 222598 - protein, 15 aa, Artificial Sequence
  Description of Artificial Sequence: Synthetic peptide
  Seed: LRMKWMMAMKYPITA
LRMKFMMAMWYPVTA

SEQ ID NO: 222599 - protein, 15 aa, Artificial Sequence
  Description of Artificial Sequence: Synthetic peptide
  Seed: LRMKWMMAMKYPITA
LRMKFMMAMWYPYTA

SEQ ID NO: 222600 - protein, 15 aa, Artificial Sequence
  Description of Artificial Sequence: Synthetic peptide
  Seed: LRMKWMMAMKYPITA
LRMKFMMAMYYPATA

SEQ ID NO: 222601 - protein, 15 aa, Artificial Sequence
  Description of Artificial Sequence: Synthetic peptide
  Seed: LRMKWMMAMKYPITA
LRMKFMMAMYYPDTA

SEQ ID NO: 222602 - protein, 15 aa, Artificial Sequence
  Description of Artificial Sequence: Synthetic peptide
  Seed: LRMKWMMAMKYPITA
LRMKFMMAMYYPETA

SEQ ID NO: 222603 - protein, 15 aa, Artificial Sequence
  Description of Artificial Sequence: Synthetic peptide
  Seed: LRMKWMMAMKYPITA
LRMKFMMAMYYPFTA

SEQ ID NO: 222604 - protein, 15 aa, Artificial Sequence
  Description of Artificial Sequence: Synthetic peptide
  Seed: LRMKWMMAMKYPITA
LRMKFMMAMYYPGTA

SEQ ID NO: 222605 - protein, 15 aa, Artificial Sequence
  Description of Artificial Sequence: Synthetic peptide
  Seed: LRMKWMMAMKYPITA
LRMKFMMAMYYPHTA

SEQ ID NO: 222606 - protein, 15 aa, Artificial Sequence
  Description of Artificial Sequence: Synthetic peptide
  Seed: LRMKWMMAMKYPITA
LRMKFMMAMYYPITA

SEQ ID NO: 222607 - protein, 15 aa, Artificial Sequence
  Description of Artificial Sequence: Synthetic peptide
  Seed: LRMKWMMAMKYPITA
LRMKFMMAMYYPLTA

SEQ ID NO: 222608 - protein, 15 aa, Artificial Sequence
  Description of Artificial Sequence: Synthetic peptide
  Seed: LRMKWMMAMKYPITA
LRMKFMMAMYYPMTA

SEQ ID NO: 222609 - protein, 15 aa, Artificial Sequence
  Description of Artificial Sequence: Synthetic peptide
  Seed: LRMKWMMAMKYPITA
LRMKFMMAMYYPNTA

SEQ ID NO: 222610 - protein, 15 aa, Artificial Sequence
  Description of Artificial Sequence: Synthetic peptide
  Seed: LRMKWMMAMKYPITA
LRMKFMMAMYYPQTA

SEQ ID NO: 222611 - protein, 15 aa, Artificial Sequence
  Description of Artificial Sequence: Synthetic peptide
  Seed: LRMKWMMAMKYPITA
LRMKFMMAMYYPSTA

SEQ ID NO: 222612 - protein, 15 aa, Artificial Sequence
  Description of Artificial Sequence: Synthetic peptide
  Seed: LRMKWMMAMKYPITA
LRMKFMMAMYYPTTA

SEQ ID NO: 222613 - protein, 15 aa, Artificial Sequence
  Description of Artificial Sequence: Synthetic peptide
  Seed: LRMKWMMAMKYPITA
LRMKFMMAMYYPVTA

SEQ ID NO: 222614 - protein, 15 aa, Artificial Sequence
  Description of Artificial Sequence: Synthetic peptide
  Seed: LRMKWMMAMKYPITA
LRMKFMMCMAYPATA

SEQ ID NO: 222615 - protein, 15 aa, Artificial Sequence
  Description of Artificial Sequence: Synthetic peptide
  Seed: LRMKWMMAMKYPITA
LRMKFMMCMAYPCTA

SEQ ID NO: 222616 - protein, 15 aa, Artificial Sequence
  Description of Artificial Sequence: Synthetic peptide
  Seed: LRMKWMMAMKYPITA
LRMKFMMCMAYPDTA

SEQ ID NO: 222617 - protein, 15 aa, Artificial Sequence
  Description of Artificial Sequence: Synthetic peptide
  Seed: LRMKWMMAMKYPITA
LRMKFMMCMAYPETA

SEQ ID NO: 222618 - protein, 15 aa, Artificial Sequence
  Description of Artificial Sequence: Synthetic peptide
  Seed: LRMKWMMAMKYPITA
LRMKFMMCMAYPFTA

SEQ ID NO: 222619 - protein, 15 aa, Artificial Sequence
  Description of Artificial Sequence: Synthetic peptide
  Seed: LRMKWMMAMKYPITA
LRMKFMMCMAYPGTA

SEQ ID NO: 222620 - protein, 15 aa, Artificial Sequence
  Description of Artificial Sequence: Synthetic peptide
  Seed: LRMKWMMAMKYPITA
LRMKFMMCMAYPHTA

SEQ ID NO: 222621 - protein, 15 aa, Artificial Sequence
  Description of Artificial Sequence: Synthetic peptide
  Seed: LRMKWMMAMKYPITA
LRMKFMMCMAYPITA

SEQ ID NO: 222622 - protein, 15 aa, Artificial Sequence
  Description of Artificial Sequence: Synthetic peptide
  Seed: LRMKWMMAMKYPITA
LRMKFMMCMAYPKTA

SEQ ID NO: 222623 - protein, 15 aa, Artificial Sequence
  Description of Artificial Sequence: Synthetic peptide
  Seed: LRMKWMMAMKYPITA
LRMKFMMCMAYPLTA

SEQ ID NO: 222624 - protein, 15 aa, Artificial Sequence
  Description of Artificial Sequence: Synthetic peptide
  Seed: LRMKWMMAMKYPITA
LRMKFMMCMAYPMTA

SEQ ID NO: 222625 - protein, 15 aa, Artificial Sequence
  Description of Artificial Sequence: Synthetic peptide
  Seed: LRMKWMMAMKYPITA
LRMKFMMCMAYPNTA

SEQ ID NO: 222626 - protein, 15 aa, Artificial Sequence
  Description of Artificial Sequence: Synthetic peptide
  Seed: LRMKWMMAMKYPITA
LRMKFMMCMAYPPTA

SEQ ID NO: 222627 - protein, 15 aa, Artificial Sequence
  Description of Artificial Sequence: Synthetic peptide
  Seed: LRMKWMMAMKYPITA
LRMKFMMCMAYPQTA

SEQ ID NO: 222628 - protein, 15 aa, Artificial Sequence
  Description of Artificial Sequence: Synthetic peptide
  Seed: LRMKWMMAMKYPITA
LRMKFMMCMAYPRTA

SEQ ID NO: 222629 - protein, 15 aa, Artificial Sequence
  Description of Artificial Sequence: Synthetic peptide
  Seed: LRMKWMMAMKYPITA
LRMKFMMCMAYPSTA

SEQ ID NO: 222630 - protein, 15 aa, Artificial Sequence
  Description of Artificial Sequence: Synthetic peptide
  Seed: LRMKWMMAMKYPITA
LRMKFMMCMAYPTTA

SEQ ID NO: 222631 - protein, 15 aa, Artificial Sequence
  Description of Artificial Sequence: Synthetic peptide
  Seed: LRMKWMMAMKYPITA
LRMKFMMCMAYPVTA

SEQ ID NO: 222632 - protein, 15 aa, Artificial Sequence
  Description of Artificial Sequence: Synthetic peptide
  Seed: LRMKWMMAMKYPITA
LRMKFMMCMAYPWTA

SEQ ID NO: 222633 - protein, 15 aa, Artificial Sequence
  Description of Artificial Sequence: Synthetic peptide
  Seed: LRMKWMMAMKYPITA
LRMKFMMCMAYPYTA

SEQ ID NO: 222634 - protein, 15 aa, Artificial Sequence
  Description of Artificial Sequence: Synthetic peptide
  Seed: LRMKWMMAMKYPITA
LRMKFMMCMCYPVTA

SEQ ID NO: 222635 - protein, 15 aa, Artificial Sequence
  Description of Artificial Sequence: Synthetic peptide
  Seed: LRMKWMMAMKYPITA
LRMKFMMCMDYPITA

SEQ ID NO: 222636 - protein, 15 aa, Artificial Sequence
  Description of Artificial Sequence: Synthetic peptide
  Seed: LRMKWMMAMKYPITA
LRMKFMMCMDYPLTA

SEQ ID NO: 222637 - protein, 15 aa, Artificial Sequence
  Description of Artificial Sequence: Synthetic peptide
  Seed: LRMKWMMAMKYPITA
LRMKFMMCMDYPVTA

SEQ ID NO: 222638 - protein, 15 aa, Artificial Sequence
  Description of Artificial Sequence: Synthetic peptide
  Seed: LRMKWMMAMKYPITA
LRMKFMMCMEYPITA

SEQ ID NO: 222639 - protein, 15 aa, Artificial Sequence
  Description of Artificial Sequence: Synthetic peptide
  Seed: LRMKWMMAMKYPITA
LRMKFMMCMEYPLTA

SEQ ID NO: 222640 - protein, 15 aa, Artificial Sequence
  Description of Artificial Sequence: Synthetic peptide
  Seed: LRMKWMMAMKYPITA
LRMKFMMCMEYPVTA

SEQ ID NO: 222641 - protein, 15 aa, Artificial Sequence
  Description of Artificial Sequence: Synthetic peptide
  Seed: LRMKWMMAMKYPITA
LRMKFMMCMFYPITA

SEQ ID NO: 222642 - protein, 15 aa, Artificial Sequence
  Description of Artificial Sequence: Synthetic peptide
  Seed: LRMKWMMAMKYPITA
LRMKFMMCMFYPLTA

SEQ ID NO: 222643 - protein, 15 aa, Artificial Sequence
  Description of Artificial Sequence: Synthetic peptide
  Seed: LRMKWMMAMKYPITA
LRMKFMMCMFYPVTA

SEQ ID NO: 222644 - protein, 15 aa, Artificial Sequence
  Description of Artificial Sequence: Synthetic peptide
  Seed: LRMKWMMAMKYPITA
LRMKFMMCMGYPATA

SEQ ID NO: 222645 - protein, 15 aa, Artificial Sequence
  Description of Artificial Sequence: Synthetic peptide
  Seed: LRMKWMMAMKYPITA
LRMKFMMCMGYPCTA

SEQ ID NO: 222646 - protein, 15 aa, Artificial Sequence
  Description of Artificial Sequence: Synthetic peptide
  Seed: LRMKWMMAMKYPITA
LRMKFMMCMGYPDTA

SEQ ID NO: 222647 - protein, 15 aa, Artificial Sequence
  Description of Artificial Sequence: Synthetic peptide
  Seed: LRMKWMMAMKYPITA
LRMKFMMCMGYPFTA

SEQ ID NO: 222648 - protein, 15 aa, Artificial Sequence
  Description of Artificial Sequence: Synthetic peptide
  Seed: LRMKWMMAMKYPITA
LRMKFMMCMGYPGTA

SEQ ID NO: 222649 - protein, 15 aa, Artificial Sequence
  Description of Artificial Sequence: Synthetic peptide
  Seed: LRMKWMMAMKYPITA
LRMKFMMCMGYPHTA

SEQ ID NO: 222650 - protein, 15 aa, Artificial Sequence
  Description of Artificial Sequence: Synthetic peptide
  Seed: LRMKWMMAMKYPITA
LRMKFMMCMGYPITA

SEQ ID NO: 222651 - protein, 15 aa, Artificial Sequence
  Description of Artificial Sequence: Synthetic peptide
  Seed: LRMKWMMAMKYPITA
LRMKFMMCMGYPLTA

SEQ ID NO: 222652 - protein, 15 aa, Artificial Sequence
  Description of Artificial Sequence: Synthetic peptide
  Seed: LRMKWMMAMKYPITA
LRMKFMMCMGYPMTA

SEQ ID NO: 222653 - protein, 15 aa, Artificial Sequence
  Description of Artificial Sequence: Synthetic peptide
  Seed: LRMKWMMAMKYPITA
LRMKFMMCMGYPNTA

SEQ ID NO: 222654 - protein, 15 aa, Artificial Sequence
  Description of Artificial Sequence: Synthetic peptide
  Seed: LRMKWMMAMKYPITA
LRMKFMMCMGYPPTA

SEQ ID NO: 222655 - protein, 15 aa, Artificial Sequence
  Description of Artificial Sequence: Synthetic peptide
  Seed: LRMKWMMAMKYPITA
LRMKFMMCMGYPQTA

SEQ ID NO: 222656 - protein, 15 aa, Artificial Sequence
  Description of Artificial Sequence: Synthetic peptide
  Seed: LRMKWMMAMKYPITA
LRMKFMMCMGYPSTA

SEQ ID NO: 222657 - protein, 15 aa, Artificial Sequence
  Description of Artificial Sequence: Synthetic peptide
  Seed: LRMKWMMAMKYPITA
LRMKFMMCMGYPTTA

SEQ ID NO: 222658 - protein, 15 aa, Artificial Sequence
  Description of Artificial Sequence: Synthetic peptide
  Seed: LRMKWMMAMKYPITA
LRMKFMMCMGYPVTA

SEQ ID NO: 222659 - protein, 15 aa, Artificial Sequence
  Description of Artificial Sequence: Synthetic peptide
  Seed: LRMKWMMAMKYPITA
LRMKFMMCMGYPYTA

SEQ ID NO: 222660 - protein, 15 aa, Artificial Sequence
  Description of Artificial Sequence: Synthetic peptide
  Seed: LRMKWMMAMKYPITA
LRMKFMMCMHYPATA

SEQ ID NO: 222661 - protein, 15 aa, Artificial Sequence
  Description of Artificial Sequence: Synthetic peptide
  Seed: LRMKWMMAMKYPITA
LRMKFMMCMHYPITA

SEQ ID NO: 222662 - protein, 15 aa, Artificial Sequence
  Description of Artificial Sequence: Synthetic peptide
  Seed: LRMKWMMAMKYPITA
LRMKFMMCMHYPLTA

SEQ ID NO: 222663 - protein, 15 aa, Artificial Sequence
  Description of Artificial Sequence: Synthetic peptide
  Seed: LRMKWMMAMKYPITA
LRMKFMMCMHYPVTA

SEQ ID NO: 222664 - protein, 15 aa, Artificial Sequence
  Description of Artificial Sequence: Synthetic peptide
  Seed: LRMKWMMAMKYPITA
LRMKFMMCMIYPATA

SEQ ID NO: 222665 - protein, 15 aa, Artificial Sequence
  Description of Artificial Sequence: Synthetic peptide
  Seed: LRMKWMMAMKYPITA
LRMKFMMCMIYPDTA

SEQ ID NO: 222666 - protein, 15 aa, Artificial Sequence
  Description of Artificial Sequence: Synthetic peptide
  Seed: LRMKWMMAMKYPITA
LRMKFMMCMIYPETA

SEQ ID NO: 222667 - protein, 15 aa, Artificial Sequence
  Description of Artificial Sequence: Synthetic peptide
  Seed: LRMKWMMAMKYPITA
LRMKFMMCMIYPGTA

SEQ ID NO: 222668 - protein, 15 aa, Artificial Sequence
  Description of Artificial Sequence: Synthetic peptide
  Seed: LRMKWMMAMKYPITA
LRMKFMMCMIYPHTA

SEQ ID NO: 222669 - protein, 15 aa, Artificial Sequence
  Description of Artificial Sequence: Synthetic peptide
  Seed: LRMKWMMAMKYPITA
LRMKFMMCMIYPITA

SEQ ID NO: 222670 - protein, 15 aa, Artificial Sequence
  Description of Artificial Sequence: Synthetic peptide
  Seed: LRMKWMMAMKYPITA
LRMKFMMCMIYPLTA

SEQ ID NO: 222671 - protein, 15 aa, Artificial Sequence
  Description of Artificial Sequence: Synthetic peptide
  Seed: LRMKWMMAMKYPITA
LRMKFMMCMIYPMTA

SEQ ID NO: 222672 - protein, 15 aa, Artificial Sequence
  Description of Artificial Sequence: Synthetic peptide
  Seed: LRMKWMMAMKYPITA
LRMKFMMCMIYPNTA

SEQ ID NO: 222673 - protein, 15 aa, Artificial Sequence
  Description of Artificial Sequence: Synthetic peptide
  Seed: LRMKWMMAMKYPITA
LRMKFMMCMIYPQTA

SEQ ID NO: 222674 - protein, 15 aa, Artificial Sequence
  Description of Artificial Sequence: Synthetic peptide
  Seed: LRMKWMMAMKYPITA
LRMKFMMCMIYPSTA

SEQ ID NO: 222675 - protein, 15 aa, Artificial Sequence
  Description of Artificial Sequence: Synthetic peptide
  Seed: LRMKWMMAMKYPITA
LRMKFMMCMIYPTTA

SEQ ID NO: 222676 - protein, 15 aa, Artificial Sequence
  Description of Artificial Sequence: Synthetic peptide
  Seed: LRMKWMMAMKYPITA
LRMKFMMCMIYPVTA

SEQ ID NO: 222677 - protein, 15 aa, Artificial Sequence
  Description of Artificial Sequence: Synthetic peptide
  Seed: LRMKWMMAMKYPITA
LRMKFMMCMKYPATA

SEQ ID NO: 222678 - protein, 15 aa, Artificial Sequence
  Description of Artificial Sequence: Synthetic peptide
  Seed: LRMKWMMAMKYPITA
LRMKFMMCMKYPGTA

SEQ ID NO: 222679 - protein, 15 aa, Artificial Sequence
  Description of Artificial Sequence: Synthetic peptide
  Seed: LRMKWMMAMKYPITA
LRMKFMMCMKYPHTA

SEQ ID NO: 222680 - protein, 15 aa, Artificial Sequence
  Description of Artificial Sequence: Synthetic peptide
  Seed: LRMKWMMAMKYPITA
LRMKFMMCMKYPITA

SEQ ID NO: 222681 - protein, 15 aa, Artificial Sequence
  Description of Artificial Sequence: Synthetic peptide
  Seed: LRMKWMMAMKYPITA
LRMKFMMCMKYPKTA

SEQ ID NO: 222682 - protein, 15 aa, Artificial Sequence
  Description of Artificial Sequence: Synthetic peptide
  Seed: LRMKWMMAMKYPITA
LRMKFMMCMKYPLTA

SEQ ID NO: 222683 - protein, 15 aa, Artificial Sequence
  Description of Artificial Sequence: Synthetic peptide
  Seed: LRMKWMMAMKYPITA
LRMKFMMCMKYPMTA

SEQ ID NO: 222684 - protein, 15 aa, Artificial Sequence
  Description of Artificial Sequence: Synthetic peptide
  Seed: LRMKWMMAMKYPITA
LRMKFMMCMKYPNTA

SEQ ID NO: 222685 - protein, 15 aa, Artificial Sequence
  Description of Artificial Sequence: Synthetic peptide
  Seed: LRMKWMMAMKYPITA
LRMKFMMCMKYPQTA

SEQ ID NO: 222686 - protein, 15 aa, Artificial Sequence
  Description of Artificial Sequence: Synthetic peptide
  Seed: LRMKWMMAMKYPITA
LRMKFMMCMKYPRTA

SEQ ID NO: 222687 - protein, 15 aa, Artificial Sequence
  Description of Artificial Sequence: Synthetic peptide
  Seed: LRMKWMMAMKYPITA
LRMKFMMCMKYPSTA

SEQ ID NO: 222688 - protein, 15 aa, Artificial Sequence
  Description of Artificial Sequence: Synthetic peptide
  Seed: LRMKWMMAMKYPITA
LRMKFMMCMKYPTTA

SEQ ID NO: 222689 - protein, 15 aa, Artificial Sequence
  Description of Artificial Sequence: Synthetic peptide
  Seed: LRMKWMMAMKYPITA
LRMKFMMCMKYPVTA

SEQ ID NO: 222690 - protein, 15 aa, Artificial Sequence
  Description of Artificial Sequence: Synthetic peptide
  Seed: LRMKWMMAMKYPITA
LRMKFMMCMKYPYTA

SEQ ID NO: 222691 - protein, 15 aa, Artificial Sequence
  Description of Artificial Sequence: Synthetic peptide
  Seed: LRMKWMMAMKYPITA
LRMKFMMCMLYPATA

SEQ ID NO: 222692 - protein, 15 aa, Artificial Sequence
  Description of Artificial Sequence: Synthetic peptide
  Seed: LRMKWMMAMKYPITA
LRMKFMMCMLYPITA

SEQ ID NO: 222693 - protein, 15 aa, Artificial Sequence
  Description of Artificial Sequence: Synthetic peptide
  Seed: LRMKWMMAMKYPITA
LRMKFMMCMLYPLTA

SEQ ID NO: 222694 - protein, 15 aa, Artificial Sequence
  Description of Artificial Sequence: Synthetic peptide
  Seed: LRMKWMMAMKYPITA
LRMKFMMCMLYPMTA

SEQ ID NO: 222695 - protein, 15 aa, Artificial Sequence
  Description of Artificial Sequence: Synthetic peptide
  Seed: LRMKWMMAMKYPITA
LRMKFMMCMLYPNTA

SEQ ID NO: 222696 - protein, 15 aa, Artificial Sequence
  Description of Artificial Sequence: Synthetic peptide
  Seed: LRMKWMMAMKYPITA
LRMKFMMCMLYPSTA

SEQ ID NO: 222697 - protein, 15 aa, Artificial Sequence
  Description of Artificial Sequence: Synthetic peptide
  Seed: LRMKWMMAMKYPITA
LRMKFMMCMLYPTTA

SEQ ID NO: 222698 - protein, 15 aa, Artificial Sequence
  Description of Artificial Sequence: Synthetic peptide
  Seed: LRMKWMMAMKYPITA
LRMKFMMCMLYPVTA

SEQ ID NO: 222699 - protein, 15 aa, Artificial Sequence
  Description of Artificial Sequence: Synthetic peptide
  Seed: LRMKWMMAMKYPITA
LRMKFMMCMMYPATA

SEQ ID NO: 222700 - protein, 15 aa, Artificial Sequence
  Description of Artificial Sequence: Synthetic peptide
  Seed: LRMKWMMAMKYPITA
LRMKFMMCMMYPITA

SEQ ID NO: 222701 - protein, 15 aa, Artificial Sequence
  Description of Artificial Sequence: Synthetic peptide
  Seed: LRMKWMMAMKYPITA
LRMKFMMCMMYPLTA

SEQ ID NO: 222702 - protein, 15 aa, Artificial Sequence
  Description of Artificial Sequence: Synthetic peptide
  Seed: LRMKWMMAMKYPITA
LRMKFMMCMMYPMTA

SEQ ID NO: 222703 - protein, 15 aa, Artificial Sequence
  Description of Artificial Sequence: Synthetic peptide
  Seed: LRMKWMMAMKYPITA
LRMKFMMCMMYPNTA

SEQ ID NO: 222704 - protein, 15 aa, Artificial Sequence
  Description of Artificial Sequence: Synthetic peptide
  Seed: LRMKWMMAMKYPITA
LRMKFMMCMMYPSTA

SEQ ID NO: 222705 - protein, 15 aa, Artificial Sequence
  Description of Artificial Sequence: Synthetic peptide
  Seed: LRMKWMMAMKYPITA
LRMKFMMCMMYPVTA

SEQ ID NO: 222706 - protein, 15 aa, Artificial Sequence
  Description of Artificial Sequence: Synthetic peptide
  Seed: LRMKWMMAMKYPITA
LRMKFMMCMNYPATA

SEQ ID NO: 222707 - protein, 15 aa, Artificial Sequence
  Description of Artificial Sequence: Synthetic peptide
  Seed: LRMKWMMAMKYPITA
LRMKFMMCMNYPCTA

SEQ ID NO: 222708 - protein, 15 aa, Artificial Sequence
  Description of Artificial Sequence: Synthetic peptide
  Seed: LRMKWMMAMKYPITA
LRMKFMMCMNYPDTA

SEQ ID NO: 222709 - protein, 15 aa, Artificial Sequence
  Description of Artificial Sequence: Synthetic peptide
  Seed: LRMKWMMAMKYPITA
LRMKFMMCMNYPETA

SEQ ID NO: 222710 - protein, 15 aa, Artificial Sequence
  Description of Artificial Sequence: Synthetic peptide
  Seed: LRMKWMMAMKYPITA
LRMKFMMCMNYPFTA

SEQ ID NO: 222711 - protein, 15 aa, Artificial Sequence
  Description of Artificial Sequence: Synthetic peptide
  Seed: LRMKWMMAMKYPITA
LRMKFMMCMNYPGTA

SEQ ID NO: 222712 - protein, 15 aa, Artificial Sequence
  Description of Artificial Sequence: Synthetic peptide
  Seed: LRMKWMMAMKYPITA
LRMKFMMCMNYPITA

SEQ ID NO: 222713 - protein, 15 aa, Artificial Sequence
  Description of Artificial Sequence: Synthetic peptide
  Seed: LRMKWMMAMKYPITA
LRMKFMMCMNYPLTA

SEQ ID NO: 222714 - protein, 15 aa, Artificial Sequence
  Description of Artificial Sequence: Synthetic peptide
  Seed: LRMKWMMAMKYPITA
LRMKFMMCMNYPMTA

SEQ ID NO: 222715 - protein, 15 aa, Artificial Sequence
  Description of Artificial Sequence: Synthetic peptide
  Seed: LRMKWMMAMKYPITA
LRMKFMMCMNYPNTA

SEQ ID NO: 222716 - protein, 15 aa, Artificial Sequence
  Description of Artificial Sequence: Synthetic peptide
  Seed: LRMKWMMAMKYPITA
LRMKFMMCMNYPSTA

SEQ ID NO: 222717 - protein, 15 aa, Artificial Sequence
  Description of Artificial Sequence: Synthetic peptide
  Seed: LRMKWMMAMKYPITA
LRMKFMMCMNYPTTA

SEQ ID NO: 222718 - protein, 15 aa, Artificial Sequence
  Description of Artificial Sequence: Synthetic peptide
  Seed: LRMKWMMAMKYPITA
LRMKFMMCMNYPVTA

SEQ ID NO: 222719 - protein, 15 aa, Artificial Sequence
  Description of Artificial Sequence: Synthetic peptide
  Seed: LRMKWMMAMKYPITA
LRMKFMMCMPYPATA

SEQ ID NO: 222720 - protein, 15 aa, Artificial Sequence
  Description of Artificial Sequence: Synthetic peptide
  Seed: LRMKWMMAMKYPITA
LRMKFMMCMPYPCTA

SEQ ID NO: 222721 - protein, 15 aa, Artificial Sequence
  Description of Artificial Sequence: Synthetic peptide
  Seed: LRMKWMMAMKYPITA
LRMKFMMCMPYPDTA

SEQ ID NO: 222722 - protein, 15 aa, Artificial Sequence
  Description of Artificial Sequence: Synthetic peptide
  Seed: LRMKWMMAMKYPITA
LRMKFMMCMPYPETA

SEQ ID NO: 222723 - protein, 15 aa, Artificial Sequence
  Description of Artificial Sequence: Synthetic peptide
  Seed: LRMKWMMAMKYPITA
LRMKFMMCMPYPFTA

SEQ ID NO: 222724 - protein, 15 aa, Artificial Sequence
  Description of Artificial Sequence: Synthetic peptide
  Seed: LRMKWMMAMKYPITA
LRMKFMMCMPYPGTA

SEQ ID NO: 222725 - protein, 15 aa, Artificial Sequence
  Description of Artificial Sequence: Synthetic peptide
  Seed: LRMKWMMAMKYPITA
LRMKFMMCMPYPHTA

SEQ ID NO: 222726 - protein, 15 aa, Artificial Sequence
  Description of Artificial Sequence: Synthetic peptide
  Seed: LRMKWMMAMKYPITA
LRMKFMMCMPYPITA

SEQ ID NO: 222727 - protein, 15 aa, Artificial Sequence
  Description of Artificial Sequence: Synthetic peptide
  Seed: LRMKWMMAMKYPITA
LRMKFMMCMPYPLTA

SEQ ID NO: 222728 - protein, 15 aa, Artificial Sequence
  Description of Artificial Sequence: Synthetic peptide
  Seed: LRMKWMMAMKYPITA
LRMKFMMCMPYPMTA

SEQ ID NO: 222729 - protein, 15 aa, Artificial Sequence
  Description of Artificial Sequence: Synthetic peptide
  Seed: LRMKWMMAMKYPITA
LRMKFMMCMPYPNTA

SEQ ID NO: 222730 - protein, 15 aa, Artificial Sequence
  Description of Artificial Sequence: Synthetic peptide
  Seed: LRMKWMMAMKYPITA
LRMKFMMCMPYPPTA

SEQ ID NO: 222731 - protein, 15 aa, Artificial Sequence
  Description of Artificial Sequence: Synthetic peptide
  Seed: LRMKWMMAMKYPITA
LRMKFMMCMPYPQTA

SEQ ID NO: 222732 - protein, 15 aa, Artificial Sequence
  Description of Artificial Sequence: Synthetic peptide
  Seed: LRMKWMMAMKYPITA
LRMKFMMCMPYPSTA

SEQ ID NO: 222733 - protein, 15 aa, Artificial Sequence
  Description of Artificial Sequence: Synthetic peptide
  Seed: LRMKWMMAMKYPITA
LRMKFMMCMPYPTTA

SEQ ID NO: 222734 - protein, 15 aa, Artificial Sequence
  Description of Artificial Sequence: Synthetic peptide
  Seed: LRMKWMMAMKYPITA
LRMKFMMCMPYPVTA

SEQ ID NO: 222735 - protein, 15 aa, Artificial Sequence
  Description of Artificial Sequence: Synthetic peptide
  Seed: LRMKWMMAMKYPITA
LRMKFMMCMPYPWTA

SEQ ID NO: 222736 - protein, 15 aa, Artificial Sequence
  Description of Artificial Sequence: Synthetic peptide
  Seed: LRMKWMMAMKYPITA
LRMKFMMCMPYPYTA

SEQ ID NO: 222737 - protein, 15 aa, Artificial Sequence
  Description of Artificial Sequence: Synthetic peptide
  Seed: LRMKWMMAMKYPITA
LRMKFMMCMQYPATA

SEQ ID NO: 222738 - protein, 15 aa, Artificial Sequence
  Description of Artificial Sequence: Synthetic peptide
  Seed: LRMKWMMAMKYPITA
LRMKFMMCMQYPITA

SEQ ID NO: 222739 - protein, 15 aa, Artificial Sequence
  Description of Artificial Sequence: Synthetic peptide
  Seed: LRMKWMMAMKYPITA
LRMKFMMCMQYPLTA

SEQ ID NO: 222740 - protein, 15 aa, Artificial Sequence
  Description of Artificial Sequence: Synthetic peptide
  Seed: LRMKWMMAMKYPITA
LRMKFMMCMQYPMTA

SEQ ID NO: 222741 - protein, 15 aa, Artificial Sequence
  Description of Artificial Sequence: Synthetic peptide
  Seed: LRMKWMMAMKYPITA
LRMKFMMCMQYPVTA

SEQ ID NO: 222742 - protein, 15 aa, Artificial Sequence
  Description of Artificial Sequence: Synthetic peptide
  Seed: LRMKWMMAMKYPITA
LRMKFMMCMRYPATA

SEQ ID NO: 222743 - protein, 15 aa, Artificial Sequence
  Description of Artificial Sequence: Synthetic peptide
  Seed: LRMKWMMAMKYPITA
LRMKFMMCMRYPFTA

SEQ ID NO: 222744 - protein, 15 aa, Artificial Sequence
  Description of Artificial Sequence: Synthetic peptide
  Seed: LRMKWMMAMKYPITA
LRMKFMMCMRYPGTA

SEQ ID NO: 222745 - protein, 15 aa, Artificial Sequence
  Description of Artificial Sequence: Synthetic peptide
  Seed: LRMKWMMAMKYPITA
LRMKFMMCMRYPHTA

SEQ ID NO: 222746 - protein, 15 aa, Artificial Sequence
  Description of Artificial Sequence: Synthetic peptide
  Seed: LRMKWMMAMKYPITA
LRMKFMMCMRYPITA

SEQ ID NO: 222747 - protein, 15 aa, Artificial Sequence
  Description of Artificial Sequence: Synthetic peptide
  Seed: LRMKWMMAMKYPITA
LRMKFMMCMRYPKTA

SEQ ID NO: 222748 - protein, 15 aa, Artificial Sequence
  Description of Artificial Sequence: Synthetic peptide
  Seed: LRMKWMMAMKYPITA
LRMKFMMCMRYPLTA

SEQ ID NO: 222749 - protein, 15 aa, Artificial Sequence
  Description of Artificial Sequence: Synthetic peptide
  Seed: LRMKWMMAMKYPITA
LRMKFMMCMRYPMTA

SEQ ID NO: 222750 - protein, 15 aa, Artificial Sequence
  Description of Artificial Sequence: Synthetic peptide
  Seed: LRMKWMMAMKYPITA
LRMKFMMCMRYPNTA

SEQ ID NO: 222751 - protein, 15 aa, Artificial Sequence
  Description of Artificial Sequence: Synthetic peptide
  Seed: LRMKWMMAMKYPITA
LRMKFMMCMRYPPTA

SEQ ID NO: 222752 - protein, 15 aa, Artificial Sequence
  Description of Artificial Sequence: Synthetic peptide
  Seed: LRMKWMMAMKYPITA
LRMKFMMCMRYPQTA

SEQ ID NO: 222753 - protein, 15 aa, Artificial Sequence
  Description of Artificial Sequence: Synthetic peptide
  Seed: LRMKWMMAMKYPITA
LRMKFMMCMRYPRTA

SEQ ID NO: 222754 - protein, 15 aa, Artificial Sequence
  Description of Artificial Sequence: Synthetic peptide
  Seed: LRMKWMMAMKYPITA
LRMKFMMCMRYPSTA

SEQ ID NO: 222755 - protein, 15 aa, Artificial Sequence
  Description of Artificial Sequence: Synthetic peptide
  Seed: LRMKWMMAMKYPITA
LRMKFMMCMRYPTTA

SEQ ID NO: 222756 - protein, 15 aa, Artificial Sequence
  Description of Artificial Sequence: Synthetic peptide
  Seed: LRMKWMMAMKYPITA
LRMKFMMCMRYPVTA

SEQ ID NO: 222757 - protein, 15 aa, Artificial Sequence
  Description of Artificial Sequence: Synthetic peptide
  Seed: LRMKWMMAMKYPITA
LRMKFMMCMRYPYTA

SEQ ID NO: 222758 - protein, 15 aa, Artificial Sequence
  Description of Artificial Sequence: Synthetic peptide
  Seed: LRMKWMMAMKYPITA
LRMKFMMCMSYPATA

SEQ ID NO: 222759 - protein, 15 aa, Artificial Sequence
  Description of Artificial Sequence: Synthetic peptide
  Seed: LRMKWMMAMKYPITA
LRMKFMMCMSYPCTA

SEQ ID NO: 222760 - protein, 15 aa, Artificial Sequence
  Description of Artificial Sequence: Synthetic peptide
  Seed: LRMKWMMAMKYPITA
LRMKFMMCMSYPDTA

SEQ ID NO: 222761 - protein, 15 aa, Artificial Sequence
  Description of Artificial Sequence: Synthetic peptide
  Seed: LRMKWMMAMKYPITA
LRMKFMMCMSYPETA

SEQ ID NO: 222762 - protein, 15 aa, Artificial Sequence
  Description of Artificial Sequence: Synthetic peptide
  Seed: LRMKWMMAMKYPITA
LRMKFMMCMSYPFTA

SEQ ID NO: 222763 - protein, 15 aa, Artificial Sequence
  Description of Artificial Sequence: Synthetic peptide
  Seed: LRMKWMMAMKYPITA
LRMKFMMCMSYPGTA

SEQ ID NO: 222764 - protein, 15 aa, Artificial Sequence
  Description of Artificial Sequence: Synthetic peptide
  Seed: LRMKWMMAMKYPITA
LRMKFMMCMSYPHTA

SEQ ID NO: 222765 - protein, 15 aa, Artificial Sequence
  Description of Artificial Sequence: Synthetic peptide
  Seed: LRMKWMMAMKYPITA
LRMKFMMCMSYPITA

SEQ ID NO: 222766 - protein, 15 aa, Artificial Sequence
  Description of Artificial Sequence: Synthetic peptide
  Seed: LRMKWMMAMKYPITA
LRMKFMMCMSYPLTA

SEQ ID NO: 222767 - protein, 15 aa, Artificial Sequence
  Description of Artificial Sequence: Synthetic peptide
  Seed: LRMKWMMAMKYPITA
LRMKFMMCMSYPMTA

SEQ ID NO: 222768 - protein, 15 aa, Artificial Sequence
  Description of Artificial Sequence: Synthetic peptide
  Seed: LRMKWMMAMKYPITA
LRMKFMMCMSYPNTA

SEQ ID NO: 222769 - protein, 15 aa, Artificial Sequence
  Description of Artificial Sequence: Synthetic peptide
  Seed: LRMKWMMAMKYPITA
LRMKFMMCMSYPPTA

SEQ ID NO: 222770 - protein, 15 aa, Artificial Sequence
  Description of Artificial Sequence: Synthetic peptide
  Seed: LRMKWMMAMKYPITA
LRMKFMMCMSYPQTA

SEQ ID NO: 222771 - protein, 15 aa, Artificial Sequence
  Description of Artificial Sequence: Synthetic peptide
  Seed: LRMKWMMAMKYPITA
LRMKFMMCMSYPRTA

SEQ ID NO: 222772 - protein, 15 aa, Artificial Sequence
  Description of Artificial Sequence: Synthetic peptide
  Seed: LRMKWMMAMKYPITA
LRMKFMMCMSYPSTA

SEQ ID NO: 222773 - protein, 15 aa, Artificial Sequence
  Description of Artificial Sequence: Synthetic peptide
  Seed: LRMKWMMAMKYPITA
LRMKFMMCMSYPTTA

SEQ ID NO: 222774 - protein, 15 aa, Artificial Sequence
  Description of Artificial Sequence: Synthetic peptide
  Seed: LRMKWMMAMKYPITA
LRMKFMMCMSYPVTA

SEQ ID NO: 222775 - protein, 15 aa, Artificial Sequence
  Description of Artificial Sequence: Synthetic peptide
  Seed: LRMKWMMAMKYPITA
LRMKFMMCMSYPYTA

SEQ ID NO: 222776 - protein, 15 aa, Artificial Sequence
  Description of Artificial Sequence: Synthetic peptide
  Seed: LRMKWMMAMKYPITA
LRMKFMMCMTYPATA

SEQ ID NO: 222777 - protein, 15 aa, Artificial Sequence
  Description of Artificial Sequence: Synthetic peptide
  Seed: LRMKWMMAMKYPITA
LRMKFMMCMTYPCTA

SEQ ID NO: 222778 - protein, 15 aa, Artificial Sequence
  Description of Artificial Sequence: Synthetic peptide
  Seed: LRMKWMMAMKYPITA
LRMKFMMCMTYPDTA

SEQ ID NO: 222779 - protein, 15 aa, Artificial Sequence
  Description of Artificial Sequence: Synthetic peptide
  Seed: LRMKWMMAMKYPITA
LRMKFMMCMTYPETA

SEQ ID NO: 222780 - protein, 15 aa, Artificial Sequence
  Description of Artificial Sequence: Synthetic peptide
  Seed: LRMKWMMAMKYPITA
LRMKFMMCMTYPFTA

SEQ ID NO: 222781 - protein, 15 aa, Artificial Sequence
  Description of Artificial Sequence: Synthetic peptide
  Seed: LRMKWMMAMKYPITA
LRMKFMMCMTYPGTA

SEQ ID NO: 222782 - protein, 15 aa, Artificial Sequence
  Description of Artificial Sequence: Synthetic peptide
  Seed: LRMKWMMAMKYPITA
LRMKFMMCMTYPHTA

SEQ ID NO: 222783 - protein, 15 aa, Artificial Sequence
  Description of Artificial Sequence: Synthetic peptide
  Seed: LRMKWMMAMKYPITA
LRMKFMMCMTYPITA

SEQ ID NO: 222784 - protein, 15 aa, Artificial Sequence
  Description of Artificial Sequence: Synthetic peptide
  Seed: LRMKWMMAMKYPITA
LRMKFMMCMTYPLTA

SEQ ID NO: 222785 - protein, 15 aa, Artificial Sequence
  Description of Artificial Sequence: Synthetic peptide
  Seed: LRMKWMMAMKYPITA
LRMKFMMCMTYPMTA

SEQ ID NO: 222786 - protein, 15 aa, Artificial Sequence
  Description of Artificial Sequence: Synthetic peptide
  Seed: LRMKWMMAMKYPITA
LRMKFMMCMTYPNTA

SEQ ID NO: 222787 - protein, 15 aa, Artificial Sequence
  Description of Artificial Sequence: Synthetic peptide
  Seed: LRMKWMMAMKYPITA
LRMKFMMCMTYPPTA

SEQ ID NO: 222788 - protein, 15 aa, Artificial Sequence
  Description of Artificial Sequence: Synthetic peptide
  Seed: LRMKWMMAMKYPITA
LRMKFMMCMTYPQTA

SEQ ID NO: 222789 - protein, 15 aa, Artificial Sequence
  Description of Artificial Sequence: Synthetic peptide
  Seed: LRMKWMMAMKYPITA
LRMKFMMCMTYPSTA

SEQ ID NO: 222790 - protein, 15 aa, Artificial Sequence
  Description of Artificial Sequence: Synthetic peptide
  Seed: LRMKWMMAMKYPITA
LRMKFMMCMTYPTTA

SEQ ID NO: 222791 - protein, 15 aa, Artificial Sequence
  Description of Artificial Sequence: Synthetic peptide
  Seed: LRMKWMMAMKYPITA
LRMKFMMCMTYPVTA

SEQ ID NO: 222792 - protein, 15 aa, Artificial Sequence
  Description of Artificial Sequence: Synthetic peptide
  Seed: LRMKWMMAMKYPITA
LRMKFMMCMTYPYTA

SEQ ID NO: 222793 - protein, 15 aa, Artificial Sequence
  Description of Artificial Sequence: Synthetic peptide
  Seed: LRMKWMMAMKYPITA
LRMKFMMCMVYPATA

SEQ ID NO: 222794 - protein, 15 aa, Artificial Sequence
  Description of Artificial Sequence: Synthetic peptide
  Seed: LRMKWMMAMKYPITA
LRMKFMMCMVYPDTA

SEQ ID NO: 222795 - protein, 15 aa, Artificial Sequence
  Description of Artificial Sequence: Synthetic peptide
  Seed: LRMKWMMAMKYPITA
LRMKFMMCMVYPETA

SEQ ID NO: 222796 - protein, 15 aa, Artificial Sequence
  Description of Artificial Sequence: Synthetic peptide
  Seed: LRMKWMMAMKYPITA
LRMKFMMCMVYPGTA

SEQ ID NO: 222797 - protein, 15 aa, Artificial Sequence
  Description of Artificial Sequence: Synthetic peptide
  Seed: LRMKWMMAMKYPITA
LRMKFMMCMVYPHTA

SEQ ID NO: 222798 - protein, 15 aa, Artificial Sequence
  Description of Artificial Sequence: Synthetic peptide
  Seed: LRMKWMMAMKYPITA
LRMKFMMCMVYPITA

SEQ ID NO: 222799 - protein, 15 aa, Artificial Sequence
  Description of Artificial Sequence: Synthetic peptide
  Seed: LRMKWMMAMKYPITA
LRMKFMMCMVYPLTA

SEQ ID NO: 222800 - protein, 15 aa, Artificial Sequence
  Description of Artificial Sequence: Synthetic peptide
  Seed: LRMKWMMAMKYPITA
LRMKFMMCMVYPMTA

SEQ ID NO: 222801 - protein, 15 aa, Artificial Sequence
  Description of Artificial Sequence: Synthetic peptide
  Seed: LRMKWMMAMKYPITA
LRMKFMMCMVYPNTA

SEQ ID NO: 222802 - protein, 15 aa, Artificial Sequence
  Description of Artificial Sequence: Synthetic peptide
  Seed: LRMKWMMAMKYPITA
LRMKFMMCMVYPPTA

SEQ ID NO: 222803 - protein, 15 aa, Artificial Sequence
  Description of Artificial Sequence: Synthetic peptide
  Seed: LRMKWMMAMKYPITA
LRMKFMMCMVYPQTA

SEQ ID NO: 222804 - protein, 15 aa, Artificial Sequence
  Description of Artificial Sequence: Synthetic peptide
  Seed: LRMKWMMAMKYPITA
LRMKFMMCMVYPSTA

SEQ ID NO: 222805 - protein, 15 aa, Artificial Sequence
  Description of Artificial Sequence: Synthetic peptide
  Seed: LRMKWMMAMKYPITA
LRMKFMMCMVYPTTA

SEQ ID NO: 222806 - protein, 15 aa, Artificial Sequence
  Description of Artificial Sequence: Synthetic peptide
  Seed: LRMKWMMAMKYPITA
LRMKFMMCMVYPVTA

SEQ ID NO: 222807 - protein, 15 aa, Artificial Sequence
  Description of Artificial Sequence: Synthetic peptide
  Seed: LRMKWMMAMKYPITA
LRMKFMMDMAYPATA

SEQ ID NO: 222808 - protein, 15 aa, Artificial Sequence
  Description of Artificial Sequence: Synthetic peptide
  Seed: LRMKWMMAMKYPITA
LRMKFMMDMAYPCTA

SEQ ID NO: 222809 - protein, 15 aa, Artificial Sequence
  Description of Artificial Sequence: Synthetic peptide
  Seed: LRMKWMMAMKYPITA
LRMKFMMDMAYPDTA

SEQ ID NO: 222810 - protein, 15 aa, Artificial Sequence
  Description of Artificial Sequence: Synthetic peptide
  Seed: LRMKWMMAMKYPITA
LRMKFMMDMAYPETA

SEQ ID NO: 222811 - protein, 15 aa, Artificial Sequence
  Description of Artificial Sequence: Synthetic peptide
  Seed: LRMKWMMAMKYPITA
LRMKFMMDMAYPFTA

SEQ ID NO: 222812 - protein, 15 aa, Artificial Sequence
  Description of Artificial Sequence: Synthetic peptide
  Seed: LRMKWMMAMKYPITA
LRMKFMMDMAYPGTA

SEQ ID NO: 222813 - protein, 15 aa, Artificial Sequence
  Description of Artificial Sequence: Synthetic peptide
  Seed: LRMKWMMAMKYPITA
LRMKFMMDMAYPHTA

SEQ ID NO: 222814 - protein, 15 aa, Artificial Sequence
  Description of Artificial Sequence: Synthetic peptide
  Seed: LRMKWMMAMKYPITA
LRMKFMMDMAYPKTA

SEQ ID NO: 222815 - protein, 15 aa, Artificial Sequence
  Description of Artificial Sequence: Synthetic peptide
  Seed: LRMKWMMAMKYPITA
LRMKFMMDMAYPLTA

SEQ ID NO: 222816 - protein, 15 aa, Artificial Sequence
  Description of Artificial Sequence: Synthetic peptide
  Seed: LRMKWMMAMKYPITA
LRMKFMMDMAYPMTA

SEQ ID NO: 222817 - protein, 15 aa, Artificial Sequence
  Description of Artificial Sequence: Synthetic peptide
  Seed: LRMKWMMAMKYPITA
LRMKFMMDMAYPNTA

SEQ ID NO: 222818 - protein, 15 aa, Artificial Sequence
  Description of Artificial Sequence: Synthetic peptide
  Seed: LRMKWMMAMKYPITA
LRMKFMMDMAYPPTA

SEQ ID NO: 222819 - protein, 15 aa, Artificial Sequence
  Description of Artificial Sequence: Synthetic peptide
  Seed: LRMKWMMAMKYPITA
LRMKFMMDMAYPQTA

SEQ ID NO: 222820 - protein, 15 aa, Artificial Sequence
  Description of Artificial Sequence: Synthetic peptide
  Seed: LRMKWMMAMKYPITA
LRMKFMMDMAYPRTA

SEQ ID NO: 222821 - protein, 15 aa, Artificial Sequence
  Description of Artificial Sequence: Synthetic peptide
  Seed: LRMKWMMAMKYPITA
LRMKFMMDMAYPSTA

SEQ ID NO: 222822 - protein, 15 aa, Artificial Sequence
  Description of Artificial Sequence: Synthetic peptide
  Seed: LRMKWMMAMKYPITA
LRMKFMMDMAYPTTA

SEQ ID NO: 222823 - protein, 15 aa, Artificial Sequence
  Description of Artificial Sequence: Synthetic peptide
  Seed: LRMKWMMAMKYPITA
LRMKFMMDMAYPVTA

SEQ ID NO: 222824 - protein, 15 aa, Artificial Sequence
  Description of Artificial Sequence: Synthetic peptide
  Seed: LRMKWMMAMKYPITA
LRMKFMMDMAYPWTA

SEQ ID NO: 222825 - protein, 15 aa, Artificial Sequence
  Description of Artificial Sequence: Synthetic peptide
  Seed: LRMKWMMAMKYPITA
LRMKFMMDMAYPYTA

SEQ ID NO: 222826 - protein, 15 aa, Artificial Sequence
  Description of Artificial Sequence: Synthetic peptide
  Seed: LRMKWMMAMKYPITA
LRMKFMMDMDYPATA

SEQ ID NO: 222827 - protein, 15 aa, Artificial Sequence
  Description of Artificial Sequence: Synthetic peptide
  Seed: LRMKWMMAMKYPITA
LRMKFMMDMDYPGTA

SEQ ID NO: 222828 - protein, 15 aa, Artificial Sequence
  Description of Artificial Sequence: Synthetic peptide
  Seed: LRMKWMMAMKYPITA
LRMKFMMDMDYPITA

SEQ ID NO: 222829 - protein, 15 aa, Artificial Sequence
  Description of Artificial Sequence: Synthetic peptide
  Seed: LRMKWMMAMKYPITA
LRMKFMMDMDYPLTA

SEQ ID NO: 222830 - protein, 15 aa, Artificial Sequence
  Description of Artificial Sequence: Synthetic peptide
  Seed: LRMKWMMAMKYPITA
LRMKFMMDMDYPMTA

SEQ ID NO: 222831 - protein, 15 aa, Artificial Sequence
  Description of Artificial Sequence: Synthetic peptide
  Seed: LRMKWMMAMKYPITA
LRMKFMMDMDYPQTA

SEQ ID NO: 222832 - protein, 15 aa, Artificial Sequence
  Description of Artificial Sequence: Synthetic peptide
  Seed: LRMKWMMAMKYPITA
LRMKFMMDMDYPSTA

SEQ ID NO: 222833 - protein, 15 aa, Artificial Sequence
  Description of Artificial Sequence: Synthetic peptide
  Seed: LRMKWMMAMKYPITA
LRMKFMMDMDYPTTA

SEQ ID NO: 222834 - protein, 15 aa, Artificial Sequence
  Description of Artificial Sequence: Synthetic peptide
  Seed: LRMKWMMAMKYPITA
LRMKFMMDMDYPVTA

SEQ ID NO: 222835 - protein, 15 aa, Artificial Sequence
  Description of Artificial Sequence: Synthetic peptide
  Seed: LRMKWMMAMKYPITA
LRMKFMMDMFYPATA

SEQ ID NO: 222836 - protein, 15 aa, Artificial Sequence
  Description of Artificial Sequence: Synthetic peptide
  Seed: LRMKWMMAMKYPITA
LRMKFMMDMFYPDTA

SEQ ID NO: 222837 - protein, 15 aa, Artificial Sequence
  Description of Artificial Sequence: Synthetic peptide
  Seed: LRMKWMMAMKYPITA
LRMKFMMDMFYPETA

SEQ ID NO: 222838 - protein, 15 aa, Artificial Sequence
  Description of Artificial Sequence: Synthetic peptide
  Seed: LRMKWMMAMKYPITA
LRMKFMMDMFYPFTA

SEQ ID NO: 222839 - protein, 15 aa, Artificial Sequence
  Description of Artificial Sequence: Synthetic peptide
  Seed: LRMKWMMAMKYPITA
LRMKFMMDMFYPITA

SEQ ID NO: 222840 - protein, 15 aa, Artificial Sequence
  Description of Artificial Sequence: Synthetic peptide
  Seed: LRMKWMMAMKYPITA
LRMKFMMDMFYPLTA

SEQ ID NO: 222841 - protein, 15 aa, Artificial Sequence
  Description of Artificial Sequence: Synthetic peptide
  Seed: LRMKWMMAMKYPITA
LRMKFMMDMFYPMTA

SEQ ID NO: 222842 - protein, 15 aa, Artificial Sequence
  Description of Artificial Sequence: Synthetic peptide
  Seed: LRMKWMMAMKYPITA
LRMKFMMDMFYPNTA

SEQ ID NO: 222843 - protein, 15 aa, Artificial Sequence
  Description of Artificial Sequence: Synthetic peptide
  Seed: LRMKWMMAMKYPITA
LRMKFMMDMFYPSTA

SEQ ID NO: 222844 - protein, 15 aa, Artificial Sequence
  Description of Artificial Sequence: Synthetic peptide
  Seed: LRMKWMMAMKYPITA
LRMKFMMDMFYPTTA

SEQ ID NO: 222845 - protein, 15 aa, Artificial Sequence
  Description of Artificial Sequence: Synthetic peptide
  Seed: LRMKWMMAMKYPITA
LRMKFMMDMFYPVTA

SEQ ID NO: 222846 - protein, 15 aa, Artificial Sequence
  Description of Artificial Sequence: Synthetic peptide
  Seed: LRMKWMMAMKYPITA
LRMKFMMDMFYPYTA

SEQ ID NO: 222847 - protein, 15 aa, Artificial Sequence
  Description of Artificial Sequence: Synthetic peptide
  Seed: LRMKWMMAMKYPITA
LRMKFMMDMGYPATA

SEQ ID NO: 222848 - protein, 15 aa, Artificial Sequence
  Description of Artificial Sequence: Synthetic peptide
  Seed: LRMKWMMAMKYPITA
LRMKFMMDMGYPCTA

SEQ ID NO: 222849 - protein, 15 aa, Artificial Sequence
  Description of Artificial Sequence: Synthetic peptide
  Seed: LRMKWMMAMKYPITA
LRMKFMMDMGYPFTA

SEQ ID NO: 222850 - protein, 15 aa, Artificial Sequence
  Description of Artificial Sequence: Synthetic peptide
  Seed: LRMKWMMAMKYPITA
LRMKFMMDMGYPGTA

SEQ ID NO: 222851 - protein, 15 aa, Artificial Sequence
  Description of Artificial Sequence: Synthetic peptide
  Seed: LRMKWMMAMKYPITA
LRMKFMMDMGYPITA

SEQ ID NO: 222852 - protein, 15 aa, Artificial Sequence
  Description of Artificial Sequence: Synthetic peptide
  Seed: LRMKWMMAMKYPITA
LRMKFMMDMGYPLTA

SEQ ID NO: 222853 - protein, 15 aa, Artificial Sequence
  Description of Artificial Sequence: Synthetic peptide
  Seed: LRMKWMMAMKYPITA
LRMKFMMDMGYPMTA

SEQ ID NO: 222854 - protein, 15 aa, Artificial Sequence
  Description of Artificial Sequence: Synthetic peptide
  Seed: LRMKWMMAMKYPITA
LRMKFMMDMGYPNTA

SEQ ID NO: 222855 - protein, 15 aa, Artificial Sequence
  Description of Artificial Sequence: Synthetic peptide
  Seed: LRMKWMMAMKYPITA
LRMKFMMDMGYPSTA

SEQ ID NO: 222856 - protein, 15 aa, Artificial Sequence
  Description of Artificial Sequence: Synthetic peptide
  Seed: LRMKWMMAMKYPITA
LRMKFMMDMGYPTTA

SEQ ID NO: 222857 - protein, 15 aa, Artificial Sequence
  Description of Artificial Sequence: Synthetic peptide
  Seed: LRMKWMMAMKYPITA
LRMKFMMDMGYPVTA

SEQ ID NO: 222858 - protein, 15 aa, Artificial Sequence
  Description of Artificial Sequence: Synthetic peptide
  Seed: LRMKWMMAMKYPITA
LRMKFMMDMGYPYTA

SEQ ID NO: 222859 - protein, 15 aa, Artificial Sequence
  Description of Artificial Sequence: Synthetic peptide
  Seed: LRMKWMMAMKYPITA
LRMKFMMDMHYPFTA

SEQ ID NO: 222860 - protein, 15 aa, Artificial Sequence
  Description of Artificial Sequence: Synthetic peptide
  Seed: LRMKWMMAMKYPITA
LRMKFMMDMHYPYTA

SEQ ID NO: 222861 - protein, 15 aa, Artificial Sequence
  Description of Artificial Sequence: Synthetic peptide
  Seed: LRMKWMMAMKYPITA
LRMKFMMDMIYPATA

SEQ ID NO: 222862 - protein, 15 aa, Artificial Sequence
  Description of Artificial Sequence: Synthetic peptide
  Seed: LRMKWMMAMKYPITA
LRMKFMMDMIYPDTA

SEQ ID NO: 222863 - protein, 15 aa, Artificial Sequence
  Description of Artificial Sequence: Synthetic peptide
  Seed: LRMKWMMAMKYPITA
LRMKFMMDMIYPFTA

SEQ ID NO: 222864 - protein, 15 aa, Artificial Sequence
  Description of Artificial Sequence: Synthetic peptide
  Seed: LRMKWMMAMKYPITA
LRMKFMMDMIYPGTA

SEQ ID NO: 222865 - protein, 15 aa, Artificial Sequence
  Description of Artificial Sequence: Synthetic peptide
  Seed: LRMKWMMAMKYPITA
LRMKFMMDMIYPHTA

SEQ ID NO: 222866 - protein, 15 aa, Artificial Sequence
  Description of Artificial Sequence: Synthetic peptide
  Seed: LRMKWMMAMKYPITA
LRMKFMMDMIYPITA

SEQ ID NO: 222867 - protein, 15 aa, Artificial Sequence
  Description of Artificial Sequence: Synthetic peptide
  Seed: LRMKWMMAMKYPITA
LRMKFMMDMIYPLTA

SEQ ID NO: 222868 - protein, 15 aa, Artificial Sequence
  Description of Artificial Sequence: Synthetic peptide
  Seed: LRMKWMMAMKYPITA
LRMKFMMDMIYPMTA

SEQ ID NO: 222869 - protein, 15 aa, Artificial Sequence
  Description of Artificial Sequence: Synthetic peptide
  Seed: LRMKWMMAMKYPITA
LRMKFMMDMIYPNTA

SEQ ID NO: 222870 - protein, 15 aa, Artificial Sequence
  Description of Artificial Sequence: Synthetic peptide
  Seed: LRMKWMMAMKYPITA
LRMKFMMDMIYPQTA

SEQ ID NO: 222871 - protein, 15 aa, Artificial Sequence
  Description of Artificial Sequence: Synthetic peptide
  Seed: LRMKWMMAMKYPITA
LRMKFMMDMIYPRTA

SEQ ID NO: 222872 - protein, 15 aa, Artificial Sequence
  Description of Artificial Sequence: Synthetic peptide
  Seed: LRMKWMMAMKYPITA
LRMKFMMDMIYPSTA

SEQ ID NO: 222873 - protein, 15 aa, Artificial Sequence
  Description of Artificial Sequence: Synthetic peptide
  Seed: LRMKWMMAMKYPITA
LRMKFMMDMIYPTTA

SEQ ID NO: 222874 - protein, 15 aa, Artificial Sequence
  Description of Artificial Sequence: Synthetic peptide
  Seed: LRMKWMMAMKYPITA
LRMKFMMDMIYPVTA

SEQ ID NO: 222875 - protein, 15 aa, Artificial Sequence
  Description of Artificial Sequence: Synthetic peptide
  Seed: LRMKWMMAMKYPITA
LRMKFMMDMIYPYTA

SEQ ID NO: 222876 - protein, 15 aa, Artificial Sequence
  Description of Artificial Sequence: Synthetic peptide
  Seed: LRMKWMMAMKYPITA
LRMKFMMDMKYPFTA

SEQ ID NO: 222877 - protein, 15 aa, Artificial Sequence
  Description of Artificial Sequence: Synthetic peptide
  Seed: LRMKWMMAMKYPITA
LRMKFMMDMKYPITA

SEQ ID NO: 222878 - protein, 15 aa, Artificial Sequence
  Description of Artificial Sequence: Synthetic peptide
  Seed: LRMKWMMAMKYPITA
LRMKFMMDMKYPLTA

SEQ ID NO: 222879 - protein, 15 aa, Artificial Sequence
  Description of Artificial Sequence: Synthetic peptide
  Seed: LRMKWMMAMKYPITA
LRMKFMMDMKYPMTA

SEQ ID NO: 222880 - protein, 15 aa, Artificial Sequence
  Description of Artificial Sequence: Synthetic peptide
  Seed: LRMKWMMAMKYPITA
LRMKFMMDMKYPRTA

SEQ ID NO: 222881 - protein, 15 aa, Artificial Sequence
  Description of Artificial Sequence: Synthetic peptide
  Seed: LRMKWMMAMKYPITA
LRMKFMMDMKYPVTA

SEQ ID NO: 222882 - protein, 15 aa, Artificial Sequence
  Description of Artificial Sequence: Synthetic peptide
  Seed: LRMKWMMAMKYPITA
LRMKFMMDMKYPYTA

SEQ ID NO: 222883 - protein, 15 aa, Artificial Sequence
  Description of Artificial Sequence: Synthetic peptide
  Seed: LRMKWMMAMKYPITA
LRMKFMMDMLYPATA

SEQ ID NO: 222884 - protein, 15 aa, Artificial Sequence
  Description of Artificial Sequence: Synthetic peptide
  Seed: LRMKWMMAMKYPITA
LRMKFMMDMLYPITA

SEQ ID NO: 222885 - protein, 15 aa, Artificial Sequence
  Description of Artificial Sequence: Synthetic peptide
  Seed: LRMKWMMAMKYPITA
LRMKFMMDMLYPLTA

SEQ ID NO: 222886 - protein, 15 aa, Artificial Sequence
  Description of Artificial Sequence: Synthetic peptide
  Seed: LRMKWMMAMKYPITA
LRMKFMMDMLYPNTA

SEQ ID NO: 222887 - protein, 15 aa, Artificial Sequence
  Description of Artificial Sequence: Synthetic peptide
  Seed: LRMKWMMAMKYPITA
LRMKFMMDMLYPSTA

SEQ ID NO: 222888 - protein, 15 aa, Artificial Sequence
  Description of Artificial Sequence: Synthetic peptide
  Seed: LRMKWMMAMKYPITA
LRMKFMMDMLYPVTA

SEQ ID NO: 222889 - protein, 15 aa, Artificial Sequence
  Description of Artificial Sequence: Synthetic peptide
  Seed: LRMKWMMAMKYPITA
LRMKFMMDMMYPATA

SEQ ID NO: 222890 - protein, 15 aa, Artificial Sequence
  Description of Artificial Sequence: Synthetic peptide
  Seed: LRMKWMMAMKYPITA
LRMKFMMDMMYPITA

SEQ ID NO: 222891 - protein, 15 aa, Artificial Sequence
  Description of Artificial Sequence: Synthetic peptide
  Seed: LRMKWMMAMKYPITA
LRMKFMMDMMYPLTA

SEQ ID NO: 222892 - protein, 15 aa, Artificial Sequence
  Description of Artificial Sequence: Synthetic peptide
  Seed: LRMKWMMAMKYPITA
LRMKFMMDMMYPNTA

SEQ ID NO: 222893 - protein, 15 aa, Artificial Sequence
  Description of Artificial Sequence: Synthetic peptide
  Seed: LRMKWMMAMKYPITA
LRMKFMMDMMYPSTA

SEQ ID NO: 222894 - protein, 15 aa, Artificial Sequence
  Description of Artificial Sequence: Synthetic peptide
  Seed: LRMKWMMAMKYPITA
LRMKFMMDMMYPVTA

SEQ ID NO: 222895 - protein, 15 aa, Artificial Sequence
  Description of Artificial Sequence: Synthetic peptide
  Seed: LRMKWMMAMKYPITA
LRMKFMMDMNYPATA

SEQ ID NO: 222896 - protein, 15 aa, Artificial Sequence
  Description of Artificial Sequence: Synthetic peptide
  Seed: LRMKWMMAMKYPITA
LRMKFMMDMNYPCTA

SEQ ID NO: 222897 - protein, 15 aa, Artificial Sequence
  Description of Artificial Sequence: Synthetic peptide
  Seed: LRMKWMMAMKYPITA
LRMKFMMDMNYPDTA

SEQ ID NO: 222898 - protein, 15 aa, Artificial Sequence
  Description of Artificial Sequence: Synthetic peptide
  Seed: LRMKWMMAMKYPITA
LRMKFMMDMNYPETA

SEQ ID NO: 222899 - protein, 15 aa, Artificial Sequence
  Description of Artificial Sequence: Synthetic peptide
  Seed: LRMKWMMAMKYPITA
LRMKFMMDMNYPFTA

SEQ ID NO: 222900 - protein, 15 aa, Artificial Sequence
  Description of Artificial Sequence: Synthetic peptide
  Seed: LRMKWMMAMKYPITA
LRMKFMMDMNYPGTA

SEQ ID NO: 222901 - protein, 15 aa, Artificial Sequence
  Description of Artificial Sequence: Synthetic peptide
  Seed: LRMKWMMAMKYPITA
LRMKFMMDMNYPHTA

SEQ ID NO: 222902 - protein, 15 aa, Artificial Sequence
  Description of Artificial Sequence: Synthetic peptide
  Seed: LRMKWMMAMKYPITA
LRMKFMMDMNYPITA

SEQ ID NO: 222903 - protein, 15 aa, Artificial Sequence
  Description of Artificial Sequence: Synthetic peptide
  Seed: LRMKWMMAMKYPITA
LRMKFMMDMNYPLTA

SEQ ID NO: 222904 - protein, 15 aa, Artificial Sequence
  Description of Artificial Sequence: Synthetic peptide
  Seed: LRMKWMMAMKYPITA
LRMKFMMDMNYPMTA

SEQ ID NO: 222905 - protein, 15 aa, Artificial Sequence
  Description of Artificial Sequence: Synthetic peptide
  Seed: LRMKWMMAMKYPITA
LRMKFMMDMNYPNTA

SEQ ID NO: 222906 - protein, 15 aa, Artificial Sequence
  Description of Artificial Sequence: Synthetic peptide
  Seed: LRMKWMMAMKYPITA
LRMKFMMDMNYPPTA

SEQ ID NO: 222907 - protein, 15 aa, Artificial Sequence
  Description of Artificial Sequence: Synthetic peptide
  Seed: LRMKWMMAMKYPITA
LRMKFMMDMNYPQTA

SEQ ID NO: 222908 - protein, 15 aa, Artificial Sequence
  Description of Artificial Sequence: Synthetic peptide
  Seed: LRMKWMMAMKYPITA
LRMKFMMDMNYPRTA

SEQ ID NO: 222909 - protein, 15 aa, Artificial Sequence
  Description of Artificial Sequence: Synthetic peptide
  Seed: LRMKWMMAMKYPITA
LRMKFMMDMNYPSTA

SEQ ID NO: 222910 - protein, 15 aa, Artificial Sequence
  Description of Artificial Sequence: Synthetic peptide
  Seed: LRMKWMMAMKYPITA
LRMKFMMDMNYPTTA

SEQ ID NO: 222911 - protein, 15 aa, Artificial Sequence
  Description of Artificial Sequence: Synthetic peptide
  Seed: LRMKWMMAMKYPITA
LRMKFMMDMNYPVTA

SEQ ID NO: 222912 - protein, 15 aa, Artificial Sequence
  Description of Artificial Sequence: Synthetic peptide
  Seed: LRMKWMMAMKYPITA
LRMKFMMDMNYPWTA

SEQ ID NO: 222913 - protein, 15 aa, Artificial Sequence
  Description of Artificial Sequence: Synthetic peptide
  Seed: LRMKWMMAMKYPITA
LRMKFMMDMNYPYTA

SEQ ID NO: 222914 - protein, 15 aa, Artificial Sequence
  Description of Artificial Sequence: Synthetic peptide
  Seed: LRMKWMMAMKYPITA
LRMKFMMDMPYPATA

SEQ ID NO: 222915 - protein, 15 aa, Artificial Sequence
  Description of Artificial Sequence: Synthetic peptide
  Seed: LRMKWMMAMKYPITA
LRMKFMMDMPYPCTA

SEQ ID NO: 222916 - protein, 15 aa, Artificial Sequence
  Description of Artificial Sequence: Synthetic peptide
  Seed: LRMKWMMAMKYPITA
LRMKFMMDMPYPFTA

SEQ ID NO: 222917 - protein, 15 aa, Artificial Sequence
  Description of Artificial Sequence: Synthetic peptide
  Seed: LRMKWMMAMKYPITA
LRMKFMMDMPYPGTA

SEQ ID NO: 222918 - protein, 15 aa, Artificial Sequence
  Description of Artificial Sequence: Synthetic peptide
  Seed: LRMKWMMAMKYPITA
LRMKFMMDMPYPITA

SEQ ID NO: 222919 - protein, 15 aa, Artificial Sequence
  Description of Artificial Sequence: Synthetic peptide
  Seed: LRMKWMMAMKYPITA
LRMKFMMDMPYPLTA

SEQ ID NO: 222920 - protein, 15 aa, Artificial Sequence
  Description of Artificial Sequence: Synthetic peptide
  Seed: LRMKWMMAMKYPITA
LRMKFMMDMPYPMTA

SEQ ID NO: 222921 - protein, 15 aa, Artificial Sequence
  Description of Artificial Sequence: Synthetic peptide
  Seed: LRMKWMMAMKYPITA
LRMKFMMDMPYPNTA

SEQ ID NO: 222922 - protein, 15 aa, Artificial Sequence
  Description of Artificial Sequence: Synthetic peptide
  Seed: LRMKWMMAMKYPITA
LRMKFMMDMPYPQTA

SEQ ID NO: 222923 - protein, 15 aa, Artificial Sequence
  Description of Artificial Sequence: Synthetic peptide
  Seed: LRMKWMMAMKYPITA
LRMKFMMDMPYPRTA

SEQ ID NO: 222924 - protein, 15 aa, Artificial Sequence
  Description of Artificial Sequence: Synthetic peptide
  Seed: LRMKWMMAMKYPITA
LRMKFMMDMPYPSTA

SEQ ID NO: 222925 - protein, 15 aa, Artificial Sequence
  Description of Artificial Sequence: Synthetic peptide
  Seed: LRMKWMMAMKYPITA
LRMKFMMDMPYPTTA

SEQ ID NO: 222926 - protein, 15 aa, Artificial Sequence
  Description of Artificial Sequence: Synthetic peptide
  Seed: LRMKWMMAMKYPITA
LRMKFMMDMPYPVTA

SEQ ID NO: 222927 - protein, 15 aa, Artificial Sequence
  Description of Artificial Sequence: Synthetic peptide
  Seed: LRMKWMMAMKYPITA
LRMKFMMDMPYPYTA

SEQ ID NO: 222928 - protein, 15 aa, Artificial Sequence
  Description of Artificial Sequence: Synthetic peptide
  Seed: LRMKWMMAMKYPITA
LRMKFMMDMQYPFTA

SEQ ID NO: 222929 - protein, 15 aa, Artificial Sequence
  Description of Artificial Sequence: Synthetic peptide
  Seed: LRMKWMMAMKYPITA
LRMKFMMDMQYPYTA

SEQ ID NO: 222930 - protein, 15 aa, Artificial Sequence
  Description of Artificial Sequence: Synthetic peptide
  Seed: LRMKWMMAMKYPITA
LRMKFMMDMRYPFTA

SEQ ID NO: 222931 - protein, 15 aa, Artificial Sequence
  Description of Artificial Sequence: Synthetic peptide
  Seed: LRMKWMMAMKYPITA
LRMKFMMDMRYPITA

SEQ ID NO: 222932 - protein, 15 aa, Artificial Sequence
  Description of Artificial Sequence: Synthetic peptide
  Seed: LRMKWMMAMKYPITA
LRMKFMMDMRYPLTA

SEQ ID NO: 222933 - protein, 15 aa, Artificial Sequence
  Description of Artificial Sequence: Synthetic peptide
  Seed: LRMKWMMAMKYPITA
LRMKFMMDMRYPMTA

SEQ ID NO: 222934 - protein, 15 aa, Artificial Sequence
  Description of Artificial Sequence: Synthetic peptide
  Seed: LRMKWMMAMKYPITA
LRMKFMMDMRYPRTA

SEQ ID NO: 222935 - protein, 15 aa, Artificial Sequence
  Description of Artificial Sequence: Synthetic peptide
  Seed: LRMKWMMAMKYPITA
LRMKFMMDMRYPVTA

SEQ ID NO: 222936 - protein, 15 aa, Artificial Sequence
  Description of Artificial Sequence: Synthetic peptide
  Seed: LRMKWMMAMKYPITA
LRMKFMMDMRYPYTA

SEQ ID NO: 222937 - protein, 15 aa, Artificial Sequence
  Description of Artificial Sequence: Synthetic peptide
  Seed: LRMKWMMAMKYPITA
LRMKFMMDMSYPATA

SEQ ID NO: 222938 - protein, 15 aa, Artificial Sequence
  Description of Artificial Sequence: Synthetic peptide
  Seed: LRMKWMMAMKYPITA
LRMKFMMDMSYPCTA

SEQ ID NO: 222939 - protein, 15 aa, Artificial Sequence
  Description of Artificial Sequence: Synthetic peptide
  Seed: LRMKWMMAMKYPITA
LRMKFMMDMSYPDTA

SEQ ID NO: 222940 - protein, 15 aa, Artificial Sequence
  Description of Artificial Sequence: Synthetic peptide
  Seed: LRMKWMMAMKYPITA
LRMKFMMDMSYPETA

SEQ ID NO: 222941 - protein, 15 aa, Artificial Sequence
  Description of Artificial Sequence: Synthetic peptide
  Seed: LRMKWMMAMKYPITA
LRMKFMMDMSYPFTA

SEQ ID NO: 222942 - protein, 15 aa, Artificial Sequence
  Description of Artificial Sequence: Synthetic peptide
  Seed: LRMKWMMAMKYPITA
LRMKFMMDMSYPGTA

SEQ ID NO: 222943 - protein, 15 aa, Artificial Sequence
  Description of Artificial Sequence: Synthetic peptide
  Seed: LRMKWMMAMKYPITA
LRMKFMMDMSYPHTA

SEQ ID NO: 222944 - protein, 15 aa, Artificial Sequence
  Description of Artificial Sequence: Synthetic peptide
  Seed: LRMKWMMAMKYPITA
LRMKFMMDMSYPITA

SEQ ID NO: 222945 - protein, 15 aa, Artificial Sequence
  Description of Artificial Sequence: Synthetic peptide
  Seed: LRMKWMMAMKYPITA
LRMKFMMDMSYPLTA

SEQ ID NO: 222946 - protein, 15 aa, Artificial Sequence
  Description of Artificial Sequence: Synthetic peptide
  Seed: LRMKWMMAMKYPITA
LRMKFMMDMSYPMTA

SEQ ID NO: 222947 - protein, 15 aa, Artificial Sequence
  Description of Artificial Sequence: Synthetic peptide
  Seed: LRMKWMMAMKYPITA
LRMKFMMDMSYPNTA

SEQ ID NO: 222948 - protein, 15 aa, Artificial Sequence
  Description of Artificial Sequence: Synthetic peptide
  Seed: LRMKWMMAMKYPITA
LRMKFMMDMSYPPTA

SEQ ID NO: 222949 - protein, 15 aa, Artificial Sequence
  Description of Artificial Sequence: Synthetic peptide
  Seed: LRMKWMMAMKYPITA
LRMKFMMDMSYPQTA

SEQ ID NO: 222950 - protein, 15 aa, Artificial Sequence
  Description of Artificial Sequence: Synthetic peptide
  Seed: LRMKWMMAMKYPITA
LRMKFMMDMSYPRTA

SEQ ID NO: 222951 - protein, 15 aa, Artificial Sequence
  Description of Artificial Sequence: Synthetic peptide
  Seed: LRMKWMMAMKYPITA
LRMKFMMDMSYPSTA

SEQ ID NO: 222952 - protein, 15 aa, Artificial Sequence
  Description of Artificial Sequence: Synthetic peptide
  Seed: LRMKWMMAMKYPITA
LRMKFMMDMSYPTTA

SEQ ID NO: 222953 - protein, 15 aa, Artificial Sequence
  Description of Artificial Sequence: Synthetic peptide
  Seed: LRMKWMMAMKYPITA
LRMKFMMDMSYPVTA

SEQ ID NO: 222954 - protein, 15 aa, Artificial Sequence
  Description of Artificial Sequence: Synthetic peptide
  Seed: LRMKWMMAMKYPITA
LRMKFMMDMSYPYTA

SEQ ID NO: 222955 - protein, 15 aa, Artificial Sequence
  Description of Artificial Sequence: Synthetic peptide
  Seed: LRMKWMMAMKYPITA
LRMKFMMDMTYPATA

SEQ ID NO: 222956 - protein, 15 aa, Artificial Sequence
  Description of Artificial Sequence: Synthetic peptide
  Seed: LRMKWMMAMKYPITA
LRMKFMMDMTYPCTA

SEQ ID NO: 222957 - protein, 15 aa, Artificial Sequence
  Description of Artificial Sequence: Synthetic peptide
  Seed: LRMKWMMAMKYPITA
LRMKFMMDMTYPDTA

SEQ ID NO: 222958 - protein, 15 aa, Artificial Sequence
  Description of Artificial Sequence: Synthetic peptide
  Seed: LRMKWMMAMKYPITA
LRMKFMMDMTYPETA

SEQ ID NO: 222959 - protein, 15 aa, Artificial Sequence
  Description of Artificial Sequence: Synthetic peptide
  Seed: LRMKWMMAMKYPITA
LRMKFMMDMTYPFTA

SEQ ID NO: 222960 - protein, 15 aa, Artificial Sequence
  Description of Artificial Sequence: Synthetic peptide
  Seed: LRMKWMMAMKYPITA
LRMKFMMDMTYPGTA

SEQ ID NO: 222961 - protein, 15 aa, Artificial Sequence
  Description of Artificial Sequence: Synthetic peptide
  Seed: LRMKWMMAMKYPITA
LRMKFMMDMTYPHTA

SEQ ID NO: 222962 - protein, 15 aa, Artificial Sequence
  Description of Artificial Sequence: Synthetic peptide
  Seed: LRMKWMMAMKYPITA
LRMKFMMDMTYPITA

SEQ ID NO: 222963 - protein, 15 aa, Artificial Sequence
  Description of Artificial Sequence: Synthetic peptide
  Seed: LRMKWMMAMKYPITA
LRMKFMMDMTYPLTA

SEQ ID NO: 222964 - protein, 15 aa, Artificial Sequence
  Description of Artificial Sequence: Synthetic peptide
  Seed: LRMKWMMAMKYPITA
LRMKFMMDMTYPMTA

SEQ ID NO: 222965 - protein, 15 aa, Artificial Sequence
  Description of Artificial Sequence: Synthetic peptide
  Seed: LRMKWMMAMKYPITA
LRMKFMMDMTYPNTA

SEQ ID NO: 222966 - protein, 15 aa, Artificial Sequence
  Description of Artificial Sequence: Synthetic peptide
  Seed: LRMKWMMAMKYPITA
LRMKFMMDMTYPPTA

SEQ ID NO: 222967 - protein, 15 aa, Artificial Sequence
  Description of Artificial Sequence: Synthetic peptide
  Seed: LRMKWMMAMKYPITA
LRMKFMMDMTYPQTA

SEQ ID NO: 222968 - protein, 15 aa, Artificial Sequence
  Description of Artificial Sequence: Synthetic peptide
  Seed: LRMKWMMAMKYPITA
LRMKFMMDMTYPRTA

SEQ ID NO: 222969 - protein, 15 aa, Artificial Sequence
  Description of Artificial Sequence: Synthetic peptide
  Seed: LRMKWMMAMKYPITA
LRMKFMMDMTYPSTA

SEQ ID NO: 222970 - protein, 15 aa, Artificial Sequence
  Description of Artificial Sequence: Synthetic peptide
  Seed: LRMKWMMAMKYPITA
LRMKFMMDMTYPTTA

SEQ ID NO: 222971 - protein, 15 aa, Artificial Sequence
  Description of Artificial Sequence: Synthetic peptide
  Seed: LRMKWMMAMKYPITA
LRMKFMMDMTYPVTA

SEQ ID NO: 222972 - protein, 15 aa, Artificial Sequence
  Description of Artificial Sequence: Synthetic peptide
  Seed: LRMKWMMAMKYPITA
LRMKFMMDMTYPYTA

SEQ ID NO: 222973 - protein, 15 aa, Artificial Sequence
  Description of Artificial Sequence: Synthetic peptide
  Seed: LRMKWMMAMKYPITA
LRMKFMMDMVYPATA

SEQ ID NO: 222974 - protein, 15 aa, Artificial Sequence
  Description of Artificial Sequence: Synthetic peptide
  Seed: LRMKWMMAMKYPITA
LRMKFMMDMVYPDTA

SEQ ID NO: 222975 - protein, 15 aa, Artificial Sequence
  Description of Artificial Sequence: Synthetic peptide
  Seed: LRMKWMMAMKYPITA
LRMKFMMDMVYPETA

SEQ ID NO: 222976 - protein, 15 aa, Artificial Sequence
  Description of Artificial Sequence: Synthetic peptide
  Seed: LRMKWMMAMKYPITA
LRMKFMMDMVYPFTA

SEQ ID NO: 222977 - protein, 15 aa, Artificial Sequence
  Description of Artificial Sequence: Synthetic peptide
  Seed: LRMKWMMAMKYPITA
LRMKFMMDMVYPGTA

SEQ ID NO: 222978 - protein, 15 aa, Artificial Sequence
  Description of Artificial Sequence: Synthetic peptide
  Seed: LRMKWMMAMKYPITA
LRMKFMMDMVYPHTA

SEQ ID NO: 222979 - protein, 15 aa, Artificial Sequence
  Description of Artificial Sequence: Synthetic peptide
  Seed: LRMKWMMAMKYPITA
LRMKFMMDMVYPITA

SEQ ID NO: 222980 - protein, 15 aa, Artificial Sequence
  Description of Artificial Sequence: Synthetic peptide
  Seed: LRMKWMMAMKYPITA
LRMKFMMDMVYPLTA

SEQ ID NO: 222981 - protein, 15 aa, Artificial Sequence
  Description of Artificial Sequence: Synthetic peptide
  Seed: LRMKWMMAMKYPITA
LRMKFMMDMVYPMTA

SEQ ID NO: 222982 - protein, 15 aa, Artificial Sequence
  Description of Artificial Sequence: Synthetic peptide
  Seed: LRMKWMMAMKYPITA
LRMKFMMDMVYPNTA

SEQ ID NO: 222983 - protein, 15 aa, Artificial Sequence
  Description of Artificial Sequence: Synthetic peptide
  Seed: LRMKWMMAMKYPITA
LRMKFMMDMVYPQTA

SEQ ID NO: 222984 - protein, 15 aa, Artificial Sequence
  Description of Artificial Sequence: Synthetic peptide
  Seed: LRMKWMMAMKYPITA
LRMKFMMDMVYPRTA

SEQ ID NO: 222985 - protein, 15 aa, Artificial Sequence
  Description of Artificial Sequence: Synthetic peptide
  Seed: LRMKWMMAMKYPITA
LRMKFMMDMVYPSTA

SEQ ID NO: 222986 - protein, 15 aa, Artificial Sequence
  Description of Artificial Sequence: Synthetic peptide
  Seed: LRMKWMMAMKYPITA
LRMKFMMDMVYPTTA

SEQ ID NO: 222987 - protein, 15 aa, Artificial Sequence
  Description of Artificial Sequence: Synthetic peptide
  Seed: LRMKWMMAMKYPITA
LRMKFMMDMVYPVTA

SEQ ID NO: 222988 - protein, 15 aa, Artificial Sequence
  Description of Artificial Sequence: Synthetic peptide
  Seed: LRMKWMMAMKYPITA
LRMKFMMDMVYPYTA

SEQ ID NO: 222989 - protein, 15 aa, Artificial Sequence
  Description of Artificial Sequence: Synthetic peptide
  Seed: LRMKWMMAMKYPITA
LRMKFMMDMWYPITA

SEQ ID NO: 222990 - protein, 15 aa, Artificial Sequence
  Description of Artificial Sequence: Synthetic peptide
  Seed: LRMKWMMAMKYPITA
LRMKFMMDMWYPLTA

SEQ ID NO: 222991 - protein, 15 aa, Artificial Sequence
  Description of Artificial Sequence: Synthetic peptide
  Seed: LRMKWMMAMKYPITA
LRMKFMMDMWYPVTA

SEQ ID NO: 222992 - protein, 15 aa, Artificial Sequence
  Description of Artificial Sequence: Synthetic peptide
  Seed: LRMKWMMAMKYPITA
LRMKFMMDMYYPFTA

SEQ ID NO: 222993 - protein, 15 aa, Artificial Sequence
  Description of Artificial Sequence: Synthetic peptide
  Seed: LRMKWMMAMKYPITA
LRMKFMMDMYYPITA

SEQ ID NO: 222994 - protein, 15 aa, Artificial Sequence
  Description of Artificial Sequence: Synthetic peptide
  Seed: LRMKWMMAMKYPITA
LRMKFMMDMYYPLTA

SEQ ID NO: 222995 - protein, 15 aa, Artificial Sequence
  Description of Artificial Sequence: Synthetic peptide
  Seed: LRMKWMMAMKYPITA
LRMKFMMDMYYPVTA

SEQ ID NO: 222996 - protein, 15 aa, Artificial Sequence
  Description of Artificial Sequence: Synthetic peptide
  Seed: LRMKWMMAMKYPITA
LRMKFMMEMAYPATA

SEQ ID NO: 222997 - protein, 15 aa, Artificial Sequence
  Description of Artificial Sequence: Synthetic peptide
  Seed: LRMKWMMAMKYPITA
LRMKFMMEMAYPCTA

SEQ ID NO: 222998 - protein, 15 aa, Artificial Sequence
  Description of Artificial Sequence: Synthetic peptide
  Seed: LRMKWMMAMKYPITA
LRMKFMMEMAYPDTA

SEQ ID NO: 222999 - protein, 15 aa, Artificial Sequence
  Description of Artificial Sequence: Synthetic peptide
  Seed: LRMKWMMAMKYPITA
LRMKFMMEMAYPETA

SEQ ID NO: 223000 - protein, 15 aa, Artificial Sequence
  Description of Artificial Sequence: Synthetic peptide
  Seed: LRMKWMMAMKYPITA
LRMKFMMEMAYPFTA

SEQ ID NO: 223001 - protein, 15 aa, Artificial Sequence
  Description of Artificial Sequence: Synthetic peptide
  Seed: LRMKWMMAMKYPITA
LRMKFMMEMAYPGTA

SEQ ID NO: 223002 - protein, 15 aa, Artificial Sequence
  Description of Artificial Sequence: Synthetic peptide
  Seed: LRMKWMMAMKYPITA
LRMKFMMEMAYPHTA

SEQ ID NO: 223003 - protein, 15 aa, Artificial Sequence
  Description of Artificial Sequence: Synthetic peptide
  Seed: LRMKWMMAMKYPITA
LRMKFMMEMAYPITA

SEQ ID NO: 223004 - protein, 15 aa, Artificial Sequence
  Description of Artificial Sequence: Synthetic peptide
  Seed: LRMKWMMAMKYPITA
LRMKFMMEMAYPKTA

SEQ ID NO: 223005 - protein, 15 aa, Artificial Sequence
  Description of Artificial Sequence: Synthetic peptide
  Seed: LRMKWMMAMKYPITA
LRMKFMMEMAYPLTA

SEQ ID NO: 223006 - protein, 15 aa, Artificial Sequence
  Description of Artificial Sequence: Synthetic peptide
  Seed: LRMKWMMAMKYPITA
LRMKFMMEMAYPMTA

SEQ ID NO: 223007 - protein, 15 aa, Artificial Sequence
  Description of Artificial Sequence: Synthetic peptide
  Seed: LRMKWMMAMKYPITA
LRMKFMMEMAYPNTA

SEQ ID NO: 223008 - protein, 15 aa, Artificial Sequence
  Description of Artificial Sequence: Synthetic peptide
  Seed: LRMKWMMAMKYPITA
LRMKFMMEMAYPPTA

SEQ ID NO: 223009 - protein, 15 aa, Artificial Sequence
  Description of Artificial Sequence: Synthetic peptide
  Seed: LRMKWMMAMKYPITA
LRMKFMMEMAYPQTA

SEQ ID NO: 223010 - protein, 15 aa, Artificial Sequence
  Description of Artificial Sequence: Synthetic peptide
  Seed: LRMKWMMAMKYPITA
LRMKFMMEMAYPRTA

SEQ ID NO: 223011 - protein, 15 aa, Artificial Sequence
  Description of Artificial Sequence: Synthetic peptide
  Seed: LRMKWMMAMKYPITA
LRMKFMMEMAYPSTA

SEQ ID NO: 223012 - protein, 15 aa, Artificial Sequence
  Description of Artificial Sequence: Synthetic peptide
  Seed: LRMKWMMAMKYPITA
LRMKFMMEMAYPTTA

SEQ ID NO: 223013 - protein, 15 aa, Artificial Sequence
  Description of Artificial Sequence: Synthetic peptide
  Seed: LRMKWMMAMKYPITA
LRMKFMMEMAYPVTA

SEQ ID NO: 223014 - protein, 15 aa, Artificial Sequence
  Description of Artificial Sequence: Synthetic peptide
  Seed: LRMKWMMAMKYPITA
LRMKFMMEMAYPWTA

SEQ ID NO: 223015 - protein, 15 aa, Artificial Sequence
  Description of Artificial Sequence: Synthetic peptide
  Seed: LRMKWMMAMKYPITA
LRMKFMMEMAYPYTA

SEQ ID NO: 223016 - protein, 15 aa, Artificial Sequence
  Description of Artificial Sequence: Synthetic peptide
  Seed: LRMKWMMAMKYPITA
LRMKFMMEMCYPATA

SEQ ID NO: 223017 - protein, 15 aa, Artificial Sequence
  Description of Artificial Sequence: Synthetic peptide
  Seed: LRMKWMMAMKYPITA
LRMKFMMEMCYPITA

SEQ ID NO: 223018 - protein, 15 aa, Artificial Sequence
  Description of Artificial Sequence: Synthetic peptide
  Seed: LRMKWMMAMKYPITA
LRMKFMMEMCYPLTA

SEQ ID NO: 223019 - protein, 15 aa, Artificial Sequence
  Description of Artificial Sequence: Synthetic peptide
  Seed: LRMKWMMAMKYPITA
LRMKFMMEMCYPMTA

SEQ ID NO: 223020 - protein, 15 aa, Artificial Sequence
  Description of Artificial Sequence: Synthetic peptide
  Seed: LRMKWMMAMKYPITA
LRMKFMMEMCYPNTA

SEQ ID NO: 223021 - protein, 15 aa, Artificial Sequence
  Description of Artificial Sequence: Synthetic peptide
  Seed: LRMKWMMAMKYPITA
LRMKFMMEMCYPSTA

SEQ ID NO: 223022 - protein, 15 aa, Artificial Sequence
  Description of Artificial Sequence: Synthetic peptide
  Seed: LRMKWMMAMKYPITA
LRMKFMMEMCYPTTA

SEQ ID NO: 223023 - protein, 15 aa, Artificial Sequence
  Description of Artificial Sequence: Synthetic peptide
  Seed: LRMKWMMAMKYPITA
LRMKFMMEMCYPVTA

SEQ ID NO: 223024 - protein, 15 aa, Artificial Sequence
  Description of Artificial Sequence: Synthetic peptide
  Seed: LRMKWMMAMKYPITA
LRMKFMMEMDYPATA

SEQ ID NO: 223025 - protein, 15 aa, Artificial Sequence
  Description of Artificial Sequence: Synthetic peptide
  Seed: LRMKWMMAMKYPITA
LRMKFMMEMDYPITA

SEQ ID NO: 223026 - protein, 15 aa, Artificial Sequence
  Description of Artificial Sequence: Synthetic peptide
  Seed: LRMKWMMAMKYPITA
LRMKFMMEMDYPLTA

SEQ ID NO: 223027 - protein, 15 aa, Artificial Sequence
  Description of Artificial Sequence: Synthetic peptide
  Seed: LRMKWMMAMKYPITA
LRMKFMMEMDYPVTA

SEQ ID NO: 223028 - protein, 15 aa, Artificial Sequence
  Description of Artificial Sequence: Synthetic peptide
  Seed: LRMKWMMAMKYPITA
LRMKFMMEMEYPATA

SEQ ID NO: 223029 - protein, 15 aa, Artificial Sequence
  Description of Artificial Sequence: Synthetic peptide
  Seed: LRMKWMMAMKYPITA
LRMKFMMEMEYPITA

SEQ ID NO: 223030 - protein, 15 aa, Artificial Sequence
  Description of Artificial Sequence: Synthetic peptide
  Seed: LRMKWMMAMKYPITA
LRMKFMMEMEYPLTA

SEQ ID NO: 223031 - protein, 15 aa, Artificial Sequence
  Description of Artificial Sequence: Synthetic peptide
  Seed: LRMKWMMAMKYPITA
LRMKFMMEMEYPMTA

SEQ ID NO: 223032 - protein, 15 aa, Artificial Sequence
  Description of Artificial Sequence: Synthetic peptide
  Seed: LRMKWMMAMKYPITA
LRMKFMMEMEYPSTA

SEQ ID NO: 223033 - protein, 15 aa, Artificial Sequence
  Description of Artificial Sequence: Synthetic peptide
  Seed: LRMKWMMAMKYPITA
LRMKFMMEMEYPVTA

SEQ ID NO: 223034 - protein, 15 aa, Artificial Sequence
  Description of Artificial Sequence: Synthetic peptide
  Seed: LRMKWMMAMKYPITA
LRMKFMMEMFYPATA

SEQ ID NO: 223035 - protein, 15 aa, Artificial Sequence
  Description of Artificial Sequence: Synthetic peptide
  Seed: LRMKWMMAMKYPITA
LRMKFMMEMFYPCTA

SEQ ID NO: 223036 - protein, 15 aa, Artificial Sequence
  Description of Artificial Sequence: Synthetic peptide
  Seed: LRMKWMMAMKYPITA
LRMKFMMEMFYPDTA

SEQ ID NO: 223037 - protein, 15 aa, Artificial Sequence
  Description of Artificial Sequence: Synthetic peptide
  Seed: LRMKWMMAMKYPITA
LRMKFMMEMFYPETA

SEQ ID NO: 223038 - protein, 15 aa, Artificial Sequence
  Description of Artificial Sequence: Synthetic peptide
  Seed: LRMKWMMAMKYPITA
LRMKFMMEMFYPFTA

SEQ ID NO: 223039 - protein, 15 aa, Artificial Sequence
  Description of Artificial Sequence: Synthetic peptide
  Seed: LRMKWMMAMKYPITA
LRMKFMMEMFYPHTA

SEQ ID NO: 223040 - protein, 15 aa, Artificial Sequence
  Description of Artificial Sequence: Synthetic peptide
  Seed: LRMKWMMAMKYPITA
LRMKFMMEMFYPITA

SEQ ID NO: 223041 - protein, 15 aa, Artificial Sequence
  Description of Artificial Sequence: Synthetic peptide
  Seed: LRMKWMMAMKYPITA
LRMKFMMEMFYPLTA

SEQ ID NO: 223042 - protein, 15 aa, Artificial Sequence
  Description of Artificial Sequence: Synthetic peptide
  Seed: LRMKWMMAMKYPITA
LRMKFMMEMFYPMTA

SEQ ID NO: 223043 - protein, 15 aa, Artificial Sequence
  Description of Artificial Sequence: Synthetic peptide
  Seed: LRMKWMMAMKYPITA
LRMKFMMEMFYPNTA

SEQ ID NO: 223044 - protein, 15 aa, Artificial Sequence
  Description of Artificial Sequence: Synthetic peptide
  Seed: LRMKWMMAMKYPITA
LRMKFMMEMFYPPTA

SEQ ID NO: 223045 - protein, 15 aa, Artificial Sequence
  Description of Artificial Sequence: Synthetic peptide
  Seed: LRMKWMMAMKYPITA
LRMKFMMEMFYPQTA

SEQ ID NO: 223046 - protein, 15 aa, Artificial Sequence
  Description of Artificial Sequence: Synthetic peptide
  Seed: LRMKWMMAMKYPITA
LRMKFMMEMFYPSTA

SEQ ID NO: 223047 - protein, 15 aa, Artificial Sequence
  Description of Artificial Sequence: Synthetic peptide
  Seed: LRMKWMMAMKYPITA
LRMKFMMEMFYPTTA

SEQ ID NO: 223048 - protein, 15 aa, Artificial Sequence
  Description of Artificial Sequence: Synthetic peptide
  Seed: LRMKWMMAMKYPITA
LRMKFMMEMFYPVTA

SEQ ID NO: 223049 - protein, 15 aa, Artificial Sequence
  Description of Artificial Sequence: Synthetic peptide
  Seed: LRMKWMMAMKYPITA
LRMKFMMEMFYPWTA

SEQ ID NO: 223050 - protein, 15 aa, Artificial Sequence
  Description of Artificial Sequence: Synthetic peptide
  Seed: LRMKWMMAMKYPITA
LRMKFMMEMFYPYTA

SEQ ID NO: 223051 - protein, 15 aa, Artificial Sequence
  Description of Artificial Sequence: Synthetic peptide
  Seed: LRMKWMMAMKYPITA
LRMKFMMEMGYPATA

SEQ ID NO: 223052 - protein, 15 aa, Artificial Sequence
  Description of Artificial Sequence: Synthetic peptide
  Seed: LRMKWMMAMKYPITA
LRMKFMMEMGYPCTA

SEQ ID NO: 223053 - protein, 15 aa, Artificial Sequence
  Description of Artificial Sequence: Synthetic peptide
  Seed: LRMKWMMAMKYPITA
LRMKFMMEMGYPDTA

SEQ ID NO: 223054 - protein, 15 aa, Artificial Sequence
  Description of Artificial Sequence: Synthetic peptide
  Seed: LRMKWMMAMKYPITA
LRMKFMMEMGYPETA

SEQ ID NO: 223055 - protein, 15 aa, Artificial Sequence
  Description of Artificial Sequence: Synthetic peptide
  Seed: LRMKWMMAMKYPITA
LRMKFMMEMGYPFTA

SEQ ID NO: 223056 - protein, 15 aa, Artificial Sequence
  Description of Artificial Sequence: Synthetic peptide
  Seed: LRMKWMMAMKYPITA
LRMKFMMEMGYPGTA

SEQ ID NO: 223057 - protein, 15 aa, Artificial Sequence
  Description of Artificial Sequence: Synthetic peptide
  Seed: LRMKWMMAMKYPITA
LRMKFMMEMGYPHTA

SEQ ID NO: 223058 - protein, 15 aa, Artificial Sequence
  Description of Artificial Sequence: Synthetic peptide
  Seed: LRMKWMMAMKYPITA
LRMKFMMEMGYPITA

SEQ ID NO: 223059 - protein, 15 aa, Artificial Sequence
  Description of Artificial Sequence: Synthetic peptide
  Seed: LRMKWMMAMKYPITA
LRMKFMMEMGYPKTA

SEQ ID NO: 223060 - protein, 15 aa, Artificial Sequence
  Description of Artificial Sequence: Synthetic peptide
  Seed: LRMKWMMAMKYPITA
LRMKFMMEMGYPLTA

SEQ ID NO: 223061 - protein, 15 aa, Artificial Sequence
  Description of Artificial Sequence: Synthetic peptide
  Seed: LRMKWMMAMKYPITA
LRMKFMMEMGYPMTA

SEQ ID NO: 223062 - protein, 15 aa, Artificial Sequence
  Description of Artificial Sequence: Synthetic peptide
  Seed: LRMKWMMAMKYPITA
LRMKFMMEMGYPNTA

SEQ ID NO: 223063 - protein, 15 aa, Artificial Sequence
  Description of Artificial Sequence: Synthetic peptide
  Seed: LRMKWMMAMKYPITA
LRMKFMMEMGYPPTA

SEQ ID NO: 223064 - protein, 15 aa, Artificial Sequence
  Description of Artificial Sequence: Synthetic peptide
  Seed: LRMKWMMAMKYPITA
LRMKFMMEMGYPQTA

SEQ ID NO: 223065 - protein, 15 aa, Artificial Sequence
  Description of Artificial Sequence: Synthetic peptide
  Seed: LRMKWMMAMKYPITA
LRMKFMMEMGYPRTA

SEQ ID NO: 223066 - protein, 15 aa, Artificial Sequence
  Description of Artificial Sequence: Synthetic peptide
  Seed: LRMKWMMAMKYPITA
LRMKFMMEMGYPSTA

SEQ ID NO: 223067 - protein, 15 aa, Artificial Sequence
  Description of Artificial Sequence: Synthetic peptide
  Seed: LRMKWMMAMKYPITA
LRMKFMMEMGYPTTA

SEQ ID NO: 223068 - protein, 15 aa, Artificial Sequence
  Description of Artificial Sequence: Synthetic peptide
  Seed: LRMKWMMAMKYPITA
LRMKFMMEMGYPVTA

SEQ ID NO: 223069 - protein, 15 aa, Artificial Sequence
  Description of Artificial Sequence: Synthetic peptide
  Seed: LRMKWMMAMKYPITA
LRMKFMMEMGYPWTA

SEQ ID NO: 223070 - protein, 15 aa, Artificial Sequence
  Description of Artificial Sequence: Synthetic peptide
  Seed: LRMKWMMAMKYPITA
LRMKFMMEMGYPYTA

SEQ ID NO: 223071 - protein, 15 aa, Artificial Sequence
  Description of Artificial Sequence: Synthetic peptide
  Seed: LRMKWMMAMKYPITA
LRMKFMMEMHYPATA

SEQ ID NO: 223072 - protein, 15 aa, Artificial Sequence
  Description of Artificial Sequence: Synthetic peptide
  Seed: LRMKWMMAMKYPITA
LRMKFMMEMHYPITA

SEQ ID NO: 223073 - protein, 15 aa, Artificial Sequence
  Description of Artificial Sequence: Synthetic peptide
  Seed: LRMKWMMAMKYPITA
LRMKFMMEMHYPLTA

SEQ ID NO: 223074 - protein, 15 aa, Artificial Sequence
  Description of Artificial Sequence: Synthetic peptide
  Seed: LRMKWMMAMKYPITA
LRMKFMMEMHYPMTA

SEQ ID NO: 223075 - protein, 15 aa, Artificial Sequence
  Description of Artificial Sequence: Synthetic peptide
  Seed: LRMKWMMAMKYPITA
LRMKFMMEMHYPSTA

SEQ ID NO: 223076 - protein, 15 aa, Artificial Sequence
  Description of Artificial Sequence: Synthetic peptide
  Seed: LRMKWMMAMKYPITA
LRMKFMMEMHYPTTA

SEQ ID NO: 223077 - protein, 15 aa, Artificial Sequence
  Description of Artificial Sequence: Synthetic peptide
  Seed: LRMKWMMAMKYPITA
LRMKFMMEMHYPVTA

SEQ ID NO: 223078 - protein, 15 aa, Artificial Sequence
  Description of Artificial Sequence: Synthetic peptide
  Seed: LRMKWMMAMKYPITA
LRMKFMMEMIYPATA

SEQ ID NO: 223079 - protein, 15 aa, Artificial Sequence
  Description of Artificial Sequence: Synthetic peptide
  Seed: LRMKWMMAMKYPITA
LRMKFMMEMIYPCTA

SEQ ID NO: 223080 - protein, 15 aa, Artificial Sequence
  Description of Artificial Sequence: Synthetic peptide
  Seed: LRMKWMMAMKYPITA
LRMKFMMEMIYPDTA

SEQ ID NO: 223081 - protein, 15 aa, Artificial Sequence
  Description of Artificial Sequence: Synthetic peptide
  Seed: LRMKWMMAMKYPITA
LRMKFMMEMIYPETA

SEQ ID NO: 223082 - protein, 15 aa, Artificial Sequence
  Description of Artificial Sequence: Synthetic peptide
  Seed: LRMKWMMAMKYPITA
LRMKFMMEMIYPFTA

SEQ ID NO: 223083 - protein, 15 aa, Artificial Sequence
  Description of Artificial Sequence: Synthetic peptide
  Seed: LRMKWMMAMKYPITA
LRMKFMMEMIYPGTA

SEQ ID NO: 223084 - protein, 15 aa, Artificial Sequence
  Description of Artificial Sequence: Synthetic peptide
  Seed: LRMKWMMAMKYPITA
LRMKFMMEMIYPHTA

SEQ ID NO: 223085 - protein, 15 aa, Artificial Sequence
  Description of Artificial Sequence: Synthetic peptide
  Seed: LRMKWMMAMKYPITA
LRMKFMMEMIYPITA

SEQ ID NO: 223086 - protein, 15 aa, Artificial Sequence
  Description of Artificial Sequence: Synthetic peptide
  Seed: LRMKWMMAMKYPITA
LRMKFMMEMIYPLTA

SEQ ID NO: 223087 - protein, 15 aa, Artificial Sequence
  Description of Artificial Sequence: Synthetic peptide
  Seed: LRMKWMMAMKYPITA
LRMKFMMEMIYPMTA

SEQ ID NO: 223088 - protein, 15 aa, Artificial Sequence
  Description of Artificial Sequence: Synthetic peptide
  Seed: LRMKWMMAMKYPITA
LRMKFMMEMIYPNTA

SEQ ID NO: 223089 - protein, 15 aa, Artificial Sequence
  Description of Artificial Sequence: Synthetic peptide
  Seed: LRMKWMMAMKYPITA
LRMKFMMEMIYPPTA

SEQ ID NO: 223090 - protein, 15 aa, Artificial Sequence
  Description of Artificial Sequence: Synthetic peptide
  Seed: LRMKWMMAMKYPITA
LRMKFMMEMIYPQTA

SEQ ID NO: 223091 - protein, 15 aa, Artificial Sequence
  Description of Artificial Sequence: Synthetic peptide
  Seed: LRMKWMMAMKYPITA
LRMKFMMEMIYPSTA

SEQ ID NO: 223092 - protein, 15 aa, Artificial Sequence
  Description of Artificial Sequence: Synthetic peptide
  Seed: LRMKWMMAMKYPITA
LRMKFMMEMIYPTTA

SEQ ID NO: 223093 - protein, 15 aa, Artificial Sequence
  Description of Artificial Sequence: Synthetic peptide
  Seed: LRMKWMMAMKYPITA
LRMKFMMEMIYPVTA

SEQ ID NO: 223094 - protein, 15 aa, Artificial Sequence
  Description of Artificial Sequence: Synthetic peptide
  Seed: LRMKWMMAMKYPITA
LRMKFMMEMIYPYTA

SEQ ID NO: 223095 - protein, 15 aa, Artificial Sequence
  Description of Artificial Sequence: Synthetic peptide
  Seed: LRMKWMMAMKYPITA
LRMKFMMEMKYPATA

SEQ ID NO: 223096 - protein, 15 aa, Artificial Sequence
  Description of Artificial Sequence: Synthetic peptide
  Seed: LRMKWMMAMKYPITA
LRMKFMMEMKYPGTA

SEQ ID NO: 223097 - protein, 15 aa, Artificial Sequence
  Description of Artificial Sequence: Synthetic peptide
  Seed: LRMKWMMAMKYPITA
LRMKFMMEMKYPHTA

SEQ ID NO: 223098 - protein, 15 aa, Artificial Sequence
  Description of Artificial Sequence: Synthetic peptide
  Seed: LRMKWMMAMKYPITA
LRMKFMMEMKYPQTA

SEQ ID NO: 223099 - protein, 15 aa, Artificial Sequence
  Description of Artificial Sequence: Synthetic peptide
  Seed: LRMKWMMAMKYPITA
LRMKFMMEMKYPSTA

SEQ ID NO: 223100 - protein, 15 aa, Artificial Sequence
  Description of Artificial Sequence: Synthetic peptide
  Seed: LRMKWMMAMKYPITA
LRMKFMMEMLYPATA

SEQ ID NO: 223101 - protein, 15 aa, Artificial Sequence
  Description of Artificial Sequence: Synthetic peptide
  Seed: LRMKWMMAMKYPITA
LRMKFMMEMLYPCTA

SEQ ID NO: 223102 - protein, 15 aa, Artificial Sequence
  Description of Artificial Sequence: Synthetic peptide
  Seed: LRMKWMMAMKYPITA
LRMKFMMEMLYPGTA

SEQ ID NO: 223103 - protein, 15 aa, Artificial Sequence
  Description of Artificial Sequence: Synthetic peptide
  Seed: LRMKWMMAMKYPITA
LRMKFMMEMLYPITA

SEQ ID NO: 223104 - protein, 15 aa, Artificial Sequence
  Description of Artificial Sequence: Synthetic peptide
  Seed: LRMKWMMAMKYPITA
LRMKFMMEMLYPLTA

SEQ ID NO: 223105 - protein, 15 aa, Artificial Sequence
  Description of Artificial Sequence: Synthetic peptide
  Seed: LRMKWMMAMKYPITA
LRMKFMMEMLYPMTA

SEQ ID NO: 223106 - protein, 15 aa, Artificial Sequence
  Description of Artificial Sequence: Synthetic peptide
  Seed: LRMKWMMAMKYPITA
LRMKFMMEMLYPNTA

SEQ ID NO: 223107 - protein, 15 aa, Artificial Sequence
  Description of Artificial Sequence: Synthetic peptide
  Seed: LRMKWMMAMKYPITA
LRMKFMMEMLYPSTA

SEQ ID NO: 223108 - protein, 15 aa, Artificial Sequence
  Description of Artificial Sequence: Synthetic peptide
  Seed: LRMKWMMAMKYPITA
LRMKFMMEMLYPTTA

SEQ ID NO: 223109 - protein, 15 aa, Artificial Sequence
  Description of Artificial Sequence: Synthetic peptide
  Seed: LRMKWMMAMKYPITA
LRMKFMMEMLYPVTA

SEQ ID NO: 223110 - protein, 15 aa, Artificial Sequence
  Description of Artificial Sequence: Synthetic peptide
  Seed: LRMKWMMAMKYPITA
LRMKFMMEMMYPATA

SEQ ID NO: 223111 - protein, 15 aa, Artificial Sequence
  Description of Artificial Sequence: Synthetic peptide
  Seed: LRMKWMMAMKYPITA
LRMKFMMEMMYPCTA

SEQ ID NO: 223112 - protein, 15 aa, Artificial Sequence
  Description of Artificial Sequence: Synthetic peptide
  Seed: LRMKWMMAMKYPITA
LRMKFMMEMMYPGTA

SEQ ID NO: 223113 - protein, 15 aa, Artificial Sequence
  Description of Artificial Sequence: Synthetic peptide
  Seed: LRMKWMMAMKYPITA
LRMKFMMEMMYPITA

SEQ ID NO: 223114 - protein, 15 aa, Artificial Sequence
  Description of Artificial Sequence: Synthetic peptide
  Seed: LRMKWMMAMKYPITA
LRMKFMMEMMYPLTA

SEQ ID NO: 223115 - protein, 15 aa, Artificial Sequence
  Description of Artificial Sequence: Synthetic peptide
  Seed: LRMKWMMAMKYPITA
LRMKFMMEMMYPMTA

SEQ ID NO: 223116 - protein, 15 aa, Artificial Sequence
  Description of Artificial Sequence: Synthetic peptide
  Seed: LRMKWMMAMKYPITA
LRMKFMMEMMYPNTA

SEQ ID NO: 223117 - protein, 15 aa, Artificial Sequence
  Description of Artificial Sequence: Synthetic peptide
  Seed: LRMKWMMAMKYPITA
LRMKFMMEMMYPSTA

SEQ ID NO: 223118 - protein, 15 aa, Artificial Sequence
  Description of Artificial Sequence: Synthetic peptide
  Seed: LRMKWMMAMKYPITA
LRMKFMMEMMYPTTA

SEQ ID NO: 223119 - protein, 15 aa, Artificial Sequence
  Description of Artificial Sequence: Synthetic peptide
  Seed: LRMKWMMAMKYPITA
LRMKFMMEMMYPVTA

SEQ ID NO: 223120 - protein, 15 aa, Artificial Sequence
  Description of Artificial Sequence: Synthetic peptide
  Seed: LRMKWMMAMKYPITA
LRMKFMMEMNYPATA

SEQ ID NO: 223121 - protein, 15 aa, Artificial Sequence
  Description of Artificial Sequence: Synthetic peptide
  Seed: LRMKWMMAMKYPITA
LRMKFMMEMNYPCTA

SEQ ID NO: 223122 - protein, 15 aa, Artificial Sequence
  Description of Artificial Sequence: Synthetic peptide
  Seed: LRMKWMMAMKYPITA
LRMKFMMEMNYPDTA

SEQ ID NO: 223123 - protein, 15 aa, Artificial Sequence
  Description of Artificial Sequence: Synthetic peptide
  Seed: LRMKWMMAMKYPITA
LRMKFMMEMNYPETA

SEQ ID NO: 223124 - protein, 15 aa, Artificial Sequence
  Description of Artificial Sequence: Synthetic peptide
  Seed: LRMKWMMAMKYPITA
LRMKFMMEMNYPFTA

SEQ ID NO: 223125 - protein, 15 aa, Artificial Sequence
  Description of Artificial Sequence: Synthetic peptide
  Seed: LRMKWMMAMKYPITA
LRMKFMMEMNYPGTA

SEQ ID NO: 223126 - protein, 15 aa, Artificial Sequence
  Description of Artificial Sequence: Synthetic peptide
  Seed: LRMKWMMAMKYPITA
LRMKFMMEMNYPHTA

SEQ ID NO: 223127 - protein, 15 aa, Artificial Sequence
  Description of Artificial Sequence: Synthetic peptide
  Seed: LRMKWMMAMKYPITA
LRMKFMMEMNYPITA

SEQ ID NO: 223128 - protein, 15 aa, Artificial Sequence
  Description of Artificial Sequence: Synthetic peptide
  Seed: LRMKWMMAMKYPITA
LRMKFMMEMNYPLTA

SEQ ID NO: 223129 - protein, 15 aa, Artificial Sequence
  Description of Artificial Sequence: Synthetic peptide
  Seed: LRMKWMMAMKYPITA
LRMKFMMEMNYPMTA

SEQ ID NO: 223130 - protein, 15 aa, Artificial Sequence
  Description of Artificial Sequence: Synthetic peptide
  Seed: LRMKWMMAMKYPITA
LRMKFMMEMNYPNTA

SEQ ID NO: 223131 - protein, 15 aa, Artificial Sequence
  Description of Artificial Sequence: Synthetic peptide
  Seed: LRMKWMMAMKYPITA
LRMKFMMEMNYPPTA

SEQ ID NO: 223132 - protein, 15 aa, Artificial Sequence
  Description of Artificial Sequence: Synthetic peptide
  Seed: LRMKWMMAMKYPITA
LRMKFMMEMNYPQTA

SEQ ID NO: 223133 - protein, 15 aa, Artificial Sequence
  Description of Artificial Sequence: Synthetic peptide
  Seed: LRMKWMMAMKYPITA
LRMKFMMEMNYPSTA

SEQ ID NO: 223134 - protein, 15 aa, Artificial Sequence
  Description of Artificial Sequence: Synthetic peptide
  Seed: LRMKWMMAMKYPITA
LRMKFMMEMNYPTTA

SEQ ID NO: 223135 - protein, 15 aa, Artificial Sequence
  Description of Artificial Sequence: Synthetic peptide
  Seed: LRMKWMMAMKYPITA
LRMKFMMEMNYPVTA

SEQ ID NO: 223136 - protein, 15 aa, Artificial Sequence
  Description of Artificial Sequence: Synthetic peptide
  Seed: LRMKWMMAMKYPITA
LRMKFMMEMNYPYTA

SEQ ID NO: 223137 - protein, 15 aa, Artificial Sequence
  Description of Artificial Sequence: Synthetic peptide
  Seed: LRMKWMMAMKYPITA
LRMKFMMEMPYPATA

SEQ ID NO: 223138 - protein, 15 aa, Artificial Sequence
  Description of Artificial Sequence: Synthetic peptide
  Seed: LRMKWMMAMKYPITA
LRMKFMMEMPYPCTA

SEQ ID NO: 223139 - protein, 15 aa, Artificial Sequence
  Description of Artificial Sequence: Synthetic peptide
  Seed: LRMKWMMAMKYPITA
LRMKFMMEMPYPDTA

SEQ ID NO: 223140 - protein, 15 aa, Artificial Sequence
  Description of Artificial Sequence: Synthetic peptide
  Seed: LRMKWMMAMKYPITA
LRMKFMMEMPYPETA

SEQ ID NO: 223141 - protein, 15 aa, Artificial Sequence
  Description of Artificial Sequence: Synthetic peptide
  Seed: LRMKWMMAMKYPITA
LRMKFMMEMPYPFTA

SEQ ID NO: 223142 - protein, 15 aa, Artificial Sequence
  Description of Artificial Sequence: Synthetic peptide
  Seed: LRMKWMMAMKYPITA
LRMKFMMEMPYPGTA

SEQ ID NO: 223143 - protein, 15 aa, Artificial Sequence
  Description of Artificial Sequence: Synthetic peptide
  Seed: LRMKWMMAMKYPITA
LRMKFMMEMPYPHTA

SEQ ID NO: 223144 - protein, 15 aa, Artificial Sequence
  Description of Artificial Sequence: Synthetic peptide
  Seed: LRMKWMMAMKYPITA
LRMKFMMEMPYPITA

SEQ ID NO: 223145 - protein, 15 aa, Artificial Sequence
  Description of Artificial Sequence: Synthetic peptide
  Seed: LRMKWMMAMKYPITA
LRMKFMMEMPYPKTA

SEQ ID NO: 223146 - protein, 15 aa, Artificial Sequence
  Description of Artificial Sequence: Synthetic peptide
  Seed: LRMKWMMAMKYPITA
LRMKFMMEMPYPLTA

SEQ ID NO: 223147 - protein, 15 aa, Artificial Sequence
  Description of Artificial Sequence: Synthetic peptide
  Seed: LRMKWMMAMKYPITA
LRMKFMMEMPYPMTA

SEQ ID NO: 223148 - protein, 15 aa, Artificial Sequence
  Description of Artificial Sequence: Synthetic peptide
  Seed: LRMKWMMAMKYPITA
LRMKFMMEMPYPNTA

SEQ ID NO: 223149 - protein, 15 aa, Artificial Sequence
  Description of Artificial Sequence: Synthetic peptide
  Seed: LRMKWMMAMKYPITA
LRMKFMMEMPYPPTA

SEQ ID NO: 223150 - protein, 15 aa, Artificial Sequence
  Description of Artificial Sequence: Synthetic peptide
  Seed: LRMKWMMAMKYPITA
LRMKFMMEMPYPQTA

SEQ ID NO: 223151 - protein, 15 aa, Artificial Sequence
  Description of Artificial Sequence: Synthetic peptide
  Seed: LRMKWMMAMKYPITA
LRMKFMMEMPYPRTA

SEQ ID NO: 223152 - protein, 15 aa, Artificial Sequence
  Description of Artificial Sequence: Synthetic peptide
  Seed: LRMKWMMAMKYPITA
LRMKFMMEMPYPSTA

SEQ ID NO: 223153 - protein, 15 aa, Artificial Sequence
  Description of Artificial Sequence: Synthetic peptide
  Seed: LRMKWMMAMKYPITA
LRMKFMMEMPYPTTA

SEQ ID NO: 223154 - protein, 15 aa, Artificial Sequence
  Description of Artificial Sequence: Synthetic peptide
  Seed: LRMKWMMAMKYPITA
LRMKFMMEMPYPVTA

SEQ ID NO: 223155 - protein, 15 aa, Artificial Sequence
  Description of Artificial Sequence: Synthetic peptide
  Seed: LRMKWMMAMKYPITA
LRMKFMMEMPYPWTA

SEQ ID NO: 223156 - protein, 15 aa, Artificial Sequence
  Description of Artificial Sequence: Synthetic peptide
  Seed: LRMKWMMAMKYPITA
LRMKFMMEMPYPYTA

SEQ ID NO: 223157 - protein, 15 aa, Artificial Sequence
  Description of Artificial Sequence: Synthetic peptide
  Seed: LRMKWMMAMKYPITA
LRMKFMMEMQYPATA

SEQ ID NO: 223158 - protein, 15 aa, Artificial Sequence
  Description of Artificial Sequence: Synthetic peptide
  Seed: LRMKWMMAMKYPITA
LRMKFMMEMQYPITA

SEQ ID NO: 223159 - protein, 15 aa, Artificial Sequence
  Description of Artificial Sequence: Synthetic peptide
  Seed: LRMKWMMAMKYPITA
LRMKFMMEMQYPLTA

SEQ ID NO: 223160 - protein, 15 aa, Artificial Sequence
  Description of Artificial Sequence: Synthetic peptide
  Seed: LRMKWMMAMKYPITA
LRMKFMMEMQYPMTA

SEQ ID NO: 223161 - protein, 15 aa, Artificial Sequence
  Description of Artificial Sequence: Synthetic peptide
  Seed: LRMKWMMAMKYPITA
LRMKFMMEMQYPNTA

SEQ ID NO: 223162 - protein, 15 aa, Artificial Sequence
  Description of Artificial Sequence: Synthetic peptide
  Seed: LRMKWMMAMKYPITA
LRMKFMMEMQYPSTA

SEQ ID NO: 223163 - protein, 15 aa, Artificial Sequence
  Description of Artificial Sequence: Synthetic peptide
  Seed: LRMKWMMAMKYPITA
LRMKFMMEMQYPTTA

SEQ ID NO: 223164 - protein, 15 aa, Artificial Sequence
  Description of Artificial Sequence: Synthetic peptide
  Seed: LRMKWMMAMKYPITA
LRMKFMMEMQYPVTA

SEQ ID NO: 223165 - protein, 15 aa, Artificial Sequence
  Description of Artificial Sequence: Synthetic peptide
  Seed: LRMKWMMAMKYPITA
LRMKFMMEMRYPATA

SEQ ID NO: 223166 - protein, 15 aa, Artificial Sequence
  Description of Artificial Sequence: Synthetic peptide
  Seed: LRMKWMMAMKYPITA
LRMKFMMEMRYPFTA

SEQ ID NO: 223167 - protein, 15 aa, Artificial Sequence
  Description of Artificial Sequence: Synthetic peptide
  Seed: LRMKWMMAMKYPITA
LRMKFMMEMRYPGTA

SEQ ID NO: 223168 - protein, 15 aa, Artificial Sequence
  Description of Artificial Sequence: Synthetic peptide
  Seed: LRMKWMMAMKYPITA
LRMKFMMEMRYPHTA

SEQ ID NO: 223169 - protein, 15 aa, Artificial Sequence
  Description of Artificial Sequence: Synthetic peptide
  Seed: LRMKWMMAMKYPITA
LRMKFMMEMRYPKTA

SEQ ID NO: 223170 - protein, 15 aa, Artificial Sequence
  Description of Artificial Sequence: Synthetic peptide
  Seed: LRMKWMMAMKYPITA
LRMKFMMEMRYPMTA

SEQ ID NO: 223171 - protein, 15 aa, Artificial Sequence
  Description of Artificial Sequence: Synthetic peptide
  Seed: LRMKWMMAMKYPITA
LRMKFMMEMRYPQTA

SEQ ID NO: 223172 - protein, 15 aa, Artificial Sequence
  Description of Artificial Sequence: Synthetic peptide
  Seed: LRMKWMMAMKYPITA
LRMKFMMEMRYPRTA

SEQ ID NO: 223173 - protein, 15 aa, Artificial Sequence
  Description of Artificial Sequence: Synthetic peptide
  Seed: LRMKWMMAMKYPITA
LRMKFMMEMRYPSTA

SEQ ID NO: 223174 - protein, 15 aa, Artificial Sequence
  Description of Artificial Sequence: Synthetic peptide
  Seed: LRMKWMMAMKYPITA
LRMKFMMEMRYPTTA

SEQ ID NO: 223175 - protein, 15 aa, Artificial Sequence
  Description of Artificial Sequence: Synthetic peptide
  Seed: LRMKWMMAMKYPITA
LRMKFMMEMRYPVTA

SEQ ID NO: 223176 - protein, 15 aa, Artificial Sequence
  Description of Artificial Sequence: Synthetic peptide
  Seed: LRMKWMMAMKYPITA
LRMKFMMEMRYPYTA

SEQ ID NO: 223177 - protein, 15 aa, Artificial Sequence
  Description of Artificial Sequence: Synthetic peptide
  Seed: LRMKWMMAMKYPITA
LRMKFMMEMSYPATA

SEQ ID NO: 223178 - protein, 15 aa, Artificial Sequence
  Description of Artificial Sequence: Synthetic peptide
  Seed: LRMKWMMAMKYPITA
LRMKFMMEMSYPCTA

SEQ ID NO: 223179 - protein, 15 aa, Artificial Sequence
  Description of Artificial Sequence: Synthetic peptide
  Seed: LRMKWMMAMKYPITA
LRMKFMMEMSYPDTA

SEQ ID NO: 223180 - protein, 15 aa, Artificial Sequence
  Description of Artificial Sequence: Synthetic peptide
  Seed: LRMKWMMAMKYPITA
LRMKFMMEMSYPETA

SEQ ID NO: 223181 - protein, 15 aa, Artificial Sequence
  Description of Artificial Sequence: Synthetic peptide
  Seed: LRMKWMMAMKYPITA
LRMKFMMEMSYPFTA

SEQ ID NO: 223182 - protein, 15 aa, Artificial Sequence
  Description of Artificial Sequence: Synthetic peptide
  Seed: LRMKWMMAMKYPITA
LRMKFMMEMSYPGTA

SEQ ID NO: 223183 - protein, 15 aa, Artificial Sequence
  Description of Artificial Sequence: Synthetic peptide
  Seed: LRMKWMMAMKYPITA
LRMKFMMEMSYPHTA

SEQ ID NO: 223184 - protein, 15 aa, Artificial Sequence
  Description of Artificial Sequence: Synthetic peptide
  Seed: LRMKWMMAMKYPITA
LRMKFMMEMSYPITA

SEQ ID NO: 223185 - protein, 15 aa, Artificial Sequence
  Description of Artificial Sequence: Synthetic peptide
  Seed: LRMKWMMAMKYPITA
LRMKFMMEMSYPKTA

SEQ ID NO: 223186 - protein, 15 aa, Artificial Sequence
  Description of Artificial Sequence: Synthetic peptide
  Seed: LRMKWMMAMKYPITA
LRMKFMMEMSYPLTA

SEQ ID NO: 223187 - protein, 15 aa, Artificial Sequence
  Description of Artificial Sequence: Synthetic peptide
  Seed: LRMKWMMAMKYPITA
LRMKFMMEMSYPMTA

SEQ ID NO: 223188 - protein, 15 aa, Artificial Sequence
  Description of Artificial Sequence: Synthetic peptide
  Seed: LRMKWMMAMKYPITA
LRMKFMMEMSYPNTA

SEQ ID NO: 223189 - protein, 15 aa, Artificial Sequence
  Description of Artificial Sequence: Synthetic peptide
  Seed: LRMKWMMAMKYPITA
LRMKFMMEMSYPPTA

SEQ ID NO: 223190 - protein, 15 aa, Artificial Sequence
  Description of Artificial Sequence: Synthetic peptide
  Seed: LRMKWMMAMKYPITA
LRMKFMMEMSYPQTA

SEQ ID NO: 223191 - protein, 15 aa, Artificial Sequence
  Description of Artificial Sequence: Synthetic peptide
  Seed: LRMKWMMAMKYPITA
LRMKFMMEMSYPRTA

SEQ ID NO: 223192 - protein, 15 aa, Artificial Sequence
  Description of Artificial Sequence: Synthetic peptide
  Seed: LRMKWMMAMKYPITA
LRMKFMMEMSYPSTA

SEQ ID NO: 223193 - protein, 15 aa, Artificial Sequence
  Description of Artificial Sequence: Synthetic peptide
  Seed: LRMKWMMAMKYPITA
LRMKFMMEMSYPTTA

SEQ ID NO: 223194 - protein, 15 aa, Artificial Sequence
  Description of Artificial Sequence: Synthetic peptide
  Seed: LRMKWMMAMKYPITA
LRMKFMMEMSYPVTA

SEQ ID NO: 223195 - protein, 15 aa, Artificial Sequence
  Description of Artificial Sequence: Synthetic peptide
  Seed: LRMKWMMAMKYPITA
LRMKFMMEMSYPWTA

SEQ ID NO: 223196 - protein, 15 aa, Artificial Sequence
  Description of Artificial Sequence: Synthetic peptide
  Seed: LRMKWMMAMKYPITA
LRMKFMMEMSYPYTA

SEQ ID NO: 223197 - protein, 15 aa, Artificial Sequence
  Description of Artificial Sequence: Synthetic peptide
  Seed: LRMKWMMAMKYPITA
LRMKFMMEMTYPATA

SEQ ID NO: 223198 - protein, 15 aa, Artificial Sequence
  Description of Artificial Sequence: Synthetic peptide
  Seed: LRMKWMMAMKYPITA
LRMKFMMEMTYPCTA

SEQ ID NO: 223199 - protein, 15 aa, Artificial Sequence
  Description of Artificial Sequence: Synthetic peptide
  Seed: LRMKWMMAMKYPITA
LRMKFMMEMTYPDTA

SEQ ID NO: 223200 - protein, 15 aa, Artificial Sequence
  Description of Artificial Sequence: Synthetic peptide
  Seed: LRMKWMMAMKYPITA
LRMKFMMEMTYPETA

SEQ ID NO: 223201 - protein, 15 aa, Artificial Sequence
  Description of Artificial Sequence: Synthetic peptide
  Seed: LRMKWMMAMKYPITA
LRMKFMMEMTYPFTA

SEQ ID NO: 223202 - protein, 15 aa, Artificial Sequence
  Description of Artificial Sequence: Synthetic peptide
  Seed: LRMKWMMAMKYPITA
LRMKFMMEMTYPGTA

SEQ ID NO: 223203 - protein, 15 aa, Artificial Sequence
  Description of Artificial Sequence: Synthetic peptide
  Seed: LRMKWMMAMKYPITA
LRMKFMMEMTYPHTA

SEQ ID NO: 223204 - protein, 15 aa, Artificial Sequence
  Description of Artificial Sequence: Synthetic peptide
  Seed: LRMKWMMAMKYPITA
LRMKFMMEMTYPITA

SEQ ID NO: 223205 - protein, 15 aa, Artificial Sequence
  Description of Artificial Sequence: Synthetic peptide
  Seed: LRMKWMMAMKYPITA
LRMKFMMEMTYPLTA

SEQ ID NO: 223206 - protein, 15 aa, Artificial Sequence
  Description of Artificial Sequence: Synthetic peptide
  Seed: LRMKWMMAMKYPITA
LRMKFMMEMTYPMTA

SEQ ID NO: 223207 - protein, 15 aa, Artificial Sequence
  Description of Artificial Sequence: Synthetic peptide
  Seed: LRMKWMMAMKYPITA
LRMKFMMEMTYPNTA

SEQ ID NO: 223208 - protein, 15 aa, Artificial Sequence
  Description of Artificial Sequence: Synthetic peptide
  Seed: LRMKWMMAMKYPITA
LRMKFMMEMTYPPTA

SEQ ID NO: 223209 - protein, 15 aa, Artificial Sequence
  Description of Artificial Sequence: Synthetic peptide
  Seed: LRMKWMMAMKYPITA
LRMKFMMEMTYPQTA

SEQ ID NO: 223210 - protein, 15 aa, Artificial Sequence
  Description of Artificial Sequence: Synthetic peptide
  Seed: LRMKWMMAMKYPITA
LRMKFMMEMTYPRTA

SEQ ID NO: 223211 - protein, 15 aa, Artificial Sequence
  Description of Artificial Sequence: Synthetic peptide
  Seed: LRMKWMMAMKYPITA
LRMKFMMEMTYPSTA

SEQ ID NO: 223212 - protein, 15 aa, Artificial Sequence
  Description of Artificial Sequence: Synthetic peptide
  Seed: LRMKWMMAMKYPITA
LRMKFMMEMTYPTTA

SEQ ID NO: 223213 - protein, 15 aa, Artificial Sequence
  Description of Artificial Sequence: Synthetic peptide
  Seed: LRMKWMMAMKYPITA
LRMKFMMEMTYPVTA

SEQ ID NO: 223214 - protein, 15 aa, Artificial Sequence
  Description of Artificial Sequence: Synthetic peptide
  Seed: LRMKWMMAMKYPITA
LRMKFMMEMTYPWTA

SEQ ID NO: 223215 - protein, 15 aa, Artificial Sequence
  Description of Artificial Sequence: Synthetic peptide
  Seed: LRMKWMMAMKYPITA
LRMKFMMEMTYPYTA

SEQ ID NO: 223216 - protein, 15 aa, Artificial Sequence
  Description of Artificial Sequence: Synthetic peptide
  Seed: LRMKWMMAMKYPITA
LRMKFMMEMVYPATA

SEQ ID NO: 223217 - protein, 15 aa, Artificial Sequence
  Description of Artificial Sequence: Synthetic peptide
  Seed: LRMKWMMAMKYPITA
LRMKFMMEMVYPCTA

SEQ ID NO: 223218 - protein, 15 aa, Artificial Sequence
  Description of Artificial Sequence: Synthetic peptide
  Seed: LRMKWMMAMKYPITA
LRMKFMMEMVYPDTA

SEQ ID NO: 223219 - protein, 15 aa, Artificial Sequence
  Description of Artificial Sequence: Synthetic peptide
  Seed: LRMKWMMAMKYPITA
LRMKFMMEMVYPETA

SEQ ID NO: 223220 - protein, 15 aa, Artificial Sequence
  Description of Artificial Sequence: Synthetic peptide
  Seed: LRMKWMMAMKYPITA
LRMKFMMEMVYPFTA

SEQ ID NO: 223221 - protein, 15 aa, Artificial Sequence
  Description of Artificial Sequence: Synthetic peptide
  Seed: LRMKWMMAMKYPITA
LRMKFMMEMVYPGTA

SEQ ID NO: 223222 - protein, 15 aa, Artificial Sequence
  Description of Artificial Sequence: Synthetic peptide
  Seed: LRMKWMMAMKYPITA
LRMKFMMEMVYPHTA

SEQ ID NO: 223223 - protein, 15 aa, Artificial Sequence
  Description of Artificial Sequence: Synthetic peptide
  Seed: LRMKWMMAMKYPITA
LRMKFMMEMVYPITA

SEQ ID NO: 223224 - protein, 15 aa, Artificial Sequence
  Description of Artificial Sequence: Synthetic peptide
  Seed: LRMKWMMAMKYPITA
LRMKFMMEMVYPKTA

SEQ ID NO: 223225 - protein, 15 aa, Artificial Sequence
  Description of Artificial Sequence: Synthetic peptide
  Seed: LRMKWMMAMKYPITA
LRMKFMMEMVYPLTA

SEQ ID NO: 223226 - protein, 15 aa, Artificial Sequence
  Description of Artificial Sequence: Synthetic peptide
  Seed: LRMKWMMAMKYPITA
LRMKFMMEMVYPMTA

SEQ ID NO: 223227 - protein, 15 aa, Artificial Sequence
  Description of Artificial Sequence: Synthetic peptide
  Seed: LRMKWMMAMKYPITA
LRMKFMMEMVYPNTA

SEQ ID NO: 223228 - protein, 15 aa, Artificial Sequence
  Description of Artificial Sequence: Synthetic peptide
  Seed: LRMKWMMAMKYPITA
LRMKFMMEMVYPPTA

SEQ ID NO: 223229 - protein, 15 aa, Artificial Sequence
  Description of Artificial Sequence: Synthetic peptide
  Seed: LRMKWMMAMKYPITA
LRMKFMMEMVYPQTA

SEQ ID NO: 223230 - protein, 15 aa, Artificial Sequence
  Description of Artificial Sequence: Synthetic peptide
  Seed: LRMKWMMAMKYPITA
LRMKFMMEMVYPSTA

SEQ ID NO: 223231 - protein, 15 aa, Artificial Sequence
  Description of Artificial Sequence: Synthetic peptide
  Seed: LRMKWMMAMKYPITA
LRMKFMMEMVYPTTA

SEQ ID NO: 223232 - protein, 15 aa, Artificial Sequence
  Description of Artificial Sequence: Synthetic peptide
  Seed: LRMKWMMAMKYPITA
LRMKFMMEMVYPVTA

SEQ ID NO: 223233 - protein, 15 aa, Artificial Sequence
  Description of Artificial Sequence: Synthetic peptide
  Seed: LRMKWMMAMKYPITA
LRMKFMMEMVYPWTA

SEQ ID NO: 223234 - protein, 15 aa, Artificial Sequence
  Description of Artificial Sequence: Synthetic peptide
  Seed: LRMKWMMAMKYPITA
LRMKFMMEMVYPYTA

SEQ ID NO: 223235 - protein, 15 aa, Artificial Sequence
  Description of Artificial Sequence: Synthetic peptide
  Seed: LRMKWMMAMKYPITA
LRMKFMMEMWYPATA

SEQ ID NO: 223236 - protein, 15 aa, Artificial Sequence
  Description of Artificial Sequence: Synthetic peptide
  Seed: LRMKWMMAMKYPITA
LRMKFMMEMWYPFTA

SEQ ID NO: 223237 - protein, 15 aa, Artificial Sequence
  Description of Artificial Sequence: Synthetic peptide
  Seed: LRMKWMMAMKYPITA
LRMKFMMEMWYPITA

SEQ ID NO: 223238 - protein, 15 aa, Artificial Sequence
  Description of Artificial Sequence: Synthetic peptide
  Seed: LRMKWMMAMKYPITA
LRMKFMMEMWYPLTA

SEQ ID NO: 223239 - protein, 15 aa, Artificial Sequence
  Description of Artificial Sequence: Synthetic peptide
  Seed: LRMKWMMAMKYPITA
LRMKFMMEMWYPMTA

SEQ ID NO: 223240 - protein, 15 aa, Artificial Sequence
  Description of Artificial Sequence: Synthetic peptide
  Seed: LRMKWMMAMKYPITA
LRMKFMMEMWYPVTA

SEQ ID NO: 223241 - protein, 15 aa, Artificial Sequence
  Description of Artificial Sequence: Synthetic peptide
  Seed: LRMKWMMAMKYPITA
LRMKFMMEMYYPFTA

SEQ ID NO: 223242 - protein, 15 aa, Artificial Sequence
  Description of Artificial Sequence: Synthetic peptide
  Seed: LRMKWMMAMKYPITA
LRMKFMMEMYYPITA

SEQ ID NO: 223243 - protein, 15 aa, Artificial Sequence
  Description of Artificial Sequence: Synthetic peptide
  Seed: LRMKWMMAMKYPITA
LRMKFMMEMYYPLTA

SEQ ID NO: 223244 - protein, 15 aa, Artificial Sequence
  Description of Artificial Sequence: Synthetic peptide
  Seed: LRMKWMMAMKYPITA
LRMKFMMEMYYPMTA

SEQ ID NO: 223245 - protein, 15 aa, Artificial Sequence
  Description of Artificial Sequence: Synthetic peptide
  Seed: LRMKWMMAMKYPITA
LRMKFMMEMYYPTTA

SEQ ID NO: 223246 - protein, 15 aa, Artificial Sequence
  Description of Artificial Sequence: Synthetic peptide
  Seed: LRMKWMMAMKYPITA
LRMKFMMEMYYPVTA

SEQ ID NO: 223247 - protein, 15 aa, Artificial Sequence
  Description of Artificial Sequence: Synthetic peptide
  Seed: LRMKWMMAMKYPITA
LRMKFMMFMAYPATA

SEQ ID NO: 223248 - protein, 15 aa, Artificial Sequence
  Description of Artificial Sequence: Synthetic peptide
  Seed: LRMKWMMAMKYPITA
LRMKFMMFMAYPCTA

SEQ ID NO: 223249 - protein, 15 aa, Artificial Sequence
  Description of Artificial Sequence: Synthetic peptide
  Seed: LRMKWMMAMKYPITA
LRMKFMMFMAYPDTA

SEQ ID NO: 223250 - protein, 15 aa, Artificial Sequence
  Description of Artificial Sequence: Synthetic peptide
  Seed: LRMKWMMAMKYPITA
LRMKFMMFMAYPETA

SEQ ID NO: 223251 - protein, 15 aa, Artificial Sequence
  Description of Artificial Sequence: Synthetic peptide
  Seed: LRMKWMMAMKYPITA
LRMKFMMFMAYPFTA

SEQ ID NO: 223252 - protein, 15 aa, Artificial Sequence
  Description of Artificial Sequence: Synthetic peptide
  Seed: LRMKWMMAMKYPITA
LRMKFMMFMAYPGTA

SEQ ID NO: 223253 - protein, 15 aa, Artificial Sequence
  Description of Artificial Sequence: Synthetic peptide
  Seed: LRMKWMMAMKYPITA
LRMKFMMFMAYPHTA

SEQ ID NO: 223254 - protein, 15 aa, Artificial Sequence
  Description of Artificial Sequence: Synthetic peptide
  Seed: LRMKWMMAMKYPITA
LRMKFMMFMAYPITA

SEQ ID NO: 223255 - protein, 15 aa, Artificial Sequence
  Description of Artificial Sequence: Synthetic peptide
  Seed: LRMKWMMAMKYPITA
LRMKFMMFMAYPKTA

SEQ ID NO: 223256 - protein, 15 aa, Artificial Sequence
  Description of Artificial Sequence: Synthetic peptide
  Seed: LRMKWMMAMKYPITA
LRMKFMMFMAYPLTA

SEQ ID NO: 223257 - protein, 15 aa, Artificial Sequence
  Description of Artificial Sequence: Synthetic peptide
  Seed: LRMKWMMAMKYPITA
LRMKFMMFMAYPMTA

SEQ ID NO: 223258 - protein, 15 aa, Artificial Sequence
  Description of Artificial Sequence: Synthetic peptide
  Seed: LRMKWMMAMKYPITA
LRMKFMMFMAYPNTA

SEQ ID NO: 223259 - protein, 15 aa, Artificial Sequence
  Description of Artificial Sequence: Synthetic peptide
  Seed: LRMKWMMAMKYPITA
LRMKFMMFMAYPPTA

SEQ ID NO: 223260 - protein, 15 aa, Artificial Sequence
  Description of Artificial Sequence: Synthetic peptide
  Seed: LRMKWMMAMKYPITA
LRMKFMMFMAYPQTA

SEQ ID NO: 223261 - protein, 15 aa, Artificial Sequence
  Description of Artificial Sequence: Synthetic peptide
  Seed: LRMKWMMAMKYPITA
LRMKFMMFMAYPRTA

SEQ ID NO: 223262 - protein, 15 aa, Artificial Sequence
  Description of Artificial Sequence: Synthetic peptide
  Seed: LRMKWMMAMKYPITA
LRMKFMMFMAYPSTA

SEQ ID NO: 223263 - protein, 15 aa, Artificial Sequence
  Description of Artificial Sequence: Synthetic peptide
  Seed: LRMKWMMAMKYPITA
LRMKFMMFMAYPTTA

SEQ ID NO: 223264 - protein, 15 aa, Artificial Sequence
  Description of Artificial Sequence: Synthetic peptide
  Seed: LRMKWMMAMKYPITA
LRMKFMMFMAYPVTA

SEQ ID NO: 223265 - protein, 15 aa, Artificial Sequence
  Description of Artificial Sequence: Synthetic peptide
  Seed: LRMKWMMAMKYPITA
LRMKFMMFMAYPWTA

SEQ ID NO: 223266 - protein, 15 aa, Artificial Sequence
  Description of Artificial Sequence: Synthetic peptide
  Seed: LRMKWMMAMKYPITA
LRMKFMMFMAYPYTA

SEQ ID NO: 223267 - protein, 15 aa, Artificial Sequence
  Description of Artificial Sequence: Synthetic peptide
  Seed: LRMKWMMAMKYPITA
LRMKFMMFMCYPATA

SEQ ID NO: 223268 - protein, 15 aa, Artificial Sequence
  Description of Artificial Sequence: Synthetic peptide
  Seed: LRMKWMMAMKYPITA
LRMKFMMFMDYPATA

SEQ ID NO: 223269 - protein, 15 aa, Artificial Sequence
  Description of Artificial Sequence: Synthetic peptide
  Seed: LRMKWMMAMKYPITA
LRMKFMMFMDYPDTA

SEQ ID NO: 223270 - protein, 15 aa, Artificial Sequence
  Description of Artificial Sequence: Synthetic peptide
  Seed: LRMKWMMAMKYPITA
LRMKFMMFMDYPETA

SEQ ID NO: 223271 - protein, 15 aa, Artificial Sequence
  Description of Artificial Sequence: Synthetic peptide
  Seed: LRMKWMMAMKYPITA
LRMKFMMFMDYPITA

SEQ ID NO: 223272 - protein, 15 aa, Artificial Sequence
  Description of Artificial Sequence: Synthetic peptide
  Seed: LRMKWMMAMKYPITA
LRMKFMMFMDYPLTA

SEQ ID NO: 223273 - protein, 15 aa, Artificial Sequence
  Description of Artificial Sequence: Synthetic peptide
  Seed: LRMKWMMAMKYPITA
LRMKFMMFMDYPMTA

SEQ ID NO: 223274 - protein, 15 aa, Artificial Sequence
  Description of Artificial Sequence: Synthetic peptide
  Seed: LRMKWMMAMKYPITA
LRMKFMMFMDYPSTA

SEQ ID NO: 223275 - protein, 15 aa, Artificial Sequence
  Description of Artificial Sequence: Synthetic peptide
  Seed: LRMKWMMAMKYPITA
LRMKFMMFMDYPVTA

SEQ ID NO: 223276 - protein, 15 aa, Artificial Sequence
  Description of Artificial Sequence: Synthetic peptide
  Seed: LRMKWMMAMKYPITA
LRMKFMMFMEYPATA

SEQ ID NO: 223277 - protein, 15 aa, Artificial Sequence
  Description of Artificial Sequence: Synthetic peptide
  Seed: LRMKWMMAMKYPITA
LRMKFMMFMEYPITA

SEQ ID NO: 223278 - protein, 15 aa, Artificial Sequence
  Description of Artificial Sequence: Synthetic peptide
  Seed: LRMKWMMAMKYPITA
LRMKFMMFMEYPLTA

SEQ ID NO: 223279 - protein, 15 aa, Artificial Sequence
  Description of Artificial Sequence: Synthetic peptide
  Seed: LRMKWMMAMKYPITA
LRMKFMMFMEYPMTA

SEQ ID NO: 223280 - protein, 15 aa, Artificial Sequence
  Description of Artificial Sequence: Synthetic peptide
  Seed: LRMKWMMAMKYPITA
LRMKFMMFMEYPSTA

SEQ ID NO: 223281 - protein, 15 aa, Artificial Sequence
  Description of Artificial Sequence: Synthetic peptide
  Seed: LRMKWMMAMKYPITA
LRMKFMMFMEYPVTA

SEQ ID NO: 223282 - protein, 15 aa, Artificial Sequence
  Description of Artificial Sequence: Synthetic peptide
  Seed: LRMKWMMAMKYPITA
LRMKFMMFMGYPATA

SEQ ID NO: 223283 - protein, 15 aa, Artificial Sequence
  Description of Artificial Sequence: Synthetic peptide
  Seed: LRMKWMMAMKYPITA
LRMKFMMFMGYPCTA

SEQ ID NO: 223284 - protein, 15 aa, Artificial Sequence
  Description of Artificial Sequence: Synthetic peptide
  Seed: LRMKWMMAMKYPITA
LRMKFMMFMGYPDTA

SEQ ID NO: 223285 - protein, 15 aa, Artificial Sequence
  Description of Artificial Sequence: Synthetic peptide
  Seed: LRMKWMMAMKYPITA
LRMKFMMFMGYPETA

SEQ ID NO: 223286 - protein, 15 aa, Artificial Sequence
  Description of Artificial Sequence: Synthetic peptide
  Seed: LRMKWMMAMKYPITA
LRMKFMMFMGYPFTA

SEQ ID NO: 223287 - protein, 15 aa, Artificial Sequence
  Description of Artificial Sequence: Synthetic peptide
  Seed: LRMKWMMAMKYPITA
LRMKFMMFMGYPGTA

SEQ ID NO: 223288 - protein, 15 aa, Artificial Sequence
  Description of Artificial Sequence: Synthetic peptide
  Seed: LRMKWMMAMKYPITA
LRMKFMMFMGYPHTA

SEQ ID NO: 223289 - protein, 15 aa, Artificial Sequence
  Description of Artificial Sequence: Synthetic peptide
  Seed: LRMKWMMAMKYPITA
LRMKFMMFMGYPITA

SEQ ID NO: 223290 - protein, 15 aa, Artificial Sequence
  Description of Artificial Sequence: Synthetic peptide
  Seed: LRMKWMMAMKYPITA
LRMKFMMFMGYPKTA

SEQ ID NO: 223291 - protein, 15 aa, Artificial Sequence
  Description of Artificial Sequence: Synthetic peptide
  Seed: LRMKWMMAMKYPITA
LRMKFMMFMGYPLTA

SEQ ID NO: 223292 - protein, 15 aa, Artificial Sequence
  Description of Artificial Sequence: Synthetic peptide
  Seed: LRMKWMMAMKYPITA
LRMKFMMFMGYPMTA

SEQ ID NO: 223293 - protein, 15 aa, Artificial Sequence
  Description of Artificial Sequence: Synthetic peptide
  Seed: LRMKWMMAMKYPITA
LRMKFMMFMGYPNTA

SEQ ID NO: 223294 - protein, 15 aa, Artificial Sequence
  Description of Artificial Sequence: Synthetic peptide
  Seed: LRMKWMMAMKYPITA
LRMKFMMFMGYPPTA

SEQ ID NO: 223295 - protein, 15 aa, Artificial Sequence
  Description of Artificial Sequence: Synthetic peptide
  Seed: LRMKWMMAMKYPITA
LRMKFMMFMGYPQTA

SEQ ID NO: 223296 - protein, 15 aa, Artificial Sequence
  Description of Artificial Sequence: Synthetic peptide
  Seed: LRMKWMMAMKYPITA
LRMKFMMFMGYPRTA

SEQ ID NO: 223297 - protein, 15 aa, Artificial Sequence
  Description of Artificial Sequence: Synthetic peptide
  Seed: LRMKWMMAMKYPITA
LRMKFMMFMGYPSTA

SEQ ID NO: 223298 - protein, 15 aa, Artificial Sequence
  Description of Artificial Sequence: Synthetic peptide
  Seed: LRMKWMMAMKYPITA
LRMKFMMFMGYPTTA

SEQ ID NO: 223299 - protein, 15 aa, Artificial Sequence
  Description of Artificial Sequence: Synthetic peptide
  Seed: LRMKWMMAMKYPITA
LRMKFMMFMGYPVTA

SEQ ID NO: 223300 - protein, 15 aa, Artificial Sequence
  Description of Artificial Sequence: Synthetic peptide
  Seed: LRMKWMMAMKYPITA
LRMKFMMFMGYPYTA

SEQ ID NO: 223301 - protein, 15 aa, Artificial Sequence
  Description of Artificial Sequence: Synthetic peptide
  Seed: LRMKWMMAMKYPITA
LRMKFMMFMHYPATA

SEQ ID NO: 223302 - protein, 15 aa, Artificial Sequence
  Description of Artificial Sequence: Synthetic peptide
  Seed: LRMKWMMAMKYPITA
LRMKFMMFMHYPITA

SEQ ID NO: 223303 - protein, 15 aa, Artificial Sequence
  Description of Artificial Sequence: Synthetic peptide
  Seed: LRMKWMMAMKYPITA
LRMKFMMFMHYPLTA

SEQ ID NO: 223304 - protein, 15 aa, Artificial Sequence
  Description of Artificial Sequence: Synthetic peptide
  Seed: LRMKWMMAMKYPITA
LRMKFMMFMHYPMTA

SEQ ID NO: 223305 - protein, 15 aa, Artificial Sequence
  Description of Artificial Sequence: Synthetic peptide
  Seed: LRMKWMMAMKYPITA
LRMKFMMFMHYPNTA

SEQ ID NO: 223306 - protein, 15 aa, Artificial Sequence
  Description of Artificial Sequence: Synthetic peptide
  Seed: LRMKWMMAMKYPITA
LRMKFMMFMHYPRTA

SEQ ID NO: 223307 - protein, 15 aa, Artificial Sequence
  Description of Artificial Sequence: Synthetic peptide
  Seed: LRMKWMMAMKYPITA
LRMKFMMFMHYPSTA

SEQ ID NO: 223308 - protein, 15 aa, Artificial Sequence
  Description of Artificial Sequence: Synthetic peptide
  Seed: LRMKWMMAMKYPITA
LRMKFMMFMHYPVTA

SEQ ID NO: 223309 - protein, 15 aa, Artificial Sequence
  Description of Artificial Sequence: Synthetic peptide
  Seed: LRMKWMMAMKYPITA
LRMKFMMFMHYPYTA

SEQ ID NO: 223310 - protein, 15 aa, Artificial Sequence
  Description of Artificial Sequence: Synthetic peptide
  Seed: LRMKWMMAMKYPITA
LRMKFMMFMIYPATA

SEQ ID NO: 223311 - protein, 15 aa, Artificial Sequence
  Description of Artificial Sequence: Synthetic peptide
  Seed: LRMKWMMAMKYPITA
LRMKFMMFMIYPDTA

SEQ ID NO: 223312 - protein, 15 aa, Artificial Sequence
  Description of Artificial Sequence: Synthetic peptide
  Seed: LRMKWMMAMKYPITA
LRMKFMMFMIYPETA

SEQ ID NO: 223313 - protein, 15 aa, Artificial Sequence
  Description of Artificial Sequence: Synthetic peptide
  Seed: LRMKWMMAMKYPITA
LRMKFMMFMIYPGTA

SEQ ID NO: 223314 - protein, 15 aa, Artificial Sequence
  Description of Artificial Sequence: Synthetic peptide
  Seed: LRMKWMMAMKYPITA
LRMKFMMFMIYPHTA

SEQ ID NO: 223315 - protein, 15 aa, Artificial Sequence
  Description of Artificial Sequence: Synthetic peptide
  Seed: LRMKWMMAMKYPITA
LRMKFMMFMIYPITA

SEQ ID NO: 223316 - protein, 15 aa, Artificial Sequence
  Description of Artificial Sequence: Synthetic peptide
  Seed: LRMKWMMAMKYPITA
LRMKFMMFMIYPLTA

SEQ ID NO: 223317 - protein, 15 aa, Artificial Sequence
  Description of Artificial Sequence: Synthetic peptide
  Seed: LRMKWMMAMKYPITA
LRMKFMMFMIYPMTA

SEQ ID NO: 223318 - protein, 15 aa, Artificial Sequence
  Description of Artificial Sequence: Synthetic peptide
  Seed: LRMKWMMAMKYPITA
LRMKFMMFMIYPNTA

SEQ ID NO: 223319 - protein, 15 aa, Artificial Sequence
  Description of Artificial Sequence: Synthetic peptide
  Seed: LRMKWMMAMKYPITA
LRMKFMMFMIYPQTA

SEQ ID NO: 223320 - protein, 15 aa, Artificial Sequence
  Description of Artificial Sequence: Synthetic peptide
  Seed: LRMKWMMAMKYPITA
LRMKFMMFMIYPRTA

SEQ ID NO: 223321 - protein, 15 aa, Artificial Sequence
  Description of Artificial Sequence: Synthetic peptide
  Seed: LRMKWMMAMKYPITA
LRMKFMMFMIYPSTA

SEQ ID NO: 223322 - protein, 15 aa, Artificial Sequence
  Description of Artificial Sequence: Synthetic peptide
  Seed: LRMKWMMAMKYPITA
LRMKFMMFMIYPTTA

SEQ ID NO: 223323 - protein, 15 aa, Artificial Sequence
  Description of Artificial Sequence: Synthetic peptide
  Seed: LRMKWMMAMKYPITA
LRMKFMMFMIYPVTA

SEQ ID NO: 223324 - protein, 15 aa, Artificial Sequence
  Description of Artificial Sequence: Synthetic peptide
  Seed: LRMKWMMAMKYPITA
LRMKFMMFMKYPATA

SEQ ID NO: 223325 - protein, 15 aa, Artificial Sequence
  Description of Artificial Sequence: Synthetic peptide
  Seed: LRMKWMMAMKYPITA
LRMKFMMFMKYPFTA

SEQ ID NO: 223326 - protein, 15 aa, Artificial Sequence
  Description of Artificial Sequence: Synthetic peptide
  Seed: LRMKWMMAMKYPITA
LRMKFMMFMKYPGTA

SEQ ID NO: 223327 - protein, 15 aa, Artificial Sequence
  Description of Artificial Sequence: Synthetic peptide
  Seed: LRMKWMMAMKYPITA
LRMKFMMFMKYPHTA

SEQ ID NO: 223328 - protein, 15 aa, Artificial Sequence
  Description of Artificial Sequence: Synthetic peptide
  Seed: LRMKWMMAMKYPITA
LRMKFMMFMKYPITA

SEQ ID NO: 223329 - protein, 15 aa, Artificial Sequence
  Description of Artificial Sequence: Synthetic peptide
  Seed: LRMKWMMAMKYPITA
LRMKFMMFMKYPKTA

SEQ ID NO: 223330 - protein, 15 aa, Artificial Sequence
  Description of Artificial Sequence: Synthetic peptide
  Seed: LRMKWMMAMKYPITA
LRMKFMMFMKYPLTA

SEQ ID NO: 223331 - protein, 15 aa, Artificial Sequence
  Description of Artificial Sequence: Synthetic peptide
  Seed: LRMKWMMAMKYPITA
LRMKFMMFMKYPMTA

SEQ ID NO: 223332 - protein, 15 aa, Artificial Sequence
  Description of Artificial Sequence: Synthetic peptide
  Seed: LRMKWMMAMKYPITA
LRMKFMMFMKYPNTA

SEQ ID NO: 223333 - protein, 15 aa, Artificial Sequence
  Description of Artificial Sequence: Synthetic peptide
  Seed: LRMKWMMAMKYPITA
LRMKFMMFMKYPPTA

SEQ ID NO: 223334 - protein, 15 aa, Artificial Sequence
  Description of Artificial Sequence: Synthetic peptide
  Seed: LRMKWMMAMKYPITA
LRMKFMMFMKYPQTA

SEQ ID NO: 223335 - protein, 15 aa, Artificial Sequence
  Description of Artificial Sequence: Synthetic peptide
  Seed: LRMKWMMAMKYPITA
LRMKFMMFMKYPRTA

SEQ ID NO: 223336 - protein, 15 aa, Artificial Sequence
  Description of Artificial Sequence: Synthetic peptide
  Seed: LRMKWMMAMKYPITA
LRMKFMMFMKYPSTA

SEQ ID NO: 223337 - protein, 15 aa, Artificial Sequence
  Description of Artificial Sequence: Synthetic peptide
  Seed: LRMKWMMAMKYPITA
LRMKFMMFMKYPTTA

SEQ ID NO: 223338 - protein, 15 aa, Artificial Sequence
  Description of Artificial Sequence: Synthetic peptide
  Seed: LRMKWMMAMKYPITA
LRMKFMMFMKYPVTA

SEQ ID NO: 223339 - protein, 15 aa, Artificial Sequence
  Description of Artificial Sequence: Synthetic peptide
  Seed: LRMKWMMAMKYPITA
LRMKFMMFMKYPYTA

SEQ ID NO: 223340 - protein, 15 aa, Artificial Sequence
  Description of Artificial Sequence: Synthetic peptide
  Seed: LRMKWMMAMKYPITA
LRMKFMMFMLYPGTA

SEQ ID NO: 223341 - protein, 15 aa, Artificial Sequence
  Description of Artificial Sequence: Synthetic peptide
  Seed: LRMKWMMAMKYPITA
LRMKFMMFMMYPGTA

SEQ ID NO: 223342 - protein, 15 aa, Artificial Sequence
  Description of Artificial Sequence: Synthetic peptide
  Seed: LRMKWMMAMKYPITA
LRMKFMMFMNYPATA

SEQ ID NO: 223343 - protein, 15 aa, Artificial Sequence
  Description of Artificial Sequence: Synthetic peptide
  Seed: LRMKWMMAMKYPITA
LRMKFMMFMNYPDTA

SEQ ID NO: 223344 - protein, 15 aa, Artificial Sequence
  Description of Artificial Sequence: Synthetic peptide
  Seed: LRMKWMMAMKYPITA
LRMKFMMFMNYPETA

SEQ ID NO: 223345 - protein, 15 aa, Artificial Sequence
  Description of Artificial Sequence: Synthetic peptide
  Seed: LRMKWMMAMKYPITA
LRMKFMMFMNYPFTA

SEQ ID NO: 223346 - protein, 15 aa, Artificial Sequence
  Description of Artificial Sequence: Synthetic peptide
  Seed: LRMKWMMAMKYPITA
LRMKFMMFMNYPGTA

SEQ ID NO: 223347 - protein, 15 aa, Artificial Sequence
  Description of Artificial Sequence: Synthetic peptide
  Seed: LRMKWMMAMKYPITA
LRMKFMMFMNYPHTA

SEQ ID NO: 223348 - protein, 15 aa, Artificial Sequence
  Description of Artificial Sequence: Synthetic peptide
  Seed: LRMKWMMAMKYPITA
LRMKFMMFMNYPITA

SEQ ID NO: 223349 - protein, 15 aa, Artificial Sequence
  Description of Artificial Sequence: Synthetic peptide
  Seed: LRMKWMMAMKYPITA
LRMKFMMFMNYPKTA

SEQ ID NO: 223350 - protein, 15 aa, Artificial Sequence
  Description of Artificial Sequence: Synthetic peptide
  Seed: LRMKWMMAMKYPITA
LRMKFMMFMNYPLTA

SEQ ID NO: 223351 - protein, 15 aa, Artificial Sequence
  Description of Artificial Sequence: Synthetic peptide
  Seed: LRMKWMMAMKYPITA
LRMKFMMFMNYPMTA

SEQ ID NO: 223352 - protein, 15 aa, Artificial Sequence
  Description of Artificial Sequence: Synthetic peptide
  Seed: LRMKWMMAMKYPITA
LRMKFMMFMNYPNTA

SEQ ID NO: 223353 - protein, 15 aa, Artificial Sequence
  Description of Artificial Sequence: Synthetic peptide
  Seed: LRMKWMMAMKYPITA
LRMKFMMFMNYPPTA

SEQ ID NO: 223354 - protein, 15 aa, Artificial Sequence
  Description of Artificial Sequence: Synthetic peptide
  Seed: LRMKWMMAMKYPITA
LRMKFMMFMNYPQTA

SEQ ID NO: 223355 - protein, 15 aa, Artificial Sequence
  Description of Artificial Sequence: Synthetic peptide
  Seed: LRMKWMMAMKYPITA
LRMKFMMFMNYPRTA

SEQ ID NO: 223356 - protein, 15 aa, Artificial Sequence
  Description of Artificial Sequence: Synthetic peptide
  Seed: LRMKWMMAMKYPITA
LRMKFMMFMNYPSTA

SEQ ID NO: 223357 - protein, 15 aa, Artificial Sequence
  Description of Artificial Sequence: Synthetic peptide
  Seed: LRMKWMMAMKYPITA
LRMKFMMFMNYPTTA

SEQ ID NO: 223358 - protein, 15 aa, Artificial Sequence
  Description of Artificial Sequence: Synthetic peptide
  Seed: LRMKWMMAMKYPITA
LRMKFMMFMNYPVTA

SEQ ID NO: 223359 - protein, 15 aa, Artificial Sequence
  Description of Artificial Sequence: Synthetic peptide
  Seed: LRMKWMMAMKYPITA
LRMKFMMFMNYPYTA

SEQ ID NO: 223360 - protein, 15 aa, Artificial Sequence
  Description of Artificial Sequence: Synthetic peptide
  Seed: LRMKWMMAMKYPITA
LRMKFMMFMPYPATA

SEQ ID NO: 223361 - protein, 15 aa, Artificial Sequence
  Description of Artificial Sequence: Synthetic peptide
  Seed: LRMKWMMAMKYPITA
LRMKFMMFMPYPCTA

SEQ ID NO: 223362 - protein, 15 aa, Artificial Sequence
  Description of Artificial Sequence: Synthetic peptide
  Seed: LRMKWMMAMKYPITA
LRMKFMMFMPYPDTA

SEQ ID NO: 223363 - protein, 15 aa, Artificial Sequence
  Description of Artificial Sequence: Synthetic peptide
  Seed: LRMKWMMAMKYPITA
LRMKFMMFMPYPETA

SEQ ID NO: 223364 - protein, 15 aa, Artificial Sequence
  Description of Artificial Sequence: Synthetic peptide
  Seed: LRMKWMMAMKYPITA
LRMKFMMFMPYPFTA

SEQ ID NO: 223365 - protein, 15 aa, Artificial Sequence
  Description of Artificial Sequence: Synthetic peptide
  Seed: LRMKWMMAMKYPITA
LRMKFMMFMPYPGTA

SEQ ID NO: 223366 - protein, 15 aa, Artificial Sequence
  Description of Artificial Sequence: Synthetic peptide
  Seed: LRMKWMMAMKYPITA
LRMKFMMFMPYPHTA

SEQ ID NO: 223367 - protein, 15 aa, Artificial Sequence
  Description of Artificial Sequence: Synthetic peptide
  Seed: LRMKWMMAMKYPITA
LRMKFMMFMPYPITA

SEQ ID NO: 223368 - protein, 15 aa, Artificial Sequence
  Description of Artificial Sequence: Synthetic peptide
  Seed: LRMKWMMAMKYPITA
LRMKFMMFMPYPKTA

SEQ ID NO: 223369 - protein, 15 aa, Artificial Sequence
  Description of Artificial Sequence: Synthetic peptide
  Seed: LRMKWMMAMKYPITA
LRMKFMMFMPYPLTA

SEQ ID NO: 223370 - protein, 15 aa, Artificial Sequence
  Description of Artificial Sequence: Synthetic peptide
  Seed: LRMKWMMAMKYPITA
LRMKFMMFMPYPMTA

SEQ ID NO: 223371 - protein, 15 aa, Artificial Sequence
  Description of Artificial Sequence: Synthetic peptide
  Seed: LRMKWMMAMKYPITA
LRMKFMMFMPYPNTA

SEQ ID NO: 223372 - protein, 15 aa, Artificial Sequence
  Description of Artificial Sequence: Synthetic peptide
  Seed: LRMKWMMAMKYPITA
LRMKFMMFMPYPPTA

SEQ ID NO: 223373 - protein, 15 aa, Artificial Sequence
  Description of Artificial Sequence: Synthetic peptide
  Seed: LRMKWMMAMKYPITA
LRMKFMMFMPYPQTA

SEQ ID NO: 223374 - protein, 15 aa, Artificial Sequence
  Description of Artificial Sequence: Synthetic peptide
  Seed: LRMKWMMAMKYPITA
LRMKFMMFMPYPRTA

SEQ ID NO: 223375 - protein, 15 aa, Artificial Sequence
  Description of Artificial Sequence: Synthetic peptide
  Seed: LRMKWMMAMKYPITA
LRMKFMMFMPYPSTA

SEQ ID NO: 223376 - protein, 15 aa, Artificial Sequence
  Description of Artificial Sequence: Synthetic peptide
  Seed: LRMKWMMAMKYPITA
LRMKFMMFMPYPTTA

SEQ ID NO: 223377 - protein, 15 aa, Artificial Sequence
  Description of Artificial Sequence: Synthetic peptide
  Seed: LRMKWMMAMKYPITA
LRMKFMMFMPYPVTA

SEQ ID NO: 223378 - protein, 15 aa, Artificial Sequence
  Description of Artificial Sequence: Synthetic peptide
  Seed: LRMKWMMAMKYPITA
LRMKFMMFMPYPWTA

SEQ ID NO: 223379 - protein, 15 aa, Artificial Sequence
  Description of Artificial Sequence: Synthetic peptide
  Seed: LRMKWMMAMKYPITA
LRMKFMMFMPYPYTA

SEQ ID NO: 223380 - protein, 15 aa, Artificial Sequence
  Description of Artificial Sequence: Synthetic peptide
  Seed: LRMKWMMAMKYPITA
LRMKFMMFMQYPATA

SEQ ID NO: 223381 - protein, 15 aa, Artificial Sequence
  Description of Artificial Sequence: Synthetic peptide
  Seed: LRMKWMMAMKYPITA
LRMKFMMFMQYPITA

SEQ ID NO: 223382 - protein, 15 aa, Artificial Sequence
  Description of Artificial Sequence: Synthetic peptide
  Seed: LRMKWMMAMKYPITA
LRMKFMMFMQYPLTA

SEQ ID NO: 223383 - protein, 15 aa, Artificial Sequence
  Description of Artificial Sequence: Synthetic peptide
  Seed: LRMKWMMAMKYPITA
LRMKFMMFMQYPMTA

SEQ ID NO: 223384 - protein, 15 aa, Artificial Sequence
  Description of Artificial Sequence: Synthetic peptide
  Seed: LRMKWMMAMKYPITA
LRMKFMMFMQYPNTA

SEQ ID NO: 223385 - protein, 15 aa, Artificial Sequence
  Description of Artificial Sequence: Synthetic peptide
  Seed: LRMKWMMAMKYPITA
LRMKFMMFMQYPSTA

SEQ ID NO: 223386 - protein, 15 aa, Artificial Sequence
  Description of Artificial Sequence: Synthetic peptide
  Seed: LRMKWMMAMKYPITA
LRMKFMMFMQYPTTA

SEQ ID NO: 223387 - protein, 15 aa, Artificial Sequence
  Description of Artificial Sequence: Synthetic peptide
  Seed: LRMKWMMAMKYPITA
LRMKFMMFMQYPVTA

SEQ ID NO: 223388 - protein, 15 aa, Artificial Sequence
  Description of Artificial Sequence: Synthetic peptide
  Seed: LRMKWMMAMKYPITA
LRMKFMMFMRYPATA

SEQ ID NO: 223389 - protein, 15 aa, Artificial Sequence
  Description of Artificial Sequence: Synthetic peptide
  Seed: LRMKWMMAMKYPITA
LRMKFMMFMRYPETA

SEQ ID NO: 223390 - protein, 15 aa, Artificial Sequence
  Description of Artificial Sequence: Synthetic peptide
  Seed: LRMKWMMAMKYPITA
LRMKFMMFMRYPFTA

SEQ ID NO: 223391 - protein, 15 aa, Artificial Sequence
  Description of Artificial Sequence: Synthetic peptide
  Seed: LRMKWMMAMKYPITA
LRMKFMMFMRYPGTA

SEQ ID NO: 223392 - protein, 15 aa, Artificial Sequence
  Description of Artificial Sequence: Synthetic peptide
  Seed: LRMKWMMAMKYPITA
LRMKFMMFMRYPHTA

SEQ ID NO: 223393 - protein, 15 aa, Artificial Sequence
  Description of Artificial Sequence: Synthetic peptide
  Seed: LRMKWMMAMKYPITA
LRMKFMMFMRYPITA

SEQ ID NO: 223394 - protein, 15 aa, Artificial Sequence
  Description of Artificial Sequence: Synthetic peptide
  Seed: LRMKWMMAMKYPITA
LRMKFMMFMRYPKTA

SEQ ID NO: 223395 - protein, 15 aa, Artificial Sequence
  Description of Artificial Sequence: Synthetic peptide
  Seed: LRMKWMMAMKYPITA
LRMKFMMFMRYPLTA

SEQ ID NO: 223396 - protein, 15 aa, Artificial Sequence
  Description of Artificial Sequence: Synthetic peptide
  Seed: LRMKWMMAMKYPITA
LRMKFMMFMRYPMTA

SEQ ID NO: 223397 - protein, 15 aa, Artificial Sequence
  Description of Artificial Sequence: Synthetic peptide
  Seed: LRMKWMMAMKYPITA
LRMKFMMFMRYPNTA

SEQ ID NO: 223398 - protein, 15 aa, Artificial Sequence
  Description of Artificial Sequence: Synthetic peptide
  Seed: LRMKWMMAMKYPITA
LRMKFMMFMRYPPTA

SEQ ID NO: 223399 - protein, 15 aa, Artificial Sequence
  Description of Artificial Sequence: Synthetic peptide
  Seed: LRMKWMMAMKYPITA
LRMKFMMFMRYPQTA

SEQ ID NO: 223400 - protein, 15 aa, Artificial Sequence
  Description of Artificial Sequence: Synthetic peptide
  Seed: LRMKWMMAMKYPITA
LRMKFMMFMRYPRTA

SEQ ID NO: 223401 - protein, 15 aa, Artificial Sequence
  Description of Artificial Sequence: Synthetic peptide
  Seed: LRMKWMMAMKYPITA
LRMKFMMFMRYPSTA

SEQ ID NO: 223402 - protein, 15 aa, Artificial Sequence
  Description of Artificial Sequence: Synthetic peptide
  Seed: LRMKWMMAMKYPITA
LRMKFMMFMRYPTTA

SEQ ID NO: 223403 - protein, 15 aa, Artificial Sequence
  Description of Artificial Sequence: Synthetic peptide
  Seed: LRMKWMMAMKYPITA
LRMKFMMFMRYPVTA

SEQ ID NO: 223404 - protein, 15 aa, Artificial Sequence
  Description of Artificial Sequence: Synthetic peptide
  Seed: LRMKWMMAMKYPITA
LRMKFMMFMRYPYTA

SEQ ID NO: 223405 - protein, 15 aa, Artificial Sequence
  Description of Artificial Sequence: Synthetic peptide
  Seed: LRMKWMMAMKYPITA
LRMKFMMFMSYPATA

SEQ ID NO: 223406 - protein, 15 aa, Artificial Sequence
  Description of Artificial Sequence: Synthetic peptide
  Seed: LRMKWMMAMKYPITA
LRMKFMMFMSYPCTA

SEQ ID NO: 223407 - protein, 15 aa, Artificial Sequence
  Description of Artificial Sequence: Synthetic peptide
  Seed: LRMKWMMAMKYPITA
LRMKFMMFMSYPDTA

SEQ ID NO: 223408 - protein, 15 aa, Artificial Sequence
  Description of Artificial Sequence: Synthetic peptide
  Seed: LRMKWMMAMKYPITA
LRMKFMMFMSYPETA

SEQ ID NO: 223409 - protein, 15 aa, Artificial Sequence
  Description of Artificial Sequence: Synthetic peptide
  Seed: LRMKWMMAMKYPITA
LRMKFMMFMSYPFTA

SEQ ID NO: 223410 - protein, 15 aa, Artificial Sequence
  Description of Artificial Sequence: Synthetic peptide
  Seed: LRMKWMMAMKYPITA
LRMKFMMFMSYPGTA

SEQ ID NO: 223411 - protein, 15 aa, Artificial Sequence
  Description of Artificial Sequence: Synthetic peptide
  Seed: LRMKWMMAMKYPITA
LRMKFMMFMSYPHTA

SEQ ID NO: 223412 - protein, 15 aa, Artificial Sequence
  Description of Artificial Sequence: Synthetic peptide
  Seed: LRMKWMMAMKYPITA
LRMKFMMFMSYPITA

SEQ ID NO: 223413 - protein, 15 aa, Artificial Sequence
  Description of Artificial Sequence: Synthetic peptide
  Seed: LRMKWMMAMKYPITA
LRMKFMMFMSYPKTA

SEQ ID NO: 223414 - protein, 15 aa, Artificial Sequence
  Description of Artificial Sequence: Synthetic peptide
  Seed: LRMKWMMAMKYPITA
LRMKFMMFMSYPLTA

SEQ ID NO: 223415 - protein, 15 aa, Artificial Sequence
  Description of Artificial Sequence: Synthetic peptide
  Seed: LRMKWMMAMKYPITA
LRMKFMMFMSYPMTA

SEQ ID NO: 223416 - protein, 15 aa, Artificial Sequence
  Description of Artificial Sequence: Synthetic peptide
  Seed: LRMKWMMAMKYPITA
LRMKFMMFMSYPNTA

SEQ ID NO: 223417 - protein, 15 aa, Artificial Sequence
  Description of Artificial Sequence: Synthetic peptide
  Seed: LRMKWMMAMKYPITA
LRMKFMMFMSYPPTA

SEQ ID NO: 223418 - protein, 15 aa, Artificial Sequence
  Description of Artificial Sequence: Synthetic peptide
  Seed: LRMKWMMAMKYPITA
LRMKFMMFMSYPQTA

SEQ ID NO: 223419 - protein, 15 aa, Artificial Sequence
  Description of Artificial Sequence: Synthetic peptide
  Seed: LRMKWMMAMKYPITA
LRMKFMMFMSYPRTA

SEQ ID NO: 223420 - protein, 15 aa, Artificial Sequence
  Description of Artificial Sequence: Synthetic peptide
  Seed: LRMKWMMAMKYPITA
LRMKFMMFMSYPSTA

SEQ ID NO: 223421 - protein, 15 aa, Artificial Sequence
  Description of Artificial Sequence: Synthetic peptide
  Seed: LRMKWMMAMKYPITA
LRMKFMMFMSYPTTA

SEQ ID NO: 223422 - protein, 15 aa, Artificial Sequence
  Description of Artificial Sequence: Synthetic peptide
  Seed: LRMKWMMAMKYPITA
LRMKFMMFMSYPVTA

SEQ ID NO: 223423 - protein, 15 aa, Artificial Sequence
  Description of Artificial Sequence: Synthetic peptide
  Seed: LRMKWMMAMKYPITA
LRMKFMMFMSYPYTA

SEQ ID NO: 223424 - protein, 15 aa, Artificial Sequence
  Description of Artificial Sequence: Synthetic peptide
  Seed: LRMKWMMAMKYPITA
LRMKFMMFMTYPATA

SEQ ID NO: 223425 - protein, 15 aa, Artificial Sequence
  Description of Artificial Sequence: Synthetic peptide
  Seed: LRMKWMMAMKYPITA
LRMKFMMFMTYPCTA

SEQ ID NO: 223426 - protein, 15 aa, Artificial Sequence
  Description of Artificial Sequence: Synthetic peptide
  Seed: LRMKWMMAMKYPITA
LRMKFMMFMTYPDTA

SEQ ID NO: 223427 - protein, 15 aa, Artificial Sequence
  Description of Artificial Sequence: Synthetic peptide
  Seed: LRMKWMMAMKYPITA
LRMKFMMFMTYPETA

SEQ ID NO: 223428 - protein, 15 aa, Artificial Sequence
  Description of Artificial Sequence: Synthetic peptide
  Seed: LRMKWMMAMKYPITA
LRMKFMMFMTYPFTA

SEQ ID NO: 223429 - protein, 15 aa, Artificial Sequence
  Description of Artificial Sequence: Synthetic peptide
  Seed: LRMKWMMAMKYPITA
LRMKFMMFMTYPGTA

SEQ ID NO: 223430 - protein, 15 aa, Artificial Sequence
  Description of Artificial Sequence: Synthetic peptide
  Seed: LRMKWMMAMKYPITA
LRMKFMMFMTYPHTA

SEQ ID NO: 223431 - protein, 15 aa, Artificial Sequence
  Description of Artificial Sequence: Synthetic peptide
  Seed: LRMKWMMAMKYPITA
LRMKFMMFMTYPITA

SEQ ID NO: 223432 - protein, 15 aa, Artificial Sequence
  Description of Artificial Sequence: Synthetic peptide
  Seed: LRMKWMMAMKYPITA
LRMKFMMFMTYPKTA

SEQ ID NO: 223433 - protein, 15 aa, Artificial Sequence
  Description of Artificial Sequence: Synthetic peptide
  Seed: LRMKWMMAMKYPITA
LRMKFMMFMTYPLTA

SEQ ID NO: 223434 - protein, 15 aa, Artificial Sequence
  Description of Artificial Sequence: Synthetic peptide
  Seed: LRMKWMMAMKYPITA
LRMKFMMFMTYPMTA

SEQ ID NO: 223435 - protein, 15 aa, Artificial Sequence
  Description of Artificial Sequence: Synthetic peptide
  Seed: LRMKWMMAMKYPITA
LRMKFMMFMTYPNTA

SEQ ID NO: 223436 - protein, 15 aa, Artificial Sequence
  Description of Artificial Sequence: Synthetic peptide
  Seed: LRMKWMMAMKYPITA
LRMKFMMFMTYPPTA

SEQ ID NO: 223437 - protein, 15 aa, Artificial Sequence
  Description of Artificial Sequence: Synthetic peptide
  Seed: LRMKWMMAMKYPITA
LRMKFMMFMTYPQTA

SEQ ID NO: 223438 - protein, 15 aa, Artificial Sequence
  Description of Artificial Sequence: Synthetic peptide
  Seed: LRMKWMMAMKYPITA
LRMKFMMFMTYPRTA

SEQ ID NO: 223439 - protein, 15 aa, Artificial Sequence
  Description of Artificial Sequence: Synthetic peptide
  Seed: LRMKWMMAMKYPITA
LRMKFMMFMTYPSTA

SEQ ID NO: 223440 - protein, 15 aa, Artificial Sequence
  Description of Artificial Sequence: Synthetic peptide
  Seed: LRMKWMMAMKYPITA
LRMKFMMFMTYPTTA

SEQ ID NO: 223441 - protein, 15 aa, Artificial Sequence
  Description of Artificial Sequence: Synthetic peptide
  Seed: LRMKWMMAMKYPITA
LRMKFMMFMTYPVTA

SEQ ID NO: 223442 - protein, 15 aa, Artificial Sequence
  Description of Artificial Sequence: Synthetic peptide
  Seed: LRMKWMMAMKYPITA
LRMKFMMFMTYPYTA

SEQ ID NO: 223443 - protein, 15 aa, Artificial Sequence
  Description of Artificial Sequence: Synthetic peptide
  Seed: LRMKWMMAMKYPITA
LRMKFMMFMVYPATA

SEQ ID NO: 223444 - protein, 15 aa, Artificial Sequence
  Description of Artificial Sequence: Synthetic peptide
  Seed: LRMKWMMAMKYPITA
LRMKFMMFMVYPDTA

SEQ ID NO: 223445 - protein, 15 aa, Artificial Sequence
  Description of Artificial Sequence: Synthetic peptide
  Seed: LRMKWMMAMKYPITA
LRMKFMMFMVYPETA

SEQ ID NO: 223446 - protein, 15 aa, Artificial Sequence
  Description of Artificial Sequence: Synthetic peptide
  Seed: LRMKWMMAMKYPITA
LRMKFMMFMVYPGTA

SEQ ID NO: 223447 - protein, 15 aa, Artificial Sequence
  Description of Artificial Sequence: Synthetic peptide
  Seed: LRMKWMMAMKYPITA
LRMKFMMFMVYPHTA

SEQ ID NO: 223448 - protein, 15 aa, Artificial Sequence
  Description of Artificial Sequence: Synthetic peptide
  Seed: LRMKWMMAMKYPITA
LRMKFMMFMVYPITA

SEQ ID NO: 223449 - protein, 15 aa, Artificial Sequence
  Description of Artificial Sequence: Synthetic peptide
  Seed: LRMKWMMAMKYPITA
LRMKFMMFMVYPKTA

SEQ ID NO: 223450 - protein, 15 aa, Artificial Sequence
  Description of Artificial Sequence: Synthetic peptide
  Seed: LRMKWMMAMKYPITA
LRMKFMMFMVYPLTA

SEQ ID NO: 223451 - protein, 15 aa, Artificial Sequence
  Description of Artificial Sequence: Synthetic peptide
  Seed: LRMKWMMAMKYPITA
LRMKFMMFMVYPMTA

SEQ ID NO: 223452 - protein, 15 aa, Artificial Sequence
  Description of Artificial Sequence: Synthetic peptide
  Seed: LRMKWMMAMKYPITA
LRMKFMMFMVYPNTA

SEQ ID NO: 223453 - protein, 15 aa, Artificial Sequence
  Description of Artificial Sequence: Synthetic peptide
  Seed: LRMKWMMAMKYPITA
LRMKFMMFMVYPPTA

SEQ ID NO: 223454 - protein, 15 aa, Artificial Sequence
  Description of Artificial Sequence: Synthetic peptide
  Seed: LRMKWMMAMKYPITA
LRMKFMMFMVYPQTA

SEQ ID NO: 223455 - protein, 15 aa, Artificial Sequence
  Description of Artificial Sequence: Synthetic peptide
  Seed: LRMKWMMAMKYPITA
LRMKFMMFMVYPRTA

SEQ ID NO: 223456 - protein, 15 aa, Artificial Sequence
  Description of Artificial Sequence: Synthetic peptide
  Seed: LRMKWMMAMKYPITA
LRMKFMMFMVYPSTA

SEQ ID NO: 223457 - protein, 15 aa, Artificial Sequence
  Description of Artificial Sequence: Synthetic peptide
  Seed: LRMKWMMAMKYPITA
LRMKFMMFMVYPTTA

SEQ ID NO: 223458 - protein, 15 aa, Artificial Sequence
  Description of Artificial Sequence: Synthetic peptide
  Seed: LRMKWMMAMKYPITA
LRMKFMMFMVYPVTA

SEQ ID NO: 223459 - protein, 15 aa, Artificial Sequence
  Description of Artificial Sequence: Synthetic peptide
  Seed: LRMKWMMAMKYPITA
LRMKFMMFMVYPYTA

SEQ ID NO: 223460 - protein, 15 aa, Artificial Sequence
  Description of Artificial Sequence: Synthetic peptide
  Seed: LRMKWMMAMKYPITA
LRMKFMMGMAYPATA

SEQ ID NO: 223461 - protein, 15 aa, Artificial Sequence
  Description of Artificial Sequence: Synthetic peptide
  Seed: LRMKWMMAMKYPITA
LRMKFMMGMAYPCTA

SEQ ID NO: 223462 - protein, 15 aa, Artificial Sequence
  Description of Artificial Sequence: Synthetic peptide
  Seed: LRMKWMMAMKYPITA
LRMKFMMGMAYPDTA

SEQ ID NO: 223463 - protein, 15 aa, Artificial Sequence
  Description of Artificial Sequence: Synthetic peptide
  Seed: LRMKWMMAMKYPITA
LRMKFMMGMAYPETA

SEQ ID NO: 223464 - protein, 15 aa, Artificial Sequence
  Description of Artificial Sequence: Synthetic peptide
  Seed: LRMKWMMAMKYPITA
LRMKFMMGMAYPFTA

SEQ ID NO: 223465 - protein, 15 aa, Artificial Sequence
  Description of Artificial Sequence: Synthetic peptide
  Seed: LRMKWMMAMKYPITA
LRMKFMMGMAYPGTA

SEQ ID NO: 223466 - protein, 15 aa, Artificial Sequence
  Description of Artificial Sequence: Synthetic peptide
  Seed: LRMKWMMAMKYPITA
LRMKFMMGMAYPHTA

SEQ ID NO: 223467 - protein, 15 aa, Artificial Sequence
  Description of Artificial Sequence: Synthetic peptide
  Seed: LRMKWMMAMKYPITA
LRMKFMMGMAYPITA

SEQ ID NO: 223468 - protein, 15 aa, Artificial Sequence
  Description of Artificial Sequence: Synthetic peptide
  Seed: LRMKWMMAMKYPITA
LRMKFMMGMAYPKTA

SEQ ID NO: 223469 - protein, 15 aa, Artificial Sequence
  Description of Artificial Sequence: Synthetic peptide
  Seed: LRMKWMMAMKYPITA
LRMKFMMGMAYPLTA

SEQ ID NO: 223470 - protein, 15 aa, Artificial Sequence
  Description of Artificial Sequence: Synthetic peptide
  Seed: LRMKWMMAMKYPITA
LRMKFMMGMAYPMTA

SEQ ID NO: 223471 - protein, 15 aa, Artificial Sequence
  Description of Artificial Sequence: Synthetic peptide
  Seed: LRMKWMMAMKYPITA
LRMKFMMGMAYPNTA

SEQ ID NO: 223472 - protein, 15 aa, Artificial Sequence
  Description of Artificial Sequence: Synthetic peptide
  Seed: LRMKWMMAMKYPITA
LRMKFMMGMAYPPTA

SEQ ID NO: 223473 - protein, 15 aa, Artificial Sequence
  Description of Artificial Sequence: Synthetic peptide
  Seed: LRMKWMMAMKYPITA
LRMKFMMGMAYPQTA

SEQ ID NO: 223474 - protein, 15 aa, Artificial Sequence
  Description of Artificial Sequence: Synthetic peptide
  Seed: LRMKWMMAMKYPITA
LRMKFMMGMAYPRTA

SEQ ID NO: 223475 - protein, 15 aa, Artificial Sequence
  Description of Artificial Sequence: Synthetic peptide
  Seed: LRMKWMMAMKYPITA
LRMKFMMGMAYPSTA

SEQ ID NO: 223476 - protein, 15 aa, Artificial Sequence
  Description of Artificial Sequence: Synthetic peptide
  Seed: LRMKWMMAMKYPITA
LRMKFMMGMAYPTTA

SEQ ID NO: 223477 - protein, 15 aa, Artificial Sequence
  Description of Artificial Sequence: Synthetic peptide
  Seed: LRMKWMMAMKYPITA
LRMKFMMGMAYPVTA

SEQ ID NO: 223478 - protein, 15 aa, Artificial Sequence
  Description of Artificial Sequence: Synthetic peptide
  Seed: LRMKWMMAMKYPITA
LRMKFMMGMAYPWTA

SEQ ID NO: 223479 - protein, 15 aa, Artificial Sequence
  Description of Artificial Sequence: Synthetic peptide
  Seed: LRMKWMMAMKYPITA
LRMKFMMGMAYPYTA

SEQ ID NO: 223480 - protein, 15 aa, Artificial Sequence
  Description of Artificial Sequence: Synthetic peptide
  Seed: LRMKWMMAMKYPITA
LRMKFMMGMCYPATA

SEQ ID NO: 223481 - protein, 15 aa, Artificial Sequence
  Description of Artificial Sequence: Synthetic peptide
  Seed: LRMKWMMAMKYPITA
LRMKFMMGMCYPFTA

SEQ ID NO: 223482 - protein, 15 aa, Artificial Sequence
  Description of Artificial Sequence: Synthetic peptide
  Seed: LRMKWMMAMKYPITA
LRMKFMMGMCYPGTA

SEQ ID NO: 223483 - protein, 15 aa, Artificial Sequence
  Description of Artificial Sequence: Synthetic peptide
  Seed: LRMKWMMAMKYPITA
LRMKFMMGMCYPITA

SEQ ID NO: 223484 - protein, 15 aa, Artificial Sequence
  Description of Artificial Sequence: Synthetic peptide
  Seed: LRMKWMMAMKYPITA
LRMKFMMGMCYPLTA

SEQ ID NO: 223485 - protein, 15 aa, Artificial Sequence
  Description of Artificial Sequence: Synthetic peptide
  Seed: LRMKWMMAMKYPITA
LRMKFMMGMCYPMTA

SEQ ID NO: 223486 - protein, 15 aa, Artificial Sequence
  Description of Artificial Sequence: Synthetic peptide
  Seed: LRMKWMMAMKYPITA
LRMKFMMGMCYPNTA

SEQ ID NO: 223487 - protein, 15 aa, Artificial Sequence
  Description of Artificial Sequence: Synthetic peptide
  Seed: LRMKWMMAMKYPITA
LRMKFMMGMCYPSTA

SEQ ID NO: 223488 - protein, 15 aa, Artificial Sequence
  Description of Artificial Sequence: Synthetic peptide
  Seed: LRMKWMMAMKYPITA
LRMKFMMGMCYPTTA

SEQ ID NO: 223489 - protein, 15 aa, Artificial Sequence
  Description of Artificial Sequence: Synthetic peptide
  Seed: LRMKWMMAMKYPITA
LRMKFMMGMCYPVTA

SEQ ID NO: 223490 - protein, 15 aa, Artificial Sequence
  Description of Artificial Sequence: Synthetic peptide
  Seed: LRMKWMMAMKYPITA
LRMKFMMGMCYPYTA

SEQ ID NO: 223491 - protein, 15 aa, Artificial Sequence
  Description of Artificial Sequence: Synthetic peptide
  Seed: LRMKWMMAMKYPITA
LRMKFMMGMDYPATA

SEQ ID NO: 223492 - protein, 15 aa, Artificial Sequence
  Description of Artificial Sequence: Synthetic peptide
  Seed: LRMKWMMAMKYPITA
LRMKFMMGMDYPITA

SEQ ID NO: 223493 - protein, 15 aa, Artificial Sequence
  Description of Artificial Sequence: Synthetic peptide
  Seed: LRMKWMMAMKYPITA
LRMKFMMGMDYPLTA

SEQ ID NO: 223494 - protein, 15 aa, Artificial Sequence
  Description of Artificial Sequence: Synthetic peptide
  Seed: LRMKWMMAMKYPITA
LRMKFMMGMDYPMTA

SEQ ID NO: 223495 - protein, 15 aa, Artificial Sequence
  Description of Artificial Sequence: Synthetic peptide
  Seed: LRMKWMMAMKYPITA
LRMKFMMGMDYPSTA

SEQ ID NO: 223496 - protein, 15 aa, Artificial Sequence
  Description of Artificial Sequence: Synthetic peptide
  Seed: LRMKWMMAMKYPITA
LRMKFMMGMDYPTTA

SEQ ID NO: 223497 - protein, 15 aa, Artificial Sequence
  Description of Artificial Sequence: Synthetic peptide
  Seed: LRMKWMMAMKYPITA
LRMKFMMGMDYPVTA

SEQ ID NO: 223498 - protein, 15 aa, Artificial Sequence
  Description of Artificial Sequence: Synthetic peptide
  Seed: LRMKWMMAMKYPITA
LRMKFMMGMEYPATA

SEQ ID NO: 223499 - protein, 15 aa, Artificial Sequence
  Description of Artificial Sequence: Synthetic peptide
  Seed: LRMKWMMAMKYPITA
LRMKFMMGMEYPITA

SEQ ID NO: 223500 - protein, 15 aa, Artificial Sequence
  Description of Artificial Sequence: Synthetic peptide
  Seed: LRMKWMMAMKYPITA
LRMKFMMGMEYPLTA

SEQ ID NO: 223501 - protein, 15 aa, Artificial Sequence
  Description of Artificial Sequence: Synthetic peptide
  Seed: LRMKWMMAMKYPITA
LRMKFMMGMEYPMTA

SEQ ID NO: 223502 - protein, 15 aa, Artificial Sequence
  Description of Artificial Sequence: Synthetic peptide
  Seed: LRMKWMMAMKYPITA
LRMKFMMGMEYPSTA

SEQ ID NO: 223503 - protein, 15 aa, Artificial Sequence
  Description of Artificial Sequence: Synthetic peptide
  Seed: LRMKWMMAMKYPITA
LRMKFMMGMEYPTTA

SEQ ID NO: 223504 - protein, 15 aa, Artificial Sequence
  Description of Artificial Sequence: Synthetic peptide
  Seed: LRMKWMMAMKYPITA
LRMKFMMGMEYPVTA

SEQ ID NO: 223505 - protein, 15 aa, Artificial Sequence
  Description of Artificial Sequence: Synthetic peptide
  Seed: LRMKWMMAMKYPITA
LRMKFMMGMFYPATA

SEQ ID NO: 223506 - protein, 15 aa, Artificial Sequence
  Description of Artificial Sequence: Synthetic peptide
  Seed: LRMKWMMAMKYPITA
LRMKFMMGMFYPFTA

SEQ ID NO: 223507 - protein, 15 aa, Artificial Sequence
  Description of Artificial Sequence: Synthetic peptide
  Seed: LRMKWMMAMKYPITA
LRMKFMMGMFYPITA

SEQ ID NO: 223508 - protein, 15 aa, Artificial Sequence
  Description of Artificial Sequence: Synthetic peptide
  Seed: LRMKWMMAMKYPITA
LRMKFMMGMFYPLTA

SEQ ID NO: 223509 - protein, 15 aa, Artificial Sequence
  Description of Artificial Sequence: Synthetic peptide
  Seed: LRMKWMMAMKYPITA
LRMKFMMGMFYPMTA

SEQ ID NO: 223510 - protein, 15 aa, Artificial Sequence
  Description of Artificial Sequence: Synthetic peptide
  Seed: LRMKWMMAMKYPITA
LRMKFMMGMFYPVTA

SEQ ID NO: 223511 - protein, 15 aa, Artificial Sequence
  Description of Artificial Sequence: Synthetic peptide
  Seed: LRMKWMMAMKYPITA
LRMKFMMGMGYPATA

SEQ ID NO: 223512 - protein, 15 aa, Artificial Sequence
  Description of Artificial Sequence: Synthetic peptide
  Seed: LRMKWMMAMKYPITA
LRMKFMMGMGYPCTA

SEQ ID NO: 223513 - protein, 15 aa, Artificial Sequence
  Description of Artificial Sequence: Synthetic peptide
  Seed: LRMKWMMAMKYPITA
LRMKFMMGMGYPDTA

SEQ ID NO: 223514 - protein, 15 aa, Artificial Sequence
  Description of Artificial Sequence: Synthetic peptide
  Seed: LRMKWMMAMKYPITA
LRMKFMMGMGYPETA

SEQ ID NO: 223515 - protein, 15 aa, Artificial Sequence
  Description of Artificial Sequence: Synthetic peptide
  Seed: LRMKWMMAMKYPITA
LRMKFMMGMGYPFTA

SEQ ID NO: 223516 - protein, 15 aa, Artificial Sequence
  Description of Artificial Sequence: Synthetic peptide
  Seed: LRMKWMMAMKYPITA
LRMKFMMGMGYPGTA

SEQ ID NO: 223517 - protein, 15 aa, Artificial Sequence
  Description of Artificial Sequence: Synthetic peptide
  Seed: LRMKWMMAMKYPITA
LRMKFMMGMGYPHTA

SEQ ID NO: 223518 - protein, 15 aa, Artificial Sequence
  Description of Artificial Sequence: Synthetic peptide
  Seed: LRMKWMMAMKYPITA
LRMKFMMGMGYPITA

SEQ ID NO: 223519 - protein, 15 aa, Artificial Sequence
  Description of Artificial Sequence: Synthetic peptide
  Seed: LRMKWMMAMKYPITA
LRMKFMMGMGYPKTA

SEQ ID NO: 223520 - protein, 15 aa, Artificial Sequence
  Description of Artificial Sequence: Synthetic peptide
  Seed: LRMKWMMAMKYPITA
LRMKFMMGMGYPLTA

SEQ ID NO: 223521 - protein, 15 aa, Artificial Sequence
  Description of Artificial Sequence: Synthetic peptide
  Seed: LRMKWMMAMKYPITA
LRMKFMMGMGYPMTA

SEQ ID NO: 223522 - protein, 15 aa, Artificial Sequence
  Description of Artificial Sequence: Synthetic peptide
  Seed: LRMKWMMAMKYPITA
LRMKFMMGMGYPNTA

SEQ ID NO: 223523 - protein, 15 aa, Artificial Sequence
  Description of Artificial Sequence: Synthetic peptide
  Seed: LRMKWMMAMKYPITA
LRMKFMMGMGYPPTA

SEQ ID NO: 223524 - protein, 15 aa, Artificial Sequence
  Description of Artificial Sequence: Synthetic peptide
  Seed: LRMKWMMAMKYPITA
LRMKFMMGMGYPQTA

SEQ ID NO: 223525 - protein, 15 aa, Artificial Sequence
  Description of Artificial Sequence: Synthetic peptide
  Seed: LRMKWMMAMKYPITA
LRMKFMMGMGYPRTA

SEQ ID NO: 223526 - protein, 15 aa, Artificial Sequence
  Description of Artificial Sequence: Synthetic peptide
  Seed: LRMKWMMAMKYPITA
LRMKFMMGMGYPSTA

SEQ ID NO: 223527 - protein, 15 aa, Artificial Sequence
  Description of Artificial Sequence: Synthetic peptide
  Seed: LRMKWMMAMKYPITA
LRMKFMMGMGYPTTA

SEQ ID NO: 223528 - protein, 15 aa, Artificial Sequence
  Description of Artificial Sequence: Synthetic peptide
  Seed: LRMKWMMAMKYPITA
LRMKFMMGMGYPVTA

SEQ ID NO: 223529 - protein, 15 aa, Artificial Sequence
  Description of Artificial Sequence: Synthetic peptide
  Seed: LRMKWMMAMKYPITA
LRMKFMMGMGYPWTA

SEQ ID NO: 223530 - protein, 15 aa, Artificial Sequence
  Description of Artificial Sequence: Synthetic peptide
  Seed: LRMKWMMAMKYPITA
LRMKFMMGMGYPYTA

SEQ ID NO: 223531 - protein, 15 aa, Artificial Sequence
  Description of Artificial Sequence: Synthetic peptide
  Seed: LRMKWMMAMKYPITA
LRMKFMMGMHYPATA

SEQ ID NO: 223532 - protein, 15 aa, Artificial Sequence
  Description of Artificial Sequence: Synthetic peptide
  Seed: LRMKWMMAMKYPITA
LRMKFMMGMHYPCTA

SEQ ID NO: 223533 - protein, 15 aa, Artificial Sequence
  Description of Artificial Sequence: Synthetic peptide
  Seed: LRMKWMMAMKYPITA
LRMKFMMGMHYPGTA

SEQ ID NO: 223534 - protein, 15 aa, Artificial Sequence
  Description of Artificial Sequence: Synthetic peptide
  Seed: LRMKWMMAMKYPITA
LRMKFMMGMHYPITA

SEQ ID NO: 223535 - protein, 15 aa, Artificial Sequence
  Description of Artificial Sequence: Synthetic peptide
  Seed: LRMKWMMAMKYPITA
LRMKFMMGMHYPLTA

SEQ ID NO: 223536 - protein, 15 aa, Artificial Sequence
  Description of Artificial Sequence: Synthetic peptide
  Seed: LRMKWMMAMKYPITA
LRMKFMMGMHYPMTA

SEQ ID NO: 223537 - protein, 15 aa, Artificial Sequence
  Description of Artificial Sequence: Synthetic peptide
  Seed: LRMKWMMAMKYPITA
LRMKFMMGMHYPNTA

SEQ ID NO: 223538 - protein, 15 aa, Artificial Sequence
  Description of Artificial Sequence: Synthetic peptide
  Seed: LRMKWMMAMKYPITA
LRMKFMMGMHYPSTA

SEQ ID NO: 223539 - protein, 15 aa, Artificial Sequence
  Description of Artificial Sequence: Synthetic peptide
  Seed: LRMKWMMAMKYPITA
LRMKFMMGMHYPTTA

SEQ ID NO: 223540 - protein, 15 aa, Artificial Sequence
  Description of Artificial Sequence: Synthetic peptide
  Seed: LRMKWMMAMKYPITA
LRMKFMMGMHYPVTA

SEQ ID NO: 223541 - protein, 15 aa, Artificial Sequence
  Description of Artificial Sequence: Synthetic peptide
  Seed: LRMKWMMAMKYPITA
LRMKFMMGMIYPATA

SEQ ID NO: 223542 - protein, 15 aa, Artificial Sequence
  Description of Artificial Sequence: Synthetic peptide
  Seed: LRMKWMMAMKYPITA
LRMKFMMGMIYPCTA

SEQ ID NO: 223543 - protein, 15 aa, Artificial Sequence
  Description of Artificial Sequence: Synthetic peptide
  Seed: LRMKWMMAMKYPITA
LRMKFMMGMIYPDTA

SEQ ID NO: 223544 - protein, 15 aa, Artificial Sequence
  Description of Artificial Sequence: Synthetic peptide
  Seed: LRMKWMMAMKYPITA
LRMKFMMGMIYPETA

SEQ ID NO: 223545 - protein, 15 aa, Artificial Sequence
  Description of Artificial Sequence: Synthetic peptide
  Seed: LRMKWMMAMKYPITA
LRMKFMMGMIYPFTA

SEQ ID NO: 223546 - protein, 15 aa, Artificial Sequence
  Description of Artificial Sequence: Synthetic peptide
  Seed: LRMKWMMAMKYPITA
LRMKFMMGMIYPGTA

SEQ ID NO: 223547 - protein, 15 aa, Artificial Sequence
  Description of Artificial Sequence: Synthetic peptide
  Seed: LRMKWMMAMKYPITA
LRMKFMMGMIYPHTA

SEQ ID NO: 223548 - protein, 15 aa, Artificial Sequence
  Description of Artificial Sequence: Synthetic peptide
  Seed: LRMKWMMAMKYPITA
LRMKFMMGMIYPITA

SEQ ID NO: 223549 - protein, 15 aa, Artificial Sequence
  Description of Artificial Sequence: Synthetic peptide
  Seed: LRMKWMMAMKYPITA
LRMKFMMGMIYPLTA

SEQ ID NO: 223550 - protein, 15 aa, Artificial Sequence
  Description of Artificial Sequence: Synthetic peptide
  Seed: LRMKWMMAMKYPITA
LRMKFMMGMIYPMTA

SEQ ID NO: 223551 - protein, 15 aa, Artificial Sequence
  Description of Artificial Sequence: Synthetic peptide
  Seed: LRMKWMMAMKYPITA
LRMKFMMGMIYPNTA

SEQ ID NO: 223552 - protein, 15 aa, Artificial Sequence
  Description of Artificial Sequence: Synthetic peptide
  Seed: LRMKWMMAMKYPITA
LRMKFMMGMIYPPTA

SEQ ID NO: 223553 - protein, 15 aa, Artificial Sequence
  Description of Artificial Sequence: Synthetic peptide
  Seed: LRMKWMMAMKYPITA
LRMKFMMGMIYPQTA

SEQ ID NO: 223554 - protein, 15 aa, Artificial Sequence
  Description of Artificial Sequence: Synthetic peptide
  Seed: LRMKWMMAMKYPITA
LRMKFMMGMIYPRTA

SEQ ID NO: 223555 - protein, 15 aa, Artificial Sequence
  Description of Artificial Sequence: Synthetic peptide
  Seed: LRMKWMMAMKYPITA
LRMKFMMGMIYPSTA

SEQ ID NO: 223556 - protein, 15 aa, Artificial Sequence
  Description of Artificial Sequence: Synthetic peptide
  Seed: LRMKWMMAMKYPITA
LRMKFMMGMIYPTTA

SEQ ID NO: 223557 - protein, 15 aa, Artificial Sequence
  Description of Artificial Sequence: Synthetic peptide
  Seed: LRMKWMMAMKYPITA
LRMKFMMGMIYPVTA

SEQ ID NO: 223558 - protein, 15 aa, Artificial Sequence
  Description of Artificial Sequence: Synthetic peptide
  Seed: LRMKWMMAMKYPITA
LRMKFMMGMIYPYTA

SEQ ID NO: 223559 - protein, 15 aa, Artificial Sequence
  Description of Artificial Sequence: Synthetic peptide
  Seed: LRMKWMMAMKYPITA
LRMKFMMGMKYPATA

SEQ ID NO: 223560 - protein, 15 aa, Artificial Sequence
  Description of Artificial Sequence: Synthetic peptide
  Seed: LRMKWMMAMKYPITA
LRMKFMMGMKYPFTA

SEQ ID NO: 223561 - protein, 15 aa, Artificial Sequence
  Description of Artificial Sequence: Synthetic peptide
  Seed: LRMKWMMAMKYPITA
LRMKFMMGMKYPGTA

SEQ ID NO: 223562 - protein, 15 aa, Artificial Sequence
  Description of Artificial Sequence: Synthetic peptide
  Seed: LRMKWMMAMKYPITA
LRMKFMMGMKYPHTA

SEQ ID NO: 223563 - protein, 15 aa, Artificial Sequence
  Description of Artificial Sequence: Synthetic peptide
  Seed: LRMKWMMAMKYPITA
LRMKFMMGMKYPITA

SEQ ID NO: 223564 - protein, 15 aa, Artificial Sequence
  Description of Artificial Sequence: Synthetic peptide
  Seed: LRMKWMMAMKYPITA
LRMKFMMGMKYPKTA

SEQ ID NO: 223565 - protein, 15 aa, Artificial Sequence
  Description of Artificial Sequence: Synthetic peptide
  Seed: LRMKWMMAMKYPITA
LRMKFMMGMKYPLTA

SEQ ID NO: 223566 - protein, 15 aa, Artificial Sequence
  Description of Artificial Sequence: Synthetic peptide
  Seed: LRMKWMMAMKYPITA
LRMKFMMGMKYPMTA

SEQ ID NO: 223567 - protein, 15 aa, Artificial Sequence
  Description of Artificial Sequence: Synthetic peptide
  Seed: LRMKWMMAMKYPITA
LRMKFMMGMKYPQTA

SEQ ID NO: 223568 - protein, 15 aa, Artificial Sequence
  Description of Artificial Sequence: Synthetic peptide
  Seed: LRMKWMMAMKYPITA
LRMKFMMGMKYPRTA

SEQ ID NO: 223569 - protein, 15 aa, Artificial Sequence
  Description of Artificial Sequence: Synthetic peptide
  Seed: LRMKWMMAMKYPITA
LRMKFMMGMKYPSTA

SEQ ID NO: 223570 - protein, 15 aa, Artificial Sequence
  Description of Artificial Sequence: Synthetic peptide
  Seed: LRMKWMMAMKYPITA
LRMKFMMGMKYPTTA

SEQ ID NO: 223571 - protein, 15 aa, Artificial Sequence
  Description of Artificial Sequence: Synthetic peptide
  Seed: LRMKWMMAMKYPITA
LRMKFMMGMKYPVTA

SEQ ID NO: 223572 - protein, 15 aa, Artificial Sequence
  Description of Artificial Sequence: Synthetic peptide
  Seed: LRMKWMMAMKYPITA
LRMKFMMGMKYPYTA

SEQ ID NO: 223573 - protein, 15 aa, Artificial Sequence
  Description of Artificial Sequence: Synthetic peptide
  Seed: LRMKWMMAMKYPITA
LRMKFMMGMLYPATA

SEQ ID NO: 223574 - protein, 15 aa, Artificial Sequence
  Description of Artificial Sequence: Synthetic peptide
  Seed: LRMKWMMAMKYPITA
LRMKFMMGMLYPCTA

SEQ ID NO: 223575 - protein, 15 aa, Artificial Sequence
  Description of Artificial Sequence: Synthetic peptide
  Seed: LRMKWMMAMKYPITA
LRMKFMMGMLYPDTA

SEQ ID NO: 223576 - protein, 15 aa, Artificial Sequence
  Description of Artificial Sequence: Synthetic peptide
  Seed: LRMKWMMAMKYPITA
LRMKFMMGMLYPGTA

SEQ ID NO: 223577 - protein, 15 aa, Artificial Sequence
  Description of Artificial Sequence: Synthetic peptide
  Seed: LRMKWMMAMKYPITA
LRMKFMMGMLYPITA

SEQ ID NO: 223578 - protein, 15 aa, Artificial Sequence
  Description of Artificial Sequence: Synthetic peptide
  Seed: LRMKWMMAMKYPITA
LRMKFMMGMLYPLTA

SEQ ID NO: 223579 - protein, 15 aa, Artificial Sequence
  Description of Artificial Sequence: Synthetic peptide
  Seed: LRMKWMMAMKYPITA
LRMKFMMGMLYPMTA

SEQ ID NO: 223580 - protein, 15 aa, Artificial Sequence
  Description of Artificial Sequence: Synthetic peptide
  Seed: LRMKWMMAMKYPITA
LRMKFMMGMLYPNTA

SEQ ID NO: 223581 - protein, 15 aa, Artificial Sequence
  Description of Artificial Sequence: Synthetic peptide
  Seed: LRMKWMMAMKYPITA
LRMKFMMGMLYPSTA

SEQ ID NO: 223582 - protein, 15 aa, Artificial Sequence
  Description of Artificial Sequence: Synthetic peptide
  Seed: LRMKWMMAMKYPITA
LRMKFMMGMLYPTTA

SEQ ID NO: 223583 - protein, 15 aa, Artificial Sequence
  Description of Artificial Sequence: Synthetic peptide
  Seed: LRMKWMMAMKYPITA
LRMKFMMGMLYPVTA

SEQ ID NO: 223584 - protein, 15 aa, Artificial Sequence
  Description of Artificial Sequence: Synthetic peptide
  Seed: LRMKWMMAMKYPITA
LRMKFMMGMMYPATA

SEQ ID NO: 223585 - protein, 15 aa, Artificial Sequence
  Description of Artificial Sequence: Synthetic peptide
  Seed: LRMKWMMAMKYPITA
LRMKFMMGMMYPCTA

SEQ ID NO: 223586 - protein, 15 aa, Artificial Sequence
  Description of Artificial Sequence: Synthetic peptide
  Seed: LRMKWMMAMKYPITA
LRMKFMMGMMYPDTA

SEQ ID NO: 223587 - protein, 15 aa, Artificial Sequence
  Description of Artificial Sequence: Synthetic peptide
  Seed: LRMKWMMAMKYPITA
LRMKFMMGMMYPGTA

SEQ ID NO: 223588 - protein, 15 aa, Artificial Sequence
  Description of Artificial Sequence: Synthetic peptide
  Seed: LRMKWMMAMKYPITA
LRMKFMMGMMYPITA

SEQ ID NO: 223589 - protein, 15 aa, Artificial Sequence
  Description of Artificial Sequence: Synthetic peptide
  Seed: LRMKWMMAMKYPITA
LRMKFMMGMMYPLTA

SEQ ID NO: 223590 - protein, 15 aa, Artificial Sequence
  Description of Artificial Sequence: Synthetic peptide
  Seed: LRMKWMMAMKYPITA
LRMKFMMGMMYPMTA

SEQ ID NO: 223591 - protein, 15 aa, Artificial Sequence
  Description of Artificial Sequence: Synthetic peptide
  Seed: LRMKWMMAMKYPITA
LRMKFMMGMMYPNTA

SEQ ID NO: 223592 - protein, 15 aa, Artificial Sequence
  Description of Artificial Sequence: Synthetic peptide
  Seed: LRMKWMMAMKYPITA
LRMKFMMGMMYPSTA

SEQ ID NO: 223593 - protein, 15 aa, Artificial Sequence
  Description of Artificial Sequence: Synthetic peptide
  Seed: LRMKWMMAMKYPITA
LRMKFMMGMMYPTTA

SEQ ID NO: 223594 - protein, 15 aa, Artificial Sequence
  Description of Artificial Sequence: Synthetic peptide
  Seed: LRMKWMMAMKYPITA
LRMKFMMGMMYPVTA

SEQ ID NO: 223595 - protein, 15 aa, Artificial Sequence
  Description of Artificial Sequence: Synthetic peptide
  Seed: LRMKWMMAMKYPITA
LRMKFMMGMNYPATA

SEQ ID NO: 223596 - protein, 15 aa, Artificial Sequence
  Description of Artificial Sequence: Synthetic peptide
  Seed: LRMKWMMAMKYPITA
LRMKFMMGMNYPCTA

SEQ ID NO: 223597 - protein, 15 aa, Artificial Sequence
  Description of Artificial Sequence: Synthetic peptide
  Seed: LRMKWMMAMKYPITA
LRMKFMMGMNYPDTA

SEQ ID NO: 223598 - protein, 15 aa, Artificial Sequence
  Description of Artificial Sequence: Synthetic peptide
  Seed: LRMKWMMAMKYPITA
LRMKFMMGMNYPETA

SEQ ID NO: 223599 - protein, 15 aa, Artificial Sequence
  Description of Artificial Sequence: Synthetic peptide
  Seed: LRMKWMMAMKYPITA
LRMKFMMGMNYPFTA

SEQ ID NO: 223600 - protein, 15 aa, Artificial Sequence
  Description of Artificial Sequence: Synthetic peptide
  Seed: LRMKWMMAMKYPITA
LRMKFMMGMNYPGTA

SEQ ID NO: 223601 - protein, 15 aa, Artificial Sequence
  Description of Artificial Sequence: Synthetic peptide
  Seed: LRMKWMMAMKYPITA
LRMKFMMGMNYPHTA

SEQ ID NO: 223602 - protein, 15 aa, Artificial Sequence
  Description of Artificial Sequence: Synthetic peptide
  Seed: LRMKWMMAMKYPITA
LRMKFMMGMNYPITA

SEQ ID NO: 223603 - protein, 15 aa, Artificial Sequence
  Description of Artificial Sequence: Synthetic peptide
  Seed: LRMKWMMAMKYPITA
LRMKFMMGMNYPKTA

SEQ ID NO: 223604 - protein, 15 aa, Artificial Sequence
  Description of Artificial Sequence: Synthetic peptide
  Seed: LRMKWMMAMKYPITA
LRMKFMMGMNYPLTA

SEQ ID NO: 223605 - protein, 15 aa, Artificial Sequence
  Description of Artificial Sequence: Synthetic peptide
  Seed: LRMKWMMAMKYPITA
LRMKFMMGMNYPMTA

SEQ ID NO: 223606 - protein, 15 aa, Artificial Sequence
  Description of Artificial Sequence: Synthetic peptide
  Seed: LRMKWMMAMKYPITA
LRMKFMMGMNYPNTA

SEQ ID NO: 223607 - protein, 15 aa, Artificial Sequence
  Description of Artificial Sequence: Synthetic peptide
  Seed: LRMKWMMAMKYPITA
LRMKFMMGMNYPPTA

SEQ ID NO: 223608 - protein, 15 aa, Artificial Sequence
  Description of Artificial Sequence: Synthetic peptide
  Seed: LRMKWMMAMKYPITA
LRMKFMMGMNYPQTA

SEQ ID NO: 223609 - protein, 15 aa, Artificial Sequence
  Description of Artificial Sequence: Synthetic peptide
  Seed: LRMKWMMAMKYPITA
LRMKFMMGMNYPRTA

SEQ ID NO: 223610 - protein, 15 aa, Artificial Sequence
  Description of Artificial Sequence: Synthetic peptide
  Seed: LRMKWMMAMKYPITA
LRMKFMMGMNYPSTA

SEQ ID NO: 223611 - protein, 15 aa, Artificial Sequence
  Description of Artificial Sequence: Synthetic peptide
  Seed: LRMKWMMAMKYPITA
LRMKFMMGMNYPTTA

SEQ ID NO: 223612 - protein, 15 aa, Artificial Sequence
  Description of Artificial Sequence: Synthetic peptide
  Seed: LRMKWMMAMKYPITA
LRMKFMMGMNYPVTA

SEQ ID NO: 223613 - protein, 15 aa, Artificial Sequence
  Description of Artificial Sequence: Synthetic peptide
  Seed: LRMKWMMAMKYPITA
LRMKFMMGMNYPWTA

SEQ ID NO: 223614 - protein, 15 aa, Artificial Sequence
  Description of Artificial Sequence: Synthetic peptide
  Seed: LRMKWMMAMKYPITA
LRMKFMMGMNYPYTA

SEQ ID NO: 223615 - protein, 15 aa, Artificial Sequence
  Description of Artificial Sequence: Synthetic peptide
  Seed: LRMKWMMAMKYPITA
LRMKFMMGMPYPATA

SEQ ID NO: 223616 - protein, 15 aa, Artificial Sequence
  Description of Artificial Sequence: Synthetic peptide
  Seed: LRMKWMMAMKYPITA
LRMKFMMGMPYPCTA

SEQ ID NO: 223617 - protein, 15 aa, Artificial Sequence
  Description of Artificial Sequence: Synthetic peptide
  Seed: LRMKWMMAMKYPITA
LRMKFMMGMPYPDTA

SEQ ID NO: 223618 - protein, 15 aa, Artificial Sequence
  Description of Artificial Sequence: Synthetic peptide
  Seed: LRMKWMMAMKYPITA
LRMKFMMGMPYPETA

SEQ ID NO: 223619 - protein, 15 aa, Artificial Sequence
  Description of Artificial Sequence: Synthetic peptide
  Seed: LRMKWMMAMKYPITA
LRMKFMMGMPYPFTA

SEQ ID NO: 223620 - protein, 15 aa, Artificial Sequence
  Description of Artificial Sequence: Synthetic peptide
  Seed: LRMKWMMAMKYPITA
LRMKFMMGMPYPGTA

SEQ ID NO: 223621 - protein, 15 aa, Artificial Sequence
  Description of Artificial Sequence: Synthetic peptide
  Seed: LRMKWMMAMKYPITA
LRMKFMMGMPYPHTA

SEQ ID NO: 223622 - protein, 15 aa, Artificial Sequence
  Description of Artificial Sequence: Synthetic peptide
  Seed: LRMKWMMAMKYPITA
LRMKFMMGMPYPITA

SEQ ID NO: 223623 - protein, 15 aa, Artificial Sequence
  Description of Artificial Sequence: Synthetic peptide
  Seed: LRMKWMMAMKYPITA
LRMKFMMGMPYPKTA

SEQ ID NO: 223624 - protein, 15 aa, Artificial Sequence
  Description of Artificial Sequence: Synthetic peptide
  Seed: LRMKWMMAMKYPITA
LRMKFMMGMPYPLTA

SEQ ID NO: 223625 - protein, 15 aa, Artificial Sequence
  Description of Artificial Sequence: Synthetic peptide
  Seed: LRMKWMMAMKYPITA
LRMKFMMGMPYPMTA

SEQ ID NO: 223626 - protein, 15 aa, Artificial Sequence
  Description of Artificial Sequence: Synthetic peptide
  Seed: LRMKWMMAMKYPITA
LRMKFMMGMPYPNTA

SEQ ID NO: 223627 - protein, 15 aa, Artificial Sequence
  Description of Artificial Sequence: Synthetic peptide
  Seed: LRMKWMMAMKYPITA
LRMKFMMGMPYPPTA

SEQ ID NO: 223628 - protein, 15 aa, Artificial Sequence
  Description of Artificial Sequence: Synthetic peptide
  Seed: LRMKWMMAMKYPITA
LRMKFMMGMPYPQTA

SEQ ID NO: 223629 - protein, 15 aa, Artificial Sequence
  Description of Artificial Sequence: Synthetic peptide
  Seed: LRMKWMMAMKYPITA
LRMKFMMGMPYPRTA

SEQ ID NO: 223630 - protein, 15 aa, Artificial Sequence
  Description of Artificial Sequence: Synthetic peptide
  Seed: LRMKWMMAMKYPITA
LRMKFMMGMPYPSTA

SEQ ID NO: 223631 - protein, 15 aa, Artificial Sequence
  Description of Artificial Sequence: Synthetic peptide
  Seed: LRMKWMMAMKYPITA
LRMKFMMGMPYPTTA

SEQ ID NO: 223632 - protein, 15 aa, Artificial Sequence
  Description of Artificial Sequence: Synthetic peptide
  Seed: LRMKWMMAMKYPITA
LRMKFMMGMPYPVTA

SEQ ID NO: 223633 - protein, 15 aa, Artificial Sequence
  Description of Artificial Sequence: Synthetic peptide
  Seed: LRMKWMMAMKYPITA
LRMKFMMGMPYPWTA

SEQ ID NO: 223634 - protein, 15 aa, Artificial Sequence
  Description of Artificial Sequence: Synthetic peptide
  Seed: LRMKWMMAMKYPITA
LRMKFMMGMPYPYTA

SEQ ID NO: 223635 - protein, 15 aa, Artificial Sequence
  Description of Artificial Sequence: Synthetic peptide
  Seed: LRMKWMMAMKYPITA
LRMKFMMGMQYPATA

SEQ ID NO: 223636 - protein, 15 aa, Artificial Sequence
  Description of Artificial Sequence: Synthetic peptide
  Seed: LRMKWMMAMKYPITA
LRMKFMMGMQYPGTA

SEQ ID NO: 223637 - protein, 15 aa, Artificial Sequence
  Description of Artificial Sequence: Synthetic peptide
  Seed: LRMKWMMAMKYPITA
LRMKFMMGMQYPITA

SEQ ID NO: 223638 - protein, 15 aa, Artificial Sequence
  Description of Artificial Sequence: Synthetic peptide
  Seed: LRMKWMMAMKYPITA
LRMKFMMGMQYPLTA

SEQ ID NO: 223639 - protein, 15 aa, Artificial Sequence
  Description of Artificial Sequence: Synthetic peptide
  Seed: LRMKWMMAMKYPITA
LRMKFMMGMQYPMTA

SEQ ID NO: 223640 - protein, 15 aa, Artificial Sequence
  Description of Artificial Sequence: Synthetic peptide
  Seed: LRMKWMMAMKYPITA
LRMKFMMGMQYPNTA

SEQ ID NO: 223641 - protein, 15 aa, Artificial Sequence
  Description of Artificial Sequence: Synthetic peptide
  Seed: LRMKWMMAMKYPITA
LRMKFMMGMQYPSTA

SEQ ID NO: 223642 - protein, 15 aa, Artificial Sequence
  Description of Artificial Sequence: Synthetic peptide
  Seed: LRMKWMMAMKYPITA
LRMKFMMGMQYPTTA

SEQ ID NO: 223643 - protein, 15 aa, Artificial Sequence
  Description of Artificial Sequence: Synthetic peptide
  Seed: LRMKWMMAMKYPITA
LRMKFMMGMQYPVTA

SEQ ID NO: 223644 - protein, 15 aa, Artificial Sequence
  Description of Artificial Sequence: Synthetic peptide
  Seed: LRMKWMMAMKYPITA
LRMKFMMGMRYPATA

SEQ ID NO: 223645 - protein, 15 aa, Artificial Sequence
  Description of Artificial Sequence: Synthetic peptide
  Seed: LRMKWMMAMKYPITA
LRMKFMMGMRYPFTA

SEQ ID NO: 223646 - protein, 15 aa, Artificial Sequence
  Description of Artificial Sequence: Synthetic peptide
  Seed: LRMKWMMAMKYPITA
LRMKFMMGMRYPGTA

SEQ ID NO: 223647 - protein, 15 aa, Artificial Sequence
  Description of Artificial Sequence: Synthetic peptide
  Seed: LRMKWMMAMKYPITA
LRMKFMMGMRYPHTA

SEQ ID NO: 223648 - protein, 15 aa, Artificial Sequence
  Description of Artificial Sequence: Synthetic peptide
  Seed: LRMKWMMAMKYPITA
LRMKFMMGMRYPITA

SEQ ID NO: 223649 - protein, 15 aa, Artificial Sequence
  Description of Artificial Sequence: Synthetic peptide
  Seed: LRMKWMMAMKYPITA
LRMKFMMGMRYPKTA

SEQ ID NO: 223650 - protein, 15 aa, Artificial Sequence
  Description of Artificial Sequence: Synthetic peptide
  Seed: LRMKWMMAMKYPITA
LRMKFMMGMRYPLTA

SEQ ID NO: 223651 - protein, 15 aa, Artificial Sequence
  Description of Artificial Sequence: Synthetic peptide
  Seed: LRMKWMMAMKYPITA
LRMKFMMGMRYPMTA

SEQ ID NO: 223652 - protein, 15 aa, Artificial Sequence
  Description of Artificial Sequence: Synthetic peptide
  Seed: LRMKWMMAMKYPITA
LRMKFMMGMRYPNTA

SEQ ID NO: 223653 - protein, 15 aa, Artificial Sequence
  Description of Artificial Sequence: Synthetic peptide
  Seed: LRMKWMMAMKYPITA
LRMKFMMGMRYPQTA

SEQ ID NO: 223654 - protein, 15 aa, Artificial Sequence
  Description of Artificial Sequence: Synthetic peptide
  Seed: LRMKWMMAMKYPITA
LRMKFMMGMRYPRTA

SEQ ID NO: 223655 - protein, 15 aa, Artificial Sequence
  Description of Artificial Sequence: Synthetic peptide
  Seed: LRMKWMMAMKYPITA
LRMKFMMGMRYPSTA

SEQ ID NO: 223656 - protein, 15 aa, Artificial Sequence
  Description of Artificial Sequence: Synthetic peptide
  Seed: LRMKWMMAMKYPITA
LRMKFMMGMRYPTTA

SEQ ID NO: 223657 - protein, 15 aa, Artificial Sequence
  Description of Artificial Sequence: Synthetic peptide
  Seed: LRMKWMMAMKYPITA
LRMKFMMGMRYPVTA

SEQ ID NO: 223658 - protein, 15 aa, Artificial Sequence
  Description of Artificial Sequence: Synthetic peptide
  Seed: LRMKWMMAMKYPITA
LRMKFMMGMRYPYTA

SEQ ID NO: 223659 - protein, 15 aa, Artificial Sequence
  Description of Artificial Sequence: Synthetic peptide
  Seed: LRMKWMMAMKYPITA
LRMKFMMGMSYPATA

SEQ ID NO: 223660 - protein, 15 aa, Artificial Sequence
  Description of Artificial Sequence: Synthetic peptide
  Seed: LRMKWMMAMKYPITA
LRMKFMMGMSYPCTA

SEQ ID NO: 223661 - protein, 15 aa, Artificial Sequence
  Description of Artificial Sequence: Synthetic peptide
  Seed: LRMKWMMAMKYPITA
LRMKFMMGMSYPDTA

SEQ ID NO: 223662 - protein, 15 aa, Artificial Sequence
  Description of Artificial Sequence: Synthetic peptide
  Seed: LRMKWMMAMKYPITA
LRMKFMMGMSYPETA

SEQ ID NO: 223663 - protein, 15 aa, Artificial Sequence
  Description of Artificial Sequence: Synthetic peptide
  Seed: LRMKWMMAMKYPITA
LRMKFMMGMSYPFTA

SEQ ID NO: 223664 - protein, 15 aa, Artificial Sequence
  Description of Artificial Sequence: Synthetic peptide
  Seed: LRMKWMMAMKYPITA
LRMKFMMGMSYPGTA

SEQ ID NO: 223665 - protein, 15 aa, Artificial Sequence
  Description of Artificial Sequence: Synthetic peptide
  Seed: LRMKWMMAMKYPITA
LRMKFMMGMSYPHTA

SEQ ID NO: 223666 - protein, 15 aa, Artificial Sequence
  Description of Artificial Sequence: Synthetic peptide
  Seed: LRMKWMMAMKYPITA
LRMKFMMGMSYPITA

SEQ ID NO: 223667 - protein, 15 aa, Artificial Sequence
  Description of Artificial Sequence: Synthetic peptide
  Seed: LRMKWMMAMKYPITA
LRMKFMMGMSYPKTA

SEQ ID NO: 223668 - protein, 15 aa, Artificial Sequence
  Description of Artificial Sequence: Synthetic peptide
  Seed: LRMKWMMAMKYPITA
LRMKFMMGMSYPLTA

SEQ ID NO: 223669 - protein, 15 aa, Artificial Sequence
  Description of Artificial Sequence: Synthetic peptide
  Seed: LRMKWMMAMKYPITA
LRMKFMMGMSYPMTA

SEQ ID NO: 223670 - protein, 15 aa, Artificial Sequence
  Description of Artificial Sequence: Synthetic peptide
  Seed: LRMKWMMAMKYPITA
LRMKFMMGMSYPNTA

SEQ ID NO: 223671 - protein, 15 aa, Artificial Sequence
  Description of Artificial Sequence: Synthetic peptide
  Seed: LRMKWMMAMKYPITA
LRMKFMMGMSYPPTA

SEQ ID NO: 223672 - protein, 15 aa, Artificial Sequence
  Description of Artificial Sequence: Synthetic peptide
  Seed: LRMKWMMAMKYPITA
LRMKFMMGMSYPQTA

SEQ ID NO: 223673 - protein, 15 aa, Artificial Sequence
  Description of Artificial Sequence: Synthetic peptide
  Seed: LRMKWMMAMKYPITA
LRMKFMMGMSYPRTA

SEQ ID NO: 223674 - protein, 15 aa, Artificial Sequence
  Description of Artificial Sequence: Synthetic peptide
  Seed: LRMKWMMAMKYPITA
LRMKFMMGMSYPSTA

SEQ ID NO: 223675 - protein, 15 aa, Artificial Sequence
  Description of Artificial Sequence: Synthetic peptide
  Seed: LRMKWMMAMKYPITA
LRMKFMMGMSYPTTA

SEQ ID NO: 223676 - protein, 15 aa, Artificial Sequence
  Description of Artificial Sequence: Synthetic peptide
  Seed: LRMKWMMAMKYPITA
LRMKFMMGMSYPVTA

SEQ ID NO: 223677 - protein, 15 aa, Artificial Sequence
  Description of Artificial Sequence: Synthetic peptide
  Seed: LRMKWMMAMKYPITA
LRMKFMMGMSYPWTA

SEQ ID NO: 223678 - protein, 15 aa, Artificial Sequence
  Description of Artificial Sequence: Synthetic peptide
  Seed: LRMKWMMAMKYPITA
LRMKFMMGMSYPYTA

SEQ ID NO: 223679 - protein, 15 aa, Artificial Sequence
  Description of Artificial Sequence: Synthetic peptide
  Seed: LRMKWMMAMKYPITA
LRMKFMMGMTYPATA

SEQ ID NO: 223680 - protein, 15 aa, Artificial Sequence
  Description of Artificial Sequence: Synthetic peptide
  Seed: LRMKWMMAMKYPITA
LRMKFMMGMTYPCTA

SEQ ID NO: 223681 - protein, 15 aa, Artificial Sequence
  Description of Artificial Sequence: Synthetic peptide
  Seed: LRMKWMMAMKYPITA
LRMKFMMGMTYPDTA

SEQ ID NO: 223682 - protein, 15 aa, Artificial Sequence
  Description of Artificial Sequence: Synthetic peptide
  Seed: LRMKWMMAMKYPITA
LRMKFMMGMTYPETA

SEQ ID NO: 223683 - protein, 15 aa, Artificial Sequence
  Description of Artificial Sequence: Synthetic peptide
  Seed: LRMKWMMAMKYPITA
LRMKFMMGMTYPFTA

SEQ ID NO: 223684 - protein, 15 aa, Artificial Sequence
  Description of Artificial Sequence: Synthetic peptide
  Seed: LRMKWMMAMKYPITA
LRMKFMMGMTYPGTA

SEQ ID NO: 223685 - protein, 15 aa, Artificial Sequence
  Description of Artificial Sequence: Synthetic peptide
  Seed: LRMKWMMAMKYPITA
LRMKFMMGMTYPHTA

SEQ ID NO: 223686 - protein, 15 aa, Artificial Sequence
  Description of Artificial Sequence: Synthetic peptide
  Seed: LRMKWMMAMKYPITA
LRMKFMMGMTYPITA

SEQ ID NO: 223687 - protein, 15 aa, Artificial Sequence
  Description of Artificial Sequence: Synthetic peptide
  Seed: LRMKWMMAMKYPITA
LRMKFMMGMTYPKTA

SEQ ID NO: 223688 - protein, 15 aa, Artificial Sequence
  Description of Artificial Sequence: Synthetic peptide
  Seed: LRMKWMMAMKYPITA
LRMKFMMGMTYPLTA

SEQ ID NO: 223689 - protein, 15 aa, Artificial Sequence
  Description of Artificial Sequence: Synthetic peptide
  Seed: LRMKWMMAMKYPITA
LRMKFMMGMTYPMTA

SEQ ID NO: 223690 - protein, 15 aa, Artificial Sequence
  Description of Artificial Sequence: Synthetic peptide
  Seed: LRMKWMMAMKYPITA
LRMKFMMGMTYPNTA

SEQ ID NO: 223691 - protein, 15 aa, Artificial Sequence
  Description of Artificial Sequence: Synthetic peptide
  Seed: LRMKWMMAMKYPITA
LRMKFMMGMTYPPTA

SEQ ID NO: 223692 - protein, 15 aa, Artificial Sequence
  Description of Artificial Sequence: Synthetic peptide
  Seed: LRMKWMMAMKYPITA
LRMKFMMGMTYPQTA

SEQ ID NO: 223693 - protein, 15 aa, Artificial Sequence
  Description of Artificial Sequence: Synthetic peptide
  Seed: LRMKWMMAMKYPITA
LRMKFMMGMTYPRTA

SEQ ID NO: 223694 - protein, 15 aa, Artificial Sequence
  Description of Artificial Sequence: Synthetic peptide
  Seed: LRMKWMMAMKYPITA
LRMKFMMGMTYPSTA

SEQ ID NO: 223695 - protein, 15 aa, Artificial Sequence
  Description of Artificial Sequence: Synthetic peptide
  Seed: LRMKWMMAMKYPITA
LRMKFMMGMTYPTTA

SEQ ID NO: 223696 - protein, 15 aa, Artificial Sequence
  Description of Artificial Sequence: Synthetic peptide
  Seed: LRMKWMMAMKYPITA
LRMKFMMGMTYPVTA

SEQ ID NO: 223697 - protein, 15 aa, Artificial Sequence
  Description of Artificial Sequence: Synthetic peptide
  Seed: LRMKWMMAMKYPITA
LRMKFMMGMTYPWTA

SEQ ID NO: 223698 - protein, 15 aa, Artificial Sequence
  Description of Artificial Sequence: Synthetic peptide
  Seed: LRMKWMMAMKYPITA
LRMKFMMGMTYPYTA

SEQ ID NO: 223699 - protein, 15 aa, Artificial Sequence
  Description of Artificial Sequence: Synthetic peptide
  Seed: LRMKWMMAMKYPITA
LRMKFMMGMVYPATA

SEQ ID NO: 223700 - protein, 15 aa, Artificial Sequence
  Description of Artificial Sequence: Synthetic peptide
  Seed: LRMKWMMAMKYPITA
LRMKFMMGMVYPCTA

SEQ ID NO: 223701 - protein, 15 aa, Artificial Sequence
  Description of Artificial Sequence: Synthetic peptide
  Seed: LRMKWMMAMKYPITA
LRMKFMMGMVYPDTA

SEQ ID NO: 223702 - protein, 15 aa, Artificial Sequence
  Description of Artificial Sequence: Synthetic peptide
  Seed: LRMKWMMAMKYPITA
LRMKFMMGMVYPETA

SEQ ID NO: 223703 - protein, 15 aa, Artificial Sequence
  Description of Artificial Sequence: Synthetic peptide
  Seed: LRMKWMMAMKYPITA
LRMKFMMGMVYPFTA

SEQ ID NO: 223704 - protein, 15 aa, Artificial Sequence
  Description of Artificial Sequence: Synthetic peptide
  Seed: LRMKWMMAMKYPITA
LRMKFMMGMVYPGTA

SEQ ID NO: 223705 - protein, 15 aa, Artificial Sequence
  Description of Artificial Sequence: Synthetic peptide
  Seed: LRMKWMMAMKYPITA
LRMKFMMGMVYPHTA

SEQ ID NO: 223706 - protein, 15 aa, Artificial Sequence
  Description of Artificial Sequence: Synthetic peptide
  Seed: LRMKWMMAMKYPITA
LRMKFMMGMVYPITA

SEQ ID NO: 223707 - protein, 15 aa, Artificial Sequence
  Description of Artificial Sequence: Synthetic peptide
  Seed: LRMKWMMAMKYPITA
LRMKFMMGMVYPKTA

SEQ ID NO: 223708 - protein, 15 aa, Artificial Sequence
  Description of Artificial Sequence: Synthetic peptide
  Seed: LRMKWMMAMKYPITA
LRMKFMMGMVYPLTA

SEQ ID NO: 223709 - protein, 15 aa, Artificial Sequence
  Description of Artificial Sequence: Synthetic peptide
  Seed: LRMKWMMAMKYPITA
LRMKFMMGMVYPMTA

SEQ ID NO: 223710 - protein, 15 aa, Artificial Sequence
  Description of Artificial Sequence: Synthetic peptide
  Seed: LRMKWMMAMKYPITA
LRMKFMMGMVYPNTA

SEQ ID NO: 223711 - protein, 15 aa, Artificial Sequence
  Description of Artificial Sequence: Synthetic peptide
  Seed: LRMKWMMAMKYPITA
LRMKFMMGMVYPPTA

SEQ ID NO: 223712 - protein, 15 aa, Artificial Sequence
  Description of Artificial Sequence: Synthetic peptide
  Seed: LRMKWMMAMKYPITA
LRMKFMMGMVYPQTA

SEQ ID NO: 223713 - protein, 15 aa, Artificial Sequence
  Description of Artificial Sequence: Synthetic peptide
  Seed: LRMKWMMAMKYPITA
LRMKFMMGMVYPRTA

SEQ ID NO: 223714 - protein, 15 aa, Artificial Sequence
  Description of Artificial Sequence: Synthetic peptide
  Seed: LRMKWMMAMKYPITA
LRMKFMMGMVYPSTA

SEQ ID NO: 223715 - protein, 15 aa, Artificial Sequence
  Description of Artificial Sequence: Synthetic peptide
  Seed: LRMKWMMAMKYPITA
LRMKFMMGMVYPTTA

SEQ ID NO: 223716 - protein, 15 aa, Artificial Sequence
  Description of Artificial Sequence: Synthetic peptide
  Seed: LRMKWMMAMKYPITA
LRMKFMMGMVYPVTA

SEQ ID NO: 223717 - protein, 15 aa, Artificial Sequence
  Description of Artificial Sequence: Synthetic peptide
  Seed: LRMKWMMAMKYPITA
LRMKFMMGMVYPWTA

SEQ ID NO: 223718 - protein, 15 aa, Artificial Sequence
  Description of Artificial Sequence: Synthetic peptide
  Seed: LRMKWMMAMKYPITA
LRMKFMMGMVYPYTA

SEQ ID NO: 223719 - protein, 15 aa, Artificial Sequence
  Description of Artificial Sequence: Synthetic peptide
  Seed: LRMKWMMAMKYPITA
LRMKFMMGMWYPATA

SEQ ID NO: 223720 - protein, 15 aa, Artificial Sequence
  Description of Artificial Sequence: Synthetic peptide
  Seed: LRMKWMMAMKYPITA
LRMKFMMGMWYPITA

SEQ ID NO: 223721 - protein, 15 aa, Artificial Sequence
  Description of Artificial Sequence: Synthetic peptide
  Seed: LRMKWMMAMKYPITA
LRMKFMMGMWYPLTA

SEQ ID NO: 223722 - protein, 15 aa, Artificial Sequence
  Description of Artificial Sequence: Synthetic peptide
  Seed: LRMKWMMAMKYPITA
LRMKFMMGMWYPMTA

SEQ ID NO: 223723 - protein, 15 aa, Artificial Sequence
  Description of Artificial Sequence: Synthetic peptide
  Seed: LRMKWMMAMKYPITA
LRMKFMMGMWYPVTA

SEQ ID NO: 223724 - protein, 15 aa, Artificial Sequence
  Description of Artificial Sequence: Synthetic peptide
  Seed: LRMKWMMAMKYPITA
LRMKFMMGMYYPATA

SEQ ID NO: 223725 - protein, 15 aa, Artificial Sequence
  Description of Artificial Sequence: Synthetic peptide
  Seed: LRMKWMMAMKYPITA
LRMKFMMGMYYPITA

SEQ ID NO: 223726 - protein, 15 aa, Artificial Sequence
  Description of Artificial Sequence: Synthetic peptide
  Seed: LRMKWMMAMKYPITA
LRMKFMMGMYYPLTA

SEQ ID NO: 223727 - protein, 15 aa, Artificial Sequence
  Description of Artificial Sequence: Synthetic peptide
  Seed: LRMKWMMAMKYPITA
LRMKFMMGMYYPMTA

SEQ ID NO: 223728 - protein, 15 aa, Artificial Sequence
  Description of Artificial Sequence: Synthetic peptide
  Seed: LRMKWMMAMKYPITA
LRMKFMMGMYYPVTA

SEQ ID NO: 223729 - protein, 15 aa, Artificial Sequence
  Description of Artificial Sequence: Synthetic peptide
  Seed: LRMKWMMAMKYPITA
LRMKFMMHMAYPATA

SEQ ID NO: 223730 - protein, 15 aa, Artificial Sequence
  Description of Artificial Sequence: Synthetic peptide
  Seed: LRMKWMMAMKYPITA
LRMKFMMHMAYPCTA

SEQ ID NO: 223731 - protein, 15 aa, Artificial Sequence
  Description of Artificial Sequence: Synthetic peptide
  Seed: LRMKWMMAMKYPITA
LRMKFMMHMAYPDTA

SEQ ID NO: 223732 - protein, 15 aa, Artificial Sequence
  Description of Artificial Sequence: Synthetic peptide
  Seed: LRMKWMMAMKYPITA
LRMKFMMHMAYPETA

SEQ ID NO: 223733 - protein, 15 aa, Artificial Sequence
  Description of Artificial Sequence: Synthetic peptide
  Seed: LRMKWMMAMKYPITA
LRMKFMMHMAYPFTA

SEQ ID NO: 223734 - protein, 15 aa, Artificial Sequence
  Description of Artificial Sequence: Synthetic peptide
  Seed: LRMKWMMAMKYPITA
LRMKFMMHMAYPGTA

SEQ ID NO: 223735 - protein, 15 aa, Artificial Sequence
  Description of Artificial Sequence: Synthetic peptide
  Seed: LRMKWMMAMKYPITA
LRMKFMMHMAYPHTA

SEQ ID NO: 223736 - protein, 15 aa, Artificial Sequence
  Description of Artificial Sequence: Synthetic peptide
  Seed: LRMKWMMAMKYPITA
LRMKFMMHMAYPITA

SEQ ID NO: 223737 - protein, 15 aa, Artificial Sequence
  Description of Artificial Sequence: Synthetic peptide
  Seed: LRMKWMMAMKYPITA
LRMKFMMHMAYPKTA

SEQ ID NO: 223738 - protein, 15 aa, Artificial Sequence
  Description of Artificial Sequence: Synthetic peptide
  Seed: LRMKWMMAMKYPITA
LRMKFMMHMAYPLTA

SEQ ID NO: 223739 - protein, 15 aa, Artificial Sequence
  Description of Artificial Sequence: Synthetic peptide
  Seed: LRMKWMMAMKYPITA
LRMKFMMHMAYPMTA

SEQ ID NO: 223740 - protein, 15 aa, Artificial Sequence
  Description of Artificial Sequence: Synthetic peptide
  Seed: LRMKWMMAMKYPITA
LRMKFMMHMAYPNTA

SEQ ID NO: 223741 - protein, 15 aa, Artificial Sequence
  Description of Artificial Sequence: Synthetic peptide
  Seed: LRMKWMMAMKYPITA
LRMKFMMHMAYPPTA

SEQ ID NO: 223742 - protein, 15 aa, Artificial Sequence
  Description of Artificial Sequence: Synthetic peptide
  Seed: LRMKWMMAMKYPITA
LRMKFMMHMAYPQTA

SEQ ID NO: 223743 - protein, 15 aa, Artificial Sequence
  Description of Artificial Sequence: Synthetic peptide
  Seed: LRMKWMMAMKYPITA
LRMKFMMHMAYPRTA

SEQ ID NO: 223744 - protein, 15 aa, Artificial Sequence
  Description of Artificial Sequence: Synthetic peptide
  Seed: LRMKWMMAMKYPITA
LRMKFMMHMAYPSTA

SEQ ID NO: 223745 - protein, 15 aa, Artificial Sequence
  Description of Artificial Sequence: Synthetic peptide
  Seed: LRMKWMMAMKYPITA
LRMKFMMHMAYPTTA

SEQ ID NO: 223746 - protein, 15 aa, Artificial Sequence
  Description of Artificial Sequence: Synthetic peptide
  Seed: LRMKWMMAMKYPITA
LRMKFMMHMAYPVTA

SEQ ID NO: 223747 - protein, 15 aa, Artificial Sequence
  Description of Artificial Sequence: Synthetic peptide
  Seed: LRMKWMMAMKYPITA
LRMKFMMHMAYPWTA

SEQ ID NO: 223748 - protein, 15 aa, Artificial Sequence
  Description of Artificial Sequence: Synthetic peptide
  Seed: LRMKWMMAMKYPITA
LRMKFMMHMAYPYTA

SEQ ID NO: 223749 - protein, 15 aa, Artificial Sequence
  Description of Artificial Sequence: Synthetic peptide
  Seed: LRMKWMMAMKYPITA
LRMKFMMHMCYPATA

SEQ ID NO: 223750 - protein, 15 aa, Artificial Sequence
  Description of Artificial Sequence: Synthetic peptide
  Seed: LRMKWMMAMKYPITA
LRMKFMMHMCYPITA

SEQ ID NO: 223751 - protein, 15 aa, Artificial Sequence
  Description of Artificial Sequence: Synthetic peptide
  Seed: LRMKWMMAMKYPITA
LRMKFMMHMCYPLTA

SEQ ID NO: 223752 - protein, 15 aa, Artificial Sequence
  Description of Artificial Sequence: Synthetic peptide
  Seed: LRMKWMMAMKYPITA
LRMKFMMHMCYPMTA

SEQ ID NO: 223753 - protein, 15 aa, Artificial Sequence
  Description of Artificial Sequence: Synthetic peptide
  Seed: LRMKWMMAMKYPITA
LRMKFMMHMCYPVTA

SEQ ID NO: 223754 - protein, 15 aa, Artificial Sequence
  Description of Artificial Sequence: Synthetic peptide
  Seed: LRMKWMMAMKYPITA
LRMKFMMHMDYPATA

SEQ ID NO: 223755 - protein, 15 aa, Artificial Sequence
  Description of Artificial Sequence: Synthetic peptide
  Seed: LRMKWMMAMKYPITA
LRMKFMMHMDYPITA

SEQ ID NO: 223756 - protein, 15 aa, Artificial Sequence
  Description of Artificial Sequence: Synthetic peptide
  Seed: LRMKWMMAMKYPITA
LRMKFMMHMDYPLTA

SEQ ID NO: 223757 - protein, 15 aa, Artificial Sequence
  Description of Artificial Sequence: Synthetic peptide
  Seed: LRMKWMMAMKYPITA
LRMKFMMHMDYPVTA

SEQ ID NO: 223758 - protein, 15 aa, Artificial Sequence
  Description of Artificial Sequence: Synthetic peptide
  Seed: LRMKWMMAMKYPITA
LRMKFMMHMEYPATA

SEQ ID NO: 223759 - protein, 15 aa, Artificial Sequence
  Description of Artificial Sequence: Synthetic peptide
  Seed: LRMKWMMAMKYPITA
LRMKFMMHMEYPITA

SEQ ID NO: 223760 - protein, 15 aa, Artificial Sequence
  Description of Artificial Sequence: Synthetic peptide
  Seed: LRMKWMMAMKYPITA
LRMKFMMHMEYPLTA

SEQ ID NO: 223761 - protein, 15 aa, Artificial Sequence
  Description of Artificial Sequence: Synthetic peptide
  Seed: LRMKWMMAMKYPITA
LRMKFMMHMEYPVTA

SEQ ID NO: 223762 - protein, 15 aa, Artificial Sequence
  Description of Artificial Sequence: Synthetic peptide
  Seed: LRMKWMMAMKYPITA
LRMKFMMHMFYPATA

SEQ ID NO: 223763 - protein, 15 aa, Artificial Sequence
  Description of Artificial Sequence: Synthetic peptide
  Seed: LRMKWMMAMKYPITA
LRMKFMMHMFYPDTA

SEQ ID NO: 223764 - protein, 15 aa, Artificial Sequence
  Description of Artificial Sequence: Synthetic peptide
  Seed: LRMKWMMAMKYPITA
LRMKFMMHMFYPETA

SEQ ID NO: 223765 - protein, 15 aa, Artificial Sequence
  Description of Artificial Sequence: Synthetic peptide
  Seed: LRMKWMMAMKYPITA
LRMKFMMHMFYPFTA

SEQ ID NO: 223766 - protein, 15 aa, Artificial Sequence
  Description of Artificial Sequence: Synthetic peptide
  Seed: LRMKWMMAMKYPITA
LRMKFMMHMFYPITA

SEQ ID NO: 223767 - protein, 15 aa, Artificial Sequence
  Description of Artificial Sequence: Synthetic peptide
  Seed: LRMKWMMAMKYPITA
LRMKFMMHMFYPLTA

SEQ ID NO: 223768 - protein, 15 aa, Artificial Sequence
  Description of Artificial Sequence: Synthetic peptide
  Seed: LRMKWMMAMKYPITA
LRMKFMMHMFYPMTA

SEQ ID NO: 223769 - protein, 15 aa, Artificial Sequence
  Description of Artificial Sequence: Synthetic peptide
  Seed: LRMKWMMAMKYPITA
LRMKFMMHMFYPNTA

SEQ ID NO: 223770 - protein, 15 aa, Artificial Sequence
  Description of Artificial Sequence: Synthetic peptide
  Seed: LRMKWMMAMKYPITA
LRMKFMMHMFYPSTA

SEQ ID NO: 223771 - protein, 15 aa, Artificial Sequence
  Description of Artificial Sequence: Synthetic peptide
  Seed: LRMKWMMAMKYPITA
LRMKFMMHMFYPTTA

SEQ ID NO: 223772 - protein, 15 aa, Artificial Sequence
  Description of Artificial Sequence: Synthetic peptide
  Seed: LRMKWMMAMKYPITA
LRMKFMMHMFYPVTA

SEQ ID NO: 223773 - protein, 15 aa, Artificial Sequence
  Description of Artificial Sequence: Synthetic peptide
  Seed: LRMKWMMAMKYPITA
LRMKFMMHMFYPYTA

SEQ ID NO: 223774 - protein, 15 aa, Artificial Sequence
  Description of Artificial Sequence: Synthetic peptide
  Seed: LRMKWMMAMKYPITA
LRMKFMMHMGYPATA

SEQ ID NO: 223775 - protein, 15 aa, Artificial Sequence
  Description of Artificial Sequence: Synthetic peptide
  Seed: LRMKWMMAMKYPITA
LRMKFMMHMGYPCTA

SEQ ID NO: 223776 - protein, 15 aa, Artificial Sequence
  Description of Artificial Sequence: Synthetic peptide
  Seed: LRMKWMMAMKYPITA
LRMKFMMHMGYPFTA

SEQ ID NO: 223777 - protein, 15 aa, Artificial Sequence
  Description of Artificial Sequence: Synthetic peptide
  Seed: LRMKWMMAMKYPITA
LRMKFMMHMGYPGTA

SEQ ID NO: 223778 - protein, 15 aa, Artificial Sequence
  Description of Artificial Sequence: Synthetic peptide
  Seed: LRMKWMMAMKYPITA
LRMKFMMHMGYPHTA

SEQ ID NO: 223779 - protein, 15 aa, Artificial Sequence
  Description of Artificial Sequence: Synthetic peptide
  Seed: LRMKWMMAMKYPITA
LRMKFMMHMGYPITA

SEQ ID NO: 223780 - protein, 15 aa, Artificial Sequence
  Description of Artificial Sequence: Synthetic peptide
  Seed: LRMKWMMAMKYPITA
LRMKFMMHMGYPKTA

SEQ ID NO: 223781 - protein, 15 aa, Artificial Sequence
  Description of Artificial Sequence: Synthetic peptide
  Seed: LRMKWMMAMKYPITA
LRMKFMMHMGYPLTA

SEQ ID NO: 223782 - protein, 15 aa, Artificial Sequence
  Description of Artificial Sequence: Synthetic peptide
  Seed: LRMKWMMAMKYPITA
LRMKFMMHMGYPMTA

SEQ ID NO: 223783 - protein, 15 aa, Artificial Sequence
  Description of Artificial Sequence: Synthetic peptide
  Seed: LRMKWMMAMKYPITA
LRMKFMMHMGYPNTA

SEQ ID NO: 223784 - protein, 15 aa, Artificial Sequence
  Description of Artificial Sequence: Synthetic peptide
  Seed: LRMKWMMAMKYPITA
LRMKFMMHMGYPPTA

SEQ ID NO: 223785 - protein, 15 aa, Artificial Sequence
  Description of Artificial Sequence: Synthetic peptide
  Seed: LRMKWMMAMKYPITA
LRMKFMMHMGYPQTA

SEQ ID NO: 223786 - protein, 15 aa, Artificial Sequence
  Description of Artificial Sequence: Synthetic peptide
  Seed: LRMKWMMAMKYPITA
LRMKFMMHMGYPRTA

SEQ ID NO: 223787 - protein, 15 aa, Artificial Sequence
  Description of Artificial Sequence: Synthetic peptide
  Seed: LRMKWMMAMKYPITA
LRMKFMMHMGYPSTA

SEQ ID NO: 223788 - protein, 15 aa, Artificial Sequence
  Description of Artificial Sequence: Synthetic peptide
  Seed: LRMKWMMAMKYPITA
LRMKFMMHMGYPTTA

SEQ ID NO: 223789 - protein, 15 aa, Artificial Sequence
  Description of Artificial Sequence: Synthetic peptide
  Seed: LRMKWMMAMKYPITA
LRMKFMMHMGYPVTA

SEQ ID NO: 223790 - protein, 15 aa, Artificial Sequence
  Description of Artificial Sequence: Synthetic peptide
  Seed: LRMKWMMAMKYPITA
LRMKFMMHMGYPWTA

SEQ ID NO: 223791 - protein, 15 aa, Artificial Sequence
  Description of Artificial Sequence: Synthetic peptide
  Seed: LRMKWMMAMKYPITA
LRMKFMMHMGYPYTA

SEQ ID NO: 223792 - protein, 15 aa, Artificial Sequence
  Description of Artificial Sequence: Synthetic peptide
  Seed: LRMKWMMAMKYPITA
LRMKFMMHMHYPATA

SEQ ID NO: 223793 - protein, 15 aa, Artificial Sequence
  Description of Artificial Sequence: Synthetic peptide
  Seed: LRMKWMMAMKYPITA
LRMKFMMHMHYPFTA

SEQ ID NO: 223794 - protein, 15 aa, Artificial Sequence
  Description of Artificial Sequence: Synthetic peptide
  Seed: LRMKWMMAMKYPITA
LRMKFMMHMHYPHTA

SEQ ID NO: 223795 - protein, 15 aa, Artificial Sequence
  Description of Artificial Sequence: Synthetic peptide
  Seed: LRMKWMMAMKYPITA
LRMKFMMHMHYPITA

SEQ ID NO: 223796 - protein, 15 aa, Artificial Sequence
  Description of Artificial Sequence: Synthetic peptide
  Seed: LRMKWMMAMKYPITA
LRMKFMMHMHYPKTA

SEQ ID NO: 223797 - protein, 15 aa, Artificial Sequence
  Description of Artificial Sequence: Synthetic peptide
  Seed: LRMKWMMAMKYPITA
LRMKFMMHMHYPLTA

SEQ ID NO: 223798 - protein, 15 aa, Artificial Sequence
  Description of Artificial Sequence: Synthetic peptide
  Seed: LRMKWMMAMKYPITA
LRMKFMMHMHYPMTA

SEQ ID NO: 223799 - protein, 15 aa, Artificial Sequence
  Description of Artificial Sequence: Synthetic peptide
  Seed: LRMKWMMAMKYPITA
LRMKFMMHMHYPQTA

SEQ ID NO: 223800 - protein, 15 aa, Artificial Sequence
  Description of Artificial Sequence: Synthetic peptide
  Seed: LRMKWMMAMKYPITA
LRMKFMMHMHYPRTA

SEQ ID NO: 223801 - protein, 15 aa, Artificial Sequence
  Description of Artificial Sequence: Synthetic peptide
  Seed: LRMKWMMAMKYPITA
LRMKFMMHMHYPSTA

SEQ ID NO: 223802 - protein, 15 aa, Artificial Sequence
  Description of Artificial Sequence: Synthetic peptide
  Seed: LRMKWMMAMKYPITA
LRMKFMMHMHYPVTA

SEQ ID NO: 223803 - protein, 15 aa, Artificial Sequence
  Description of Artificial Sequence: Synthetic peptide
  Seed: LRMKWMMAMKYPITA
LRMKFMMHMHYPYTA

SEQ ID NO: 223804 - protein, 15 aa, Artificial Sequence
  Description of Artificial Sequence: Synthetic peptide
  Seed: LRMKWMMAMKYPITA
LRMKFMMHMIYPATA

SEQ ID NO: 223805 - protein, 15 aa, Artificial Sequence
  Description of Artificial Sequence: Synthetic peptide
  Seed: LRMKWMMAMKYPITA
LRMKFMMHMIYPCTA

SEQ ID NO: 223806 - protein, 15 aa, Artificial Sequence
  Description of Artificial Sequence: Synthetic peptide
  Seed: LRMKWMMAMKYPITA
LRMKFMMHMIYPDTA

SEQ ID NO: 223807 - protein, 15 aa, Artificial Sequence
  Description of Artificial Sequence: Synthetic peptide
  Seed: LRMKWMMAMKYPITA
LRMKFMMHMIYPETA

SEQ ID NO: 223808 - protein, 15 aa, Artificial Sequence
  Description of Artificial Sequence: Synthetic peptide
  Seed: LRMKWMMAMKYPITA
LRMKFMMHMIYPFTA

SEQ ID NO: 223809 - protein, 15 aa, Artificial Sequence
  Description of Artificial Sequence: Synthetic peptide
  Seed: LRMKWMMAMKYPITA
LRMKFMMHMIYPGTA

SEQ ID NO: 223810 - protein, 15 aa, Artificial Sequence
  Description of Artificial Sequence: Synthetic peptide
  Seed: LRMKWMMAMKYPITA
LRMKFMMHMIYPITA

SEQ ID NO: 223811 - protein, 15 aa, Artificial Sequence
  Description of Artificial Sequence: Synthetic peptide
  Seed: LRMKWMMAMKYPITA
LRMKFMMHMIYPKTA

SEQ ID NO: 223812 - protein, 15 aa, Artificial Sequence
  Description of Artificial Sequence: Synthetic peptide
  Seed: LRMKWMMAMKYPITA
LRMKFMMHMIYPLTA

SEQ ID NO: 223813 - protein, 15 aa, Artificial Sequence
  Description of Artificial Sequence: Synthetic peptide
  Seed: LRMKWMMAMKYPITA
LRMKFMMHMIYPMTA

SEQ ID NO: 223814 - protein, 15 aa, Artificial Sequence
  Description of Artificial Sequence: Synthetic peptide
  Seed: LRMKWMMAMKYPITA
LRMKFMMHMIYPNTA

SEQ ID NO: 223815 - protein, 15 aa, Artificial Sequence
  Description of Artificial Sequence: Synthetic peptide
  Seed: LRMKWMMAMKYPITA
LRMKFMMHMIYPRTA

SEQ ID NO: 223816 - protein, 15 aa, Artificial Sequence
  Description of Artificial Sequence: Synthetic peptide
  Seed: LRMKWMMAMKYPITA
LRMKFMMHMIYPSTA

SEQ ID NO: 223817 - protein, 15 aa, Artificial Sequence
  Description of Artificial Sequence: Synthetic peptide
  Seed: LRMKWMMAMKYPITA
LRMKFMMHMIYPTTA

SEQ ID NO: 223818 - protein, 15 aa, Artificial Sequence
  Description of Artificial Sequence: Synthetic peptide
  Seed: LRMKWMMAMKYPITA
LRMKFMMHMIYPVTA

SEQ ID NO: 223819 - protein, 15 aa, Artificial Sequence
  Description of Artificial Sequence: Synthetic peptide
  Seed: LRMKWMMAMKYPITA
LRMKFMMHMIYPYTA

SEQ ID NO: 223820 - protein, 15 aa, Artificial Sequence
  Description of Artificial Sequence: Synthetic peptide
  Seed: LRMKWMMAMKYPITA
LRMKFMMHMKYPATA

SEQ ID NO: 223821 - protein, 15 aa, Artificial Sequence
  Description of Artificial Sequence: Synthetic peptide
  Seed: LRMKWMMAMKYPITA
LRMKFMMHMKYPCTA

SEQ ID NO: 223822 - protein, 15 aa, Artificial Sequence
  Description of Artificial Sequence: Synthetic peptide
  Seed: LRMKWMMAMKYPITA
LRMKFMMHMKYPETA

SEQ ID NO: 223823 - protein, 15 aa, Artificial Sequence
  Description of Artificial Sequence: Synthetic peptide
  Seed: LRMKWMMAMKYPITA
LRMKFMMHMKYPFTA

SEQ ID NO: 223824 - protein, 15 aa, Artificial Sequence
  Description of Artificial Sequence: Synthetic peptide
  Seed: LRMKWMMAMKYPITA
LRMKFMMHMKYPGTA

SEQ ID NO: 223825 - protein, 15 aa, Artificial Sequence
  Description of Artificial Sequence: Synthetic peptide
  Seed: LRMKWMMAMKYPITA
LRMKFMMHMKYPHTA

SEQ ID NO: 223826 - protein, 15 aa, Artificial Sequence
  Description of Artificial Sequence: Synthetic peptide
  Seed: LRMKWMMAMKYPITA
LRMKFMMHMKYPITA

SEQ ID NO: 223827 - protein, 15 aa, Artificial Sequence
  Description of Artificial Sequence: Synthetic peptide
  Seed: LRMKWMMAMKYPITA
LRMKFMMHMKYPKTA

SEQ ID NO: 223828 - protein, 15 aa, Artificial Sequence
  Description of Artificial Sequence: Synthetic peptide
  Seed: LRMKWMMAMKYPITA
LRMKFMMHMKYPLTA

SEQ ID NO: 223829 - protein, 15 aa, Artificial Sequence
  Description of Artificial Sequence: Synthetic peptide
  Seed: LRMKWMMAMKYPITA
LRMKFMMHMKYPMTA

SEQ ID NO: 223830 - protein, 15 aa, Artificial Sequence
  Description of Artificial Sequence: Synthetic peptide
  Seed: LRMKWMMAMKYPITA
LRMKFMMHMKYPNTA

SEQ ID NO: 223831 - protein, 15 aa, Artificial Sequence
  Description of Artificial Sequence: Synthetic peptide
  Seed: LRMKWMMAMKYPITA
LRMKFMMHMKYPPTA

SEQ ID NO: 223832 - protein, 15 aa, Artificial Sequence
  Description of Artificial Sequence: Synthetic peptide
  Seed: LRMKWMMAMKYPITA
LRMKFMMHMKYPQTA

SEQ ID NO: 223833 - protein, 15 aa, Artificial Sequence
  Description of Artificial Sequence: Synthetic peptide
  Seed: LRMKWMMAMKYPITA
LRMKFMMHMKYPRTA

SEQ ID NO: 223834 - protein, 15 aa, Artificial Sequence
  Description of Artificial Sequence: Synthetic peptide
  Seed: LRMKWMMAMKYPITA
LRMKFMMHMKYPSTA

SEQ ID NO: 223835 - protein, 15 aa, Artificial Sequence
  Description of Artificial Sequence: Synthetic peptide
  Seed: LRMKWMMAMKYPITA
LRMKFMMHMKYPTTA

SEQ ID NO: 223836 - protein, 15 aa, Artificial Sequence
  Description of Artificial Sequence: Synthetic peptide
  Seed: LRMKWMMAMKYPITA
LRMKFMMHMKYPVTA

SEQ ID NO: 223837 - protein, 15 aa, Artificial Sequence
  Description of Artificial Sequence: Synthetic peptide
  Seed: LRMKWMMAMKYPITA
LRMKFMMHMKYPWTA

SEQ ID NO: 223838 - protein, 15 aa, Artificial Sequence
  Description of Artificial Sequence: Synthetic peptide
  Seed: LRMKWMMAMKYPITA
LRMKFMMHMKYPYTA

SEQ ID NO: 223839 - protein, 15 aa, Artificial Sequence
  Description of Artificial Sequence: Synthetic peptide
  Seed: LRMKWMMAMKYPITA
LRMKFMMHMLYPFTA

SEQ ID NO: 223840 - protein, 15 aa, Artificial Sequence
  Description of Artificial Sequence: Synthetic peptide
  Seed: LRMKWMMAMKYPITA
LRMKFMMHMLYPITA

SEQ ID NO: 223841 - protein, 15 aa, Artificial Sequence
  Description of Artificial Sequence: Synthetic peptide
  Seed: LRMKWMMAMKYPITA
LRMKFMMHMLYPLTA

SEQ ID NO: 223842 - protein, 15 aa, Artificial Sequence
  Description of Artificial Sequence: Synthetic peptide
  Seed: LRMKWMMAMKYPITA
LRMKFMMHMLYPRTA

SEQ ID NO: 223843 - protein, 15 aa, Artificial Sequence
  Description of Artificial Sequence: Synthetic peptide
  Seed: LRMKWMMAMKYPITA
LRMKFMMHMLYPVTA

SEQ ID NO: 223844 - protein, 15 aa, Artificial Sequence
  Description of Artificial Sequence: Synthetic peptide
  Seed: LRMKWMMAMKYPITA
LRMKFMMHMLYPYTA

SEQ ID NO: 223845 - protein, 15 aa, Artificial Sequence
  Description of Artificial Sequence: Synthetic peptide
  Seed: LRMKWMMAMKYPITA
LRMKFMMHMMYPITA

SEQ ID NO: 223846 - protein, 15 aa, Artificial Sequence
  Description of Artificial Sequence: Synthetic peptide
  Seed: LRMKWMMAMKYPITA
LRMKFMMHMMYPKTA

SEQ ID NO: 223847 - protein, 15 aa, Artificial Sequence
  Description of Artificial Sequence: Synthetic peptide
  Seed: LRMKWMMAMKYPITA
LRMKFMMHMMYPLTA

SEQ ID NO: 223848 - protein, 15 aa, Artificial Sequence
  Description of Artificial Sequence: Synthetic peptide
  Seed: LRMKWMMAMKYPITA
LRMKFMMHMMYPMTA

SEQ ID NO: 223849 - protein, 15 aa, Artificial Sequence
  Description of Artificial Sequence: Synthetic peptide
  Seed: LRMKWMMAMKYPITA
LRMKFMMHMMYPRTA

SEQ ID NO: 223850 - protein, 15 aa, Artificial Sequence
  Description of Artificial Sequence: Synthetic peptide
  Seed: LRMKWMMAMKYPITA
LRMKFMMHMMYPVTA

SEQ ID NO: 223851 - protein, 15 aa, Artificial Sequence
  Description of Artificial Sequence: Synthetic peptide
  Seed: LRMKWMMAMKYPITA
LRMKFMMHMMYPYTA

SEQ ID NO: 223852 - protein, 15 aa, Artificial Sequence
  Description of Artificial Sequence: Synthetic peptide
  Seed: LRMKWMMAMKYPITA
LRMKFMMHMNYPATA

SEQ ID NO: 223853 - protein, 15 aa, Artificial Sequence
  Description of Artificial Sequence: Synthetic peptide
  Seed: LRMKWMMAMKYPITA
LRMKFMMHMNYPCTA

SEQ ID NO: 223854 - protein, 15 aa, Artificial Sequence
  Description of Artificial Sequence: Synthetic peptide
  Seed: LRMKWMMAMKYPITA
LRMKFMMHMNYPDTA

SEQ ID NO: 223855 - protein, 15 aa, Artificial Sequence
  Description of Artificial Sequence: Synthetic peptide
  Seed: LRMKWMMAMKYPITA
LRMKFMMHMNYPFTA

SEQ ID NO: 223856 - protein, 15 aa, Artificial Sequence
  Description of Artificial Sequence: Synthetic peptide
  Seed: LRMKWMMAMKYPITA
LRMKFMMHMNYPGTA

SEQ ID NO: 223857 - protein, 15 aa, Artificial Sequence
  Description of Artificial Sequence: Synthetic peptide
  Seed: LRMKWMMAMKYPITA
LRMKFMMHMNYPHTA

SEQ ID NO: 223858 - protein, 15 aa, Artificial Sequence
  Description of Artificial Sequence: Synthetic peptide
  Seed: LRMKWMMAMKYPITA
LRMKFMMHMNYPITA

SEQ ID NO: 223859 - protein, 15 aa, Artificial Sequence
  Description of Artificial Sequence: Synthetic peptide
  Seed: LRMKWMMAMKYPITA
LRMKFMMHMNYPKTA

SEQ ID NO: 223860 - protein, 15 aa, Artificial Sequence
  Description of Artificial Sequence: Synthetic peptide
  Seed: LRMKWMMAMKYPITA
LRMKFMMHMNYPLTA

SEQ ID NO: 223861 - protein, 15 aa, Artificial Sequence
  Description of Artificial Sequence: Synthetic peptide
  Seed: LRMKWMMAMKYPITA
LRMKFMMHMNYPMTA

SEQ ID NO: 223862 - protein, 15 aa, Artificial Sequence
  Description of Artificial Sequence: Synthetic peptide
  Seed: LRMKWMMAMKYPITA
LRMKFMMHMNYPNTA

SEQ ID NO: 223863 - protein, 15 aa, Artificial Sequence
  Description of Artificial Sequence: Synthetic peptide
  Seed: LRMKWMMAMKYPITA
LRMKFMMHMNYPRTA

SEQ ID NO: 223864 - protein, 15 aa, Artificial Sequence
  Description of Artificial Sequence: Synthetic peptide
  Seed: LRMKWMMAMKYPITA
LRMKFMMHMNYPSTA

SEQ ID NO: 223865 - protein, 15 aa, Artificial Sequence
  Description of Artificial Sequence: Synthetic peptide
  Seed: LRMKWMMAMKYPITA
LRMKFMMHMNYPTTA

SEQ ID NO: 223866 - protein, 15 aa, Artificial Sequence
  Description of Artificial Sequence: Synthetic peptide
  Seed: LRMKWMMAMKYPITA
LRMKFMMHMNYPVTA

SEQ ID NO: 223867 - protein, 15 aa, Artificial Sequence
  Description of Artificial Sequence: Synthetic peptide
  Seed: LRMKWMMAMKYPITA
LRMKFMMHMNYPYTA

SEQ ID NO: 223868 - protein, 15 aa, Artificial Sequence
  Description of Artificial Sequence: Synthetic peptide
  Seed: LRMKWMMAMKYPITA
LRMKFMMHMPYPATA

SEQ ID NO: 223869 - protein, 15 aa, Artificial Sequence
  Description of Artificial Sequence: Synthetic peptide
  Seed: LRMKWMMAMKYPITA
LRMKFMMHMPYPCTA

SEQ ID NO: 223870 - protein, 15 aa, Artificial Sequence
  Description of Artificial Sequence: Synthetic peptide
  Seed: LRMKWMMAMKYPITA
LRMKFMMHMPYPDTA

SEQ ID NO: 223871 - protein, 15 aa, Artificial Sequence
  Description of Artificial Sequence: Synthetic peptide
  Seed: LRMKWMMAMKYPITA
LRMKFMMHMPYPETA

SEQ ID NO: 223872 - protein, 15 aa, Artificial Sequence
  Description of Artificial Sequence: Synthetic peptide
  Seed: LRMKWMMAMKYPITA
LRMKFMMHMPYPFTA

SEQ ID NO: 223873 - protein, 15 aa, Artificial Sequence
  Description of Artificial Sequence: Synthetic peptide
  Seed: LRMKWMMAMKYPITA
LRMKFMMHMPYPGTA

SEQ ID NO: 223874 - protein, 15 aa, Artificial Sequence
  Description of Artificial Sequence: Synthetic peptide
  Seed: LRMKWMMAMKYPITA
LRMKFMMHMPYPHTA

SEQ ID NO: 223875 - protein, 15 aa, Artificial Sequence
  Description of Artificial Sequence: Synthetic peptide
  Seed: LRMKWMMAMKYPITA
LRMKFMMHMPYPITA

SEQ ID NO: 223876 - protein, 15 aa, Artificial Sequence
  Description of Artificial Sequence: Synthetic peptide
  Seed: LRMKWMMAMKYPITA
LRMKFMMHMPYPKTA

SEQ ID NO: 223877 - protein, 15 aa, Artificial Sequence
  Description of Artificial Sequence: Synthetic peptide
  Seed: LRMKWMMAMKYPITA
LRMKFMMHMPYPLTA

SEQ ID NO: 223878 - protein, 15 aa, Artificial Sequence
  Description of Artificial Sequence: Synthetic peptide
  Seed: LRMKWMMAMKYPITA
LRMKFMMHMPYPMTA

SEQ ID NO: 223879 - protein, 15 aa, Artificial Sequence
  Description of Artificial Sequence: Synthetic peptide
  Seed: LRMKWMMAMKYPITA
LRMKFMMHMPYPNTA

SEQ ID NO: 223880 - protein, 15 aa, Artificial Sequence
  Description of Artificial Sequence: Synthetic peptide
  Seed: LRMKWMMAMKYPITA
LRMKFMMHMPYPPTA

SEQ ID NO: 223881 - protein, 15 aa, Artificial Sequence
  Description of Artificial Sequence: Synthetic peptide
  Seed: LRMKWMMAMKYPITA
LRMKFMMHMPYPQTA

SEQ ID NO: 223882 - protein, 15 aa, Artificial Sequence
  Description of Artificial Sequence: Synthetic peptide
  Seed: LRMKWMMAMKYPITA
LRMKFMMHMPYPRTA

SEQ ID NO: 223883 - protein, 15 aa, Artificial Sequence
  Description of Artificial Sequence: Synthetic peptide
  Seed: LRMKWMMAMKYPITA
LRMKFMMHMPYPSTA

SEQ ID NO: 223884 - protein, 15 aa, Artificial Sequence
  Description of Artificial Sequence: Synthetic peptide
  Seed: LRMKWMMAMKYPITA
LRMKFMMHMPYPTTA

SEQ ID NO: 223885 - protein, 15 aa, Artificial Sequence
  Description of Artificial Sequence: Synthetic peptide
  Seed: LRMKWMMAMKYPITA
LRMKFMMHMPYPVTA

SEQ ID NO: 223886 - protein, 15 aa, Artificial Sequence
  Description of Artificial Sequence: Synthetic peptide
  Seed: LRMKWMMAMKYPITA
LRMKFMMHMPYPWTA

SEQ ID NO: 223887 - protein, 15 aa, Artificial Sequence
  Description of Artificial Sequence: Synthetic peptide
  Seed: LRMKWMMAMKYPITA
LRMKFMMHMPYPYTA

SEQ ID NO: 223888 - protein, 15 aa, Artificial Sequence
  Description of Artificial Sequence: Synthetic peptide
  Seed: LRMKWMMAMKYPITA
LRMKFMMHMQYPATA

SEQ ID NO: 223889 - protein, 15 aa, Artificial Sequence
  Description of Artificial Sequence: Synthetic peptide
  Seed: LRMKWMMAMKYPITA
LRMKFMMHMQYPFTA

SEQ ID NO: 223890 - protein, 15 aa, Artificial Sequence
  Description of Artificial Sequence: Synthetic peptide
  Seed: LRMKWMMAMKYPITA
LRMKFMMHMQYPITA

SEQ ID NO: 223891 - protein, 15 aa, Artificial Sequence
  Description of Artificial Sequence: Synthetic peptide
  Seed: LRMKWMMAMKYPITA
LRMKFMMHMQYPLTA

SEQ ID NO: 223892 - protein, 15 aa, Artificial Sequence
  Description of Artificial Sequence: Synthetic peptide
  Seed: LRMKWMMAMKYPITA
LRMKFMMHMQYPMTA

SEQ ID NO: 223893 - protein, 15 aa, Artificial Sequence
  Description of Artificial Sequence: Synthetic peptide
  Seed: LRMKWMMAMKYPITA
LRMKFMMHMQYPRTA

SEQ ID NO: 223894 - protein, 15 aa, Artificial Sequence
  Description of Artificial Sequence: Synthetic peptide
  Seed: LRMKWMMAMKYPITA
LRMKFMMHMQYPVTA

SEQ ID NO: 223895 - protein, 15 aa, Artificial Sequence
  Description of Artificial Sequence: Synthetic peptide
  Seed: LRMKWMMAMKYPITA
LRMKFMMHMQYPYTA

SEQ ID NO: 223896 - protein, 15 aa, Artificial Sequence
  Description of Artificial Sequence: Synthetic peptide
  Seed: LRMKWMMAMKYPITA
LRMKFMMHMRYPATA

SEQ ID NO: 223897 - protein, 15 aa, Artificial Sequence
  Description of Artificial Sequence: Synthetic peptide
  Seed: LRMKWMMAMKYPITA
LRMKFMMHMRYPCTA

SEQ ID NO: 223898 - protein, 15 aa, Artificial Sequence
  Description of Artificial Sequence: Synthetic peptide
  Seed: LRMKWMMAMKYPITA
LRMKFMMHMRYPDTA

SEQ ID NO: 223899 - protein, 15 aa, Artificial Sequence
  Description of Artificial Sequence: Synthetic peptide
  Seed: LRMKWMMAMKYPITA
LRMKFMMHMRYPETA

SEQ ID NO: 223900 - protein, 15 aa, Artificial Sequence
  Description of Artificial Sequence: Synthetic peptide
  Seed: LRMKWMMAMKYPITA
LRMKFMMHMRYPFTA

SEQ ID NO: 223901 - protein, 15 aa, Artificial Sequence
  Description of Artificial Sequence: Synthetic peptide
  Seed: LRMKWMMAMKYPITA
LRMKFMMHMRYPGTA

SEQ ID NO: 223902 - protein, 15 aa, Artificial Sequence
  Description of Artificial Sequence: Synthetic peptide
  Seed: LRMKWMMAMKYPITA
LRMKFMMHMRYPHTA

SEQ ID NO: 223903 - protein, 15 aa, Artificial Sequence
  Description of Artificial Sequence: Synthetic peptide
  Seed: LRMKWMMAMKYPITA
LRMKFMMHMRYPITA

SEQ ID NO: 223904 - protein, 15 aa, Artificial Sequence
  Description of Artificial Sequence: Synthetic peptide
  Seed: LRMKWMMAMKYPITA
LRMKFMMHMRYPKTA

SEQ ID NO: 223905 - protein, 15 aa, Artificial Sequence
  Description of Artificial Sequence: Synthetic peptide
  Seed: LRMKWMMAMKYPITA
LRMKFMMHMRYPLTA

SEQ ID NO: 223906 - protein, 15 aa, Artificial Sequence
  Description of Artificial Sequence: Synthetic peptide
  Seed: LRMKWMMAMKYPITA
LRMKFMMHMRYPMTA

SEQ ID NO: 223907 - protein, 15 aa, Artificial Sequence
  Description of Artificial Sequence: Synthetic peptide
  Seed: LRMKWMMAMKYPITA
LRMKFMMHMRYPNTA

SEQ ID NO: 223908 - protein, 15 aa, Artificial Sequence
  Description of Artificial Sequence: Synthetic peptide
  Seed: LRMKWMMAMKYPITA
LRMKFMMHMRYPPTA

SEQ ID NO: 223909 - protein, 15 aa, Artificial Sequence
  Description of Artificial Sequence: Synthetic peptide
  Seed: LRMKWMMAMKYPITA
LRMKFMMHMRYPQTA

SEQ ID NO: 223910 - protein, 15 aa, Artificial Sequence
  Description of Artificial Sequence: Synthetic peptide
  Seed: LRMKWMMAMKYPITA
LRMKFMMHMRYPRTA

SEQ ID NO: 223911 - protein, 15 aa, Artificial Sequence
  Description of Artificial Sequence: Synthetic peptide
  Seed: LRMKWMMAMKYPITA
LRMKFMMHMRYPSTA

SEQ ID NO: 223912 - protein, 15 aa, Artificial Sequence
  Description of Artificial Sequence: Synthetic peptide
  Seed: LRMKWMMAMKYPITA
LRMKFMMHMRYPTTA

SEQ ID NO: 223913 - protein, 15 aa, Artificial Sequence
  Description of Artificial Sequence: Synthetic peptide
  Seed: LRMKWMMAMKYPITA
LRMKFMMHMRYPVTA

SEQ ID NO: 223914 - protein, 15 aa, Artificial Sequence
  Description of Artificial Sequence: Synthetic peptide
  Seed: LRMKWMMAMKYPITA
LRMKFMMHMRYPWTA

SEQ ID NO: 223915 - protein, 15 aa, Artificial Sequence
  Description of Artificial Sequence: Synthetic peptide
  Seed: LRMKWMMAMKYPITA
LRMKFMMHMRYPYTA

SEQ ID NO: 223916 - protein, 15 aa, Artificial Sequence
  Description of Artificial Sequence: Synthetic peptide
  Seed: LRMKWMMAMKYPITA
LRMKFMMHMSYPATA

SEQ ID NO: 223917 - protein, 15 aa, Artificial Sequence
  Description of Artificial Sequence: Synthetic peptide
  Seed: LRMKWMMAMKYPITA
LRMKFMMHMSYPCTA

SEQ ID NO: 223918 - protein, 15 aa, Artificial Sequence
  Description of Artificial Sequence: Synthetic peptide
  Seed: LRMKWMMAMKYPITA
LRMKFMMHMSYPDTA

SEQ ID NO: 223919 - protein, 15 aa, Artificial Sequence
  Description of Artificial Sequence: Synthetic peptide
  Seed: LRMKWMMAMKYPITA
LRMKFMMHMSYPETA

SEQ ID NO: 223920 - protein, 15 aa, Artificial Sequence
  Description of Artificial Sequence: Synthetic peptide
  Seed: LRMKWMMAMKYPITA
LRMKFMMHMSYPFTA

SEQ ID NO: 223921 - protein, 15 aa, Artificial Sequence
  Description of Artificial Sequence: Synthetic peptide
  Seed: LRMKWMMAMKYPITA
LRMKFMMHMSYPGTA

SEQ ID NO: 223922 - protein, 15 aa, Artificial Sequence
  Description of Artificial Sequence: Synthetic peptide
  Seed: LRMKWMMAMKYPITA
LRMKFMMHMSYPHTA

SEQ ID NO: 223923 - protein, 15 aa, Artificial Sequence
  Description of Artificial Sequence: Synthetic peptide
  Seed: LRMKWMMAMKYPITA
LRMKFMMHMSYPITA

SEQ ID NO: 223924 - protein, 15 aa, Artificial Sequence
  Description of Artificial Sequence: Synthetic peptide
  Seed: LRMKWMMAMKYPITA
LRMKFMMHMSYPKTA

SEQ ID NO: 223925 - protein, 15 aa, Artificial Sequence
  Description of Artificial Sequence: Synthetic peptide
  Seed: LRMKWMMAMKYPITA
LRMKFMMHMSYPLTA

SEQ ID NO: 223926 - protein, 15 aa, Artificial Sequence
  Description of Artificial Sequence: Synthetic peptide
  Seed: LRMKWMMAMKYPITA
LRMKFMMHMSYPMTA

SEQ ID NO: 223927 - protein, 15 aa, Artificial Sequence
  Description of Artificial Sequence: Synthetic peptide
  Seed: LRMKWMMAMKYPITA
LRMKFMMHMSYPNTA

SEQ ID NO: 223928 - protein, 15 aa, Artificial Sequence
  Description of Artificial Sequence: Synthetic peptide
  Seed: LRMKWMMAMKYPITA
LRMKFMMHMSYPPTA

SEQ ID NO: 223929 - protein, 15 aa, Artificial Sequence
  Description of Artificial Sequence: Synthetic peptide
  Seed: LRMKWMMAMKYPITA
LRMKFMMHMSYPQTA

SEQ ID NO: 223930 - protein, 15 aa, Artificial Sequence
  Description of Artificial Sequence: Synthetic peptide
  Seed: LRMKWMMAMKYPITA
LRMKFMMHMSYPRTA

SEQ ID NO: 223931 - protein, 15 aa, Artificial Sequence
  Description of Artificial Sequence: Synthetic peptide
  Seed: LRMKWMMAMKYPITA
LRMKFMMHMSYPSTA

SEQ ID NO: 223932 - protein, 15 aa, Artificial Sequence
  Description of Artificial Sequence: Synthetic peptide
  Seed: LRMKWMMAMKYPITA
LRMKFMMHMSYPTTA

SEQ ID NO: 223933 - protein, 15 aa, Artificial Sequence
  Description of Artificial Sequence: Synthetic peptide
  Seed: LRMKWMMAMKYPITA
LRMKFMMHMSYPVTA

SEQ ID NO: 223934 - protein, 15 aa, Artificial Sequence
  Description of Artificial Sequence: Synthetic peptide
  Seed: LRMKWMMAMKYPITA
LRMKFMMHMSYPWTA

SEQ ID NO: 223935 - protein, 15 aa, Artificial Sequence
  Description of Artificial Sequence: Synthetic peptide
  Seed: LRMKWMMAMKYPITA
LRMKFMMHMSYPYTA

SEQ ID NO: 223936 - protein, 15 aa, Artificial Sequence
  Description of Artificial Sequence: Synthetic peptide
  Seed: LRMKWMMAMKYPITA
LRMKFMMHMTYPATA

SEQ ID NO: 223937 - protein, 15 aa, Artificial Sequence
  Description of Artificial Sequence: Synthetic peptide
  Seed: LRMKWMMAMKYPITA
LRMKFMMHMTYPCTA

SEQ ID NO: 223938 - protein, 15 aa, Artificial Sequence
  Description of Artificial Sequence: Synthetic peptide
  Seed: LRMKWMMAMKYPITA
LRMKFMMHMTYPDTA

SEQ ID NO: 223939 - protein, 15 aa, Artificial Sequence
  Description of Artificial Sequence: Synthetic peptide
  Seed: LRMKWMMAMKYPITA
LRMKFMMHMTYPETA

SEQ ID NO: 223940 - protein, 15 aa, Artificial Sequence
  Description of Artificial Sequence: Synthetic peptide
  Seed: LRMKWMMAMKYPITA
LRMKFMMHMTYPFTA

SEQ ID NO: 223941 - protein, 15 aa, Artificial Sequence
  Description of Artificial Sequence: Synthetic peptide
  Seed: LRMKWMMAMKYPITA
LRMKFMMHMTYPGTA

SEQ ID NO: 223942 - protein, 15 aa, Artificial Sequence
  Description of Artificial Sequence: Synthetic peptide
  Seed: LRMKWMMAMKYPITA
LRMKFMMHMTYPHTA

SEQ ID NO: 223943 - protein, 15 aa, Artificial Sequence
  Description of Artificial Sequence: Synthetic peptide
  Seed: LRMKWMMAMKYPITA
LRMKFMMHMTYPITA

SEQ ID NO: 223944 - protein, 15 aa, Artificial Sequence
  Description of Artificial Sequence: Synthetic peptide
  Seed: LRMKWMMAMKYPITA
LRMKFMMHMTYPKTA

SEQ ID NO: 223945 - protein, 15 aa, Artificial Sequence
  Description of Artificial Sequence: Synthetic peptide
  Seed: LRMKWMMAMKYPITA
LRMKFMMHMTYPLTA

SEQ ID NO: 223946 - protein, 15 aa, Artificial Sequence
  Description of Artificial Sequence: Synthetic peptide
  Seed: LRMKWMMAMKYPITA
LRMKFMMHMTYPMTA

SEQ ID NO: 223947 - protein, 15 aa, Artificial Sequence
  Description of Artificial Sequence: Synthetic peptide
  Seed: LRMKWMMAMKYPITA
LRMKFMMHMTYPNTA

SEQ ID NO: 223948 - protein, 15 aa, Artificial Sequence
  Description of Artificial Sequence: Synthetic peptide
  Seed: LRMKWMMAMKYPITA
LRMKFMMHMTYPPTA

SEQ ID NO: 223949 - protein, 15 aa, Artificial Sequence
  Description of Artificial Sequence: Synthetic peptide
  Seed: LRMKWMMAMKYPITA
LRMKFMMHMTYPQTA

SEQ ID NO: 223950 - protein, 15 aa, Artificial Sequence
  Description of Artificial Sequence: Synthetic peptide
  Seed: LRMKWMMAMKYPITA
LRMKFMMHMTYPRTA

SEQ ID NO: 223951 - protein, 15 aa, Artificial Sequence
  Description of Artificial Sequence: Synthetic peptide
  Seed: LRMKWMMAMKYPITA
LRMKFMMHMTYPSTA

SEQ ID NO: 223952 - protein, 15 aa, Artificial Sequence
  Description of Artificial Sequence: Synthetic peptide
  Seed: LRMKWMMAMKYPITA
LRMKFMMHMTYPTTA

SEQ ID NO: 223953 - protein, 15 aa, Artificial Sequence
  Description of Artificial Sequence: Synthetic peptide
  Seed: LRMKWMMAMKYPITA
LRMKFMMHMTYPVTA

SEQ ID NO: 223954 - protein, 15 aa, Artificial Sequence
  Description of Artificial Sequence: Synthetic peptide
  Seed: LRMKWMMAMKYPITA
LRMKFMMHMTYPWTA

SEQ ID NO: 223955 - protein, 15 aa, Artificial Sequence
  Description of Artificial Sequence: Synthetic peptide
  Seed: LRMKWMMAMKYPITA
LRMKFMMHMTYPYTA

SEQ ID NO: 223956 - protein, 15 aa, Artificial Sequence
  Description of Artificial Sequence: Synthetic peptide
  Seed: LRMKWMMAMKYPITA
LRMKFMMHMVYPATA

SEQ ID NO: 223957 - protein, 15 aa, Artificial Sequence
  Description of Artificial Sequence: Synthetic peptide
  Seed: LRMKWMMAMKYPITA
LRMKFMMHMVYPCTA

SEQ ID NO: 223958 - protein, 15 aa, Artificial Sequence
  Description of Artificial Sequence: Synthetic peptide
  Seed: LRMKWMMAMKYPITA
LRMKFMMHMVYPDTA

SEQ ID NO: 223959 - protein, 15 aa, Artificial Sequence
  Description of Artificial Sequence: Synthetic peptide
  Seed: LRMKWMMAMKYPITA
LRMKFMMHMVYPETA

SEQ ID NO: 223960 - protein, 15 aa, Artificial Sequence
  Description of Artificial Sequence: Synthetic peptide
  Seed: LRMKWMMAMKYPITA
LRMKFMMHMVYPFTA

SEQ ID NO: 223961 - protein, 15 aa, Artificial Sequence
  Description of Artificial Sequence: Synthetic peptide
  Seed: LRMKWMMAMKYPITA
LRMKFMMHMVYPGTA

SEQ ID NO: 223962 - protein, 15 aa, Artificial Sequence
  Description of Artificial Sequence: Synthetic peptide
  Seed: LRMKWMMAMKYPITA
LRMKFMMHMVYPHTA

SEQ ID NO: 223963 - protein, 15 aa, Artificial Sequence
  Description of Artificial Sequence: Synthetic peptide
  Seed: LRMKWMMAMKYPITA
LRMKFMMHMVYPITA

SEQ ID NO: 223964 - protein, 15 aa, Artificial Sequence
  Description of Artificial Sequence: Synthetic peptide
  Seed: LRMKWMMAMKYPITA
LRMKFMMHMVYPKTA

SEQ ID NO: 223965 - protein, 15 aa, Artificial Sequence
  Description of Artificial Sequence: Synthetic peptide
  Seed: LRMKWMMAMKYPITA
LRMKFMMHMVYPLTA

SEQ ID NO: 223966 - protein, 15 aa, Artificial Sequence
  Description of Artificial Sequence: Synthetic peptide
  Seed: LRMKWMMAMKYPITA
LRMKFMMHMVYPMTA

SEQ ID NO: 223967 - protein, 15 aa, Artificial Sequence
  Description of Artificial Sequence: Synthetic peptide
  Seed: LRMKWMMAMKYPITA
LRMKFMMHMVYPNTA

SEQ ID NO: 223968 - protein, 15 aa, Artificial Sequence
  Description of Artificial Sequence: Synthetic peptide
  Seed: LRMKWMMAMKYPITA
LRMKFMMHMVYPPTA

SEQ ID NO: 223969 - protein, 15 aa, Artificial Sequence
  Description of Artificial Sequence: Synthetic peptide
  Seed: LRMKWMMAMKYPITA
LRMKFMMHMVYPQTA

SEQ ID NO: 223970 - protein, 15 aa, Artificial Sequence
  Description of Artificial Sequence: Synthetic peptide
  Seed: LRMKWMMAMKYPITA
LRMKFMMHMVYPRTA

SEQ ID NO: 223971 - protein, 15 aa, Artificial Sequence
  Description of Artificial Sequence: Synthetic peptide
  Seed: LRMKWMMAMKYPITA
LRMKFMMHMVYPSTA

SEQ ID NO: 223972 - protein, 15 aa, Artificial Sequence
  Description of Artificial Sequence: Synthetic peptide
  Seed: LRMKWMMAMKYPITA
LRMKFMMHMVYPTTA

SEQ ID NO: 223973 - protein, 15 aa, Artificial Sequence
  Description of Artificial Sequence: Synthetic peptide
  Seed: LRMKWMMAMKYPITA
LRMKFMMHMVYPVTA

SEQ ID NO: 223974 - protein, 15 aa, Artificial Sequence
  Description of Artificial Sequence: Synthetic peptide
  Seed: LRMKWMMAMKYPITA
LRMKFMMHMVYPYTA

SEQ ID NO: 223975 - protein, 15 aa, Artificial Sequence
  Description of Artificial Sequence: Synthetic peptide
  Seed: LRMKWMMAMKYPITA
LRMKFMMHMWYPFTA

SEQ ID NO: 223976 - protein, 15 aa, Artificial Sequence
  Description of Artificial Sequence: Synthetic peptide
  Seed: LRMKWMMAMKYPITA
LRMKFMMHMWYPITA

SEQ ID NO: 223977 - protein, 15 aa, Artificial Sequence
  Description of Artificial Sequence: Synthetic peptide
  Seed: LRMKWMMAMKYPITA
LRMKFMMHMWYPLTA

SEQ ID NO: 223978 - protein, 15 aa, Artificial Sequence
  Description of Artificial Sequence: Synthetic peptide
  Seed: LRMKWMMAMKYPITA
LRMKFMMHMWYPVTA

SEQ ID NO: 223979 - protein, 15 aa, Artificial Sequence
  Description of Artificial Sequence: Synthetic peptide
  Seed: LRMKWMMAMKYPITA
LRMKFMMHMYYPFTA

SEQ ID NO: 223980 - protein, 15 aa, Artificial Sequence
  Description of Artificial Sequence: Synthetic peptide
  Seed: LRMKWMMAMKYPITA
LRMKFMMHMYYPITA

SEQ ID NO: 223981 - protein, 15 aa, Artificial Sequence
  Description of Artificial Sequence: Synthetic peptide
  Seed: LRMKWMMAMKYPITA
LRMKFMMHMYYPLTA

SEQ ID NO: 223982 - protein, 15 aa, Artificial Sequence
  Description of Artificial Sequence: Synthetic peptide
  Seed: LRMKWMMAMKYPITA
LRMKFMMHMYYPVTA

SEQ ID NO: 223983 - protein, 15 aa, Artificial Sequence
  Description of Artificial Sequence: Synthetic peptide
  Seed: LRMKWMMAMKYPITA
LRMKFMMIMAYPATA

SEQ ID NO: 223984 - protein, 15 aa, Artificial Sequence
  Description of Artificial Sequence: Synthetic peptide
  Seed: LRMKWMMAMKYPITA
LRMKFMMIMAYPCTA

SEQ ID NO: 223985 - protein, 15 aa, Artificial Sequence
  Description of Artificial Sequence: Synthetic peptide
  Seed: LRMKWMMAMKYPITA
LRMKFMMIMAYPDTA

SEQ ID NO: 223986 - protein, 15 aa, Artificial Sequence
  Description of Artificial Sequence: Synthetic peptide
  Seed: LRMKWMMAMKYPITA
LRMKFMMIMAYPETA

SEQ ID NO: 223987 - protein, 15 aa, Artificial Sequence
  Description of Artificial Sequence: Synthetic peptide
  Seed: LRMKWMMAMKYPITA
LRMKFMMIMAYPFTA

SEQ ID NO: 223988 - protein, 15 aa, Artificial Sequence
  Description of Artificial Sequence: Synthetic peptide
  Seed: LRMKWMMAMKYPITA
LRMKFMMIMAYPGTA

SEQ ID NO: 223989 - protein, 15 aa, Artificial Sequence
  Description of Artificial Sequence: Synthetic peptide
  Seed: LRMKWMMAMKYPITA
LRMKFMMIMAYPHTA

SEQ ID NO: 223990 - protein, 15 aa, Artificial Sequence
  Description of Artificial Sequence: Synthetic peptide
  Seed: LRMKWMMAMKYPITA
LRMKFMMIMAYPITA

SEQ ID NO: 223991 - protein, 15 aa, Artificial Sequence
  Description of Artificial Sequence: Synthetic peptide
  Seed: LRMKWMMAMKYPITA
LRMKFMMIMAYPKTA

SEQ ID NO: 223992 - protein, 15 aa, Artificial Sequence
  Description of Artificial Sequence: Synthetic peptide
  Seed: LRMKWMMAMKYPITA
LRMKFMMIMAYPLTA

SEQ ID NO: 223993 - protein, 15 aa, Artificial Sequence
  Description of Artificial Sequence: Synthetic peptide
  Seed: LRMKWMMAMKYPITA
LRMKFMMIMAYPMTA

SEQ ID NO: 223994 - protein, 15 aa, Artificial Sequence
  Description of Artificial Sequence: Synthetic peptide
  Seed: LRMKWMMAMKYPITA
LRMKFMMIMAYPNTA

SEQ ID NO: 223995 - protein, 15 aa, Artificial Sequence
  Description of Artificial Sequence: Synthetic peptide
  Seed: LRMKWMMAMKYPITA
LRMKFMMIMAYPPTA

SEQ ID NO: 223996 - protein, 15 aa, Artificial Sequence
  Description of Artificial Sequence: Synthetic peptide
  Seed: LRMKWMMAMKYPITA
LRMKFMMIMAYPQTA

SEQ ID NO: 223997 - protein, 15 aa, Artificial Sequence
  Description of Artificial Sequence: Synthetic peptide
  Seed: LRMKWMMAMKYPITA
LRMKFMMIMAYPRTA

SEQ ID NO: 223998 - protein, 15 aa, Artificial Sequence
  Description of Artificial Sequence: Synthetic peptide
  Seed: LRMKWMMAMKYPITA
LRMKFMMIMAYPSTA

SEQ ID NO: 223999 - protein, 15 aa, Artificial Sequence
  Description of Artificial Sequence: Synthetic peptide
  Seed: LRMKWMMAMKYPITA
LRMKFMMIMAYPTTA

SEQ ID NO: 224000 - protein, 15 aa, Artificial Sequence
  Description of Artificial Sequence: Synthetic peptide
  Seed: LRMKWMMAMKYPITA
LRMKFMMIMAYPVTA

SEQ ID NO: 224001 - protein, 15 aa, Artificial Sequence
  Description of Artificial Sequence: Synthetic peptide
  Seed: LRMKWMMAMKYPITA
LRMKFMMIMAYPWTA

SEQ ID NO: 224002 - protein, 15 aa, Artificial Sequence
  Description of Artificial Sequence: Synthetic peptide
  Seed: LRMKWMMAMKYPITA
LRMKFMMIMAYPYTA

SEQ ID NO: 224003 - protein, 15 aa, Artificial Sequence
  Description of Artificial Sequence: Synthetic peptide
  Seed: LRMKWMMAMKYPITA
LRMKFMMIMCYPATA

SEQ ID NO: 224004 - protein, 15 aa, Artificial Sequence
  Description of Artificial Sequence: Synthetic peptide
  Seed: LRMKWMMAMKYPITA
LRMKFMMIMCYPDTA

SEQ ID NO: 224005 - protein, 15 aa, Artificial Sequence
  Description of Artificial Sequence: Synthetic peptide
  Seed: LRMKWMMAMKYPITA
LRMKFMMIMCYPETA

SEQ ID NO: 224006 - protein, 15 aa, Artificial Sequence
  Description of Artificial Sequence: Synthetic peptide
  Seed: LRMKWMMAMKYPITA
LRMKFMMIMCYPGTA

SEQ ID NO: 224007 - protein, 15 aa, Artificial Sequence
  Description of Artificial Sequence: Synthetic peptide
  Seed: LRMKWMMAMKYPITA
LRMKFMMIMCYPHTA

SEQ ID NO: 224008 - protein, 15 aa, Artificial Sequence
  Description of Artificial Sequence: Synthetic peptide
  Seed: LRMKWMMAMKYPITA
LRMKFMMIMCYPITA

SEQ ID NO: 224009 - protein, 15 aa, Artificial Sequence
  Description of Artificial Sequence: Synthetic peptide
  Seed: LRMKWMMAMKYPITA
LRMKFMMIMCYPLTA

SEQ ID NO: 224010 - protein, 15 aa, Artificial Sequence
  Description of Artificial Sequence: Synthetic peptide
  Seed: LRMKWMMAMKYPITA
LRMKFMMIMCYPMTA

SEQ ID NO: 224011 - protein, 15 aa, Artificial Sequence
  Description of Artificial Sequence: Synthetic peptide
  Seed: LRMKWMMAMKYPITA
LRMKFMMIMCYPNTA

SEQ ID NO: 224012 - protein, 15 aa, Artificial Sequence
  Description of Artificial Sequence: Synthetic peptide
  Seed: LRMKWMMAMKYPITA
LRMKFMMIMCYPPTA

SEQ ID NO: 224013 - protein, 15 aa, Artificial Sequence
  Description of Artificial Sequence: Synthetic peptide
  Seed: LRMKWMMAMKYPITA
LRMKFMMIMCYPQTA

SEQ ID NO: 224014 - protein, 15 aa, Artificial Sequence
  Description of Artificial Sequence: Synthetic peptide
  Seed: LRMKWMMAMKYPITA
LRMKFMMIMCYPSTA

SEQ ID NO: 224015 - protein, 15 aa, Artificial Sequence
  Description of Artificial Sequence: Synthetic peptide
  Seed: LRMKWMMAMKYPITA
LRMKFMMIMCYPTTA

SEQ ID NO: 224016 - protein, 15 aa, Artificial Sequence
  Description of Artificial Sequence: Synthetic peptide
  Seed: LRMKWMMAMKYPITA
LRMKFMMIMCYPVTA

SEQ ID NO: 224017 - protein, 15 aa, Artificial Sequence
  Description of Artificial Sequence: Synthetic peptide
  Seed: LRMKWMMAMKYPITA
LRMKFMMIMDYPATA

SEQ ID NO: 224018 - protein, 15 aa, Artificial Sequence
  Description of Artificial Sequence: Synthetic peptide
  Seed: LRMKWMMAMKYPITA
LRMKFMMIMDYPCTA

SEQ ID NO: 224019 - protein, 15 aa, Artificial Sequence
  Description of Artificial Sequence: Synthetic peptide
  Seed: LRMKWMMAMKYPITA
LRMKFMMIMDYPDTA

SEQ ID NO: 224020 - protein, 15 aa, Artificial Sequence
  Description of Artificial Sequence: Synthetic peptide
  Seed: LRMKWMMAMKYPITA
LRMKFMMIMDYPETA

SEQ ID NO: 224021 - protein, 15 aa, Artificial Sequence
  Description of Artificial Sequence: Synthetic peptide
  Seed: LRMKWMMAMKYPITA
LRMKFMMIMDYPFTA

SEQ ID NO: 224022 - protein, 15 aa, Artificial Sequence
  Description of Artificial Sequence: Synthetic peptide
  Seed: LRMKWMMAMKYPITA
LRMKFMMIMDYPGTA

SEQ ID NO: 224023 - protein, 15 aa, Artificial Sequence
  Description of Artificial Sequence: Synthetic peptide
  Seed: LRMKWMMAMKYPITA
LRMKFMMIMDYPHTA

SEQ ID NO: 224024 - protein, 15 aa, Artificial Sequence
  Description of Artificial Sequence: Synthetic peptide
  Seed: LRMKWMMAMKYPITA
LRMKFMMIMDYPITA

SEQ ID NO: 224025 - protein, 15 aa, Artificial Sequence
  Description of Artificial Sequence: Synthetic peptide
  Seed: LRMKWMMAMKYPITA
LRMKFMMIMDYPLTA

SEQ ID NO: 224026 - protein, 15 aa, Artificial Sequence
  Description of Artificial Sequence: Synthetic peptide
  Seed: LRMKWMMAMKYPITA
LRMKFMMIMDYPMTA

SEQ ID NO: 224027 - protein, 15 aa, Artificial Sequence
  Description of Artificial Sequence: Synthetic peptide
  Seed: LRMKWMMAMKYPITA
LRMKFMMIMDYPNTA

SEQ ID NO: 224028 - protein, 15 aa, Artificial Sequence
  Description of Artificial Sequence: Synthetic peptide
  Seed: LRMKWMMAMKYPITA
LRMKFMMIMDYPPTA

SEQ ID NO: 224029 - protein, 15 aa, Artificial Sequence
  Description of Artificial Sequence: Synthetic peptide
  Seed: LRMKWMMAMKYPITA
LRMKFMMIMDYPQTA

SEQ ID NO: 224030 - protein, 15 aa, Artificial Sequence
  Description of Artificial Sequence: Synthetic peptide
  Seed: LRMKWMMAMKYPITA
LRMKFMMIMDYPSTA

SEQ ID NO: 224031 - protein, 15 aa, Artificial Sequence
  Description of Artificial Sequence: Synthetic peptide
  Seed: LRMKWMMAMKYPITA
LRMKFMMIMDYPTTA

SEQ ID NO: 224032 - protein, 15 aa, Artificial Sequence
  Description of Artificial Sequence: Synthetic peptide
  Seed: LRMKWMMAMKYPITA
LRMKFMMIMDYPVTA

SEQ ID NO: 224033 - protein, 15 aa, Artificial Sequence
  Description of Artificial Sequence: Synthetic peptide
  Seed: LRMKWMMAMKYPITA
LRMKFMMIMEYPATA

SEQ ID NO: 224034 - protein, 15 aa, Artificial Sequence
  Description of Artificial Sequence: Synthetic peptide
  Seed: LRMKWMMAMKYPITA
LRMKFMMIMEYPCTA

SEQ ID NO: 224035 - protein, 15 aa, Artificial Sequence
  Description of Artificial Sequence: Synthetic peptide
  Seed: LRMKWMMAMKYPITA
LRMKFMMIMEYPDTA

SEQ ID NO: 224036 - protein, 15 aa, Artificial Sequence
  Description of Artificial Sequence: Synthetic peptide
  Seed: LRMKWMMAMKYPITA
LRMKFMMIMEYPETA

SEQ ID NO: 224037 - protein, 15 aa, Artificial Sequence
  Description of Artificial Sequence: Synthetic peptide
  Seed: LRMKWMMAMKYPITA
LRMKFMMIMEYPFTA

SEQ ID NO: 224038 - protein, 15 aa, Artificial Sequence
  Description of Artificial Sequence: Synthetic peptide
  Seed: LRMKWMMAMKYPITA
LRMKFMMIMEYPGTA

SEQ ID NO: 224039 - protein, 15 aa, Artificial Sequence
  Description of Artificial Sequence: Synthetic peptide
  Seed: LRMKWMMAMKYPITA
LRMKFMMIMEYPHTA

SEQ ID NO: 224040 - protein, 15 aa, Artificial Sequence
  Description of Artificial Sequence: Synthetic peptide
  Seed: LRMKWMMAMKYPITA
LRMKFMMIMEYPITA

SEQ ID NO: 224041 - protein, 15 aa, Artificial Sequence
  Description of Artificial Sequence: Synthetic peptide
  Seed: LRMKWMMAMKYPITA
LRMKFMMIMEYPLTA

SEQ ID NO: 224042 - protein, 15 aa, Artificial Sequence
  Description of Artificial Sequence: Synthetic peptide
  Seed: LRMKWMMAMKYPITA
LRMKFMMIMEYPMTA

SEQ ID NO: 224043 - protein, 15 aa, Artificial Sequence
  Description of Artificial Sequence: Synthetic peptide
  Seed: LRMKWMMAMKYPITA
LRMKFMMIMEYPNTA

SEQ ID NO: 224044 - protein, 15 aa, Artificial Sequence
  Description of Artificial Sequence: Synthetic peptide
  Seed: LRMKWMMAMKYPITA
LRMKFMMIMEYPPTA

SEQ ID NO: 224045 - protein, 15 aa, Artificial Sequence
  Description of Artificial Sequence: Synthetic peptide
  Seed: LRMKWMMAMKYPITA
LRMKFMMIMEYPQTA

SEQ ID NO: 224046 - protein, 15 aa, Artificial Sequence
  Description of Artificial Sequence: Synthetic peptide
  Seed: LRMKWMMAMKYPITA
LRMKFMMIMEYPRTA

SEQ ID NO: 224047 - protein, 15 aa, Artificial Sequence
  Description of Artificial Sequence: Synthetic peptide
  Seed: LRMKWMMAMKYPITA
LRMKFMMIMEYPSTA

SEQ ID NO: 224048 - protein, 15 aa, Artificial Sequence
  Description of Artificial Sequence: Synthetic peptide
  Seed: LRMKWMMAMKYPITA
LRMKFMMIMEYPTTA

SEQ ID NO: 224049 - protein, 15 aa, Artificial Sequence
  Description of Artificial Sequence: Synthetic peptide
  Seed: LRMKWMMAMKYPITA
LRMKFMMIMEYPVTA

SEQ ID NO: 224050 - protein, 15 aa, Artificial Sequence
  Description of Artificial Sequence: Synthetic peptide
  Seed: LRMKWMMAMKYPITA
LRMKFMMIMEYPYTA

SEQ ID NO: 224051 - protein, 15 aa, Artificial Sequence
  Description of Artificial Sequence: Synthetic peptide
  Seed: LRMKWMMAMKYPITA
LRMKFMMIMFYPATA

SEQ ID NO: 224052 - protein, 15 aa, Artificial Sequence
  Description of Artificial Sequence: Synthetic peptide
  Seed: LRMKWMMAMKYPITA
LRMKFMMIMFYPDTA

SEQ ID NO: 224053 - protein, 15 aa, Artificial Sequence
  Description of Artificial Sequence: Synthetic peptide
  Seed: LRMKWMMAMKYPITA
LRMKFMMIMFYPETA

SEQ ID NO: 224054 - protein, 15 aa, Artificial Sequence
  Description of Artificial Sequence: Synthetic peptide
  Seed: LRMKWMMAMKYPITA
LRMKFMMIMFYPITA

SEQ ID NO: 224055 - protein, 15 aa, Artificial Sequence
  Description of Artificial Sequence: Synthetic peptide
  Seed: LRMKWMMAMKYPITA
LRMKFMMIMFYPLTA

SEQ ID NO: 224056 - protein, 15 aa, Artificial Sequence
  Description of Artificial Sequence: Synthetic peptide
  Seed: LRMKWMMAMKYPITA
LRMKFMMIMFYPMTA

SEQ ID NO: 224057 - protein, 15 aa, Artificial Sequence
  Description of Artificial Sequence: Synthetic peptide
  Seed: LRMKWMMAMKYPITA
LRMKFMMIMFYPNTA

SEQ ID NO: 224058 - protein, 15 aa, Artificial Sequence
  Description of Artificial Sequence: Synthetic peptide
  Seed: LRMKWMMAMKYPITA
LRMKFMMIMFYPQTA

SEQ ID NO: 224059 - protein, 15 aa, Artificial Sequence
  Description of Artificial Sequence: Synthetic peptide
  Seed: LRMKWMMAMKYPITA
LRMKFMMIMFYPSTA

SEQ ID NO: 224060 - protein, 15 aa, Artificial Sequence
  Description of Artificial Sequence: Synthetic peptide
  Seed: LRMKWMMAMKYPITA
LRMKFMMIMFYPTTA

SEQ ID NO: 224061 - protein, 15 aa, Artificial Sequence
  Description of Artificial Sequence: Synthetic peptide
  Seed: LRMKWMMAMKYPITA
LRMKFMMIMFYPVTA

SEQ ID NO: 224062 - protein, 15 aa, Artificial Sequence
  Description of Artificial Sequence: Synthetic peptide
  Seed: LRMKWMMAMKYPITA
LRMKFMMIMFYPYTA

SEQ ID NO: 224063 - protein, 15 aa, Artificial Sequence
  Description of Artificial Sequence: Synthetic peptide
  Seed: LRMKWMMAMKYPITA
LRMKFMMIMGYPATA

SEQ ID NO: 224064 - protein, 15 aa, Artificial Sequence
  Description of Artificial Sequence: Synthetic peptide
  Seed: LRMKWMMAMKYPITA
LRMKFMMIMGYPCTA

SEQ ID NO: 224065 - protein, 15 aa, Artificial Sequence
  Description of Artificial Sequence: Synthetic peptide
  Seed: LRMKWMMAMKYPITA
LRMKFMMIMGYPDTA

SEQ ID NO: 224066 - protein, 15 aa, Artificial Sequence
  Description of Artificial Sequence: Synthetic peptide
  Seed: LRMKWMMAMKYPITA
LRMKFMMIMGYPETA

SEQ ID NO: 224067 - protein, 15 aa, Artificial Sequence
  Description of Artificial Sequence: Synthetic peptide
  Seed: LRMKWMMAMKYPITA
LRMKFMMIMGYPFTA

SEQ ID NO: 224068 - protein, 15 aa, Artificial Sequence
  Description of Artificial Sequence: Synthetic peptide
  Seed: LRMKWMMAMKYPITA
LRMKFMMIMGYPGTA

SEQ ID NO: 224069 - protein, 15 aa, Artificial Sequence
  Description of Artificial Sequence: Synthetic peptide
  Seed: LRMKWMMAMKYPITA
LRMKFMMIMGYPHTA

SEQ ID NO: 224070 - protein, 15 aa, Artificial Sequence
  Description of Artificial Sequence: Synthetic peptide
  Seed: LRMKWMMAMKYPITA
LRMKFMMIMGYPITA

SEQ ID NO: 224071 - protein, 15 aa, Artificial Sequence
  Description of Artificial Sequence: Synthetic peptide
  Seed: LRMKWMMAMKYPITA
LRMKFMMIMGYPKTA

SEQ ID NO: 224072 - protein, 15 aa, Artificial Sequence
  Description of Artificial Sequence: Synthetic peptide
  Seed: LRMKWMMAMKYPITA
LRMKFMMIMGYPLTA

SEQ ID NO: 224073 - protein, 15 aa, Artificial Sequence
  Description of Artificial Sequence: Synthetic peptide
  Seed: LRMKWMMAMKYPITA
LRMKFMMIMGYPMTA

SEQ ID NO: 224074 - protein, 15 aa, Artificial Sequence
  Description of Artificial Sequence: Synthetic peptide
  Seed: LRMKWMMAMKYPITA
LRMKFMMIMGYPNTA

SEQ ID NO: 224075 - protein, 15 aa, Artificial Sequence
  Description of Artificial Sequence: Synthetic peptide
  Seed: LRMKWMMAMKYPITA
LRMKFMMIMGYPPTA

SEQ ID NO: 224076 - protein, 15 aa, Artificial Sequence
  Description of Artificial Sequence: Synthetic peptide
  Seed: LRMKWMMAMKYPITA
LRMKFMMIMGYPQTA

SEQ ID NO: 224077 - protein, 15 aa, Artificial Sequence
  Description of Artificial Sequence: Synthetic peptide
  Seed: LRMKWMMAMKYPITA
LRMKFMMIMGYPRTA

SEQ ID NO: 224078 - protein, 15 aa, Artificial Sequence
  Description of Artificial Sequence: Synthetic peptide
  Seed: LRMKWMMAMKYPITA
LRMKFMMIMGYPSTA

SEQ ID NO: 224079 - protein, 15 aa, Artificial Sequence
  Description of Artificial Sequence: Synthetic peptide
  Seed: LRMKWMMAMKYPITA
LRMKFMMIMGYPTTA

SEQ ID NO: 224080 - protein, 15 aa, Artificial Sequence
  Description of Artificial Sequence: Synthetic peptide
  Seed: LRMKWMMAMKYPITA
LRMKFMMIMGYPVTA

SEQ ID NO: 224081 - protein, 15 aa, Artificial Sequence
  Description of Artificial Sequence: Synthetic peptide
  Seed: LRMKWMMAMKYPITA
LRMKFMMIMGYPWTA

SEQ ID NO: 224082 - protein, 15 aa, Artificial Sequence
  Description of Artificial Sequence: Synthetic peptide
  Seed: LRMKWMMAMKYPITA
LRMKFMMIMGYPYTA

SEQ ID NO: 224083 - protein, 15 aa, Artificial Sequence
  Description of Artificial Sequence: Synthetic peptide
  Seed: LRMKWMMAMKYPITA
LRMKFMMIMHYPATA

SEQ ID NO: 224084 - protein, 15 aa, Artificial Sequence
  Description of Artificial Sequence: Synthetic peptide
  Seed: LRMKWMMAMKYPITA
LRMKFMMIMHYPCTA

SEQ ID NO: 224085 - protein, 15 aa, Artificial Sequence
  Description of Artificial Sequence: Synthetic peptide
  Seed: LRMKWMMAMKYPITA
LRMKFMMIMHYPDTA

SEQ ID NO: 224086 - protein, 15 aa, Artificial Sequence
  Description of Artificial Sequence: Synthetic peptide
  Seed: LRMKWMMAMKYPITA
LRMKFMMIMHYPETA

SEQ ID NO: 224087 - protein, 15 aa, Artificial Sequence
  Description of Artificial Sequence: Synthetic peptide
  Seed: LRMKWMMAMKYPITA
LRMKFMMIMHYPFTA

SEQ ID NO: 224088 - protein, 15 aa, Artificial Sequence
  Description of Artificial Sequence: Synthetic peptide
  Seed: LRMKWMMAMKYPITA
LRMKFMMIMHYPGTA

SEQ ID NO: 224089 - protein, 15 aa, Artificial Sequence
  Description of Artificial Sequence: Synthetic peptide
  Seed: LRMKWMMAMKYPITA
LRMKFMMIMHYPHTA

SEQ ID NO: 224090 - protein, 15 aa, Artificial Sequence
  Description of Artificial Sequence: Synthetic peptide
  Seed: LRMKWMMAMKYPITA
LRMKFMMIMHYPITA

SEQ ID NO: 224091 - protein, 15 aa, Artificial Sequence
  Description of Artificial Sequence: Synthetic peptide
  Seed: LRMKWMMAMKYPITA
LRMKFMMIMHYPKTA

SEQ ID NO: 224092 - protein, 15 aa, Artificial Sequence
  Description of Artificial Sequence: Synthetic peptide
  Seed: LRMKWMMAMKYPITA
LRMKFMMIMHYPLTA

SEQ ID NO: 224093 - protein, 15 aa, Artificial Sequence
  Description of Artificial Sequence: Synthetic peptide
  Seed: LRMKWMMAMKYPITA
LRMKFMMIMHYPMTA

SEQ ID NO: 224094 - protein, 15 aa, Artificial Sequence
  Description of Artificial Sequence: Synthetic peptide
  Seed: LRMKWMMAMKYPITA
LRMKFMMIMHYPNTA

SEQ ID NO: 224095 - protein, 15 aa, Artificial Sequence
  Description of Artificial Sequence: Synthetic peptide
  Seed: LRMKWMMAMKYPITA
LRMKFMMIMHYPPTA

SEQ ID NO: 224096 - protein, 15 aa, Artificial Sequence
  Description of Artificial Sequence: Synthetic peptide
  Seed: LRMKWMMAMKYPITA
LRMKFMMIMHYPQTA

SEQ ID NO: 224097 - protein, 15 aa, Artificial Sequence
  Description of Artificial Sequence: Synthetic peptide
  Seed: LRMKWMMAMKYPITA
LRMKFMMIMHYPRTA

SEQ ID NO: 224098 - protein, 15 aa, Artificial Sequence
  Description of Artificial Sequence: Synthetic peptide
  Seed: LRMKWMMAMKYPITA
LRMKFMMIMHYPSTA

SEQ ID NO: 224099 - protein, 15 aa, Artificial Sequence
  Description of Artificial Sequence: Synthetic peptide
  Seed: LRMKWMMAMKYPITA
LRMKFMMIMHYPTTA

SEQ ID NO: 224100 - protein, 15 aa, Artificial Sequence
  Description of Artificial Sequence: Synthetic peptide
  Seed: LRMKWMMAMKYPITA
LRMKFMMIMHYPVTA

SEQ ID NO: 224101 - protein, 15 aa, Artificial Sequence
  Description of Artificial Sequence: Synthetic peptide
  Seed: LRMKWMMAMKYPITA
LRMKFMMIMHYPYTA

SEQ ID NO: 224102 - protein, 15 aa, Artificial Sequence
  Description of Artificial Sequence: Synthetic peptide
  Seed: LRMKWMMAMKYPITA
LRMKFMMIMIYPATA

SEQ ID NO: 224103 - protein, 15 aa, Artificial Sequence
  Description of Artificial Sequence: Synthetic peptide
  Seed: LRMKWMMAMKYPITA
LRMKFMMIMIYPCTA

SEQ ID NO: 224104 - protein, 15 aa, Artificial Sequence
  Description of Artificial Sequence: Synthetic peptide
  Seed: LRMKWMMAMKYPITA
LRMKFMMIMIYPDTA

SEQ ID NO: 224105 - protein, 15 aa, Artificial Sequence
  Description of Artificial Sequence: Synthetic peptide
  Seed: LRMKWMMAMKYPITA
LRMKFMMIMIYPETA

SEQ ID NO: 224106 - protein, 15 aa, Artificial Sequence
  Description of Artificial Sequence: Synthetic peptide
  Seed: LRMKWMMAMKYPITA
LRMKFMMIMIYPFTA

SEQ ID NO: 224107 - protein, 15 aa, Artificial Sequence
  Description of Artificial Sequence: Synthetic peptide
  Seed: LRMKWMMAMKYPITA
LRMKFMMIMIYPGTA

SEQ ID NO: 224108 - protein, 15 aa, Artificial Sequence
  Description of Artificial Sequence: Synthetic peptide
  Seed: LRMKWMMAMKYPITA
LRMKFMMIMIYPHTA

SEQ ID NO: 224109 - protein, 15 aa, Artificial Sequence
  Description of Artificial Sequence: Synthetic peptide
  Seed: LRMKWMMAMKYPITA
LRMKFMMIMIYPITA

SEQ ID NO: 224110 - protein, 15 aa, Artificial Sequence
  Description of Artificial Sequence: Synthetic peptide
  Seed: LRMKWMMAMKYPITA
LRMKFMMIMIYPKTA

SEQ ID NO: 224111 - protein, 15 aa, Artificial Sequence
  Description of Artificial Sequence: Synthetic peptide
  Seed: LRMKWMMAMKYPITA
LRMKFMMIMIYPLTA

SEQ ID NO: 224112 - protein, 15 aa, Artificial Sequence
  Description of Artificial Sequence: Synthetic peptide
  Seed: LRMKWMMAMKYPITA
LRMKFMMIMIYPMTA

SEQ ID NO: 224113 - protein, 15 aa, Artificial Sequence
  Description of Artificial Sequence: Synthetic peptide
  Seed: LRMKWMMAMKYPITA
LRMKFMMIMIYPNTA

SEQ ID NO: 224114 - protein, 15 aa, Artificial Sequence
  Description of Artificial Sequence: Synthetic peptide
  Seed: LRMKWMMAMKYPITA
LRMKFMMIMIYPPTA

SEQ ID NO: 224115 - protein, 15 aa, Artificial Sequence
  Description of Artificial Sequence: Synthetic peptide
  Seed: LRMKWMMAMKYPITA
LRMKFMMIMIYPQTA

SEQ ID NO: 224116 - protein, 15 aa, Artificial Sequence
  Description of Artificial Sequence: Synthetic peptide
  Seed: LRMKWMMAMKYPITA
LRMKFMMIMIYPRTA

SEQ ID NO: 224117 - protein, 15 aa, Artificial Sequence
  Description of Artificial Sequence: Synthetic peptide
  Seed: LRMKWMMAMKYPITA
LRMKFMMIMIYPSTA

SEQ ID NO: 224118 - protein, 15 aa, Artificial Sequence
  Description of Artificial Sequence: Synthetic peptide
  Seed: LRMKWMMAMKYPITA
LRMKFMMIMIYPTTA

SEQ ID NO: 224119 - protein, 15 aa, Artificial Sequence
  Description of Artificial Sequence: Synthetic peptide
  Seed: LRMKWMMAMKYPITA
LRMKFMMIMIYPVTA

SEQ ID NO: 224120 - protein, 15 aa, Artificial Sequence
  Description of Artificial Sequence: Synthetic peptide
  Seed: LRMKWMMAMKYPITA
LRMKFMMIMIYPYTA

SEQ ID NO: 224121 - protein, 15 aa, Artificial Sequence
  Description of Artificial Sequence: Synthetic peptide
  Seed: LRMKWMMAMKYPITA
LRMKFMMIMKYPATA

SEQ ID NO: 224122 - protein, 15 aa, Artificial Sequence
  Description of Artificial Sequence: Synthetic peptide
  Seed: LRMKWMMAMKYPITA
LRMKFMMIMKYPCTA

SEQ ID NO: 224123 - protein, 15 aa, Artificial Sequence
  Description of Artificial Sequence: Synthetic peptide
  Seed: LRMKWMMAMKYPITA
LRMKFMMIMKYPDTA

SEQ ID NO: 224124 - protein, 15 aa, Artificial Sequence
  Description of Artificial Sequence: Synthetic peptide
  Seed: LRMKWMMAMKYPITA
LRMKFMMIMKYPETA

SEQ ID NO: 224125 - protein, 15 aa, Artificial Sequence
  Description of Artificial Sequence: Synthetic peptide
  Seed: LRMKWMMAMKYPITA
LRMKFMMIMKYPFTA

SEQ ID NO: 224126 - protein, 15 aa, Artificial Sequence
  Description of Artificial Sequence: Synthetic peptide
  Seed: LRMKWMMAMKYPITA
LRMKFMMIMKYPGTA

SEQ ID NO: 224127 - protein, 15 aa, Artificial Sequence
  Description of Artificial Sequence: Synthetic peptide
  Seed: LRMKWMMAMKYPITA
LRMKFMMIMKYPHTA

SEQ ID NO: 224128 - protein, 15 aa, Artificial Sequence
  Description of Artificial Sequence: Synthetic peptide
  Seed: LRMKWMMAMKYPITA
LRMKFMMIMKYPITA

SEQ ID NO: 224129 - protein, 15 aa, Artificial Sequence
  Description of Artificial Sequence: Synthetic peptide
  Seed: LRMKWMMAMKYPITA
LRMKFMMIMKYPKTA

SEQ ID NO: 224130 - protein, 15 aa, Artificial Sequence
  Description of Artificial Sequence: Synthetic peptide
  Seed: LRMKWMMAMKYPITA
LRMKFMMIMKYPLTA

SEQ ID NO: 224131 - protein, 15 aa, Artificial Sequence
  Description of Artificial Sequence: Synthetic peptide
  Seed: LRMKWMMAMKYPITA
LRMKFMMIMKYPMTA

SEQ ID NO: 224132 - protein, 15 aa, Artificial Sequence
  Description of Artificial Sequence: Synthetic peptide
  Seed: LRMKWMMAMKYPITA
LRMKFMMIMKYPNTA

SEQ ID NO: 224133 - protein, 15 aa, Artificial Sequence
  Description of Artificial Sequence: Synthetic peptide
  Seed: LRMKWMMAMKYPITA
LRMKFMMIMKYPPTA

SEQ ID NO: 224134 - protein, 15 aa, Artificial Sequence
  Description of Artificial Sequence: Synthetic peptide
  Seed: LRMKWMMAMKYPITA
LRMKFMMIMKYPQTA

SEQ ID NO: 224135 - protein, 15 aa, Artificial Sequence
  Description of Artificial Sequence: Synthetic peptide
  Seed: LRMKWMMAMKYPITA
LRMKFMMIMKYPRTA

SEQ ID NO: 224136 - protein, 15 aa, Artificial Sequence
  Description of Artificial Sequence: Synthetic peptide
  Seed: LRMKWMMAMKYPITA
LRMKFMMIMKYPSTA

SEQ ID NO: 224137 - protein, 15 aa, Artificial Sequence
  Description of Artificial Sequence: Synthetic peptide
  Seed: LRMKWMMAMKYPITA
LRMKFMMIMKYPTTA

SEQ ID NO: 224138 - protein, 15 aa, Artificial Sequence
  Description of Artificial Sequence: Synthetic peptide
  Seed: LRMKWMMAMKYPITA
LRMKFMMIMKYPVTA

SEQ ID NO: 224139 - protein, 15 aa, Artificial Sequence
  Description of Artificial Sequence: Synthetic peptide
  Seed: LRMKWMMAMKYPITA
LRMKFMMIMKYPWTA

SEQ ID NO: 224140 - protein, 15 aa, Artificial Sequence
  Description of Artificial Sequence: Synthetic peptide
  Seed: LRMKWMMAMKYPITA
LRMKFMMIMKYPYTA

SEQ ID NO: 224141 - protein, 15 aa, Artificial Sequence
  Description of Artificial Sequence: Synthetic peptide
  Seed: LRMKWMMAMKYPITA
LRMKFMMIMLYPATA

SEQ ID NO: 224142 - protein, 15 aa, Artificial Sequence
  Description of Artificial Sequence: Synthetic peptide
  Seed: LRMKWMMAMKYPITA
LRMKFMMIMLYPCTA

SEQ ID NO: 224143 - protein, 15 aa, Artificial Sequence
  Description of Artificial Sequence: Synthetic peptide
  Seed: LRMKWMMAMKYPITA
LRMKFMMIMLYPDTA

SEQ ID NO: 224144 - protein, 15 aa, Artificial Sequence
  Description of Artificial Sequence: Synthetic peptide
  Seed: LRMKWMMAMKYPITA
LRMKFMMIMLYPGTA

SEQ ID NO: 224145 - protein, 15 aa, Artificial Sequence
  Description of Artificial Sequence: Synthetic peptide
  Seed: LRMKWMMAMKYPITA
LRMKFMMIMLYPITA

SEQ ID NO: 224146 - protein, 15 aa, Artificial Sequence
  Description of Artificial Sequence: Synthetic peptide
  Seed: LRMKWMMAMKYPITA
LRMKFMMIMLYPLTA

SEQ ID NO: 224147 - protein, 15 aa, Artificial Sequence
  Description of Artificial Sequence: Synthetic peptide
  Seed: LRMKWMMAMKYPITA
LRMKFMMIMLYPMTA

SEQ ID NO: 224148 - protein, 15 aa, Artificial Sequence
  Description of Artificial Sequence: Synthetic peptide
  Seed: LRMKWMMAMKYPITA
LRMKFMMIMLYPNTA

SEQ ID NO: 224149 - protein, 15 aa, Artificial Sequence
  Description of Artificial Sequence: Synthetic peptide
  Seed: LRMKWMMAMKYPITA
LRMKFMMIMLYPRTA

SEQ ID NO: 224150 - protein, 15 aa, Artificial Sequence
  Description of Artificial Sequence: Synthetic peptide
  Seed: LRMKWMMAMKYPITA
LRMKFMMIMLYPSTA

SEQ ID NO: 224151 - protein, 15 aa, Artificial Sequence
  Description of Artificial Sequence: Synthetic peptide
  Seed: LRMKWMMAMKYPITA
LRMKFMMIMLYPTTA

SEQ ID NO: 224152 - protein, 15 aa, Artificial Sequence
  Description of Artificial Sequence: Synthetic peptide
  Seed: LRMKWMMAMKYPITA
LRMKFMMIMLYPVTA

SEQ ID NO: 224153 - protein, 15 aa, Artificial Sequence
  Description of Artificial Sequence: Synthetic peptide
  Seed: LRMKWMMAMKYPITA
LRMKFMMIMMYPATA

SEQ ID NO: 224154 - protein, 15 aa, Artificial Sequence
  Description of Artificial Sequence: Synthetic peptide
  Seed: LRMKWMMAMKYPITA
LRMKFMMIMMYPCTA

SEQ ID NO: 224155 - protein, 15 aa, Artificial Sequence
  Description of Artificial Sequence: Synthetic peptide
  Seed: LRMKWMMAMKYPITA
LRMKFMMIMMYPDTA

SEQ ID NO: 224156 - protein, 15 aa, Artificial Sequence
  Description of Artificial Sequence: Synthetic peptide
  Seed: LRMKWMMAMKYPITA
LRMKFMMIMMYPGTA

SEQ ID NO: 224157 - protein, 15 aa, Artificial Sequence
  Description of Artificial Sequence: Synthetic peptide
  Seed: LRMKWMMAMKYPITA
LRMKFMMIMMYPITA

SEQ ID NO: 224158 - protein, 15 aa, Artificial Sequence
  Description of Artificial Sequence: Synthetic peptide
  Seed: LRMKWMMAMKYPITA
LRMKFMMIMMYPKTA

SEQ ID NO: 224159 - protein, 15 aa, Artificial Sequence
  Description of Artificial Sequence: Synthetic peptide
  Seed: LRMKWMMAMKYPITA
LRMKFMMIMMYPLTA

SEQ ID NO: 224160 - protein, 15 aa, Artificial Sequence
  Description of Artificial Sequence: Synthetic peptide
  Seed: LRMKWMMAMKYPITA
LRMKFMMIMMYPMTA

SEQ ID NO: 224161 - protein, 15 aa, Artificial Sequence
  Description of Artificial Sequence: Synthetic peptide
  Seed: LRMKWMMAMKYPITA
LRMKFMMIMMYPNTA

SEQ ID NO: 224162 - protein, 15 aa, Artificial Sequence
  Description of Artificial Sequence: Synthetic peptide
  Seed: LRMKWMMAMKYPITA
LRMKFMMIMMYPRTA

SEQ ID NO: 224163 - protein, 15 aa, Artificial Sequence
  Description of Artificial Sequence: Synthetic peptide
  Seed: LRMKWMMAMKYPITA
LRMKFMMIMMYPSTA

SEQ ID NO: 224164 - protein, 15 aa, Artificial Sequence
  Description of Artificial Sequence: Synthetic peptide
  Seed: LRMKWMMAMKYPITA
LRMKFMMIMMYPTTA

SEQ ID NO: 224165 - protein, 15 aa, Artificial Sequence
  Description of Artificial Sequence: Synthetic peptide
  Seed: LRMKWMMAMKYPITA
LRMKFMMIMMYPVTA

SEQ ID NO: 224166 - protein, 15 aa, Artificial Sequence
  Description of Artificial Sequence: Synthetic peptide
  Seed: LRMKWMMAMKYPITA
LRMKFMMIMNYPATA

SEQ ID NO: 224167 - protein, 15 aa, Artificial Sequence
  Description of Artificial Sequence: Synthetic peptide
  Seed: LRMKWMMAMKYPITA
LRMKFMMIMNYPCTA

SEQ ID NO: 224168 - protein, 15 aa, Artificial Sequence
  Description of Artificial Sequence: Synthetic peptide
  Seed: LRMKWMMAMKYPITA
LRMKFMMIMNYPDTA

SEQ ID NO: 224169 - protein, 15 aa, Artificial Sequence
  Description of Artificial Sequence: Synthetic peptide
  Seed: LRMKWMMAMKYPITA
LRMKFMMIMNYPETA

SEQ ID NO: 224170 - protein, 15 aa, Artificial Sequence
  Description of Artificial Sequence: Synthetic peptide
  Seed: LRMKWMMAMKYPITA
LRMKFMMIMNYPFTA

SEQ ID NO: 224171 - protein, 15 aa, Artificial Sequence
  Description of Artificial Sequence: Synthetic peptide
  Seed: LRMKWMMAMKYPITA
LRMKFMMIMNYPGTA

SEQ ID NO: 224172 - protein, 15 aa, Artificial Sequence
  Description of Artificial Sequence: Synthetic peptide
  Seed: LRMKWMMAMKYPITA
LRMKFMMIMNYPHTA

SEQ ID NO: 224173 - protein, 15 aa, Artificial Sequence
  Description of Artificial Sequence: Synthetic peptide
  Seed: LRMKWMMAMKYPITA
LRMKFMMIMNYPITA

SEQ ID NO: 224174 - protein, 15 aa, Artificial Sequence
  Description of Artificial Sequence: Synthetic peptide
  Seed: LRMKWMMAMKYPITA
LRMKFMMIMNYPKTA

SEQ ID NO: 224175 - protein, 15 aa, Artificial Sequence
  Description of Artificial Sequence: Synthetic peptide
  Seed: LRMKWMMAMKYPITA
LRMKFMMIMNYPLTA

SEQ ID NO: 224176 - protein, 15 aa, Artificial Sequence
  Description of Artificial Sequence: Synthetic peptide
  Seed: LRMKWMMAMKYPITA
LRMKFMMIMNYPMTA

SEQ ID NO: 224177 - protein, 15 aa, Artificial Sequence
  Description of Artificial Sequence: Synthetic peptide
  Seed: LRMKWMMAMKYPITA
LRMKFMMIMNYPNTA

SEQ ID NO: 224178 - protein, 15 aa, Artificial Sequence
  Description of Artificial Sequence: Synthetic peptide
  Seed: LRMKWMMAMKYPITA
LRMKFMMIMNYPPTA

SEQ ID NO: 224179 - protein, 15 aa, Artificial Sequence
  Description of Artificial Sequence: Synthetic peptide
  Seed: LRMKWMMAMKYPITA
LRMKFMMIMNYPQTA

SEQ ID NO: 224180 - protein, 15 aa, Artificial Sequence
  Description of Artificial Sequence: Synthetic peptide
  Seed: LRMKWMMAMKYPITA
LRMKFMMIMNYPRTA

SEQ ID NO: 224181 - protein, 15 aa, Artificial Sequence
  Description of Artificial Sequence: Synthetic peptide
  Seed: LRMKWMMAMKYPITA
LRMKFMMIMNYPSTA

SEQ ID NO: 224182 - protein, 15 aa, Artificial Sequence
  Description of Artificial Sequence: Synthetic peptide
  Seed: LRMKWMMAMKYPITA
LRMKFMMIMNYPTTA

SEQ ID NO: 224183 - protein, 15 aa, Artificial Sequence
  Description of Artificial Sequence: Synthetic peptide
  Seed: LRMKWMMAMKYPITA
LRMKFMMIMNYPVTA

SEQ ID NO: 224184 - protein, 15 aa, Artificial Sequence
  Description of Artificial Sequence: Synthetic peptide
  Seed: LRMKWMMAMKYPITA
LRMKFMMIMNYPWTA

SEQ ID NO: 224185 - protein, 15 aa, Artificial Sequence
  Description of Artificial Sequence: Synthetic peptide
  Seed: LRMKWMMAMKYPITA
LRMKFMMIMNYPYTA

SEQ ID NO: 224186 - protein, 15 aa, Artificial Sequence
  Description of Artificial Sequence: Synthetic peptide
  Seed: LRMKWMMAMKYPITA
LRMKFMMIMPYPATA

SEQ ID NO: 224187 - protein, 15 aa, Artificial Sequence
  Description of Artificial Sequence: Synthetic peptide
  Seed: LRMKWMMAMKYPITA
LRMKFMMIMPYPCTA

SEQ ID NO: 224188 - protein, 15 aa, Artificial Sequence
  Description of Artificial Sequence: Synthetic peptide
  Seed: LRMKWMMAMKYPITA
LRMKFMMIMPYPDTA

SEQ ID NO: 224189 - protein, 15 aa, Artificial Sequence
  Description of Artificial Sequence: Synthetic peptide
  Seed: LRMKWMMAMKYPITA
LRMKFMMIMPYPETA

SEQ ID NO: 224190 - protein, 15 aa, Artificial Sequence
  Description of Artificial Sequence: Synthetic peptide
  Seed: LRMKWMMAMKYPITA
LRMKFMMIMPYPFTA

SEQ ID NO: 224191 - protein, 15 aa, Artificial Sequence
  Description of Artificial Sequence: Synthetic peptide
  Seed: LRMKWMMAMKYPITA
LRMKFMMIMPYPGTA

SEQ ID NO: 224192 - protein, 15 aa, Artificial Sequence
  Description of Artificial Sequence: Synthetic peptide
  Seed: LRMKWMMAMKYPITA
LRMKFMMIMPYPHTA

SEQ ID NO: 224193 - protein, 15 aa, Artificial Sequence
  Description of Artificial Sequence: Synthetic peptide
  Seed: LRMKWMMAMKYPITA
LRMKFMMIMPYPITA

SEQ ID NO: 224194 - protein, 15 aa, Artificial Sequence
  Description of Artificial Sequence: Synthetic peptide
  Seed: LRMKWMMAMKYPITA
LRMKFMMIMPYPKTA

SEQ ID NO: 224195 - protein, 15 aa, Artificial Sequence
  Description of Artificial Sequence: Synthetic peptide
  Seed: LRMKWMMAMKYPITA
LRMKFMMIMPYPLTA

SEQ ID NO: 224196 - protein, 15 aa, Artificial Sequence
  Description of Artificial Sequence: Synthetic peptide
  Seed: LRMKWMMAMKYPITA
LRMKFMMIMPYPMTA

SEQ ID NO: 224197 - protein, 15 aa, Artificial Sequence
  Description of Artificial Sequence: Synthetic peptide
  Seed: LRMKWMMAMKYPITA
LRMKFMMIMPYPNTA

SEQ ID NO: 224198 - protein, 15 aa, Artificial Sequence
  Description of Artificial Sequence: Synthetic peptide
  Seed: LRMKWMMAMKYPITA
LRMKFMMIMPYPPTA

SEQ ID NO: 224199 - protein, 15 aa, Artificial Sequence
  Description of Artificial Sequence: Synthetic peptide
  Seed: LRMKWMMAMKYPITA
LRMKFMMIMPYPQTA

SEQ ID NO: 224200 - protein, 15 aa, Artificial Sequence
  Description of Artificial Sequence: Synthetic peptide
  Seed: LRMKWMMAMKYPITA
LRMKFMMIMPYPRTA

SEQ ID NO: 224201 - protein, 15 aa, Artificial Sequence
  Description of Artificial Sequence: Synthetic peptide
  Seed: LRMKWMMAMKYPITA
LRMKFMMIMPYPSTA

SEQ ID NO: 224202 - protein, 15 aa, Artificial Sequence
  Description of Artificial Sequence: Synthetic peptide
  Seed: LRMKWMMAMKYPITA
LRMKFMMIMPYPTTA

SEQ ID NO: 224203 - protein, 15 aa, Artificial Sequence
  Description of Artificial Sequence: Synthetic peptide
  Seed: LRMKWMMAMKYPITA
LRMKFMMIMPYPVTA

SEQ ID NO: 224204 - protein, 15 aa, Artificial Sequence
  Description of Artificial Sequence: Synthetic peptide
  Seed: LRMKWMMAMKYPITA
LRMKFMMIMPYPWTA

SEQ ID NO: 224205 - protein, 15 aa, Artificial Sequence
  Description of Artificial Sequence: Synthetic peptide
  Seed: LRMKWMMAMKYPITA
LRMKFMMIMPYPYTA

SEQ ID NO: 224206 - protein, 15 aa, Artificial Sequence
  Description of Artificial Sequence: Synthetic peptide
  Seed: LRMKWMMAMKYPITA
LRMKFMMIMQYPATA

SEQ ID NO: 224207 - protein, 15 aa, Artificial Sequence
  Description of Artificial Sequence: Synthetic peptide
  Seed: LRMKWMMAMKYPITA
LRMKFMMIMQYPCTA

SEQ ID NO: 224208 - protein, 15 aa, Artificial Sequence
  Description of Artificial Sequence: Synthetic peptide
  Seed: LRMKWMMAMKYPITA
LRMKFMMIMQYPDTA

SEQ ID NO: 224209 - protein, 15 aa, Artificial Sequence
  Description of Artificial Sequence: Synthetic peptide
  Seed: LRMKWMMAMKYPITA
LRMKFMMIMQYPETA

SEQ ID NO: 224210 - protein, 15 aa, Artificial Sequence
  Description of Artificial Sequence: Synthetic peptide
  Seed: LRMKWMMAMKYPITA
LRMKFMMIMQYPFTA

SEQ ID NO: 224211 - protein, 15 aa, Artificial Sequence
  Description of Artificial Sequence: Synthetic peptide
  Seed: LRMKWMMAMKYPITA
LRMKFMMIMQYPGTA

SEQ ID NO: 224212 - protein, 15 aa, Artificial Sequence
  Description of Artificial Sequence: Synthetic peptide
  Seed: LRMKWMMAMKYPITA
LRMKFMMIMQYPHTA

SEQ ID NO: 224213 - protein, 15 aa, Artificial Sequence
  Description of Artificial Sequence: Synthetic peptide
  Seed: LRMKWMMAMKYPITA
LRMKFMMIMQYPITA

SEQ ID NO: 224214 - protein, 15 aa, Artificial Sequence
  Description of Artificial Sequence: Synthetic peptide
  Seed: LRMKWMMAMKYPITA
LRMKFMMIMQYPKTA

SEQ ID NO: 224215 - protein, 15 aa, Artificial Sequence
  Description of Artificial Sequence: Synthetic peptide
  Seed: LRMKWMMAMKYPITA
LRMKFMMIMQYPLTA

SEQ ID NO: 224216 - protein, 15 aa, Artificial Sequence
  Description of Artificial Sequence: Synthetic peptide
  Seed: LRMKWMMAMKYPITA
LRMKFMMIMQYPMTA

SEQ ID NO: 224217 - protein, 15 aa, Artificial Sequence
  Description of Artificial Sequence: Synthetic peptide
  Seed: LRMKWMMAMKYPITA
LRMKFMMIMQYPNTA

SEQ ID NO: 224218 - protein, 15 aa, Artificial Sequence
  Description of Artificial Sequence: Synthetic peptide
  Seed: LRMKWMMAMKYPITA
LRMKFMMIMQYPPTA

SEQ ID NO: 224219 - protein, 15 aa, Artificial Sequence
  Description of Artificial Sequence: Synthetic peptide
  Seed: LRMKWMMAMKYPITA
LRMKFMMIMQYPQTA

SEQ ID NO: 224220 - protein, 15 aa, Artificial Sequence
  Description of Artificial Sequence: Synthetic peptide
  Seed: LRMKWMMAMKYPITA
LRMKFMMIMQYPRTA

SEQ ID NO: 224221 - protein, 15 aa, Artificial Sequence
  Description of Artificial Sequence: Synthetic peptide
  Seed: LRMKWMMAMKYPITA
LRMKFMMIMQYPSTA

SEQ ID NO: 224222 - protein, 15 aa, Artificial Sequence
  Description of Artificial Sequence: Synthetic peptide
  Seed: LRMKWMMAMKYPITA
LRMKFMMIMQYPTTA

SEQ ID NO: 224223 - protein, 15 aa, Artificial Sequence
  Description of Artificial Sequence: Synthetic peptide
  Seed: LRMKWMMAMKYPITA
LRMKFMMIMQYPVTA

SEQ ID NO: 224224 - protein, 15 aa, Artificial Sequence
  Description of Artificial Sequence: Synthetic peptide
  Seed: LRMKWMMAMKYPITA
LRMKFMMIMQYPYTA

SEQ ID NO: 224225 - protein, 15 aa, Artificial Sequence
  Description of Artificial Sequence: Synthetic peptide
  Seed: LRMKWMMAMKYPITA
LRMKFMMIMRYPATA

SEQ ID NO: 224226 - protein, 15 aa, Artificial Sequence
  Description of Artificial Sequence: Synthetic peptide
  Seed: LRMKWMMAMKYPITA
LRMKFMMIMRYPCTA

SEQ ID NO: 224227 - protein, 15 aa, Artificial Sequence
  Description of Artificial Sequence: Synthetic peptide
  Seed: LRMKWMMAMKYPITA
LRMKFMMIMRYPDTA

SEQ ID NO: 224228 - protein, 15 aa, Artificial Sequence
  Description of Artificial Sequence: Synthetic peptide
  Seed: LRMKWMMAMKYPITA
LRMKFMMIMRYPETA

SEQ ID NO: 224229 - protein, 15 aa, Artificial Sequence
  Description of Artificial Sequence: Synthetic peptide
  Seed: LRMKWMMAMKYPITA
LRMKFMMIMRYPFTA

SEQ ID NO: 224230 - protein, 15 aa, Artificial Sequence
  Description of Artificial Sequence: Synthetic peptide
  Seed: LRMKWMMAMKYPITA
LRMKFMMIMRYPGTA

SEQ ID NO: 224231 - protein, 15 aa, Artificial Sequence
  Description of Artificial Sequence: Synthetic peptide
  Seed: LRMKWMMAMKYPITA
LRMKFMMIMRYPHTA

SEQ ID NO: 224232 - protein, 15 aa, Artificial Sequence
  Description of Artificial Sequence: Synthetic peptide
  Seed: LRMKWMMAMKYPITA
LRMKFMMIMRYPITA

SEQ ID NO: 224233 - protein, 15 aa, Artificial Sequence
  Description of Artificial Sequence: Synthetic peptide
  Seed: LRMKWMMAMKYPITA
LRMKFMMIMRYPKTA

SEQ ID NO: 224234 - protein, 15 aa, Artificial Sequence
  Description of Artificial Sequence: Synthetic peptide
  Seed: LRMKWMMAMKYPITA
LRMKFMMIMRYPLTA

SEQ ID NO: 224235 - protein, 15 aa, Artificial Sequence
  Description of Artificial Sequence: Synthetic peptide
  Seed: LRMKWMMAMKYPITA
LRMKFMMIMRYPMTA

SEQ ID NO: 224236 - protein, 15 aa, Artificial Sequence
  Description of Artificial Sequence: Synthetic peptide
  Seed: LRMKWMMAMKYPITA
LRMKFMMIMRYPNTA

SEQ ID NO: 224237 - protein, 15 aa, Artificial Sequence
  Description of Artificial Sequence: Synthetic peptide
  Seed: LRMKWMMAMKYPITA
LRMKFMMIMRYPPTA

SEQ ID NO: 224238 - protein, 15 aa, Artificial Sequence
  Description of Artificial Sequence: Synthetic peptide
  Seed: LRMKWMMAMKYPITA
LRMKFMMIMRYPQTA

SEQ ID NO: 224239 - protein, 15 aa, Artificial Sequence
  Description of Artificial Sequence: Synthetic peptide
  Seed: LRMKWMMAMKYPITA
LRMKFMMIMRYPRTA

SEQ ID NO: 224240 - protein, 15 aa, Artificial Sequence
  Description of Artificial Sequence: Synthetic peptide
  Seed: LRMKWMMAMKYPITA
LRMKFMMIMRYPSTA

SEQ ID NO: 224241 - protein, 15 aa, Artificial Sequence
  Description of Artificial Sequence: Synthetic peptide
  Seed: LRMKWMMAMKYPITA
LRMKFMMIMRYPTTA

SEQ ID NO: 224242 - protein, 15 aa, Artificial Sequence
  Description of Artificial Sequence: Synthetic peptide
  Seed: LRMKWMMAMKYPITA
LRMKFMMIMRYPVTA

SEQ ID NO: 224243 - protein, 15 aa, Artificial Sequence
  Description of Artificial Sequence: Synthetic peptide
  Seed: LRMKWMMAMKYPITA
LRMKFMMIMRYPWTA

SEQ ID NO: 224244 - protein, 15 aa, Artificial Sequence
  Description of Artificial Sequence: Synthetic peptide
  Seed: LRMKWMMAMKYPITA
LRMKFMMIMRYPYTA

SEQ ID NO: 224245 - protein, 15 aa, Artificial Sequence
  Description of Artificial Sequence: Synthetic peptide
  Seed: LRMKWMMAMKYPITA
LRMKFMMIMSYPATA

SEQ ID NO: 224246 - protein, 15 aa, Artificial Sequence
  Description of Artificial Sequence: Synthetic peptide
  Seed: LRMKWMMAMKYPITA
LRMKFMMIMSYPCTA

SEQ ID NO: 224247 - protein, 15 aa, Artificial Sequence
  Description of Artificial Sequence: Synthetic peptide
  Seed: LRMKWMMAMKYPITA
LRMKFMMIMSYPDTA

SEQ ID NO: 224248 - protein, 15 aa, Artificial Sequence
  Description of Artificial Sequence: Synthetic peptide
  Seed: LRMKWMMAMKYPITA
LRMKFMMIMSYPETA

SEQ ID NO: 224249 - protein, 15 aa, Artificial Sequence
  Description of Artificial Sequence: Synthetic peptide
  Seed: LRMKWMMAMKYPITA
LRMKFMMIMSYPFTA

SEQ ID NO: 224250 - protein, 15 aa, Artificial Sequence
  Description of Artificial Sequence: Synthetic peptide
  Seed: LRMKWMMAMKYPITA
LRMKFMMIMSYPGTA

SEQ ID NO: 224251 - protein, 15 aa, Artificial Sequence
  Description of Artificial Sequence: Synthetic peptide
  Seed: LRMKWMMAMKYPITA
LRMKFMMIMSYPHTA

SEQ ID NO: 224252 - protein, 15 aa, Artificial Sequence
  Description of Artificial Sequence: Synthetic peptide
  Seed: LRMKWMMAMKYPITA
LRMKFMMIMSYPITA

SEQ ID NO: 224253 - protein, 15 aa, Artificial Sequence
  Description of Artificial Sequence: Synthetic peptide
  Seed: LRMKWMMAMKYPITA
LRMKFMMIMSYPKTA

SEQ ID NO: 224254 - protein, 15 aa, Artificial Sequence
  Description of Artificial Sequence: Synthetic peptide
  Seed: LRMKWMMAMKYPITA
LRMKFMMIMSYPLTA

SEQ ID NO: 224255 - protein, 15 aa, Artificial Sequence
  Description of Artificial Sequence: Synthetic peptide
  Seed: LRMKWMMAMKYPITA
LRMKFMMIMSYPMTA

SEQ ID NO: 224256 - protein, 15 aa, Artificial Sequence
  Description of Artificial Sequence: Synthetic peptide
  Seed: LRMKWMMAMKYPITA
LRMKFMMIMSYPNTA

SEQ ID NO: 224257 - protein, 15 aa, Artificial Sequence
  Description of Artificial Sequence: Synthetic peptide
  Seed: LRMKWMMAMKYPITA
LRMKFMMIMSYPPTA

SEQ ID NO: 224258 - protein, 15 aa, Artificial Sequence
  Description of Artificial Sequence: Synthetic peptide
  Seed: LRMKWMMAMKYPITA
LRMKFMMIMSYPQTA

SEQ ID NO: 224259 - protein, 15 aa, Artificial Sequence
  Description of Artificial Sequence: Synthetic peptide
  Seed: LRMKWMMAMKYPITA
LRMKFMMIMSYPRTA

SEQ ID NO: 224260 - protein, 15 aa, Artificial Sequence
  Description of Artificial Sequence: Synthetic peptide
  Seed: LRMKWMMAMKYPITA
LRMKFMMIMSYPSTA

SEQ ID NO: 224261 - protein, 15 aa, Artificial Sequence
  Description of Artificial Sequence: Synthetic peptide
  Seed: LRMKWMMAMKYPITA
LRMKFMMIMSYPTTA

SEQ ID NO: 224262 - protein, 15 aa, Artificial Sequence
  Description of Artificial Sequence: Synthetic peptide
  Seed: LRMKWMMAMKYPITA
LRMKFMMIMSYPVTA

SEQ ID NO: 224263 - protein, 15 aa, Artificial Sequence
  Description of Artificial Sequence: Synthetic peptide
  Seed: LRMKWMMAMKYPITA
LRMKFMMIMSYPWTA

SEQ ID NO: 224264 - protein, 15 aa, Artificial Sequence
  Description of Artificial Sequence: Synthetic peptide
  Seed: LRMKWMMAMKYPITA
LRMKFMMIMSYPYTA

SEQ ID NO: 224265 - protein, 15 aa, Artificial Sequence
  Description of Artificial Sequence: Synthetic peptide
  Seed: LRMKWMMAMKYPITA
LRMKFMMIMTYPATA

SEQ ID NO: 224266 - protein, 15 aa, Artificial Sequence
  Description of Artificial Sequence: Synthetic peptide
  Seed: LRMKWMMAMKYPITA
LRMKFMMIMTYPCTA

SEQ ID NO: 224267 - protein, 15 aa, Artificial Sequence
  Description of Artificial Sequence: Synthetic peptide
  Seed: LRMKWMMAMKYPITA
LRMKFMMIMTYPDTA

SEQ ID NO: 224268 - protein, 15 aa, Artificial Sequence
  Description of Artificial Sequence: Synthetic peptide
  Seed: LRMKWMMAMKYPITA
LRMKFMMIMTYPETA

SEQ ID NO: 224269 - protein, 15 aa, Artificial Sequence
  Description of Artificial Sequence: Synthetic peptide
  Seed: LRMKWMMAMKYPITA
LRMKFMMIMTYPFTA

SEQ ID NO: 224270 - protein, 15 aa, Artificial Sequence
  Description of Artificial Sequence: Synthetic peptide
  Seed: LRMKWMMAMKYPITA
LRMKFMMIMTYPGTA

SEQ ID NO: 224271 - protein, 15 aa, Artificial Sequence
  Description of Artificial Sequence: Synthetic peptide
  Seed: LRMKWMMAMKYPITA
LRMKFMMIMTYPHTA

SEQ ID NO: 224272 - protein, 15 aa, Artificial Sequence
  Description of Artificial Sequence: Synthetic peptide
  Seed: LRMKWMMAMKYPITA
LRMKFMMIMTYPITA

SEQ ID NO: 224273 - protein, 15 aa, Artificial Sequence
  Description of Artificial Sequence: Synthetic peptide
  Seed: LRMKWMMAMKYPITA
LRMKFMMIMTYPKTA

SEQ ID NO: 224274 - protein, 15 aa, Artificial Sequence
  Description of Artificial Sequence: Synthetic peptide
  Seed: LRMKWMMAMKYPITA
LRMKFMMIMTYPLTA

SEQ ID NO: 224275 - protein, 15 aa, Artificial Sequence
  Description of Artificial Sequence: Synthetic peptide
  Seed: LRMKWMMAMKYPITA
LRMKFMMIMTYPMTA

SEQ ID NO: 224276 - protein, 15 aa, Artificial Sequence
  Description of Artificial Sequence: Synthetic peptide
  Seed: LRMKWMMAMKYPITA
LRMKFMMIMTYPNTA

SEQ ID NO: 224277 - protein, 15 aa, Artificial Sequence
  Description of Artificial Sequence: Synthetic peptide
  Seed: LRMKWMMAMKYPITA
LRMKFMMIMTYPPTA

SEQ ID NO: 224278 - protein, 15 aa, Artificial Sequence
  Description of Artificial Sequence: Synthetic peptide
  Seed: LRMKWMMAMKYPITA
LRMKFMMIMTYPQTA

SEQ ID NO: 224279 - protein, 15 aa, Artificial Sequence
  Description of Artificial Sequence: Synthetic peptide
  Seed: LRMKWMMAMKYPITA
LRMKFMMIMTYPRTA

SEQ ID NO: 224280 - protein, 15 aa, Artificial Sequence
  Description of Artificial Sequence: Synthetic peptide
  Seed: LRMKWMMAMKYPITA
LRMKFMMIMTYPSTA

SEQ ID NO: 224281 - protein, 15 aa, Artificial Sequence
  Description of Artificial Sequence: Synthetic peptide
  Seed: LRMKWMMAMKYPITA
LRMKFMMIMTYPTTA

SEQ ID NO: 224282 - protein, 15 aa, Artificial Sequence
  Description of Artificial Sequence: Synthetic peptide
  Seed: LRMKWMMAMKYPITA
LRMKFMMIMTYPVTA

SEQ ID NO: 224283 - protein, 15 aa, Artificial Sequence
  Description of Artificial Sequence: Synthetic peptide
  Seed: LRMKWMMAMKYPITA
LRMKFMMIMTYPWTA

SEQ ID NO: 224284 - protein, 15 aa, Artificial Sequence
  Description of Artificial Sequence: Synthetic peptide
  Seed: LRMKWMMAMKYPITA
LRMKFMMIMTYPYTA

SEQ ID NO: 224285 - protein, 15 aa, Artificial Sequence
  Description of Artificial Sequence: Synthetic peptide
  Seed: LRMKWMMAMKYPITA
LRMKFMMIMVYPATA

SEQ ID NO: 224286 - protein, 15 aa, Artificial Sequence
  Description of Artificial Sequence: Synthetic peptide
  Seed: LRMKWMMAMKYPITA
LRMKFMMIMVYPCTA

SEQ ID NO: 224287 - protein, 15 aa, Artificial Sequence
  Description of Artificial Sequence: Synthetic peptide
  Seed: LRMKWMMAMKYPITA
LRMKFMMIMVYPDTA

SEQ ID NO: 224288 - protein, 15 aa, Artificial Sequence
  Description of Artificial Sequence: Synthetic peptide
  Seed: LRMKWMMAMKYPITA
LRMKFMMIMVYPETA

SEQ ID NO: 224289 - protein, 15 aa, Artificial Sequence
  Description of Artificial Sequence: Synthetic peptide
  Seed: LRMKWMMAMKYPITA
LRMKFMMIMVYPFTA

SEQ ID NO: 224290 - protein, 15 aa, Artificial Sequence
  Description of Artificial Sequence: Synthetic peptide
  Seed: LRMKWMMAMKYPITA
LRMKFMMIMVYPGTA

SEQ ID NO: 224291 - protein, 15 aa, Artificial Sequence
  Description of Artificial Sequence: Synthetic peptide
  Seed: LRMKWMMAMKYPITA
LRMKFMMIMVYPHTA

SEQ ID NO: 224292 - protein, 15 aa, Artificial Sequence
  Description of Artificial Sequence: Synthetic peptide
  Seed: LRMKWMMAMKYPITA
LRMKFMMIMVYPITA

SEQ ID NO: 224293 - protein, 15 aa, Artificial Sequence
  Description of Artificial Sequence: Synthetic peptide
  Seed: LRMKWMMAMKYPITA
LRMKFMMIMVYPKTA

SEQ ID NO: 224294 - protein, 15 aa, Artificial Sequence
  Description of Artificial Sequence: Synthetic peptide
  Seed: LRMKWMMAMKYPITA
LRMKFMMIMVYPLTA

SEQ ID NO: 224295 - protein, 15 aa, Artificial Sequence
  Description of Artificial Sequence: Synthetic peptide
  Seed: LRMKWMMAMKYPITA
LRMKFMMIMVYPMTA

SEQ ID NO: 224296 - protein, 15 aa, Artificial Sequence
  Description of Artificial Sequence: Synthetic peptide
  Seed: LRMKWMMAMKYPITA
LRMKFMMIMVYPNTA

SEQ ID NO: 224297 - protein, 15 aa, Artificial Sequence
  Description of Artificial Sequence: Synthetic peptide
  Seed: LRMKWMMAMKYPITA
LRMKFMMIMVYPPTA

SEQ ID NO: 224298 - protein, 15 aa, Artificial Sequence
  Description of Artificial Sequence: Synthetic peptide
  Seed: LRMKWMMAMKYPITA
LRMKFMMIMVYPQTA

SEQ ID NO: 224299 - protein, 15 aa, Artificial Sequence
  Description of Artificial Sequence: Synthetic peptide
  Seed: LRMKWMMAMKYPITA
LRMKFMMIMVYPRTA

SEQ ID NO: 224300 - protein, 15 aa, Artificial Sequence
  Description of Artificial Sequence: Synthetic peptide
  Seed: LRMKWMMAMKYPITA
LRMKFMMIMVYPSTA

SEQ ID NO: 224301 - protein, 15 aa, Artificial Sequence
  Description of Artificial Sequence: Synthetic peptide
  Seed: LRMKWMMAMKYPITA
LRMKFMMIMVYPTTA

SEQ ID NO: 224302 - protein, 15 aa, Artificial Sequence
  Description of Artificial Sequence: Synthetic peptide
  Seed: LRMKWMMAMKYPITA
LRMKFMMIMVYPVTA

SEQ ID NO: 224303 - protein, 15 aa, Artificial Sequence
  Description of Artificial Sequence: Synthetic peptide
  Seed: LRMKWMMAMKYPITA
LRMKFMMIMVYPYTA

SEQ ID NO: 224304 - protein, 15 aa, Artificial Sequence
  Description of Artificial Sequence: Synthetic peptide
  Seed: LRMKWMMAMKYPITA
LRMKFMMIMWYPATA

SEQ ID NO: 224305 - protein, 15 aa, Artificial Sequence
  Description of Artificial Sequence: Synthetic peptide
  Seed: LRMKWMMAMKYPITA
LRMKFMMIMWYPETA

SEQ ID NO: 224306 - protein, 15 aa, Artificial Sequence
  Description of Artificial Sequence: Synthetic peptide
  Seed: LRMKWMMAMKYPITA
LRMKFMMIMWYPITA

SEQ ID NO: 224307 - protein, 15 aa, Artificial Sequence
  Description of Artificial Sequence: Synthetic peptide
  Seed: LRMKWMMAMKYPITA
LRMKFMMIMWYPLTA

SEQ ID NO: 224308 - protein, 15 aa, Artificial Sequence
  Description of Artificial Sequence: Synthetic peptide
  Seed: LRMKWMMAMKYPITA
LRMKFMMIMWYPMTA

SEQ ID NO: 224309 - protein, 15 aa, Artificial Sequence
  Description of Artificial Sequence: Synthetic peptide
  Seed: LRMKWMMAMKYPITA
LRMKFMMIMWYPNTA

SEQ ID NO: 224310 - protein, 15 aa, Artificial Sequence
  Description of Artificial Sequence: Synthetic peptide
  Seed: LRMKWMMAMKYPITA
LRMKFMMIMWYPSTA

SEQ ID NO: 224311 - protein, 15 aa, Artificial Sequence
  Description of Artificial Sequence: Synthetic peptide
  Seed: LRMKWMMAMKYPITA
LRMKFMMIMWYPVTA

SEQ ID NO: 224312 - protein, 15 aa, Artificial Sequence
  Description of Artificial Sequence: Synthetic peptide
  Seed: LRMKWMMAMKYPITA
LRMKFMMIMYYPATA

SEQ ID NO: 224313 - protein, 15 aa, Artificial Sequence
  Description of Artificial Sequence: Synthetic peptide
  Seed: LRMKWMMAMKYPITA
LRMKFMMIMYYPDTA

SEQ ID NO: 224314 - protein, 15 aa, Artificial Sequence
  Description of Artificial Sequence: Synthetic peptide
  Seed: LRMKWMMAMKYPITA
LRMKFMMIMYYPETA

SEQ ID NO: 224315 - protein, 15 aa, Artificial Sequence
  Description of Artificial Sequence: Synthetic peptide
  Seed: LRMKWMMAMKYPITA
LRMKFMMIMYYPGTA

SEQ ID NO: 224316 - protein, 15 aa, Artificial Sequence
  Description of Artificial Sequence: Synthetic peptide
  Seed: LRMKWMMAMKYPITA
LRMKFMMIMYYPHTA

SEQ ID NO: 224317 - protein, 15 aa, Artificial Sequence
  Description of Artificial Sequence: Synthetic peptide
  Seed: LRMKWMMAMKYPITA
LRMKFMMIMYYPITA

SEQ ID NO: 224318 - protein, 15 aa, Artificial Sequence
  Description of Artificial Sequence: Synthetic peptide
  Seed: LRMKWMMAMKYPITA
LRMKFMMIMYYPLTA

SEQ ID NO: 224319 - protein, 15 aa, Artificial Sequence
  Description of Artificial Sequence: Synthetic peptide
  Seed: LRMKWMMAMKYPITA
LRMKFMMIMYYPMTA

SEQ ID NO: 224320 - protein, 15 aa, Artificial Sequence
  Description of Artificial Sequence: Synthetic peptide
  Seed: LRMKWMMAMKYPITA
LRMKFMMIMYYPNTA

SEQ ID NO: 224321 - protein, 15 aa, Artificial Sequence
  Description of Artificial Sequence: Synthetic peptide
  Seed: LRMKWMMAMKYPITA
LRMKFMMIMYYPQTA

SEQ ID NO: 224322 - protein, 15 aa, Artificial Sequence
  Description of Artificial Sequence: Synthetic peptide
  Seed: LRMKWMMAMKYPITA
LRMKFMMIMYYPSTA

SEQ ID NO: 224323 - protein, 15 aa, Artificial Sequence
  Description of Artificial Sequence: Synthetic peptide
  Seed: LRMKWMMAMKYPITA
LRMKFMMIMYYPTTA

SEQ ID NO: 224324 - protein, 15 aa, Artificial Sequence
  Description of Artificial Sequence: Synthetic peptide
  Seed: LRMKWMMAMKYPITA
LRMKFMMIMYYPVTA

SEQ ID NO: 224325 - protein, 15 aa, Artificial Sequence
  Description of Artificial Sequence: Synthetic peptide
  Seed: LRMKWMMAMKYPITA
LRMKFMMKMAYPATA

SEQ ID NO: 224326 - protein, 15 aa, Artificial Sequence
  Description of Artificial Sequence: Synthetic peptide
  Seed: LRMKWMMAMKYPITA
LRMKFMMKMAYPCTA

SEQ ID NO: 224327 - protein, 15 aa, Artificial Sequence
  Description of Artificial Sequence: Synthetic peptide
  Seed: LRMKWMMAMKYPITA
LRMKFMMKMAYPDTA

SEQ ID NO: 224328 - protein, 15 aa, Artificial Sequence
  Description of Artificial Sequence: Synthetic peptide
  Seed: LRMKWMMAMKYPITA
LRMKFMMKMAYPETA

SEQ ID NO: 224329 - protein, 15 aa, Artificial Sequence
  Description of Artificial Sequence: Synthetic peptide
  Seed: LRMKWMMAMKYPITA
LRMKFMMKMAYPFTA

SEQ ID NO: 224330 - protein, 15 aa, Artificial Sequence
  Description of Artificial Sequence: Synthetic peptide
  Seed: LRMKWMMAMKYPITA
LRMKFMMKMAYPGTA

SEQ ID NO: 224331 - protein, 15 aa, Artificial Sequence
  Description of Artificial Sequence: Synthetic peptide
  Seed: LRMKWMMAMKYPITA
LRMKFMMKMAYPHTA

SEQ ID NO: 224332 - protein, 15 aa, Artificial Sequence
  Description of Artificial Sequence: Synthetic peptide
  Seed: LRMKWMMAMKYPITA
LRMKFMMKMAYPITA

SEQ ID NO: 224333 - protein, 15 aa, Artificial Sequence
  Description of Artificial Sequence: Synthetic peptide
  Seed: LRMKWMMAMKYPITA
LRMKFMMKMAYPKTA

SEQ ID NO: 224334 - protein, 15 aa, Artificial Sequence
  Description of Artificial Sequence: Synthetic peptide
  Seed: LRMKWMMAMKYPITA
LRMKFMMKMAYPLTA

SEQ ID NO: 224335 - protein, 15 aa, Artificial Sequence
  Description of Artificial Sequence: Synthetic peptide
  Seed: LRMKWMMAMKYPITA
LRMKFMMKMAYPMTA

SEQ ID NO: 224336 - protein, 15 aa, Artificial Sequence
  Description of Artificial Sequence: Synthetic peptide
  Seed: LRMKWMMAMKYPITA
LRMKFMMKMAYPNTA

SEQ ID NO: 224337 - protein, 15 aa, Artificial Sequence
  Description of Artificial Sequence: Synthetic peptide
  Seed: LRMKWMMAMKYPITA
LRMKFMMKMAYPPTA

SEQ ID NO: 224338 - protein, 15 aa, Artificial Sequence
  Description of Artificial Sequence: Synthetic peptide
  Seed: LRMKWMMAMKYPITA
LRMKFMMKMAYPQTA

SEQ ID NO: 224339 - protein, 15 aa, Artificial Sequence
  Description of Artificial Sequence: Synthetic peptide
  Seed: LRMKWMMAMKYPITA
LRMKFMMKMAYPRTA

SEQ ID NO: 224340 - protein, 15 aa, Artificial Sequence
  Description of Artificial Sequence: Synthetic peptide
  Seed: LRMKWMMAMKYPITA
LRMKFMMKMAYPSTA

SEQ ID NO: 224341 - protein, 15 aa, Artificial Sequence
  Description of Artificial Sequence: Synthetic peptide
  Seed: LRMKWMMAMKYPITA
LRMKFMMKMAYPTTA

SEQ ID NO: 224342 - protein, 15 aa, Artificial Sequence
  Description of Artificial Sequence: Synthetic peptide
  Seed: LRMKWMMAMKYPITA
LRMKFMMKMAYPVTA

SEQ ID NO: 224343 - protein, 15 aa, Artificial Sequence
  Description of Artificial Sequence: Synthetic peptide
  Seed: LRMKWMMAMKYPITA
LRMKFMMKMAYPWTA

SEQ ID NO: 224344 - protein, 15 aa, Artificial Sequence
  Description of Artificial Sequence: Synthetic peptide
  Seed: LRMKWMMAMKYPITA
LRMKFMMKMAYPYTA

SEQ ID NO: 224345 - protein, 15 aa, Artificial Sequence
  Description of Artificial Sequence: Synthetic peptide
  Seed: LRMKWMMAMKYPITA
LRMKFMMKMCYPITA

SEQ ID NO: 224346 - protein, 15 aa, Artificial Sequence
  Description of Artificial Sequence: Synthetic peptide
  Seed: LRMKWMMAMKYPITA
LRMKFMMKMCYPLTA

SEQ ID NO: 224347 - protein, 15 aa, Artificial Sequence
  Description of Artificial Sequence: Synthetic peptide
  Seed: LRMKWMMAMKYPITA
LRMKFMMKMCYPVTA

SEQ ID NO: 224348 - protein, 15 aa, Artificial Sequence
  Description of Artificial Sequence: Synthetic peptide
  Seed: LRMKWMMAMKYPITA
LRMKFMMKMDYPITA

SEQ ID NO: 224349 - protein, 15 aa, Artificial Sequence
  Description of Artificial Sequence: Synthetic peptide
  Seed: LRMKWMMAMKYPITA
LRMKFMMKMDYPLTA

SEQ ID NO: 224350 - protein, 15 aa, Artificial Sequence
  Description of Artificial Sequence: Synthetic peptide
  Seed: LRMKWMMAMKYPITA
LRMKFMMKMDYPVTA

SEQ ID NO: 224351 - protein, 15 aa, Artificial Sequence
  Description of Artificial Sequence: Synthetic peptide
  Seed: LRMKWMMAMKYPITA
LRMKFMMKMEYPLTA

SEQ ID NO: 224352 - protein, 15 aa, Artificial Sequence
  Description of Artificial Sequence: Synthetic peptide
  Seed: LRMKWMMAMKYPITA
LRMKFMMKMFYPFTA

SEQ ID NO: 224353 - protein, 15 aa, Artificial Sequence
  Description of Artificial Sequence: Synthetic peptide
  Seed: LRMKWMMAMKYPITA
LRMKFMMKMFYPITA

SEQ ID NO: 224354 - protein, 15 aa, Artificial Sequence
  Description of Artificial Sequence: Synthetic peptide
  Seed: LRMKWMMAMKYPITA
LRMKFMMKMFYPLTA

SEQ ID NO: 224355 - protein, 15 aa, Artificial Sequence
  Description of Artificial Sequence: Synthetic peptide
  Seed: LRMKWMMAMKYPITA
LRMKFMMKMFYPMTA

SEQ ID NO: 224356 - protein, 15 aa, Artificial Sequence
  Description of Artificial Sequence: Synthetic peptide
  Seed: LRMKWMMAMKYPITA
LRMKFMMKMFYPVTA

SEQ ID NO: 224357 - protein, 15 aa, Artificial Sequence
  Description of Artificial Sequence: Synthetic peptide
  Seed: LRMKWMMAMKYPITA
LRMKFMMKMGYPATA

SEQ ID NO: 224358 - protein, 15 aa, Artificial Sequence
  Description of Artificial Sequence: Synthetic peptide
  Seed: LRMKWMMAMKYPITA
LRMKFMMKMGYPCTA

SEQ ID NO: 224359 - protein, 15 aa, Artificial Sequence
  Description of Artificial Sequence: Synthetic peptide
  Seed: LRMKWMMAMKYPITA
LRMKFMMKMGYPFTA

SEQ ID NO: 224360 - protein, 15 aa, Artificial Sequence
  Description of Artificial Sequence: Synthetic peptide
  Seed: LRMKWMMAMKYPITA
LRMKFMMKMGYPGTA

SEQ ID NO: 224361 - protein, 15 aa, Artificial Sequence
  Description of Artificial Sequence: Synthetic peptide
  Seed: LRMKWMMAMKYPITA
LRMKFMMKMGYPITA

SEQ ID NO: 224362 - protein, 15 aa, Artificial Sequence
  Description of Artificial Sequence: Synthetic peptide
  Seed: LRMKWMMAMKYPITA
LRMKFMMKMGYPLTA

SEQ ID NO: 224363 - protein, 15 aa, Artificial Sequence
  Description of Artificial Sequence: Synthetic peptide
  Seed: LRMKWMMAMKYPITA
LRMKFMMKMGYPMTA

SEQ ID NO: 224364 - protein, 15 aa, Artificial Sequence
  Description of Artificial Sequence: Synthetic peptide
  Seed: LRMKWMMAMKYPITA
LRMKFMMKMGYPNTA

SEQ ID NO: 224365 - protein, 15 aa, Artificial Sequence
  Description of Artificial Sequence: Synthetic peptide
  Seed: LRMKWMMAMKYPITA
LRMKFMMKMGYPPTA

SEQ ID NO: 224366 - protein, 15 aa, Artificial Sequence
  Description of Artificial Sequence: Synthetic peptide
  Seed: LRMKWMMAMKYPITA
LRMKFMMKMGYPQTA

SEQ ID NO: 224367 - protein, 15 aa, Artificial Sequence
  Description of Artificial Sequence: Synthetic peptide
  Seed: LRMKWMMAMKYPITA
LRMKFMMKMGYPSTA

SEQ ID NO: 224368 - protein, 15 aa, Artificial Sequence
  Description of Artificial Sequence: Synthetic peptide
  Seed: LRMKWMMAMKYPITA
LRMKFMMKMGYPTTA

SEQ ID NO: 224369 - protein, 15 aa, Artificial Sequence
  Description of Artificial Sequence: Synthetic peptide
  Seed: LRMKWMMAMKYPITA
LRMKFMMKMGYPVTA

SEQ ID NO: 224370 - protein, 15 aa, Artificial Sequence
  Description of Artificial Sequence: Synthetic peptide
  Seed: LRMKWMMAMKYPITA
LRMKFMMKMGYPWTA

SEQ ID NO: 224371 - protein, 15 aa, Artificial Sequence
  Description of Artificial Sequence: Synthetic peptide
  Seed: LRMKWMMAMKYPITA
LRMKFMMKMGYPYTA

SEQ ID NO: 224372 - protein, 15 aa, Artificial Sequence
  Description of Artificial Sequence: Synthetic peptide
  Seed: LRMKWMMAMKYPITA
LRMKFMMKMHYPATA

SEQ ID NO: 224373 - protein, 15 aa, Artificial Sequence
  Description of Artificial Sequence: Synthetic peptide
  Seed: LRMKWMMAMKYPITA
LRMKFMMKMHYPGTA

SEQ ID NO: 224374 - protein, 15 aa, Artificial Sequence
  Description of Artificial Sequence: Synthetic peptide
  Seed: LRMKWMMAMKYPITA
LRMKFMMKMHYPHTA

SEQ ID NO: 224375 - protein, 15 aa, Artificial Sequence
  Description of Artificial Sequence: Synthetic peptide
  Seed: LRMKWMMAMKYPITA
LRMKFMMKMHYPITA

SEQ ID NO: 224376 - protein, 15 aa, Artificial Sequence
  Description of Artificial Sequence: Synthetic peptide
  Seed: LRMKWMMAMKYPITA
LRMKFMMKMHYPLTA

SEQ ID NO: 224377 - protein, 15 aa, Artificial Sequence
  Description of Artificial Sequence: Synthetic peptide
  Seed: LRMKWMMAMKYPITA
LRMKFMMKMHYPMTA

SEQ ID NO: 224378 - protein, 15 aa, Artificial Sequence
  Description of Artificial Sequence: Synthetic peptide
  Seed: LRMKWMMAMKYPITA
LRMKFMMKMHYPQTA

SEQ ID NO: 224379 - protein, 15 aa, Artificial Sequence
  Description of Artificial Sequence: Synthetic peptide
  Seed: LRMKWMMAMKYPITA
LRMKFMMKMHYPSTA

SEQ ID NO: 224380 - protein, 15 aa, Artificial Sequence
  Description of Artificial Sequence: Synthetic peptide
  Seed: LRMKWMMAMKYPITA
LRMKFMMKMHYPVTA

SEQ ID NO: 224381 - protein, 15 aa, Artificial Sequence
  Description of Artificial Sequence: Synthetic peptide
  Seed: LRMKWMMAMKYPITA
LRMKFMMKMIYPATA

SEQ ID NO: 224382 - protein, 15 aa, Artificial Sequence
  Description of Artificial Sequence: Synthetic peptide
  Seed: LRMKWMMAMKYPITA
LRMKFMMKMIYPCTA

SEQ ID NO: 224383 - protein, 15 aa, Artificial Sequence
  Description of Artificial Sequence: Synthetic peptide
  Seed: LRMKWMMAMKYPITA
LRMKFMMKMIYPDTA

SEQ ID NO: 224384 - protein, 15 aa, Artificial Sequence
  Description of Artificial Sequence: Synthetic peptide
  Seed: LRMKWMMAMKYPITA
LRMKFMMKMIYPGTA

SEQ ID NO: 224385 - protein, 15 aa, Artificial Sequence
  Description of Artificial Sequence: Synthetic peptide
  Seed: LRMKWMMAMKYPITA
LRMKFMMKMIYPITA

SEQ ID NO: 224386 - protein, 15 aa, Artificial Sequence
  Description of Artificial Sequence: Synthetic peptide
  Seed: LRMKWMMAMKYPITA
LRMKFMMKMIYPLTA

SEQ ID NO: 224387 - protein, 15 aa, Artificial Sequence
  Description of Artificial Sequence: Synthetic peptide
  Seed: LRMKWMMAMKYPITA
LRMKFMMKMIYPMTA

SEQ ID NO: 224388 - protein, 15 aa, Artificial Sequence
  Description of Artificial Sequence: Synthetic peptide
  Seed: LRMKWMMAMKYPITA
LRMKFMMKMIYPNTA

SEQ ID NO: 224389 - protein, 15 aa, Artificial Sequence
  Description of Artificial Sequence: Synthetic peptide
  Seed: LRMKWMMAMKYPITA
LRMKFMMKMIYPRTA

SEQ ID NO: 224390 - protein, 15 aa, Artificial Sequence
  Description of Artificial Sequence: Synthetic peptide
  Seed: LRMKWMMAMKYPITA
LRMKFMMKMIYPSTA

SEQ ID NO: 224391 - protein, 15 aa, Artificial Sequence
  Description of Artificial Sequence: Synthetic peptide
  Seed: LRMKWMMAMKYPITA
LRMKFMMKMIYPTTA

SEQ ID NO: 224392 - protein, 15 aa, Artificial Sequence
  Description of Artificial Sequence: Synthetic peptide
  Seed: LRMKWMMAMKYPITA
LRMKFMMKMIYPVTA

SEQ ID NO: 224393 - protein, 15 aa, Artificial Sequence
  Description of Artificial Sequence: Synthetic peptide
  Seed: LRMKWMMAMKYPITA
LRMKFMMKMIYPYTA

SEQ ID NO: 224394 - protein, 15 aa, Artificial Sequence
  Description of Artificial Sequence: Synthetic peptide
  Seed: LRMKWMMAMKYPITA
LRMKFMMKMKYPATA

SEQ ID NO: 224395 - protein, 15 aa, Artificial Sequence
  Description of Artificial Sequence: Synthetic peptide
  Seed: LRMKWMMAMKYPITA
LRMKFMMKMKYPCTA

SEQ ID NO: 224396 - protein, 15 aa, Artificial Sequence
  Description of Artificial Sequence: Synthetic peptide
  Seed: LRMKWMMAMKYPITA
LRMKFMMKMKYPDTA

SEQ ID NO: 224397 - protein, 15 aa, Artificial Sequence
  Description of Artificial Sequence: Synthetic peptide
  Seed: LRMKWMMAMKYPITA
LRMKFMMKMKYPETA

SEQ ID NO: 224398 - protein, 15 aa, Artificial Sequence
  Description of Artificial Sequence: Synthetic peptide
  Seed: LRMKWMMAMKYPITA
LRMKFMMKMKYPFTA

SEQ ID NO: 224399 - protein, 15 aa, Artificial Sequence
  Description of Artificial Sequence: Synthetic peptide
  Seed: LRMKWMMAMKYPITA
LRMKFMMKMKYPGTA

SEQ ID NO: 224400 - protein, 15 aa, Artificial Sequence
  Description of Artificial Sequence: Synthetic peptide
  Seed: LRMKWMMAMKYPITA
LRMKFMMKMKYPHTA

SEQ ID NO: 224401 - protein, 15 aa, Artificial Sequence
  Description of Artificial Sequence: Synthetic peptide
  Seed: LRMKWMMAMKYPITA
LRMKFMMKMKYPITA

SEQ ID NO: 224402 - protein, 15 aa, Artificial Sequence
  Description of Artificial Sequence: Synthetic peptide
  Seed: LRMKWMMAMKYPITA
LRMKFMMKMKYPKTA

SEQ ID NO: 224403 - protein, 15 aa, Artificial Sequence
  Description of Artificial Sequence: Synthetic peptide
  Seed: LRMKWMMAMKYPITA
LRMKFMMKMKYPLTA

SEQ ID NO: 224404 - protein, 15 aa, Artificial Sequence
  Description of Artificial Sequence: Synthetic peptide
  Seed: LRMKWMMAMKYPITA
LRMKFMMKMKYPMTA

SEQ ID NO: 224405 - protein, 15 aa, Artificial Sequence
  Description of Artificial Sequence: Synthetic peptide
  Seed: LRMKWMMAMKYPITA
LRMKFMMKMKYPNTA

SEQ ID NO: 224406 - protein, 15 aa, Artificial Sequence
  Description of Artificial Sequence: Synthetic peptide
  Seed: LRMKWMMAMKYPITA
LRMKFMMKMKYPPTA

SEQ ID NO: 224407 - protein, 15 aa, Artificial Sequence
  Description of Artificial Sequence: Synthetic peptide
  Seed: LRMKWMMAMKYPITA
LRMKFMMKMKYPQTA

SEQ ID NO: 224408 - protein, 15 aa, Artificial Sequence
  Description of Artificial Sequence: Synthetic peptide
  Seed: LRMKWMMAMKYPITA
LRMKFMMKMKYPRTA

SEQ ID NO: 224409 - protein, 15 aa, Artificial Sequence
  Description of Artificial Sequence: Synthetic peptide
  Seed: LRMKWMMAMKYPITA
LRMKFMMKMKYPSTA

SEQ ID NO: 224410 - protein, 15 aa, Artificial Sequence
  Description of Artificial Sequence: Synthetic peptide
  Seed: LRMKWMMAMKYPITA
LRMKFMMKMKYPTTA

SEQ ID NO: 224411 - protein, 15 aa, Artificial Sequence
  Description of Artificial Sequence: Synthetic peptide
  Seed: LRMKWMMAMKYPITA
LRMKFMMKMKYPVTA

SEQ ID NO: 224412 - protein, 15 aa, Artificial Sequence
  Description of Artificial Sequence: Synthetic peptide
  Seed: LRMKWMMAMKYPITA
LRMKFMMKMKYPWTA

SEQ ID NO: 224413 - protein, 15 aa, Artificial Sequence
  Description of Artificial Sequence: Synthetic peptide
  Seed: LRMKWMMAMKYPITA
LRMKFMMKMKYPYTA

SEQ ID NO: 224414 - protein, 15 aa, Artificial Sequence
  Description of Artificial Sequence: Synthetic peptide
  Seed: LRMKWMMAMKYPITA
LRMKFMMKMMYPATA

SEQ ID NO: 224415 - protein, 15 aa, Artificial Sequence
  Description of Artificial Sequence: Synthetic peptide
  Seed: LRMKWMMAMKYPITA
LRMKFMMKMNYPATA

SEQ ID NO: 224416 - protein, 15 aa, Artificial Sequence
  Description of Artificial Sequence: Synthetic peptide
  Seed: LRMKWMMAMKYPITA
LRMKFMMKMNYPCTA

SEQ ID NO: 224417 - protein, 15 aa, Artificial Sequence
  Description of Artificial Sequence: Synthetic peptide
  Seed: LRMKWMMAMKYPITA
LRMKFMMKMNYPFTA

SEQ ID NO: 224418 - protein, 15 aa, Artificial Sequence
  Description of Artificial Sequence: Synthetic peptide
  Seed: LRMKWMMAMKYPITA
LRMKFMMKMNYPGTA

SEQ ID NO: 224419 - protein, 15 aa, Artificial Sequence
  Description of Artificial Sequence: Synthetic peptide
  Seed: LRMKWMMAMKYPITA
LRMKFMMKMNYPITA

SEQ ID NO: 224420 - protein, 15 aa, Artificial Sequence
  Description of Artificial Sequence: Synthetic peptide
  Seed: LRMKWMMAMKYPITA
LRMKFMMKMNYPLTA

SEQ ID NO: 224421 - protein, 15 aa, Artificial Sequence
  Description of Artificial Sequence: Synthetic peptide
  Seed: LRMKWMMAMKYPITA
LRMKFMMKMNYPMTA

SEQ ID NO: 224422 - protein, 15 aa, Artificial Sequence
  Description of Artificial Sequence: Synthetic peptide
  Seed: LRMKWMMAMKYPITA
LRMKFMMKMNYPQTA

SEQ ID NO: 224423 - protein, 15 aa, Artificial Sequence
  Description of Artificial Sequence: Synthetic peptide
  Seed: LRMKWMMAMKYPITA
LRMKFMMKMNYPRTA

SEQ ID NO: 224424 - protein, 15 aa, Artificial Sequence
  Description of Artificial Sequence: Synthetic peptide
  Seed: LRMKWMMAMKYPITA
LRMKFMMKMNYPSTA

SEQ ID NO: 224425 - protein, 15 aa, Artificial Sequence
  Description of Artificial Sequence: Synthetic peptide
  Seed: LRMKWMMAMKYPITA
LRMKFMMKMNYPTTA

SEQ ID NO: 224426 - protein, 15 aa, Artificial Sequence
  Description of Artificial Sequence: Synthetic peptide
  Seed: LRMKWMMAMKYPITA
LRMKFMMKMNYPVTA

SEQ ID NO: 224427 - protein, 15 aa, Artificial Sequence
  Description of Artificial Sequence: Synthetic peptide
  Seed: LRMKWMMAMKYPITA
LRMKFMMKMNYPYTA

SEQ ID NO: 224428 - protein, 15 aa, Artificial Sequence
  Description of Artificial Sequence: Synthetic peptide
  Seed: LRMKWMMAMKYPITA
LRMKFMMKMPYPATA

SEQ ID NO: 224429 - protein, 15 aa, Artificial Sequence
  Description of Artificial Sequence: Synthetic peptide
  Seed: LRMKWMMAMKYPITA
LRMKFMMKMPYPCTA

SEQ ID NO: 224430 - protein, 15 aa, Artificial Sequence
  Description of Artificial Sequence: Synthetic peptide
  Seed: LRMKWMMAMKYPITA
LRMKFMMKMPYPFTA

SEQ ID NO: 224431 - protein, 15 aa, Artificial Sequence
  Description of Artificial Sequence: Synthetic peptide
  Seed: LRMKWMMAMKYPITA
LRMKFMMKMPYPGTA

SEQ ID NO: 224432 - protein, 15 aa, Artificial Sequence
  Description of Artificial Sequence: Synthetic peptide
  Seed: LRMKWMMAMKYPITA
LRMKFMMKMPYPHTA

SEQ ID NO: 224433 - protein, 15 aa, Artificial Sequence
  Description of Artificial Sequence: Synthetic peptide
  Seed: LRMKWMMAMKYPITA
LRMKFMMKMPYPITA

SEQ ID NO: 224434 - protein, 15 aa, Artificial Sequence
  Description of Artificial Sequence: Synthetic peptide
  Seed: LRMKWMMAMKYPITA
LRMKFMMKMPYPLTA

SEQ ID NO: 224435 - protein, 15 aa, Artificial Sequence
  Description of Artificial Sequence: Synthetic peptide
  Seed: LRMKWMMAMKYPITA
LRMKFMMKMPYPMTA

SEQ ID NO: 224436 - protein, 15 aa, Artificial Sequence
  Description of Artificial Sequence: Synthetic peptide
  Seed: LRMKWMMAMKYPITA
LRMKFMMKMPYPNTA

SEQ ID NO: 224437 - protein, 15 aa, Artificial Sequence
  Description of Artificial Sequence: Synthetic peptide
  Seed: LRMKWMMAMKYPITA
LRMKFMMKMPYPQTA

SEQ ID NO: 224438 - protein, 15 aa, Artificial Sequence
  Description of Artificial Sequence: Synthetic peptide
  Seed: LRMKWMMAMKYPITA
LRMKFMMKMPYPSTA

SEQ ID NO: 224439 - protein, 15 aa, Artificial Sequence
  Description of Artificial Sequence: Synthetic peptide
  Seed: LRMKWMMAMKYPITA
LRMKFMMKMPYPTTA

SEQ ID NO: 224440 - protein, 15 aa, Artificial Sequence
  Description of Artificial Sequence: Synthetic peptide
  Seed: LRMKWMMAMKYPITA
LRMKFMMKMPYPVTA

SEQ ID NO: 224441 - protein, 15 aa, Artificial Sequence
  Description of Artificial Sequence: Synthetic peptide
  Seed: LRMKWMMAMKYPITA
LRMKFMMKMPYPYTA

SEQ ID NO: 224442 - protein, 15 aa, Artificial Sequence
  Description of Artificial Sequence: Synthetic peptide
  Seed: LRMKWMMAMKYPITA
LRMKFMMKMQYPATA

SEQ ID NO: 224443 - protein, 15 aa, Artificial Sequence
  Description of Artificial Sequence: Synthetic peptide
  Seed: LRMKWMMAMKYPITA
LRMKFMMKMQYPITA

SEQ ID NO: 224444 - protein, 15 aa, Artificial Sequence
  Description of Artificial Sequence: Synthetic peptide
  Seed: LRMKWMMAMKYPITA
LRMKFMMKMQYPLTA

SEQ ID NO: 224445 - protein, 15 aa, Artificial Sequence
  Description of Artificial Sequence: Synthetic peptide
  Seed: LRMKWMMAMKYPITA
LRMKFMMKMQYPRTA

SEQ ID NO: 224446 - protein, 15 aa, Artificial Sequence
  Description of Artificial Sequence: Synthetic peptide
  Seed: LRMKWMMAMKYPITA
LRMKFMMKMQYPVTA

SEQ ID NO: 224447 - protein, 15 aa, Artificial Sequence
  Description of Artificial Sequence: Synthetic peptide
  Seed: LRMKWMMAMKYPITA
LRMKFMMKMQYPYTA
